United States Patent Application Publication US 2016/0319361 A1 - sequence listing, part 3

SEQ ID NO: 50129 - DNA, 30 bp, Artificial Sequence
  Synthetic oligonucleotide
tagcgagtgtcgaccaacgctatacacagg

SEQ ID NO: 50130 - DNA, 30 bp, Artificial Sequence
  Synthetic oligonucleotide
tgacagcaagaggttcgttcccatcacagg

SEQ ID NO: 50131 - DNA, 30 bp, Artificial Sequence
  Synthetic oligonucleotide
ataacttgcagaaaagttaggactcacagg

SEQ ID NO: 50132 - DNA, 30 bp, Artificial Sequence
  Synthetic oligonucleotide
tcgcgtccatcgacggtacttgcagacagg

SEQ ID NO: 50133 - DNA, 30 bp, Artificial Sequence
  Synthetic oligonucleotide
aagactgtgcgtacgagcgtgagcgacagg

SEQ ID NO: 50134 - DNA, 30 bp, Artificial Sequence
  Synthetic oligonucleotide
tccaagatatgattggaaataatggacagg

SEQ ID NO: 50135 - DNA, 30 bp, Artificial Sequence
  Synthetic oligonucleotide
ttgccaacaggacacccactagtatacagg

SEQ ID NO: 50136 - DNA, 31 bp, Artificial Sequence
  Synthetic oligonucleotide
actgtaatgccacgggttacttgcctacagg

SEQ ID NO: 50137 - DNA, 30 bp, Artificial Sequence
  Synthetic oligonucleotide
ctgaagcgcgggagccgtttcggtaccagg

SEQ ID NO: 50138 - DNA, 30 bp, Artificial Sequence
  Synthetic oligonucleotide
gccaatcaacgaggacgtcggcaacccagg

SEQ ID NO: 50139 - DNA, 30 bp, Artificial Sequence
  Synthetic oligonucleotide
ccggtgttcacccagaaaagcgtccccagg

SEQ ID NO: 50140 - DNA, 30 bp, Artificial Sequence
  Synthetic oligonucleotide
atctttgcgggagagaatctgagggccagg

SEQ ID NO: 50141 - DNA, 30 bp, Artificial Sequence
  Synthetic oligonucleotide
tgtatagagtacgtgcccgtgtgtgccagg

SEQ ID NO: 50142 - DNA, 30 bp, Artificial Sequence
  Synthetic oligonucleotide
acatcaaactctgttaggacgccatccagg

SEQ ID NO: 50143 - DNA, 30 bp, Artificial Sequence
  Synthetic oligonucleotide
aagaacatcagggacgtgagctgatccagg

SEQ ID NO: 50144 - DNA, 30 bp, Artificial Sequence
  Synthetic oligonucleotide
ctcagtgcttatgatcacggcgtatccagg

SEQ ID NO: 50145 - DNA, 30 bp, Artificial Sequence
  Synthetic oligonucleotide
catttgaaatcctagataggaatgtccagg

SEQ ID NO: 50146 - DNA, 30 bp, Artificial Sequence
  Synthetic oligonucleotide
ctgcataggggtttagactaaataagcagg

SEQ ID NO: 50147 - DNA, 30 bp, Artificial Sequence
  Synthetic oligonucleotide
catggacgacagtctcacacaaagcgcagg

SEQ ID NO: 50148 - DNA, 30 bp, Artificial Sequence
  Synthetic oligonucleotide
cggaataactggcgacgccttatgcgcagg

SEQ ID NO: 50149 - DNA, 30 bp, Artificial Sequence
  Synthetic oligonucleotide
aaagtaaggctgattacattaataggcagg

SEQ ID NO: 50150 - DNA, 30 bp, Artificial Sequence
  Synthetic oligonucleotide
gtgtgcggggacagaaccaaggactgcagg

SEQ ID NO: 50151 - DNA, 30 bp, Artificial Sequence
  Synthetic oligonucleotide
cgaggaaccggcgttcggattaattgcagg

SEQ ID NO: 50152 - DNA, 30 bp, Artificial Sequence
  Synthetic oligonucleotide
tctcacccaccctgccggaactacatcagg

SEQ ID NO: 50153 - DNA, 30 bp, Artificial Sequence
  Synthetic oligonucleotide
ttacgaagtgcgtctacaatgggcctcagg

SEQ ID NO: 50154 - DNA, 30 bp, Artificial Sequence
  Synthetic oligonucleotide
ctggctaacgaagaataggtctcggtcagg

SEQ ID NO: 50155 - DNA, 30 bp, Artificial Sequence
  Synthetic oligonucleotide
accaagaggcttggagcatgattattcagg

SEQ ID NO: 50156 - DNA, 30 bp, Artificial Sequence
  Synthetic oligonucleotide
cagctactctaatggtgtcgagagttcagg

SEQ ID NO: 50157 - DNA, 30 bp, Artificial Sequence
  Synthetic oligonucleotide
ccgacgcggaatagtattcgggaaaagagg

SEQ ID NO: 50158 - DNA, 30 bp, Artificial Sequence
  Synthetic oligonucleotide
ccggaggaaaccgaatcgcatgaaaagagg

SEQ ID NO: 50159 - DNA, 30 bp, Artificial Sequence
  Synthetic oligonucleotide
ccttgtacctgtaacttctgaaaacagagg

SEQ ID NO: 50160 - DNA, 30 bp, Artificial Sequence
  Synthetic oligonucleotide
tctacttacgggcaaaatcaatcgcagagg

SEQ ID NO: 50161 - DNA, 30 bp, Artificial Sequence
  Synthetic oligonucleotide
tggtgaacaatgcctatagttgcagagagg

SEQ ID NO: 50162 - DNA, 30 bp, Artificial Sequence
  Synthetic oligonucleotide
cgaggctcgaatggctttaaaagggagagg

SEQ ID NO: 50163 - DNA, 30 bp, Artificial Sequence
  Synthetic oligonucleotide
acagggctgctggccccaggtataacgagg

SEQ ID NO: 50164 - DNA, 30 bp, Artificial Sequence
  Synthetic oligonucleotide
cagataatacctacgcaagtgtagaggagg

SEQ ID NO: 50165 - DNA, 30 bp, Artificial Sequence
  Synthetic oligonucleotide
ttgatagaggagggtagcagcatagggagg

SEQ ID NO: 50166 - DNA, 30 bp, Artificial Sequence
  Synthetic oligonucleotide
atggaatgtaatggcagagatcgggggagg

SEQ ID NO: 50167 - DNA, 30 bp, Artificial Sequence
  Synthetic oligonucleotide
gacggtattacggaagagagtccatggagg

SEQ ID NO: 50168 - DNA, 30 bp, Artificial Sequence
  Synthetic oligonucleotide
cgggtgtaacagcgtgagggcagtatgagg

SEQ ID NO: 50169 - DNA, 30 bp, Artificial Sequence
  Synthetic oligonucleotide
ggcaggcagggacataatatggtaaatagg

SEQ ID NO: 50170 - DNA, 30 bp, Artificial Sequence
  Synthetic oligonucleotide
tcgatcgggaatcgaatgatacccaatagg

SEQ ID NO: 50171 - DNA, 30 bp, Artificial Sequence
  Synthetic oligonucleotide
gagtacagggagatgtgtaggcggaatagg

SEQ ID NO: 50172 - DNA, 30 bp, Artificial Sequence
  Synthetic oligonucleotide
acagtggtccggattggaaccaacgatagg

SEQ ID NO: 50173 - DNA, 30 bp, Artificial Sequence
  Synthetic oligonucleotide
acagggctttattgatcagtccccgatagg

SEQ ID NO: 50174 - DNA, 30 bp, Artificial Sequence
  Synthetic oligonucleotide
ggtcgaattaattcattcggaacggatagg

SEQ ID NO: 50175 - DNA, 30 bp, Artificial Sequence
  Synthetic oligonucleotide
actcgcctcgtgccgacatccagggatagg

SEQ ID NO: 50176 - DNA, 30 bp, Artificial Sequence
  Synthetic oligonucleotide
cagtagcattcagagagcgattattatagg

SEQ ID NO: 50177 - DNA, 30 bp, Artificial Sequence
  Synthetic oligonucleotide
cgacagatcgtttggtgccccagaactagg

SEQ ID NO: 50178 - DNA, 30 bp, Artificial Sequence
  Synthetic oligonucleotide
tatggaatagtcatagaacagtacactagg

SEQ ID NO: 50179 - DNA, 30 bp, Artificial Sequence
  Synthetic oligonucleotide
tagggaaacgcgagtgcttaaagcactagg

SEQ ID NO: 50180 - DNA, 30 bp, Artificial Sequence
  Synthetic oligonucleotide
ctagaccacgaaattcaacgggtagctagg

SEQ ID NO: 50181 - DNA, 30 bp, Artificial Sequence
  Synthetic oligonucleotide
tatcaaacagcaatatcgggcaaccttagg

SEQ ID NO: 50182 - DNA, 30 bp, Artificial Sequence
  Synthetic oligonucleotide
gggcgtagacatcggactaatggtcttagg

SEQ ID NO: 50183 - DNA, 30 bp, Artificial Sequence
  Synthetic oligonucleotide
agacaaggattaccggttatgtcatttagg

SEQ ID NO: 50184 - DNA, 30 bp, Artificial Sequence
  Synthetic oligonucleotide
cggattccatcagcgtaagaacagtttagg

SEQ ID NO: 50185 - DNA, 30 bp, Artificial Sequence
  Synthetic oligonucleotide
ctctaagggaatggaatcacgctcaaacgg

SEQ ID NO: 50186 - DNA, 30 bp, Artificial Sequence
  Synthetic oligonucleotide
gcgtagtatgagttatggcgcgataaacgg

SEQ ID NO: 50187 - DNA, 30 bp, Artificial Sequence
  Synthetic oligonucleotide
ggaagctggggccataaagtagcgcaacgg

SEQ ID NO: 50188 - DNA, 30 bp, Artificial Sequence
  Synthetic oligonucleotide
agaaccaggcaactacgtaattaaatacgg

SEQ ID NO: 50189 - DNA, 30 bp, Artificial Sequence
  Synthetic oligonucleotide
tcggccgacgttcctagcacaactatacgg

SEQ ID NO: 50190 - DNA, 30 bp, Artificial Sequence
  Synthetic oligonucleotide
cgatgcaagggcagattacaacgactacgg

SEQ ID NO: 50191 - DNA, 30 bp, Artificial Sequence
  Synthetic oligonucleotide
taaggcgaaagactttaaagtagcgtacgg

SEQ ID NO: 50192 - DNA, 30 bp, Artificial Sequence
  Synthetic oligonucleotide
acaatcgcatagagaaaacgcaggttacgg

SEQ ID NO: 50193 - DNA, 30 bp, Artificial Sequence
  Synthetic oligonucleotide
tgtctcaacaaagataaataatccgaccgg

SEQ ID NO: 50194 - DNA, 30 bp, Artificial Sequence
  Synthetic oligonucleotide
atagcgcataagattatctaatatccccgg

SEQ ID NO: 50195 - DNA, 30 bp, Artificial Sequence
  Synthetic oligonucleotide
gcgagaaacgctgctcactagggcgcccgg

SEQ ID NO: 50196 - DNA, 30 bp, Artificial Sequence
  Synthetic oligonucleotide
taagcgcgaatggcctgctactgatcccgg

SEQ ID NO: 50197 - DNA, 30 bp, Artificial Sequence
  Synthetic oligonucleotide
agctgctatataaatcgaggcacgcgccgg

SEQ ID NO: 50198 - DNA, 30 bp, Artificial Sequence
  Synthetic oligonucleotide
gcgtaattgtgtcacatgcatatgctccgg

SEQ ID NO: 50199 - DNA, 30 bp, Artificial Sequence
  Synthetic oligonucleotide
aagacatgcgactaataagatggtctccgg

SEQ ID NO: 50200 - DNA, 30 bp, Artificial Sequence
  Synthetic oligonucleotide
cattcagtgatttacccgcgaggagtccgg

SEQ ID NO: 50201 - DNA, 30 bp, Artificial Sequence
  Synthetic oligonucleotide
acgatacagtcgcaaggcggaggagtccgg

SEQ ID NO: 50202 - DNA, 31 bp, Artificial Sequence
  Synthetic oligonucleotide
tgggtaacaaacggacttagttccattccgg

SEQ ID NO: 50203 - DNA, 30 bp, Artificial Sequence
  Synthetic oligonucleotide
aggaaggtgctacagtactcgtaaaagcgg

SEQ ID NO: 50204 - DNA, 30 bp, Artificial Sequence
  Synthetic oligonucleotide
gcctgggggacagatccttatagaaagcgg

SEQ ID NO: 50205 - DNA, 30 bp, Artificial Sequence
  Synthetic oligonucleotide
tccgatcaacccctacaagcccgacagcgg

SEQ ID NO: 50206 - DNA, 30 bp, Artificial Sequence
  Synthetic oligonucleotide
acaaaagccgtcctcaagttacatcagcgg

SEQ ID NO: 50207 - DNA, 30 bp, Artificial Sequence
  Synthetic oligonucleotide
aacggtcattagaaggcacgtgatcagcgg

SEQ ID NO: 50208 - DNA, 30 bp, Artificial Sequence
  Synthetic oligonucleotide
cccgacaatgcatagtttaaccaagagcgg

SEQ ID NO: 50209 - DNA, 30 bp, Artificial Sequence
  Synthetic oligonucleotide
taggacctgtcgaaagtctacaacgagcgg

SEQ ID NO: 50210 - DNA, 30 bp, Artificial Sequence
  Synthetic oligonucleotide
gtggctaacatggaaaaagatcctgagcgg

SEQ ID NO: 50211 - DNA, 30 bp, Artificial Sequence
  Synthetic oligonucleotide
gcgcaaaattgtggaagtataccatagcgg

SEQ ID NO: 50212 - DNA, 30 bp, Artificial Sequence
  Synthetic oligonucleotide
gaaaaagaattgaacgtacttagatagcgg

SEQ ID NO: 50213 - DNA, 30 bp, Artificial Sequence
  Synthetic oligonucleotide
cgaaggacttacagttgctaccatccgcgg

SEQ ID NO: 50214 - DNA, 30 bp, Artificial Sequence
  Synthetic oligonucleotide
ctaccaaaatgtaaagttggcaaaaggcgg

SEQ ID NO: 50215 - DNA, 30 bp, Artificial Sequence
  Synthetic oligonucleotide
taaaactcaacgataatacaagtcaggcgg

SEQ ID NO: 50216 - DNA, 30 bp, Artificial Sequence
  Synthetic oligonucleotide
agtgctggactagagcacaatcgccggcgg

SEQ ID NO: 50217 - DNA, 30 bp, Artificial Sequence
  Synthetic oligonucleotide
tctacgcgctgaaaatatcatgaagggcgg

SEQ ID NO: 50218 - DNA, 30 bp, Artificial Sequence
  Synthetic oligonucleotide
atgcacagcggttgaccagagaaggggcgg

SEQ ID NO: 50219 - DNA, 30 bp, Artificial Sequence
  Synthetic oligonucleotide
tattggcgatgagagagactgaatgggcgg

SEQ ID NO: 50220 - DNA, 30 bp, Artificial Sequence
  Synthetic oligonucleotide
gaagcgggagtgtgggtaataatcatgcgg

SEQ ID NO: 50221 - DNA, 30 bp, Artificial Sequence
  Synthetic oligonucleotide
atgtgcgaacagtctatctcgcaagtgcgg

SEQ ID NO: 50222 - DNA, 30 bp, Artificial Sequence
  Synthetic oligonucleotide
cctcgaacatagttacccaacgctaatcgg

SEQ ID NO: 50223 - DNA, 30 bp, Artificial Sequence
  Synthetic oligonucleotide
gcaagtgttgatgaaggtagaggccatcgg

SEQ ID NO: 50224 - DNA, 30 bp, Artificial Sequence
  Synthetic oligonucleotide
ctagctgctaggctgatctgaactcatcgg

SEQ ID NO: 50225 - DNA, 30 bp, Artificial Sequence
  Synthetic oligonucleotide
taacgagaggccaagtgaccctcagatcgg

SEQ ID NO: 50226 - DNA, 30 bp, Artificial Sequence
  Synthetic oligonucleotide
ctaaaaagtgtgcacatacccaatgatcgg

SEQ ID NO: 50227 - DNA, 30 bp, Artificial Sequence
  Synthetic oligonucleotide
ggtagggcgaatgatagttcccaatatcgg

SEQ ID NO: 50228 - DNA, 30 bp, Artificial Sequence
  Synthetic oligonucleotide
cctagagctatgaacaagcaggggtatcgg

SEQ ID NO: 50229 - DNA, 30 bp, Artificial Sequence
  Synthetic oligonucleotide
tcacgcgtggacgaatctcttatgtatcgg

SEQ ID NO: 50230 - DNA, 30 bp, Artificial Sequence
  Synthetic oligonucleotide
acgcaaggggggcacgatatctattatcgg

SEQ ID NO: 50231 - DNA, 30 bp, Artificial Sequence
  Synthetic oligonucleotide
cgaagagacttgcctagcgggtttactcgg

SEQ ID NO: 50232 - DNA, 30 bp, Artificial Sequence
  Synthetic oligonucleotide
agggacacatgagcggtcatttagcctcgg

SEQ ID NO: 50233 - DNA, 30 bp, Artificial Sequence
  Synthetic oligonucleotide
atcgaagagttattaggctcacatgctcgg

SEQ ID NO: 50234 - DNA, 30 bp, Artificial Sequence
  Synthetic oligonucleotide
gcaggatactgggcaatcagatctgctcgg

SEQ ID NO: 50235 - DNA, 30 bp, Artificial Sequence
  Synthetic oligonucleotide
agaaaccgaatctggcttaagcactctcgg

SEQ ID NO: 50236 - DNA, 30 bp, Artificial Sequence
  Synthetic oligonucleotide
gtgcgctcggttttgatgaaggtaagtcgg

SEQ ID NO: 50237 - DNA, 30 bp, Artificial Sequence
  Synthetic oligonucleotide
gcgcgagggattgtaaaatagcgtagtcgg

SEQ ID NO: 50238 - DNA, 30 bp, Artificial Sequence
  Synthetic oligonucleotide
gccaggcgtgacataggcatagatcgtcgg

SEQ ID NO: 50239 - DNA, 30 bp, Artificial Sequence
  Synthetic oligonucleotide
tcgcaacgggaccgtcgggggtaaggtcgg

SEQ ID NO: 50240 - DNA, 30 bp, Artificial Sequence
  Synthetic oligonucleotide
cagcctgggattggtggtgcccagtgtcgg

SEQ ID NO: 50241 - DNA, 30 bp, Artificial Sequence
  Synthetic oligonucleotide
cgcgtatcattatggtcttatggttgtcgg

SEQ ID NO: 50242 - DNA, 30 bp, Artificial Sequence
  Synthetic oligonucleotide
catgtgcaggatgggttgttagaaattcgg

SEQ ID NO: 50243 - DNA, 30 bp, Artificial Sequence
  Synthetic oligonucleotide
tcgtcgtcgggaaatggagaccatcttcgg

SEQ ID NO: 50244 - DNA, 30 bp, Artificial Sequence
  Synthetic oligonucleotide
agtagatagataacacaatatcgagttcgg

SEQ ID NO: 50245 - DNA, 30 bp, Artificial Sequence
  Synthetic oligonucleotide
agatcacaccagactaggtcctcggttcgg

SEQ ID NO: 50246 - DNA, 30 bp, Artificial Sequence
  Synthetic oligonucleotide
gccgacgtgaaaatgcatcattaatttcgg

SEQ ID NO: 50247 - DNA, 30 bp, Artificial Sequence
  Synthetic oligonucleotide
aacccgtatagaaaagattgcctgaaaggg

SEQ ID NO: 50248 - DNA, 30 bp, Artificial Sequence
  Synthetic oligonucleotide
tggacttcaactctgagtcgctgggaaggg

SEQ ID NO: 50249 - DNA, 30 bp, Artificial Sequence
  Synthetic oligonucleotide
ggctggaggcaaggatctcctattgaaggg

SEQ ID NO: 50250 - DNA, 30 bp, Artificial Sequence
  Synthetic oligonucleotide
atgtgaagccctctctaggaaatctaaggg

SEQ ID NO: 50251 - DNA, 30 bp, Artificial Sequence
  Synthetic oligonucleotide
acggaggcccggacccactgaaggtaaggg

SEQ ID NO: 50252 - DNA, 30 bp, Artificial Sequence
  Synthetic oligonucleotide
actttgtgcccccaacgaaacgcttaaggg

SEQ ID NO: 50253 - DNA, 30 bp, Artificial Sequence
  Synthetic oligonucleotide
atatcagactcccagaggtaagtttaaggg

SEQ ID NO: 50254 - DNA, 30 bp, Artificial Sequence
  Synthetic oligonucleotide
cgggacccctctcaacctgagacaacaggg

SEQ ID NO: 50255 - DNA, 30 bp, Artificial Sequence
  Synthetic oligonucleotide
gtccatggatttatgagcacttctacaggg

SEQ ID NO: 50256 - DNA, 30 bp, Artificial Sequence
  Synthetic oligonucleotide
gctagtggaggccatccgtctgaaccaggg

SEQ ID NO: 50257 - DNA, 30 bp, Artificial Sequence
  Synthetic oligonucleotide
ggaaatccagagagaacgttcgtggcaggg

SEQ ID NO: 50258 - DNA, 30 bp, Artificial Sequence
  Synthetic oligonucleotide
ggacgtctttcgcgcaaggtacagtcaggg

SEQ ID NO: 50259 - DNA, 30 bp, Artificial Sequence
  Synthetic oligonucleotide
acagaacattttgaacgcggggtttcaggg

SEQ ID NO: 50260 - DNA, 30 bp, Artificial Sequence
  Synthetic oligonucleotide
ggatcgaggcatccccagccgcaccgaggg

SEQ ID NO: 50261 - DNA, 30 bp, Artificial Sequence
  Synthetic oligonucleotide
agagatacgctcaagagcggcgttcgaggg

SEQ ID NO: 50262 - DNA, 30 bp, Artificial Sequence
  Synthetic oligonucleotide
aacgcgaggctaggtacctatcagggaggg

SEQ ID NO: 50263 - DNA, 30 bp, Artificial Sequence
  Synthetic oligonucleotide
gtcgttagtgcaatcatatatactggaggg

SEQ ID NO: 50264 - DNA, 30 bp, Artificial Sequence
  Synthetic oligonucleotide
ggacaccatctggcaatccaagtgctaggg

SEQ ID NO: 50265 - DNA, 30 bp, Artificial Sequence
  Synthetic oligonucleotide
ggcggttgtgatggcgagaatcgtctaggg

SEQ ID NO: 50266 - DNA, 30 bp, Artificial Sequence
  Synthetic oligonucleotide
agtgatgtccgcttagtagtgcacaacggg

SEQ ID NO: 50267 - DNA, 30 bp, Artificial Sequence
  Synthetic oligonucleotide
tgcagaggaattgtcacttgggccaacggg

SEQ ID NO: 50268 - DNA, 30 bp, Artificial Sequence
  Synthetic oligonucleotide
ggcgaacgtttgtcacggaaagtcaacggg

SEQ ID NO: 50269 - DNA, 30 bp, Artificial Sequence
  Synthetic oligonucleotide
acgcctggatcctaaagtattgcacacggg

SEQ ID NO: 50270 - DNA, 30 bp, Artificial Sequence
  Synthetic oligonucleotide
gtagtactcgtggcactggaaaaagacggg

SEQ ID NO: 50271 - DNA, 30 bp, Artificial Sequence
  Synthetic oligonucleotide
ggcgcattaactcagttagaatggtacggg

SEQ ID NO: 50272 - DNA, 30 bp, Artificial Sequence
  Synthetic oligonucleotide
gggaatcagtgacaatagtcaaacaccggg

SEQ ID NO: 50273 - DNA, 30 bp, Artificial Sequence
  Synthetic oligonucleotide
agggattttcatttggttcgatacaccggg

SEQ ID NO: 50274 - DNA, 30 bp, Artificial Sequence
  Synthetic oligonucleotide
tgtgctgccatttccgaacatcgagccggg

SEQ ID NO: 50275 - DNA, 30 bp, Artificial Sequence
  Synthetic oligonucleotide
gctgagataaacgagggtttcccatccggg

SEQ ID NO: 50276 - DNA, 30 bp, Artificial Sequence
  Synthetic oligonucleotide
gcacgagagaagcaaatggggacaggcggg

SEQ ID NO: 50277 - DNA, 30 bp, Artificial Sequence
  Synthetic oligonucleotide
cgtgccctgggaaccaaggagataggcggg

SEQ ID NO: 50278 - DNA, 30 bp, Artificial Sequence
  Synthetic oligonucleotide
cacgtatgcgcgtaagctgtatccggcggg

SEQ ID NO: 50279 - DNA, 30 bp, Artificial Sequence
  Synthetic oligonucleotide
agcggtatcatctccagattgcgatgcggg

SEQ ID NO: 50280 - DNA, 30 bp, Artificial Sequence
  Synthetic oligonucleotide
tgacgcggaataaagttaggattgatcggg

SEQ ID NO: 50281 - DNA, 30 bp, Artificial Sequence
  Synthetic oligonucleotide
gcgttaggtggtaacattagttcagtcggg

SEQ ID NO: 50282 - DNA, 30 bp, Artificial Sequence
  Synthetic oligonucleotide
cagcagcatgagtccgccacgaaaaagggg

SEQ ID NO: 50283 - DNA, 30 bp, Artificial Sequence
  Synthetic oligonucleotide
tcggggttgcacatattatgagctcagggg

SEQ ID NO: 50284 - DNA, 30 bp, Artificial Sequence
  Synthetic oligonucleotide
tagtaaaagaaagacgttttgctagagggg

SEQ ID NO: 50285 - DNA, 30 bp, Artificial Sequence
  Synthetic oligonucleotide
gaccttgaggtagaagaattaattgagggg

SEQ ID NO: 50286 - DNA, 30 bp, Artificial Sequence
  Synthetic oligonucleotide
gtgcttggtatgtaccaataggtctagggg

SEQ ID NO: 50287 - DNA, 30 bp, Artificial Sequence
  Synthetic oligonucleotide
aaggacctcaaacgagctaatgggtagggg

SEQ ID NO: 50288 - DNA, 30 bp, Artificial Sequence
  Synthetic oligonucleotide
cgtcgctatctaaaggagcgaacagcgggg

SEQ ID NO: 50289 - DNA, 30 bp, Artificial Sequence
  Synthetic oligonucleotide
ggatggaatctgtcgtaagtccccgcgggg

SEQ ID NO: 50290 - DNA, 31 bp, Artificial Sequence
  Synthetic oligonucleotide
ttggctgacttcaaatgggatgtatgcgggg

SEQ ID NO: 50291 - DNA, 30 bp, Artificial Sequence
  Synthetic oligonucleotide
acacgtatgacgcaatataaacggtcgggg

SEQ ID NO: 50292 - DNA, 31 bp, Artificial Sequence
  Synthetic oligonucleotide
ggctgccctactgctaattgcgacttcgggg

SEQ ID NO: 50293 - DNA, 30 bp, Artificial Sequence
  Synthetic oligonucleotide
gcaggcacagactaaatcaaggctaggggg

SEQ ID NO: 50294 - DNA, 30 bp, Artificial Sequence
  Synthetic oligonucleotide
gtaaggaggaaacgagctaatgcacggggg

SEQ ID NO: 50295 - DNA, 30 bp, Artificial Sequence
  Synthetic oligonucleotide
tggcacagagctaggactcgcctgcggggg

SEQ ID NO: 50296 - DNA, 30 bp, Artificial Sequence
  Synthetic oligonucleotide
ccagcaggtccgaagaatagactaatgggg

SEQ ID NO: 50297 - DNA, 30 bp, Artificial Sequence
  Synthetic oligonucleotide
gaaggtaatttcaacaatatccccctgggg

SEQ ID NO: 50298 - DNA, 30 bp, Artificial Sequence
  Synthetic oligonucleotide
ttggccgaggagcagatgtgaacgctgggg

SEQ ID NO: 50299 - DNA, 30 bp, Artificial Sequence
  Synthetic oligonucleotide
gtatggacgttggcccagactgacttgggg

SEQ ID NO: 50300 - DNA, 31 bp, Artificial Sequence
  Synthetic oligonucleotide
cctcaccggcgtgtacataattgtgttgggg

SEQ ID NO: 50301 - DNA, 30 bp, Artificial Sequence
  Synthetic oligonucleotide
tgcgcaattccttgataggaccaaaatggg

SEQ ID NO: 50302 - DNA, 31 bp, Artificial Sequence
  Synthetic oligonucleotide
caggagtgaataagtggtctcgaagaatggg

SEQ ID NO: 50303 - DNA, 30 bp, Artificial Sequence
  Synthetic oligonucleotide
ggaagagtggcaagaggttataataatggg

SEQ ID NO: 50304 - DNA, 30 bp, Artificial Sequence
  Synthetic oligonucleotide
tgcaagagctgagctgagggctcccatggg

SEQ ID NO: 50305 - DNA, 30 bp, Artificial Sequence
  Synthetic oligonucleotide
cttgggagctcagaactatgtggcgatggg

SEQ ID NO: 50306 - DNA, 30 bp, Artificial Sequence
  Synthetic oligonucleotide
gaaggatgatttgacagatgaaatgatggg

SEQ ID NO: 50307 - DNA, 30 bp, Artificial Sequence
  Synthetic oligonucleotide
ggagactcaggaaaaggctggtactatggg

SEQ ID NO: 50308 - DNA, 30 bp, Artificial Sequence
  Synthetic oligonucleotide
cgatgattatgtgaagattctgcctatggg

SEQ ID NO: 50309 - DNA, 30 bp, Artificial Sequence
  Synthetic oligonucleotide
tttcgaatcagatagacagcaaatcctggg

SEQ ID NO: 50310 - DNA, 30 bp, Artificial Sequence
  Synthetic oligonucleotide
gtgagcaatatgcgcaatgcagatcctggg

SEQ ID NO: 50311 - DNA, 30 bp, Artificial Sequence
  Synthetic oligonucleotide
tcgaggggtcgtgaattccgtacagctggg

SEQ ID NO: 50312 - DNA, 30 bp, Artificial Sequence
  Synthetic oligonucleotide
cgactggagaccactttacgttcgcgtggg

SEQ ID NO: 50313 - DNA, 30 bp, Artificial Sequence
  Synthetic oligonucleotide
ggagagatcatcatttacagggggcgtggg

SEQ ID NO: 50314 - DNA, 30 bp, Artificial Sequence
  Synthetic oligonucleotide
accgagaaccacagagccgtctcaggtggg

SEQ ID NO: 50315 - DNA, 30 bp, Artificial Sequence
  Synthetic oligonucleotide
gccaagaggagagcagatctgcagggtggg

SEQ ID NO: 50316 - DNA, 30 bp, Artificial Sequence
  Synthetic oligonucleotide
cgtatactgcgtctaacgaagacatgtggg

SEQ ID NO: 50317 - DNA, 30 bp, Artificial Sequence
  Synthetic oligonucleotide
gcgtgcggcttattcaacataggaattggg

SEQ ID NO: 50318 - DNA, 30 bp, Artificial Sequence
  Synthetic oligonucleotide
aaacgaagatgagggccgcgcggcattggg

SEQ ID NO: 50319 - DNA, 30 bp, Artificial Sequence
  Synthetic oligonucleotide
ggagataagatgcgaatgggtaagcttggg

SEQ ID NO: 50320 - DNA, 30 bp, Artificial Sequence
  Synthetic oligonucleotide
ctaaacgataggcttatttacgaggttggg

SEQ ID NO: 50321 - DNA, 30 bp, Artificial Sequence
  Synthetic oligonucleotide
gcgtgacccagacaagtgcgcatatttggg

SEQ ID NO: 50322 - DNA, 30 bp, Artificial Sequence
  Synthetic oligonucleotide
cgggatgagcaggctcgcatcagctttggg

SEQ ID NO: 50323 - DNA, 30 bp, Artificial Sequence
  Synthetic oligonucleotide
gcggccgcgaggtcagcgattcaaaaatgg

SEQ ID NO: 50324 - DNA, 30 bp, Artificial Sequence
  Synthetic oligonucleotide
aggtaaagtcgggctcatatggaataatgg

SEQ ID NO: 50325 - DNA, 30 bp, Artificial Sequence
  Synthetic oligonucleotide
acgccaagaaagggaagagcctcttaatgg

SEQ ID NO: 50326 - DNA, 30 bp, Artificial Sequence
  Synthetic oligonucleotide
acaaggacgagcgtagctctgtgtacatgg

SEQ ID NO: 50327 - DNA, 30 bp, Artificial Sequence
  Synthetic oligonucleotide
ataagcgaacctaatccctaatttacatgg

SEQ ID NO: 50328 - DNA, 30 bp, Artificial Sequence
  Synthetic oligonucleotide
aagagggcattaccaagatagcaggcatgg

SEQ ID NO: 50329 - DNA, 30 bp, Artificial Sequence
  Synthetic oligonucleotide
cgaagcgcggtacacgacccgggaagatgg

SEQ ID NO: 50330 - DNA, 30 bp, Artificial Sequence
  Synthetic oligonucleotide
cttcgtgaagagtcgacctgaaggagatgg

SEQ ID NO: 50331 - DNA, 30 bp, Artificial Sequence
  Synthetic oligonucleotide
agttactaatcgctcagaactagtagatgg

SEQ ID NO: 50332 - DNA, 30 bp, Artificial Sequence
  Synthetic oligonucleotide
acattatgacatgtagcgatacgacgatgg

SEQ ID NO: 50333 - DNA, 30 bp, Artificial Sequence
  Synthetic oligonucleotide
caaggcatatgtaagtgggcaaaatgatgg

SEQ ID NO: 50334 - DNA, 30 bp, Artificial Sequence
  Synthetic oligonucleotide
gtgagtggcgtgggggcgattcactgatgg

SEQ ID NO: 50335 - DNA, 30 bp, Artificial Sequence
  Synthetic oligonucleotide
acggggaaaggacaaagacggaatatatgg

SEQ ID NO: 50336 - DNA, 30 bp, Artificial Sequence
  Synthetic oligonucleotide
tacgccgaacctaactcgcgcgaactatgg

SEQ ID NO: 50337 - DNA, 30 bp, Artificial Sequence
  Synthetic oligonucleotide
ctcgaactcgaagtagtatgccacctatgg

SEQ ID NO: 50338 - DNA, 30 bp, Artificial Sequence
  Synthetic oligonucleotide
gcgctaggggcagatgactaataggtatgg

SEQ ID NO: 50339 - DNA, 30 bp, Artificial Sequence
  Synthetic oligonucleotide
gccaacgatacgaagggggcatatgtatgg

SEQ ID NO: 50340 - DNA, 30 bp, Artificial Sequence
  Synthetic oligonucleotide
caccgaatcgcgaagtgcgatgcgaactgg

SEQ ID NO: 50341 - DNA, 30 bp, Artificial Sequence
  Synthetic oligonucleotide
aagcagaaataagcgcaaagaccccactgg

SEQ ID NO: 50342 - DNA, 30 bp, Artificial Sequence
  Synthetic oligonucleotide
gagggcagacagcgacgaaatagagactgg

SEQ ID NO: 50343 - DNA, 30 bp, Artificial Sequence
  Synthetic oligonucleotide
cctgggcagtgagtccatacagggtactgg

SEQ ID NO: 50344 - DNA, 30 bp, Artificial Sequence
  Synthetic oligonucleotide
cgggccaaaacagcaacgaatctgtactgg

SEQ ID NO: 50345 - DNA, 30 bp, Artificial Sequence
  Synthetic oligonucleotide
gtcaagcgaatacttaaatactaatcctgg

SEQ ID NO: 50346 - DNA, 30 bp, Artificial Sequence
  Synthetic oligonucleotide
tcggattattccagaggacggacgagctgg

SEQ ID NO: 50347 - DNA, 30 bp, Artificial Sequence
  Synthetic oligonucleotide
cgtggctgcaaaggactatcaccgagctgg

SEQ ID NO: 50348 - DNA, 30 bp, Artificial Sequence
  Synthetic oligonucleotide
cgcgtcgactaggacaacgtatctcgctgg

SEQ ID NO: 50349 - DNA, 30 bp, Artificial Sequence
  Synthetic oligonucleotide
gatcgaaagtatgatcaggaccatggctgg

SEQ ID NO: 50350 - DNA, 30 bp, Artificial Sequence
  Synthetic oligonucleotide
tcaagatccgcaaaaaggtgaatatgctgg

SEQ ID NO: 50351 - DNA, 30 bp, Artificial Sequence
  Synthetic oligonucleotide
ggaaagccagagtagagcgactaaatctgg

SEQ ID NO: 50352 - DNA, 30 bp, Artificial Sequence
  Synthetic oligonucleotide
agacaggcctggctaagcacttcgatctgg

SEQ ID NO: 50353 - DNA, 30 bp, Artificial Sequence
  Synthetic oligonucleotide
gcgactagcggagagcaaggacgagtctgg

SEQ ID NO: 50354 - DNA, 30 bp, Artificial Sequence
  Synthetic oligonucleotide
aaagcaaaagggcacgggaaagacgtctgg

SEQ ID NO: 50355 - DNA, 30 bp, Artificial Sequence
  Synthetic oligonucleotide
atcgaagaagtcggaactgaatcattctgg

SEQ ID NO: 50356 - DNA, 30 bp, Artificial Sequence
  Synthetic oligonucleotide
gtaatttcaaggaaagaacataatcagtgg

SEQ ID NO: 50357 - DNA, 30 bp, Artificial Sequence
  Synthetic oligonucleotide
gcgagctgagtccgtgtcgtcattcagtgg

SEQ ID NO: 50358 - DNA, 30 bp, Artificial Sequence
  Synthetic oligonucleotide
ggaagcagccaatgttattgacaagagtgg

SEQ ID NO: 50359 - DNA, 30 bp, Artificial Sequence
  Synthetic oligonucleotide
actaagcaggatacactcaatcaatagtgg

SEQ ID NO: 50360 - DNA, 30 bp, Artificial Sequence
  Synthetic oligonucleotide
ctgtaaactcagggtataacaaactagtgg

SEQ ID NO: 50361 - DNA, 30 bp, Artificial Sequence
  Synthetic oligonucleotide
gcacgagtagatagtaattgacatacgtgg

SEQ ID NO: 50362 - DNA, 30 bp, Artificial Sequence
  Synthetic oligonucleotide
ttgataaacagacacaaggcctatacgtgg

SEQ ID NO: 50363 - DNA, 30 bp, Artificial Sequence
  Synthetic oligonucleotide
taccgtcggaaccgtcagtgagctacgtgg

SEQ ID NO: 50364 - DNA, 30 bp, Artificial Sequence
  Synthetic oligonucleotide
gcgaatcatgggcaatgacggtctccgtgg

SEQ ID NO: 50365 - DNA, 30 bp, Artificial Sequence
  Synthetic oligonucleotide
gaggaaaagctcaagtattcaattgcgtgg

SEQ ID NO: 50366 - DNA, 30 bp, Artificial Sequence
  Synthetic oligonucleotide
gcataggctaatatattgtgaaaacggtgg

SEQ ID NO: 50367 - DNA, 30 bp, Artificial Sequence
  Synthetic oligonucleotide
acggtatcatggcgacttcgaatagggtgg

SEQ ID NO: 50368 - DNA, 30 bp, Artificial Sequence
  Synthetic oligonucleotide
gtagaggttaattcggctacgatatggtgg

SEQ ID NO: 50369 - DNA, 30 bp, Artificial Sequence
  Synthetic oligonucleotide
ggcatatggtatacatctaatgaaatgtgg

SEQ ID NO: 50370 - DNA, 30 bp, Artificial Sequence
  Synthetic oligonucleotide
tagcgtcctgccacgaggtcgacgttgtgg

SEQ ID NO: 50371 - DNA, 30 bp, Artificial Sequence
  Synthetic oligonucleotide
cctatgtcgaaccccagacacatcaattgg

SEQ ID NO: 50372 - DNA, 30 bp, Artificial Sequence
  Synthetic oligonucleotide
aaggttcttgaggagatcatcgaccattgg

SEQ ID NO: 50373 - DNA, 30 bp, Artificial Sequence
  Synthetic oligonucleotide
gagggtcgggccgcgattatgagagattgg

SEQ ID NO: 50374 - DNA, 30 bp, Artificial Sequence
  Synthetic oligonucleotide
gggggagaggtatcagaagcaaatccttgg

SEQ ID NO: 50375 - DNA, 30 bp, Artificial Sequence
  Synthetic oligonucleotide
gtggtaaacgttaaacggaaggcaagttgg

SEQ ID NO: 50376 - DNA, 30 bp, Artificial Sequence
  Synthetic oligonucleotide
tatgaacgtcaagagcatgtagatggttgg

SEQ ID NO: 50377 - DNA, 30 bp, Artificial Sequence
  Synthetic oligonucleotide
ctacgaccgacactttcgactctgatttgg

SEQ ID NO: 50378 - DNA, 30 bp, Artificial Sequence
  Synthetic oligonucleotide
tcgtccttgagcaaaagaatgggattttgg

SEQ ID NO: 50379 - DNA, 30 bp, Artificial Sequence
  Synthetic oligonucleotide
atgggactggtagtggatgggcaaaaaatg

SEQ ID NO: 50380 - DNA, 30 bp, Artificial Sequence
  Synthetic oligonucleotide
gtctacaacaagtcgagacggctcgaaatg

SEQ ID NO: 50381 - DNA, 30 bp, Artificial Sequence
  Synthetic oligonucleotide
actggggtggcgtatgaatgaaaggaaatg

SEQ ID NO: 50382 - DNA, 30 bp, Artificial Sequence
  Synthetic oligonucleotide
tgcatgtaaatctgtctaggccaggaaatg

SEQ ID NO: 50383 - DNA, 30 bp, Artificial Sequence
  Synthetic oligonucleotide
gtgtgcaatagtgtgtacatgcaggaaatg

SEQ ID NO: 50384 - DNA, 30 bp, Artificial Sequence
  Synthetic oligonucleotide
gccggggaaagcgcgagaaggatggaaatg

SEQ ID NO: 50385 - DNA, 30 bp, Artificial Sequence
  Synthetic oligonucleotide
cttaatgcgcgaatatgaatctgataaatg

SEQ ID NO: 50386 - DNA, 30 bp, Artificial Sequence
  Synthetic oligonucleotide
gaaactaagaacaacagtacgcgttaaatg

SEQ ID NO: 50387 - DNA, 30 bp, Artificial Sequence
  Synthetic oligonucleotide
tcagcgtacgtggatggaaattatacaatg

SEQ ID NO: 50388 - DNA, 30 bp, Artificial Sequence
  Synthetic oligonucleotide
taactggagatcctctcgctgattacaatg

SEQ ID NO: 50389 - DNA, 30 bp, Artificial Sequence
  Synthetic oligonucleotide
atgtgcattacaataggcgtgcgggcaatg

SEQ ID NO: 50390 - DNA, 30 bp, Artificial Sequence
  Synthetic oligonucleotide
acggtatacgattattacgataaatcaatg

SEQ ID NO: 50391 - DNA, 30 bp, Artificial Sequence
  Synthetic oligonucleotide
tgtcgacctgtatcggaagaccgctcaatg

SEQ ID NO: 50392 - DNA, 30 bp, Artificial Sequence
  Synthetic oligonucleotide
gcggaccgccgcaggtagggagcttcaatg

SEQ ID NO: 50393 - DNA, 30 bp, Artificial Sequence
  Synthetic oligonucleotide
aacatgaacggcttcaactgatcaagaatg

SEQ ID NO: 50394 - DNA, 30 bp, Artificial Sequence
  Synthetic oligonucleotide
gtcgtgaagatgacataacgttccagaatg

SEQ ID NO: 50395 - DNA, 30 bp, Artificial Sequence
  Synthetic oligonucleotide
aagtgagaagtggagtgcggttaacgaatg

SEQ ID NO: 50396 - DNA, 30 bp, Artificial Sequence
  Synthetic oligonucleotide
gctagccgaatcagccaagatgaaggaatg

SEQ ID NO: 50397 - DNA, 30 bp, Artificial Sequence
  Synthetic oligonucleotide
cactacctaaggtgtagtataccaggaatg

SEQ ID NO: 50398 - DNA, 30 bp, Artificial Sequence
  Synthetic oligonucleotide
cggaacagatacaggtaatgacagggaatg

SEQ ID NO: 50399 - DNA, 30 bp, Artificial Sequence
  Synthetic oligonucleotide
tcaatcgcaaattccgccagagactgaatg

SEQ ID NO: 50400 - DNA, 30 bp, Artificial Sequence
  Synthetic oligonucleotide
gaacgaacatacaccaaccaaccctgaatg

SEQ ID NO: 50401 - DNA, 30 bp, Artificial Sequence
  Synthetic oligonucleotide
acaacaatcatacggggacagccctgaatg

SEQ ID NO: 50402 - DNA, 30 bp, Artificial Sequence
  Synthetic oligonucleotide
aagtagataggtagtaataacggtataatg

SEQ ID NO: 50403 - DNA, 30 bp, Artificial Sequence
  Synthetic oligonucleotide
cagaaagtggaactactagagacactaatg

SEQ ID NO: 50404 - DNA, 30 bp, Artificial Sequence
  Synthetic oligonucleotide
gtacaatgaaaaggcataagtgttctaatg

SEQ ID NO: 50405 - DNA, 31 bp, Artificial Sequence
  Synthetic oligonucleotide
agcagaatagtgtattcgagtcacagtaatg

SEQ ID NO: 50406 - DNA, 30 bp, Artificial Sequence
  Synthetic oligonucleotide
gtacaatcccagcgaactcattcaaacatg

SEQ ID NO: 50407 - DNA, 30 bp, Artificial Sequence
  Synthetic oligonucleotide
cacggcgcagacgggctgaattccaacatg

SEQ ID NO: 50408 - DNA, 30 bp, Artificial Sequence
  Synthetic oligonucleotide
ccgatggccgccttaatgggaattcacatg

SEQ ID NO: 50409 - DNA, 30 bp, Artificial Sequence
  Synthetic oligonucleotide
caggttgctgtgcaggatacgagcgacatg

SEQ ID NO: 50410 - DNA, 30 bp, Artificial Sequence
  Synthetic oligonucleotide
caataaatagattaagcctctttaaccatg

SEQ ID NO: 50411 - DNA, 30 bp, Artificial Sequence
  Synthetic oligonucleotide
tatacgggggctgagacagggaactccatg

SEQ ID NO: 50412 - DNA, 30 bp, Artificial Sequence
  Synthetic oligonucleotide
ccagaagaatgcttcaattggccttccatg

SEQ ID NO: 50413 - DNA, 30 bp, Artificial Sequence
  Synthetic oligonucleotide
acaaggtgcggaacattaccgacaggcatg

SEQ ID NO: 50414 - DNA, 30 bp, Artificial Sequence
  Synthetic oligonucleotide
gccgacgtcgaatatacttccgagggcatg

SEQ ID NO: 50415 - DNA, 30 bp, Artificial Sequence
  Synthetic oligonucleotide
gtatctgcgcatcagatagacttgggcatg

SEQ ID NO: 50416 - DNA, 30 bp, Artificial Sequence
  Synthetic oligonucleotide
acaggacagcgccgagtccttgaatgcatg

SEQ ID NO: 50417 - DNA, 30 bp, Artificial Sequence
  Synthetic oligonucleotide
gcagaggataaaaagttaaacaactgcatg

SEQ ID NO: 50418 - DNA, 30 bp, Artificial Sequence
  Synthetic oligonucleotide
taggacgtaaataccaaacagcgctgcatg

SEQ ID NO: 50419 - DNA, 30 bp, Artificial Sequence
  Synthetic oligonucleotide
tcttaaacacaaacaatatgggggtgcatg

SEQ ID NO: 50420 - DNA, 30 bp, Artificial Sequence
  Synthetic oligonucleotide
aacaatgacaaggcttaggaaaaactcatg

SEQ ID NO: 50421 - DNA, 30 bp, Artificial Sequence
  Synthetic oligonucleotide
tgtatgctagacatcaatggaccagtcatg

SEQ ID NO: 50422 - DNA, 30 bp, Artificial Sequence
  Synthetic oligonucleotide
cgtagcttagttgtaattcactgattcatg

SEQ ID NO: 50423 - DNA, 30 bp, Artificial Sequence
  Synthetic oligonucleotide
cttaactagattccgcttagaaacaagatg

SEQ ID NO: 50424 - DNA, 30 bp, Artificial Sequence
  Synthetic oligonucleotide
gccgcaaacgacagcaaggccttcaagatg

SEQ ID NO: 50425 - DNA, 31 bp, Artificial Sequence
  Synthetic oligonucleotide
cagagataacggttcttgcccgttgcagatg

SEQ ID NO: 50426 - DNA, 30 bp, Artificial Sequence
  Synthetic oligonucleotide
tcactaaggggcagtgtaaaaaatcagatg

SEQ ID NO: 50427 - DNA, 30 bp, Artificial Sequence
  Synthetic oligonucleotide
agccaatccgggcacgttggtgcggagatg

SEQ ID NO: 50428 - DNA, 30 bp, Artificial Sequence
  Synthetic oligonucleotide
caccagggccagtattttatgcctgagatg

SEQ ID NO: 50429 - DNA, 30 bp, Artificial Sequence
  Synthetic oligonucleotide
ggtattggcccaaaaacggatattgagatg

SEQ ID NO: 50430 - DNA, 30 bp, Artificial Sequence
  Synthetic oligonucleotide
tcgggtcactggccgtcctcaaactagatg

SEQ ID NO: 50431 - DNA, 30 bp, Artificial Sequence
  Synthetic oligonucleotide
taagcattgtaagccgagtcttattagatg

SEQ ID NO: 50432 - DNA, 30 bp, Artificial Sequence
  Synthetic oligonucleotide
cagaatgcgctatatcagcaagcaacgatg

SEQ ID NO: 50433 - DNA, 30 bp, Artificial Sequence
  Synthetic oligonucleotide
acgttctcgaggagaatctagttcacgatg

SEQ ID NO: 50434 - DNA, 30 bp, Artificial Sequence
  Synthetic oligonucleotide
ctgcgaaagcctcagtaatactaatcgatg

SEQ ID NO: 50435 - DNA, 30 bp, Artificial Sequence
  Synthetic oligonucleotide
agggaatgcatcagccaacaggcgtcgatg

SEQ ID NO: 50436 - DNA, 30 bp, Artificial Sequence
  Synthetic oligonucleotide
cgaagaggaactttaacaggtatgtcgatg

SEQ ID NO: 50437 - DNA, 30 bp, Artificial Sequence
  Synthetic oligonucleotide
agccgcggttaaaaggcgttcggttcgatg

SEQ ID NO: 50438 - DNA, 30 bp, Artificial Sequence
  Synthetic oligonucleotide
agagaaacgtccaataagaaggggaggatg

SEQ ID NO: 50439 - DNA, 30 bp, Artificial Sequence
  Synthetic oligonucleotide
tatagaacgacattagtgacaagtaggatg

SEQ ID NO: 50440 - DNA, 30 bp, Artificial Sequence
  Synthetic oligonucleotide
ctacgctgaacgagtcctatggggcggatg

SEQ ID NO: 50441 - DNA, 30 bp, Artificial Sequence
  Synthetic oligonucleotide
ctaaacgatagggtcatgcttttggggatg

SEQ ID NO: 50442 - DNA, 30 bp, Artificial Sequence
  Synthetic oligonucleotide
cagtatattacccagcctgagaagatgatg

SEQ ID NO: 50443 - DNA, 30 bp, Artificial Sequence
  Synthetic oligonucleotide
ttaggtcacttaagaggatcggttatgatg

SEQ ID NO: 50444 - DNA, 30 bp, Artificial Sequence
  Synthetic oligonucleotide
tacaaaactaaatgttagagtgagctgatg

SEQ ID NO: 50445 - DNA, 30 bp, Artificial Sequence
  Synthetic oligonucleotide
gaggtaatcaatcaaaggatacaggtgatg

SEQ ID NO: 50446 - DNA, 30 bp, Artificial Sequence
  Synthetic oligonucleotide
cggcaagagcgtacgggacgtccgttgatg

SEQ ID NO: 50447 - DNA, 30 bp, Artificial Sequence
  Synthetic oligonucleotide
tgagagcaaggtcgtgtaacgtggttgatg

SEQ ID NO: 50448 - DNA, 30 bp, Artificial Sequence
  Synthetic oligonucleotide
ccactagtgtaatggaggacacctaatatg

SEQ ID NO: 50449 - DNA, 30 bp, Artificial Sequence
  Synthetic oligonucleotide
cgactggtcctggccagtagttcgcatatg

SEQ ID NO: 50450 - DNA, 30 bp, Artificial Sequence
  Synthetic oligonucleotide
acggtgctgaatagactgacacaggatatg

SEQ ID NO: 50451 - DNA, 30 bp, Artificial Sequence
  Synthetic oligonucleotide
tacgatacagagtaagatcttggtactatg

SEQ ID NO: 50452 - DNA, 30 bp, Artificial Sequence
  Synthetic oligonucleotide
ggcacaatgccaatagccatcccgagtatg

SEQ ID NO: 50453 - DNA, 30 bp, Artificial Sequence
  Synthetic oligonucleotide
cgcgactgcccagtcacccacagccgtatg

SEQ ID NO: 50454 - DNA, 30 bp, Artificial Sequence
  Synthetic oligonucleotide
aagataagggtacatagggtgagaggtatg

SEQ ID NO: 50455 - DNA, 30 bp, Artificial Sequence
  Synthetic oligonucleotide
agaccgtgctgaggtcgtaagtactgtatg

SEQ ID NO: 50456 - DNA, 30 bp, Artificial Sequence
  Synthetic oligonucleotide
aggcgaaaataacacgttggtctctgtatg

SEQ ID NO: 50457 - DNA, 30 bp, Artificial Sequence
  Synthetic oligonucleotide
actcgatggacaacctccccgacaattatg

SEQ ID NO: 50458 - DNA, 30 bp, Artificial Sequence
  Synthetic oligonucleotide
gcctgaggacgacctgcatgttgaattatg

SEQ ID NO: 50459 - DNA, 30 bp, Artificial Sequence
  Synthetic oligonucleotide
acacatacagcccgggagagacgtattatg

SEQ ID NO: 50460 - DNA, 30 bp, Artificial Sequence
  Synthetic oligonucleotide
ggaggaaactgcgcctttgtaccacaactg

SEQ ID NO: 50461 - DNA, 30 bp, Artificial Sequence
  Synthetic oligonucleotide
ggtcatcaataagatctacggggccaactg

SEQ ID NO: 50462 - DNA, 30 bp, Artificial Sequence
  Synthetic oligonucleotide
tatagcgccaaatgggggatggggcaactg

SEQ ID NO: 50463 - DNA, 30 bp, Artificial Sequence
  Synthetic oligonucleotide
gtctcgggagtccaagggcatgatcaactg

SEQ ID NO: 50464 - DNA, 30 bp, Artificial Sequence
  Synthetic oligonucleotide
gcggtgtgaataagagtgagttgggaactg

SEQ ID NO: 50465 - DNA, 30 bp, Artificial Sequence
  Synthetic oligonucleotide
ctaagcggaatctctcgcacacgataactg

SEQ ID NO: 50466 - DNA, 30 bp, Artificial Sequence
  Synthetic oligonucleotide
gcgcagcggaatgaggacctcgggtaactg

SEQ ID NO: 50467 - DNA, 30 bp, Artificial Sequence
  Synthetic oligonucleotide
ggccaatttgcgacgaccagattaacactg

SEQ ID NO: 50468 - DNA, 30 bp, Artificial Sequence
  Synthetic oligonucleotide
gatgaagagtagatgtcttaacatgcactg

SEQ ID NO: 50469 - DNA, 30 bp, Artificial Sequence
  Synthetic oligonucleotide
gtgatggacggcggtttgcgaggtgcactg

SEQ ID NO: 50470 - DNA, 30 bp, Artificial Sequence
  Synthetic oligonucleotide
tgggcaggcgggaccatacttaagtcactg

SEQ ID NO: 50471 - DNA, 30 bp, Artificial Sequence
  Synthetic oligonucleotide
cctcacacaagtgaggcacaccccagactg

SEQ ID NO: 50472 - DNA, 30 bp, Artificial Sequence
  Synthetic oligonucleotide
atcagattcaagacacgatctgccagactg

SEQ ID NO: 50473 - DNA, 29 bp, Artificial Sequence
  Synthetic oligonucleotide
tgggcggcatcccccgaattgaacgactg

SEQ ID NO: 50474 - DNA, 30 bp, Artificial Sequence
  Synthetic oligonucleotide
gatagttggttatccatgccagaaggactg

SEQ ID NO: 50475 - DNA, 30 bp, Artificial Sequence
  Synthetic oligonucleotide
gagacccaaaattggtaaccatgatgactg

SEQ ID NO: 50476 - DNA, 30 bp, Artificial Sequence
  Synthetic oligonucleotide
tcgaccacaacatttctcgcgccctgactg

SEQ ID NO: 50477 - DNA, 30 bp, Artificial Sequence
  Synthetic oligonucleotide
gcacccgctgagagagtgtggtaaatactg

SEQ ID NO: 50478 - DNA, 30 bp, Artificial Sequence
  Synthetic oligonucleotide
ggataattgggtccgaaagagcgcatactg

SEQ ID NO: 50479 - DNA, 30 bp, Artificial Sequence
  Synthetic oligonucleotide
tcacggaaagtcgtagacggcaccctactg

SEQ ID NO: 50480 - DNA, 30 bp, Artificial Sequence
  Synthetic oligonucleotide
ttaataggtgcgaagtgaaaagagctactg

SEQ ID NO: 50481 - DNA, 30 bp, Artificial Sequence
  Synthetic oligonucleotide
tgagacgtatccgaagagccacgtctactg

SEQ ID NO: 50482 - DNA, 30 bp, Artificial Sequence
  Synthetic oligonucleotide
agcaagttaacaacgccaccaggagtactg

SEQ ID NO: 50483 - DNA, 30 bp, Artificial Sequence
  Synthetic oligonucleotide
aggcaaaaagtgctgaggaataggcacctg

SEQ ID NO: 50484 - DNA, 30 bp, Artificial Sequence
  Synthetic oligonucleotide
tcaacgattattatggaacgagaagacctg

SEQ ID NO: 50485 - DNA, 30 bp, Artificial Sequence
  Synthetic oligonucleotide
ataataactcagagggagatgctcgacctg

SEQ ID NO: 50486 - DNA, 30 bp, Artificial Sequence
  Synthetic oligonucleotide
cggaggtagcgtttaagaactcaatccctg

SEQ ID NO: 50487 - DNA, 30 bp, Artificial Sequence
  Synthetic oligonucleotide
agaaggatggagtgtcaaaagctctgcctg

SEQ ID NO: 50488 - DNA, 30 bp, Artificial Sequence
  Synthetic oligonucleotide
cgttgtcgttcatagggaaagctgtgcctg

SEQ ID NO: 50489 - DNA, 30 bp, Artificial Sequence
  Synthetic oligonucleotide
ctaaacgcggaatgtaacatagaaatcctg

SEQ ID NO: 50490 - DNA, 30 bp, Artificial Sequence
  Synthetic oligonucleotide
acgggccaaaagggttacagtaagatcctg

SEQ ID NO: 50491 - DNA, 30 bp, Artificial Sequence
  Synthetic oligonucleotide
atgacgtggaagtgtcaaaccgaagtcctg

SEQ ID NO: 50492 - DNA, 30 bp, Artificial Sequence
  Synthetic oligonucleotide
taccatcaaacgtggggcaacgcattcctg

SEQ ID NO: 50493 - DNA, 30 bp, Artificial Sequence
  Synthetic oligonucleotide
cggtaatgagaggcagtctacaacttcctg

SEQ ID NO: 50494 - DNA, 30 bp, Artificial Sequence
  Synthetic oligonucleotide
ttagacacaacagtaaactaaacacagctg

SEQ ID NO: 50495 - DNA, 30 bp, Artificial Sequence
  Synthetic oligonucleotide
tcctcattagcggggagtggtctacagctg

SEQ ID NO: 50496 - DNA, 30 bp, Artificial Sequence
  Synthetic oligonucleotide
tgggtaacgtgccgacaacagatcgagctg

SEQ ID NO: 50497 - DNA, 30 bp, Artificial Sequence
  Synthetic oligonucleotide
acatcagtgggaactagtaccgcctagctg

SEQ ID NO: 50498 - DNA, 30 bp, Artificial Sequence
  Synthetic oligonucleotide
aggaggaccaagtagcgagtctgatcgctg

SEQ ID NO: 50499 - DNA, 30 bp, Artificial Sequence
  Synthetic oligonucleotide
gcgaagaacgggacatgggactctcggctg

SEQ ID NO: 50500 - DNA, 30 bp, Artificial Sequence
  Synthetic oligonucleotide
gtatggtaggttagggttcgagaaatgctg

SEQ ID NO: 50501 - DNA, 30 bp, Artificial Sequence
  Synthetic oligonucleotide
gggtaaaatacgaggactctgcatatgctg

SEQ ID NO: 50502 - DNA, 30 bp, Artificial Sequence
  Synthetic oligonucleotide
cgaaggccgggtcgattattcgccgtgctg

SEQ ID NO: 50503 - DNA, 30 bp, Artificial Sequence
  Synthetic oligonucleotide
aaggccgaaacccctcctaagattaatctg

SEQ ID NO: 50504 - DNA, 30 bp, Artificial Sequence
  Synthetic oligonucleotide
atcagggccgggaaagtctaaccccatctg

SEQ ID NO: 50505 - DNA, 30 bp, Artificial Sequence
  Synthetic oligonucleotide
agtggaacatcaaagctggcaggcactctg

SEQ ID NO: 50506 - DNA, 30 bp, Artificial Sequence
  Synthetic oligonucleotide
acagtgagtgtcgagaagctgactactctg

SEQ ID NO: 50507 - DNA, 30 bp, Artificial Sequence
  Synthetic oligonucleotide
ataggaaaggaatggagagtcagacctctg

SEQ ID NO: 50508 - DNA, 30 bp, Artificial Sequence
  Synthetic oligonucleotide
cccgaacgggacatgaccaaggcaagtctg

SEQ ID NO: 50509 - DNA, 30 bp, Artificial Sequence
  Synthetic oligonucleotide
caggactcgtttcgcggtatgtggagtctg

SEQ ID NO: 50510 - DNA, 30 bp, Artificial Sequence
  Synthetic oligonucleotide
tacgatcactaaggacagtacgagggtctg

SEQ ID NO: 50511 - DNA, 30 bp, Artificial Sequence
  Synthetic oligonucleotide
actcatgaaccgggaatcgtctggggtctg

SEQ ID NO: 50512 - DNA, 30 bp, Artificial Sequence
  Synthetic oligonucleotide
aacccgccaggaggagaggatgtgcttctg

SEQ ID NO: 50513 - DNA, 30 bp, Artificial Sequence
  Synthetic oligonucleotide
caaagattcgctccgtttcgtgcaaaagtg

SEQ ID NO: 50514 - DNA, 30 bp, Artificial Sequence
  Synthetic oligonucleotide
agattagtagttccgtaaccgtgtaaagtg

SEQ ID NO: 50515 - DNA, 30 bp, Artificial Sequence
  Synthetic oligonucleotide
ctttaagcgagggaaggggagggtcaagtg

SEQ ID NO: 50516 - DNA, 30 bp, Artificial Sequence
  Synthetic oligonucleotide
ttctccacgaggggcatccaggcagaagtg

SEQ ID NO: 50517 - DNA, 30 bp, Artificial Sequence
  Synthetic oligonucleotide
acggtcaatagtcagtggctattagaagtg

SEQ ID NO: 50518 - DNA, 30 bp, Artificial Sequence
  Synthetic oligonucleotide
tgtgttacttatgaatcaaagattgaagtg

SEQ ID NO: 50519 - DNA, 30 bp, Artificial Sequence
  Synthetic oligonucleotide
taaccaacatggaaaatgctgtaataagtg

SEQ ID NO: 50520 - DNA, 30 bp, Artificial Sequence
  Synthetic oligonucleotide
ccacatccaaaacatgaagtccattaagtg

SEQ ID NO: 50521 - DNA, 30 bp, Artificial Sequence
  Synthetic oligonucleotide
tggaagagtaattcgagatcagttacagtg

SEQ ID NO: 50522 - DNA, 30 bp, Artificial Sequence
  Synthetic oligonucleotide
tgacgacccggcttcaattggacaccagtg

SEQ ID NO: 50523 - DNA, 30 bp, Artificial Sequence
  Synthetic oligonucleotide
tgaaagtagtatcttaacgtcataccagtg

SEQ ID NO: 50524 - DNA, 30 bp, Artificial Sequence
  Synthetic oligonucleotide
ttacggcggatgaggtagcgttttccagtg

SEQ ID NO: 50525 - DNA, 30 bp, Artificial Sequence
  Synthetic oligonucleotide
acagtaagagttttacaaacgtcgtcagtg

SEQ ID NO: 50526 - DNA, 30 bp, Artificial Sequence
  Synthetic oligonucleotide
tcttagtaactcaaccaattagcaagagtg

SEQ ID NO: 50527 - DNA, 30 bp, Artificial Sequence
  Synthetic oligonucleotide
acgttcacggatgagaaggaacctagagtg

SEQ ID NO: 50528 - DNA, 30 bp, Artificial Sequence
  Synthetic oligonucleotide
gacacccagctagcatccctacttagagtg

SEQ ID NO: 50529 - DNA, 30 bp, Artificial Sequence
  Synthetic oligonucleotide
gtatgcgagcaaggtagatatgcgcgagtg

SEQ ID NO: 50530 - DNA, 30 bp, Artificial Sequence
  Synthetic oligonucleotide
gaggcgctacggaaaatgtttaaaggagtg

SEQ ID NO: 50531 - DNA, 30 bp, Artificial Sequence
  Synthetic oligonucleotide
agtggcgacataagtcaacttaccggagtg

SEQ ID NO: 50532 - DNA, 30 bp, Artificial Sequence
  Synthetic oligonucleotide
accaaggggcggtagaaggttcccatagtg

SEQ ID NO: 50533 - DNA, 30 bp, Artificial Sequence
  Synthetic oligonucleotide
acgacaggcctttagatctaaagactagtg

SEQ ID NO: 50534 - DNA, 30 bp, Artificial Sequence
  Synthetic oligonucleotide
gcgtatgtaaccaggatcaatgtactagtg

SEQ ID NO: 50535 - DNA, 30 bp, Artificial Sequence
  Synthetic oligonucleotide
ttggagtagtaggcttcactcaagttagtg

SEQ ID NO: 50536 - DNA, 30 bp, Artificial Sequence
  Synthetic oligonucleotide
tgacgcataagccgagtatacatcaacgtg

SEQ ID NO: 50537 - DNA, 30 bp, Artificial Sequence
  Synthetic oligonucleotide
aaccaccgcaggtaaagtacggcgaccgtg

SEQ ID NO: 50538 - DNA, 30 bp, Artificial Sequence
  Synthetic oligonucleotide
gggccgaggtaaaggccgtacttgaccgtg

SEQ ID NO: 50539 - DNA, 30 bp, Artificial Sequence
  Synthetic oligonucleotide
gcatatcgactccgagctatagtggccgtg

SEQ ID NO: 50540 - DNA, 30 bp, Artificial Sequence
  Synthetic oligonucleotide
aagggctgaggactaggtgtatcttccgtg

SEQ ID NO: 50541 - DNA, 30 bp, Artificial Sequence
  Synthetic oligonucleotide
atgcagtggataactcagcttacaagcgtg

SEQ ID NO: 50542 - DNA, 30 bp, Artificial Sequence
  Synthetic oligonucleotide
tacagtcagaaagcacttggactgcgcgtg

SEQ ID NO: 50543 - DNA, 30 bp, Artificial Sequence
  Synthetic oligonucleotide
aacagcggcgaagagtaattaccaggcgtg

SEQ ID NO: 50544 - DNA, 30 bp, Artificial Sequence
  Synthetic oligonucleotide
atagagtgcgaaaataccactggtggcgtg

SEQ ID NO: 50545 - DNA, 30 bp, Artificial Sequence
  Synthetic oligonucleotide
ggcatatggggatagctgttgtgaatcgtg

SEQ ID NO: 50546 - DNA, 30 bp, Artificial Sequence
  Synthetic oligonucleotide
gtcggctcagttgataggtacataatcgtg

SEQ ID NO: 50547 - DNA, 30 bp, Artificial Sequence
  Synthetic oligonucleotide
tcgtgatctcttgaaggatccaacatcgtg

SEQ ID NO: 50548 - DNA, 30 bp, Artificial Sequence
  Synthetic oligonucleotide
ataagggaacgggttgtaacctccatcgtg

SEQ ID NO: 50549 - DNA, 30 bp, Artificial Sequence
  Synthetic oligonucleotide
cggaggtagggtcgataacgaggtatcgtg

SEQ ID NO: 50550 - DNA, 30 bp, Artificial Sequence
  Synthetic oligonucleotide
cacggacagtatgtaaacaccccgttcgtg

SEQ ID NO: 50551 - DNA, 30 bp, Artificial Sequence
  Synthetic oligonucleotide
agcggacccaagcgagtacgttcgttcgtg

SEQ ID NO: 50552 - DNA, 30 bp, Artificial Sequence
  Synthetic oligonucleotide
gcggtgagattcccttgaggtataaaggtg

SEQ ID NO: 50553 - DNA, 30 bp, Artificial Sequence
  Synthetic oligonucleotide
catcaaagactgcacgtctaagggcaggtg

SEQ ID NO: 50554 - DNA, 30 bp, Artificial Sequence
  Synthetic oligonucleotide
cctgtgttagggctaatcgctagtgaggtg

SEQ ID NO: 50555 - DNA, 30 bp, Artificial Sequence
  Synthetic oligonucleotide
agctctcatgagccgagaggatgtgaggtg

SEQ ID NO: 50556 - DNA, 30 bp, Artificial Sequence
  Synthetic oligonucleotide
ttgcataaacggggataaggcaatacggtg

SEQ ID NO: 50557 - DNA, 30 bp, Artificial Sequence
  Synthetic oligonucleotide
ccatgatgtgaaatgtggacgataagggtg

SEQ ID NO: 50558 - DNA, 30 bp, Artificial Sequence
  Synthetic oligonucleotide
ggaaacccaggcgtaatgtgacacagggtg

SEQ ID NO: 50559 - DNA, 30 bp, Artificial Sequence
  Synthetic oligonucleotide
aggcgtaatcgtcgcgtggattggcgggtg

SEQ ID NO: 50560 - DNA, 30 bp, Artificial Sequence
  Synthetic oligonucleotide
agatcgaaagaatcgacccgacctatggtg

SEQ ID NO: 50561 - DNA, 30 bp, Artificial Sequence
  Synthetic oligonucleotide
cgtggtaaattctagcgctaaagtgtggtg

SEQ ID NO: 50562 - DNA, 30 bp, Artificial Sequence
  Synthetic oligonucleotide
ccgagctcggaacttgatattggattggtg

SEQ ID NO: 50563 - DNA, 30 bp, Artificial Sequence
  Synthetic oligonucleotide
tctgcacgtaagtttcggtcgatgttggtg

SEQ ID NO: 50564 - DNA, 30 bp, Artificial Sequence
  Synthetic oligonucleotide
acggccagttatcatgtaactaatttggtg

SEQ ID NO: 50565 - DNA, 30 bp, Artificial Sequence
  Synthetic oligonucleotide
ctcagagggggccgactattacaccatgtg

SEQ ID NO: 50566 - DNA, 30 bp, Artificial Sequence
  Synthetic oligonucleotide
tgagcttacccaactagtaacttccatgtg

SEQ ID NO: 50567 - DNA, 30 bp, Artificial Sequence
  Synthetic oligonucleotide
ctaaaaaggaaaaggcgttaaatgcatgtg

SEQ ID NO: 50568 - DNA, 30 bp, Artificial Sequence
  Synthetic oligonucleotide
gcatggtggagaaattgcagataagatgtg

SEQ ID NO: 50569 - DNA, 30 bp, Artificial Sequence
  Synthetic oligonucleotide
tggctaaatcaagacatcacacctgatgtg

SEQ ID NO: 50570 - DNA, 30 bp, Artificial Sequence
  Synthetic oligonucleotide
accagcctcctcatactctgactacctgtg

SEQ ID NO: 50571 - DNA, 30 bp, Artificial Sequence
  Synthetic oligonucleotide
cgactcctgttaaatgggaacatacgtgtg

SEQ ID NO: 50572 - DNA, 31 bp, Artificial Sequence
  Synthetic oligonucleotide
agggctgcgggtcggatcgtgtagcggtgtg

SEQ ID NO: 50573 - DNA, 30 bp, Artificial Sequence
  Synthetic oligonucleotide
atagcatgggtgtggtgaatagggggtgtg

SEQ ID NO: 50574 - DNA, 30 bp, Artificial Sequence
  Synthetic oligonucleotide
tggcctacgtaacataagactgtgggtgtg

SEQ ID NO: 50575 - DNA, 30 bp, Artificial Sequence
  Synthetic oligonucleotide
caacttgcattaggacgggaggaatgtgtg

SEQ ID NO: 50576 - DNA, 30 bp, Artificial Sequence
  Synthetic oligonucleotide
gaactaaaacattatggaaatgagtgtgtg

SEQ ID NO: 50577 - DNA, 30 bp, Artificial Sequence
  Synthetic oligonucleotide
tggttcggtgttggactgaaagacattgtg

SEQ ID NO: 50578 - DNA, 30 bp, Artificial Sequence
  Synthetic oligonucleotide
cgtagtcagggggttgtgtcatagcttgtg

SEQ ID NO: 50579 - DNA, 30 bp, Artificial Sequence
  Synthetic oligonucleotide
ggtcatgaatggcgcgggtctgaagttgtg

SEQ ID NO: 50580 - DNA, 30 bp, Artificial Sequence
  Synthetic oligonucleotide
tggaacagtatttactcgggcacggttgtg

SEQ ID NO: 50581 - DNA, 30 bp, Artificial Sequence
  Synthetic oligonucleotide
tgcccgtgaaacgtatggcttacaaaattg

SEQ ID NO: 50582 - DNA, 30 bp, Artificial Sequence
  Synthetic oligonucleotide
atatgcgcgatagaatacccaaatgcattg

SEQ ID NO: 50583 - DNA, 30 bp, Artificial Sequence
  Synthetic oligonucleotide
acgttgaggcgtacatcttgtgatgcattg

SEQ ID NO: 50584 - DNA, 30 bp, Artificial Sequence
  Synthetic oligonucleotide
taaaggcaatccagaggccttggtgcattg

SEQ ID NO: 50585 - DNA, 30 bp, Artificial Sequence
  Synthetic oligonucleotide
cgtctcgctctaggatcggaatcgtcattg

SEQ ID NO: 50586 - DNA, 29 bp, Artificial Sequence
  Synthetic oligonucleotide
taatgacaacccgtgccaacgagagattg

SEQ ID NO: 50587 - DNA, 30 bp, Artificial Sequence
  Synthetic oligonucleotide
gcggcgcgggcgcgggcagataatggattg

SEQ ID NO: 50588 - DNA, 30 bp, Artificial Sequence
  Synthetic oligonucleotide
cagcagagacaagtccataaataaatattg

SEQ ID NO: 50589 - DNA, 30 bp, Artificial Sequence
  Synthetic oligonucleotide
ccagaaagaggtggctttgaggacatattg

SEQ ID NO: 50590 - DNA, 30 bp, Artificial Sequence
  Synthetic oligonucleotide
ccgagttaaagtaggtgacttgcactattg

SEQ ID NO: 50591 - DNA, 30 bp, Artificial Sequence
  Synthetic oligonucleotide
caagcgggctcggtacctatcggcgtattg

SEQ ID NO: 50592 - DNA, 30 bp, Artificial Sequence
  Synthetic oligonucleotide
cagggcacggcaccaccagtacggttattg

SEQ ID NO: 50593 - DNA, 30 bp, Artificial Sequence
  Synthetic oligonucleotide
atccgtgaaagtgggatacgccctaacttg

SEQ ID NO: 50594 - DNA, 30 bp, Artificial Sequence
  Synthetic oligonucleotide
gctgtccagcctgggaacaaaagacacttg

SEQ ID NO: 50595 - DNA, 30 bp, Artificial Sequence
  Synthetic oligonucleotide
ctgaacgaagtgctattacggacccacttg

SEQ ID NO: 50596 - DNA, 30 bp, Artificial Sequence
  Synthetic oligonucleotide
tgaaagaggaaaagacctccgcaatacttg

SEQ ID NO: 50597 - DNA, 30 bp, Artificial Sequence
  Synthetic oligonucleotide
gcaatgaggctaattgagcgggattacttg

SEQ ID NO: 50598 - DNA, 30 bp, Artificial Sequence
  Synthetic oligonucleotide
ggcgcataaaacctggttgccatgtccttg

SEQ ID NO: 50599 - DNA, 30 bp, Artificial Sequence
  Synthetic oligonucleotide
ccacaatcgacgacttgacacagaggcttg

SEQ ID NO: 50600 - DNA, 30 bp, Artificial Sequence
  Synthetic oligonucleotide
tggtgaccatgtataatccgagccggcttg

SEQ ID NO: 50601 - DNA, 30 bp, Artificial Sequence
  Synthetic oligonucleotide
acccactaatgataaactaagaatggcttg

SEQ ID NO: 50602 - DNA, 30 bp, Artificial Sequence
  Synthetic oligonucleotide
gggtcacacgggacattctaccattgcttg

SEQ ID NO: 50603 - DNA, 30 bp, Artificial Sequence
  Synthetic oligonucleotide
ggggatcgggctagtaccggggagatcttg

SEQ ID NO: 50604 - DNA, 30 bp, Artificial Sequence
  Synthetic oligonucleotide
accaaagctatattaaagaatgtgatcttg

SEQ ID NO: 50605 - DNA, 30 bp, Artificial Sequence
  Synthetic oligonucleotide
atgggtaccagcctatgtgtgtcagagttg

SEQ ID NO: 50606 - DNA, 30 bp, Artificial Sequence
  Synthetic oligonucleotide
ttgagcaggcggtgattaggtgaatagttg

SEQ ID NO: 50607 - DNA, 30 bp, Artificial Sequence
  Synthetic oligonucleotide
tcggttgaaatatcggtaacccgctagttg

SEQ ID NO: 50608 - DNA, 30 bp, Artificial Sequence
  Synthetic oligonucleotide
gttcggtgtataaatggagctcgaacgttg

SEQ ID NO: 50609 - DNA, 30 bp, Artificial Sequence
  Synthetic oligonucleotide
agagccgggacacatacagtgcatacgttg

SEQ ID NO: 50610 - DNA, 30 bp, Artificial Sequence
  Synthetic oligonucleotide
gagaacgtctactaggatccgctaccgttg

SEQ ID NO: 50611 - DNA, 30 bp, Artificial Sequence
  Synthetic oligonucleotide
gcgaagagggggcactgtacatcatcgttg

SEQ ID NO: 50612 - DNA, 30 bp, Artificial Sequence
  Synthetic oligonucleotide
ctgcacggatacatatctaccgtagggttg

SEQ ID NO: 50613 - DNA, 30 bp, Artificial Sequence
  Synthetic oligonucleotide
gagaagatatcggaaatttgaaaggggttg

SEQ ID NO: 50614 - DNA, 30 bp, Artificial Sequence
  Synthetic oligonucleotide
cccagtaacaagtgaaactaaagggtgttg

SEQ ID NO: 50615 - DNA, 30 bp, Artificial Sequence
  Synthetic oligonucleotide
tgacgaagctggaactgtatcacgaatttg

SEQ ID NO: 50616 - DNA, 30 bp, Artificial Sequence
  Synthetic oligonucleotide
ctaaggctctacgtgcggacgaacgatttg

SEQ ID NO: 50617 - DNA, 30 bp, Artificial Sequence
  Synthetic oligonucleotide
ggtaatacgaagtgactctcatgatatttg

SEQ ID NO: 50618 - DNA, 30 bp, Artificial Sequence
  Synthetic oligonucleotide
agggtattaagacatggaagatagactttg

SEQ ID NO: 50619 - DNA, 30 bp, Artificial Sequence
  Synthetic oligonucleotide
atcggaaaattagagcaaatgcaatctttg

SEQ ID NO: 50620 - DNA, 30 bp, Artificial Sequence
  Synthetic oligonucleotide
agggtaaagacgcccttatacacaagtttg

SEQ ID NO: 50621 - DNA, 30 bp, Artificial Sequence
  Synthetic oligonucleotide
cgtcgaagtgttgggctacgagccagtttg

SEQ ID NO: 50622 - DNA, 30 bp, Artificial Sequence
  Synthetic oligonucleotide
ctggtagttgcaagggccatcagcagtttg

SEQ ID NO: 50623 - DNA, 30 bp, Artificial Sequence
  Synthetic oligonucleotide
gtgagtgtgatagtaagttagtgccgtttg

SEQ ID NO: 50624 - DNA, 30 bp, Artificial Sequence
  Synthetic oligonucleotide
caacgggaagtggctccaaggaggcgtttg

SEQ ID NO: 50625 - DNA, 30 bp, Artificial Sequence
  Synthetic oligonucleotide
tgtaaaggcagaaccgaatggcttggtttg

SEQ ID NO: 50626 - DNA, 30 bp, Artificial Sequence
  Synthetic oligonucleotide
cgtaaaccgacgtgcgttcggtggtgtttg

SEQ ID NO: 50627 - DNA, 30 bp, Artificial Sequence
  Synthetic oligonucleotide
acgagagtgcgaggtgctgaaggccttttg

SEQ ID NO: 50628 - DNA, 30 bp, Artificial Sequence
  Synthetic oligonucleotide
ggcgttcccccgcgtcaacatgagtttttg

SEQ ID NO: 50629 - DNA, 30 bp, Artificial Sequence
  Synthetic oligonucleotide
tctggtcgacaattcatgaaagcgaaaaat

SEQ ID NO: 50630 - DNA, 30 bp, Artificial Sequence
  Synthetic oligonucleotide
gcccgcatagggtgtgtgcgaactgaaaat

SEQ ID NO: 50631 - DNA, 30 bp, Artificial Sequence
  Synthetic oligonucleotide
tctcggcgatggtgccggccattagcaaat

SEQ ID NO: 50632 - DNA, 30 bp, Artificial Sequence
  Synthetic oligonucleotide
aataggaagattacagggtgaggcgcaaat

SEQ ID NO: 50633 - DNA, 30 bp, Artificial Sequence
  Synthetic oligonucleotide
gtaaggagtggaagaagatcaatgggaaat

SEQ ID NO: 50634 - DNA, 30 bp, Artificial Sequence
  Synthetic oligonucleotide
ttgaaacgggtggtaacactcattggaaat

SEQ ID NO: 50635 - DNA, 30 bp, Artificial Sequence
  Synthetic oligonucleotide
accggtcaacagagcaagtagacaataaat

SEQ ID NO: 50636 - DNA, 30 bp, Artificial Sequence
  Synthetic oligonucleotide
caacagatggaggcaacgggcgtaataaat

SEQ ID NO: 50637 - DNA, 30 bp, Artificial Sequence
  Synthetic oligonucleotide
tggacggttcgaacgttagttaggctaaat

SEQ ID NO: 50638 - DNA, 30 bp, Artificial Sequence
  Synthetic oligonucleotide
agagtcaagaggggccacataggcttaaat

SEQ ID NO: 50639 - DNA, 30 bp, Artificial Sequence
  Synthetic oligonucleotide
aaggtagacgactcgcccaaagtacacaat

SEQ ID NO: 50640 - DNA, 30 bp, Artificial Sequence
  Synthetic oligonucleotide
cgatcgtgcgcccgtcccagtggcgacaat

SEQ ID NO: 50641 - DNA, 30 bp, Artificial Sequence
  Synthetic oligonucleotide
acgcaagggtgagaacggcggatctacaat

SEQ ID NO: 50642 - DNA, 30 bp, Artificial Sequence
  Synthetic oligonucleotide
gctcagagggtaaccggcgtaacgtacaat

SEQ ID NO: 50643 - DNA, 30 bp, Artificial Sequence
  Synthetic oligonucleotide
tgggcttactgaaagaacatgtaggccaat

SEQ ID NO: 50644 - DNA, 30 bp, Artificial Sequence
  Synthetic oligonucleotide
aacaaggacatagtgtttatgagctccaat

SEQ ID NO: 50645 - DNA, 30 bp, Artificial Sequence
  Synthetic oligonucleotide
taaaagggataggacctaggccatgtcaat

SEQ ID NO: 50646 - DNA, 30 bp, Artificial Sequence
  Synthetic oligonucleotide
agcatacgctaagcctcaaaaacaaagaat

SEQ ID NO: 50647 - DNA, 30 bp, Artificial Sequence
  Synthetic oligonucleotide
taacgggcaagaaaggcgtctgataagaat

SEQ ID NO: 50648 - DNA, 30 bp, Artificial Sequence
  Synthetic oligonucleotide
cgaaatagctcgcacagataagggtagaat

SEQ ID NO: 50649 - DNA, 30 bp, Artificial Sequence
  Synthetic oligonucleotide
cgcaccggcggaaaccccgagcattagaat

SEQ ID NO: 50650 - DNA, 30 bp, Artificial Sequence
  Synthetic oligonucleotide
agtcgacgttgatggagatgctcaccgaat

SEQ ID NO: 50651 - DNA, 30 bp, Artificial Sequence
  Synthetic oligonucleotide
acaaacgacattggaagggggtcaccgaat

SEQ ID NO: 50652 - DNA, 30 bp, Artificial Sequence
  Synthetic oligonucleotide
ggcgaaggcccggtaacaatcagctcgaat

SEQ ID NO: 50653 - DNA, 30 bp, Artificial Sequence
  Synthetic oligonucleotide
gatacgagatacgtgagtgcaagcaggaat

SEQ ID NO: 50654 - DNA, 30 bp, Artificial Sequence
  Synthetic oligonucleotide
tcagggactggcttcagatcatggaggaat

SEQ ID NO: 50655 - DNA, 30 bp, Artificial Sequence
  Synthetic oligonucleotide
agatggggtggaaaatcccaaaaccggaat

SEQ ID NO: 50656 - DNA, 30 bp, Artificial Sequence
  Synthetic oligonucleotide
catgctaaagaggaaagggatgttcggaat

SEQ ID NO: 50657 - DNA, 30 bp, Artificial Sequence
  Synthetic oligonucleotide
caagctgtggtcaacgtatacctttggaat

SEQ ID NO: 50658 - DNA, 30 bp, Artificial Sequence
  Synthetic oligonucleotide
tcatgttgataaggtggtttggtttggaat

SEQ ID NO: 50659 - DNA, 30 bp, Artificial Sequence
  Synthetic oligonucleotide
ccggcaagggaatagaggggccgaatgaat

SEQ ID NO: 50660 - DNA, 30 bp, Artificial Sequence
  Synthetic oligonucleotide
ataggagctcataagaaggagggagtgaat

SEQ ID NO: 50661 - DNA, 30 bp, Artificial Sequence
  Synthetic oligonucleotide
taacaccgtaataagatacgattcgtgaat

SEQ ID NO: 50662 - DNA, 30 bp, Artificial Sequence
  Synthetic oligonucleotide
gcatgagtaattccaaacggtcacgataat

SEQ ID NO: 50663 - DNA, 30 bp, Artificial Sequence
  Synthetic oligonucleotide
gatcgagaaagttgaatatcacaatataat

SEQ ID NO: 50664 - DNA, 30 bp, Artificial Sequence
  Synthetic oligonucleotide
acagagggaagggtaggtggtggatataat

SEQ ID NO: 50665 - DNA, 30 bp, Artificial Sequence
  Synthetic oligonucleotide
gatcggaccaagataagataattttataat

SEQ ID NO: 50666 - DNA, 30 bp, Artificial Sequence
  Synthetic oligonucleotide
taggagagaaagccgagacataccactaat

SEQ ID NO: 50667 - DNA, 30 bp, Artificial Sequence
  Synthetic oligonucleotide
cgaagaggaattttgtacccaccgcctaat

SEQ ID NO: 50668 - DNA, 30 bp, Artificial Sequence
  Synthetic oligonucleotide
aggacggccggaagccgaataatggctaat

SEQ ID NO: 50669 - DNA, 30 bp, Artificial Sequence
  Synthetic oligonucleotide
cgcgcgatggtgacaaaaaatcaatctaat

SEQ ID NO: 50670 - DNA, 30 bp, Artificial Sequence
  Synthetic oligonucleotide
cgagcattggagcaatgagtggggcttaat

SEQ ID NO: 50671 - DNA, 30 bp, Artificial Sequence
  Synthetic oligonucleotide
acaaaaagaatgcgtgcaacttcagttaat

SEQ ID NO: 50672 - DNA, 30 bp, Artificial Sequence
  Synthetic oligonucleotide
cagtacgcgcgtcaagggactaccgttaat

SEQ ID NO: 50673 - DNA, 30 bp, Artificial Sequence
  Synthetic oligonucleotide
cgctggtcgggcacgttcgatgatgttaat

SEQ ID NO: 50674 - DNA, 30 bp, Artificial Sequence
  Synthetic oligonucleotide
ccagtgatagtggctgactgtgtgaaacat

SEQ ID NO: 50675 - DNA, 30 bp, Artificial Sequence
  Synthetic oligonucleotide
ccattggcaggggggtctactgaagaacat

SEQ ID NO: 50676 - DNA, 30 bp, Artificial Sequence
  Synthetic oligonucleotide
cctaacggaagtgctagactatacgaacat

SEQ ID NO: 50677 - DNA, 30 bp, Artificial Sequence
  Synthetic oligonucleotide
atcacgagtcacatgaaatagatctaacat

SEQ ID NO: 50678 - DNA, 30 bp, Artificial Sequence
  Synthetic oligonucleotide
cgttgccccggagaaaatcacgtgacacat

SEQ ID NO: 50679 - DNA, 30 bp, Artificial Sequence
  Synthetic oligonucleotide
aggagagccaccaccgaccaaccgccacat

SEQ ID NO: 50680 - DNA, 30 bp, Artificial Sequence
  Synthetic oligonucleotide
ataggtccccacggatagataacagcacat

SEQ ID NO: 50681 - DNA, 30 bp, Artificial Sequence
  Synthetic oligonucleotide
tggtaaacatgcgggattatcaattcacat

SEQ ID NO: 50682 - DNA, 30 bp, Artificial Sequence
  Synthetic oligonucleotide
acggggctagggaggattatttgcagacat

SEQ ID NO: 50683 - DNA, 30 bp, Artificial Sequence
  Synthetic oligonucleotide
cacgggaaacgtgggtctcggatcagacat

SEQ ID NO: 50684 - DNA, 30 bp, Artificial Sequence
  Synthetic oligonucleotide
tgaggcgacccaattagggataagagacat

SEQ ID NO: 50685 - DNA, 30 bp, Artificial Sequence
  Synthetic oligonucleotide
gaaacgaccgttatcagaggagtccgacat

SEQ ID NO: 50686 - DNA, 30 bp, Artificial Sequence
  Synthetic oligonucleotide
tgatagcgataactaggagacctaggacat

SEQ ID NO: 50687 - DNA, 30 bp, Artificial Sequence
  Synthetic oligonucleotide
aacctgagggacaataatgcacgatgacat

SEQ ID NO: 50688 - DNA, 30 bp, Artificial Sequence
  Synthetic oligonucleotide
taggtaccttgcgtacttacccagtgacat

SEQ ID NO: 50689 - DNA, 30 bp, Artificial Sequence
  Synthetic oligonucleotide
cagtgcgtcagggtaaacaggggttgacat

SEQ ID NO: 50690 - DNA, 30 bp, Artificial Sequence
  Synthetic oligonucleotide
caggggggttcattgagtggcgtaatacat

SEQ ID NO: 50691 - DNA, 30 bp, Artificial Sequence
  Synthetic oligonucleotide
tcggtccgaaccatatcggggacgatacat

SEQ ID NO: 50692 - DNA, 30 bp, Artificial Sequence
  Synthetic oligonucleotide
aggcagaattccgcatgcgtaactatacat

SEQ ID NO: 50693 - DNA, 30 bp, Artificial Sequence
  Synthetic oligonucleotide
cagaccaatgggagattgtggcgtatacat

SEQ ID NO: 50694 - DNA, 30 bp, Artificial Sequence
  Synthetic oligonucleotide
acaaacgaaaggggcgcaccaccagtacat

SEQ ID NO: 50695 - DNA, 30 bp, Artificial Sequence
  Synthetic oligonucleotide
tggcggggatatctaaatcatcttgtacat

SEQ ID NO: 50696 - DNA, 30 bp, Artificial Sequence
  Synthetic oligonucleotide
gacggactatggaagacaccacccacccat

SEQ ID NO: 50697 - DNA, 30 bp, Artificial Sequence
  Synthetic oligonucleotide
cgccacatgcctaatcaacctcagcgccat

SEQ ID NO: 50698 - DNA, 30 bp, Artificial Sequence
  Synthetic oligonucleotide
ttgcgacggaaggagtctggagggatccat

SEQ ID NO: 50699 - DNA, 30 bp, Artificial Sequence
  Synthetic oligonucleotide
accgagcaccgcaaaccgtgcaacctccat

SEQ ID NO: 50700 - DNA, 30 bp, Artificial Sequence
  Synthetic oligonucleotide
catgggcggtgaaagttcacgtggaagcat

SEQ ID NO: 50701 - DNA, 30 bp, Artificial Sequence
  Synthetic oligonucleotide
gagagcatgaaccgagtattgtaacagcat

SEQ ID NO: 50702 - DNA, 30 bp, Artificial Sequence
  Synthetic oligonucleotide
aaaccaccatcgccagggcgcgaggagcat

SEQ ID NO: 50703 - DNA, 30 bp, Artificial Sequence
  Synthetic oligonucleotide
caaaaggcatgaaacaatagtcagtagcat

SEQ ID NO: 50704 - DNA, 30 bp, Artificial Sequence
  Synthetic oligonucleotide
tccggaccggaaatcataaagtaaccgcat

SEQ ID NO: 50705 - DNA, 30 bp, Artificial Sequence
  Synthetic oligonucleotide
cctcaccataggggtaagtgaaggtggcat

SEQ ID NO: 50706 - DNA, 30 bp, Artificial Sequence
  Synthetic oligonucleotide
tgggctatgagagaaacatcgtggctgcat

SEQ ID NO: 50707 - DNA, 30 bp, Artificial Sequence
  Synthetic oligonucleotide
gacacgctacattccaagtcgaacaatcat

SEQ ID NO: 50708 - DNA, 30 bp, Artificial Sequence
  Synthetic oligonucleotide
tcgaaaatagacggaaccaaccccagtcat

SEQ ID NO: 50709 - DNA, 30 bp, Artificial Sequence
  Synthetic oligonucleotide
gaagaacatgatgcgatgatgaaacgtcat

SEQ ID NO: 50710 - DNA, 30 bp, Artificial Sequence
  Synthetic oligonucleotide
gggctagggacgaggtcaactgagcgtcat

SEQ ID NO: 50711 - DNA, 30 bp, Artificial Sequence
  Synthetic oligonucleotide
agcgtggaggcagaaagggatagcggtcat

SEQ ID NO: 50712 - DNA, 30 bp, Artificial Sequence
  Synthetic oligonucleotide
agaaaagcataatcccgtcgtgatcaagat

SEQ ID NO: 50713 - DNA, 30 bp, Artificial Sequence
  Synthetic oligonucleotide
cggacatcgattacttaactcagagaagat

SEQ ID NO: 50714 - DNA, 30 bp, Artificial Sequence
  Synthetic oligonucleotide
ggaacactggtctagtgacgttcataagat

SEQ ID NO: 50715 - DNA, 30 bp, Artificial Sequence
  Synthetic oligonucleotide
gagggggcctctacggggagagcgtaagat

SEQ ID NO: 50716 - DNA, 30 bp, Artificial Sequence
  Synthetic oligonucleotide
agaaaggtacacgcaacagaaatgacagat

SEQ ID NO: 50717 - DNA, 30 bp, Artificial Sequence
  Synthetic oligonucleotide
catgggatcagactgtgttttggtacagat

SEQ ID NO: 50718 - DNA, 30 bp, Artificial Sequence
  Synthetic oligonucleotide
ttatgagcagacggtgtcactagaccagat

SEQ ID NO: 50719 - DNA, 30 bp, Artificial Sequence
  Synthetic oligonucleotide
tgtgatcgcttaccgttactttggccagat

SEQ ID NO: 50720 - DNA, 30 bp, Artificial Sequence
  Synthetic oligonucleotide
cacaagattaatcatatatcattagcagat

SEQ ID NO: 50721 - DNA, 30 bp, Artificial Sequence
  Synthetic oligonucleotide
gaggggttggatccgttagaaacggcagat

SEQ ID NO: 50722 - DNA, 30 bp, Artificial Sequence
  Synthetic oligonucleotide
ccagatcacggcgcgtgaccatgctcagat

SEQ ID NO: 50723 - DNA, 30 bp, Artificial Sequence
  Synthetic oligonucleotide
tagttcggacgcggtatggtcgagtcagat

SEQ ID NO: 50724 - DNA, 30 bp, Artificial Sequence
  Synthetic oligonucleotide
cgataacacaatgaagccataagaagagat

SEQ ID NO: 50725 - DNA, 30 bp, Artificial Sequence
  Synthetic oligonucleotide
tacgtttaaagtgacagacactgaagagat

SEQ ID NO: 50726 - DNA, 30 bp, Artificial Sequence
  Synthetic oligonucleotide
ctgcatagagctgatgccaggggccgagat

SEQ ID NO: 50727 - DNA, 30 bp, Artificial Sequence
  Synthetic oligonucleotide
ggggacactaatgaaaaatagtaaggagat

SEQ ID NO: 50728 - DNA, 30 bp, Artificial Sequence
  Synthetic oligonucleotide
aagcggaaccggttagagtggccaatagat

SEQ ID NO: 50729 - DNA, 30 bp, Artificial Sequence
  Synthetic oligonucleotide
gaaggtgactactgtagccgaatcatagat

SEQ ID NO: 50730 - DNA, 30 bp, Artificial Sequence
  Synthetic oligonucleotide
cagcgtgtgagagcagcaggaacactagat

SEQ ID NO: 50731 - DNA, 30 bp, Artificial Sequence
  Synthetic oligonucleotide
gttggacgtataaacggcgggatactagat

SEQ ID NO: 50732 - DNA, 30 bp, Artificial Sequence
  Synthetic oligonucleotide
aggttaccgtaaagcctgcacaagctagat

SEQ ID NO: 50733 - DNA, 30 bp, Artificial Sequence
  Synthetic oligonucleotide
gcatgggtgagcaacagcggtcccgtagat

SEQ ID NO: 50734 - DNA, 30 bp, Artificial Sequence
  Synthetic oligonucleotide
ggttgagagtggttggctgcatcctacgat

SEQ ID NO: 50735 - DNA, 30 bp, Artificial Sequence
  Synthetic oligonucleotide
gaaggtccgattaaagattttaaacccgat

SEQ ID NO: 50736 - DNA, 30 bp, Artificial Sequence
  Synthetic oligonucleotide
attacgcctgtgaacaagaatcatgccgat

SEQ ID NO: 50737 - DNA, 30 bp, Artificial Sequence
  Synthetic oligonucleotide
cgccacggaaaccggttggtgcgaagcgat

SEQ ID NO: 50738 - DNA, 30 bp, Artificial Sequence
  Synthetic oligonucleotide
cgctaggaattagattttccgagcagcgat

SEQ ID NO: 50739 - DNA, 30 bp, Artificial Sequence
  Synthetic oligonucleotide
aacgtaagtgttgaacagagtgcacgcgat

SEQ ID NO: 50740 - DNA, 31 bp, Artificial Sequence
  Synthetic oligonucleotide
ccacagaggatggttaacgcgagcgcgcgat

SEQ ID NO: 50741 - DNA, 30 bp, Artificial Sequence
  Synthetic oligonucleotide
tgacagggtcagagacgtattattcgcgat

SEQ ID NO: 50742 - DNA, 30 bp, Artificial Sequence
  Synthetic oligonucleotide
gcaacagtcagggatacgagtagcggcgat

SEQ ID NO: 50743 - DNA, 30 bp, Artificial Sequence
  Synthetic oligonucleotide
cgagatagtggttcacagcatgtctgcgat

SEQ ID NO: 50744 - DNA, 30 bp, Artificial Sequence
  Synthetic oligonucleotide
cgtaaaggaacgccatcactccagtgcgat

SEQ ID NO: 50745 - DNA, 30 bp, Artificial Sequence
  Synthetic oligonucleotide
gatccagaaagaagaaggaaatggtgcgat

SEQ ID NO: 50746 - DNA, 30 bp, Artificial Sequence
  Synthetic oligonucleotide
cattaattacttgtctcacgaaacatcgat

SEQ ID NO: 50747 - DNA, 30 bp, Artificial Sequence
  Synthetic oligonucleotide
tggaatgtctcggtgcaaagcgaactcgat

SEQ ID NO: 50748 - DNA, 30 bp, Artificial Sequence
  Synthetic oligonucleotide
gcgtgtgatggcgaaaaacatccactcgat

SEQ ID NO: 50749 - DNA, 30 bp, Artificial Sequence
  Synthetic oligonucleotide
tgaacaacgggacttcagaacaacgtcgat

SEQ ID NO: 50750 - DNA, 30 bp, Artificial Sequence
  Synthetic oligonucleotide
ggtgcaagacgagttcaattgttcttcgat

SEQ ID NO: 50751 - DNA, 30 bp, Artificial Sequence
  Synthetic oligonucleotide
tctctgggcacagacaaatcgggacaggat

SEQ ID NO: 50752 - DNA, 30 bp, Artificial Sequence
  Synthetic oligonucleotide
cagaggaagccgtgtcatcgttactaggat

SEQ ID NO: 50753 - DNA, 30 bp, Artificial Sequence
  Synthetic oligonucleotide
gcaaaaatgagtcagcggcatagaacggat

SEQ ID NO: 50754 - DNA, 30 bp, Artificial Sequence
  Synthetic oligonucleotide
actcaaatcgaggcatatgtggaaagggat

SEQ ID NO: 50755 - DNA, 30 bp, Artificial Sequence
  Synthetic oligonucleotide
gaagatctggaatccgatgaaagcagggat

SEQ ID NO: 50756 - DNA, 30 bp, Artificial Sequence
  Synthetic oligonucleotide
gaaataacgcgatcgtcacttcagagggat

SEQ ID NO: 50757 - DNA, 30 bp, Artificial Sequence
  Synthetic oligonucleotide
gcgatcgtgcggaaatgctagtgatgggat

SEQ ID NO: 50758 - DNA, 30 bp, Artificial Sequence
  Synthetic oligonucleotide
tgggccagtgaaacggataggcagatggat

SEQ ID NO: 50759 - DNA, 30 bp, Artificial Sequence
  Synthetic oligonucleotide
acaataccgaacgggtgcagggcgaatgat

SEQ ID NO: 50760 - DNA, 30 bp, Artificial Sequence
  Synthetic oligonucleotide
tgaaagggtaggggaggtatccggaatgat

SEQ ID NO: 50761 - DNA, 30 bp, Artificial Sequence
  Synthetic oligonucleotide
ggacagttccaaacacgcgtaagccctgat

SEQ ID NO: 50762 - DNA, 30 bp, Artificial Sequence
  Synthetic oligonucleotide
aatcaaatatcaggagtagagtgggctgat

SEQ ID NO: 50763 - DNA, 30 bp, Artificial Sequence
  Synthetic oligonucleotide
catgactacaccatacgttaaacctctgat

SEQ ID NO: 50764 - DNA, 30 bp, Artificial Sequence
  Synthetic oligonucleotide
ggcggtaggtacggctattaagcgagtgat

SEQ ID NO: 50765 - DNA, 30 bp, Artificial Sequence
  Synthetic oligonucleotide
gtccgactttcgaaatggtccgcgagtgat

SEQ ID NO: 50766 - DNA, 30 bp, Artificial Sequence
  Synthetic oligonucleotide
cacccaatcgagcacatgggtccacgtgat

SEQ ID NO: 50767 - DNA, 30 bp, Artificial Sequence
  Synthetic oligonucleotide
gtgtcaggggaaggcaaacgaccatttgat

SEQ ID NO: 50768 - DNA, 30 bp, Artificial Sequence
  Synthetic oligonucleotide
gactcatcgattatgagggaaagtaaatat

SEQ ID NO: 50769 - DNA, 30 bp, Artificial Sequence
  Synthetic oligonucleotide
ggcgccggtgatagcactgacatacaatat

SEQ ID NO: 50770 - DNA, 30 bp, Artificial Sequence
  Synthetic oligonucleotide
cgtgggcgggctgagatatgtatccaatat

SEQ ID NO: 50771 - DNA, 30 bp, Artificial Sequence
  Synthetic oligonucleotide
acgggggaaaaaggatggcacatctaatat

SEQ ID NO: 50772 - DNA, 30 bp, Artificial Sequence
  Synthetic oligonucleotide
aggctatcatcccgacgtcccactacatat

SEQ ID NO: 50773 - DNA, 30 bp, Artificial Sequence
  Synthetic oligonucleotide
agcgcagaaccagggcatgttggtgcatat

SEQ ID NO: 50774 - DNA, 30 bp, Artificial Sequence
  Synthetic oligonucleotide
acgcgggactccgtagaaagccaatcatat

SEQ ID NO: 50775 - DNA, 30 bp, Artificial Sequence
  Synthetic oligonucleotide
gcgtgacctcaagacaggctatggcgatat

SEQ ID NO: 50776 - DNA, 31 bp, Artificial Sequence
  Synthetic oligonucleotide
tgccaggcgaggcgtagcgcgcagatgatat

SEQ ID NO: 50777 - DNA, 30 bp, Artificial Sequence
  Synthetic oligonucleotide
tgggcggggtgctgtgaaggggcgtgatat

SEQ ID NO: 50778 - DNA, 30 bp, Artificial Sequence
  Synthetic oligonucleotide
aaggttgagcaagagtcctggcattgatat

SEQ ID NO: 50779 - DNA, 30 bp, Artificial Sequence
  Synthetic oligonucleotide
agcgtgaggggaagagatactactgtatat

SEQ ID NO: 50780 - DNA, 30 bp, Artificial Sequence
  Synthetic oligonucleotide
ccacaacgaaaagattagaacgcgaactat

SEQ ID NO: 50781 - DNA, 30 bp, Artificial Sequence
  Synthetic oligonucleotide
agtcagagaacgacgtgtggggctaactat

SEQ ID NO: 50782 - DNA, 30 bp, Artificial Sequence
  Synthetic oligonucleotide
ggcccagagagcaatgactcccgtaactat

SEQ ID NO: 50783 - DNA, 30 bp, Artificial Sequence
  Synthetic oligonucleotide
gactgagagcagagagataagcgtcactat

SEQ ID NO: 50784 - DNA, 30 bp, Artificial Sequence
  Synthetic oligonucleotide
taacaatggcaacacattcgcagctactat

SEQ ID NO: 50785 - DNA, 30 bp, Artificial Sequence
  Synthetic oligonucleotide
ggcgacggaaggcatcatgactattactat

SEQ ID NO: 50786 - DNA, 30 bp, Artificial Sequence
  Synthetic oligonucleotide
agtataccgaactgaatccagaccacctat

SEQ ID NO: 50787 - DNA, 30 bp, Artificial Sequence
  Synthetic oligonucleotide
aagggcgtagaggatatcactagaccctat

SEQ ID NO: 50788 - DNA, 30 bp, Artificial Sequence
  Synthetic oligonucleotide
gaagacgtgcgcctagtaactggaccctat

SEQ ID NO: 50789 - DNA, 30 bp, Artificial Sequence
  Synthetic oligonucleotide
gaacacttccccgaaatgagaactagctat

SEQ ID NO: 50790 - DNA, 30 bp, Artificial Sequence
  Synthetic oligonucleotide
taacacacataaaaaaggaccaaagtctat

SEQ ID NO: 50791 - DNA, 30 bp, Artificial Sequence
  Synthetic oligonucleotide
agaggatgaggcaagaatgctggggtctat

SEQ ID NO: 50792 - DNA, 30 bp, Artificial Sequence
  Synthetic oligonucleotide
cgaggcatcaccctcagaatgatgtagtat

SEQ ID NO: 50793 - DNA, 30 bp, Artificial Sequence
  Synthetic oligonucleotide
gctagaggacagtgatatggtacaacgtat

SEQ ID NO: 50794 - DNA, 30 bp, Artificial Sequence
  Synthetic oligonucleotide
caacctgccaatgagagcctccccacgtat

SEQ ID NO: 50795 - DNA, 30 bp, Artificial Sequence
  Synthetic oligonucleotide
aagggtgcagacagagagcatgcgacgtat

SEQ ID NO: 50796 - DNA, 30 bp, Artificial Sequence
  Synthetic oligonucleotide
catcagttgtagatgtgactaggaccgtat

SEQ ID NO: 50797 - DNA, 30 bp, Artificial Sequence
  Synthetic oligonucleotide
atattgggcgcgtgtgatctcagaaggtat

SEQ ID NO: 50798 - DNA, 30 bp, Artificial Sequence
  Synthetic oligonucleotide
accactgggcgggaataaagaatcaggtat

SEQ ID NO: 50799 - DNA, 30 bp, Artificial Sequence
  Synthetic oligonucleotide
tgacttggaggtacctcaacttagcggtat

SEQ ID NO: 50800 - DNA, 30 bp, Artificial Sequence
  Synthetic oligonucleotide
cgggcgtaaggcggcagattatatgggtat

SEQ ID NO: 50801 - DNA, 30 bp, Artificial Sequence
  Synthetic oligonucleotide
agagcaagtgtaattcgtggggcatggtat

SEQ ID NO: 50802 - DNA, 30 bp, Artificial Sequence
  Synthetic oligonucleotide
cacgagtacgggcccgaaagtgtgtggtat

SEQ ID NO: 50803 - DNA, 30 bp, Artificial Sequence
  Synthetic oligonucleotide
tcataagcagagcaggatttgtaaatgtat

SEQ ID NO: 50804 - DNA, 30 bp, Artificial Sequence
  Synthetic oligonucleotide
ggatgtgttcaaatagcaggccgaatgtat

SEQ ID NO: 50805 - DNA, 30 bp, Artificial Sequence
  Synthetic oligonucleotide
cgtagcgcagggagcagcttagtaatgtat

SEQ ID NO: 50806 - DNA, 30 bp, Artificial Sequence
  Synthetic oligonucleotide
tccacggaaaaatccaggcagactatgtat

SEQ ID NO: 50807 - DNA, 39 bp, Artificial Sequence
  Synthetic oligonucleotide
tctttcgtcttgttatgtattgttcgtcttgttatgtat

SEQ ID NO: 50808 - DNA, 30 bp, Artificial Sequence
  Synthetic oligonucleotide
tcttatctgttgtgttttccgcttgtgtat

SEQ ID NO: 50809 - DNA, 30 bp, Artificial Sequence
  Synthetic oligonucleotide
aggtacgtaaaccgggacacaattaattat

SEQ ID NO: 50810 - DNA, 30 bp, Artificial Sequence
  Synthetic oligonucleotide
acggcaatgaacgtagagttatagagttat

SEQ ID NO: 50811 - DNA, 30 bp, Artificial Sequence
  Synthetic oligonucleotide
cagccaaaagaaggacgaattcgctgttat

SEQ ID NO: 50812 - DNA, 30 bp, Artificial Sequence
  Synthetic oligonucleotide
tgcgggcgaatctccaattctgatatttat

SEQ ID NO: 50813 - DNA, 30 bp, Artificial Sequence
  Synthetic oligonucleotide
tcgaggatggttcgttttggtccgctttat

SEQ ID NO: 50814 - DNA, 30 bp, Artificial Sequence
  Synthetic oligonucleotide
cggtacaggcgcccataggagtgaaaaact

SEQ ID NO: 50815 - DNA, 30 bp, Artificial Sequence
  Synthetic oligonucleotide
tcatcaggtgagggtgtgcgtcccacaact

SEQ ID NO: 50816 - DNA, 30 bp, Artificial Sequence
  Synthetic oligonucleotide
cgaaacggacacttgcggaccgtgacaact

SEQ ID NO: 50817 - DNA, 30 bp, Artificial Sequence
  Synthetic oligonucleotide
attgtacttcatcagagggcgggtcgaact

SEQ ID NO: 50818 - DNA, 30 bp, Artificial Sequence
  Synthetic oligonucleotide
cgcctagactatatcaggaccagaggaact

SEQ ID NO: 50819 - DNA, 30 bp, Artificial Sequence
  Synthetic oligonucleotide
cacgtacgagaccatcacatctatataact

SEQ ID NO: 50820 - DNA, 30 bp, Artificial Sequence
  Synthetic oligonucleotide
gcataggctgatcgaacttagtacctaact

SEQ ID NO: 50821 - DNA, 30 bp, Artificial Sequence
  Synthetic oligonucleotide
agagcgctaggaaaatcgcgtcgtctaact

SEQ ID NO: 50822 - DNA, 30 bp, Artificial Sequence
  Synthetic oligonucleotide
gagacaaatcgtggttaaaggccggtaact

SEQ ID NO: 50823 - DNA, 30 bp, Artificial Sequence
  Synthetic oligonucleotide
caaccgagcctagaattagtcagatacact

SEQ ID NO: 50824 - DNA, 30 bp, Artificial Sequence
  Synthetic oligonucleotide
ggcggccaagtctatgaacgaacacccact

SEQ ID NO: 50825 - DNA, 30 bp, Artificial Sequence
  Synthetic oligonucleotide
gtagtgaatgggggaggtccaatgcgcact

SEQ ID NO: 50826 - DNA, 30 bp, Artificial Sequence
  Synthetic oligonucleotide
atgatacccgtacaccaagcgagggagact

SEQ ID NO: 50827 - DNA, 30 bp, Artificial Sequence
  Synthetic oligonucleotide
acatgggaaagaactaacacgtgttagact

SEQ ID NO: 50828 - DNA, 30 bp, Artificial Sequence
  Synthetic oligonucleotide
tgaggggatttggacttgggcaaaacgact

SEQ ID NO: 50829 - DNA, 30 bp, Artificial Sequence
  Synthetic oligonucleotide
acaattgacaccacggtgcgaaagaggact

SEQ ID NO: 50830 - DNA, 30 bp, Artificial Sequence
  Synthetic oligonucleotide
ccagggaacggacttaagtgctcggggact

SEQ ID NO: 50831 - DNA, 30 bp, Artificial Sequence
  Synthetic oligonucleotide
aggatactgtctgtggatgaattttggact

SEQ ID NO: 50832 - DNA, 30 bp, Artificial Sequence
  Synthetic oligonucleotide
gcgcggtccgaaagagagtgaaccatgact

SEQ ID NO: 50833 - DNA, 30 bp, Artificial Sequence
  Synthetic oligonucleotide
tagggtaataggaaggtgagtcgggtgact

SEQ ID NO: 50834 - DNA, 30 bp, Artificial Sequence
  Synthetic oligonucleotide
agcttgaaccatcgatgaagaaaaagtact

SEQ ID NO: 50835 - DNA, 30 bp, Artificial Sequence
  Synthetic oligonucleotide
aaccagaggctcaggacaggtaacagtact

SEQ ID NO: 50836 - DNA, 30 bp, Artificial Sequence
  Synthetic oligonucleotide
aggatgaaacggtagcgctaatcgcgtact

SEQ ID NO: 50837 - DNA, 30 bp, Artificial Sequence
  Synthetic oligonucleotide
gaaaccagatgggaaaacgccgggcgtact

SEQ ID NO: 50838 - DNA, 30 bp, Artificial Sequence
  Synthetic oligonucleotide
gtacacacgggatggaggggctaatgtact

SEQ ID NO: 50839 - DNA, 30 bp, Artificial Sequence
  Synthetic oligonucleotide
acgagaagccggactgacgaaggagttact

SEQ ID NO: 50840 - DNA, 30 bp, Artificial Sequence
  Synthetic oligonucleotide
ggggctagatcaaggaagtagacgtttact

SEQ ID NO: 50841 - DNA, 30 bp, Artificial Sequence
  Synthetic oligonucleotide
ccaagctgaaaagctaaaaagcctcaacct

SEQ ID NO: 50842 - DNA, 30 bp, Artificial Sequence
  Synthetic oligonucleotide
agggccgggatgccctcccaacgctaacct

SEQ ID NO: 50843 - DNA, 30 bp, Artificial Sequence
  Synthetic oligonucleotide
caagatccagcggacggaacctcttaacct

SEQ ID NO: 50844 - DNA, 30 bp, Artificial Sequence
  Synthetic oligonucleotide
tgaacgggaagcccaacgagggagccacct

SEQ ID NO: 50845 - DNA, 30 bp, Artificial Sequence
  Synthetic oligonucleotide
ccgtaatctaagggtgtaagactagcacct

SEQ ID NO: 50846 - DNA, 30 bp, Artificial Sequence
  Synthetic oligonucleotide
tcgagaactcgggcgaagtaggtagcacct

SEQ ID NO: 50847 - DNA, 30 bp, Artificial Sequence
  Synthetic oligonucleotide
tgcgtctgatagtgaggaaccaagttacct

SEQ ID NO: 50848 - DNA, 30 bp, Artificial Sequence
  Synthetic oligonucleotide
aggaacacctccctaccggtgaccaaccct

SEQ ID NO: 50849 - DNA, 30 bp, Artificial Sequence
  Synthetic oligonucleotide
ggtagctacaggactaggtcaacacaccct

SEQ ID NO: 50850 - DNA, 30 bp, Artificial Sequence
  Synthetic oligonucleotide
agggacattccttcaaaggcgaccccccct

SEQ ID NO: 50851 - DNA, 30 bp, Artificial Sequence
  Synthetic oligonucleotide
agtgaaattaagactgagcggatcgcccct

SEQ ID NO: 50852 - DNA, 30 bp, Artificial Sequence
  Synthetic oligonucleotide
cagaggtgtcctggtgagatgtgaagccct

SEQ ID NO: 50853 - DNA, 30 bp, Artificial Sequence
  Synthetic oligonucleotide
catgaatgcgtaaagacgacgatgtgccct

SEQ ID NO: 50854 - DNA, 30 bp, Artificial Sequence
  Synthetic oligonucleotide
aacgtggagataccgcacacattccagcct

SEQ ID NO: 50855 - DNA, 30 bp, Artificial Sequence
  Synthetic oligonucleotide
cgattgaccatgtatcaactacaagcgcct

SEQ ID NO: 50856 - DNA, 30 bp, Artificial Sequence
  Synthetic oligonucleotide
atgtaagaaaagaaggtgggcgtatcgcct

SEQ ID NO: 50857 - DNA, 30 bp, Artificial Sequence
  Synthetic oligonucleotide
aggtgaccataaacctatataggagggcct

SEQ ID NO: 50858 - DNA, 30 bp, Artificial Sequence
  Synthetic oligonucleotide
tcgagacgtacagggtgtatgagcatgcct

SEQ ID NO: 50859 - DNA, 30 bp, Artificial Sequence
  Synthetic oligonucleotide
atacacggaaggtagcggatgtcgatgcct

SEQ ID NO: 50860 - DNA, 30 bp, Artificial Sequence
  Synthetic oligonucleotide
catggaatacccaaattcccaaagttgcct

SEQ ID NO: 50861 - DNA, 30 bp, Artificial Sequence
  Synthetic oligonucleotide
aggacaatagggaatgggctctagactcct

SEQ ID NO: 50862 - DNA, 30 bp, Artificial Sequence
  Synthetic oligonucleotide
gagacccatgccgtatcggggcggcctcct

SEQ ID NO: 50863 - DNA, 30 bp, Artificial Sequence
  Synthetic oligonucleotide
tgacgcgggagttgtcactggaggggtcct

SEQ ID NO: 50864 - DNA, 30 bp, Artificial Sequence
  Synthetic oligonucleotide
tggtaggaaaatgaaagcgaaggcaaagct

SEQ ID NO: 50865 - DNA, 30 bp, Artificial Sequence
  Synthetic oligonucleotide
gggggagttcgtacaagtatagtacaagct

SEQ ID NO: 50866 - DNA, 30 bp, Artificial Sequence
  Synthetic oligonucleotide
agggcagaacacacaatcaccactgaagct

SEQ ID NO: 50867 - DNA, 30 bp, Artificial Sequence
  Synthetic oligonucleotide
actccaggagtgaggtcacagagaccagct

SEQ ID NO: 50868 - DNA, 30 bp, Artificial Sequence
  Synthetic oligonucleotide
cacggaatgtaacatcgttgccgtgcagct

SEQ ID NO: 50869 - DNA, 30 bp, Artificial Sequence
  Synthetic oligonucleotide
accaggcggaaactcccatcgtgatcagct

SEQ ID NO: 50870 - DNA, 30 bp, Artificial Sequence
  Synthetic oligonucleotide
gacttacaggccggtaggcaacggtcagct

SEQ ID NO: 50871 - DNA, 30 bp, Artificial Sequence
  Synthetic oligonucleotide
agggtatgacactgcttacgtcgaatagct

SEQ ID NO: 50872 - DNA, 30 bp, Artificial Sequence
  Synthetic oligonucleotide
agacctggtgagagcaacgacgatttagct

SEQ ID NO: 50873 - DNA, 30 bp, Artificial Sequence
  Synthetic oligonucleotide
aaggagggaaacagacggccacttcacgct

SEQ ID NO: 50874 - DNA, 30 bp, Artificial Sequence
  Synthetic oligonucleotide
gtaacacggaaatggccaccttgctacgct

SEQ ID NO: 50875 - DNA, 30 bp, Artificial Sequence
  Synthetic oligonucleotide
ggtggaggacctgtacgactactcgccgct

SEQ ID NO: 50876 - DNA, 30 bp, Artificial Sequence
  Synthetic oligonucleotide
gtaccgtgggaagaccagatgtaaagcgct

SEQ ID NO: 50877 - DNA, 30 bp, Artificial Sequence
  Synthetic oligonucleotide
gtatgaaagaaggagtgcgagcatttcgct

SEQ ID NO: 50878 - DNA, 30 bp, Artificial Sequence
  Synthetic oligonucleotide
aacgtctccactcaatctagcgggaaggct

SEQ ID NO: 50879 - DNA, 30 bp, Artificial Sequence
  Synthetic oligonucleotide
agcgggggccacttagcagcgagacaggct

SEQ ID NO: 50880 - DNA, 30 bp, Artificial Sequence
  Synthetic oligonucleotide
cggtagtcgacctaaccgatggtgtaggct

SEQ ID NO: 50881 - DNA, 30 bp, Artificial Sequence
  Synthetic oligonucleotide
cgcggagcaccgtagtgtcgcatttaggct

SEQ ID NO: 50882 - DNA, 30 bp, Artificial Sequence
  Synthetic oligonucleotide
caacggtccaaaccctcgatttacccggct

SEQ ID NO: 50883 - DNA, 30 bp, Artificial Sequence
  Synthetic oligonucleotide
gcgaccagcataatagtgatgtagccggct

SEQ ID NO: 50884 - DNA, 30 bp, Artificial Sequence
  Synthetic oligonucleotide
ctcaaacgatgaagaacgaccacgccggct

SEQ ID NO: 50885 - DNA, 30 bp, Artificial Sequence
  Synthetic oligonucleotide
tgcaatgcaaggactgaagggagagcggct

SEQ ID NO: 50886 - DNA, 30 bp, Artificial Sequence
  Synthetic oligonucleotide
cagctaagaaaagaagagactatgtcggct

SEQ ID NO: 50887 - DNA, 30 bp, Artificial Sequence
  Synthetic oligonucleotide
gacctgaggtaaggtagaattcggatggct

SEQ ID NO: 50888 - DNA, 29 bp, Artificial Sequence
  Synthetic oligonucleotide
agagaaccaaaccctgaggataggtggct

SEQ ID NO: 50889 - DNA, 30 bp, Artificial Sequence
  Synthetic oligonucleotide
tctcaggggacgcctaaactatatcatgct

SEQ ID NO: 50890 - DNA, 30 bp, Artificial Sequence
  Synthetic oligonucleotide
acgttcgcacgcggaacatacagcgctgct

SEQ ID NO: 50891 - DNA, 31 bp, Artificial Sequence
  Synthetic oligonucleotide
tatgggggcccaaaataaaactcatcgtgct

SEQ ID NO: 50892 - DNA, 30 bp, Artificial Sequence
  Synthetic oligonucleotide
aggctcacaactagtcatatggattgtgct

SEQ ID NO: 50893 - DNA, 30 bp, Artificial Sequence
  Synthetic oligonucleotide
gcattgagagcagtgcacaccggaaaatct

SEQ ID NO: 50894 - DNA, 30 bp, Artificial Sequence
  Synthetic oligonucleotide
cgaagacgagatgagacgtatttacaatct

SEQ ID NO: 50895 - DNA, 30 bp, Artificial Sequence
  Synthetic oligonucleotide
ggtcgaagtaatctataccgccaagaatct

SEQ ID NO: 50896 - DNA, 30 bp, Artificial Sequence
  Synthetic oligonucleotide
gaaggcaaatcagccatggtccgaagatct

SEQ ID NO: 50897 - DNA, 30 bp, Artificial Sequence
  Synthetic oligonucleotide
cgtgacctcacgttaaattgatccagatct

SEQ ID NO: 50898 - DNA, 30 bp, Artificial Sequence
  Synthetic oligonucleotide
cacggcaatagccaggttgatttcagatct

SEQ ID NO: 50899 - DNA, 30 bp, Artificial Sequence
  Synthetic oligonucleotide
gacgggtgacgatccataagagcgcgatct

SEQ ID NO: 50900 - DNA, 30 bp, Artificial Sequence
  Synthetic oligonucleotide
acttactgtccagagaatagtcaaatatct

SEQ ID NO: 50901 - DNA, 30 bp, Artificial Sequence
  Synthetic oligonucleotide
cgcgtacaagcacaggataaacagttatct

SEQ ID NO: 50902 - DNA, 30 bp, Artificial Sequence
  Synthetic oligonucleotide
gtggataagacggcgaacttcgagacctct

SEQ ID NO: 50903 - DNA, 30 bp, Artificial Sequence
  Synthetic oligonucleotide
aatggtgctcataggattaaaagcgagtct

SEQ ID NO: 50904 - DNA, 30 bp, Artificial Sequence
  Synthetic oligonucleotide
agcggtactaccaacgagaatagggcgtct

SEQ ID NO: 50905 - DNA, 30 bp, Artificial Sequence
  Synthetic oligonucleotide
acaaaattggtcccctcctcatcgtcgtct

SEQ ID NO: 50906 - DNA, 30 bp, Artificial Sequence
  Synthetic oligonucleotide
gtgatgtcaaatcaacggtgcgtacggtct

SEQ ID NO: 50907 - DNA, 30 bp, Artificial Sequence
  Synthetic oligonucleotide
atgcgtccgaagtagggcgggagctggtct

SEQ ID NO: 50908 - DNA, 30 bp, Artificial Sequence
  Synthetic oligonucleotide
tcgagagcgccctcatgtgataggttgtct

SEQ ID NO: 50909 - DNA, 30 bp, Artificial Sequence
  Synthetic oligonucleotide
aacgtcatggcacgtgctgctgcctattct

SEQ ID NO: 50910 - DNA, 31 bp, Artificial Sequence
  Synthetic oligonucleotide
tcagacagaaatgggcgtatcgataggttct

SEQ ID NO: 50911 - DNA, 30 bp, Artificial Sequence
  Synthetic oligonucleotide
ggagtggatagggtgaaacagaactgttct

SEQ ID NO: 50912 - DNA, 30 bp, Artificial Sequence
  Synthetic oligonucleotide
tggtgcaaaggccatatggactacatttct

SEQ ID NO: 50913 - DNA, 30 bp, Artificial Sequence
  Synthetic oligonucleotide
cccccaattaagagcaggagacagaaaagt

SEQ ID NO: 50914 - DNA, 30 bp, Artificial Sequence
  Synthetic oligonucleotide
agaaaaagggacaatcggttgaataaaagt

SEQ ID NO: 50915 - DNA, 30 bp, Artificial Sequence
  Synthetic oligonucleotide
ggcaccactacgcgacaaggcgaccaaagt

SEQ ID NO: 50916 - DNA, 30 bp, Artificial Sequence
  Synthetic oligonucleotide
gggtacaagcaaggcggtgcccacacaagt

SEQ ID NO: 50917 - DNA, 30 bp, Artificial Sequence
  Synthetic oligonucleotide
atcggcacaaagtaagattaccagacaagt

SEQ ID NO: 50918 - DNA, 30 bp, Artificial Sequence
  Synthetic oligonucleotide
cgtgtccaaggatccgtacctcagccaagt

SEQ ID NO: 50919 - DNA, 30 bp, Artificial Sequence
  Synthetic oligonucleotide
gtaacggagtcgaaacgcgcccggtcaagt

SEQ ID NO: 50920 - DNA, 30 bp, Artificial Sequence
  Synthetic oligonucleotide
tgctctcggcaaagacgagttcgtggaagt

SEQ ID NO: 50921 - DNA, 30 bp, Artificial Sequence
  Synthetic oligonucleotide
aacgcatagtgggaaaaccccgcatgaagt

SEQ ID NO: 50922 - DNA, 30 bp, Artificial Sequence
  Synthetic oligonucleotide
aggtgatcctgtctcaggaaagagtgaagt

SEQ ID NO: 50923 - DNA, 30 bp, Artificial Sequence
  Synthetic oligonucleotide
atcgtcgtccgtgaagcgggtgtagtaagt

SEQ ID NO: 50924 - DNA, 30 bp, Artificial Sequence
  Synthetic oligonucleotide
ccattacaggatagcatcgcgatcaacagt

SEQ ID NO: 50925 - DNA, 30 bp, Artificial Sequence
  Synthetic oligonucleotide
ggctaagacttggtagcgcaatagaacagt

SEQ ID NO: 50926 - DNA, 30 bp, Artificial Sequence
  Synthetic oligonucleotide
agggtcatgggtgggggtgcgcataacagt

SEQ ID NO: 50927 - DNA, 30 bp, Artificial Sequence
  Synthetic oligonucleotide
caccaaacatggatcaggtagtacgacagt

SEQ ID NO: 50928 - DNA, 30 bp, Artificial Sequence
  Synthetic oligonucleotide
gaaggtagcacgttgaacatagtggccagt

SEQ ID NO: 50929 - DNA, 30 bp, Artificial Sequence
  Synthetic oligonucleotide
ctgccggcgaacaggcgaccccagctcagt

SEQ ID NO: 50930 - DNA, 30 bp, Artificial Sequence
  Synthetic oligonucleotide
agtaagaagaaagaaggcgtactagtcagt

SEQ ID NO: 50931 - DNA, 30 bp, Artificial Sequence
  Synthetic oligonucleotide
ggcgtggacgaatgggtagtagctttcagt

SEQ ID NO: 50932 - DNA, 30 bp, Artificial Sequence
  Synthetic oligonucleotide
ctctaacacatcatactgacttctaagagt

SEQ ID NO: 50933 - DNA, 30 bp, Artificial Sequence
  Synthetic oligonucleotide
atgagcattggaaggaaggggcatcagagt

SEQ ID NO: 50934 - DNA, 30 bp, Artificial Sequence
  Synthetic oligonucleotide
agaaaatgcaccattgggcatcgggagagt

SEQ ID NO: 50935 - DNA, 30 bp, Artificial Sequence
  Synthetic oligonucleotide
acggggagggctaagaaactaccgacgagt

SEQ ID NO: 50936 - DNA, 30 bp, Artificial Sequence
  Synthetic oligonucleotide
tagcttcgtatagtactgcaaaaaccgagt

SEQ ID NO: 50937 - DNA, 30 bp, Artificial Sequence
  Synthetic oligonucleotide
acgttcaggtgtaccttcaataaaccgagt

SEQ ID NO: 50938 - DNA, 30 bp, Artificial Sequence
  Synthetic oligonucleotide
tcgggcacggagttcactcgcaggccgagt

SEQ ID NO: 50939 - DNA, 30 bp, Artificial Sequence
  Synthetic oligonucleotide
cgcccgcttcagggagatcctatgccgagt

SEQ ID NO: 50940 - DNA, 30 bp, Artificial Sequence
  Synthetic oligonucleotide
cgaagtattacggcatcgagtgcagcgagt

SEQ ID NO: 50941 - DNA, 30 bp, Artificial Sequence
  Synthetic oligonucleotide
cttcaagcccagatacagcagagagcgagt

SEQ ID NO: 50942 - DNA, 30 bp, Artificial Sequence
  Synthetic oligonucleotide
taagttccacaggttgcggtctaaaggagt

SEQ ID NO: 50943 - DNA, 30 bp, Artificial Sequence
  Synthetic oligonucleotide
gttggagggcaggcacgtcgagtcgggagt

SEQ ID NO: 50944 - DNA, 30 bp, Artificial Sequence
  Synthetic oligonucleotide
gccgattcgggttacaagattgatgggagt

SEQ ID NO: 50945 - DNA, 30 bp, Artificial Sequence
  Synthetic oligonucleotide
atggtgtgcaggttggggagcccttggagt

SEQ ID NO: 50946 - DNA, 30 bp, Artificial Sequence
  Synthetic oligonucleotide
acaggatacttgcatgaaaagtgtgtgagt

SEQ ID NO: 50947 - DNA, 30 bp, Artificial Sequence
  Synthetic oligonucleotide
acaggcggggacatgtccgaagttttgagt

SEQ ID NO: 50948 - DNA, 30 bp, Artificial Sequence
  Synthetic oligonucleotide
cgattaactggaaacacaatttgtaatagt

SEQ ID NO: 50949 - DNA, 30 bp, Artificial Sequence
  Synthetic oligonucleotide
cgaacaaccggagtgtccctctaacctagt

SEQ ID NO: 50950 - DNA, 30 bp, Artificial Sequence
  Synthetic oligonucleotide
acgagtcgcgtttgtgcgtattgagctagt

SEQ ID NO: 50951 - DNA, 30 bp, Artificial Sequence
  Synthetic oligonucleotide
cggggctatccgtaggggcgatattctagt

SEQ ID NO: 50952 - DNA, 30 bp, Artificial Sequence
  Synthetic oligonucleotide
agtaacggcgaggctaaaagggagcgtagt

SEQ ID NO: 50953 - DNA, 30 bp, Artificial Sequence
  Synthetic oligonucleotide
tggaaagacagcaatagtttacagggtagt

SEQ ID NO: 50954 - DNA, 30 bp, Artificial Sequence
  Synthetic oligonucleotide
actcaaaatccgagcatcagctcgcaacgt

SEQ ID NO: 50955 - DNA, 30 bp, Artificial Sequence
  Synthetic oligonucleotide
tgggtagggcagaacttcgtgcaataacgt

SEQ ID NO: 50956 - DNA, 30 bp, Artificial Sequence
  Synthetic oligonucleotide
gaacgcaaaaaagtctgtcaaataacacgt

SEQ ID NO: 50957 - DNA, 30 bp, Artificial Sequence
  Synthetic oligonucleotide
gtaggggcgtcagactacagggatacacgt

SEQ ID NO: 50958 - DNA, 30 bp, Artificial Sequence
  Synthetic oligonucleotide
actactcaatgtgcgatacatattgcacgt

SEQ ID NO: 50959 - DNA, 30 bp, Artificial Sequence
  Synthetic oligonucleotide
ccttggacccaaacacggagtgtagtacgt

SEQ ID NO: 50960 - DNA, 30 bp, Artificial Sequence
  Synthetic oligonucleotide
ggtgacgagcgacactagagcttgcaccgt

SEQ ID NO: 50961 - DNA, 30 bp, Artificial Sequence
  Synthetic oligonucleotide
gtcgggggcgtaaagtacggggcagaccgt

SEQ ID NO: 50962 - DNA, 30 bp, Artificial Sequence
  Synthetic oligonucleotide
cagataagtaaagtcgcgaacataagccgt

SEQ ID NO: 50963 - DNA, 30 bp, Artificial Sequence
  Synthetic oligonucleotide
cacaagctggacaaagggtatatactccgt

SEQ ID NO: 50964 - DNA, 30 bp, Artificial Sequence
  Synthetic oligonucleotide
caggtgacatggggtaagcaatagctccgt

SEQ ID NO: 50965 - DNA, 30 bp, Artificial Sequence
  Synthetic oligonucleotide
catcgtagataccacggggttagcaagcgt

SEQ ID NO: 50966 - DNA, 30 bp, Artificial Sequence
  Synthetic oligonucleotide
tgagccgacacaggaagataggaacagcgt

SEQ ID NO: 50967 - DNA, 30 bp, Artificial Sequence
  Synthetic oligonucleotide
caatagatggacaccgaatccagagagcgt

SEQ ID NO: 50968 - DNA, 30 bp, Artificial Sequence
  Synthetic oligonucleotide
cacgaccgcataaaaagccgaatagagcgt

SEQ ID NO: 50969 - DNA, 30 bp, Artificial Sequence
  Synthetic oligonucleotide
tattgatcggcagagtagcatgcctcgcgt

SEQ ID NO: 50970 - DNA, 30 bp, Artificial Sequence
  Synthetic oligonucleotide
taacaacagtcaggacaaaaccgacggcgt

SEQ ID NO: 50971 - DNA, 30 bp, Artificial Sequence
  Synthetic oligonucleotide
tagatcaacgtaaaggagcggtacgggcgt

SEQ ID NO: 50972 - DNA, 31 bp, Artificial Sequence
  Synthetic oligonucleotide
cgattggagcaccgtaatggccagttggcgt

SEQ ID NO: 50973 - DNA, 30 bp, Artificial Sequence
  Synthetic oligonucleotide
ggcgggcgagtgccgagatcgtcggtgcgt

SEQ ID NO: 50974 - DNA, 30 bp, Artificial Sequence
  Synthetic oligonucleotide
tagatcaaggcccggacatggtttgtgcgt

SEQ ID NO: 50975 - DNA, 30 bp, Artificial Sequence
  Synthetic oligonucleotide
gtgtgggcataaaacggaataactaatcgt

SEQ ID NO: 50976 - DNA, 30 bp, Artificial Sequence
  Synthetic oligonucleotide
catagggtgcaatacaagatactgtatcgt

SEQ ID NO: 50977 - DNA, 30 bp, Artificial Sequence
  Synthetic oligonucleotide
acgtccggtcgaaggtcgctgatcactcgt

SEQ ID NO: 50978 - DNA, 30 bp, Artificial Sequence
  Synthetic oligonucleotide
acgaaggggaactaatggatgggtcctcgt

SEQ ID NO: 50979 - DNA, 30 bp, Artificial Sequence
  Synthetic oligonucleotide
gcgatgactacgtgggaattggttcgtcgt

SEQ ID NO: 50980 - DNA, 30 bp, Artificial Sequence
  Synthetic oligonucleotide
ggggcgacaagagctggccaaacaggtcgt

SEQ ID NO: 50981 - DNA, 30 bp, Artificial Sequence
  Synthetic oligonucleotide
aggcagagactcaggagaataatgggtcgt

SEQ ID NO: 50982 - DNA, 30 bp, Artificial Sequence
  Synthetic oligonucleotide
tggcacggcagtcactgacacatcattcgt

SEQ ID NO: 50983 - DNA, 30 bp, Artificial Sequence
  Synthetic oligonucleotide
agacagacgaaggcaatcagtcatattcgt

SEQ ID NO: 50984 - DNA, 30 bp, Artificial Sequence
  Synthetic oligonucleotide
agccggagctgagtgcaagaaccacaaggt

SEQ ID NO: 50985 - DNA, 30 bp, Artificial Sequence
  Synthetic oligonucleotide
ggagccgcgcgtagcttaagtcaagcaggt

SEQ ID NO: 50986 - DNA, 30 bp, Artificial Sequence
  Synthetic oligonucleotide
cgccaagccagcagcccaccccactcaggt

SEQ ID NO: 50987 - DNA, 30 bp, Artificial Sequence
  Synthetic oligonucleotide
atcgaagacaggaaccgtgagtgtcgaggt

SEQ ID NO: 50988 - DNA, 30 bp, Artificial Sequence
  Synthetic oligonucleotide
tgggcgaaattttagctaaagtgaggaggt

SEQ ID NO: 50989 - DNA, 30 bp, Artificial Sequence
  Synthetic oligonucleotide
tggatggtcctgaagtttacatagtgaggt

SEQ ID NO: 50990 - DNA, 30 bp, Artificial Sequence
  Synthetic oligonucleotide
gatgaggtcgatccctataaagaaataggt

SEQ ID NO: 50991 - DNA, 30 bp, Artificial Sequence
  Synthetic oligonucleotide
aggggaactttatccacacgtgagataggt

SEQ ID NO: 50992 - DNA, 30 bp, Artificial Sequence
  Synthetic oligonucleotide
tcctggacatagctcgtaacaattctaggt

SEQ ID NO: 50993 - DNA, 30 bp, Artificial Sequence
  Synthetic oligonucleotide
tggccgcaaggcttcgaaacgtgcgtaggt

SEQ ID NO: 50994 - DNA, 30 bp, Artificial Sequence
  Synthetic oligonucleotide
atgctcccatgaaaagcaggaagttacggt

SEQ ID NO: 50995 - DNA, 30 bp, Artificial Sequence
  Synthetic oligonucleotide
acaggaaagaagcccgactgaatgaccggt

SEQ ID NO: 50996 - DNA, 30 bp, Artificial Sequence
  Synthetic oligonucleotide
gaccgattcaaacggggaagaagatccggt

SEQ ID NO: 50997 - DNA, 30 bp, Artificial Sequence
  Synthetic oligonucleotide
agataaagcataaagctggcaaactccggt

SEQ ID NO: 50998 - DNA, 30 bp, Artificial Sequence
  Synthetic oligonucleotide
cgaccaggaagacgcgattgggacaagggt

SEQ ID NO: 50999 - DNA, 31 bp, Artificial Sequence
  Synthetic oligonucleotide
acggtagttcgggtgagaagatttacagggt

SEQ ID NO: 51000 - DNA, 30 bp, Artificial Sequence
  Synthetic oligonucleotide
gtgagcaataatagcggggagcatgagggt

SEQ ID NO: 51001 - DNA, 30 bp, Artificial Sequence
  Synthetic oligonucleotide
gggattgccgaaggatacgatcatgagggt

SEQ ID NO: 51002 - DNA, 30 bp, Artificial Sequence
  Synthetic oligonucleotide
gccgccagaggccagcgtataagtccgggt

SEQ ID NO: 51003 - DNA, 30 bp, Artificial Sequence
  Synthetic oligonucleotide
ccgcacaagtacaaatacctaggagcgggt

SEQ ID NO: 51004 - DNA, 30 bp, Artificial Sequence
  Synthetic oligonucleotide
cctttcggcgcggaagagagatgtcggggt

SEQ ID NO: 51005 - DNA, 30 bp, Artificial Sequence
  Synthetic oligonucleotide
gcgaaccgaaatacagctgcgtaactgggt

SEQ ID NO: 51006 - DNA, 31 bp, Artificial Sequence
  Synthetic oligonucleotide
ccaggatatgttggggattaagtacgtgggt

SEQ ID NO: 51007 - DNA, 30 bp, Artificial Sequence
  Synthetic oligonucleotide
agggagccagggaggaaaggaatattgggt

SEQ ID NO: 51008 - DNA, 30 bp, Artificial Sequence
  Synthetic oligonucleotide
tgcggagcggcatgtacaatcgtgttgggt

SEQ ID NO: 51009 - DNA, 30 bp, Artificial Sequence
  Synthetic oligonucleotide
cgaagtacaacacgttcactcgtcaatggt

SEQ ID NO: 51010 - DNA, 30 bp, Artificial Sequence
  Synthetic oligonucleotide
tgtaaaggaatttacgaaaagcgtcatggt

SEQ ID NO: 51011 - DNA, 30 bp, Artificial Sequence
  Synthetic oligonucleotide
tagattcggacagggtcacccaaagatggt

SEQ ID NO: 51012 - DNA, 30 bp, Artificial Sequence
  Synthetic oligonucleotide
ggaggcactatatacctttggaggactggt

SEQ ID NO: 51013 - DNA, 30 bp, Artificial Sequence
  Synthetic oligonucleotide
tcaacggggcggtggcagacaactcctggt

SEQ ID NO: 51014 - DNA, 30 bp, Artificial Sequence
  Synthetic oligonucleotide
acgggggtactcgaagagtgctattctggt

SEQ ID NO: 51015 - DNA, 30 bp, Artificial Sequence
  Synthetic oligonucleotide
gccagtgatagtgcgtttgctgctagtggt

SEQ ID NO: 51016 - DNA, 29 bp, Artificial Sequence
  Synthetic oligonucleotide
gcgaggacgggtgaccatataagtgtggt

SEQ ID NO: 51017 - DNA, 30 bp, Artificial Sequence
  Synthetic oligonucleotide
agtcaagcttactaccgaagaaatattggt

SEQ ID NO: 51018 - DNA, 30 bp, Artificial Sequence
  Synthetic oligonucleotide
agcaagacggtatcattctacagagttggt

SEQ ID NO: 51019 - DNA, 30 bp, Artificial Sequence
  Synthetic oligonucleotide
tgatagtccgattaatgaaggaactaatgt

SEQ ID NO: 51020 - DNA, 30 bp, Artificial Sequence
  Synthetic oligonucleotide
gagggcaattggacaatggaaaagacatgt

SEQ ID NO: 51021 - DNA, 30 bp, Artificial Sequence
  Synthetic oligonucleotide
tcgagtggccccctcagacgtcaagcatgt

SEQ ID NO: 51022 - DNA, 30 bp, Artificial Sequence
  Synthetic oligonucleotide
tgaggtactgaaacacatactaccgcatgt

SEQ ID NO: 51023 - DNA, 30 bp, Artificial Sequence
  Synthetic oligonucleotide
gggagacttcaacatacgaggtcggcatgt

SEQ ID NO: 51024 - DNA, 30 bp, Artificial Sequence
  Synthetic oligonucleotide
gggacgaccgacgtcagagaaatggcatgt

SEQ ID NO: 51025 - DNA, 30 bp, Artificial Sequence
  Synthetic oligonucleotide
cgatcttacatacccgaggtgatgtcatgt

SEQ ID NO: 51026 - DNA, 30 bp, Artificial Sequence
  Synthetic oligonucleotide
gggtaccatttaagcacgtgactgtcatgt

SEQ ID NO: 51027 - DNA, 39 bp, Artificial Sequence
  Synthetic oligonucleotide
cgatgaaagttcgcctcagagagggggttaatactatgt

SEQ ID NO: 51028 - DNA, 30 bp, Artificial Sequence
  Synthetic oligonucleotide
gagcataagcactctcacgaagaaaactgt

SEQ ID NO: 51029 - DNA, 30 bp, Artificial Sequence
  Synthetic oligonucleotide
atagtcatgacggaagaacaaagtgactgt

SEQ ID NO: 51030 - DNA, 30 bp, Artificial Sequence
  Synthetic oligonucleotide
ctagatatcttcatgatcacttactcctgt

SEQ ID NO: 51031 - DNA, 30 bp, Artificial Sequence
  Synthetic oligonucleotide
aaccgcatacagtagaccaagtaacgctgt

SEQ ID NO: 51032 - DNA, 30 bp, Artificial Sequence
  Synthetic oligonucleotide
gcgacacgactgagaacgttgctgcgctgt

SEQ ID NO: 51033 - DNA, 30 bp, Artificial Sequence
  Synthetic oligonucleotide
ggccgggtgatgcgaattccaacttgctgt

SEQ ID NO: 51034 - DNA, 30 bp, Artificial Sequence
  Synthetic oligonucleotide
gcggaatcaaacattatgtgaaaactctgt

SEQ ID NO: 51035 - DNA, 30 bp, Artificial Sequence
  Synthetic oligonucleotide
tgccgggactcggaatcagttagccagtgt

SEQ ID NO: 51036 - DNA, 30 bp, Artificial Sequence
  Synthetic oligonucleotide
ttcgtcaggccgattctaaaagtgtagtgt

SEQ ID NO: 51037 - DNA, 30 bp, Artificial Sequence
  Synthetic oligonucleotide
agcactgcgacagaggcaagtgggcggtgt

SEQ ID NO: 51038 - DNA, 30 bp, Artificial Sequence
  Synthetic oligonucleotide
acaaactgttaagcggcgaaactgatgtgt

SEQ ID NO: 51039 - DNA, 30 bp, Artificial Sequence
  Synthetic oligonucleotide
gggtggaggcatcgttaagtaagaaattgt

SEQ ID NO: 51040 - DNA, 30 bp, Artificial Sequence
  Synthetic oligonucleotide
agggtgctcccatacgtggagactaattgt

SEQ ID NO: 51041 - DNA, 30 bp, Artificial Sequence
  Synthetic oligonucleotide
atcgacgtcgtgaacggtcaagctacttgt

SEQ ID NO: 51042 - DNA, 30 bp, Artificial Sequence
  Synthetic oligonucleotide
agcgtggctgatgtcagatataggtcttgt

SEQ ID NO: 51043 - DNA, 30 bp, Artificial Sequence
  Synthetic oligonucleotide
ctcaggcatttccgagtcaactcacaaatt

SEQ ID NO: 51044 - DNA, 30 bp, Artificial Sequence
  Synthetic oligonucleotide
ccagaggagaatggtacaataggtcaaatt

SEQ ID NO: 51045 - DNA, 30 bp, Artificial Sequence
  Synthetic oligonucleotide
tacggttaatgggacgtcgagaagacaatt

SEQ ID NO: 51046 - DNA, 30 bp, Artificial Sequence
  Synthetic oligonucleotide
gcagaccgaataagttgaaagtatccaatt

SEQ ID NO: 51047 - DNA, 30 bp, Artificial Sequence
  Synthetic oligonucleotide
gcgaacagaccgaggcaatgtacctcaatt

SEQ ID NO: 51048 - DNA, 30 bp, Artificial Sequence
  Synthetic oligonucleotide
cgtacccaaaaggtgtggctcacttcaatt

SEQ ID NO: 51049 - DNA, 30 bp, Artificial Sequence
  Synthetic oligonucleotide
gtacttgaaggtcgaggggtaaaacgaatt

SEQ ID NO: 51050 - DNA, 30 bp, Artificial Sequence
  Synthetic oligonucleotide
aggaggcaggagcaaagtgctcgtataatt

SEQ ID NO: 51051 - DNA, 30 bp, Artificial Sequence
  Synthetic oligonucleotide
ggagaggtctgaggtagattaagacacatt

SEQ ID NO: 51052 - DNA, 30 bp, Artificial Sequence
  Synthetic oligonucleotide
tggcagaaaagataagaactctgagacatt

SEQ ID NO: 51053 - DNA, 30 bp, Artificial Sequence
  Synthetic oligonucleotide
acataatcagcgggagtagcccaacccatt

SEQ ID NO: 51054 - DNA, 30 bp, Artificial Sequence
  Synthetic oligonucleotide
gacaacgatgagttagtgcaaggtcccatt

SEQ ID NO: 51055 - DNA, 30 bp, Artificial Sequence
  Synthetic oligonucleotide
ggtcatagaagaacggcacgagcgcgcatt

SEQ ID NO: 51056 - DNA, 30 bp, Artificial Sequence
  Synthetic oligonucleotide
caggcctccagaaagggaagaccaatcatt

SEQ ID NO: 51057 - DNA, 30 bp, Artificial Sequence
  Synthetic oligonucleotide
aagggtgcgcactagtctaaaatggtcatt

SEQ ID NO: 51058 - DNA, 30 bp, Artificial Sequence
  Synthetic oligonucleotide
agggagacatcgggtcgaagttcctagatt

SEQ ID NO: 51059 - DNA, 30 bp, Artificial Sequence
  Synthetic oligonucleotide
aggaatcatagataactacggctatcgatt

SEQ ID NO: 51060 - DNA, 30 bp, Artificial Sequence
  Synthetic oligonucleotide
ccgtacggaccatacattagcagcgggatt

SEQ ID NO: 51061 - DNA, 30 bp, Artificial Sequence
  Synthetic oligonucleotide
catgcgcgcagaggtgcccaagaatggatt

SEQ ID NO: 51062 - DNA, 30 bp, Artificial Sequence
  Synthetic oligonucleotide
cagactatttgcaggagagtagcactgatt

SEQ ID NO: 51063 - DNA, 30 bp, Artificial Sequence
  Synthetic oligonucleotide
agagatgacaaagccccagtaccattgatt

SEQ ID NO: 51064 - DNA, 30 bp, Artificial Sequence
  Synthetic oligonucleotide
cgaggctaaacgtcaaacacaacgttgatt

SEQ ID NO: 51065 - DNA, 30 bp, Artificial Sequence
  Synthetic oligonucleotide
gcgcggagaaatctacgtaggtgtcatatt

SEQ ID NO: 51066 - DNA, 30 bp, Artificial Sequence
  Synthetic oligonucleotide
tgcaatggagaattaccatcacaagctatt

SEQ ID NO: 51067 - DNA, 30 bp, Artificial Sequence
  Synthetic oligonucleotide
gaacagaagccttatcgagaggtgcgtatt

SEQ ID NO: 51068 - DNA, 31 bp, Artificial Sequence
  Synthetic oligonucleotide
cgaggcaatggacacatgtatgtcttttatt

SEQ ID NO: 51069 - DNA, 30 bp, Artificial Sequence
  Synthetic oligonucleotide
atggcggtaggtagcactaataagaaactt

SEQ ID NO: 51070 - DNA, 30 bp, Artificial Sequence
  Synthetic oligonucleotide
catgaaaggcccaaacaaaaggtagcactt

SEQ ID NO: 51071 - DNA, 30 bp, Artificial Sequence
  Synthetic oligonucleotide
ctgcacggctgcacagaatgattagcactt

SEQ ID NO: 51072 - DNA, 30 bp, Artificial Sequence
  Synthetic oligonucleotide
gactacgacacgagcagatctccatcactt

SEQ ID NO: 51073 - DNA, 30 bp, Artificial Sequence
  Synthetic oligonucleotide
tctggacagtcgcgtacaaccccaagactt

SEQ ID NO: 51074 - DNA, 30 bp, Artificial Sequence
  Synthetic oligonucleotide
aaactgagcgacctcagagctaccagactt

SEQ ID NO: 51075 - DNA, 30 bp, Artificial Sequence
  Synthetic oligonucleotide
acataacacgattcacttatcgtccgactt

SEQ ID NO: 51076 - DNA, 30 bp, Artificial Sequence
  Synthetic oligonucleotide
agggtggccggccagtggataagaggactt

SEQ ID NO: 51077 - DNA, 30 bp, Artificial Sequence
  Synthetic oligonucleotide
gggagtagggagaagaatccgattctactt

SEQ ID NO: 51078 - DNA, 30 bp, Artificial Sequence
  Synthetic oligonucleotide
aagaaaacgtgcaacacaaatggggtactt

SEQ ID NO: 51079 - DNA, 30 bp, Artificial Sequence
  Synthetic oligonucleotide
accaaagggaagggggaccaggatgtactt

SEQ ID NO: 51080 - DNA, 30 bp, Artificial Sequence
  Synthetic oligonucleotide
taataataggagaacgggtaggctgtactt

SEQ ID NO: 51081 - DNA, 30 bp, Artificial Sequence
  Synthetic oligonucleotide
tacttattccattaaataagtcgattactt

SEQ ID NO: 51082 - DNA, 30 bp, Artificial Sequence
  Synthetic oligonucleotide
agcaaagctgggccgacgatccgacacctt

SEQ ID NO: 51083 - DNA, 30 bp, Artificial Sequence
  Synthetic oligonucleotide
ccgcaagatgaatagaatcagttaaccctt

SEQ ID NO: 51084 - DNA, 30 bp, Artificial Sequence
  Synthetic oligonucleotide
cgtggtgagtgcgtaggtcaagcaggcctt

SEQ ID NO: 51085 - DNA, 30 bp, Artificial Sequence
  Synthetic oligonucleotide
ggggaacgtgagataagccagtggggcctt

SEQ ID NO: 51086 - DNA, 30 bp, Artificial Sequence
  Synthetic oligonucleotide
tgggcgctaaacccatcacgagtaaagctt

SEQ ID NO: 51087 - DNA, 30 bp, Artificial Sequence
  Synthetic oligonucleotide
gtggagcaatgtaacactgataatcagctt

SEQ ID NO: 51088 - DNA, 30 bp, Artificial Sequence
  Synthetic oligonucleotide
aggaggaactcgtaaagcgagagaacgctt

SEQ ID NO: 51089 - DNA, 30 bp, Artificial Sequence
  Synthetic oligonucleotide
tgtgataaaagtggaggagctcggaggctt

SEQ ID NO: 51090 - DNA, 30 bp, Artificial Sequence
  Synthetic oligonucleotide
cgacgagtaacgactcgagtcgcttggctt

SEQ ID NO: 51091 - DNA, 30 bp, Artificial Sequence
  Synthetic oligonucleotide
agaggcccccaaagctcaaggtgccatctt

SEQ ID NO: 51092 - DNA, 30 bp, Artificial Sequence
  Synthetic oligonucleotide
ccgataacgctaggaacattggtggatctt

SEQ ID NO: 51093 - DNA, 30 bp, Artificial Sequence
  Synthetic oligonucleotide
gagggccctacacaaatggtgatcgttctt

SEQ ID NO: 51094 - DNA, 30 bp, Artificial Sequence
  Synthetic oligonucleotide
cttgcgcgaaagtgagtatatatcaaagtt

SEQ ID NO: 51095 - DNA, 30 bp, Artificial Sequence
  Synthetic oligonucleotide
aacgccgctcggcatggacaagttaaagtt

SEQ ID NO: 51096 - DNA, 30 bp, Artificial Sequence
  Synthetic oligonucleotide
gtcggtacgacccaaaagtccatttcagtt

SEQ ID NO: 51097 - DNA, 30 bp, Artificial Sequence
  Synthetic oligonucleotide
atcggagtacagctaggtcggataagagtt

SEQ ID NO: 51098 - DNA, 30 bp, Artificial Sequence
  Synthetic oligonucleotide
ttgtgaatacaagtgttatgagttcgagtt

SEQ ID NO: 51099 - DNA, 30 bp, Artificial Sequence
  Synthetic oligonucleotide
acaccgtgctatacgtcgacagatggagtt

SEQ ID NO: 51100 - DNA, 30 bp, Artificial Sequence
  Synthetic oligonucleotide
catgagtgtgcttctcgaagggaaatagtt

SEQ ID NO: 51101 - DNA, 31 bp, Artificial Sequence
  Synthetic oligonucleotide
gcggagagatatactatggacttagttagtt

SEQ ID NO: 51102 - DNA, 30 bp, Artificial Sequence
  Synthetic oligonucleotide
tggtcaacaactgacaagtagaatgacgtt

SEQ ID NO: 51103 - DNA, 30 bp, Artificial Sequence
  Synthetic oligonucleotide
gggccgacactaagtgagagctaaaccgtt

SEQ ID NO: 51104 - DNA, 30 bp, Artificial Sequence
  Synthetic oligonucleotide
cagggctggcgagagcacaccctaaccgtt

SEQ ID NO: 51105 - DNA, 30 bp, Artificial Sequence
  Synthetic oligonucleotide
ggggcagaacccgaccacccaactaccgtt

SEQ ID NO: 51106 - DNA, 30 bp, Artificial Sequence
  Synthetic oligonucleotide
ccgaggggggtgggcgttagtacagccgtt

SEQ ID NO: 51107 - DNA, 30 bp, Artificial Sequence
  Synthetic oligonucleotide
cgtggatagttgcttaagcttaactccgtt

SEQ ID NO: 51108 - DNA, 30 bp, Artificial Sequence
  Synthetic oligonucleotide
acggctagaaaagcggaacccatgcgcgtt

SEQ ID NO: 51109 - DNA, 30 bp, Artificial Sequence
  Synthetic oligonucleotide
acgacggggagacggtgcgctgcactcgtt

SEQ ID NO: 51110 - DNA, 30 bp, Artificial Sequence
  Synthetic oligonucleotide
ttgatgcgaaagggacaattaactaaggtt

SEQ ID NO: 51111 - DNA, 30 bp, Artificial Sequence
  Synthetic oligonucleotide
taacagggagcggtgattctccagcaggtt

SEQ ID NO: 51112 - DNA, 30 bp, Artificial Sequence
  Synthetic oligonucleotide
agaaacacatcacgcctgaagaaaacggtt

SEQ ID NO: 51113 - DNA, 30 bp, Artificial Sequence
  Synthetic oligonucleotide
acggaacaggtctgcttgcgtcgacgggtt

SEQ ID NO: 51114 - DNA, 30 bp, Artificial Sequence
  Synthetic oligonucleotide
ggtggagtgcgacggccgacagagcgggtt

SEQ ID NO: 51115 - DNA, 30 bp, Artificial Sequence
  Synthetic oligonucleotide
gcacctagaataacaagggggggcatggtt

SEQ ID NO: 51116 - DNA, 30 bp, Artificial Sequence
  Synthetic oligonucleotide
ctctagggggcgcgagcgtcaaagatggtt

SEQ ID NO: 51117 - DNA, 30 bp, Artificial Sequence
  Synthetic oligonucleotide
tagaacggactgacctaagtaaggatggtt

SEQ ID NO: 51118 - DNA, 30 bp, Artificial Sequence
  Synthetic oligonucleotide
acacaatctagggtccaggaagtcgtggtt

SEQ ID NO: 51119 - DNA, 30 bp, Artificial Sequence
  Synthetic oligonucleotide
acggacagtccgaacccttggacctatgtt

SEQ ID NO: 51120 - DNA, 30 bp, Artificial Sequence
  Synthetic oligonucleotide
tatggaacaaatagaaataagggtcctgtt

SEQ ID NO: 51121 - DNA, 30 bp, Artificial Sequence
  Synthetic oligonucleotide
tcatggcaacattgggacaaccgagctgtt

SEQ ID NO: 51122 - DNA, 30 bp, Artificial Sequence
  Synthetic oligonucleotide
aggagattaaatgagtggcggctaagtgtt

SEQ ID NO: 51123 - DNA, 30 bp, Artificial Sequence
  Synthetic oligonucleotide
atggaatacacgagaggttgaaccggtgtt

SEQ ID NO: 51124 - DNA, 30 bp, Artificial Sequence
  Synthetic oligonucleotide
cgtgactatggctagggtgctactggtgtt

SEQ ID NO: 51125 - DNA, 30 bp, Artificial Sequence
  Synthetic oligonucleotide
tcacatcatcgacatatctccgccattgtt

SEQ ID NO: 51126 - DNA, 30 bp, Artificial Sequence
  Synthetic oligonucleotide
gggctgaagtgtcgaggaacgaaccaattt

SEQ ID NO: 51127 - DNA, 30 bp, Artificial Sequence
  Synthetic oligonucleotide
tctagactctagagcgaaactacctaattt

SEQ ID NO: 51128 - DNA, 30 bp, Artificial Sequence
  Synthetic oligonucleotide
tggagcattgggcgagggagaatatcattt

SEQ ID NO: 51129 - DNA, 30 bp, Artificial Sequence
  Synthetic oligonucleotide
caacgtggatgagcgacttcgatgagattt

SEQ ID NO: 51130 - DNA, 30 bp, Artificial Sequence
  Synthetic oligonucleotide
tcgaggcacaggtaatgtcatcacgtattt

SEQ ID NO: 51131 - DNA, 30 bp, Artificial Sequence
  Synthetic oligonucleotide
gcgtgtagcgaccaacaactgtaggacttt

SEQ ID NO: 51132 - DNA, 30 bp, Artificial Sequence
  Synthetic oligonucleotide
acgagagttaataatacggaactagtcttt

SEQ ID NO: 51133 - DNA, 30 bp, Artificial Sequence
  Synthetic oligonucleotide
gcaacgaaaaaatatgtggattcgaagttt

SEQ ID NO: 51134 - DNA, 30 bp, Artificial Sequence
  Synthetic oligonucleotide
cgacaaaatccatcggtaggaacatagttt

SEQ ID NO: 51135 - DNA, 30 bp, Artificial Sequence
  Synthetic oligonucleotide
acagagtgtagggttggaaggtttacgttt

SEQ ID NO: 51136 - DNA, 30 bp, Artificial Sequence
  Synthetic oligonucleotide
acattaggaacgtagggaggcactgcgttt

SEQ ID NO: 51137 - DNA, 30 bp, Artificial Sequence
  Synthetic oligonucleotide
tgcggcaacagtaagcaccgagcagggttt

SEQ ID NO: 51138 - DNA, 30 bp, Artificial Sequence
  Synthetic oligonucleotide
ggaggcaggagttccaaattgaaagtgttt

SEQ ID NO: 51139 - DNA, 30 bp, Artificial Sequence
  Synthetic oligonucleotide
gtatcgggcgagtatatggggtgagtgttt

SEQ ID NO: 51140 - DNA, 30 bp, Artificial Sequence
  Synthetic oligonucleotide
acacagaaaagggaatgctaagagtatttt

SEQ ID NO: 51141 - DNA, 30 bp, Artificial Sequence
  Synthetic oligonucleotide
gctactagccaaagggaggacggaactttt

SEQ ID NO: 51142 - DNA, 30 bp, Artificial Sequence
  Synthetic oligonucleotide
gagcaggtcatccagaactagcccactttt

SEQ ID NO: 51143 - DNA, 30 bp, Artificial Sequence
  Synthetic oligonucleotide
agctgaagtgatgcccatacagtgactttt

SEQ ID NO: 51144 - DNA, 30 bp, Artificial Sequence
  Synthetic oligonucleotide
tggcacgacaaggggcgaaccggtagtttt

SEQ ID NO: 51145 - DNA, 30 bp, Artificial Sequence
  Synthetic oligonucleotide
agtgaagcgtggaaatcaatgaggcaaaaa

SEQ ID NO: 51146 - DNA, 30 bp, Artificial Sequence
  Synthetic oligonucleotide
tgcttatacaacatgcgaccctctcaaaaa

SEQ ID NO: 51147 - DNA, 30 bp, Artificial Sequence
  Synthetic oligonucleotide
taacacgcgacgacgctgttccgagaaaaa

SEQ ID NO: 51148 - DNA, 30 bp, Artificial Sequence
  Synthetic oligonucleotide
gtagggcaactaggccgcaccggcgaaaaa

SEQ ID NO: 51149 - DNA, 30 bp, Artificial Sequence
  Synthetic oligonucleotide
cgttacctccaagaggatgctccggaaaaa

SEQ ID NO: 51150 - DNA, 30 bp, Artificial Sequence
  Synthetic oligonucleotide
agccggagcctgcatcaaaacctggaaaaa

SEQ ID NO: 51151 - DNA, 30 bp, Artificial Sequence
  Synthetic oligonucleotide
gcgtctaatgtggacaggtcacagtaaaaa

SEQ ID NO: 51152 - DNA, 30 bp, Artificial Sequence
  Synthetic oligonucleotide
aggtgaatcgacggaccggtctatccaaaa

SEQ ID NO: 51153 - DNA, 30 bp, Artificial Sequence
  Synthetic oligonucleotide
ggagtaaacaggcacgctaacactccaaaa

SEQ ID NO: 51154 - DNA, 30 bp, Artificial Sequence
  Synthetic oligonucleotide
ccatcctggaatggactacaccgtccaaaa

SEQ ID NO: 51155 - DNA, 30 bp, Artificial Sequence
  Synthetic oligonucleotide
ctagccaggtactcacaaagtcattcaaaa

SEQ ID NO: 51156 - DNA, 30 bp, Artificial Sequence
  Synthetic oligonucleotide
aacgcgctggataagcggcgccaaagaaaa

SEQ ID NO: 51157 - DNA, 30 bp, Artificial Sequence
  Synthetic oligonucleotide
cacgccatacatagtcgtaccggaagaaaa

SEQ ID NO: 51158 - DNA, 30 bp, Artificial Sequence
  Synthetic oligonucleotide
gacacatccgagcgaggagcggtaagaaaa

SEQ ID NO: 51159 - DNA, 30 bp, Artificial Sequence
  Synthetic oligonucleotide
ggccattgaataaacgcgaaaacacgaaaa

SEQ ID NO: 51160 - DNA, 29 bp, Artificial Sequence
  Synthetic oligonucleotide
taagcagaccaagtaggtggtaccgaaaa

SEQ ID NO: 51161 - DNA, 30 bp, Artificial Sequence
  Synthetic oligonucleotide
aaacggacaccgcccatgacaatccgaaaa

SEQ ID NO: 51162 - DNA, 30 bp, Artificial Sequence
  Synthetic oligonucleotide
actggagtgatcatgcgaagaggtcgaaaa

SEQ ID NO: 51163 - DNA, 30 bp, Artificial Sequence
  Synthetic oligonucleotide
aaagcctcgatcggaaccagggacggaaaa

SEQ ID NO: 51164 - DNA, 30 bp, Artificial Sequence
  Synthetic oligonucleotide
cgccttgaattggcaggaaaccgcggaaaa

SEQ ID NO: 51165 - DNA, 30 bp, Artificial Sequence
  Synthetic oligonucleotide
ttgcgtcagaaccggcaagaatcactaaaa

SEQ ID NO: 51166 - DNA, 30 bp, Artificial Sequence
  Synthetic oligonucleotide
gcccaaaaacgaagagtggctgaaaacaaa

SEQ ID NO: 51167 - DNA, 30 bp, Artificial Sequence
  Synthetic oligonucleotide
tcgcatcgggcatacccgcgttagaacaaa

SEQ ID NO: 51168 - DNA, 30 bp, Artificial Sequence
  Synthetic oligonucleotide
gcagatccccaaccataaaatcttaacaaa

SEQ ID NO: 51169 - DNA, 30 bp, Artificial Sequence
  Synthetic oligonucleotide
ctgaagatggcaatcgactctgttaacaaa

SEQ ID NO: 51170 - DNA, 30 bp, Artificial Sequence
  Synthetic oligonucleotide
gtccggagggtttagtaagcgttagacaaa

SEQ ID NO: 51171 - DNA, 30 bp, Artificial Sequence
  Synthetic oligonucleotide
agggtgcgcaaagatcacttgcaaaccaaa

SEQ ID NO: 51172 - DNA, 30 bp, Artificial Sequence
  Synthetic oligonucleotide
gcagacataccatctccaatcgaaaccaaa

SEQ ID NO: 51173 - DNA, 30 bp, Artificial Sequence
  Synthetic oligonucleotide
agttgtaaagccggcttgagcctccccaaa

SEQ ID NO: 51174 - DNA, 30 bp, Artificial Sequence
  Synthetic oligonucleotide
cagacaacggataatagtacgcacgccaaa

SEQ ID NO: 51175 - DNA, 30 bp, Artificial Sequence
  Synthetic oligonucleotide
agtagattgagggacagtcagcttgccaaa

SEQ ID NO: 51176 - DNA, 30 bp, Artificial Sequence
  Synthetic oligonucleotide
catgaaccgagtacttaccagctttccaaa

SEQ ID NO: 51177 - DNA, 30 bp, Artificial Sequence
  Synthetic oligonucleotide
aacgacagagtatagaattcaaacagcaaa

SEQ ID NO: 51178 - DNA, 30 bp, Artificial Sequence
  Synthetic oligonucleotide
gaacgggcgaatctacatttcggcagcaaa

SEQ ID NO: 51179 - DNA, 30 bp, Artificial Sequence
  Synthetic oligonucleotide
cttaaggactaaagaggattcgtcagcaaa

SEQ ID NO: 51180 - DNA, 30 bp, Artificial Sequence
  Synthetic oligonucleotide
ccagaagaggtgctagcatccccgagcaaa

SEQ ID NO: 51181 - DNA, 30 bp, Artificial Sequence
  Synthetic oligonucleotide
gtgttctagagtgcaagcagttggcgcaaa

SEQ ID NO: 51182 - DNA, 30 bp, Artificial Sequence
  Synthetic oligonucleotide
ggacgaaaaaatcggtcccacgagggcaaa

SEQ ID NO: 51183 - DNA, 30 bp, Artificial Sequence
  Synthetic oligonucleotide
ggagtgtcaagcccgcaagtaatgggcaaa

SEQ ID NO: 51184 - DNA, 31 bp, Artificial Sequence
  Synthetic oligonucleotide
atccgatgaaaaagcgataaaggttggcaaa

SEQ ID NO: 51185 - DNA, 30 bp, Artificial Sequence
  Synthetic oligonucleotide
tcgacacatgccggcgtcgattactgcaaa

SEQ ID NO: 51186 - DNA, 30 bp, Artificial Sequence
  Synthetic oligonucleotide
acagtgaggtttagggcaacagtcatcaaa

SEQ ID NO: 51187 - DNA, 31 bp, Artificial Sequence
  Synthetic oligonucleotide
ggagaggaccttgaacagtccgcttctcaaa

SEQ ID NO: 51188 - DNA, 30 bp, Artificial Sequence
  Synthetic oligonucleotide
acgagggcggtcaaatctcacaaggtcaaa

SEQ ID NO: 51189 - DNA, 30 bp, Artificial Sequence
  Synthetic oligonucleotide
tgcctaaaaatcggagaaccgacgttcaaa

SEQ ID NO: 51190 - DNA, 30 bp, Artificial Sequence
  Synthetic oligonucleotide
actactcccgggacacgtccgaatttcaaa

SEQ ID NO: 51191 - DNA, 30 bp, Artificial Sequence
  Synthetic oligonucleotide
gttatggactcagatcaaacggctttcaaa

SEQ ID NO: 51192 - DNA, 30 bp, Artificial Sequence
  Synthetic oligonucleotide
acgcgagaaaggtatgctaagggagagaaa

SEQ ID NO: 51193 - DNA, 30 bp, Artificial Sequence
  Synthetic oligonucleotide
ggaagacagtgtactaccaaggttgagaaa

SEQ ID NO: 51194 - DNA, 30 bp, Artificial Sequence
  Synthetic oligonucleotide
ggtgtccgttaagcgtaacgagtgtagaaa

SEQ ID NO: 51195 - DNA, 30 bp, Artificial Sequence
  Synthetic oligonucleotide
aaacaagtgaaccgtgaatgaggaacgaaa

SEQ ID NO: 51196 - DNA, 30 bp, Artificial Sequence
  Synthetic oligonucleotide
gcaacctaggatgttaccgggaagccgaaa

SEQ ID NO: 51197 - DNA, 30 bp, Artificial Sequence
  Synthetic oligonucleotide
ataaggttacaaaaagcgtggttggcgaaa

SEQ ID NO: 51198 - DNA, 30 bp, Artificial Sequence
  Synthetic oligonucleotide
tggagtgcgactgcagttcgacagaggaaa

SEQ ID NO: 51199 - DNA, 30 bp, Artificial Sequence
  Synthetic oligonucleotide
ccggtagatgggcacaatggccgtaggaaa

SEQ ID NO: 51200 - DNA, 29 bp, Artificial Sequence
  Synthetic oligonucleotide
gcgagatagcggggccgaacactcggaaa

SEQ ID NO: 51201 - DNA, 30 bp, Artificial Sequence
  Synthetic oligonucleotide
gaaggccatggaaacgtcgcctacgggaaa

SEQ ID NO: 51202 - DNA, 30 bp, Artificial Sequence
  Synthetic oligonucleotide
gcatcgaccaagtaacttacggtgtggaaa

SEQ ID NO: 51203 - DNA, 30 bp, Artificial Sequence
  Synthetic oligonucleotide
aacgaacagtaaagtttgccgttgctgaaa

SEQ ID NO: 51204 - DNA, 30 bp, Artificial Sequence
  Synthetic oligonucleotide
aggacagctccacctgaagccctaaataaa

SEQ ID NO: 51205 - DNA, 30 bp, Artificial Sequence
  Synthetic oligonucleotide
agggttaagcccaataggccttgcaataaa

SEQ ID NO: 51206 - DNA, 30 bp, Artificial Sequence
  Synthetic oligonucleotide
ctcggggtgatgactgtcgccttacataaa

SEQ ID NO: 51207 - DNA, 30 bp, Artificial Sequence
  Synthetic oligonucleotide
cggaacagaagaggtgattaccaagataaa

SEQ ID NO: 51208 - DNA, 30 bp, Artificial Sequence
  Synthetic oligonucleotide
acggacgcgtcacgccggcggtcggataaa

SEQ ID NO: 51209 - DNA, 30 bp, Artificial Sequence
  Synthetic oligonucleotide
caatcacaacacgtccgtaacaatgataaa

SEQ ID NO: 51210 - DNA, 30 bp, Artificial Sequence
  Synthetic oligonucleotide
aagatctcactaggatcgggttggtataaa

SEQ ID NO: 51211 - DNA, 30 bp, Artificial Sequence
  Synthetic oligonucleotide
aggaaaccgaggggaaaaggacgaactaaa

SEQ ID NO: 51212 - DNA, 30 bp, Artificial Sequence
  Synthetic oligonucleotide
aggcagagaatatgtctcccgaacgctaaa

SEQ ID NO: 51213 - DNA, 30 bp, Artificial Sequence
  Synthetic oligonucleotide
aataagggtagtgatcggcgggagtgtaaa

SEQ ID NO: 51214 - DNA, 30 bp, Artificial Sequence
  Synthetic oligonucleotide
atggtccgagtcgttagaatgcttgttaaa

SEQ ID NO: 51215 - DNA, 30 bp, Artificial Sequence
  Synthetic oligonucleotide
ggatagaaccactgcgggagatcgtttaaa

SEQ ID NO: 51216 - DNA, 30 bp, Artificial Sequence
  Synthetic oligonucleotide
cgggaaacgggatcacgacttaggtttaaa

SEQ ID NO: 51217 - DNA, 30 bp, Artificial Sequence
  Synthetic oligonucleotide
agataagaaggctgagagtcgtgcaaacaa

SEQ ID NO: 51218 - DNA, 30 bp, Artificial Sequence
  Synthetic oligonucleotide
ctaaaataacgggttggaccgtaacaacaa

SEQ ID NO: 51219 - DNA, 30 bp, Artificial Sequence
  Synthetic oligonucleotide
tgaataatcttaacagaattgcaccaacaa

SEQ ID NO: 51220 - DNA, 30 bp, Artificial Sequence
  Synthetic oligonucleotide
gcgggggatcactcctagacaatgtaacaa

SEQ ID NO: 51221 - DNA, 30 bp, Artificial Sequence
  Synthetic oligonucleotide
gtgggaatggggctgggccaaccttaacaa

SEQ ID NO: 51222 - DNA, 30 bp, Artificial Sequence
  Synthetic oligonucleotide
atggacaagagaaacagaagggttacacaa

SEQ ID NO: 51223 - DNA, 30 bp, Artificial Sequence
  Synthetic oligonucleotide
cgtaggtggaatacgactgcaaaaccacaa

SEQ ID NO: 51224 - DNA, 30 bp, Artificial Sequence
  Synthetic oligonucleotide
actatgagccacacagacctaaagccacaa

SEQ ID NO: 51225 - DNA, 30 bp, Artificial Sequence
  Synthetic oligonucleotide
gcggtaggggttcacccaatatgtccacaa

SEQ ID NO: 51226 - DNA, 30 bp, Artificial Sequence
  Synthetic oligonucleotide
aggcggaatgtattgcgcaacgaagcacaa

SEQ ID NO: 51227 - DNA, 30 bp, Artificial Sequence
  Synthetic oligonucleotide
aattggagcagtaagagaaggttagcacaa

SEQ ID NO: 51228 - DNA, 30 bp, Artificial Sequence
  Synthetic oligonucleotide
attgactcatagaagaagtgttctgcacaa

SEQ ID NO: 51229 - DNA, 30 bp, Artificial Sequence
  Synthetic oligonucleotide
tgatcccgtaactagcaaacacttagacaa

SEQ ID NO: 51230 - DNA, 30 bp, Artificial Sequence
  Synthetic oligonucleotide
cgaattcgcccggtggagcacatacgacaa

SEQ ID NO: 51231 - DNA, 30 bp, Artificial Sequence
  Synthetic oligonucleotide
cctcaaacacccgcttacactgaccgacaa

SEQ ID NO: 51232 - DNA, 30 bp, Artificial Sequence
  Synthetic oligonucleotide
tgcgagtagataggggcagcagcccgacaa

SEQ ID NO: 51233 - DNA, 30 bp, Artificial Sequence
  Synthetic oligonucleotide
acttgctaacaccattggtgccggcgacaa

SEQ ID NO: 51234 - DNA, 30 bp, Artificial Sequence
  Synthetic oligonucleotide
tcgttgaagaaaatatgtccaacatgacaa

SEQ ID NO: 51235 - DNA, 30 bp, Artificial Sequence
  Synthetic oligonucleotide
acgtaaattcggtcggactcacagatacaa

SEQ ID NO: 51236 - DNA, 30 bp, Artificial Sequence
  Synthetic oligonucleotide
tagcggttacgaactgtaaacccgatacaa

SEQ ID NO: 51237 - DNA, 30 bp, Artificial Sequence
  Synthetic oligonucleotide
gtggtgtatcgtcaatcgacaaatatacaa

SEQ ID NO: 51238 - DNA, 30 bp, Artificial Sequence
  Synthetic oligonucleotide
gtgacagcgaagggaagatcaagcctacaa

SEQ ID NO: 51239 - DNA, 30 bp, Artificial Sequence
  Synthetic oligonucleotide
cacgggctaagactttaaatcgtggtacaa

SEQ ID NO: 51240 - DNA, 30 bp, Artificial Sequence
  Synthetic oligonucleotide
tcgtagaagattgattaagatatattacaa

SEQ ID NO: 51241 - DNA, 30 bp, Artificial Sequence
  Synthetic oligonucleotide
cgggtaggttgaggagtaagatgtttacaa

SEQ ID NO: 51242 - DNA, 30 bp, Artificial Sequence
  Synthetic oligonucleotide
aagtgcatgaaatgtgcgcggggtaaccaa

SEQ ID NO: 51243 - DNA, 30 bp, Artificial Sequence
  Synthetic oligonucleotide
cgcgtcgggaaacaacaatggcgggaccaa

SEQ ID NO: 51244 - DNA, 30 bp, Artificial Sequence
  Synthetic oligonucleotide
aggggacttattggaccgtaatgataccaa

SEQ ID NO: 51245 - DNA, 30 bp, Artificial Sequence
  Synthetic oligonucleotide
gggaacgagtacattgttacgcctacccaa

SEQ ID NO: 51246 - DNA, 30 bp, Artificial Sequence
  Synthetic oligonucleotide
acgagatatgtacccgtaaagtaaccccaa

SEQ ID NO: 51247 - DNA, 30 bp, Artificial Sequence
  Synthetic oligonucleotide
ggggattgcaggaacgtaaatactccccaa

SEQ ID NO: 51248 - DNA, 30 bp, Artificial Sequence
  Synthetic oligonucleotide
gaaaccgcaaatacctaagcgtaagcccaa

SEQ ID NO: 51249 - DNA, 30 bp, Artificial Sequence
  Synthetic oligonucleotide
tcgagcggtaagggtcgcaaaacaagccaa

SEQ ID NO: 51250 - DNA, 30 bp, Artificial Sequence
  Synthetic oligonucleotide
acggtgggaatgactgcacagaacggccaa

SEQ ID NO: 51251 - DNA, 30 bp, Artificial Sequence
  Synthetic oligonucleotide
gcgattccgacatcagggaggtatggccaa

SEQ ID NO: 51252 - DNA, 30 bp, Artificial Sequence
  Synthetic oligonucleotide
cagccgcaagggaaccgcagaacctgccaa

SEQ ID NO: 51253 - DNA, 30 bp, Artificial Sequence
  Synthetic oligonucleotide
atacagcggtatgcaaggaagagaatccaa

SEQ ID NO: 51254 - DNA, 30 bp, Artificial Sequence
  Synthetic oligonucleotide
ttacgctaactgaagctccaaagtatccaa

SEQ ID NO: 51255 - DNA, 30 bp, Artificial Sequence
  Synthetic oligonucleotide
atgggaatgcagggcatcagagccctccaa

SEQ ID NO: 51256 - DNA, 30 bp, Artificial Sequence
  Synthetic oligonucleotide
atgatacgttcgtgctgacagagggtccaa

SEQ ID NO: 51257 - DNA, 30 bp, Artificial Sequence
  Synthetic oligonucleotide
tagacccacgatgtagaactacgattccaa

SEQ ID NO: 51258 - DNA, 30 bp, Artificial Sequence
  Synthetic oligonucleotide
cgaccgtgctggccacttcagctaaagcaa

SEQ ID NO: 51259 - DNA, 30 bp, Artificial Sequence
  Synthetic oligonucleotide
agatcaaacgtcttacccggtgataagcaa

SEQ ID NO: 51260 - DNA, 30 bp, Artificial Sequence
  Synthetic oligonucleotide
gtcagatcgtgaagcgggtcttaccagcaa

SEQ ID NO: 51261 - DNA, 30 bp, Artificial Sequence
  Synthetic oligonucleotide
ggcacgtgtgtaggaaagtccggtcagcaa

SEQ ID NO: 51262 - DNA, 30 bp, Artificial Sequence
  Synthetic oligonucleotide
ttcgagacagtaatcggggccaaagagcaa

SEQ ID NO: 51263 - DNA, 30 bp, Artificial Sequence
  Synthetic oligonucleotide
gctttggaaggaacataaagtacagagcaa

SEQ ID NO: 51264 - DNA, 30 bp, Artificial Sequence
  Synthetic oligonucleotide
atcagtaatccacgtgttgaagtagagcaa

SEQ ID NO: 51265 - DNA, 30 bp, Artificial Sequence
  Synthetic oligonucleotide
gtagtgaatgccatccagcagtatgagcaa

SEQ ID NO: 51266 - DNA, 30 bp, Artificial Sequence
  Synthetic oligonucleotide
gaggtcagtgtgcacagaaactgttagcaa

SEQ ID NO: 51267 - DNA, 30 bp, Artificial Sequence
  Synthetic oligonucleotide
tgttcggcgggagctgtaggagcaacgcaa

SEQ ID NO: 51268 - DNA, 30 bp, Artificial Sequence
  Synthetic oligonucleotide
cgttggaccgaagataatgcttctacgcaa

SEQ ID NO: 51269 - DNA, 30 bp, Artificial Sequence
  Synthetic oligonucleotide
catcaaactaaaatggagtatggtacgcaa

SEQ ID NO: 51270 - DNA, 30 bp, Artificial Sequence
  Synthetic oligonucleotide
gttgcctccgaatagaggacgtggccgcaa

SEQ ID NO: 51271 - DNA, 30 bp, Artificial Sequence
  Synthetic oligonucleotide
gggtataatagagactgatggtgtgcgcaa

SEQ ID NO: 51272 - DNA, 30 bp, Artificial Sequence
  Synthetic oligonucleotide
atgctacaatcgaatccactagcatcgcaa

SEQ ID NO: 51273 - DNA, 30 bp, Artificial Sequence
  Synthetic oligonucleotide
gaagtgcacaaattatctacatactcgcaa

SEQ ID NO: 51274 - DNA, 30 bp, Artificial Sequence
  Synthetic oligonucleotide
taagagttaggcgtcagcccgtaaaggcaa

SEQ ID NO: 51275 - DNA, 30 bp, Artificial Sequence
  Synthetic oligonucleotide
aggcctacgttgtagcagtcttgcaggcaa

SEQ ID NO: 51276 - DNA, 30 bp, Artificial Sequence
  Synthetic oligonucleotide
tgcgaaggaaggtcaaccagctagaggcaa

SEQ ID NO: 51277 - DNA, 30 bp, Artificial Sequence
  Synthetic oligonucleotide
caatctcgactaaagaatccagtgaggcaa

SEQ ID NO: 51278 - DNA, 30 bp, Artificial Sequence
  Synthetic oligonucleotide
cactagataccatcacaaagaaatcggcaa

SEQ ID NO: 51279 - DNA, 30 bp, Artificial Sequence
  Synthetic oligonucleotide
agtcgaagaagggggtatcactgcgggcaa

SEQ ID NO: 51280 - DNA, 30 bp, Artificial Sequence
  Synthetic oligonucleotide
caaagcatacggatggagatttaggggcaa

SEQ ID NO: 51281 - DNA, 30 bp, Artificial Sequence
  Synthetic oligonucleotide
caggggtaacgtagtgtataactggggcaa

SEQ ID NO: 51282 - DNA, 30 bp, Artificial Sequence
  Synthetic oligonucleotide
tcttcaccaaggtgcgctaccggatggcaa

SEQ ID NO: 51283 - DNA, 30 bp, Artificial Sequence
  Synthetic oligonucleotide
agtacggttacctagagcatccactggcaa

SEQ ID NO: 51284 - DNA, 30 bp, Artificial Sequence
  Synthetic oligonucleotide
tcgtgtaacatcataacacaggattggcaa

SEQ ID NO: 51285 - DNA, 30 bp, Artificial Sequence
  Synthetic oligonucleotide
aggaaaaggaacgacaccagaccgctgcaa

SEQ ID NO: 51286 - DNA, 30 bp, Artificial Sequence
  Synthetic oligonucleotide
acactgcaccgaagcgcgaaccgagtgcaa

SEQ ID NO: 51287 - DNA, 30 bp, Artificial Sequence
  Synthetic oligonucleotide
tcaagtgttattagaaccctaggagtgcaa

SEQ ID NO: 51288 - DNA, 30 bp, Artificial Sequence
  Synthetic oligonucleotide
gggcggtcggcgtcagcatcgatggtgcaa

SEQ ID NO: 51289 - DNA, 30 bp, Artificial Sequence
  Synthetic oligonucleotide
agtgagagggagcccaataacaagttgcaa

SEQ ID NO: 51290 - DNA, 30 bp, Artificial Sequence
  Synthetic oligonucleotide
gataaaaatccgaagtgtgcacaaaatcaa

SEQ ID NO: 51291 - DNA, 30 bp, Artificial Sequence
  Synthetic oligonucleotide
atcaacggagtggtagggttataatatcaa

SEQ ID NO: 51292 - DNA, 30 bp, Artificial Sequence
  Synthetic oligonucleotide
tataggacaatagaactcttgcgatatcaa

SEQ ID NO: 51293 - DNA, 30 bp, Artificial Sequence
  Synthetic oligonucleotide
acgaaagcgttagtattgcagttgtatcaa

SEQ ID NO: 51294 - DNA, 30 bp, Artificial Sequence
  Synthetic oligonucleotide
gcgcacgccgcgctacatagccatactcaa

SEQ ID NO: 51295 - DNA, 30 bp, Artificial Sequence
  Synthetic oligonucleotide
tggcaggatctaaaataaggccgtcctcaa

SEQ ID NO: 51296 - DNA, 30 bp, Artificial Sequence
  Synthetic oligonucleotide
tacgtaaggagtagtcaacagagagctcaa

SEQ ID NO: 51297 - DNA, 30 bp, Artificial Sequence
  Synthetic oligonucleotide
agtgcggtgtgatgaagtcgtagcgctcaa

SEQ ID NO: 51298 - DNA, 30 bp, Artificial Sequence
  Synthetic oligonucleotide
caaacgaagggttcatcgatataaggtcaa

SEQ ID NO: 51299 - DNA, 30 bp, Artificial Sequence
  Synthetic oligonucleotide
cgatgtcacctcaccggcggaaacggtcaa

SEQ ID NO: 51300 - DNA, 30 bp, Artificial Sequence
  Synthetic oligonucleotide
ctgcaaaccgcgcgtccaagagcttgtcaa

SEQ ID NO: 51301 - DNA, 30 bp, Artificial Sequence
  Synthetic oligonucleotide
ggatgtagtcgaaggagctacggttgtcaa

SEQ ID NO: 51302 - DNA, 30 bp, Artificial Sequence
  Synthetic oligonucleotide
gcatgacgatgagagtcggcgaggattcaa

SEQ ID NO: 51303 - DNA, 30 bp, Artificial Sequence
  Synthetic oligonucleotide
ggcgcaaagtagatgattactgtgattcaa

SEQ ID NO: 51304 - DNA, 30 bp, Artificial Sequence
  Synthetic oligonucleotide
cgccaatggcaccagtaatatccgcttcaa

SEQ ID NO: 51305 - DNA, 30 bp, Artificial Sequence
  Synthetic oligonucleotide
aacgaggctgtgacaatgtgaacaaaagaa

SEQ ID NO: 51306 - DNA, 30 bp, Artificial Sequence
  Synthetic oligonucleotide
accctagctccagacaacgacttacaagaa

SEQ ID NO: 51307 - DNA, 30 bp, Artificial Sequence
  Synthetic oligonucleotide
gtccaaatcgcatggaaatcaggggaagaa

SEQ ID NO: 51308 - DNA, 30 bp, Artificial Sequence
  Synthetic oligonucleotide
gtgcaaacgttaagagactctgctgaagaa

SEQ ID NO: 51309 - DNA, 30 bp, Artificial Sequence
  Synthetic oligonucleotide
taccgtcggaatcgtgggatctactaagaa

SEQ ID NO: 51310 - DNA, 30 bp, Artificial Sequence
  Synthetic oligonucleotide
cggtaccggatcataggctcccagtaagaa

SEQ ID NO: 51311 - DNA, 30 bp, Artificial Sequence
  Synthetic oligonucleotide
cgtgagacccagagtacacagatgtaagaa

SEQ ID NO: 51312 - DNA, 30 bp, Artificial Sequence
  Synthetic oligonucleotide
tggggaaatcttgggataaaggaaacagaa

SEQ ID NO: 51313 - DNA, 30 bp, Artificial Sequence
  Synthetic oligonucleotide
tggctagacagttcttcgaagcgaacagaa

SEQ ID NO: 51314 - DNA, 30 bp, Artificial Sequence
  Synthetic oligonucleotide
ccacaagccgaaaccgcagtctccacagaa

SEQ ID NO: 51315 - DNA, 30 bp, Artificial Sequence
  Synthetic oligonucleotide
ctgtggaatcaagccccccagggcacagaa

SEQ ID NO: 51316 - DNA, 30 bp, Artificial Sequence
  Synthetic oligonucleotide
gttagagttggacaaggaaagatgacagaa

SEQ ID NO: 51317 - DNA, 30 bp, Artificial Sequence
  Synthetic oligonucleotide
tcccaacaggagtagcgaaccttaccagaa

SEQ ID NO: 51318 - DNA, 30 bp, Artificial Sequence
  Synthetic oligonucleotide
tatagcggtaaacgtgaggttaccccagaa

SEQ ID NO: 51319 - DNA, 30 bp, Artificial Sequence
  Synthetic oligonucleotide
cctccagtcagaagactggtaacagcagaa

SEQ ID NO: 51320 - DNA, 30 bp, Artificial Sequence
  Synthetic oligonucleotide
tgatcggtgtgaatattcgacttggcagaa

SEQ ID NO: 51321 - DNA, 30 bp, Artificial Sequence
  Synthetic oligonucleotide
tgcctgagaggaaaacgttggttatcagaa

SEQ ID NO: 51322 - DNA, 30 bp, Artificial Sequence
  Synthetic oligonucleotide
gaagaacaatgcttcgcgatcgactcagaa

SEQ ID NO: 51323 - DNA, 30 bp, Artificial Sequence
  Synthetic oligonucleotide
ttgcgcagtccgaacattgagggctcagaa

SEQ ID NO: 51324 - DNA, 30 bp, Artificial Sequence
  Synthetic oligonucleotide
acgtagcggagttaagaagtgtttagagaa

SEQ ID NO: 51325 - DNA, 30 bp, Artificial Sequence
  Synthetic oligonucleotide
tcggaggcggaagtgagaccattgcgagaa

SEQ ID NO: 51326 - DNA, 30 bp, Artificial Sequence
  Synthetic oligonucleotide
tcccgaggattcagagcatcctgcggagaa

SEQ ID NO: 51327 - DNA, 30 bp, Artificial Sequence
  Synthetic oligonucleotide
atagtattgcggaaactatagagttgagaa

SEQ ID NO: 51328 - DNA, 30 bp, Artificial Sequence
  Synthetic oligonucleotide
ctgcaacgacactgatcggcgtttatagaa

SEQ ID NO: 51329 - DNA, 30 bp, Artificial Sequence
  Synthetic oligonucleotide
gaccatgaaatgtccacaaaggtactagaa

SEQ ID NO: 51330 - DNA, 30 bp, Artificial Sequence
  Synthetic oligonucleotide
tgtaatcggccagtcttaatcatagtagaa

SEQ ID NO: 51331 - DNA, 30 bp, Artificial Sequence
  Synthetic oligonucleotide
cctgggttgtcgaagggaactgtagtagaa

SEQ ID NO: 51332 - DNA, 30 bp, Artificial Sequence
  Synthetic oligonucleotide
ataacgtattcagcgccaaaacgcgtagaa

SEQ ID NO: 51333 - DNA, 30 bp, Artificial Sequence
  Synthetic oligonucleotide
cagggtgttgtgatagaaggagtggtagaa

SEQ ID NO: 51334 - DNA, 30 bp, Artificial Sequence
  Synthetic oligonucleotide
agtagcaatgggaatcatattagtgtagaa

SEQ ID NO: 51335 - DNA, 30 bp, Artificial Sequence
  Synthetic oligonucleotide
acaatcatcggttccgccacgaccttagaa

SEQ ID NO: 51336 - DNA, 30 bp, Artificial Sequence
  Synthetic oligonucleotide
taggttcgcaatgaggaggacatcaacgaa

SEQ ID NO: 51337 - DNA, 30 bp, Artificial Sequence
  Synthetic oligonucleotide
cgagcgtatccactcgcaactatgcacgaa

SEQ ID NO: 51338 - DNA, 30 bp, Artificial Sequence
  Synthetic oligonucleotide
gcggtgcttagaaggcggacgaaatacgaa

SEQ ID NO: 51339 - DNA, 30 bp, Artificial Sequence
  Synthetic oligonucleotide
ggtgtatgacggtaggtgagttactacgaa

SEQ ID NO: 51340 - DNA, 30 bp, Artificial Sequence
  Synthetic oligonucleotide
gcttatgggcgccgggaagacagttacgaa

SEQ ID NO: 51341 - DNA, 30 bp, Artificial Sequence
  Synthetic oligonucleotide
caatttcgggcacggactatatctaccgaa

SEQ ID NO: 51342 - DNA, 30 bp, Artificial Sequence
  Synthetic oligonucleotide
tccctacgctattagaagaagtgtaccgaa

SEQ ID NO: 51343 - DNA, 30 bp, Artificial Sequence
  Synthetic oligonucleotide
tggtcgtcattaaaacggactaaagccgaa

SEQ ID NO: 51344 - DNA, 30 bp, Artificial Sequence
  Synthetic oligonucleotide
ccgtcacgtatcctgaccgtgatggccgaa

SEQ ID NO: 51345 - DNA, 30 bp, Artificial Sequence
  Synthetic oligonucleotide
cggtattagaccacccgaagtacttccgaa

SEQ ID NO: 51346 - DNA, 30 bp, Artificial Sequence
  Synthetic oligonucleotide
tactgcagccgagtgcatcggtacagcgaa

SEQ ID NO: 51347 - DNA, 30 bp, Artificial Sequence
  Synthetic oligonucleotide
cggtacgtacgctagtcagtagagagcgaa

SEQ ID NO: 51348 - DNA, 30 bp, Artificial Sequence
  Synthetic oligonucleotide
gcagatcattacgtaaagtatgtgagcgaa

SEQ ID NO: 51349 - DNA, 30 bp, Artificial Sequence
  Synthetic oligonucleotide
gtagagggctacaggttaggaatgcgcgaa

SEQ ID NO: 51350 - DNA, 30 bp, Artificial Sequence
  Synthetic oligonucleotide
cgttctctaggaatgacaacaggtcgcgaa

SEQ ID NO: 51351 - DNA, 30 bp, Artificial Sequence
  Synthetic oligonucleotide
tcctcgaattagtgcactcagcgatgcgaa

SEQ ID NO: 51352 - DNA, 30 bp, Artificial Sequence
  Synthetic oligonucleotide
ctacagtcgcgcgccggactaacctgcgaa

SEQ ID NO: 51353 - DNA, 30 bp, Artificial Sequence
  Synthetic oligonucleotide
gagcaccagacgacacggattgtctgcgaa

SEQ ID NO: 51354 - DNA, 30 bp, Artificial Sequence
  Synthetic oligonucleotide
tgaggttgaacaacctcaaatctgtgcgaa

SEQ ID NO: 51355 - DNA, 30 bp, Artificial Sequence
  Synthetic oligonucleotide
aggtatcaaacccagggaaaactgctcgaa

SEQ ID NO: 51356 - DNA, 30 bp, Artificial Sequence
  Synthetic oligonucleotide
cgattgcccaagcgagagggtcaggtcgaa

SEQ ID NO: 51357 - DNA, 30 bp, Artificial Sequence
  Synthetic oligonucleotide
gataaccgtaaggcttaccacgctgtcgaa

SEQ ID NO: 51358 - DNA, 30 bp, Artificial Sequence
  Synthetic oligonucleotide
catgcaattaaatgataaaaaacaaaggaa

SEQ ID NO: 51359 - DNA, 30 bp, Artificial Sequence
  Synthetic oligonucleotide
attgagtgcgcaaacagcgccaagcaggaa

SEQ ID NO: 51360 - DNA, 30 bp, Artificial Sequence
  Synthetic oligonucleotide
aaaaaacgacacacttttgaggggcaggaa

SEQ ID NO: 51361 - DNA, 30 bp, Artificial Sequence
  Synthetic oligonucleotide
tcaactcggaatgttattcgcgaagaggaa

SEQ ID NO: 51362 - DNA, 30 bp, Artificial Sequence
  Synthetic oligonucleotide
gaggatgcatcacacgtctcgggtgaggaa

SEQ ID NO: 51363 - DNA, 30 bp, Artificial Sequence
  Synthetic oligonucleotide
ggagaatccctaccagatgtgtaaacggaa

SEQ ID NO: 51364 - DNA, 30 bp, Artificial Sequence
  Synthetic oligonucleotide
atcacgcattcacgggggcactggacggaa

SEQ ID NO: 51365 - DNA, 30 bp, Artificial Sequence
  Synthetic oligonucleotide
aactgcgaggggtataagcgtggtccggaa

SEQ ID NO: 51366 - DNA, 30 bp, Artificial Sequence
  Synthetic oligonucleotide
tcgtcatataggatgataaaatactcggaa

SEQ ID NO: 51367 - DNA, 30 bp, Artificial Sequence
  Synthetic oligonucleotide
cgagcgacataggaacaggcctgttcggaa

SEQ ID NO: 51368 - DNA, 30 bp, Artificial Sequence
  Synthetic oligonucleotide
gggtgaaaggcctgtacagataaccgggaa

SEQ ID NO: 51369 - DNA, 30 bp, Artificial Sequence
  Synthetic oligonucleotide
cggtgcgtgactagtatagcatggcgggaa

SEQ ID NO: 51370 - DNA, 30 bp, Artificial Sequence
  Synthetic oligonucleotide
cgtagcgggagaattggtcctcaaggggaa

SEQ ID NO: 51371 - DNA, 30 bp, Artificial Sequence
  Synthetic oligonucleotide
gttggatcccactaaaccgcgacaggggaa

SEQ ID NO: 51372 - DNA, 30 bp, Artificial Sequence
  Synthetic oligonucleotide
ggttcgcaagttatcgagtcagtgtgggaa

SEQ ID NO: 51373 - DNA, 30 bp, Artificial Sequence
  Synthetic oligonucleotide
gtgaccgggctggagtaagttagcatggaa

SEQ ID NO: 51374 - DNA, 30 bp, Artificial Sequence
  Synthetic oligonucleotide
agagagaacggcagactacggggcctggaa

SEQ ID NO: 51375 - DNA, 30 bp, Artificial Sequence
  Synthetic oligonucleotide
tcaggaccctcggagctgcgaatgctggaa

SEQ ID NO: 51376 - DNA, 30 bp, Artificial Sequence
  Synthetic oligonucleotide
actagctaccgatgtgcggggatggtggaa

SEQ ID NO: 51377 - DNA, 30 bp, Artificial Sequence
  Synthetic oligonucleotide
tacgacatccccctcggattaacaaatgaa

SEQ ID NO: 51378 - DNA, 30 bp, Artificial Sequence
  Synthetic oligonucleotide
cgaaagtaccaggagcaaggggcaaatgaa

SEQ ID NO: 51379 - DNA, 30 bp, Artificial Sequence
  Synthetic oligonucleotide
cgacgttatatgcgaaagtgtgcaaatgaa

SEQ ID NO: 51380 - DNA, 30 bp, Artificial Sequence
  Synthetic oligonucleotide
agtacgattcggattaaaaactcaaatgaa

SEQ ID NO: 51381 - DNA, 30 bp, Artificial Sequence
  Synthetic oligonucleotide
ataacagtcaaatcaagctacctaaatgaa

SEQ ID NO: 51382 - DNA, 30 bp, Artificial Sequence
  Synthetic oligonucleotide
taatgggagataaaagaagtggaacatgaa

SEQ ID NO: 51383 - DNA, 30 bp, Artificial Sequence
  Synthetic oligonucleotide
tcaccagtgtgcgactaagtaacccatgaa

SEQ ID NO: 51384 - DNA, 30 bp, Artificial Sequence
  Synthetic oligonucleotide
gaagagatacggcgttgtatcaaagatgaa

SEQ ID NO: 51385 - DNA, 30 bp, Artificial Sequence
  Synthetic oligonucleotide
ggtagatatggtggcccgctcattgatgaa

SEQ ID NO: 51386 - DNA, 30 bp, Artificial Sequence
  Synthetic oligonucleotide
aacaaggcgaagggttaattaggtgctgaa

SEQ ID NO: 51387 - DNA, 30 bp, Artificial Sequence
  Synthetic oligonucleotide
ccgtactcttccacaatcacacagtgtgaa

SEQ ID NO: 51388 - DNA, 30 bp, Artificial Sequence
  Synthetic oligonucleotide
acgacgagacatcactttctatttcttgaa

SEQ ID NO: 51389 - DNA, 30 bp, Artificial Sequence
  Synthetic oligonucleotide
tgctcggcgagaaattgaagttaaaaataa

SEQ ID NO: 51390 - DNA, 30 bp, Artificial Sequence
  Synthetic oligonucleotide
caaggagtgagcgtttagacgtctaaataa

SEQ ID NO: 51391 - DNA, 30 bp, Artificial Sequence
  Synthetic oligonucleotide
agttggatcgtactagaaggagagcaataa

SEQ ID NO: 51392 - DNA, 30 bp, Artificial Sequence
  Synthetic oligonucleotide
cccatgcgatacaggtagaaccatcaataa

SEQ ID NO: 51393 - DNA, 30 bp, Artificial Sequence
  Synthetic oligonucleotide
atggaacgcgaatgcaagcgatgtcaataa

SEQ ID NO: 51394 - DNA, 30 bp, Artificial Sequence
  Synthetic oligonucleotide
ggcaattaaagatccgttacacttgaataa

SEQ ID NO: 51395 - DNA, 30 bp, Artificial Sequence
  Synthetic oligonucleotide
catcacctgtagcatcggtgccgctaataa

SEQ ID NO: 51396 - DNA, 30 bp, Artificial Sequence
  Synthetic oligonucleotide
ggaacgactcatctgtaagagcgcgcataa

SEQ ID NO: 51397 - DNA, 30 bp, Artificial Sequence
  Synthetic oligonucleotide
gacacctagtatcaacgacgaagggcataa

SEQ ID NO: 51398 - DNA, 30 bp, Artificial Sequence
  Synthetic oligonucleotide
catgaactataacaattccagatggcataa

SEQ ID NO: 51399 - DNA, 30 bp, Artificial Sequence
  Synthetic oligonucleotide
gcgagggcgcattagatacgttactcataa

SEQ ID NO: 51400 - DNA, 30 bp, Artificial Sequence
  Synthetic oligonucleotide
gggagggtaaattgcgttatagcgtcataa

SEQ ID NO: 51401 - DNA, 30 bp, Artificial Sequence
  Synthetic oligonucleotide
cctgatagttgaggaatgaccgcaagataa

SEQ ID NO: 51402 - DNA, 30 bp, Artificial Sequence
  Synthetic oligonucleotide
aacggaattcggttcccaagggatagataa

SEQ ID NO: 51403 - DNA, 30 bp, Artificial Sequence
  Synthetic oligonucleotide
agatgaaaacggcattcatcacggggataa

SEQ ID NO: 51404 - DNA, 30 bp, Artificial Sequence
  Synthetic oligonucleotide
cgggcaagcacgctacactgaagtatataa

SEQ ID NO: 51405 - DNA, 30 bp, Artificial Sequence
  Synthetic oligonucleotide
catcgtgagatctgggaactaggtatataa

SEQ ID NO: 51406 - DNA, 30 bp, Artificial Sequence
  Synthetic oligonucleotide
cacaaggggatacctttgggaaatgtataa

SEQ ID NO: 51407 - DNA, 30 bp, Artificial Sequence
  Synthetic oligonucleotide
tcgatgctacggaagacataagggttataa

SEQ ID NO: 51408 - DNA, 30 bp, Artificial Sequence
  Synthetic oligonucleotide
cgatagaaaagaaacgtataagtacactaa

SEQ ID NO: 51409 - DNA, 30 bp, Artificial Sequence
  Synthetic oligonucleotide
caaagtcacttctcgataaacgtccactaa

SEQ ID NO: 51410 - DNA, 30 bp, Artificial Sequence
  Synthetic oligonucleotide
acagggcctagcgcatcagtaatgcactaa

SEQ ID NO: 51411 - DNA, 30 bp, Artificial Sequence
  Synthetic oligonucleotide
tgtgacaataaaacccacgggacagactaa

SEQ ID NO: 51412 - DNA, 30 bp, Artificial Sequence
  Synthetic oligonucleotide
agagcagggtcatgcaggctgttcgactaa

SEQ ID NO: 51413 - DNA, 30 bp, Artificial Sequence
  Synthetic oligonucleotide
aacagaaaaatcatagtcacggcgtactaa

SEQ ID NO: 51414 - DNA, 30 bp, Artificial Sequence
  Synthetic oligonucleotide
catatacgaacaagaactatgataacctaa

SEQ ID NO: 51415 - DNA, 30 bp, Artificial Sequence
  Synthetic oligonucleotide
gagcgggacacctaattcaagcccacctaa

SEQ ID NO: 51416 - DNA, 30 bp, Artificial Sequence
  Synthetic oligonucleotide
atgcctgatatcgaatacaactagacctaa

SEQ ID NO: 51417 - DNA, 30 bp, Artificial Sequence
  Synthetic oligonucleotide
caccatcaacaagcacgtcgggcaccctaa

SEQ ID NO: 51418 - DNA, 30 bp, Artificial Sequence
  Synthetic oligonucleotide
acgccaccggaacttcttaatcgtgcctaa

SEQ ID NO: 51419 - DNA, 30 bp, Artificial Sequence
  Synthetic oligonucleotide
tcatgccacatttattctcgagcgagctaa

SEQ ID NO: 51420 - DNA, 30 bp, Artificial Sequence
  Synthetic oligonucleotide
tgccatgcaacggtaggaaactagcgctaa

SEQ ID NO: 51421 - DNA, 30 bp, Artificial Sequence
  Synthetic oligonucleotide
aacgtccacgacacgtcagacacaggctaa

SEQ ID NO: 51422 - DNA, 30 bp, Artificial Sequence
  Synthetic oligonucleotide
agctagggggcccagagacctcagggctaa

SEQ ID NO: 51423 - DNA, 30 bp, Artificial Sequence
  Synthetic oligonucleotide
agcggcggattgcaatagagcgaatgctaa

SEQ ID NO: 51424 - DNA, 30 bp, Artificial Sequence
  Synthetic oligonucleotide
gggacaggtcgactgggaagggaatgctaa

SEQ ID NO: 51425 - DNA, 30 bp, Artificial Sequence
  Synthetic oligonucleotide
aggaccagcacacatccattgaggatctaa

SEQ ID NO: 51426 - DNA, 30 bp, Artificial Sequence
  Synthetic oligonucleotide
ggggcagtggacaatgaaaaaggtttctaa

SEQ ID NO: 51427 - DNA, 30 bp, Artificial Sequence
  Synthetic oligonucleotide
agggagcaggcatagcgttgggcacagtaa

SEQ ID NO: 51428 - DNA, 30 bp, Artificial Sequence
  Synthetic oligonucleotide
ccgtaagggagctgattcagagagcagtaa

SEQ ID NO: 51429 - DNA, 30 bp, Artificial Sequence
  Synthetic oligonucleotide
acgaagaatggcgtatgttgtatggagtaa

SEQ ID NO: 51430 - DNA, 30 bp, Artificial Sequence
  Synthetic oligonucleotide
cggcactgtaattctaactgttgtgagtaa

SEQ ID NO: 51431 - DNA, 30 bp, Artificial Sequence
  Synthetic oligonucleotide
ggacggtaggtaatacaaatataatagtaa

SEQ ID NO: 51432 - DNA, 30 bp, Artificial Sequence
  Synthetic oligonucleotide
atcgcagagttgcatcgggaaagctagtaa

SEQ ID NO: 51433 - DNA, 30 bp, Artificial Sequence
  Synthetic oligonucleotide
tgaggaggcgaacacgtgatcaaaacgtaa

SEQ ID NO: 51434 - DNA, 30 bp, Artificial Sequence
  Synthetic oligonucleotide
tcagataactcgcttgccagacagacgtaa

SEQ ID NO: 51435 - DNA, 30 bp, Artificial Sequence
  Synthetic oligonucleotide
ctaggggcgagtatttatcacgggacgtaa

SEQ ID NO: 51436 - DNA, 30 bp, Artificial Sequence
  Synthetic oligonucleotide
gggtaaacgggactcgttgcgcatacgtaa

SEQ ID NO: 51437 - DNA, 30 bp, Artificial Sequence
  Synthetic oligonucleotide
tgggagtaaggctgcgatcacaagccgtaa

SEQ ID NO: 51438 - DNA, 30 bp, Artificial Sequence
  Synthetic oligonucleotide
ctgtcagaaacgcgtgagacagggccgtaa

SEQ ID NO: 51439 - DNA, 30 bp, Artificial Sequence
  Synthetic oligonucleotide
tatagaaggtcgtacagaatgggagcgtaa

SEQ ID NO: 51440 - DNA, 30 bp, Artificial Sequence
  Synthetic oligonucleotide
acctatgcgagttgatgtcggctagcgtaa

SEQ ID NO: 51441 - DNA, 30 bp, Artificial Sequence
  Synthetic oligonucleotide
tcgagcaatcgtaccgacttacaaaggtaa

SEQ ID NO: 51442 - DNA, 29 bp, Artificial Sequence
  Synthetic oligonucleotide
gtagacaccttgcggatggataaaggtaa

SEQ ID NO: 51443 - DNA, 30 bp, Artificial Sequence
  Synthetic oligonucleotide
tcggcactctaatatactagcccacggtaa

SEQ ID NO: 51444 - DNA, 30 bp, Artificial Sequence
  Synthetic oligonucleotide
tgctcagaggaatgtgaacgtcagcggtaa

SEQ ID NO: 51445 - DNA, 30 bp, Artificial Sequence
  Synthetic oligonucleotide
tacgtatctatgatggaaacgagcgggtaa

SEQ ID NO: 51446 - DNA, 30 bp, Artificial Sequence
  Synthetic oligonucleotide
ctgataccggagacacagaagatcgtgtaa

SEQ ID NO: 51447 - DNA, 30 bp, Artificial Sequence
  Synthetic oligonucleotide
ggaccttaagaacacgcgacacggaattaa

SEQ ID NO: 51448 - DNA, 31 bp, Artificial Sequence
  Synthetic oligonucleotide
ggctgacagagggcctaaaaatagtaattaa

SEQ ID NO: 51449 - DNA, 30 bp, Artificial Sequence
  Synthetic oligonucleotide
ggtagcaatgggagagacagtagtcattaa

SEQ ID NO: 51450 - DNA, 30 bp, Artificial Sequence
  Synthetic oligonucleotide
tcaaataataacccactactcgcgacttaa

SEQ ID NO: 51451 - DNA, 30 bp, Artificial Sequence
  Synthetic oligonucleotide
cggatacattgagggaacgtgctgccttaa

SEQ ID NO: 51452 - DNA, 30 bp, Artificial Sequence
  Synthetic oligonucleotide
agattatcccggttccgaaaagcggcttaa

SEQ ID NO: 51453 - DNA, 30 bp, Artificial Sequence
  Synthetic oligonucleotide
cgtgcgaggactccttcacccagtcgttaa

SEQ ID NO: 51454 - DNA, 30 bp, Artificial Sequence
  Synthetic oligonucleotide
caggttggacatctaagcggtggtcgttaa

SEQ ID NO: 51455 - DNA, 30 bp, Artificial Sequence
  Synthetic oligonucleotide
agaaactagtactccataaaacttcgttaa

SEQ ID NO: 51456 - DNA, 30 bp, Artificial Sequence
  Synthetic oligonucleotide
acgaagtttcagaaaatgtaacgcggttaa

SEQ ID NO: 51457 - DNA, 30 bp, Artificial Sequence
  Synthetic oligonucleotide
agtgagcgaatttgtcaggcaaaatgttaa

SEQ ID NO: 51458 - DNA, 30 bp, Artificial Sequence
  Synthetic oligonucleotide
ctggtaagaaattgccgagggtgatgttaa

SEQ ID NO: 51459 - DNA, 30 bp, Artificial Sequence
  Synthetic oligonucleotide
agccggagcgagcgagccaccacgtgttaa

SEQ ID NO: 51460 - DNA, 30 bp, Artificial Sequence
  Synthetic oligonucleotide
tcacgaggtaaacctcacgctataatttaa

SEQ ID NO: 51461 - DNA, 30 bp, Artificial Sequence
  Synthetic oligonucleotide
atggggactacctcagcgaaattgatttaa

SEQ ID NO: 51462 - DNA, 30 bp, Artificial Sequence
  Synthetic oligonucleotide
aacgaggttcacgtgtgtggggtgaaaaca

SEQ ID NO: 51463 - DNA, 30 bp, Artificial Sequence
  Synthetic oligonucleotide
gtggtgttaatgaagacatgggaacaaaca

SEQ ID NO: 51464 - DNA, 30 bp, Artificial Sequence
  Synthetic oligonucleotide
agaatatggcagtaaaaggattgagaaaca

SEQ ID NO: 51465 - DNA, 30 bp, Artificial Sequence
  Synthetic oligonucleotide
cccacgaaaagttgatacggcccaacaaca

SEQ ID NO: 51466 - DNA, 30 bp, Artificial Sequence
  Synthetic oligonucleotide
tgacagcaaacggaatcggggcctacaaca

SEQ ID NO: 51467 - DNA, 30 bp, Artificial Sequence
  Synthetic oligonucleotide
cgagtggtaacaaggtggttgattacaaca

SEQ ID NO: 51468 - DNA, 30 bp, Artificial Sequence
  Synthetic oligonucleotide
cgtggacatagttgttcatgacaagcaaca

SEQ ID NO: 51469 - DNA, 30 bp, Artificial Sequence
  Synthetic oligonucleotide
gataagaagagacccacatctgtggcaaca

SEQ ID NO: 51470 - DNA, 30 bp, Artificial Sequence
  Synthetic oligonucleotide
gtcggatcggccaccgtcatcgtgtcaaca

SEQ ID NO: 51471 - DNA, 30 bp, Artificial Sequence
  Synthetic oligonucleotide
tcaacataaaagacgggagccaaaagaaca

SEQ ID NO: 51472 - DNA, 30 bp, Artificial Sequence
  Synthetic oligonucleotide
gaaatgttacacgagagacacagaagaaca

SEQ ID NO: 51473 - DNA, 30 bp, Artificial Sequence
  Synthetic oligonucleotide
aggaacaatgggttttatgcacatagaaca

SEQ ID NO: 51474 - DNA, 31 bp, Artificial Sequence
  Synthetic oligonucleotide
cgagggggaagggttgatgtgcgtccgaaca

SEQ ID NO: 51475 - DNA, 30 bp, Artificial Sequence
  Synthetic oligonucleotide
tcgaaataacgattgtcgcatggtcgaaca

SEQ ID NO: 51476 - DNA, 30 bp, Artificial Sequence
  Synthetic oligonucleotide
ggcaaagtctccttaacgaacattcgaaca

SEQ ID NO: 51477 - DNA, 30 bp, Artificial Sequence
  Synthetic oligonucleotide
taggatttggatagaccacccattcgaaca

SEQ ID NO: 51478 - DNA, 30 bp, Artificial Sequence
  Synthetic oligonucleotide
gatcctggcctggcgaaaaagtaaggaaca

SEQ ID NO: 51479 - DNA, 30 bp, Artificial Sequence
  Synthetic oligonucleotide
caccttgaacctacaaactcacatataaca

SEQ ID NO: 51480 - DNA, 30 bp, Artificial Sequence
  Synthetic oligonucleotide
catagtcagacttaagaaaaactagtaaca

SEQ ID NO: 51481 - DNA, 30 bp, Artificial Sequence
  Synthetic oligonucleotide
gccggcgaatgcataggggagtccgtaaca

SEQ ID NO: 51482 - DNA, 30 bp, Artificial Sequence
  Synthetic oligonucleotide
gggtatgcgacaacagactcctgcgtaaca

SEQ ID NO: 51483 - DNA, 30 bp, Artificial Sequence
  Synthetic oligonucleotide
aggggaccggggtacagtgtggcggtaaca

SEQ ID NO: 51484 - DNA, 30 bp, Artificial Sequence
  Synthetic oligonucleotide
gtcttagtggccgaaaacacaggggtaaca

SEQ ID NO: 51485 - DNA, 30 bp, Artificial Sequence
  Synthetic oligonucleotide
agcttggaggacacatccggattggtaaca

SEQ ID NO: 51486 - DNA, 30 bp, Artificial Sequence
  Synthetic oligonucleotide
tcgagcaaacggttcgaagggtatttaaca

SEQ ID NO: 51487 - DNA, 30 bp, Artificial Sequence
  Synthetic oligonucleotide
cgatgataagcttcagagtggtaaaacaca

SEQ ID NO: 51488 - DNA, 30 bp, Artificial Sequence
  Synthetic oligonucleotide
cctaggtcatctgacctgggcccaaacaca

SEQ ID NO: 51489 - DNA, 30 bp, Artificial Sequence
  Synthetic oligonucleotide
tggaacgagacaaaaagctgtgtaaacaca

SEQ ID NO: 51490 - DNA, 30 bp, Artificial Sequence
  Synthetic oligonucleotide
gtgacataggggacaacctacagtaacaca

SEQ ID NO: 51491 - DNA, 30 bp, Artificial Sequence
  Synthetic oligonucleotide
acattcatggagtggaacgggagtaacaca

SEQ ID NO: 51492 - DNA, 30 bp, Artificial Sequence
  Synthetic oligonucleotide
cgcggtaggaaaagctgcgagcacgacaca

SEQ ID NO: 51493 - DNA, 30 bp, Artificial Sequence
  Synthetic oligonucleotide
aatgggcctaggcgaattattgaccccaca

SEQ ID NO: 51494 - DNA, 30 bp, Artificial Sequence
  Synthetic oligonucleotide
gggtcacacacggagtcaaacgtctccaca

SEQ ID NO: 51495 - DNA, 30 bp, Artificial Sequence
  Synthetic oligonucleotide
aacgtataaaatactaacccctaaagcaca

SEQ ID NO: 51496 - DNA, 30 bp, Artificial Sequence
  Synthetic oligonucleotide
gatggtcaagctaagatagttttcagcaca

SEQ ID NO: 51497 - DNA, 30 bp, Artificial Sequence
  Synthetic oligonucleotide
aatgaactgtggaatgatagcgggagcaca

SEQ ID NO: 51498 - DNA, 30 bp, Artificial Sequence
  Synthetic oligonucleotide
gtacatccacgcaggacctccaatagcaca

SEQ ID NO: 51499 - DNA, 30 bp, Artificial Sequence
  Synthetic oligonucleotide
gtaacgtacaggatcagggcgcaccgcaca

SEQ ID NO: 51500 - DNA, 30 bp, Artificial Sequence
  Synthetic oligonucleotide
agccagccaagataagacgggggtcgcaca

SEQ ID NO: 51501 - DNA, 30 bp, Artificial Sequence
  Synthetic oligonucleotide
aaaaagcataggagggatgtagaaggcaca

SEQ ID NO: 51502 - DNA, 30 bp, Artificial Sequence
  Synthetic oligonucleotide
cgtaaccgaggcacgggcgacaacggcaca

SEQ ID NO: 51503 - DNA, 30 bp, Artificial Sequence
  Synthetic oligonucleotide
ttcaatacagtgacgatcaccccgggcaca

SEQ ID NO: 51504 - DNA, 30 bp, Artificial Sequence
  Synthetic oligonucleotide
atagccacctcagcgtcgaaaacgtgcaca

SEQ ID NO: 51505 - DNA, 30 bp, Artificial Sequence
  Synthetic oligonucleotide
agcgtggacaggcccggtttcgtcatcaca

SEQ ID NO: 51506 - DNA, 30 bp, Artificial Sequence
  Synthetic oligonucleotide
gcgtggtaatagatgtatacttgtctcaca

SEQ ID NO: 51507 - DNA, 30 bp, Artificial Sequence
  Synthetic oligonucleotide
tgcaccacggctacactcattagcgtcaca

SEQ ID NO: 51508 - DNA, 30 bp, Artificial Sequence
  Synthetic oligonucleotide
ataggaaagagcacgttatcttgcgtcaca

SEQ ID NO: 51509 - DNA, 30 bp, Artificial Sequence
  Synthetic oligonucleotide
ggtcaagccgtttgggtggaaaggaagaca

SEQ ID NO: 51510 - DNA, 30 bp, Artificial Sequence
  Synthetic oligonucleotide
gcgggagtacttgcaaagaaatcgcagaca

SEQ ID NO: 51511 - DNA, 30 bp, Artificial Sequence
  Synthetic oligonucleotide
aaggctatatgggcgtcaccaactgagaca

SEQ ID NO: 51512 - DNA, 30 bp, Artificial Sequence
  Synthetic oligonucleotide
ggggatggtcagcaaacgaggactgagaca

SEQ ID NO: 51513 - DNA, 30 bp, Artificial Sequence
  Synthetic oligonucleotide
ccgaaagctacgtggacttctattgagaca

SEQ ID NO: 51514 - DNA, 30 bp, Artificial Sequence
  Synthetic oligonucleotide
agctacagtccctagttcccagatccgaca

SEQ ID NO: 51515 - DNA, 30 bp, Artificial Sequence
  Synthetic oligonucleotide
agggacgaagtgacatatggttgtccgaca

SEQ ID NO: 51516 - DNA, 30 bp, Artificial Sequence
  Synthetic oligonucleotide
gctaaggatgggttgacaaggattccgaca

SEQ ID NO: 51517 - DNA, 30 bp, Artificial Sequence
  Synthetic oligonucleotide
aagcaatggagagctgttcaggaagcgaca

SEQ ID NO: 51518 - DNA, 30 bp, Artificial Sequence
  Synthetic oligonucleotide
gtaactatcccgtccaccagttgagcgaca

SEQ ID NO: 51519 - DNA, 30 bp, Artificial Sequence
  Synthetic oligonucleotide
ccctaggcaatgaattagcacaggtcgaca

SEQ ID NO: 51520 - DNA, 30 bp, Artificial Sequence
  Synthetic oligonucleotide
ggggatggctatttaaatcgatggtcgaca

SEQ ID NO: 51521 - DNA, 30 bp, Artificial Sequence
  Synthetic oligonucleotide
gtctataggtaaacgtaaagaagttcgaca

SEQ ID NO: 51522 - DNA, 30 bp, Artificial Sequence
  Synthetic oligonucleotide
gtaaacaaagtgcagtgtgaccgaaggaca

SEQ ID NO: 51523 - DNA, 30 bp, Artificial Sequence
  Synthetic oligonucleotide
atgggcaggggtgccgtagtccccaggaca

SEQ ID NO: 51524 - DNA, 30 bp, Artificial Sequence
  Synthetic oligonucleotide
cagcaaagcgactactaacgttccaggaca

SEQ ID NO: 51525 - DNA, 30 bp, Artificial Sequence
  Synthetic oligonucleotide
ttgatgtgcaacatatctctaaataggaca

SEQ ID NO: 51526 - DNA, 29 bp, Artificial Sequence
  Synthetic oligonucleotide
tgatcggccggactacattcatagggaca

SEQ ID NO: 51527 - DNA, 30 bp, Artificial Sequence
  Synthetic oligonucleotide
aaaacaaccgcgacaaatatgcgtgggaca

SEQ ID NO: 51528 - DNA, 30 bp, Artificial Sequence
  Synthetic oligonucleotide
agcgacatgcgggtggttgtaggttggaca

SEQ ID NO: 51529 - DNA, 30 bp, Artificial Sequence
  Synthetic oligonucleotide
tagggtcagtgcaagtctcacacgatgaca

SEQ ID NO: 51530 - DNA, 30 bp, Artificial Sequence
  Synthetic oligonucleotide
aacgtaaataagtcgcttgtcttactgaca

SEQ ID NO: 51531 - DNA, 30 bp, Artificial Sequence
  Synthetic oligonucleotide
cagtgtatacaccgcaaaatcagtgtgaca

SEQ ID NO: 51532 - DNA, 30 bp, Artificial Sequence
  Synthetic oligonucleotide
atgggatctgcggattccattcttgtgaca

SEQ ID NO: 51533 - DNA, 30 bp, Artificial Sequence
  Synthetic oligonucleotide
cgggcaggtgtcgtctggtaaagattgaca

SEQ ID NO: 51534 - DNA, 30 bp, Artificial Sequence
  Synthetic oligonucleotide
tcagcacggggccgtgaacaccgcaataca

SEQ ID NO: 51535 - DNA, 30 bp, Artificial Sequence
  Synthetic oligonucleotide
ggtagcctggtagaacggggcgcgaataca

SEQ ID NO: 51536 - DNA, 30 bp, Artificial Sequence
  Synthetic oligonucleotide
cggacatatcccgtcagaatatccgataca

SEQ ID NO: 51537 - DNA, 30 bp, Artificial Sequence
  Synthetic oligonucleotide
caattagttccaacgaaggcaatcgataca

SEQ ID NO: 51538 - DNA, 30 bp, Artificial Sequence
  Synthetic oligonucleotide
acgtaatttacatcgattttgagtgataca

SEQ ID NO: 51539 - DNA, 30 bp, Artificial Sequence
  Synthetic oligonucleotide
gacatgaacacccaaggacgagcacctaca

SEQ ID NO: 51540 - DNA, 30 bp, Artificial Sequence
  Synthetic oligonucleotide
gaaggtagcgcgcaaggcacacaagctaca

SEQ ID NO: 51541 - DNA, 30 bp, Artificial Sequence
  Synthetic oligonucleotide
tgaacggttcgtttgtcagagagtgctaca

SEQ ID NO: 51542 - DNA, 30 bp, Artificial Sequence
  Synthetic oligonucleotide
gggctgggaagttcgataacgagatgtaca

SEQ ID NO: 51543 - DNA, 30 bp, Artificial Sequence
  Synthetic oligonucleotide
catgagacaataccaaaattcgttattaca

SEQ ID NO: 51544 - DNA, 30 bp, Artificial Sequence
  Synthetic oligonucleotide
agagggggtagaatcagagacggttttaca

SEQ ID NO: 51545 - DNA, 30 bp, Artificial Sequence
  Synthetic oligonucleotide
cacggtagatagaggaatatgggcacacca

SEQ ID NO: 51546 - DNA, 30 bp, Artificial Sequence
  Synthetic oligonucleotide
ggtcagcggaactagaatagatagacacca

SEQ ID NO: 51547 - DNA, 30 bp, Artificial Sequence
  Synthetic oligonucleotide
aatgattcagaggacagaagttacgcacca

SEQ ID NO: 51548 - DNA, 30 bp, Artificial Sequence
  Synthetic oligonucleotide
atgtataagcgatgatatagagttgcacca

SEQ ID NO: 51549 - DNA, 30 bp, Artificial Sequence
  Synthetic oligonucleotide
cataaatccgatggttaaccacgtagacca

SEQ ID NO: 51550 - DNA, 30 bp, Artificial Sequence
  Synthetic oligonucleotide
cctgggtggtttagagaagtagacggacca

SEQ ID NO: 51551 - DNA, 30 bp, Artificial Sequence
  Synthetic oligonucleotide
ggaacagcgagtacggttaagaatggacca

SEQ ID NO: 51552 - DNA, 30 bp, Artificial Sequence
  Synthetic oligonucleotide
ggtttagaaaggtaaaacagactgtgacca

SEQ ID NO: 51553 - DNA, 30 bp, Artificial Sequence
  Synthetic oligonucleotide
caacgacctgaactcctatcgtaactacca

SEQ ID NO: 51554 - DNA, 30 bp, Artificial Sequence
  Synthetic oligonucleotide
ggacacgttgagaggtgtgacatgctacca

SEQ ID NO: 51555 - DNA, 30 bp, Artificial Sequence
  Synthetic oligonucleotide
atcgcgttagatccataaggaccagtacca

SEQ ID NO: 51556 - DNA, 30 bp, Artificial Sequence
  Synthetic oligonucleotide
aagtgcaaagccactgtgcagcgcaaccca

SEQ ID NO: 51557 - DNA, 30 bp, Artificial Sequence
  Synthetic oligonucleotide
gtaatgaagtcacgatcaattgagcaccca

SEQ ID NO: 51558 - DNA, 30 bp, Artificial Sequence
  Synthetic oligonucleotide
gcgataaagactaaaagacttgaagaccca

SEQ ID NO: 51559 - DNA, 30 bp, Artificial Sequence
  Synthetic oligonucleotide
tcatgggcaaaagaacgggggcagccccca

SEQ ID NO: 51560 - DNA, 30 bp, Artificial Sequence
  Synthetic oligonucleotide
aggagtaaagttcattgtagtccatcccca

SEQ ID NO: 51561 - DNA, 30 bp, Artificial Sequence
  Synthetic oligonucleotide
tatggattccagagctagaacctcagccca

SEQ ID NO: 51562 - DNA, 30 bp, Artificial Sequence
  Synthetic oligonucleotide
cgcaaagctggtaacacaaatacccgccca

SEQ ID NO: 51563 - DNA, 30 bp, Artificial Sequence
  Synthetic oligonucleotide
tactcaaggaaactccactaccttcgccca

SEQ ID NO: 51564 - DNA, 30 bp, Artificial Sequence
  Synthetic oligonucleotide
ccggtactataccagataccgtcatgccca

SEQ ID NO: 51565 - DNA, 30 bp, Artificial Sequence
  Synthetic oligonucleotide
gacataacggctcgaggcccaaggatccca

SEQ ID NO: 51566 - DNA, 30 bp, Artificial Sequence
  Synthetic oligonucleotide
ataggcctagaatctctgctcaacgtccca

SEQ ID NO: 51567 - DNA, 30 bp, Artificial Sequence
  Synthetic oligonucleotide
aggcagccacaggagcatctccaaaagcca

SEQ ID NO: 51568 - DNA, 30 bp, Artificial Sequence
  Synthetic oligonucleotide
tcccaaacggtgctagagtgcacaaagcca

SEQ ID NO: 51569 - DNA, 30 bp, Artificial Sequence
  Synthetic oligonucleotide
atgcacgtgggccccagagttcatgagcca

SEQ ID NO: 51570 - DNA, 30 bp, Artificial Sequence
  Synthetic oligonucleotide
caaaaaataagggaatcctacagaacgcca

SEQ ID NO: 51571 - DNA, 30 bp, Artificial Sequence
  Synthetic oligonucleotide
gtcggccgcgcctagatcgatctcacgcca

SEQ ID NO: 51572 - DNA, 30 bp, Artificial Sequence
  Synthetic oligonucleotide
cattggagaagtacgtatgaagtttcgcca

SEQ ID NO: 51573 - DNA, 30 bp, Artificial Sequence
  Synthetic oligonucleotide
ataaagcagaacagaccgtctaccaggcca

SEQ ID NO: 51574 - DNA, 30 bp, Artificial Sequence
  Synthetic oligonucleotide
ggagggcccagccaagcgtcagtcaggcca

SEQ ID NO: 51575 - DNA, 30 bp, Artificial Sequence
  Synthetic oligonucleotide
ccaatgggtggaaccaatctacaagggcca

SEQ ID NO: 51576 - DNA, 30 bp, Artificial Sequence
  Synthetic oligonucleotide
tccaagtccatagtcggaatcggggggcca

SEQ ID NO: 51577 - DNA, 30 bp, Artificial Sequence
  Synthetic oligonucleotide
aaacaatgaccctgcgcaaagaatgggcca

SEQ ID NO: 51578 - DNA, 30 bp, Artificial Sequence
  Synthetic oligonucleotide
ccacataagatcgaggttaggagtgggcca

SEQ ID NO: 51579 - DNA, 30 bp, Artificial Sequence
  Synthetic oligonucleotide
cggaggaatggagaattaaccggtatgcca

SEQ ID NO: 51580 - DNA, 30 bp, Artificial Sequence
  Synthetic oligonucleotide
cagtatcgacaggccaggggggttatgcca

SEQ ID NO: 51581 - DNA, 30 bp, Artificial Sequence
  Synthetic oligonucleotide
taagtgcaaagcatcgcggcccagaatcca

SEQ ID NO: 51582 - DNA, 30 bp, Artificial Sequence
  Synthetic oligonucleotide
gatagatagtgaaagataagaaatcatcca

SEQ ID NO: 51583 - DNA, 30 bp, Artificial Sequence
  Synthetic oligonucleotide
acgtcatgaacatcggatcatgtagatcca

SEQ ID NO: 51584 - DNA, 30 bp, Artificial Sequence
  Synthetic oligonucleotide
tcacgattagagcgaggcggcacggatcca

SEQ ID NO: 51585 - DNA, 30 bp, Artificial Sequence
  Synthetic oligonucleotide
cacccagagtctccaaagaaaaagtatcca

SEQ ID NO: 51586 - DNA, 30 bp, Artificial Sequence
  Synthetic oligonucleotide
attgccgaatagttgcaccaccaagctcca

SEQ ID NO: 51587 - DNA, 30 bp, Artificial Sequence
  Synthetic oligonucleotide
cgtgaccaggctctgtatataagacgtcca

SEQ ID NO: 51588 - DNA, 30 bp, Artificial Sequence
  Synthetic oligonucleotide
tgaaaacaaccaacgtgcgattacggtcca

SEQ ID NO: 51589 - DNA, 30 bp, Artificial Sequence
  Synthetic oligonucleotide
caagcggggctcgtccgtgagtgatgtcca

SEQ ID NO: 51590 - DNA, 30 bp, Artificial Sequence
  Synthetic oligonucleotide
tcgccgatgactgtgtgacgtgtcattcca

SEQ ID NO: 51591 - DNA, 30 bp, Artificial Sequence
  Synthetic oligonucleotide
aagaacatagatacgatgagagtggttcca

SEQ ID NO: 51592 - DNA, 30 bp, Artificial Sequence
  Synthetic oligonucleotide
ctcctgctgccgaagaaaaaggtcaaagca

SEQ ID NO: 51593 - DNA, 30 bp, Artificial Sequence
  Synthetic oligonucleotide
acagacattaagtgtatggaagcgcaagca

SEQ ID NO: 51594 - DNA, 30 bp, Artificial Sequence
  Synthetic oligonucleotide
taagttggagcagacaaccaatgggaagca

SEQ ID NO: 51595 - DNA, 30 bp, Artificial Sequence
  Synthetic oligonucleotide
ggagtcctgtggctagttaccagtgaagca

SEQ ID NO: 51596 - DNA, 30 bp, Artificial Sequence
  Synthetic oligonucleotide
agagtcgggtagctcgaatcgccataagca

SEQ ID NO: 51597 - DNA, 30 bp, Artificial Sequence
  Synthetic oligonucleotide
gggtgaaagcttcaaaatgagctgtaagca

SEQ ID NO: 51598 - DNA, 30 bp, Artificial Sequence
  Synthetic oligonucleotide
acaaattcggttccgataaaattaacagca

SEQ ID NO: 51599 - DNA, 30 bp, Artificial Sequence
  Synthetic oligonucleotide
atccccgcacacttctataaccagacagca

SEQ ID NO: 51600 - DNA, 30 bp, Artificial Sequence
  Synthetic oligonucleotide
tcgatgctctcggtaaccacagatacagca

SEQ ID NO: 51601 - DNA, 30 bp, Artificial Sequence
  Synthetic oligonucleotide
ttggcgagaccaggagctcaggtaccagca

SEQ ID NO: 51602 - DNA, 30 bp, Artificial Sequence
  Synthetic oligonucleotide
aggaccaattcagtggggagtcatccagca

SEQ ID NO: 51603 - DNA, 30 bp, Artificial Sequence
  Synthetic oligonucleotide
agggagtgaaggcgttccccgattagagca

SEQ ID NO: 51604 - DNA, 30 bp, Artificial Sequence
  Synthetic oligonucleotide
aacgtcaatatgaagttctaacgtggagca

SEQ ID NO: 51605 - DNA, 30 bp, Artificial Sequence
  Synthetic oligonucleotide
catagggaaaaaaatcgaaaccattgagca

SEQ ID NO: 51606 - DNA, 30 bp, Artificial Sequence
  Synthetic oligonucleotide
tcgttagtcataatgcttgcgtgttgagca

SEQ ID NO: 51607 - DNA, 30 bp, Artificial Sequence
  Synthetic oligonucleotide
ataggtaacgtgtggatgaaagtttgagca

SEQ ID NO: 51608 - DNA, 30 bp, Artificial Sequence
  Synthetic oligonucleotide
gtactagaaatgtcggtgggacgaatagca

SEQ ID NO: 51609 - DNA, 30 bp, Artificial Sequence
  Synthetic oligonucleotide
cgagaagagcgatagttatggggtatagca

SEQ ID NO: 51610 - DNA, 30 bp, Artificial Sequence
  Synthetic oligonucleotide
agagtgaaccggctatacgcgatactagca

SEQ ID NO: 51611 - DNA, 30 bp, Artificial Sequence
  Synthetic oligonucleotide
ggggcaaggttactgttgagccacctagca

SEQ ID NO: 51612 - DNA, 30 bp, Artificial Sequence
  Synthetic oligonucleotide
agaggatcacgtttgcgcaccggcctagca

SEQ ID NO: 51613 - DNA, 30 bp, Artificial Sequence
  Synthetic oligonucleotide
acatatggggctgttcgggctgggctagca

SEQ ID NO: 51614 - DNA, 30 bp, Artificial Sequence
  Synthetic oligonucleotide
ttgatgtacagtatacacactaatctagca

SEQ ID NO: 51615 - DNA, 30 bp, Artificial Sequence
  Synthetic oligonucleotide
acgtcctagactttgttgatagaattagca

SEQ ID NO: 51616 - DNA, 30 bp, Artificial Sequence
  Synthetic oligonucleotide
tggccacgaagctaaagcctctaattagca

SEQ ID NO: 51617 - DNA, 30 bp, Artificial Sequence
  Synthetic oligonucleotide
cgacagggacagggctatttgtcattagca

SEQ ID NO: 51618 - DNA, 30 bp, Artificial Sequence
  Synthetic oligonucleotide
agagcaaaagtaaaggatatggccttagca

SEQ ID NO: 51619 - DNA, 30 bp, Artificial Sequence
  Synthetic oligonucleotide
acaaggggtgattacgtatactcgttagca

SEQ ID NO: 51620 - DNA, 30 bp, Artificial Sequence
  Synthetic oligonucleotide
gcgatccgatggggcgtagtacgtaacgca

SEQ ID NO: 51621 - DNA, 31 bp, Artificial Sequence
  Synthetic oligonucleotide
tctgacaaaaaccggccaggcagggtacgca

SEQ ID NO: 51622 - DNA, 30 bp, Artificial Sequence
  Synthetic oligonucleotide
tcataatacggcttcacttaactaaccgca

SEQ ID NO: 51623 - DNA, 30 bp, Artificial Sequence
  Synthetic oligonucleotide
cgctggtgggaatcggcagattgtaccgca

SEQ ID NO: 51624 - DNA, 30 bp, Artificial Sequence
  Synthetic oligonucleotide
taggagcagagcttacataacaatcccgca

SEQ ID NO: 51625 - DNA, 30 bp, Artificial Sequence
  Synthetic oligonucleotide
gcgaatcatcaagaagggcagcattccgca

SEQ ID NO: 51626 - DNA, 30 bp, Artificial Sequence
  Synthetic oligonucleotide
acggcaagcgggtactactgacctagcgca

SEQ ID NO: 51627 - DNA, 30 bp, Artificial Sequence
  Synthetic oligonucleotide
agggtgagggacggattccgttgtagcgca

SEQ ID NO: 51628 - DNA, 30 bp, Artificial Sequence
  Synthetic oligonucleotide
tagcgacgcttctaaaaggagtcacgcgca

SEQ ID NO: 51629 - DNA, 30 bp, Artificial Sequence
  Synthetic oligonucleotide
aagattcaagcatgaagatgccgacgcgca

SEQ ID NO: 51630 - DNA, 30 bp, Artificial Sequence
  Synthetic oligonucleotide
acctgcaagctaagaagccaccagcgcgca

SEQ ID NO: 51631 - DNA, 30 bp, Artificial Sequence
  Synthetic oligonucleotide
aaagaagcgtttaacagataagtcggcgca

SEQ ID NO: 51632 - DNA, 30 bp, Artificial Sequence
  Synthetic oligonucleotide
tggtcaatatggtccaggtaacagggcgca

SEQ ID NO: 51633 - DNA, 30 bp, Artificial Sequence
  Synthetic oligonucleotide
tcggaggggtccagtcatgtgaaatgcgca

SEQ ID NO: 51634 - DNA, 30 bp, Artificial Sequence
  Synthetic oligonucleotide
ttggctagggccagaaggtctagcatcgca

SEQ ID NO: 51635 - DNA, 30 bp, Artificial Sequence
  Synthetic oligonucleotide
acgtaggttcgcaattcagcaatggtcgca

SEQ ID NO: 51636 - DNA, 30 bp, Artificial Sequence
  Synthetic oligonucleotide
acggatggggaagtcgattaccccttcgca

SEQ ID NO: 51637 - DNA, 30 bp, Artificial Sequence
  Synthetic oligonucleotide
caggtttcacgatccgagccaaggttcgca

SEQ ID NO: 51638 - DNA, 30 bp, Artificial Sequence
  Synthetic oligonucleotide
agaccctgaaagttgcagtgcgcataggca

SEQ ID NO: 51639 - DNA, 30 bp, Artificial Sequence
  Synthetic oligonucleotide
acgcctgggaacacggcgatgaactaggca

SEQ ID NO: 51640 - DNA, 30 bp, Artificial Sequence
  Synthetic oligonucleotide
ggcctgtaagaaaagacttccaaaacggca

SEQ ID NO: 51641 - DNA, 30 bp, Artificial Sequence
  Synthetic oligonucleotide
gcaacccagtaaggtgtagagaatacggca

SEQ ID NO: 51642 - DNA, 30 bp, Artificial Sequence
  Synthetic oligonucleotide
agcgggcacaggatcacaattgagccggca

SEQ ID NO: 51643 - DNA, 30 bp, Artificial Sequence
  Synthetic oligonucleotide
tcagacatggtactttcgtcgacgagggca

SEQ ID NO: 51644 - DNA, 30 bp, Artificial Sequence
  Synthetic oligonucleotide
ataggtactaactggcataactagcgggca

SEQ ID NO: 51645 - DNA, 30 bp, Artificial Sequence
  Synthetic oligonucleotide
ttagagacggacaattggcagaagggggca

SEQ ID NO: 51646 - DNA, 30 bp, Artificial Sequence
  Synthetic oligonucleotide
acttgattcgtacacaagattaagggggca

SEQ ID NO: 51647 - DNA, 30 bp, Artificial Sequence
  Synthetic oligonucleotide
ttgcggacaagcaactgttacccatgggca

SEQ ID NO: 51648 - DNA, 30 bp, Artificial Sequence
  Synthetic oligonucleotide
acaaaggaagtataggaacggtcctgggca

SEQ ID NO: 51649 - DNA, 30 bp, Artificial Sequence
  Synthetic oligonucleotide
gtgagaggcgaaaacggcgccggcatggca

SEQ ID NO: 51650 - DNA, 30 bp, Artificial Sequence
  Synthetic oligonucleotide
ggggtttgaaggtgattcggagagttggca

SEQ ID NO: 51651 - DNA, 30 bp, Artificial Sequence
  Synthetic oligonucleotide
aagggcgggtaggtatcctccatatatgca

SEQ ID NO: 51652 - DNA, 30 bp, Artificial Sequence
  Synthetic oligonucleotide
ccgcgataagacgagtacaattagtatgca

SEQ ID NO: 51653 - DNA, 30 bp, Artificial Sequence
  Synthetic oligonucleotide
cttagcgtagaggaactagaagagcctgca

SEQ ID NO: 51654 - DNA, 30 bp, Artificial Sequence
  Synthetic oligonucleotide
aagccaatacgaagtggtcggcacagtgca

SEQ ID NO: 51655 - DNA, 30 bp, Artificial Sequence
  Synthetic oligonucleotide
tactcgctaagcagagtaaattctcgtgca

SEQ ID NO: 51656 - DNA, 30 bp, Artificial Sequence
  Synthetic oligonucleotide
ccgtgggccgagaatattgaattgggtgca

SEQ ID NO: 51657 - DNA, 30 bp, Artificial Sequence
  Synthetic oligonucleotide
gggagccgtaaggacctgacatatggtgca

SEQ ID NO: 51658 - DNA, 30 bp, Artificial Sequence
  Synthetic oligonucleotide
ggacattggtgtgaacacaaggcatgtgca

SEQ ID NO: 51659 - DNA, 30 bp, Artificial Sequence
  Synthetic oligonucleotide
cacgacttccgtggctcgaaagagtgtgca

SEQ ID NO: 51660 - DNA, 30 bp, Artificial Sequence
  Synthetic oligonucleotide
gcgggaagggagtatccgtgataacttgca

SEQ ID NO: 51661 - DNA, 30 bp, Artificial Sequence
  Synthetic oligonucleotide
cctgggtgaggaaaaggtgggcaaaaatca

SEQ ID NO: 51662 - DNA, 30 bp, Artificial Sequence
  Synthetic oligonucleotide
gtcgcgaggcaaggtaatagggttgaatca

SEQ ID NO: 51663 - DNA, 30 bp, Artificial Sequence
  Synthetic oligonucleotide
acgaacagtatctacgttacattctaatca

SEQ ID NO: 51664 - DNA, 30 bp, Artificial Sequence
  Synthetic oligonucleotide
ctaacagggcatcggtgtatgtacacatca

SEQ ID NO: 51665 - DNA, 30 bp, Artificial Sequence
  Synthetic oligonucleotide
gcaccgaggacggcttaacaacagacatca

SEQ ID NO: 51666 - DNA, 30 bp, Artificial Sequence
  Synthetic oligonucleotide
cgaccgtgcaggctatgggagtggccatca

SEQ ID NO: 51667 - DNA, 30 bp, Artificial Sequence
  Synthetic oligonucleotide
caaaggcagtgtcgctactcagtggcatca

SEQ ID NO: 51668 - DNA, 30 bp, Artificial Sequence
  Synthetic oligonucleotide
ttagtggaagggaaaaactaccacggatca

SEQ ID NO: 51669 - DNA, 30 bp, Artificial Sequence
  Synthetic oligonucleotide
cgacgtcatcgcgtctaattcgatggatca

SEQ ID NO: 51670 - DNA, 30 bp, Artificial Sequence
  Synthetic oligonucleotide
gcgcaccggggggagagaaaggcgatatca

SEQ ID NO: 51671 - DNA, 30 bp, Artificial Sequence
  Synthetic oligonucleotide
gtttgaaggtaacatcaatacacactatca

SEQ ID NO: 51672 - DNA, 30 bp, Artificial Sequence
  Synthetic oligonucleotide
tacgatacagctcaagggagtgccaactca

SEQ ID NO: 51673 - DNA, 30 bp, Artificial Sequence
  Synthetic oligonucleotide
tggacaatgatggatgtatggcgccactca

SEQ ID NO: 51674 - DNA, 30 bp, Artificial Sequence
  Synthetic oligonucleotide
atggcggtcaaacacatagatagtcactca

SEQ ID NO: 51675 - DNA, 30 bp, Artificial Sequence
  Synthetic oligonucleotide
gaagctaactaaagagtaccttgagactca

SEQ ID NO: 51676 - DNA, 30 bp, Artificial Sequence
  Synthetic oligonucleotide
acttgctaccgattaacctggctcgactca

SEQ ID NO: 51677 - DNA, 30 bp, Artificial Sequence
  Synthetic oligonucleotide
acccgaacaacacaaaagatgttcgcctca

SEQ ID NO: 51678 - DNA, 30 bp, Artificial Sequence
  Synthetic oligonucleotide
tcggcatcacagcggaagcaccaaggctca

SEQ ID NO: 51679 - DNA, 30 bp, Artificial Sequence
  Synthetic oligonucleotide
cttacaaatgggggcaagttaagcggctca

SEQ ID NO: 51680 - DNA, 30 bp, Artificial Sequence
  Synthetic oligonucleotide
ggaggtgtagataattaaacgaggtgctca

SEQ ID NO: 51681 - DNA, 30 bp, Artificial Sequence
  Synthetic oligonucleotide
cgcaccgtcgacggcgaggtggcgctctca

SEQ ID NO: 51682 - DNA, 30 bp, Artificial Sequence
  Synthetic oligonucleotide
gagcaatggaactacaggactcaattctca

SEQ ID NO: 51683 - DNA, 30 bp, Artificial Sequence
  Synthetic oligonucleotide
catcgagcagtcggttaagggtgtaagtca

SEQ ID NO: 51684 - DNA, 30 bp, Artificial Sequence
  Synthetic oligonucleotide
agaggggacgatagcctcgactatgagtca

SEQ ID NO: 51685 - DNA, 30 bp, Artificial Sequence
  Synthetic oligonucleotide
cgtggtctatcgctgagtaagcattagtca

SEQ ID NO: 51686 - DNA, 30 bp, Artificial Sequence
  Synthetic oligonucleotide
tgcggcctctgagagaattgaaaaacgtca

SEQ ID NO: 51687 - DNA, 30 bp, Artificial Sequence
  Synthetic oligonucleotide
gaagaagaaaatatttctcctacagcgtca

SEQ ID NO: 51688 - DNA, 30 bp, Artificial Sequence
  Synthetic oligonucleotide
aggtgactgtgactgaacacggaaaggtca

SEQ ID NO: 51689 - DNA, 30 bp, Artificial Sequence
  Synthetic oligonucleotide
aacgctattcattcgtggaacaagcggtca

SEQ ID NO: 51690 - DNA, 30 bp, Artificial Sequence
  Synthetic oligonucleotide
gacggggcctggcactggaaagaggggtca

SEQ ID NO: 51691 - DNA, 30 bp, Artificial Sequence
  Synthetic oligonucleotide
agaattgggcattatcgggggcatgggtca

SEQ ID NO: 51692 - DNA, 30 bp, Artificial Sequence
  Synthetic oligonucleotide
cgcaaggggatcataaaattaagtgggtca

SEQ ID NO: 51693 - DNA, 30 bp, Artificial Sequence
  Synthetic oligonucleotide
cgtgaagacacacggtgtagatgaatgtca

SEQ ID NO: 51694 - DNA, 30 bp, Artificial Sequence
  Synthetic oligonucleotide
aaagggaaagaccaaagacccaccgtgtca

SEQ ID NO: 51695 - DNA, 30 bp, Artificial Sequence
  Synthetic oligonucleotide
gtcgggggcagtgaacgttcaacggtgtca

SEQ ID NO: 51696 - DNA, 30 bp, Artificial Sequence
  Synthetic oligonucleotide
gatacaccaactagagggatagctgtgtca

SEQ ID NO: 51697 - DNA, 30 bp, Artificial Sequence
  Synthetic oligonucleotide
agacgacagaggataggaacttacaattca

SEQ ID NO: 51698 - DNA, 30 bp, Artificial Sequence
  Synthetic oligonucleotide
aacaagtggggaggtatgtcgtcgacttca

SEQ ID NO: 51699 - DNA, 30 bp, Artificial Sequence
  Synthetic oligonucleotide
cgatgcaggtactagaggacacgggcttca

SEQ ID NO: 51700 - DNA, 30 bp, Artificial Sequence
  Synthetic oligonucleotide
ctggtggatgggacgagcgcgattgcttca

SEQ ID NO: 51701 - DNA, 30 bp, Artificial Sequence
  Synthetic oligonucleotide
taccgattcaaggacacagggtgccgttca

SEQ ID NO: 51702 - DNA, 30 bp, Artificial Sequence
  Synthetic oligonucleotide
ggcatgccgagtgtgcacgtgttctgttca

SEQ ID NO: 51703 - DNA, 30 bp, Artificial Sequence
  Synthetic oligonucleotide
atcaggcaggactcgaatgtaacaatttca

SEQ ID NO: 51704 - DNA, 30 bp, Artificial Sequence
  Synthetic oligonucleotide
gacgtgggatatgtggccagccatatttca

SEQ ID NO: 51705 - DNA, 30 bp, Artificial Sequence
  Synthetic oligonucleotide
ggtccacactgggaacattggggaaaaaga

SEQ ID NO: 51706 - DNA, 30 bp, Artificial Sequence
  Synthetic oligonucleotide
agtgcatgcgagagtcgatagctaaaaaga

SEQ ID NO: 51707 - DNA, 30 bp, Artificial Sequence
  Synthetic oligonucleotide
tagtggaataacatgcctacgaataaaaga

SEQ ID NO: 51708 - DNA, 30 bp, Artificial Sequence
  Synthetic oligonucleotide
acgggagcggacaggttcatttggcaaaga

SEQ ID NO: 51709 - DNA, 30 bp, Artificial Sequence
  Synthetic oligonucleotide
taattgaaagccgatgatttcaacgaaaga

SEQ ID NO: 51710 - DNA, 30 bp, Artificial Sequence
  Synthetic oligonucleotide
aggaattttatgttaaccaacaatgaaaga

SEQ ID NO: 51711 - DNA, 30 bp, Artificial Sequence
  Synthetic oligonucleotide
tctaaacgaaaggttgattaggatgaaaga

SEQ ID NO: 51712 - DNA, 30 bp, Artificial Sequence
  Synthetic oligonucleotide
agtaatggcttagtctatactgatgaaaga

SEQ ID NO: 51713 - DNA, 30 bp, Artificial Sequence
  Synthetic oligonucleotide
taagacgcgtggaggttcggagtataaaga

SEQ ID NO: 51714 - DNA, 30 bp, Artificial Sequence
  Synthetic oligonucleotide
cgttgggggaggctcacagggaggtaaaga

SEQ ID NO: 51715 - DNA, 30 bp, Artificial Sequence
  Synthetic oligonucleotide
ccgtagtcggcgatcgggccgctcacaaga

SEQ ID NO: 51716 - DNA, 30 bp, Artificial Sequence
  Synthetic oligonucleotide
ccctccacgacacgagagtaaaaaccaaga

SEQ ID NO: 51717 - DNA, 30 bp, Artificial Sequence
  Synthetic oligonucleotide
acaggtgccgtgatgaggttcccaccaaga

SEQ ID NO: 51718 - DNA, 30 bp, Artificial Sequence
  Synthetic oligonucleotide
aacggtactcatttcactattcaggcaaga

SEQ ID NO: 51719 - DNA, 30 bp, Artificial Sequence
  Synthetic oligonucleotide
ccgacatcttggttgagacagtccagaaga

SEQ ID NO: 51720 - DNA, 30 bp, Artificial Sequence
  Synthetic oligonucleotide
gtaagtacagtctcacccaatgcaggaaga

SEQ ID NO: 51721 - DNA, 30 bp, Artificial Sequence
  Synthetic oligonucleotide
tggccataaatacttcacgctaatggaaga

SEQ ID NO: 51722 - DNA, 30 bp, Artificial Sequence
  Synthetic oligonucleotide
tagtgaagtcattaaatgtaagatggaaga

SEQ ID NO: 51723 - DNA, 30 bp, Artificial Sequence
  Synthetic oligonucleotide
gatgctaagtatgaatttgagtatggaaga

SEQ ID NO: 51724 - DNA, 30 bp, Artificial Sequence
  Synthetic oligonucleotide
ctccaatgaagggcagggttgattggaaga

SEQ ID NO: 51725 - DNA, 30 bp, Artificial Sequence
  Synthetic oligonucleotide
gaacaggatagagcaggatgttaatgaaga

SEQ ID NO: 51726 - DNA, 30 bp, Artificial Sequence
  Synthetic oligonucleotide
taacgaggtagtgcgattcatgaagtaaga

SEQ ID NO: 51727 - DNA, 30 bp, Artificial Sequence
  Synthetic oligonucleotide
aacggcagagcatattattaactagtaaga

SEQ ID NO: 51728 - DNA, 30 bp, Artificial Sequence
  Synthetic oligonucleotide
ccttgcccatgacatggatgaacattaaga

SEQ ID NO: 51729 - DNA, 30 bp, Artificial Sequence
  Synthetic oligonucleotide
agtaccacgcatagcaccgacaacaacaga

SEQ ID NO: 51730 - DNA, 30 bp, Artificial Sequence
  Synthetic oligonucleotide
gtaccattcagggtatatgaagccaacaga

SEQ ID NO: 51731 - DNA, 30 bp, Artificial Sequence
  Synthetic oligonucleotide
tatcaatgattacgagtagtgcaacacaga

SEQ ID NO: 51732 - DNA, 30 bp, Artificial Sequence
  Synthetic oligonucleotide
aggtaagacaaagcatccgaaaaccacaga

SEQ ID NO: 51733 - DNA, 30 bp, Artificial Sequence
  Synthetic oligonucleotide
attgtacacatcaagacaaatgtgcacaga

SEQ ID NO: 51734 - DNA, 30 bp, Artificial Sequence
  Synthetic oligonucleotide
caattggctgtcgactcagaaatggacaga

SEQ ID NO: 51735 - DNA, 30 bp, Artificial Sequence
  Synthetic oligonucleotide
gcgctgaacagaagagcagggaaatacaga

SEQ ID NO: 51736 - DNA, 30 bp, Artificial Sequence
  Synthetic oligonucleotide
gggggtgatttcaactattcaagatacaga

SEQ ID NO: 51737 - DNA, 30 bp, Artificial Sequence
  Synthetic oligonucleotide
gcgacgaactgcgactagcaatcgtacaga

SEQ ID NO: 51738 - DNA, 30 bp, Artificial Sequence
  Synthetic oligonucleotide
taatgggttacgaccacccggcggtacaga

SEQ ID NO: 51739 - DNA, 30 bp, Artificial Sequence
  Synthetic oligonucleotide
acaaacagaaaattggagtcctaaaccaga

SEQ ID NO: 51740 - DNA, 30 bp, Artificial Sequence
  Synthetic oligonucleotide
ggctaggcctagccaggacgtaacaccaga

SEQ ID NO: 51741 - DNA, 30 bp, Artificial Sequence
  Synthetic oligonucleotide
catgctgagggaaaatagcaaatcaccaga

SEQ ID NO: 51742 - DNA, 30 bp, Artificial Sequence
  Synthetic oligonucleotide
ttccgaggttgaacgatctacgggcccaga

SEQ ID NO: 51743 - DNA, 30 bp, Artificial Sequence
  Synthetic oligonucleotide
acccgaaccctgaactatataggtcccaga

SEQ ID NO: 51744 - DNA, 30 bp, Artificial Sequence
  Synthetic oligonucleotide
ggtcctggagtcaaaacattgggagccaga

SEQ ID NO: 51745 - DNA, 30 bp, Artificial Sequence
  Synthetic oligonucleotide
tttagagggagaacaattatgtacgccaga

SEQ ID NO: 51746 - DNA, 30 bp, Artificial Sequence
  Synthetic oligonucleotide
ccctgggccagaagaaggtatggatccaga

SEQ ID NO: 51747 - DNA, 30 bp, Artificial Sequence
  Synthetic oligonucleotide
agtcaggtgagtatattcaccgcgtccaga

SEQ ID NO: 51748 - DNA, 30 bp, Artificial Sequence
  Synthetic oligonucleotide
acgcatcgcacctagcaagagttcagcaga

SEQ ID NO: 51749 - DNA, 30 bp, Artificial Sequence
  Synthetic oligonucleotide
gcactccctatgatataagccgtgagcaga

SEQ ID NO: 51750 - DNA, 30 bp, Artificial Sequence
  Synthetic oligonucleotide
atgagctagtccgcaggtgatgaaggcaga

SEQ ID NO: 51751 - DNA, 30 bp, Artificial Sequence
  Synthetic oligonucleotide
caagacggcgttcccagagacataggcaga

SEQ ID NO: 51752 - DNA, 30 bp, Artificial Sequence
  Synthetic oligonucleotide
gacggatagtgggttccagggctgtgcaga

SEQ ID NO: 51753 - DNA, 30 bp, Artificial Sequence
  Synthetic oligonucleotide
ccgacccgaaatttattagctgcgatcaga

SEQ ID NO: 51754 - DNA, 30 bp, Artificial Sequence
  Synthetic oligonucleotide
ctatgtaggtagaatgtaaggggcctcaga

SEQ ID NO: 51755 - DNA, 30 bp, Artificial Sequence
  Synthetic oligonucleotide
atccgaaggctatcataggaatcagtcaga

SEQ ID NO: 51756 - DNA, 30 bp, Artificial Sequence
  Synthetic oligonucleotide
agactcattaaaaatccactggacttcaga

SEQ ID NO: 51757 - DNA, 30 bp, Artificial Sequence
  Synthetic oligonucleotide
ccaccgtgctgatcataaaatggccagaga

SEQ ID NO: 51758 - DNA, 30 bp, Artificial Sequence
  Synthetic oligonucleotide
gggcagaaagtaactagtcaggatcagaga

SEQ ID NO: 51759 - DNA, 30 bp, Artificial Sequence
  Synthetic oligonucleotide
cgaatggctcacgtgttggatagcgagaga

SEQ ID NO: 51760 - DNA, 30 bp, Artificial Sequence
  Synthetic oligonucleotide
aacggtgcgtagaaaatcgggagctagaga

SEQ ID NO: 51761 - DNA, 30 bp, Artificial Sequence
  Synthetic oligonucleotide
agggaagggaccctccggacttatccgaga

SEQ ID NO: 51762 - DNA, 30 bp, Artificial Sequence
  Synthetic oligonucleotide
agtgataaacggagcagacctacggcgaga

SEQ ID NO: 51763 - DNA, 30 bp, Artificial Sequence
  Synthetic oligonucleotide
gctggtcggcgaacaaaggaggagtcgaga

SEQ ID NO: 51764 - DNA, 30 bp, Artificial Sequence
  Synthetic oligonucleotide
agcaagcagttcgtggctcaacgaaggaga

SEQ ID NO: 51765 - DNA, 30 bp, Artificial Sequence
  Synthetic oligonucleotide
ggggcaatctgaggtgatcgagacaggaga

SEQ ID NO: 51766 - DNA, 30 bp, Artificial Sequence
  Synthetic oligonucleotide
ggtccgctgaatggatccaacgacaggaga

SEQ ID NO: 51767 - DNA, 30 bp, Artificial Sequence
  Synthetic oligonucleotide
gatgcatgacgggggtcggtgcccaggaga

SEQ ID NO: 51768 - DNA, 30 bp, Artificial Sequence
  Synthetic oligonucleotide
tcgattataaaagtgaggagactcaggaga

SEQ ID NO: 51769 - DNA, 30 bp, Artificial Sequence
  Synthetic oligonucleotide
tcgacgccctttaaccatgccagtaggaga

SEQ ID NO: 51770 - DNA, 30 bp, Artificial Sequence
  Synthetic oligonucleotide
tcacaaatgaggttgtataaagcccggaga

SEQ ID NO: 51771 - DNA, 30 bp, Artificial Sequence
  Synthetic oligonucleotide
actactgctagcctctgaccgacggggaga

SEQ ID NO: 51772 - DNA, 30 bp, Artificial Sequence
  Synthetic oligonucleotide
gaaagtaaagtgcacgggaaagcttggaga

SEQ ID NO: 51773 - DNA, 30 bp, Artificial Sequence
  Synthetic oligonucleotide
taggctgggaccgctttaacccgcatgaga

SEQ ID NO: 51774 - DNA, 30 bp, Artificial Sequence
  Synthetic oligonucleotide
gggcgaatttgacgaccagataaggtgaga

SEQ ID NO: 51775 - DNA, 30 bp, Artificial Sequence
  Synthetic oligonucleotide
aaggtaaaatctggtcaataaagggtgaga

SEQ ID NO: 51776 - DNA, 30 bp, Artificial Sequence
  Synthetic oligonucleotide
ccgcagggcggttaaaatatgacagataga

SEQ ID NO: 51777 - DNA, 30 bp, Artificial Sequence
  Synthetic oligonucleotide
aggccggagaacttgaacgctttctataga

SEQ ID NO: 51778 - DNA, 30 bp, Artificial Sequence
  Synthetic oligonucleotide
atgcgtgatgggcatacgtgcgcaactaga

SEQ ID NO: 51779 - DNA, 30 bp, Artificial Sequence
  Synthetic oligonucleotide
aacacttcaccatgcaaatgcaaacctaga

SEQ ID NO: 51780 - DNA, 30 bp, Artificial Sequence
  Synthetic oligonucleotide
ccataacggtgatgacagtaggtgcctaga

SEQ ID NO: 51781 - DNA, 30 bp, Artificial Sequence
  Synthetic oligonucleotide
aaagggcctagaatgttagcaacagctaga

SEQ ID NO: 51782 - DNA, 30 bp, Artificial Sequence
  Synthetic oligonucleotide
ggtagataccaactaccatcacggtctaga

SEQ ID NO: 51783 - DNA, 30 bp, Artificial Sequence
  Synthetic oligonucleotide
gaggtatctcacgtaatacatgcaagtaga

SEQ ID NO: 51784 - DNA, 30 bp, Artificial Sequence
  Synthetic oligonucleotide
cgacggaaaggccgcaaggtccagagtaga

SEQ ID NO: 51785 - DNA, 30 bp, Artificial Sequence
  Synthetic oligonucleotide
acctaacgtttctccgcgcatgtgcgtaga

SEQ ID NO: 51786 - DNA, 30 bp, Artificial Sequence
  Synthetic oligonucleotide
aggtagccagtaccatcgatctaaggtaga

SEQ ID NO: 51787 - DNA, 30 bp, Artificial Sequence
  Synthetic oligonucleotide
ctacaaagcaagtccgcccgggatattaga

SEQ ID NO: 51788 - DNA, 30 bp, Artificial Sequence
  Synthetic oligonucleotide
taagtgaaaattggcgttacttcaaaacga

SEQ ID NO: 51789 - DNA, 30 bp, Artificial Sequence
  Synthetic oligonucleotide
gcgatgacaaactggggtgaacgtcaacga

SEQ ID NO: 51790 - DNA, 30 bp, Artificial Sequence
  Synthetic oligonucleotide
acatagcgcagcaaggagtgtagggaacga

SEQ ID NO: 51791 - DNA, 30 bp, Artificial Sequence
  Synthetic oligonucleotide
atgtaaggcgatgagagtttccgttaacga

SEQ ID NO: 51792 - DNA, 30 bp, Artificial Sequence
  Synthetic oligonucleotide
ctgaaattgactggacaaagtgaaacacga

SEQ ID NO: 51793 - DNA, 30 bp, Artificial Sequence
  Synthetic oligonucleotide
ctttagaaactaaaaccacacctaacacga

SEQ ID NO: 51794 - DNA, 30 bp, Artificial Sequence
  Synthetic oligonucleotide
ttccaatgcaagaaaaccgtcatcgcacga

SEQ ID NO: 51795 - DNA, 30 bp, Artificial Sequence
  Synthetic oligonucleotide
gtgaatccaccgagaacgagaaactcacga

SEQ ID NO: 51796 - DNA, 30 bp, Artificial Sequence
  Synthetic oligonucleotide
agagatttcacgaggtccataggaagacga

SEQ ID NO: 51797 - DNA, 30 bp, Artificial Sequence
  Synthetic oligonucleotide
ccggctggtatgttaacattcacacgacga

SEQ ID NO: 51798 - DNA, 30 bp, Artificial Sequence
  Synthetic oligonucleotide
gtaagagatgtaaagaagcctaagcgacga

SEQ ID NO: 51799 - DNA, 30 bp, Artificial Sequence
  Synthetic oligonucleotide
agtaggtcacgcggaaggcggtcgtgacga

SEQ ID NO: 51800 - DNA, 30 bp, Artificial Sequence
  Synthetic oligonucleotide
agattacgagggtccagcgttggcatacga

SEQ ID NO: 51801 - DNA, 30 bp, Artificial Sequence
  Synthetic oligonucleotide
ggaacgactttcaacagaggtttcgtacga

SEQ ID NO: 51802 - DNA, 30 bp, Artificial Sequence
  Synthetic oligonucleotide
gcagagtagataccggcaaacgtattacga

SEQ ID NO: 51803 - DNA, 30 bp, Artificial Sequence
  Synthetic oligonucleotide
cccgtggatattcactgagccaggcaccga

SEQ ID NO: 51804 - DNA, 30 bp, Artificial Sequence
  Synthetic oligonucleotide
acatccagagataaggtgtgggccgaccga

SEQ ID NO: 51805 - DNA, 30 bp, Artificial Sequence
  Synthetic oligonucleotide
accgagaaccgcagttgggagcaggaccga

SEQ ID NO: 51806 - DNA, 30 bp, Artificial Sequence
  Synthetic oligonucleotide
ctatccaacaatacaagtcaggttgaccga

SEQ ID NO: 51807 - DNA, 30 bp, Artificial Sequence
  Synthetic oligonucleotide
gttaaagacgaggggggcagatgataccga

SEQ ID NO: 51808 - DNA, 30 bp, Artificial Sequence
  Synthetic oligonucleotide
cgcttaaagaaagtctgccgaagttaccga

SEQ ID NO: 51809 - DNA, 30 bp, Artificial Sequence
  Synthetic oligonucleotide
ccaggaccacgaactcatcagcagccccga

SEQ ID NO: 51810 - DNA, 30 bp, Artificial Sequence
  Synthetic oligonucleotide
gcaatcggcggcaaagaagcaagttcccga

SEQ ID NO: 51811 - DNA, 30 bp, Artificial Sequence
  Synthetic oligonucleotide
ctaaccactcgttcttcgtgcacctgccga

SEQ ID NO: 51812 - DNA, 30 bp, Artificial Sequence
  Synthetic oligonucleotide
aagggataccggtaagtgttttgctgccga

SEQ ID NO: 51813 - DNA, 30 bp, Artificial Sequence
  Synthetic oligonucleotide
tctagaatggtagcaagcttgtgtatccga

SEQ ID NO: 51814 - DNA, 30 bp, Artificial Sequence
  Synthetic oligonucleotide
ctggacatcaaccgaacgattcgtttccga

SEQ ID NO: 51815 - DNA, 30 bp, Artificial Sequence
  Synthetic oligonucleotide
tgaagataaagatagcttcgatgtttccga

SEQ ID NO: 51816 - DNA, 30 bp, Artificial Sequence
  Synthetic oligonucleotide
cgggatttatcacagaatccaatgcagcga

SEQ ID NO: 51817 - DNA, 30 bp, Artificial Sequence
  Synthetic oligonucleotide
acagtagcatccgtattccgacccgcgcga

SEQ ID NO: 51818 - DNA, 30 bp, Artificial Sequence
  Synthetic oligonucleotide
gtcgtattggaagcattagtgacatcgcga

SEQ ID NO: 51819 - DNA, 30 bp, Artificial Sequence
  Synthetic oligonucleotide
tgcgtgaacggaaccaagcgggtaaggcga

SEQ ID NO: 51820 - DNA, 30 bp, Artificial Sequence
  Synthetic oligonucleotide
gagaagagggttagaacagatggcaggcga

SEQ ID NO: 51821 - DNA, 30 bp, Artificial Sequence
  Synthetic oligonucleotide
gatagcacaagcgggtggctaaaacggcga

SEQ ID NO: 51822 - DNA, 30 bp, Artificial Sequence
  Synthetic oligonucleotide
caattaggtataatagagtgataggggcga

SEQ ID NO: 51823 - DNA, 30 bp, Artificial Sequence
  Synthetic oligonucleotide
gaacgataattaacataaatttgtatgcga

SEQ ID NO: 51824 - DNA, 30 bp, Artificial Sequence
  Synthetic oligonucleotide
taccagacccaataacaagccattatgcga

SEQ ID NO: 51825 - DNA, 31 bp, Artificial Sequence
  Synthetic oligonucleotide
cggcgagatgattaaacgggcggccctgcga

SEQ ID NO: 51826 - DNA, 30 bp, Artificial Sequence
  Synthetic oligonucleotide
ttgcgggaccagtcaatctaagagctgcga

SEQ ID NO: 51827 - DNA, 30 bp, Artificial Sequence
  Synthetic oligonucleotide
agtcggagtcggtaccactgcaggctgcga

SEQ ID NO: 51828 - DNA, 30 bp, Artificial Sequence
  Synthetic oligonucleotide
gtggtaacggggggagcgaaaaaggtgcga

SEQ ID NO: 51829 - DNA, 30 bp, Artificial Sequence
  Synthetic oligonucleotide
gtacagatttagggtgtaaggaataatcga

SEQ ID NO: 51830 - DNA, 30 bp, Artificial Sequence
  Synthetic oligonucleotide
aaggtctatgacggtaggggtgcgtatcga

SEQ ID NO: 51831 - DNA, 30 bp, Artificial Sequence
  Synthetic oligonucleotide
caaggtgaaagtgatccactcaattctcga

SEQ ID NO: 51832 - DNA, 30 bp, Artificial Sequence
  Synthetic oligonucleotide
ttcgtcgaaatcagatcggatacgagtcga

SEQ ID NO: 51833 - DNA, 30 bp, Artificial Sequence
  Synthetic oligonucleotide
tgtgccgggttgagctactatgcacgtcga

SEQ ID NO: 51834 - DNA, 30 bp, Artificial Sequence
  Synthetic oligonucleotide
acgttagcagtggtgattagccgtcgtcga

SEQ ID NO: 51835 - DNA, 30 bp, Artificial Sequence
  Synthetic oligonucleotide
acgtaaggacaggttgggtcgataattcga

SEQ ID NO: 51836 - DNA, 30 bp, Artificial Sequence
  Synthetic oligonucleotide
tgggggcgtatgtcaaattgccatattcga

SEQ ID NO: 51837 - DNA, 30 bp, Artificial Sequence
  Synthetic oligonucleotide
catcaggctaaaacgaacggaagtattcga

SEQ ID NO: 51838 - DNA, 30 bp, Artificial Sequence
  Synthetic oligonucleotide
gcaaatgagggggcctagaaataccttcga

SEQ ID NO: 51839 - DNA, 30 bp, Artificial Sequence
  Synthetic oligonucleotide
gtgcatcgggtaaggaaagtgagagttcga

SEQ ID NO: 51840 - DNA, 30 bp, Artificial Sequence
  Synthetic oligonucleotide
ccgtagagcaacagagctactgccgttcga

SEQ ID NO: 51841 - DNA, 30 bp, Artificial Sequence
  Synthetic oligonucleotide
aggcgctgggcgcagggataaagctttcga

SEQ ID NO: 51842 - DNA, 30 bp, Artificial Sequence
  Synthetic oligonucleotide
cataatccacttccctatgcccgaaaagga

SEQ ID NO: 51843 - DNA, 30 bp, Artificial Sequence
  Synthetic oligonucleotide
gtgtaaggtataaaatacgacagtaaagga

SEQ ID NO: 51844 - DNA, 30 bp, Artificial Sequence
  Synthetic oligonucleotide
ggtcgaggtttaaataacccgaaccaagga

SEQ ID NO: 51845 - DNA, 30 bp, Artificial Sequence
  Synthetic oligonucleotide
tggcctgcagtgcgctaaggtaaccaagga

SEQ ID NO: 51846 - DNA, 30 bp, Artificial Sequence
  Synthetic oligonucleotide
ccagctacataagggacgccaagccaagga

SEQ ID NO: 51847 - DNA, 30 bp, Artificial Sequence
  Synthetic oligonucleotide
agcgcgggttcagggcgaatcgctgaagga

SEQ ID NO: 51848 - DNA, 30 bp, Artificial Sequence
  Synthetic oligonucleotide
aggactggcgtgtgaatctttaaataagga

SEQ ID NO: 51849 - DNA, 30 bp, Artificial Sequence
  Synthetic oligonucleotide
cacgttaggagttcggggataaagtaagga

SEQ ID NO: 51850 - DNA, 30 bp, Artificial Sequence
  Synthetic oligonucleotide
caagaccatactgtcatacagacttaagga

SEQ ID NO: 51851 - DNA, 30 bp, Artificial Sequence
  Synthetic oligonucleotide
agggaccgggaacaggttagcggttaagga

SEQ ID NO: 51852 - DNA, 30 bp, Artificial Sequence
  Synthetic oligonucleotide
gtgatactatggatacgatggcgaacagga

SEQ ID NO: 51853 - DNA, 30 bp, Artificial Sequence
  Synthetic oligonucleotide
tccaagcccgggtctgagaatgttacagga

SEQ ID NO: 51854 - DNA, 30 bp, Artificial Sequence
  Synthetic oligonucleotide
cggtatgtgcctatactattccaatcagga

SEQ ID NO: 51855 - DNA, 30 bp, Artificial Sequence
  Synthetic oligonucleotide
aggaattcgggtgctaaaaacaattcagga

SEQ ID NO: 51856 - DNA, 30 bp, Artificial Sequence
  Synthetic oligonucleotide
atgcatgggatataatggacttcaagagga

SEQ ID NO: 51857 - DNA, 30 bp, Artificial Sequence
  Synthetic oligonucleotide
cacgaaaccagagaggatttaataagagga

SEQ ID NO: 51858 - DNA, 30 bp, Artificial Sequence
  Synthetic oligonucleotide
atccatatgaacaaggcctagggcagagga

SEQ ID NO: 51859 - DNA, 30 bp, Artificial Sequence
  Synthetic oligonucleotide
ttgagaatgtgttggctaagggagcgagga

SEQ ID NO: 51860 - DNA, 30 bp, Artificial Sequence
  Synthetic oligonucleotide
aaccctgtaaacgtcatgaattagcgagga

SEQ ID NO: 51861 - DNA, 30 bp, Artificial Sequence
  Synthetic oligonucleotide
cacgcggacaaacaacatgccacgcgagga

SEQ ID NO: 51862 - DNA, 30 bp, Artificial Sequence
  Synthetic oligonucleotide
cgaggcaagtgtgaacaagatggctgagga

SEQ ID NO: 51863 - DNA, 31 bp, Artificial Sequence
  Synthetic oligonucleotide
gtacggagatgtttatcggtataggtgagga

SEQ ID NO: 51864 - DNA, 30 bp, Artificial Sequence
  Synthetic oligonucleotide
gcatcaagtgtaggtcatggcatgtgagga

SEQ ID NO: 51865 - DNA, 30 bp, Artificial Sequence
  Synthetic oligonucleotide
aataaacagggggaatacactaattgagga

SEQ ID NO: 51866 - DNA, 30 bp, Artificial Sequence
  Synthetic oligonucleotide
tctgcgcacggctgaaacagttggctagga

SEQ ID NO: 51867 - DNA, 30 bp, Artificial Sequence
  Synthetic oligonucleotide
tgaaagatgtgagggtaacgccttctagga

SEQ ID NO: 51868 - DNA, 30 bp, Artificial Sequence
  Synthetic oligonucleotide
ccaggtaaataacgggaactttgagtagga

SEQ ID NO: 51869 - DNA, 30 bp, Artificial Sequence
  Synthetic oligonucleotide
tcggcggcggagggctcggtcaacgtagga

SEQ ID NO: 51870 - DNA, 30 bp, Artificial Sequence
  Synthetic oligonucleotide
agtttacaagataacatacagatcgtagga

SEQ ID NO: 51871 - DNA, 30 bp, Artificial Sequence
  Synthetic oligonucleotide
acgaacaaggtgccaagacagaaattagga

SEQ ID NO: 51872 - DNA, 30 bp, Artificial Sequence
  Synthetic oligonucleotide
gacgggacggaccatcgatcatgcttagga

SEQ ID NO: 51873 - DNA, 30 bp, Artificial Sequence
  Synthetic oligonucleotide
atgctatcagcggatcagcagatgttagga

SEQ ID NO: 51874 - DNA, 30 bp, Artificial Sequence
  Synthetic oligonucleotide
cggaagtgaatccggcaacagcagcacgga

SEQ ID NO: 51875 - DNA, 30 bp, Artificial Sequence
  Synthetic oligonucleotide
aagaggcgagggataatcggagtagacgga

SEQ ID NO: 51876 - DNA, 30 bp, Artificial Sequence
  Synthetic oligonucleotide
ggatgcaaagtggaaaggatcttctacgga

SEQ ID NO: 51877 - DNA, 30 bp, Artificial Sequence
  Synthetic oligonucleotide
agacagcaaggtacaacagatatgtacgga

SEQ ID NO: 51878 - DNA, 30 bp, Artificial Sequence
  Synthetic oligonucleotide
aacttcccgagtaaccaacactgaaccgga

SEQ ID NO: 51879 - DNA, 30 bp, Artificial Sequence
  Synthetic oligonucleotide
gtatcccctggaaaaaggaacattgccgga

SEQ ID NO: 51880 - DNA, 30 bp, Artificial Sequence
  Synthetic oligonucleotide
gtgaggacattgagtgccatcgtgtgcgga

SEQ ID NO: 51881 - DNA, 30 bp, Artificial Sequence
  Synthetic oligonucleotide
ttcacacccataatggtcatccggatcgga

SEQ ID NO: 51882 - DNA, 30 bp, Artificial Sequence
  Synthetic oligonucleotide
tgagattcatttaggcaaagcggagtcgga

SEQ ID NO: 51883 - DNA, 30 bp, Artificial Sequence
  Synthetic oligonucleotide
gtgcgcggccaagaggagtttcgcgtcgga

SEQ ID NO: 51884 - DNA, 30 bp, Artificial Sequence
  Synthetic oligonucleotide
tttggggaattaagagcataccaggtcgga

SEQ ID NO: 51885 - DNA, 30 bp, Artificial Sequence
  Synthetic oligonucleotide
agtactctcgggaatcatatctgaaaggga

SEQ ID NO: 51886 - DNA, 30 bp, Artificial Sequence
  Synthetic oligonucleotide
ggaaagtgtgcgtccagtgatattaaggga

SEQ ID NO: 51887 - DNA, 30 bp, Artificial Sequence
  Synthetic oligonucleotide
ctggcagagggggttaccacatcccaggga

SEQ ID NO: 51888 - DNA, 30 bp, Artificial Sequence
  Synthetic oligonucleotide
agtcccgttagaaggcaattacggcaggga

SEQ ID NO: 51889 - DNA, 30 bp, Artificial Sequence
  Synthetic oligonucleotide
gggcaatagccggaatgttccctaccggga

SEQ ID NO: 51890 - DNA, 30 bp, Artificial Sequence
  Synthetic oligonucleotide
tacaaatttcgaatacggaagaaagcggga

SEQ ID NO: 51891 - DNA, 30 bp, Artificial Sequence
  Synthetic oligonucleotide
gaacgactcgatgaatcacattccgcggga

SEQ ID NO: 51892 - DNA, 30 bp, Artificial Sequence
  Synthetic oligonucleotide
gcggatgctggtggtattatggtcgcggga

SEQ ID NO: 51893 - DNA, 30 bp, Artificial Sequence
  Synthetic oligonucleotide
cggtttggttcatacgaagttgtatcggga

SEQ ID NO: 51894 - DNA, 30 bp, Artificial Sequence
  Synthetic oligonucleotide
aattcgtgtagcaggaccacgaaaagggga

SEQ ID NO: 51895 - DNA, 30 bp, Artificial Sequence
  Synthetic oligonucleotide
ctcgaatggttacgtgatgggtaaagggga

SEQ ID NO: 51896 - DNA, 30 bp, Artificial Sequence
  Synthetic oligonucleotide
agtaaagtgcgccgctgacggagaagggga

SEQ ID NO: 51897 - DNA, 30 bp, Artificial Sequence
  Synthetic oligonucleotide
tgactatgggaactccgtatgtgtagggga

SEQ ID NO: 51898 - DNA, 30 bp, Artificial Sequence
  Synthetic oligonucleotide
gacgggtgggacggcggggtataagtggga

SEQ ID NO: 51899 - DNA, 30 bp, Artificial Sequence
  Synthetic oligonucleotide
ctcgtgccaacgggcatacacacagtggga

SEQ ID NO: 51900 - DNA, 30 bp, Artificial Sequence
  Synthetic oligonucleotide
gaggtgaagaggtgcaactccgtattggga

SEQ ID NO: 51901 - DNA, 28 bp, Artificial Sequence
  Synthetic oligonucleotide
gaatgattagtacgatgaccacaatgga

SEQ ID NO: 51902 - DNA, 30 bp, Artificial Sequence
  Synthetic oligonucleotide
aggaagtccaaaattaagcatcacaatgga

SEQ ID NO: 51903 - DNA, 30 bp, Artificial Sequence
  Synthetic oligonucleotide
cgccacaactggattgctgtttaagatgga

SEQ ID NO: 51904 - DNA, 30 bp, Artificial Sequence
  Synthetic oligonucleotide
tggagataacaccttacgtgacgggatgga

SEQ ID NO: 51905 - DNA, 30 bp, Artificial Sequence
  Synthetic oligonucleotide
gatggcagaactggatcacaccgacctgga

SEQ ID NO: 51906 - DNA, 30 bp, Artificial Sequence
  Synthetic oligonucleotide
agtagggatggaactatcacgctcgctgga

SEQ ID NO: 51907 - DNA, 30 bp, Artificial Sequence
  Synthetic oligonucleotide
ctgaatcgattgtacaagcttcgaagtgga

SEQ ID NO: 51908 - DNA, 30 bp, Artificial Sequence
  Synthetic oligonucleotide
gcaactgccagtgcaagcaaataccgtgga

SEQ ID NO: 51909 - DNA, 30 bp, Artificial Sequence
  Synthetic oligonucleotide
cgattcgccatatggggtaataacggtgga

SEQ ID NO: 51910 - DNA, 30 bp, Artificial Sequence
  Synthetic oligonucleotide
gccaaggctattgtagaaggggatattgga

SEQ ID NO: 51911 - DNA, 30 bp, Artificial Sequence
  Synthetic oligonucleotide
cagctgagtaccgactcaatcaggcttgga

SEQ ID NO: 51912 - DNA, 30 bp, Artificial Sequence
  Synthetic oligonucleotide
ggcgagttaggccatgctacactatttgga

SEQ ID NO: 51913 - DNA, 30 bp, Artificial Sequence
  Synthetic oligonucleotide
tcggagcgaatgtgtaaggtgacttttgga

SEQ ID NO: 51914 - DNA, 30 bp, Artificial Sequence
  Synthetic oligonucleotide
ggccagatgaatcgcaaaagcagttttgga

SEQ ID NO: 51915 - DNA, 31 bp, Artificial Sequence
  Synthetic oligonucleotide
ctgccaaacgcaagagggtggatctaaatga

SEQ ID NO: 51916 - DNA, 30 bp, Artificial Sequence
  Synthetic oligonucleotide
ggtgggcggtgtagactccacaaggaatga

SEQ ID NO: 51917 - DNA, 30 bp, Artificial Sequence
  Synthetic oligonucleotide
gcaaggtgatatcagggctgacaggaatga

SEQ ID NO: 51918 - DNA, 30 bp, Artificial Sequence
  Synthetic oligonucleotide
aaaggagaccatgagttgatccgataatga

SEQ ID NO: 51919 - DNA, 30 bp, Artificial Sequence
  Synthetic oligonucleotide
ctaaatgttctagaggcgaatgattaatga

SEQ ID NO: 51920 - DNA, 30 bp, Artificial Sequence
  Synthetic oligonucleotide
taggccttgtcaccggaagacagcacatga

SEQ ID NO: 51921 - DNA, 30 bp, Artificial Sequence
  Synthetic oligonucleotide
ctgagatggagtcaatgagttactacatga

SEQ ID NO: 51922 - DNA, 30 bp, Artificial Sequence
  Synthetic oligonucleotide
gaagaggaccaagcggcgcgtatcccatga

SEQ ID NO: 51923 - DNA, 30 bp, Artificial Sequence
  Synthetic oligonucleotide
aggctacgtgtggatacctatgagccatga

SEQ ID NO: 51924 - DNA, 30 bp, Artificial Sequence
  Synthetic oligonucleotide
aactaggtgcgctcttacgcgagtccatga

SEQ ID NO: 51925 - DNA, 30 bp, Artificial Sequence
  Synthetic oligonucleotide
cctgggacactgaacaagtaggattcatga

SEQ ID NO: 51926 - DNA, 30 bp, Artificial Sequence
  Synthetic oligonucleotide
ctggccgtcggagggtagcagatgagatga

SEQ ID NO: 51927 - DNA, 30 bp, Artificial Sequence
  Synthetic oligonucleotide
tgggtacctgccgagtaagagcacggatga

SEQ ID NO: 51928 - DNA, 30 bp, Artificial Sequence
  Synthetic oligonucleotide
cggccgaacaaactccactacgcgggatga

SEQ ID NO: 51929 - DNA, 31 bp, Artificial Sequence
  Synthetic oligonucleotide
tgggacgaatgagtattagctaatgggatga

SEQ ID NO: 51930 - DNA, 30 bp, Artificial Sequence
  Synthetic oligonucleotide
gtagaggatgcgaggatcgtggctggatga

SEQ ID NO: 51931 - DNA, 30 bp, Artificial Sequence
  Synthetic oligonucleotide
aggatctcggtacgtactttggtgtgatga

SEQ ID NO: 51932 - DNA, 30 bp, Artificial Sequence
  Synthetic oligonucleotide
ctggcgatacggcgttaacagaagatatga

SEQ ID NO: 51933 - DNA, 30 bp, Artificial Sequence
  Synthetic oligonucleotide
catatagaagcgaattgacgatagatatga

SEQ ID NO: 51934 - DNA, 30 bp, Artificial Sequence
  Synthetic oligonucleotide
tgagagagattcgacaatgaaggtatatga

SEQ ID NO: 51935 - DNA, 30 bp, Artificial Sequence
  Synthetic oligonucleotide
aaaaggcgaactatggggcaaaaactatga

SEQ ID NO: 51936 - DNA, 30 bp, Artificial Sequence
  Synthetic oligonucleotide
tgtgagcggacacgccgagggaaactatga

SEQ ID NO: 51937 - DNA, 30 bp, Artificial Sequence
  Synthetic oligonucleotide
gctttgtcaagagagacagtcacagtatga

SEQ ID NO: 51938 - DNA, 30 bp, Artificial Sequence
  Synthetic oligonucleotide
agtaagcctggtaaggccattaaattatga

SEQ ID NO: 51939 - DNA, 30 bp, Artificial Sequence
  Synthetic oligonucleotide
ttaggtcaggaactgtagacggtgttatga

SEQ ID NO: 51940 - DNA, 30 bp, Artificial Sequence
  Synthetic oligonucleotide
ggaggatattaataatacgcgttgaactga

SEQ ID NO: 51941 - DNA, 30 bp, Artificial Sequence
  Synthetic oligonucleotide
gaagatcctgtataaagggtgagtcactga

SEQ ID NO: 51942 - DNA, 30 bp, Artificial Sequence
  Synthetic oligonucleotide
caagaggttcaagagatggggtgtgactga

SEQ ID NO: 51943 - DNA, 30 bp, Artificial Sequence
  Synthetic oligonucleotide
tgtggcaggtaaaaaagactaagatactga

SEQ ID NO: 51944 - DNA, 30 bp, Artificial Sequence
  Synthetic oligonucleotide
cgtttaactggatgaggagaatagtactga

SEQ ID NO: 51945 - DNA, 30 bp, Artificial Sequence
  Synthetic oligonucleotide
atactaaggcctagattcggattgccctga

SEQ ID NO: 51946 - DNA, 30 bp, Artificial Sequence
  Synthetic oligonucleotide
cttgactactgagatgccacaacgcgctga

SEQ ID NO: 51947 - DNA, 30 bp, Artificial Sequence
  Synthetic oligonucleotide
taccactggacgcaaaggcgaatgtgctga

SEQ ID NO: 51948 - DNA, 30 bp, Artificial Sequence
  Synthetic oligonucleotide
ctatactcgtgctaccaaaaacacatctga

SEQ ID NO: 51949 - DNA, 30 bp, Artificial Sequence
  Synthetic oligonucleotide
agaggcaacactacccacatggccaagtga

SEQ ID NO: 51950 - DNA, 30 bp, Artificial Sequence
  Synthetic oligonucleotide
gcgtaaaccacaggccgactcatccagtga

SEQ ID NO: 51951 - DNA, 30 bp, Artificial Sequence
  Synthetic oligonucleotide
agcaagtttgtaagcccaagctcggagtga

SEQ ID NO: 51952 - DNA, 30 bp, Artificial Sequence
  Synthetic oligonucleotide
tgagtgtctgtaaagtaggatgttgagtga

SEQ ID NO: 51953 - DNA, 30 bp, Artificial Sequence
  Synthetic oligonucleotide
tcaacgtggagttggtgtagaacgtcgtga

SEQ ID NO: 51954 - DNA, 30 bp, Artificial Sequence
  Synthetic oligonucleotide
gagacacggggacatcacgaatagaggtga

SEQ ID NO: 51955 - DNA, 30 bp, Artificial Sequence
  Synthetic oligonucleotide
tgagaaggcgtgtcagtcagatctaggtga

SEQ ID NO: 51956 - DNA, 30 bp, Artificial Sequence
  Synthetic oligonucleotide
tatgtcagaaagagtctgaaaaagcggtga

SEQ ID NO: 51957 - DNA, 30 bp, Artificial Sequence
  Synthetic oligonucleotide
aatcgcgccgtgaccggagaatgggggtga

SEQ ID NO: 51958 - DNA, 30 bp, Artificial Sequence
  Synthetic oligonucleotide
acataactgagtaggagcgtaggtgggtga

SEQ ID NO: 51959 - DNA, 30 bp, Artificial Sequence
  Synthetic oligonucleotide
cacaagcgtgagctacgctcggagtggtga

SEQ ID NO: 51960 - DNA, 30 bp, Artificial Sequence
  Synthetic oligonucleotide
catcagttagtgcacgactaggcgtggtga

SEQ ID NO: 51961 - DNA, 30 bp, Artificial Sequence
  Synthetic oligonucleotide
acagaggcatgccagatggcgggcatgtga

SEQ ID NO: 51962 - DNA, 30 bp, Artificial Sequence
  Synthetic oligonucleotide
ctgtccggccgataagggaagtggatgtga

SEQ ID NO: 51963 - DNA, 30 bp, Artificial Sequence
  Synthetic oligonucleotide
taaagtgcagtcgtagaagtcaacctgtga

SEQ ID NO: 51964 - DNA, 30 bp, Artificial Sequence
  Synthetic oligonucleotide
gagcgagtcatgcggatcgtcgacttgtga

SEQ ID NO: 51965 - DNA, 30 bp, Artificial Sequence
  Synthetic oligonucleotide
agcgccataggacagagttgcttgttgtga

SEQ ID NO: 51966 - DNA, 30 bp, Artificial Sequence
  Synthetic oligonucleotide
aggttgggacataaagtcgggcaaaattga

SEQ ID NO: 51967 - DNA, 30 bp, Artificial Sequence
  Synthetic oligonucleotide
acctcaacgaggtctgaggcattcaattga

SEQ ID NO: 51968 - DNA, 30 bp, Artificial Sequence
  Synthetic oligonucleotide
gggcgaacacgtcacaaaattgggaattga

SEQ ID NO: 51969 - DNA, 30 bp, Artificial Sequence
  Synthetic oligonucleotide
cggaggaggggctacttctaatcccattga

SEQ ID NO: 51970 - DNA, 30 bp, Artificial Sequence
  Synthetic oligonucleotide
tgggatgacacaactgtgtagtagcattga

SEQ ID NO: 51971 - DNA, 29 bp, Artificial Sequence
  Synthetic oligonucleotide
ccgatagaattttgacatcgagagattga

SEQ ID NO: 51972 - DNA, 30 bp, Artificial Sequence
  Synthetic oligonucleotide
gtagcggcccgaaagaaggtctgcgattga

SEQ ID NO: 51973 - DNA, 30 bp, Artificial Sequence
  Synthetic oligonucleotide
aaggagcagcctggaaggcatggttcttga

SEQ ID NO: 51974 - DNA, 30 bp, Artificial Sequence
  Synthetic oligonucleotide
ggaacagatacagtgtggcgagaaagttga

SEQ ID NO: 51975 - DNA, 30 bp, Artificial Sequence
  Synthetic oligonucleotide
gggaattagccacgaacgaggataagttga

SEQ ID NO: 51976 - DNA, 30 bp, Artificial Sequence
  Synthetic oligonucleotide
caccatcgtaggtaacagacgtcgagttga

SEQ ID NO: 51977 - DNA, 30 bp, Artificial Sequence
  Synthetic oligonucleotide
ttacctaaggacaacaatcggtcaatttga

SEQ ID NO: 51978 - DNA, 30 bp, Artificial Sequence
  Synthetic oligonucleotide
caaaacggtgccagtggactcgaggtttga

SEQ ID NO: 51979 - DNA, 30 bp, Artificial Sequence
  Synthetic oligonucleotide
ggggatggtgttagcagcaaagctaaaata

SEQ ID NO: 51980 - DNA, 30 bp, Artificial Sequence
  Synthetic oligonucleotide
caagaaaagctgagtggggaccaccaaata

SEQ ID NO: 51981 - DNA, 30 bp, Artificial Sequence
  Synthetic oligonucleotide
gtggtgtgggagacttaaaatacgcaaata

SEQ ID NO: 51982 - DNA, 30 bp, Artificial Sequence
  Synthetic oligonucleotide
gttaaaagtcacagagtggcaatagaaata

SEQ ID NO: 51983 - DNA, 30 bp, Artificial Sequence
  Synthetic oligonucleotide
gataaagactaaagcgtaaagggcgaaata

SEQ ID NO: 51984 - DNA, 30 bp, Artificial Sequence
  Synthetic oligonucleotide
caaacgcggcgagttatgcaaccggaaata

SEQ ID NO: 51985 - DNA, 30 bp, Artificial Sequence
  Synthetic oligonucleotide
gcgatgtctaacggtgctcgagcataaata

SEQ ID NO: 51986 - DNA, 30 bp, Artificial Sequence
  Synthetic oligonucleotide
accacatatagtacgatattggggacaata

SEQ ID NO: 51987 - DNA, 30 bp, Artificial Sequence
  Synthetic oligonucleotide
ggtagaggaggtacctcgtgcgttgcaata

SEQ ID NO: 51988 - DNA, 30 bp, Artificial Sequence
  Synthetic oligonucleotide
cctcaatcgatttcacggggtgcgtcaata

SEQ ID NO: 51989 - DNA, 30 bp, Artificial Sequence
  Synthetic oligonucleotide
gaggagcagaaagaccagcgcccttcaata

SEQ ID NO: 51990 - DNA, 30 bp, Artificial Sequence
  Synthetic oligonucleotide
cggctaatcagtacaagcacgcatagaata

SEQ ID NO: 51991 - DNA, 31 bp, Artificial Sequence
  Synthetic oligonucleotide
ctgatacaccaaggcaggggagtctagaata

SEQ ID NO: 51992 - DNA, 30 bp, Artificial Sequence
  Synthetic oligonucleotide
agcacagccactttgagaggaagtagaata

SEQ ID NO: 51993 - DNA, 30 bp, Artificial Sequence
  Synthetic oligonucleotide
accggaatggaagatcagagtacctgaata

SEQ ID NO: 51994 - DNA, 30 bp, Artificial Sequence
  Synthetic oligonucleotide
tgcgggatgggggatccaggatcgtgaata

SEQ ID NO: 51995 - DNA, 30 bp, Artificial Sequence
  Synthetic oligonucleotide
caaagaccgggatgaaaggtaataataata

SEQ ID NO: 51996 - DNA, 30 bp, Artificial Sequence
  Synthetic oligonucleotide
cactgcgggcacataccgaaatctataata

SEQ ID NO: 51997 - DNA, 30 bp, Artificial Sequence
  Synthetic oligonucleotide
gacagaactcaccttgatcgaatactaata

SEQ ID NO: 51998 - DNA, 30 bp, Artificial Sequence
  Synthetic oligonucleotide
agatcagaacgaaagaacaagaacctaata

SEQ ID NO: 51999 - DNA, 30 bp, Artificial Sequence
  Synthetic oligonucleotide
tcgcggattgcggatatgtatcgcctaata

SEQ ID NO: 52000 - DNA, 30 bp, Artificial Sequence
  Synthetic oligonucleotide
gctttgtaagacaggagaaagcgcgtaata

SEQ ID NO: 52001 - DNA, 30 bp, Artificial Sequence
  Synthetic oligonucleotide
ggatccagttagagcatatgccacttaata

SEQ ID NO: 52002 - DNA, 30 bp, Artificial Sequence
  Synthetic oligonucleotide
gctgcaggggcatggaacggaaataacata

SEQ ID NO: 52003 - DNA, 30 bp, Artificial Sequence
  Synthetic oligonucleotide
ttgccgtcggggggacctagtagagacata

SEQ ID NO: 52004 - DNA, 30 bp, Artificial Sequence
  Synthetic oligonucleotide
tccgagaaaagggaagggactcgatacata

SEQ ID NO: 52005 - DNA, 30 bp, Artificial Sequence
  Synthetic oligonucleotide
gatacatctagtggtaagcaagcctacata

SEQ ID NO: 52006 - DNA, 30 bp, Artificial Sequence
  Synthetic oligonucleotide
gttaccgagaacaagaccagggtgtacata

SEQ ID NO: 52007 - DNA, 30 bp, Artificial Sequence
  Synthetic oligonucleotide
ccacgtcggtaagctctgtcagattacata

SEQ ID NO: 52008 - DNA, 30 bp, Artificial Sequence
  Synthetic oligonucleotide
ggcgaccgggaaggggtatcgcgaaccata

SEQ ID NO: 52009 - DNA, 30 bp, Artificial Sequence
  Synthetic oligonucleotide
aggtatacggtctctataaccacagccata

SEQ ID NO: 52010 - DNA, 30 bp, Artificial Sequence
  Synthetic oligonucleotide
ccgcgatagccgtcttccctgacatccata

SEQ ID NO: 52011 - DNA, 30 bp, Artificial Sequence
  Synthetic oligonucleotide
cggaccctgggatgtgacacaacgtccata

SEQ ID NO: 52012 - DNA, 30 bp, Artificial Sequence
  Synthetic oligonucleotide
caagatagtgcgctatgtatgggttccata

SEQ ID NO: 52013 - DNA, 30 bp, Artificial Sequence
  Synthetic oligonucleotide
catagtcacacgcatggtggcggaagcata

SEQ ID NO: 52014 - DNA, 30 bp, Artificial Sequence
  Synthetic oligonucleotide
gacatgtggctcagggttcaatggagcata

SEQ ID NO: 52015 - DNA, 30 bp, Artificial Sequence
  Synthetic oligonucleotide
atgaggcaagatttgtatcaaattggcata

SEQ ID NO: 52016 - DNA, 30 bp, Artificial Sequence
  Synthetic oligonucleotide
aggtctggattaaaatagtcctgctgcata

SEQ ID NO: 52017 - DNA, 30 bp, Artificial Sequence
  Synthetic oligonucleotide
ggaggtcgtaacgctctccgaatactcata

SEQ ID NO: 52018 - DNA, 30 bp, Artificial Sequence
  Synthetic oligonucleotide
gcgaaatactaggggcgataaaacctcata

SEQ ID NO: 52019 - DNA, 30 bp, Artificial Sequence
  Synthetic oligonucleotide
ggttgacagctcgagagaggaaagctcata

SEQ ID NO: 52020 - DNA, 30 bp, Artificial Sequence
  Synthetic oligonucleotide
cgtcgagtcctaatgtttagagcgttcata

SEQ ID NO: 52021 - DNA, 30 bp, Artificial Sequence
  Synthetic oligonucleotide
gatggggtgcgaatctattcaaaccagata

SEQ ID NO: 52022 - DNA, 30 bp, Artificial Sequence
  Synthetic oligonucleotide
aggtcctgcatatgggggaccagttagata

SEQ ID NO: 52023 - DNA, 30 bp, Artificial Sequence
  Synthetic oligonucleotide
cgccaaaggggtttgaggtgtcgcacgata

SEQ ID NO: 52024 - DNA, 30 bp, Artificial Sequence
  Synthetic oligonucleotide
accatggcaatgaagaagtttcaaccgata

SEQ ID NO: 52025 - DNA, 30 bp, Artificial Sequence
  Synthetic oligonucleotide
cggtaaggttaatcttcgaagctcccgata

SEQ ID NO: 52026 - DNA, 30 bp, Artificial Sequence
  Synthetic oligonucleotide
taagcctcaggttgacaggtgggtccgata

SEQ ID NO: 52027 - DNA, 30 bp, Artificial Sequence
  Synthetic oligonucleotide
aggcaatgccttaataaggaccttccgata

SEQ ID NO: 52028 - DNA, 30 bp, Artificial Sequence
  Synthetic oligonucleotide
atcagggggctcccgagtgggaacgcgata

SEQ ID NO: 52029 - DNA, 30 bp, Artificial Sequence
  Synthetic oligonucleotide
gacgactaggatctcgaacggtccaggata

SEQ ID NO: 52030 - DNA, 30 bp, Artificial Sequence
  Synthetic oligonucleotide
ccggcaacaacgcgcgggcgggaccggata

SEQ ID NO: 52031 - DNA, 30 bp, Artificial Sequence
  Synthetic oligonucleotide
gctcagagttgcactgcattgtacgggata

SEQ ID NO: 52032 - DNA, 30 bp, Artificial Sequence
  Synthetic oligonucleotide
gacaagaaccgaagggtggatcggtggata

SEQ ID NO: 52033 - DNA, 30 bp, Artificial Sequence
  Synthetic oligonucleotide
atgcgagtagtaaatctcagtaaaatgata

SEQ ID NO: 52034 - DNA, 30 bp, Artificial Sequence
  Synthetic oligonucleotide
gagcacgacgtctgaaggagttgaaatata

SEQ ID NO: 52035 - DNA, 30 bp, Artificial Sequence
  Synthetic oligonucleotide
tcgagatactcgaaagcaaaggctaatata

SEQ ID NO: 52036 - DNA, 30 bp, Artificial Sequence
  Synthetic oligonucleotide
tatgcagaaggagtcaccatgcgcgatata

SEQ ID NO: 52037 - DNA, 30 bp, Artificial Sequence
  Synthetic oligonucleotide
cgacaattagtcaaatatgaagtaactata

SEQ ID NO: 52038 - DNA, 30 bp, Artificial Sequence
  Synthetic oligonucleotide
gtttggcataaaagtaaggagtgcactata

SEQ ID NO: 52039 - DNA, 30 bp, Artificial Sequence
  Synthetic oligonucleotide
ggtgagataggtccgccccacttgactata

SEQ ID NO: 52040 - DNA, 30 bp, Artificial Sequence
  Synthetic oligonucleotide
gtgggagacaagagcgaattaatacctata

SEQ ID NO: 52041 - DNA, 30 bp, Artificial Sequence
  Synthetic oligonucleotide
tgtgaggaagtgaaagtctggacgggtata

SEQ ID NO: 52042 - DNA, 30 bp, Artificial Sequence
  Synthetic oligonucleotide
acttaacaatatgtcaatgcgcatggtata

SEQ ID NO: 52043 - DNA, 30 bp, Artificial Sequence
  Synthetic oligonucleotide
aactgccataaaacgaaatgcatgtgtata

SEQ ID NO: 52044 - DNA, 30 bp, Artificial Sequence
  Synthetic oligonucleotide
gttaaaaaaaagaatcattcgccaattata

SEQ ID NO: 52045 - DNA, 30 bp, Artificial Sequence
  Synthetic oligonucleotide
aagggctgggaaaggtttagcatcgttata

SEQ ID NO: 52046 - DNA, 30 bp, Artificial Sequence
  Synthetic oligonucleotide
ttgcaatgtgagtgcgatgaatacaaacta

SEQ ID NO: 52047 - DNA, 30 bp, Artificial Sequence
  Synthetic oligonucleotide
tatcagagactgtccttaatagcgcaacta

SEQ ID NO: 52048 - DNA, 30 bp, Artificial Sequence
  Synthetic oligonucleotide
cgacgacaacaatttgtcaacgtgcaacta

SEQ ID NO: 52049 - DNA, 30 bp, Artificial Sequence
  Synthetic oligonucleotide
tagccagagtcaatcagggagaacgaacta

SEQ ID NO: 52050 - DNA, 31 bp, Artificial Sequence
  Synthetic oligonucleotide
cgatcaatagggctcacatggaaaataacta

SEQ ID NO: 52051 - DNA, 30 bp, Artificial Sequence
  Synthetic oligonucleotide
cgacatagacaccgtggttgataataacta

SEQ ID NO: 52052 - DNA, 30 bp, Artificial Sequence
  Synthetic oligonucleotide
cagactgtctcactgaatctccccggacta

SEQ ID NO: 52053 - DNA, 30 bp, Artificial Sequence
  Synthetic oligonucleotide
gcccacgttagtgacgatctggaaatacta

SEQ ID NO: 52054 - DNA, 30 bp, Artificial Sequence
  Synthetic oligonucleotide
cgcgtttaccattggaccgagatgatacta

SEQ ID NO: 52055 - DNA, 30 bp, Artificial Sequence
  Synthetic oligonucleotide
aaacaagaccgagtacaacatcgtgtacta

SEQ ID NO: 52056 - DNA, 30 bp, Artificial Sequence
  Synthetic oligonucleotide
cggtcactctcgggggacaacgtacaccta

SEQ ID NO: 52057 - DNA, 30 bp, Artificial Sequence
  Synthetic oligonucleotide
gcgtcgatccggataccgagggcataccta

SEQ ID NO: 52058 - DNA, 30 bp, Artificial Sequence
  Synthetic oligonucleotide
caaggtatcactacgaaggcattctaccta

SEQ ID NO: 52059 - DNA, 30 bp, Artificial Sequence
  Synthetic oligonucleotide
gccgctacaacgtcgagtccgaggccccta

SEQ ID NO: 52060 - DNA, 30 bp, Artificial Sequence
  Synthetic oligonucleotide
actacagaagaaggttcatcaatgtcccta

SEQ ID NO: 52061 - DNA, 30 bp, Artificial Sequence
  Synthetic oligonucleotide
catggtgaaactgtaagcagggacaagcta

SEQ ID NO: 52062 - DNA, 30 bp, Artificial Sequence
  Synthetic oligonucleotide
gcggagttgtacggggggcctagcaagcta

SEQ ID NO: 52063 - DNA, 30 bp, Artificial Sequence
  Synthetic oligonucleotide
cattgggaatggaaacaaggacgtaagcta

SEQ ID NO: 52064 - DNA, 30 bp, Artificial Sequence
  Synthetic oligonucleotide
cataacatattaagtgacactagacagcta

SEQ ID NO: 52065 - DNA, 30 bp, Artificial Sequence
  Synthetic oligonucleotide
agtgagtaaagctggagagcctcatagcta

SEQ ID NO: 52066 - DNA, 30 bp, Artificial Sequence
  Synthetic oligonucleotide
gcgaaataaaatcaaacgtaaggatagcta

SEQ ID NO: 52067 - DNA, 30 bp, Artificial Sequence
  Synthetic oligonucleotide
tagagcacacaagagactacaagcctgcta

SEQ ID NO: 52068 - DNA, 30 bp, Artificial Sequence
  Synthetic oligonucleotide
ttgcagggaaaaggacaggtagagttgcta

SEQ ID NO: 52069 - DNA, 30 bp, Artificial Sequence
  Synthetic oligonucleotide
cggtcttgtaagatcccatcagctcatcta

SEQ ID NO: 52070 - DNA, 30 bp, Artificial Sequence
  Synthetic oligonucleotide
aggaggcatgatgaaatccttccgtatcta

SEQ ID NO: 52071 - DNA, 30 bp, Artificial Sequence
  Synthetic oligonucleotide
gcaggagaccacctgatcaatcaagctcta

SEQ ID NO: 52072 - DNA, 30 bp, Artificial Sequence
  Synthetic oligonucleotide
cgctagtcgggacatatacacagaggtcta

SEQ ID NO: 52073 - DNA, 30 bp, Artificial Sequence
  Synthetic oligonucleotide
aaggccaacatgagcagtgccccctgtcta

SEQ ID NO: 52074 - DNA, 30 bp, Artificial Sequence
  Synthetic oligonucleotide
gcggatcacttaaatcgaaaagcgtgtcta

SEQ ID NO: 52075 - DNA, 30 bp, Artificial Sequence
  Synthetic oligonucleotide
gttcaaagtcgtcagacctgggccattcta

SEQ ID NO: 52076 - DNA, 30 bp, Artificial Sequence
  Synthetic oligonucleotide
acattaaccaaaagttagactaaggttcta

SEQ ID NO: 52077 - DNA, 30 bp, Artificial Sequence
  Synthetic oligonucleotide
actgcccaaaagggcaatacggccaaagta

SEQ ID NO: 52078 - DNA, 30 bp, Artificial Sequence
  Synthetic oligonucleotide
aaagacgaaagattactcgtgcggaaagta

SEQ ID NO: 52079 - DNA, 30 bp, Artificial Sequence
  Synthetic oligonucleotide
acaaactaagcatcgagaagcgtcgaagta

SEQ ID NO: 52080 - DNA, 30 bp, Artificial Sequence
  Synthetic oligonucleotide
agtgtatgctcagtgtggaaagcggaagta

SEQ ID NO: 52081 - DNA, 30 bp, Artificial Sequence
  Synthetic oligonucleotide
tatcggctggaagccacactgagggaagta

SEQ ID NO: 52082 - DNA, 30 bp, Artificial Sequence
  Synthetic oligonucleotide
tggactacggagcgacttacctatgcagta

SEQ ID NO: 52083 - DNA, 30 bp, Artificial Sequence
  Synthetic oligonucleotide
ccatcggtacggcagttccaaggatcagta

SEQ ID NO: 52084 - DNA, 30 bp, Artificial Sequence
  Synthetic oligonucleotide
caggatgcctgagtcttaaaggggagagta

SEQ ID NO: 52085 - DNA, 30 bp, Artificial Sequence
  Synthetic oligonucleotide
tacaccatggggcgagttcaaatgagagta

SEQ ID NO: 52086 - DNA, 30 bp, Artificial Sequence
  Synthetic oligonucleotide
tcggctaacctgaggacggacattcgagta

SEQ ID NO: 52087 - DNA, 30 bp, Artificial Sequence
  Synthetic oligonucleotide
gagcgatcggggcccgggagtgcaggagta

SEQ ID NO: 52088 - DNA, 30 bp, Artificial Sequence
  Synthetic oligonucleotide
tgaggctataaatccggaatcatgggagta

SEQ ID NO: 52089 - DNA, 30 bp, Artificial Sequence
  Synthetic oligonucleotide
atggcatcatctgggacaatgtcatgagta

SEQ ID NO: 52090 - DNA, 30 bp, Artificial Sequence
  Synthetic oligonucleotide
ggaatggtgagcatatacaaaacctgagta

SEQ ID NO: 52091 - DNA, 30 bp, Artificial Sequence
  Synthetic oligonucleotide
atagcaaatgcagaggaagtattttgagta

SEQ ID NO: 52092 - DNA, 30 bp, Artificial Sequence
  Synthetic oligonucleotide
ggacctaaggtggacgaatagaccatagta

SEQ ID NO: 52093 - DNA, 30 bp, Artificial Sequence
  Synthetic oligonucleotide
cgagtctcggaagctagctacatgatagta

SEQ ID NO: 52094 - DNA, 30 bp, Artificial Sequence
  Synthetic oligonucleotide
cggtcagaggtctaggtaagccaactagta

SEQ ID NO: 52095 - DNA, 30 bp, Artificial Sequence
  Synthetic oligonucleotide
gcgacggccggggcattcggcagtgtagta

SEQ ID NO: 52096 - DNA, 30 bp, Artificial Sequence
  Synthetic oligonucleotide
gcgcgtcagtgccaggtagcgcaattagta

SEQ ID NO: 52097 - DNA, 30 bp, Artificial Sequence
  Synthetic oligonucleotide
ttaggcgatactaagagaagcggattagta

SEQ ID NO: 52098 - DNA, 30 bp, Artificial Sequence
  Synthetic oligonucleotide
cgaatcacggtaggacgctattgattagta

SEQ ID NO: 52099 - DNA, 30 bp, Artificial Sequence
  Synthetic oligonucleotide
agggtgcatcgaagcgctggtataaacgta

SEQ ID NO: 52100 - DNA, 30 bp, Artificial Sequence
  Synthetic oligonucleotide
ggggtgtaatggggaaaagggtaccacgta

SEQ ID NO: 52101 - DNA, 30 bp, Artificial Sequence
  Synthetic oligonucleotide
ctgaagttacgagaacaagattaccacgta

SEQ ID NO: 52102 - DNA, 30 bp, Artificial Sequence
  Synthetic oligonucleotide
ctagaaggggcacgaggactacgccacgta

SEQ ID NO: 52103 - DNA, 30 bp, Artificial Sequence
  Synthetic oligonucleotide
ctttgcaagtactctagaataaagcacgta

SEQ ID NO: 52104 - DNA, 30 bp, Artificial Sequence
  Synthetic oligonucleotide
actgctcagatcatcgggatgaatcacgta

SEQ ID NO: 52105 - DNA, 30 bp, Artificial Sequence
  Synthetic oligonucleotide
tcttgcagaagtattatccaacaaaccgta

SEQ ID NO: 52106 - DNA, 30 bp, Artificial Sequence
  Synthetic oligonucleotide
cgaggatgagtatcactgtgcgtaaccgta

SEQ ID NO: 52107 - DNA, 30 bp, Artificial Sequence
  Synthetic oligonucleotide
cctgagacaagagtatacaaatccaccgta

SEQ ID NO: 52108 - DNA, 30 bp, Artificial Sequence
  Synthetic oligonucleotide
cattggggggaatgaaattgaggacccgta

SEQ ID NO: 52109 - DNA, 30 bp, Artificial Sequence
  Synthetic oligonucleotide
tccgtgttagttaataaggaatatgccgta

SEQ ID NO: 52110 - DNA, 30 bp, Artificial Sequence
  Synthetic oligonucleotide
aaagtgaggcaccccgttggtcgatccgta

SEQ ID NO: 52111 - DNA, 30 bp, Artificial Sequence
  Synthetic oligonucleotide
gcgcaaagaccacctaggcgtccgtccgta

SEQ ID NO: 52112 - DNA, 30 bp, Artificial Sequence
  Synthetic oligonucleotide
tcgtaccgataacgtgtccagtaaagcgta

SEQ ID NO: 52113 - DNA, 30 bp, Artificial Sequence
  Synthetic oligonucleotide
tagcagggtagtcaatgtgcacttcgcgta

SEQ ID NO: 52114 - DNA, 30 bp, Artificial Sequence
  Synthetic oligonucleotide
ggtggcaatccagatataattaagtgcgta

SEQ ID NO: 52115 - DNA, 30 bp, Artificial Sequence
  Synthetic oligonucleotide
ccagcgttagggaagttcaaactgctcgta

SEQ ID NO: 52116 - DNA, 30 bp, Artificial Sequence
  Synthetic oligonucleotide
atgacttggagacgaatatcgacagtcgta

SEQ ID NO: 52117 - DNA, 30 bp, Artificial Sequence
  Synthetic oligonucleotide
tctcctgaaatggctcaaacaactgtcgta

SEQ ID NO: 52118 - DNA, 30 bp, Artificial Sequence
  Synthetic oligonucleotide
tagaaacttaagagtggccaccctgtcgta

SEQ ID NO: 52119 - DNA, 30 bp, Artificial Sequence
  Synthetic oligonucleotide
agcacggagggcaatgaacttaggttcgta

SEQ ID NO: 52120 - DNA, 30 bp, Artificial Sequence
  Synthetic oligonucleotide
acgggggacgtgggtgacgggtcaaaggta

SEQ ID NO: 52121 - DNA, 30 bp, Artificial Sequence
  Synthetic oligonucleotide
gaggcacggcgaactgcgtcttgtaaggta

SEQ ID NO: 52122 - DNA, 30 bp, Artificial Sequence
  Synthetic oligonucleotide
ttgccaaaaaatggcttgctacctcaggta

SEQ ID NO: 52123 - DNA, 30 bp, Artificial Sequence
  Synthetic oligonucleotide
tggccgaaacgttagctaggaccctaggta

SEQ ID NO: 52124 - DNA, 30 bp, Artificial Sequence
  Synthetic oligonucleotide
gctcgtggagggacagcaagcatgacggta

SEQ ID NO: 52125 - DNA, 30 bp, Artificial Sequence
  Synthetic oligonucleotide
attagcaacggcacattacaaaacgcggta

SEQ ID NO: 52126 - DNA, 30 bp, Artificial Sequence
  Synthetic oligonucleotide
gcgtaggcgcacctttcactcacaagggta

SEQ ID NO: 52127 - DNA, 30 bp, Artificial Sequence
  Synthetic oligonucleotide
acaatatagcaaggtggagggagcagggta

SEQ ID NO: 52128 - DNA, 30 bp, Artificial Sequence
  Synthetic oligonucleotide
gaagaatcggtcgggtaagttgctagggta

SEQ ID NO: 52129 - DNA, 30 bp, Artificial Sequence
  Synthetic oligonucleotide
cgaagaatcgcaccggtggaacagcgggta

SEQ ID NO: 52130 - DNA, 30 bp, Artificial Sequence
  Synthetic oligonucleotide
cgaggtagaaggcgtattgagaatcgggta

SEQ ID NO: 52131 - DNA, 30 bp, Artificial Sequence
  Synthetic oligonucleotide
gcgtatgccaggctgcacgggcggggggta

SEQ ID NO: 52132 - DNA, 30 bp, Artificial Sequence
  Synthetic oligonucleotide
cgcaaatcaggatagaacggtgtgggggta

SEQ ID NO: 52133 - DNA, 30 bp, Artificial Sequence
  Synthetic oligonucleotide
gatctcgtggtgggcaaagatcatggggta

SEQ ID NO: 52134 - DNA, 30 bp, Artificial Sequence
  Synthetic oligonucleotide
caggacagtgtatctgggccatactgggta

SEQ ID NO: 52135 - DNA, 30 bp, Artificial Sequence
  Synthetic oligonucleotide
cgtgctcactgcgcatgggacagaatggta

SEQ ID NO: 52136 - DNA, 30 bp, Artificial Sequence
  Synthetic oligonucleotide
aggaccatgtaagcatcagagatcctggta

SEQ ID NO: 52137 - DNA, 30 bp, Artificial Sequence
  Synthetic oligonucleotide
tctgcgatatcaaaggatgatactcatgta

SEQ ID NO: 52138 - DNA, 30 bp, Artificial Sequence
  Synthetic oligonucleotide
tagtcaaagccgggtggtcaggccgatgta

SEQ ID NO: 52139 - DNA, 30 bp, Artificial Sequence
  Synthetic oligonucleotide
gttcgagtggaggaataacggattcctgta

SEQ ID NO: 52140 - DNA, 30 bp, Artificial Sequence
  Synthetic oligonucleotide
acgaccactaacagtctccaaggcgctgta

SEQ ID NO: 52141 - DNA, 29 bp, Artificial Sequence
  Synthetic oligonucleotide
atccgaagtgagcgacatccctggctgta

SEQ ID NO: 52142 - DNA, 30 bp, Artificial Sequence
  Synthetic oligonucleotide
aaaggagagaacggctatgtcggtgctgta

SEQ ID NO: 52143 - DNA, 30 bp, Artificial Sequence
  Synthetic oligonucleotide
agctaagaagggggagagaacaatagtgta

SEQ ID NO: 52144 - DNA, 30 bp, Artificial Sequence
  Synthetic oligonucleotide
gaaggaagcttttccagcgaagaacgtgta

SEQ ID NO: 52145 - DNA, 30 bp, Artificial Sequence
  Synthetic oligonucleotide
gaaagaacgaaagaatagtccgagcgtgta

SEQ ID NO: 52146 - DNA, 30 bp, Artificial Sequence
  Synthetic oligonucleotide
atatagaagacgtacgcgtagcgaggtgta

SEQ ID NO: 52147 - DNA, 30 bp, Artificial Sequence
  Synthetic oligonucleotide
cgggtaactggaagctcgtcgaaacttgta

SEQ ID NO: 52148 - DNA, 30 bp, Artificial Sequence
  Synthetic oligonucleotide
aacgtcaaagtgcggtaaattgcaaaatta

SEQ ID NO: 52149 - DNA, 30 bp, Artificial Sequence
  Synthetic oligonucleotide
gtagggcgtaaagcggtacgaggacaatta

SEQ ID NO: 52150 - DNA, 30 bp, Artificial Sequence
  Synthetic oligonucleotide
cgaagttgtggattattacaaggagaatta

SEQ ID NO: 52151 - DNA, 30 bp, Artificial Sequence
  Synthetic oligonucleotide
gtaggccaccatccaataagagatacatta

SEQ ID NO: 52152 - DNA, 30 bp, Artificial Sequence
  Synthetic oligonucleotide
gcgacaccgatattgataccgggaagatta

SEQ ID NO: 52153 - DNA, 30 bp, Artificial Sequence
  Synthetic oligonucleotide
gaggggggaatctaacgggtgccgagatta

SEQ ID NO: 52154 - DNA, 30 bp, Artificial Sequence
  Synthetic oligonucleotide
ttaggaacatgagtcccatttcgaggatta

SEQ ID NO: 52155 - DNA, 30 bp, Artificial Sequence
  Synthetic oligonucleotide
cctaccaaaaatgtcagatggcggggatta

SEQ ID NO: 52156 - DNA, 30 bp, Artificial Sequence
  Synthetic oligonucleotide
cgggtcgggtattgggtgaccgcctgatta

SEQ ID NO: 52157 - DNA, 30 bp, Artificial Sequence
  Synthetic oligonucleotide
tcactggcggaggtcaacaggttaatatta

SEQ ID NO: 52158 - DNA, 30 bp, Artificial Sequence
  Synthetic oligonucleotide
cgcataggcgagaggcacccaatgatatta

SEQ ID NO: 52159 - DNA, 30 bp, Artificial Sequence
  Synthetic oligonucleotide
tagacagggactccaaacacctctctatta

SEQ ID NO: 52160 - DNA, 30 bp, Artificial Sequence
  Synthetic oligonucleotide
ggcggatagctactaaaaggttaaaactta

SEQ ID NO: 52161 - DNA, 30 bp, Artificial Sequence
  Synthetic oligonucleotide
cgaggtagtatacttatacatggaaactta

SEQ ID NO: 52162 - DNA, 30 bp, Artificial Sequence
  Synthetic oligonucleotide
cgctggtgcaaaaggaaaatcgtagactta

SEQ ID NO: 52163 - DNA, 30 bp, Artificial Sequence
  Synthetic oligonucleotide
gtgagacctaggacgcgatagaccacctta

SEQ ID NO: 52164 - DNA, 30 bp, Artificial Sequence
  Synthetic oligonucleotide
cacatccgccacaatgcaacgagcgcctta

SEQ ID NO: 52165 - DNA, 31 bp, Artificial Sequence
  Synthetic oligonucleotide
caaggttctcctggagacgaaccctcgctta

SEQ ID NO: 52166 - DNA, 30 bp, Artificial Sequence
  Synthetic oligonucleotide
tacgtaatgcgcgcgtgacatgcaatctta

SEQ ID NO: 52167 - DNA, 30 bp, Artificial Sequence
  Synthetic oligonucleotide
acacggcccacgtaagcgcaatacctctta

SEQ ID NO: 52168 - DNA, 30 bp, Artificial Sequence
  Synthetic oligonucleotide
agtgatgatccgagaggagggtctgtctta

SEQ ID NO: 52169 - DNA, 30 bp, Artificial Sequence
  Synthetic oligonucleotide
tcggacgagactccgagatcctaggagtta

SEQ ID NO: 52170 - DNA, 30 bp, Artificial Sequence
  Synthetic oligonucleotide
cggagaggtgtgctttcgagcgcggagtta

SEQ ID NO: 52171 - DNA, 30 bp, Artificial Sequence
  Synthetic oligonucleotide
tagagcccggtataaacactaagatagtta

SEQ ID NO: 52172 - DNA, 30 bp, Artificial Sequence
  Synthetic oligonucleotide
ttcgacttcgaaaagaaaacatgaccgtta

SEQ ID NO: 52173 - DNA, 30 bp, Artificial Sequence
  Synthetic oligonucleotide
gcacgactggctgaggcacgcggtccgtta

SEQ ID NO: 52174 - DNA, 30 bp, Artificial Sequence
  Synthetic oligonucleotide
atgttgaaaggataagccgggcaagcgtta

SEQ ID NO: 52175 - DNA, 30 bp, Artificial Sequence
  Synthetic oligonucleotide
acgaggctgtgaacggtggttgtagcgtta

SEQ ID NO: 52176 - DNA, 30 bp, Artificial Sequence
  Synthetic oligonucleotide
ccagcccagtatgggtcacttggctcgtta

SEQ ID NO: 52177 - DNA, 30 bp, Artificial Sequence
  Synthetic oligonucleotide
agatatagtggaaattggtaacgttcgtta

SEQ ID NO: 52178 - DNA, 30 bp, Artificial Sequence
  Synthetic oligonucleotide
tcgagcagctcagggacacgcatttcgtta

SEQ ID NO: 52179 - DNA, 30 bp, Artificial Sequence
  Synthetic oligonucleotide
aggacacttaacactaccggctgcaggtta

SEQ ID NO: 52180 - DNA, 30 bp, Artificial Sequence
  Synthetic oligonucleotide
acgataatttgcctagctgtgaaagggtta

SEQ ID NO: 52181 - DNA, 30 bp, Artificial Sequence
  Synthetic oligonucleotide
tcaacagagtccacgtctaagatagtgtta

SEQ ID NO: 52182 - DNA, 30 bp, Artificial Sequence
  Synthetic oligonucleotide
actgctcgtccgaatcaaagtaaattgtta

SEQ ID NO: 52183 - DNA, 30 bp, Artificial Sequence
  Synthetic oligonucleotide
ggcaaaaagtggcgtcgcgaaacattgtta

SEQ ID NO: 52184 - DNA, 30 bp, Artificial Sequence
  Synthetic oligonucleotide
gcgcggacaaacggcaggatctaaagttta

SEQ ID NO: 52185 - DNA, 30 bp, Artificial Sequence
  Synthetic oligonucleotide
acgggaaggtggaacaaaagactaagttta

SEQ ID NO: 52186 - DNA, 30 bp, Artificial Sequence
  Synthetic oligonucleotide
gcattgacaaatgccctcttcctagaaaac

SEQ ID NO: 52187 - DNA, 30 bp, Artificial Sequence
  Synthetic oligonucleotide
agggtcaactattatggaatcgatacaaac

SEQ ID NO: 52188 - DNA, 30 bp, Artificial Sequence
  Synthetic oligonucleotide
gagcactgggaagagcgtatcggtgcaaac

SEQ ID NO: 52189 - DNA, 30 bp, Artificial Sequence
  Synthetic oligonucleotide
acacaaggaatgccgaatgttacatcaaac

SEQ ID NO: 52190 - DNA, 30 bp, Artificial Sequence
  Synthetic oligonucleotide
tgacaatcggcgatacttctgatcagaaac

SEQ ID NO: 52191 - DNA, 30 bp, Artificial Sequence
  Synthetic oligonucleotide
ggacaaaaagcagaattagacgaaggaaac

SEQ ID NO: 52192 - DNA, 30 bp, Artificial Sequence
  Synthetic oligonucleotide
cgacgtcatcgcaacttcgagctctgaaac

SEQ ID NO: 52193 - DNA, 30 bp, Artificial Sequence
  Synthetic oligonucleotide
acaactgagaacaagggtccttcgtgaaac

SEQ ID NO: 52194 - DNA, 30 bp, Artificial Sequence
  Synthetic oligonucleotide
agcgtcacccgcggaaggagcgatctaaac

SEQ ID NO: 52195 - DNA, 30 bp, Artificial Sequence
  Synthetic oligonucleotide
ccaccgcatataaatacaatgtgagtaaac

SEQ ID NO: 52196 - DNA, 30 bp, Artificial Sequence
  Synthetic oligonucleotide
agggtggaaaggtagtgagatcccttaaac

SEQ ID NO: 52197 - DNA, 30 bp, Artificial Sequence
  Synthetic oligonucleotide
catcgggctgtccgaagagcgcagttaaac

SEQ ID NO: 52198 - DNA, 30 bp, Artificial Sequence
  Synthetic oligonucleotide
cggacgtcaaaacccttctacacaaacaac

SEQ ID NO: 52199 - DNA, 30 bp, Artificial Sequence
  Synthetic oligonucleotide
gaaaaacggcaaggcatagcaataaacaac

SEQ ID NO: 52200 - DNA, 30 bp, Artificial Sequence
  Synthetic oligonucleotide
tcaaaaacctcccgaaacagtcataacaac

SEQ ID NO: 52201 - DNA, 30 bp, Artificial Sequence
  Synthetic oligonucleotide
ttgtaccgcaaacatacaaaatcacacaac

SEQ ID NO: 52202 - DNA, 30 bp, Artificial Sequence
  Synthetic oligonucleotide
catataggctctcgatgaagggacgacaac

SEQ ID NO: 52203 - DNA, 30 bp, Artificial Sequence
  Synthetic oligonucleotide
attagaacacagagtacaatcacttacaac

SEQ ID NO: 52204 - DNA, 30 bp, Artificial Sequence
  Synthetic oligonucleotide
gccgaacaagtcattcccagggcggccaac

SEQ ID NO: 52205 - DNA, 30 bp, Artificial Sequence
  Synthetic oligonucleotide
tctggcagccaatcgtcggtgaggagcaac

SEQ ID NO: 52206 - DNA, 30 bp, Artificial Sequence
  Synthetic oligonucleotide
tagaagtgtggttggtgcgaaaacatcaac

SEQ ID NO: 52207 - DNA, 30 bp, Artificial Sequence
  Synthetic oligonucleotide
tcgaaaatagatttacagttgggtctcaac

SEQ ID NO: 52208 - DNA, 31 bp, Artificial Sequence
  Synthetic oligonucleotide
agggcatgggtccatggacagaccggtcaac

SEQ ID NO: 52209 - DNA, 30 bp, Artificial Sequence
  Synthetic oligonucleotide
gctaagcgattgagtgatagtgagaagaac

SEQ ID NO: 52210 - DNA, 30 bp, Artificial Sequence
  Synthetic oligonucleotide
atggctagatggaatcacgctacggagaac

SEQ ID NO: 52211 - DNA, 30 bp, Artificial Sequence
  Synthetic oligonucleotide
gaagagtatgcaggagaatcgaatgagaac

SEQ ID NO: 52212 - DNA, 30 bp, Artificial Sequence
  Synthetic oligonucleotide
ccttggcgtgcttaggcataaacctagaac

SEQ ID NO: 52213 - DNA, 30 bp, Artificial Sequence
  Synthetic oligonucleotide
ggacaggataggtcagttagacgtacgaac

SEQ ID NO: 52214 - DNA, 30 bp, Artificial Sequence
  Synthetic oligonucleotide
tcatattaaatcaaagctagatacccgaac

SEQ ID NO: 52215 - DNA, 30 bp, Artificial Sequence
  Synthetic oligonucleotide
ctcgaagtggtcctctaggtgggtccgaac

SEQ ID NO: 52216 - DNA, 30 bp, Artificial Sequence
  Synthetic oligonucleotide
catataggggaagggacagagccagcgaac

SEQ ID NO: 52217 - DNA, 30 bp, Artificial Sequence
  Synthetic oligonucleotide
ggaacctatttctggtaggagcgaaggaac

SEQ ID NO: 52218 - DNA, 30 bp, Artificial Sequence
  Synthetic oligonucleotide
catctgagcatttaggagcatggaaggaac

SEQ ID NO: 52219 - DNA, 30 bp, Artificial Sequence
  Synthetic oligonucleotide
atacatacaagagtataggtttgcaggaac

SEQ ID NO: 52220 - DNA, 30 bp, Artificial Sequence
  Synthetic oligonucleotide
acagaacaactggtcggagctaaacggaac

SEQ ID NO: 52221 - DNA, 30 bp, Artificial Sequence
  Synthetic oligonucleotide
aagaactaccaatatctgccaacagggaac

SEQ ID NO: 52222 - DNA, 30 bp, Artificial Sequence
  Synthetic oligonucleotide
gagactggggtgtaagctgggttagggaac

SEQ ID NO: 52223 - DNA, 30 bp, Artificial Sequence
  Synthetic oligonucleotide
gacagataaagttcccgaactacaatgaac

SEQ ID NO: 52224 - DNA, 30 bp, Artificial Sequence
  Synthetic oligonucleotide
atcgtgatcaccactaagaaagtcatgaac

SEQ ID NO: 52225 - DNA, 30 bp, Artificial Sequence
  Synthetic oligonucleotide
acggaacaacggggtgaacagttactgaac

SEQ ID NO: 52226 - DNA, 30 bp, Artificial Sequence
  Synthetic oligonucleotide
taggatgaagttgggagtcaaccggataac

SEQ ID NO: 52227 - DNA, 30 bp, Artificial Sequence
  Synthetic oligonucleotide
tacgtcctaaggccaatcagagtaactaac

SEQ ID NO: 52228 - DNA, 30 bp, Artificial Sequence
  Synthetic oligonucleotide
gggcgataccgttacatcattgggtctaac

SEQ ID NO: 52229 - DNA, 30 bp, Artificial Sequence
  Synthetic oligonucleotide
gtgccatgagcggaggtggtctcgagtaac

SEQ ID NO: 52230 - DNA, 30 bp, Artificial Sequence
  Synthetic oligonucleotide
tcatgggtgctggggtaggcatgtagtaac

SEQ ID NO: 52231 - DNA, 30 bp, Artificial Sequence
  Synthetic oligonucleotide
ccggagagagtgttaaggtccagccgtaac

SEQ ID NO: 52232 - DNA, 30 bp, Artificial Sequence
  Synthetic oligonucleotide
aggaaatgtcggccttgagtgggctgtaac

SEQ ID NO: 52233 - DNA, 30 bp, Artificial Sequence
  Synthetic oligonucleotide
cgataagctgtatacgaaaggaggtgtaac

SEQ ID NO: 52234 - DNA, 30 bp, Artificial Sequence
  Synthetic oligonucleotide
gactgcttagaaggaaacgggtgacttaac

SEQ ID NO: 52235 - DNA, 30 bp, Artificial Sequence
  Synthetic oligonucleotide
agcgaacagctgacaccgtcgatccttaac

SEQ ID NO: 52236 - DNA, 30 bp, Artificial Sequence
  Synthetic oligonucleotide
attgcgaaagccgaccggaattgggttaac

SEQ ID NO: 52237 - DNA, 30 bp, Artificial Sequence
  Synthetic oligonucleotide
acgttgacgcccaccgagatcacaaaacac

SEQ ID NO: 52238 - DNA, 30 bp, Artificial Sequence
  Synthetic oligonucleotide
gtgcctaacataccacctgatcgaaaacac

SEQ ID NO: 52239 - DNA, 30 bp, Artificial Sequence
  Synthetic oligonucleotide
tagatgggcaggtaaaagagctcgcaacac

SEQ ID NO: 52240 - DNA, 30 bp, Artificial Sequence
  Synthetic oligonucleotide
cgactcaatgcgagtgggttggggcaacac

SEQ ID NO: 52241 - DNA, 30 bp, Artificial Sequence
  Synthetic oligonucleotide
agaacagtattggtgacgtacttgcaacac

SEQ ID NO: 52242 - DNA, 30 bp, Artificial Sequence
  Synthetic oligonucleotide
agacccgaagcaaagaagtagcaggaacac

SEQ ID NO: 52243 - DNA, 30 bp, Artificial Sequence
  Synthetic oligonucleotide
agaggctgcggattcgtaaagtaggcacac

SEQ ID NO: 52244 - DNA, 30 bp, Artificial Sequence
  Synthetic oligonucleotide
cggggaattaagcttacggtgtgttcacac

SEQ ID NO: 52245 - DNA, 30 bp, Artificial Sequence
  Synthetic oligonucleotide
tatcgaccgaccctcatcgaagccagacac

SEQ ID NO: 52246 - DNA, 30 bp, Artificial Sequence
  Synthetic oligonucleotide
acgtgcgaaagttgatccgcgctgatacac

SEQ ID NO: 52247 - DNA, 30 bp, Artificial Sequence
  Synthetic oligonucleotide
atcatcccgggatagggcaagcagctacac

SEQ ID NO: 52248 - DNA, 30 bp, Artificial Sequence
  Synthetic oligonucleotide
ctgaggagcttagttgttgatcgattacac

SEQ ID NO: 52249 - DNA, 30 bp, Artificial Sequence
  Synthetic oligonucleotide
atgagaatagaccaaagaattgaaaaccac

SEQ ID NO: 52250 - DNA, 30 bp, Artificial Sequence
  Synthetic oligonucleotide
ggacgggacagtagaagcgggtcccaccac

SEQ ID NO: 52251 - DNA, 30 bp, Artificial Sequence
  Synthetic oligonucleotide
cgttccccacagaaatgtcaccttcaccac

SEQ ID NO: 52252 - DNA, 30 bp, Artificial Sequence
  Synthetic oligonucleotide
ataggtacaccttaaactgacggagaccac

SEQ ID NO: 52253 - DNA, 30 bp, Artificial Sequence
  Synthetic oligonucleotide
ccacgttgaaataaaaagtcggaaccccac

SEQ ID NO: 52254 - DNA, 30 bp, Artificial Sequence
  Synthetic oligonucleotide
aaccaatgcgatgaatgaaatcctgcccac

SEQ ID NO: 52255 - DNA, 30 bp, Artificial Sequence
  Synthetic oligonucleotide
aggggggcctaactcctggccgtaatccac

SEQ ID NO: 52256 - DNA, 30 bp, Artificial Sequence
  Synthetic oligonucleotide
atggtcagaatttcccgagtaggcatccac

SEQ ID NO: 52257 - DNA, 30 bp, Artificial Sequence
  Synthetic oligonucleotide
gctgcgaactgtcgagacaagaatgtccac

SEQ ID NO: 52258 - DNA, 30 bp, Artificial Sequence
  Synthetic oligonucleotide
ccgcgcaaagggtactaagaactctagcac

SEQ ID NO: 52259 - DNA, 30 bp, Artificial Sequence
  Synthetic oligonucleotide
tcttgaataagggattgaatacctccgcac

SEQ ID NO: 52260 - DNA, 30 bp, Artificial Sequence
  Synthetic oligonucleotide
acggtgcatcgggttggagatttagcgcac

SEQ ID NO: 52261 - DNA, 30 bp, Artificial Sequence
  Synthetic oligonucleotide
accagaaaacgaatgatccgtaggtcgcac

SEQ ID NO: 52262 - DNA, 30 bp, Artificial Sequence
  Synthetic oligonucleotide
ccaccaccgaacaggtcactccactggcac

SEQ ID NO: 52263 - DNA, 30 bp, Artificial Sequence
  Synthetic oligonucleotide
acggaaacgactactgatacaacgtggcac

SEQ ID NO: 52264 - DNA, 30 bp, Artificial Sequence
  Synthetic oligonucleotide
cgccacgattcgatgccggataaacatcac

SEQ ID NO: 52265 - DNA, 30 bp, Artificial Sequence
  Synthetic oligonucleotide
tccgatagggtaacattccaatgtgatcac

SEQ ID NO: 52266 - DNA, 30 bp, Artificial Sequence
  Synthetic oligonucleotide
tcgaggaaagagcttggttaagactatcac

SEQ ID NO: 52267 - DNA, 30 bp, Artificial Sequence
  Synthetic oligonucleotide
gctagggagagtcaaagtattgcgtatcac

SEQ ID NO: 52268 - DNA, 30 bp, Artificial Sequence
  Synthetic oligonucleotide
cgacaatcaagcagacttcggacgcctcac

SEQ ID NO: 52269 - DNA, 30 bp, Artificial Sequence
  Synthetic oligonucleotide
aacaacagaggacggagacttgctagtcac

SEQ ID NO: 52270 - DNA, 30 bp, Artificial Sequence
  Synthetic oligonucleotide
ctttcgcaagaaaggtttatcccaaaagac

SEQ ID NO: 52271 - DNA, 32 bp, Artificial Sequence
  Synthetic oligonucleotide
gatactagaccaccacgtgtccatcaaaagac

SEQ ID NO: 52272 - DNA, 33 bp, Artificial Sequence
  Synthetic oligonucleotide
gatactagaccacacgtgtccatcagaaaagac

SEQ ID NO: 52273 - DNA, 30 bp, Artificial Sequence
  Synthetic oligonucleotide
tgaggactagagatacaacggatcaaagac

SEQ ID NO: 52274 - DNA, 30 bp, Artificial Sequence
  Synthetic oligonucleotide
tcagggtgagtactataccgtttcaaagac

SEQ ID NO: 52275 - DNA, 30 bp, Artificial Sequence
  Synthetic oligonucleotide
tagtgctaaggaggctgtgttcggaaagac

SEQ ID NO: 52276 - DNA, 30 bp, Artificial Sequence
  Synthetic oligonucleotide
agaaagcggtaattcgaactcgaagaagac

SEQ ID NO: 52277 - DNA, 30 bp, Artificial Sequence
  Synthetic oligonucleotide
tatcgaaatggagaagggagaagcgaagac

SEQ ID NO: 52278 - DNA, 30 bp, Artificial Sequence
  Synthetic oligonucleotide
aatcgggggtatctcatgcagagataagac

SEQ ID NO: 52279 - DNA, 30 bp, Artificial Sequence
  Synthetic oligonucleotide
tggtcacaactgccgtcatgcgtaccagac

SEQ ID NO: 52280 - DNA, 30 bp, Artificial Sequence
  Synthetic oligonucleotide
cgagatcacgacgcgtgtagaggctcagac

SEQ ID NO: 52281 - DNA, 30 bp, Artificial Sequence
  Synthetic oligonucleotide
aggagaccagggaggttagtgctcagagac

SEQ ID NO: 52282 - DNA, 30 bp, Artificial Sequence
  Synthetic oligonucleotide
gttaggtggagacccgatgcgaaacgagac

SEQ ID NO: 52283 - DNA, 30 bp, Artificial Sequence
  Synthetic oligonucleotide
ggacgcaagtcggaatacggccgccgagac

SEQ ID NO: 52284 - DNA, 30 bp, Artificial Sequence
  Synthetic oligonucleotide
catcaaacgtgaagttaataaggcggagac

SEQ ID NO: 52285 - DNA, 30 bp, Artificial Sequence
  Synthetic oligonucleotide
tggccgaagataacaataatagctggagac

SEQ ID NO: 52286 - DNA, 30 bp, Artificial Sequence
  Synthetic oligonucleotide
aacgaaaaatgatccccaggatctctagac

SEQ ID NO: 52287 - DNA, 30 bp, Artificial Sequence
  Synthetic oligonucleotide
catacactgaaaacgttggacaataacgac

SEQ ID NO: 52288 - DNA, 30 bp, Artificial Sequence
  Synthetic oligonucleotide
agttcaaatggcgaaatgagcgaatacgac

SEQ ID NO: 52289 - DNA, 30 bp, Artificial Sequence
  Synthetic oligonucleotide
tgtgggcaaatacctcgctatggatacgac

SEQ ID NO: 52290 - DNA, 30 bp, Artificial Sequence
  Synthetic oligonucleotide
tagcggtgcgtctcatgaaacagatccgac

SEQ ID NO: 52291 - DNA, 30 bp, Artificial Sequence
  Synthetic oligonucleotide
cctcgggcaatcacatcgcaatcttccgac

SEQ ID NO: 52292 - DNA, 30 bp, Artificial Sequence
  Synthetic oligonucleotide
gaggacatcttcaaggggcacgatagcgac

SEQ ID NO: 52293 - DNA, 30 bp, Artificial Sequence
  Synthetic oligonucleotide
cacatactatagcttaatcgaaccggcgac

SEQ ID NO: 52294 - DNA, 30 bp, Artificial Sequence
  Synthetic oligonucleotide
tagagcgcttattaccagagtaacctcgac

SEQ ID NO: 52295 - DNA, 30 bp, Artificial Sequence
  Synthetic oligonucleotide
tcaacagtcccagacttgccatgcctcgac

SEQ ID NO: 52296 - DNA, 30 bp, Artificial Sequence
  Synthetic oligonucleotide
tgtggttttaaagtgcgtccggcattcgac

SEQ ID NO: 52297 - DNA, 31 bp, Artificial Sequence
  Synthetic oligonucleotide
cggttaggtaaaaggacaatggcggaaggac

SEQ ID NO: 52298 - DNA, 30 bp, Artificial Sequence
  Synthetic oligonucleotide
gagatatagaggatcgtgggtaagcaggac

SEQ ID NO: 52299 - DNA, 30 bp, Artificial Sequence
  Synthetic oligonucleotide
gaactggccaaagacttcgacacagaggac

SEQ ID NO: 52300 - DNA, 30 bp, Artificial Sequence
  Synthetic oligonucleotide
acgtatggatcggtccgcatgtaggaggac

SEQ ID NO: 52301 - DNA, 30 bp, Artificial Sequence
  Synthetic oligonucleotide
cctgaaacgactcattcggacaggtaggac

SEQ ID NO: 52302 - DNA, 30 bp, Artificial Sequence
  Synthetic oligonucleotide
cacgtacgtattcacggcaattaacgggac

SEQ ID NO: 52303 - DNA, 30 bp, Artificial Sequence
  Synthetic oligonucleotide
gcaccataggggaggtgccacaccggggac

SEQ ID NO: 52304 - DNA, 30 bp, Artificial Sequence
  Synthetic oligonucleotide
cactaaagccatgcttgtacgagtggggac

SEQ ID NO: 52305 - DNA, 30 bp, Artificial Sequence
  Synthetic oligonucleotide
cgcggttctgaagactatggaacatgggac

SEQ ID NO: 52306 - DNA, 30 bp, Artificial Sequence
  Synthetic oligonucleotide
tcgcgttcagcgcatagctggtgggtggac

SEQ ID NO: 52307 - DNA, 30 bp, Artificial Sequence
  Synthetic oligonucleotide
ataagcaccgactaagacatcgaccatgac

SEQ ID NO: 52308 - DNA, 30 bp, Artificial Sequence
  Synthetic oligonucleotide
tgggcgatggctagctagtttcgatatgac

SEQ ID NO: 52309 - DNA, 30 bp, Artificial Sequence
  Synthetic oligonucleotide
agcatcgggacgtagggcatgatctatgac

SEQ ID NO: 52310 - DNA, 30 bp, Artificial Sequence
  Synthetic oligonucleotide
aacacagcgcagtaaggcgagtgtcctgac

SEQ ID NO: 52311 - DNA, 30 bp, Artificial Sequence
  Synthetic oligonucleotide
acaccgcatcaaggccgttggatagctgac

SEQ ID NO: 52312 - DNA, 29 bp, Artificial Sequence
  Synthetic oligonucleotide
cgatgacgtacggtagatggaaatctgac

SEQ ID NO: 52313 - DNA, 30 bp, Artificial Sequence
  Synthetic oligonucleotide
actaaacgggcaaggcatcgccggtctgac

SEQ ID NO: 52314 - DNA, 30 bp, Artificial Sequence
  Synthetic oligonucleotide
agacacattcgaacgtgttaatcaagtgac

SEQ ID NO: 52315 - DNA, 30 bp, Artificial Sequence
  Synthetic oligonucleotide
cactcgagacttgcgtcagagcggagtgac

SEQ ID NO: 52316 - DNA, 30 bp, Artificial Sequence
  Synthetic oligonucleotide
gtgactaaagccccgagccatgctagtgac

SEQ ID NO: 52317 - DNA, 30 bp, Artificial Sequence
  Synthetic oligonucleotide
tcttgcggccaatgtgagctcgaaggtgac

SEQ ID NO: 52318 - DNA, 30 bp, Artificial Sequence
  Synthetic oligonucleotide
ctgcaaacctggtgaagacatcacattgac

SEQ ID NO: 52319 - DNA, 30 bp, Artificial Sequence
  Synthetic oligonucleotide
ggtgtggaaaacggctgtgcgaaagttgac

SEQ ID NO: 52320 - DNA, 30 bp, Artificial Sequence
  Synthetic oligonucleotide
agaggggatggaatttatagcccacaatac

SEQ ID NO: 52321 - DNA, 30 bp, Artificial Sequence
  Synthetic oligonucleotide
caggccggacaaatttgaatctcgtaatac

SEQ ID NO: 52322 - DNA, 30 bp, Artificial Sequence
  Synthetic oligonucleotide
tcggatcacccctgcacagtgcaaacatac

SEQ ID NO: 52323 - DNA, 30 bp, Artificial Sequence
  Synthetic oligonucleotide
agcacatccgggcgtattgtggggccatac

SEQ ID NO: 52324 - DNA, 30 bp, Artificial Sequence
  Synthetic oligonucleotide
atcgggcggcatacgaatcagtgtccatac

SEQ ID NO: 52325 - DNA, 30 bp, Artificial Sequence
  Synthetic oligonucleotide
cgggagcgtatagctaagacatcggcatac

SEQ ID NO: 52326 - DNA, 30 bp, Artificial Sequence
  Synthetic oligonucleotide
gagccgtaggcaaagagaataagggcatac

SEQ ID NO: 52327 - DNA, 30 bp, Artificial Sequence
  Synthetic oligonucleotide
gtagggtaagggcgttgatccgcaagatac

SEQ ID NO: 52328 - DNA, 30 bp, Artificial Sequence
  Synthetic oligonucleotide
cagaaggatgaccaagcgtgaactcgatac

SEQ ID NO: 52329 - DNA, 30 bp, Artificial Sequence
  Synthetic oligonucleotide
caggtacaaagtgtgccgtcttgtggatac

SEQ ID NO: 52330 - DNA, 30 bp, Artificial Sequence
  Synthetic oligonucleotide
agtgcgtacgacgaaacggacggaatatac

SEQ ID NO: 52331 - DNA, 30 bp, Artificial Sequence
  Synthetic oligonucleotide
gtagaggagtcagtagtggacccagtatac

SEQ ID NO: 52332 - DNA, 30 bp, Artificial Sequence
  Synthetic oligonucleotide
cgtgcatcctgccgatggggccggtactac

SEQ ID NO: 52333 - DNA, 30 bp, Artificial Sequence
  Synthetic oligonucleotide
acggcagttggaataaggaaataaccctac

SEQ ID NO: 52334 - DNA, 30 bp, Artificial Sequence
  Synthetic oligonucleotide
acaatgagaagaaagatgaactaaagctac

SEQ ID NO: 52335 - DNA, 30 bp, Artificial Sequence
  Synthetic oligonucleotide
atagtaacggtaaagtaatatgagagctac

SEQ ID NO: 52336 - DNA, 30 bp, Artificial Sequence
  Synthetic oligonucleotide
cgcgccctaaagggtaagaatgtgttctac

SEQ ID NO: 52337 - DNA, 30 bp, Artificial Sequence
  Synthetic oligonucleotide
acaacgctctgtaccataacgaccaagtac

SEQ ID NO: 52338 - DNA, 30 bp, Artificial Sequence
  Synthetic oligonucleotide
agatgccttcgaaggtcgattactaagtac

SEQ ID NO: 52339 - DNA, 30 bp, Artificial Sequence
  Synthetic oligonucleotide
gagaacaacatagaacggtcgaactagtac

SEQ ID NO: 52340 - DNA, 30 bp, Artificial Sequence
  Synthetic oligonucleotide
cccaatcaaaattgaaattgagcgacgtac

SEQ ID NO: 52341 - DNA, 30 bp, Artificial Sequence
  Synthetic oligonucleotide
cagtgtagatcaaagttcgaccttacgtac

SEQ ID NO: 52342 - DNA, 30 bp, Artificial Sequence
  Synthetic oligonucleotide
cggtgagaaatgctcgaacgggatccgtac

SEQ ID NO: 52343 - DNA, 30 bp, Artificial Sequence
  Synthetic oligonucleotide
atgtcatgagagcgacaggctagctcgtac

SEQ ID NO: 52344 - DNA, 30 bp, Artificial Sequence
  Synthetic oligonucleotide
tatcagagtgggctgcccgcggaatggtac

SEQ ID NO: 52345 - DNA, 30 bp, Artificial Sequence
  Synthetic oligonucleotide
gagaatccgacaactgatgataggtggtac

SEQ ID NO: 52346 - DNA, 30 bp, Artificial Sequence
  Synthetic oligonucleotide
ggctgggggtctaatacaggatgagtgtac

SEQ ID NO: 52347 - DNA, 30 bp, Artificial Sequence
  Synthetic oligonucleotide
cgtagtcggctactgctctggtttgtgtac

SEQ ID NO: 52348 - DNA, 30 bp, Artificial Sequence
  Synthetic oligonucleotide
gagcggaggattgaacctctacacaattac

SEQ ID NO: 52349 - DNA, 30 bp, Artificial Sequence
  Synthetic oligonucleotide
agagggacattatgcgatcataaacattac

SEQ ID NO: 52350 - DNA, 30 bp, Artificial Sequence
  Synthetic oligonucleotide
aagacgaggtaggcgctttatcaggattac

SEQ ID NO: 52351 - DNA, 30 bp, Artificial Sequence
  Synthetic oligonucleotide
tcaggataggatgaataagttaaatattac

SEQ ID NO: 52352 - DNA, 30 bp, Artificial Sequence
  Synthetic oligonucleotide
ccacggaatataaagcggatcattacttac

SEQ ID NO: 52353 - DNA, 30 bp, Artificial Sequence
  Synthetic oligonucleotide
agtatgaagacataaagaactttcggttac

SEQ ID NO: 52354 - DNA, 30 bp, Artificial Sequence
  Synthetic oligonucleotide
ggcgaaatttcgcgaacgatgtgatgttac

SEQ ID NO: 52355 - DNA, 30 bp, Artificial Sequence
  Synthetic oligonucleotide
ggatataaaggtgtgtcagcttgttgttac

SEQ ID NO: 52356 - DNA, 30 bp, Artificial Sequence
  Synthetic oligonucleotide
accatgcgaaagaggcttgccccgatttac

SEQ ID NO: 52357 - DNA, 30 bp, Artificial Sequence
  Synthetic oligonucleotide
aagagcttgggagtacaggcaagtacaacc

SEQ ID NO: 52358 - DNA, 30 bp, Artificial Sequence
  Synthetic oligonucleotide
aaccaagggatacgttgggcaccaccaacc

SEQ ID NO: 52359 - DNA, 30 bp, Artificial Sequence
  Synthetic oligonucleotide
aacgccagtcggctctgaaacaacgcaacc

SEQ ID NO: 52360 - DNA, 30 bp, Artificial Sequence
  Synthetic oligonucleotide
tgtacgacgaaggggtaaatgcgatcaacc

SEQ ID NO: 52361 - DNA, 30 bp, Artificial Sequence
  Synthetic oligonucleotide
acactgaaacactgcgcatagggtagaacc

SEQ ID NO: 52362 - DNA, 30 bp, Artificial Sequence
  Synthetic oligonucleotide
agaggaattacgaaggaatcgaaccgaacc

SEQ ID NO: 52363 - DNA, 30 bp, Artificial Sequence
  Synthetic oligonucleotide
agtgcgagatcaacgtatcggtagcgaacc

SEQ ID NO: 52364 - DNA, 30 bp, Artificial Sequence
  Synthetic oligonucleotide
ggcggcttcgcgtgccgatgaatgggaacc

SEQ ID NO: 52365 - DNA, 30 bp, Artificial Sequence
  Synthetic oligonucleotide
cgtgtatgtgaccatggactataccacacc

SEQ ID NO: 52366 - DNA, 30 bp, Artificial Sequence
  Synthetic oligonucleotide
gtaaggctacagtgaaagaacgctcacacc

SEQ ID NO: 52367 - DNA, 30 bp, Artificial Sequence
  Synthetic oligonucleotide
taacatcgaaatctgaagatggtgtacacc

SEQ ID NO: 52368 - DNA, 30 bp, Artificial Sequence
  Synthetic oligonucleotide
tcaccaggggaactataaatactttacacc

SEQ ID NO: 52369 - DNA, 30 bp, Artificial Sequence
  Synthetic oligonucleotide
ctcggaggcgggagcaaaagcatggccacc

SEQ ID NO: 52370 - DNA, 30 bp, Artificial Sequence
  Synthetic oligonucleotide
gtgatcgtgtgtaagggaaagcactccacc

SEQ ID NO: 52371 - DNA, 30 bp, Artificial Sequence
  Synthetic oligonucleotide
atagagaggcgggggattagtgtgagcacc

SEQ ID NO: 52372 - DNA, 30 bp, Artificial Sequence
  Synthetic oligonucleotide
ccaatcctgaggagggggcgaggccgcacc

SEQ ID NO: 52373 - DNA, 30 bp, Artificial Sequence
  Synthetic oligonucleotide
agtcacactattcaaccctccagcggcacc

SEQ ID NO: 52374 - DNA, 30 bp, Artificial Sequence
  Synthetic oligonucleotide
agagctgaggtatccgaaaagtgcggcacc

SEQ ID NO: 52375 - DNA, 30 bp, Artificial Sequence
  Synthetic oligonucleotide
cgtaccggttgccacgaaacagaggtcacc

SEQ ID NO: 52376 - DNA, 30 bp, Artificial Sequence
  Synthetic oligonucleotide
cctgtggccccagcacaagaaaggcagacc

SEQ ID NO: 52377 - DNA, 30 bp, Artificial Sequence
  Synthetic oligonucleotide
agcacaggaaatctggcgcgaggaacgacc

SEQ ID NO: 52378 - DNA, 30 bp, Artificial Sequence
  Synthetic oligonucleotide
tgaaaaggaaaaggatggtgcggatcgacc

SEQ ID NO: 52379 - DNA, 30 bp, Artificial Sequence
  Synthetic oligonucleotide
atctcgatgagtaaggcactcaagaggacc

SEQ ID NO: 52380 - DNA, 30 bp, Artificial Sequence
  Synthetic oligonucleotide
gctaacgtagcacagttttaaggagggacc

SEQ ID NO: 52381 - DNA, 30 bp, Artificial Sequence
  Synthetic oligonucleotide
tcaaggcttaagagtaaagaggtactgacc

SEQ ID NO: 52382 - DNA, 30 bp, Artificial Sequence
  Synthetic oligonucleotide
atgctgcaagcattattcagaccagtgacc

SEQ ID NO: 52383 - DNA, 30 bp, Artificial Sequence
  Synthetic oligonucleotide
taggttggcggcgccgacgaacatgtgacc

SEQ ID NO: 52384 - DNA, 30 bp, Artificial Sequence
  Synthetic oligonucleotide
tacggaacgcgtggttaaatcaagttgacc

SEQ ID NO: 52385 - DNA, 30 bp, Artificial Sequence
  Synthetic oligonucleotide
tgggtgaagggctaagagcggtagttgacc

SEQ ID NO: 52386 - DNA, 30 bp, Artificial Sequence
  Synthetic oligonucleotide
cggtaacatgcgcggcgctaagggttgacc

SEQ ID NO: 52387 - DNA, 30 bp, Artificial Sequence
  Synthetic oligonucleotide
cgtcacaactaaatcctgggcgtgaatacc

SEQ ID NO: 52388 - DNA, 30 bp, Artificial Sequence
  Synthetic oligonucleotide
aacagcactacgaacagcgcttaacatacc

SEQ ID NO: 52389 - DNA, 30 bp, Artificial Sequence
  Synthetic oligonucleotide
aacgttaagatcgaaaacccgtgacatacc

SEQ ID NO: 52390 - DNA, 30 bp, Artificial Sequence
  Synthetic oligonucleotide
aacggagtatatatcttaaataaccatacc

SEQ ID NO: 52391 - DNA, 30 bp, Artificial Sequence
  Synthetic oligonucleotide
gggccgtcgacgaacgtctatgggcatacc

SEQ ID NO: 52392 - DNA, 30 bp, Artificial Sequence
  Synthetic oligonucleotide
agagacactgagaagatctccgccgatacc

SEQ ID NO: 52393 - DNA, 30 bp, Artificial Sequence
  Synthetic oligonucleotide
gaggagagccactagtgtgatgtcagtacc

SEQ ID NO: 52394 - DNA, 30 bp, Artificial Sequence
  Synthetic oligonucleotide
cttggagaatcaacttcagaacagcgtacc

SEQ ID NO: 52395 - DNA, 30 bp, Artificial Sequence
  Synthetic oligonucleotide
caaaggcacggaatttagtacgatggtacc

SEQ ID NO: 52396 - DNA, 30 bp, Artificial Sequence
  Synthetic oligonucleotide
cgtaatttgataaggaagggcgcatgtacc

SEQ ID NO: 52397 - DNA, 30 bp, Artificial Sequence
  Synthetic oligonucleotide
attgtaaggaggaacgagtgagaaattacc

SEQ ID NO: 52398 - DNA, 30 bp, Artificial Sequence
  Synthetic oligonucleotide
tggggctgtcgccgattaagaggagttacc

SEQ ID NO: 52399 - DNA, 30 bp, Artificial Sequence
  Synthetic oligonucleotide
ccgagacacccggccacataggacgttacc

SEQ ID NO: 52400 - DNA, 30 bp, Artificial Sequence
  Synthetic oligonucleotide
aggaaatcttgacaccctagaacatttacc

SEQ ID NO: 52401 - DNA, 30 bp, Artificial Sequence
  Synthetic oligonucleotide
cgagctcagaaattcagaaagagaagaccc

SEQ ID NO: 52402 - DNA, 30 bp, Artificial Sequence
  Synthetic oligonucleotide
tgtgcgatacggacacttctgtcacgaccc

SEQ ID NO: 52403 - DNA, 30 bp, Artificial Sequence
  Synthetic oligonucleotide
accgtgcacgaaaagtgattgcaccgaccc

SEQ ID NO: 52404 - DNA, 30 bp, Artificial Sequence
  Synthetic oligonucleotide
gcgattagcggacttacccggagcctaccc

SEQ ID NO: 52405 - DNA, 30 bp, Artificial Sequence
  Synthetic oligonucleotide
cgtcgggaaaaataattgatgagagccccc

SEQ ID NO: 52406 - DNA, 30 bp, Artificial Sequence
  Synthetic oligonucleotide
tgcgaagcatgtgtgggttggttgagcccc

SEQ ID NO: 52407 - DNA, 30 bp, Artificial Sequence
  Synthetic oligonucleotide
cgaggattgcgtggatacgctaatctcccc

SEQ ID NO: 52408 - DNA, 30 bp, Artificial Sequence
  Synthetic oligonucleotide
aggactagcttttccacgatctccttcccc

SEQ ID NO: 52409 - DNA, 30 bp, Artificial Sequence
  Synthetic oligonucleotide
taaagaaacagtaattcaaaagggcagccc

SEQ ID NO: 52410 - DNA, 30 bp, Artificial Sequence
  Synthetic oligonucleotide
ggcgggtccgatagtgagggactagagccc

SEQ ID NO: 52411 - DNA, 30 bp, Artificial Sequence
  Synthetic oligonucleotide
tcaagatgacgatagagtcttcaagcgccc

SEQ ID NO: 52412 - DNA, 30 bp, Artificial Sequence
  Synthetic oligonucleotide
gcgaagcgtaaggtaatggttctagcgccc

SEQ ID NO: 52413 - DNA, 30 bp, Artificial Sequence
  Synthetic oligonucleotide
ggctcggccagcaacacgatagatgcgccc

SEQ ID NO: 52414 - DNA, 30 bp, Artificial Sequence
  Synthetic oligonucleotide
tgggggacaaggtgaaaacttaaacggccc

SEQ ID NO: 52415 - DNA, 30 bp, Artificial Sequence
  Synthetic oligonucleotide
cgaccgaagagagagagaccacgtgtgccc

SEQ ID NO: 52416 - DNA, 30 bp, Artificial Sequence
  Synthetic oligonucleotide
tcggacaatcctgcaataaaagcggatccc

SEQ ID NO: 52417 - DNA, 30 bp, Artificial Sequence
  Synthetic oligonucleotide
cgaagcggaagccgcaaattaagccctccc

SEQ ID NO: 52418 - DNA, 30 bp, Artificial Sequence
  Synthetic oligonucleotide
agtccgaaggatacgcaatgagtagctccc

SEQ ID NO: 52419 - DNA, 30 bp, Artificial Sequence
  Synthetic oligonucleotide
acgaaaacccttgttcaaatcggtgctccc

SEQ ID NO: 52420 - DNA, 30 bp, Artificial Sequence
  Synthetic oligonucleotide
cacgggatgaggagctcaggcctgcgtccc

SEQ ID NO: 52421 - DNA, 30 bp, Artificial Sequence
  Synthetic oligonucleotide
ggagagcgaatttgaagtgagggacttccc

SEQ ID NO: 52422 - DNA, 30 bp, Artificial Sequence
  Synthetic oligonucleotide
gtgggggtggcaaaggactgatgatttccc

SEQ ID NO: 52423 - DNA, 30 bp, Artificial Sequence
  Synthetic oligonucleotide
caaaactattaaatcgtggaagagaaagcc

SEQ ID NO: 52424 - DNA, 30 bp, Artificial Sequence
  Synthetic oligonucleotide
ctacaacataagaggagcagagggaaagcc

SEQ ID NO: 52425 - DNA, 30 bp, Artificial Sequence
  Synthetic oligonucleotide
cagaatattagaatctggaggaaaacagcc

SEQ ID NO: 52426 - DNA, 30 bp, Artificial Sequence
  Synthetic oligonucleotide
aggaagattcgtgcatcatacggcagagcc

SEQ ID NO: 52427 - DNA, 30 bp, Artificial Sequence
  Synthetic oligonucleotide
tcattagcgttaggcgtcgaactgagagcc

SEQ ID NO: 52428 - DNA, 30 bp, Artificial Sequence
  Synthetic oligonucleotide
caaggatacggggtcaggccgtaggtcgcc

SEQ ID NO: 52429 - DNA, 30 bp, Artificial Sequence
  Synthetic oligonucleotide
agaggtgaggggaacgcgttcacaacggcc

SEQ ID NO: 52430 - DNA, 30 bp, Artificial Sequence
  Synthetic oligonucleotide
tcccggctgactgcaccacagagtacggcc

SEQ ID NO: 52431 - DNA, 30 bp, Artificial Sequence
  Synthetic oligonucleotide
gcggatatcgaatggcggctgtaaccggcc

SEQ ID NO: 52432 - DNA, 30 bp, Artificial Sequence
  Synthetic oligonucleotide
cacgtggtggaaatgattggcgtctcggcc

SEQ ID NO: 52433 - DNA, 30 bp, Artificial Sequence
  Synthetic oligonucleotide
acggtataacggtgcttaaacaggagggcc

SEQ ID NO: 52434 - DNA, 30 bp, Artificial Sequence
  Synthetic oligonucleotide
cctacagagtatagaaggatgaagatggcc

SEQ ID NO: 52435 - DNA, 30 bp, Artificial Sequence
  Synthetic oligonucleotide
tgtagaacagggcaaagccgtcacgtggcc

SEQ ID NO: 52436 - DNA, 30 bp, Artificial Sequence
  Synthetic oligonucleotide
atgcggattagcggtggtacaagagatgcc

SEQ ID NO: 52437 - DNA, 30 bp, Artificial Sequence
  Synthetic oligonucleotide
cgatacactagcgagggaattgatcctgcc

SEQ ID NO: 52438 - DNA, 30 bp, Artificial Sequence
  Synthetic oligonucleotide
tcaattaaaagtgggggctgggtagctgcc

SEQ ID NO: 52439 - DNA, 30 bp, Artificial Sequence
  Synthetic oligonucleotide
attcaacaggaatacggcccaagcagtgcc

SEQ ID NO: 52440 - DNA, 30 bp, Artificial Sequence
  Synthetic oligonucleotide
agttaaacggtaggagtggccgcgagtgcc

SEQ ID NO: 52441 - DNA, 30 bp, Artificial Sequence
  Synthetic oligonucleotide
ggttcagggaactgagaaaatggccgtgcc

SEQ ID NO: 52442 - DNA, 30 bp, Artificial Sequence
  Synthetic oligonucleotide
acaatgtaaagtgatgtgagtcgctgtgcc

SEQ ID NO: 52443 - DNA, 30 bp, Artificial Sequence
  Synthetic oligonucleotide
tgagcatgcaagctgaatgagtggtgtgcc

SEQ ID NO: 52444 - DNA, 30 bp, Artificial Sequence
  Synthetic oligonucleotide
acgcccagaatatgtagcagccgaattgcc

SEQ ID NO: 52445 - DNA, 30 bp, Artificial Sequence
  Synthetic oligonucleotide
tgggaggcttcacgcaagactgagattgcc

SEQ ID NO: 52446 - DNA, 30 bp, Artificial Sequence
  Synthetic oligonucleotide
cgatatcacgcgacgaataggcggaaatcc

SEQ ID NO: 52447 - DNA, 30 bp, Artificial Sequence
  Synthetic oligonucleotide
cgagttagcccgaaagaatcacttaaatcc

SEQ ID NO: 52448 - DNA, 30 bp, Artificial Sequence
  Synthetic oligonucleotide
tgggacatggggagcaataatgagtaatcc

SEQ ID NO: 52449 - DNA, 30 bp, Artificial Sequence
  Synthetic oligonucleotide
acaaccagtggagctcggccaacaagatcc

SEQ ID NO: 52450 - DNA, 30 bp, Artificial Sequence
  Synthetic oligonucleotide
ctagaaccagaatggatataatgacgatcc

SEQ ID NO: 52451 - DNA, 30 bp, Artificial Sequence
  Synthetic oligonucleotide
ggcttgtataggtcgtaagagagtggatcc

SEQ ID NO: 52452 - DNA, 30 bp, Artificial Sequence
  Synthetic oligonucleotide
caccaacacaagtaagagtgcgtgatatcc

SEQ ID NO: 52453 - DNA, 30 bp, Artificial Sequence
  Synthetic oligonucleotide
aatgaagaatgggtgggtaggctgttatcc

SEQ ID NO: 52454 - DNA, 30 bp, Artificial Sequence
  Synthetic oligonucleotide
cggatgcccccggatgaattcaccgactcc

SEQ ID NO: 52455 - DNA, 30 bp, Artificial Sequence
  Synthetic oligonucleotide
actcagtgaactcatgattgctggacctcc

SEQ ID NO: 52456 - DNA, 30 bp, Artificial Sequence
  Synthetic oligonucleotide
acataatgtacataaaccgtggattcctcc

SEQ ID NO: 52457 - DNA, 30 bp, Artificial Sequence
  Synthetic oligonucleotide
acatacgaggatcgttgacaagaaggctcc

SEQ ID NO: 52458 - DNA, 30 bp, Artificial Sequence
  Synthetic oligonucleotide
ctcgagatcctacattaatcttaaggctcc

SEQ ID NO: 52459 - DNA, 30 bp, Artificial Sequence
  Synthetic oligonucleotide
gtggtgcacaaggcataaaatgagttctcc

SEQ ID NO: 52460 - DNA, 28 bp, Artificial Sequence
  Synthetic oligonucleotide
acgagagcggttgatctatagaaagtcc

SEQ ID NO: 52461 - DNA, 30 bp, Artificial Sequence
  Synthetic oligonucleotide
atcgtgaagaaggggtatgttcataagtcc

SEQ ID NO: 52462 - DNA, 30 bp, Artificial Sequence
  Synthetic oligonucleotide
gaagtggacttaaaagatcgatgccagtcc

SEQ ID NO: 52463 - DNA, 30 bp, Artificial Sequence
  Synthetic oligonucleotide
agagagatttagggcaacatatggcagtcc

SEQ ID NO: 52464 - DNA, 30 bp, Artificial Sequence
  Synthetic oligonucleotide
ttggctaactatgtttgaacgtatgagtcc

SEQ ID NO: 52465 - DNA, 30 bp, Artificial Sequence
  Synthetic oligonucleotide
agtaaagttgcggcgaagcctatccggtcc

SEQ ID NO: 52466 - DNA, 30 bp, Artificial Sequence
  Synthetic oligonucleotide
acgactagacgttcataaatgtgcgggtcc

SEQ ID NO: 52467 - DNA, 30 bp, Artificial Sequence
  Synthetic oligonucleotide
ggagtgtaagtgaagattttatagtggtcc

SEQ ID NO: 52468 - DNA, 30 bp, Artificial Sequence
  Synthetic oligonucleotide
cgaaccctatataccagtactaaggtgtcc

SEQ ID NO: 52469 - DNA, 30 bp, Artificial Sequence
  Synthetic oligonucleotide
ctcaacagaactgaagcaagggaagattcc

SEQ ID NO: 52470 - DNA, 30 bp, Artificial Sequence
  Synthetic oligonucleotide
aggcaatacgtgcaacaaaccgcccgttcc

SEQ ID NO: 52471 - DNA, 30 bp, Artificial Sequence
  Synthetic oligonucleotide
cgggcacctagcattgtggaagactgttcc

SEQ ID NO: 52472 - DNA, 30 bp, Artificial Sequence
  Synthetic oligonucleotide
tgccgacgtatgtatgggacagcaaaaagc

SEQ ID NO: 52473 - DNA, 30 bp, Artificial Sequence
  Synthetic oligonucleotide
actggtcacgagtgtacgaggcgaaaaagc

SEQ ID NO: 52474 - DNA, 30 bp, Artificial Sequence
  Synthetic oligonucleotide
gcgagggtaggaatgacagcttctaaaagc

SEQ ID NO: 52475 - DNA, 30 bp, Artificial Sequence
  Synthetic oligonucleotide
gcatgtgtcagaaggacagtgcgtcaaagc

SEQ ID NO: 52476 - DNA, 30 bp, Artificial Sequence
  Synthetic oligonucleotide
tcgaatagtccgatgcacaataaggaaagc

SEQ ID NO: 52477 - DNA, 30 bp, Artificial Sequence
  Synthetic oligonucleotide
cgatcggaggaatgagttcctgaggaaagc

SEQ ID NO: 52478 - DNA, 30 bp, Artificial Sequence
  Synthetic oligonucleotide
aaagaggccgaacgtggctgacaataaagc

SEQ ID NO: 52479 - DNA, 30 bp, Artificial Sequence
  Synthetic oligonucleotide
tcatccagcgggacgatgcgctgaacaagc

SEQ ID NO: 52480 - DNA, 30 bp, Artificial Sequence
  Synthetic oligonucleotide
gccagaacacgcacagagagttgcccaagc

SEQ ID NO: 52481 - DNA, 30 bp, Artificial Sequence
  Synthetic oligonucleotide
cgggcacacggttgtgcacaagagtcaagc

SEQ ID NO: 52482 - DNA, 30 bp, Artificial Sequence
  Synthetic oligonucleotide
tacataagtggtgtggtgggctattcaagc

SEQ ID NO: 52483 - DNA, 30 bp, Artificial Sequence
  Synthetic oligonucleotide
tataaggcaccactagtagttccgagaagc

SEQ ID NO: 52484 - DNA, 30 bp, Artificial Sequence
  Synthetic oligonucleotide
gcacacactgactagaatctacatcgaagc

SEQ ID NO: 52485 - DNA, 30 bp, Artificial Sequence
  Synthetic oligonucleotide
gaggaataccggaccggtagacaaggaagc

SEQ ID NO: 52486 - DNA, 30 bp, Artificial Sequence
  Synthetic oligonucleotide
gtgtcgaccactggagtcgcctcaggaagc

SEQ ID NO: 52487 - DNA, 30 bp, Artificial Sequence
  Synthetic oligonucleotide
tacacgcgtaacggctatcgccgcggaagc

SEQ ID NO: 52488 - DNA, 30 bp, Artificial Sequence
  Synthetic oligonucleotide
acccgacgaagtccgaatataacgggaagc

SEQ ID NO: 52489 - DNA, 30 bp, Artificial Sequence
  Synthetic oligonucleotide
gaggaactatcctgaaaaacattgggaagc

SEQ ID NO: 52490 - DNA, 30 bp, Artificial Sequence
  Synthetic oligonucleotide
ccggagggtggaaagacgagcgcgataagc

SEQ ID NO: 52491 - DNA, 30 bp, Artificial Sequence
  Synthetic oligonucleotide
cgtgcttcagaatggggaagcgtccacagc

SEQ ID NO: 52492 - DNA, 30 bp, Artificial Sequence
  Synthetic oligonucleotide
tctcgacaggccacccaatctatagccagc

SEQ ID NO: 52493 - DNA, 30 bp, Artificial Sequence
  Synthetic oligonucleotide
accggaggggaacggtaggcatcaagcagc

SEQ ID NO: 52494 - DNA, 30 bp, Artificial Sequence
  Synthetic oligonucleotide
acgttcttcaccggtacagaaataagcagc

SEQ ID NO: 52495 - DNA, 30 bp, Artificial Sequence
  Synthetic oligonucleotide
gcgcgtagagcattaataatcgctggcagc

SEQ ID NO: 52496 - DNA, 30 bp, Artificial Sequence
  Synthetic oligonucleotide
cgtcaaaggagaggtgatatccttggcagc

SEQ ID NO: 52497 - DNA, 30 bp, Artificial Sequence
  Synthetic oligonucleotide
cctatgagctcaatctcgtggggaatcagc

SEQ ID NO: 52498 - DNA, 30 bp, Artificial Sequence
  Synthetic oligonucleotide
cgtgcggggtaccacgactcgggcctcagc

SEQ ID NO: 52499 - DNA, 30 bp, Artificial Sequence
  Synthetic oligonucleotide
caagtccagaagaggagaatgttattcagc

SEQ ID NO: 52500 - DNA, 30 bp, Artificial Sequence
  Synthetic oligonucleotide
caggtcaaaggactaagatgcgggttcagc

SEQ ID NO: 52501 - DNA, 30 bp, Artificial Sequence
  Synthetic oligonucleotide
gtggaagatgtcgtcattaaaatgttcagc

SEQ ID NO: 52502 - DNA, 30 bp, Artificial Sequence
  Synthetic oligonucleotide
gcactaggtcgcaatgcatcaatgaagagc

SEQ ID NO: 52503 - DNA, 30 bp, Artificial Sequence
  Synthetic oligonucleotide
tcaagcagtacaaaagtgttcctacagagc

SEQ ID NO: 52504 - DNA, 30 bp, Artificial Sequence
  Synthetic oligonucleotide
atgagagatggtagggtagcggcagagagc

SEQ ID NO: 52505 - DNA, 30 bp, Artificial Sequence
  Synthetic oligonucleotide
cagaggtgatacgtgctagaaagctagagc

SEQ ID NO: 52506 - DNA, 30 bp, Artificial Sequence
  Synthetic oligonucleotide
agattcggtcgtggtggggtgtgtacgagc

SEQ ID NO: 52507 - DNA, 30 bp, Artificial Sequence
  Synthetic oligonucleotide
gggctcgaagctgtggacatgtatgcgagc

SEQ ID NO: 52508 - DNA, 30 bp, Artificial Sequence
  Synthetic oligonucleotide
aacacgcaacgttagatccacattgcgagc

SEQ ID NO: 52509 - DNA, 30 bp, Artificial Sequence
  Synthetic oligonucleotide
gtgtagagaaggctgcgagaaaaggggagc

SEQ ID NO: 52510 - DNA, 30 bp, Artificial Sequence
  Synthetic oligonucleotide
tggtctcacaataggcttaacgaggggagc

SEQ ID NO: 52511 - DNA, 30 bp, Artificial Sequence
  Synthetic oligonucleotide
cgtgctgagagccgcgaagagggtgggagc

SEQ ID NO: 52512 - DNA, 30 bp, Artificial Sequence
  Synthetic oligonucleotide
ctcaatggatatttgcgggaaaaggtgagc

SEQ ID NO: 52513 - DNA, 30 bp, Artificial Sequence
  Synthetic oligonucleotide
ccacgttccgcctatcagggataacatagc

SEQ ID NO: 52514 - DNA, 30 bp, Artificial Sequence
  Synthetic oligonucleotide
cagagaggagtgcacgtcgcttgacatagc

SEQ ID NO: 52515 - DNA, 30 bp, Artificial Sequence
  Synthetic oligonucleotide
acgggcccagaggcgtcagctgaggatagc

SEQ ID NO: 52516 - DNA, 30 bp, Artificial Sequence
  Synthetic oligonucleotide
aaagaagtcaaaacattgcataaccctagc

SEQ ID NO: 52517 - DNA, 30 bp, Artificial Sequence
  Synthetic oligonucleotide
gaggcggaacagaccaccacagcaagtagc

SEQ ID NO: 52518 - DNA, 30 bp, Artificial Sequence
  Synthetic oligonucleotide
acagcttaggcgggtggactaaatcgtagc

SEQ ID NO: 52519 - DNA, 29 bp, Artificial Sequence
  Synthetic oligonucleotide
caagaaagattgtaaagaggggtggtagc

SEQ ID NO: 52520 - DNA, 30 bp, Artificial Sequence
  Synthetic oligonucleotide
tggaaggcgggtcaggcgcgtgattgtagc

SEQ ID NO: 52521 - DNA, 30 bp, Artificial Sequence
  Synthetic oligonucleotide
gggtcaggttggtgctcaaccgaaattagc

SEQ ID NO: 52522 - DNA, 30 bp, Artificial Sequence
  Synthetic oligonucleotide
agaacgaaccgcaaacagagatctattagc

SEQ ID NO: 52523 - DNA, 30 bp, Artificial Sequence
  Synthetic oligonucleotide
agatccgatcaagtcatcctgcattttagc

SEQ ID NO: 52524 - DNA, 30 bp, Artificial Sequence
  Synthetic oligonucleotide
ccggaactcagaccgaccatcgggaaacgc

SEQ ID NO: 52525 - DNA, 30 bp, Artificial Sequence
  Synthetic oligonucleotide
tgggacataatcaggtggtgaatgaaacgc

SEQ ID NO: 52526 - DNA, 30 bp, Artificial Sequence
  Synthetic oligonucleotide
agataattaaagatgaacggtgggcaacgc

SEQ ID NO: 52527 - DNA, 30 bp, Artificial Sequence
  Synthetic oligonucleotide
agacacatcgagatggagggcagtcaacgc

SEQ ID NO: 52528 - DNA, 30 bp, Artificial Sequence
  Synthetic oligonucleotide
gtgctaacaggtcacttgaaggggccacgc

SEQ ID NO: 52529 - DNA, 30 bp, Artificial Sequence
  Synthetic oligonucleotide
tccacaaggtataaaattgacgatatacgc

SEQ ID NO: 52530 - DNA, 30 bp, Artificial Sequence
  Synthetic oligonucleotide
tgagaaccaggcttgaggtgcgccaaccgc

SEQ ID NO: 52531 - DNA, 30 bp, Artificial Sequence
  Synthetic oligonucleotide
atgggaaacaacttcgctaagaccgaccgc

SEQ ID NO: 52532 - DNA, 30 bp, Artificial Sequence
  Synthetic oligonucleotide
acgatagtcttaacatgaaccggcgaccgc

SEQ ID NO: 52533 - DNA, 30 bp, Artificial Sequence
  Synthetic oligonucleotide
agattgggaagactctgatgcactccccgc

SEQ ID NO: 52534 - DNA, 30 bp, Artificial Sequence
  Synthetic oligonucleotide
ccatgtgcatggtcaggaaaccgtgcccgc

SEQ ID NO: 52535 - DNA, 30 bp, Artificial Sequence
  Synthetic oligonucleotide
ttacctgggggcgtgcgcgtaaattcccgc

SEQ ID NO: 52536 - DNA, 30 bp, Artificial Sequence
  Synthetic oligonucleotide
gtgaggtgtctcgggtcggtgtaaagccgc

SEQ ID NO: 52537 - DNA, 30 bp, Artificial Sequence
  Synthetic oligonucleotide
tgtggttaaggggcatgagctagtagccgc

SEQ ID NO: 52538 - DNA, 30 bp, Artificial Sequence
  Synthetic oligonucleotide
ttagcattgcaagaacacacctacatccgc

SEQ ID NO: 52539 - DNA, 30 bp, Artificial Sequence
  Synthetic oligonucleotide
tggagtggtagtaatctagtaacattccgc

SEQ ID NO: 52540 - DNA, 30 bp, Artificial Sequence
  Synthetic oligonucleotide
ggagggagacataagtggagaaacttccgc

SEQ ID NO: 52541 - DNA, 30 bp, Artificial Sequence
  Synthetic oligonucleotide
cgtacgagtgcggatccaaataggaagcgc

SEQ ID NO: 52542 - DNA, 30 bp, Artificial Sequence
  Synthetic oligonucleotide
tagtaccgcggcgaaacctcagatacgcgc

SEQ ID NO: 52543 - DNA, 30 bp, Artificial Sequence
  Synthetic oligonucleotide
caggggaaagtcatcgcctactgaccgcgc

SEQ ID NO: 52544 - DNA, 30 bp, Artificial Sequence
  Synthetic oligonucleotide
gctgacagcaccaacaagggtaaggcgcgc

SEQ ID NO: 52545 - DNA, 30 bp, Artificial Sequence
  Synthetic oligonucleotide
cctgaaagtcgaaacgaacagtccttgcgc

SEQ ID NO: 52546 - DNA, 30 bp, Artificial Sequence
  Synthetic oligonucleotide
cgtcttctgcctgaataaagaattaatcgc

SEQ ID NO: 52547 - DNA, 30 bp, Artificial Sequence
  Synthetic oligonucleotide
ctcaggagtagggatatcctcgagcatcgc

SEQ ID NO: 52548 - DNA, 30 bp, Artificial Sequence
  Synthetic oligonucleotide
tcaggtgcgctgaaggtggtgttagatcgc

SEQ ID NO: 52549 - DNA, 30 bp, Artificial Sequence
  Synthetic oligonucleotide
ggatacgtgccagaaagatacggcgctcgc

SEQ ID NO: 52550 - DNA, 30 bp, Artificial Sequence
  Synthetic oligonucleotide
atcggccatgaaaggccggtcagaagtcgc

SEQ ID NO: 52551 - DNA, 30 bp, Artificial Sequence
  Synthetic oligonucleotide
cgaggcatacccagccggaaattgagtcgc

SEQ ID NO: 52552 - DNA, 30 bp, Artificial Sequence
  Synthetic oligonucleotide
cgtagttgggtctggtgcatcaaccgtcgc

SEQ ID NO: 52553 - DNA, 30 bp, Artificial Sequence
  Synthetic oligonucleotide
gcctcactcagatcccgaggataccgtcgc

SEQ ID NO: 52554 - DNA, 30 bp, Artificial Sequence
  Synthetic oligonucleotide
caacgtaactgaaaacgatcaccccgtcgc

SEQ ID NO: 52555 - DNA, 30 bp, Artificial Sequence
  Synthetic oligonucleotide
caacaagtgaagagaataatttatcgtcgc

SEQ ID NO: 52556 - DNA, 30 bp, Artificial Sequence
  Synthetic oligonucleotide
tcgagtcaacaaacttatgggactcgtcgc

SEQ ID NO: 52557 - DNA, 30 bp, Artificial Sequence
  Synthetic oligonucleotide
gtcggcgtagaagggccattcacgtgtcgc

SEQ ID NO: 52558 - DNA, 30 bp, Artificial Sequence
  Synthetic oligonucleotide
tgcttgccatggatcaacaatcacgttcgc

SEQ ID NO: 52559 - DNA, 30 bp, Artificial Sequence
  Synthetic oligonucleotide
gacacgttgagtgggcctaaggtggttcgc

SEQ ID NO: 52560 - DNA, 30 bp, Artificial Sequence
  Synthetic oligonucleotide
cgtgaaacgggatgtaagccccggaaaggc

SEQ ID NO: 52561 - DNA, 30 bp, Artificial Sequence
  Synthetic oligonucleotide
ttcaaaattgaagatcgtcggcccgaaggc

SEQ ID NO: 52562 - DNA, 30 bp, Artificial Sequence
  Synthetic oligonucleotide
cggcgagcttcaggagacatgctggaaggc

SEQ ID NO: 52563 - DNA, 30 bp, Artificial Sequence
  Synthetic oligonucleotide
tgccagacatactttcgttccgaaccaggc

SEQ ID NO: 52564 - DNA, 29 bp, Artificial Sequence
  Synthetic oligonucleotide
cgttgtaagctcgacgaatacttgcaggc

SEQ ID NO: 52565 - DNA, 30 bp, Artificial Sequence
  Synthetic oligonucleotide
ccacgaagatcgctgtgcgcgccatgaggc

SEQ ID NO: 52566 - DNA, 30 bp, Artificial Sequence
  Synthetic oligonucleotide
ttggaggtagatagtaaacccatgtgaggc

SEQ ID NO: 52567 - DNA, 30 bp, Artificial Sequence
  Synthetic oligonucleotide
gtcaggggtctagaatcgcaaccgataggc

SEQ ID NO: 52568 - DNA, 30 bp, Artificial Sequence
  Synthetic oligonucleotide
acagcgataacgagcaaggaccatataggc

SEQ ID NO: 52569 - DNA, 30 bp, Artificial Sequence
  Synthetic oligonucleotide
tcagaccgggctaagctatggcctataggc

SEQ ID NO: 52570 - DNA, 30 bp, Artificial Sequence
  Synthetic oligonucleotide
ccgggagctcagtctaaaatagaagtaggc

SEQ ID NO: 52571 - DNA, 30 bp, Artificial Sequence
  Synthetic oligonucleotide
ccgtttgggaccgccaaagtaaacgtaggc

SEQ ID NO: 52572 - DNA, 30 bp, Artificial Sequence
  Synthetic oligonucleotide
atggaggatctacaagacaacggtgacggc

SEQ ID NO: 52573 - DNA, 30 bp, Artificial Sequence
  Synthetic oligonucleotide
ggttagagaacgaaggtaccaaaggccggc

SEQ ID NO: 52574 - DNA, 30 bp, Artificial Sequence
  Synthetic oligonucleotide
agaggaggagcatatcaggtccgtgccggc

SEQ ID NO: 52575 - DNA, 30 bp, Artificial Sequence
  Synthetic oligonucleotide
cgtccctcggatagtgagtacgctagcggc

SEQ ID NO: 52576 - DNA, 30 bp, Artificial Sequence
  Synthetic oligonucleotide
atgttgtaccctgggttcgtgctgggcggc

SEQ ID NO: 52577 - DNA, 30 bp, Artificial Sequence
  Synthetic oligonucleotide
tccgtaacggaatctgccccatccatcggc

SEQ ID NO: 52578 - DNA, 30 bp, Artificial Sequence
  Synthetic oligonucleotide
gcacgagatcctaaacgtagcgagatcggc

SEQ ID NO: 52579 - DNA, 30 bp, Artificial Sequence
  Synthetic oligonucleotide
aagagtgacttttcccgaatcatgatcggc

SEQ ID NO: 52580 - DNA, 30 bp, Artificial Sequence
  Synthetic oligonucleotide
cgtgattgggttaaactgaaggctaagggc

SEQ ID NO: 52581 - DNA, 30 bp, Artificial Sequence
  Synthetic oligonucleotide
ggctaccaagtaactattattgcccagggc

SEQ ID NO: 52582 - DNA, 30 bp, Artificial Sequence
  Synthetic oligonucleotide
ggagggttaccagatacagaaagggagggc

SEQ ID NO: 52583 - DNA, 30 bp, Artificial Sequence
  Synthetic oligonucleotide
ggagccaaagaaagcgaaaaaaagtagggc

SEQ ID NO: 52584 - DNA, 30 bp, Artificial Sequence
  Synthetic oligonucleotide
aggtccgccaagtctcgtgttgaaccgggc

SEQ ID NO: 52585 - DNA, 30 bp, Artificial Sequence
  Synthetic oligonucleotide
catgagtgcaaccgttcagaggaagcgggc

SEQ ID NO: 52586 - DNA, 30 bp, Artificial Sequence
  Synthetic oligonucleotide
ctgcatgagaacatacgggctagatcgggc

SEQ ID NO: 52587 - DNA, 30 bp, Artificial Sequence
  Synthetic oligonucleotide
acctgggcgggtcgcgtcgaaagctcgggc

SEQ ID NO: 52588 - DNA, 30 bp, Artificial Sequence
  Synthetic oligonucleotide
tcggacatacgcttatgcgactccctgggc

SEQ ID NO: 52589 - DNA, 30 bp, Artificial Sequence
  Synthetic oligonucleotide
ccaaagtaacgaatgatactaaatctgggc

SEQ ID NO: 52590 - DNA, 30 bp, Artificial Sequence
  Synthetic oligonucleotide
gataggtgcatcgcgatcatcactcatggc

SEQ ID NO: 52591 - DNA, 30 bp, Artificial Sequence
  Synthetic oligonucleotide
tacgatcggtagggtccgacacctcatggc

SEQ ID NO: 52592 - DNA, 30 bp, Artificial Sequence
  Synthetic oligonucleotide
aaggggctgattaaaagttagatagatggc

SEQ ID NO: 52593 - DNA, 30 bp, Artificial Sequence
  Synthetic oligonucleotide
ggcgcatgagactactctactgcctatggc

SEQ ID NO: 52594 - DNA, 30 bp, Artificial Sequence
  Synthetic oligonucleotide
catcgttgatccacgcgaacaatacctggc

SEQ ID NO: 52595 - DNA, 30 bp, Artificial Sequence
  Synthetic oligonucleotide
cgatgctttagaacaacgacaggttctggc

SEQ ID NO: 52596 - DNA, 30 bp, Artificial Sequence
  Synthetic oligonucleotide
tcatgcagaaaatccatataatacagtggc

SEQ ID NO: 52597 - DNA, 30 bp, Artificial Sequence
  Synthetic oligonucleotide
tgtcgtgggcatgggaaggttatcattggc

SEQ ID NO: 52598 - DNA, 30 bp, Artificial Sequence
  Synthetic oligonucleotide
cgaaccagggaccacttcgtgtggaaatgc

SEQ ID NO: 52599 - DNA, 30 bp, Artificial Sequence
  Synthetic oligonucleotide
caggatttccgatggtctatagcacaatgc

SEQ ID NO: 52600 - DNA, 30 bp, Artificial Sequence
  Synthetic oligonucleotide
catcgaatgctggccgacacccgagcatgc

SEQ ID NO: 52601 - DNA, 30 bp, Artificial Sequence
  Synthetic oligonucleotide
gcgattagcggcggtaggatagactcatgc

SEQ ID NO: 52602 - DNA, 30 bp, Artificial Sequence
  Synthetic oligonucleotide
cgtccgacaatcgttgatatagcctcatgc

SEQ ID NO: 52603 - DNA, 30 bp, Artificial Sequence
  Synthetic oligonucleotide
agcgggtgtcggcagtatgagttcagatgc

SEQ ID NO: 52604 - DNA, 30 bp, Artificial Sequence
  Synthetic oligonucleotide
gcaaagcgaggtcgtaagatccgtagatgc

SEQ ID NO: 52605 - DNA, 30 bp, Artificial Sequence
  Synthetic oligonucleotide
caagagagatcaggccccgccccacgatgc

SEQ ID NO: 52606 - DNA, 30 bp, Artificial Sequence
  Synthetic oligonucleotide
cgtaggatgttagcgagtaggacgcgatgc

SEQ ID NO: 52607 - DNA, 30 bp, Artificial Sequence
  Synthetic oligonucleotide
cgtgaagattcgccatccaacataatatgc

SEQ ID NO: 52608 - DNA, 30 bp, Artificial Sequence
  Synthetic oligonucleotide
tctaaacctagggcagttaagttcgtatgc

SEQ ID NO: 52609 - DNA, 30 bp, Artificial Sequence
  Synthetic oligonucleotide
cagtgaagtagtaaagaggtgcaccactgc

SEQ ID NO: 52610 - DNA, 30 bp, Artificial Sequence
  Synthetic oligonucleotide
aggtggacactagtatgaatcatcgcctgc

SEQ ID NO: 52611 - DNA, 30 bp, Artificial Sequence
  Synthetic oligonucleotide
agggacacccgaccttttgcgaagtcctgc

SEQ ID NO: 52612 - DNA, 30 bp, Artificial Sequence
  Synthetic oligonucleotide
atgttcaataaaataagagtcagctgctgc

SEQ ID NO: 52613 - DNA, 30 bp, Artificial Sequence
  Synthetic oligonucleotide
tatggggaaacggatgaggtggtcctctgc

SEQ ID NO: 52614 - DNA, 30 bp, Artificial Sequence
  Synthetic oligonucleotide
tgtcgaaataagcttgccccatcggtctgc

SEQ ID NO: 52615 - DNA, 30 bp, Artificial Sequence
  Synthetic oligonucleotide
agaagggccatctgccagaaggatgtctgc

SEQ ID NO: 52616 - DNA, 30 bp, Artificial Sequence
  Synthetic oligonucleotide
aaggaaacactaggacgagtgtctaagtgc

SEQ ID NO: 52617 - DNA, 30 bp, Artificial Sequence
  Synthetic oligonucleotide
taacaggacatggatggagaagatgagtgc

SEQ ID NO: 52618 - DNA, 30 bp, Artificial Sequence
  Synthetic oligonucleotide
cgaacccggatagatctagatggatagtgc

SEQ ID NO: 52619 - DNA, 30 bp, Artificial Sequence
  Synthetic oligonucleotide
acatagaatatacatcgcaaatcggcgtgc

SEQ ID NO: 52620 - DNA, 30 bp, Artificial Sequence
  Synthetic oligonucleotide
cgcaatagtgaatagacagaaaaatcgtgc

SEQ ID NO: 52621 - DNA, 30 bp, Artificial Sequence
  Synthetic oligonucleotide
aacctaaaactcaatacgacttactcgtgc

SEQ ID NO: 52622 - DNA, 30 bp, Artificial Sequence
  Synthetic oligonucleotide
ggctaattataggtgggcaaaggagtgtgc

SEQ ID NO: 52623 - DNA, 30 bp, Artificial Sequence
  Synthetic oligonucleotide
tgagcagaggctagacggcgaggtttgtgc

SEQ ID NO: 52624 - DNA, 31 bp, Artificial Sequence
  Synthetic oligonucleotide
caagagaaagctgtcagaatcatggaattgc

SEQ ID NO: 52625 - DNA, 30 bp, Artificial Sequence
  Synthetic oligonucleotide
aggaaatactaaccaaagaagagacattgc

SEQ ID NO: 52626 - DNA, 30 bp, Artificial Sequence
  Synthetic oligonucleotide
tcccacgaaagttaaacacaaaaggattgc

SEQ ID NO: 52627 - DNA, 30 bp, Artificial Sequence
  Synthetic oligonucleotide
acgtcaccctgacgccacgactatgattgc

SEQ ID NO: 52628 - DNA, 30 bp, Artificial Sequence
  Synthetic oligonucleotide
tgcgaatgtgggctagagcgaattgattgc

SEQ ID NO: 52629 - DNA, 30 bp, Artificial Sequence
  Synthetic oligonucleotide
acgtacattatgaactcacagtcaacttgc

SEQ ID NO: 52630 - DNA, 30 bp, Artificial Sequence
  Synthetic oligonucleotide
agggcaacggccatacgaaggggagcttgc

SEQ ID NO: 52631 - DNA, 30 bp, Artificial Sequence
  Synthetic oligonucleotide
gggggagtcattcagcgcgacacaagttgc

SEQ ID NO: 52632 - DNA, 30 bp, Artificial Sequence
  Synthetic oligonucleotide
atgatggtaagcaagaccggtgagggttgc

SEQ ID NO: 52633 - DNA, 30 bp, Artificial Sequence
  Synthetic oligonucleotide
ccagcgtatagatgggggtaaccgtgttgc

SEQ ID NO: 52634 - DNA, 30 bp, Artificial Sequence
  Synthetic oligonucleotide
agtgccgaaaaggaggtgagtgtaaaaatc

SEQ ID NO: 52635 - DNA, 30 bp, Artificial Sequence
  Synthetic oligonucleotide
ccaactccaactagaatagcgtctgaaatc

SEQ ID NO: 52636 - DNA, 30 bp, Artificial Sequence
  Synthetic oligonucleotide
gcaaaaattacattgtagaggagtgaaatc

SEQ ID NO: 52637 - DNA, 30 bp, Artificial Sequence
  Synthetic oligonucleotide
ggtcgatccctcaggcatataaggtcaatc

SEQ ID NO: 52638 - DNA, 30 bp, Artificial Sequence
  Synthetic oligonucleotide
ggagacgttagtccagccgccttaagaatc

SEQ ID NO: 52639 - DNA, 30 bp, Artificial Sequence
  Synthetic oligonucleotide
cctagaagtcgctcaaccatctccagaatc

SEQ ID NO: 52640 - DNA, 30 bp, Artificial Sequence
  Synthetic oligonucleotide
agtgaagtcaaggtctatggtcatagaatc

SEQ ID NO: 52641 - DNA, 30 bp, Artificial Sequence
  Synthetic oligonucleotide
tgctgaactcggcgactaacaacacgaatc

SEQ ID NO: 52642 - DNA, 30 bp, Artificial Sequence
  Synthetic oligonucleotide
gttgtcctggaagaaggctgatcgcgaatc

SEQ ID NO: 52643 - DNA, 30 bp, Artificial Sequence
  Synthetic oligonucleotide
acaacacgtggacactgagggatgggaatc

SEQ ID NO: 52644 - DNA, 30 bp, Artificial Sequence
  Synthetic oligonucleotide
ccatgggcggtagggtgacacgtgttaatc

SEQ ID NO: 52645 - DNA, 30 bp, Artificial Sequence
  Synthetic oligonucleotide
aatacatgcgtgggttcaaggaaggacatc

SEQ ID NO: 52646 - DNA, 30 bp, Artificial Sequence
  Synthetic oligonucleotide
tgtatgacagttcaggcagaaatggacatc

SEQ ID NO: 52647 - DNA, 30 bp, Artificial Sequence
  Synthetic oligonucleotide
atagaagtcaactcccacacaagtgacatc

SEQ ID NO: 52648 - DNA, 30 bp, Artificial Sequence
  Synthetic oligonucleotide
ctgatcttatgggaccagggaataaccatc

SEQ ID NO: 52649 - DNA, 30 bp, Artificial Sequence
  Synthetic oligonucleotide
cgagaagctttagtaaaagtacgacccatc

SEQ ID NO: 52650 - DNA, 30 bp, Artificial Sequence
  Synthetic oligonucleotide
tcccgacaagtttgtgctagcgagggcatc

SEQ ID NO: 52651 - DNA, 30 bp, Artificial Sequence
  Synthetic oligonucleotide
aaaccagcaaggaggagtttaccatgcatc

SEQ ID NO: 52652 - DNA, 30 bp, Artificial Sequence
  Synthetic oligonucleotide
cacggccaaacagttagccgaagtatcatc

SEQ ID NO: 52653 - DNA, 30 bp, Artificial Sequence
  Synthetic oligonucleotide
taggggtccagagaagaagtcattctcatc

SEQ ID NO: 52654 - DNA, 30 bp, Artificial Sequence
  Synthetic oligonucleotide
accagtgaacgatgcatggtgcggaagatc

SEQ ID NO: 52655 - DNA, 30 bp, Artificial Sequence
  Synthetic oligonucleotide
cgtgtaggatctagtgacaaaaatacgatc

SEQ ID NO: 52656 - DNA, 30 bp, Artificial Sequence
  Synthetic oligonucleotide
tttgcgaggactcttgggctagaaccgatc

SEQ ID NO: 52657 - DNA, 30 bp, Artificial Sequence
  Synthetic oligonucleotide
accgcaagagtaacatccggtccagcgatc

SEQ ID NO: 52658 - DNA, 30 bp, Artificial Sequence
  Synthetic oligonucleotide
gacggatcgcccatacgtgtgagaaggatc

SEQ ID NO: 52659 - DNA, 30 bp, Artificial Sequence
  Synthetic oligonucleotide
agaccgagagagtagataacagtgaggatc

SEQ ID NO: 52660 - DNA, 30 bp, Artificial Sequence
  Synthetic oligonucleotide
acctggaagggatctaaccagagccggatc

SEQ ID NO: 52661 - DNA, 30 bp, Artificial Sequence
  Synthetic oligonucleotide
gccgagcttgactacaaggtggtgtggatc

SEQ ID NO: 52662 - DNA, 30 bp, Artificial Sequence
  Synthetic oligonucleotide
tgtaatctaagctgagtatggcggatgatc

SEQ ID NO: 52663 - DNA, 30 bp, Artificial Sequence
  Synthetic oligonucleotide
tgaatgggacaaaaggtgcccgtgaatatc

SEQ ID NO: 52664 - DNA, 30 bp, Artificial Sequence
  Synthetic oligonucleotide
tacaggtcagtatggggcggccaacatatc

SEQ ID NO: 52665 - DNA, 30 bp, Artificial Sequence
  Synthetic oligonucleotide
gcaggaaaaactaccgatggattccatatc

SEQ ID NO: 52666 - DNA, 30 bp, Artificial Sequence
  Synthetic oligonucleotide
tgtgcatggggatgtctcgaatgggatatc

SEQ ID NO: 52667 - DNA, 30 bp, Artificial Sequence
  Synthetic oligonucleotide
aagagcttccgtaaacaccgcgagggtatc

SEQ ID NO: 52668 - DNA, 30 bp, Artificial Sequence
  Synthetic oligonucleotide
aggaggattcaccagtctcggacacttatc

SEQ ID NO: 52669 - DNA, 30 bp, Artificial Sequence
  Synthetic oligonucleotide
ggggattcgaacctaaatggagaaaaactc

SEQ ID NO: 52670 - DNA, 30 bp, Artificial Sequence
  Synthetic oligonucleotide
tcggccaaccgtggaattggcagacaactc

SEQ ID NO: 52671 - DNA, 30 bp, Artificial Sequence
  Synthetic oligonucleotide
aaggcgcatggggacatgtgtttagcactc

SEQ ID NO: 52672 - DNA, 30 bp, Artificial Sequence
  Synthetic oligonucleotide
gatgtggaagtcacgggaggaaactcactc

SEQ ID NO: 52673 - DNA, 30 bp, Artificial Sequence
  Synthetic oligonucleotide
tggtagagggacggccattgtataagactc

SEQ ID NO: 52674 - DNA, 30 bp, Artificial Sequence
  Synthetic oligonucleotide
tgctgagaagaggagctgtggggcagactc

SEQ ID NO: 52675 - DNA, 30 bp, Artificial Sequence
  Synthetic oligonucleotide
ggaggcggcaaacagaaatcacacctactc

SEQ ID NO: 52676 - DNA, 30 bp, Artificial Sequence
  Synthetic oligonucleotide
tgactgggcgaacataccggctgagtactc

SEQ ID NO: 52677 - DNA, 30 bp, Artificial Sequence
  Synthetic oligonucleotide
cggggagaaacagattttatcctatccctc

SEQ ID NO: 52678 - DNA, 30 bp, Artificial Sequence
  Synthetic oligonucleotide
tctcaggtcacaccaaaactgtactccctc

SEQ ID NO: 52679 - DNA, 30 bp, Artificial Sequence
  Synthetic oligonucleotide
taaaacaacgccgagatcccagtttccctc

SEQ ID NO: 52680 - DNA, 30 bp, Artificial Sequence
  Synthetic oligonucleotide
caataaagggtccaatccgtgtatcagctc

SEQ ID NO: 52681 - DNA, 30 bp, Artificial Sequence
  Synthetic oligonucleotide
cacacgaccggtcacgaaattcacccgctc

SEQ ID NO: 52682 - DNA, 30 bp, Artificial Sequence
  Synthetic oligonucleotide
acgttattacagactaaactttactcgctc

SEQ ID NO: 52683 - DNA, 30 bp, Artificial Sequence
  Synthetic oligonucleotide
cacgtagctagggcgggggtctaatggctc

SEQ ID NO: 52684 - DNA, 30 bp, Artificial Sequence
  Synthetic oligonucleotide
taacacccagcggcacgcataggatggctc

SEQ ID NO: 52685 - DNA, 30 bp, Artificial Sequence
  Synthetic oligonucleotide
catataactcacaagtccgaacgaatgctc

SEQ ID NO: 52686 - DNA, 30 bp, Artificial Sequence
  Synthetic oligonucleotide
aagtggatatggggtgtgcagcacatgctc

SEQ ID NO: 52687 - DNA, 30 bp, Artificial Sequence
  Synthetic oligonucleotide
agaatcgtgggcaccgaaagagtcatgctc

SEQ ID NO: 52688 - DNA, 30 bp, Artificial Sequence
  Synthetic oligonucleotide
gattcgaaaaagagtgggatttggctgctc

SEQ ID NO: 52689 - DNA, 30 bp, Artificial Sequence
  Synthetic oligonucleotide
tagtgcgatactcccacctgccgtctgctc

SEQ ID NO: 52690 - DNA, 30 bp, Artificial Sequence
  Synthetic oligonucleotide
ggtgaaaagaagacagatcgccctttgctc

SEQ ID NO: 52691 - DNA, 30 bp, Artificial Sequence
  Synthetic oligonucleotide
agccaataacgcgacgaaacttgaaatctc

SEQ ID NO: 52692 - DNA, 30 bp, Artificial Sequence
  Synthetic oligonucleotide
caggtgagtgtatgacgggaaacgaatctc

SEQ ID NO: 52693 - DNA, 30 bp, Artificial Sequence
  Synthetic oligonucleotide
agacgtaaggttagtataatgcgcggtctc

SEQ ID NO: 52694 - DNA, 30 bp, Artificial Sequence
  Synthetic oligonucleotide
tcgtgaatgtaggtcaatgtcgcctgtctc

SEQ ID NO: 52695 - DNA, 30 bp, Artificial Sequence
  Synthetic oligonucleotide
gcggagggcgggagctattaccacattctc

SEQ ID NO: 52696 - DNA, 30 bp, Artificial Sequence
  Synthetic oligonucleotide
taggacagtgagataggtatttgtaaagtc

SEQ ID NO: 52697 - DNA, 30 bp, Artificial Sequence
  Synthetic oligonucleotide
agtgagagcagggcagacactcgccaagtc

SEQ ID NO: 52698 - DNA, 30 bp, Artificial Sequence
  Synthetic oligonucleotide
tcttaacaaagcagcgcgccaagagaagtc

SEQ ID NO: 52699 - DNA, 30 bp, Artificial Sequence
  Synthetic oligonucleotide
cccaggtaaacaagggcgctcacaccagtc

SEQ ID NO: 52700 - DNA, 30 bp, Artificial Sequence
  Synthetic oligonucleotide
ggtgatcaacacacgggagaaggaagagtc

SEQ ID NO: 52701 - DNA, 30 bp, Artificial Sequence
  Synthetic oligonucleotide
gttgtgatagatatacgaaatcgacgagtc

SEQ ID NO: 52702 - DNA, 30 bp, Artificial Sequence
  Synthetic oligonucleotide
cgtacatggcggaagactttaaatcgagtc

SEQ ID NO: 52703 - DNA, 30 bp, Artificial Sequence
  Synthetic oligonucleotide
ttccgtaacataattgaaggagttcgagtc

SEQ ID NO: 52704 - DNA, 30 bp, Artificial Sequence
  Synthetic oligonucleotide
aggacgcgccgacaagtccatgccggagtc

SEQ ID NO: 52705 - DNA, 30 bp, Artificial Sequence
  Synthetic oligonucleotide
acggagaagcatgaggtaaggaatatagtc

SEQ ID NO: 52706 - DNA, 30 bp, Artificial Sequence
  Synthetic oligonucleotide
cggcgaaaaaaaacttcgaaagtcctagtc

SEQ ID NO: 52707 - DNA, 30 bp, Artificial Sequence
  Synthetic oligonucleotide
atgagtcggcctgagatacctgagctagtc

SEQ ID NO: 52708 - DNA, 30 bp, Artificial Sequence
  Synthetic oligonucleotide
gaaaaagtgaagcccaccacgaatcacgtc

SEQ ID NO: 52709 - DNA, 30 bp, Artificial Sequence
  Synthetic oligonucleotide
aagggaaagacgggatccgcctggtacgtc

SEQ ID NO: 52710 - DNA, 30 bp, Artificial Sequence
  Synthetic oligonucleotide
aagggtggctgcgtagggggtaattacgtc

SEQ ID NO: 52711 - DNA, 30 bp, Artificial Sequence
  Synthetic oligonucleotide
acgaggtcacaatcagcgcatcattacgtc

SEQ ID NO: 52712 - DNA, 30 bp, Artificial Sequence
  Synthetic oligonucleotide
ccttcgtgtaactacatagcagcttacgtc

SEQ ID NO: 52713 - DNA, 30 bp, Artificial Sequence
  Synthetic oligonucleotide
aggcactaactctgcctggttcgaaccgtc

SEQ ID NO: 52714 - DNA, 30 bp, Artificial Sequence
  Synthetic oligonucleotide
tccgctcgagaaaaaacagttggctccgtc

SEQ ID NO: 52715 - DNA, 30 bp, Artificial Sequence
  Synthetic oligonucleotide
agtggccagctcgtaattgcagagggcgtc

SEQ ID NO: 52716 - DNA, 30 bp, Artificial Sequence
  Synthetic oligonucleotide
ggcccggaaaatcacgcgacttgtggcgtc

SEQ ID NO: 52717 - DNA, 30 bp, Artificial Sequence
  Synthetic oligonucleotide
ggtgtaaataacaacaagaactgaatcgtc

SEQ ID NO: 52718 - DNA, 30 bp, Artificial Sequence
  Synthetic oligonucleotide
agcacatggaggataacttaacacctcgtc

SEQ ID NO: 52719 - DNA, 30 bp, Artificial Sequence
  Synthetic oligonucleotide
gcgtgcctatcgtgacatatcggggtcgtc

SEQ ID NO: 52720 - DNA, 30 bp, Artificial Sequence
  Synthetic oligonucleotide
tgggcctatgattagggctcaaaattcgtc

SEQ ID NO: 52721 - DNA, 30 bp, Artificial Sequence
  Synthetic oligonucleotide
ctcggatgggtagaaagctatagattcgtc

SEQ ID NO: 52722 - DNA, 30 bp, Artificial Sequence
  Synthetic oligonucleotide
aacaaacgcgatagattacgagtgaaggtc

SEQ ID NO: 52723 - DNA, 30 bp, Artificial Sequence
  Synthetic oligonucleotide
caggggacaagcatcgttatgtattaggtc

SEQ ID NO: 52724 - DNA, 30 bp, Artificial Sequence
  Synthetic oligonucleotide
cgggagtacgtaaagtattcatagacggtc

SEQ ID NO: 52725 - DNA, 30 bp, Artificial Sequence
  Synthetic oligonucleotide
acgaaggttacgttggatgatacgagggtc

SEQ ID NO: 52726 - DNA, 30 bp, Artificial Sequence
  Synthetic oligonucleotide
ggcaagcaagaaagtccatgagacggggtc

SEQ ID NO: 52727 - DNA, 30 bp, Artificial Sequence
  Synthetic oligonucleotide
taagcctgaaatcactggagatcgggggtc

SEQ ID NO: 52728 - DNA, 30 bp, Artificial Sequence
  Synthetic oligonucleotide
cgtgtgacagtttgtagcaccagtggggtc

SEQ ID NO: 52729 - DNA, 30 bp, Artificial Sequence
  Synthetic oligonucleotide
atgcgggggcaggctacggaagagatggtc

SEQ ID NO: 52730 - DNA, 30 bp, Artificial Sequence
  Synthetic oligonucleotide
tcacatcagctcgggactgcgagaaatgtc

SEQ ID NO: 52731 - DNA, 30 bp, Artificial Sequence
  Synthetic oligonucleotide
aaacgcgtaaatgaacccgacgaagatgtc

SEQ ID NO: 52732 - DNA, 30 bp, Artificial Sequence
  Synthetic oligonucleotide
aaaagtcgaggactcggagcgaatgatgtc

SEQ ID NO: 52733 - DNA, 30 bp, Artificial Sequence
  Synthetic oligonucleotide
agccgtagaacgaaccaaggcatctatgtc

SEQ ID NO: 52734 - DNA, 30 bp, Artificial Sequence
  Synthetic oligonucleotide
acgggtgcatttggaatccatgttcctgtc

SEQ ID NO: 52735 - DNA, 30 bp, Artificial Sequence
  Synthetic oligonucleotide
cgcgtaattgctttcccaaagactcgtgtc

SEQ ID NO: 52736 - DNA, 30 bp, Artificial Sequence
  Synthetic oligonucleotide
tcggagacgagtcaggctttgttgcttgtc

SEQ ID NO: 52737 - DNA, 30 bp, Artificial Sequence
  Synthetic oligonucleotide
gtaagtgagtcagcaaaacactggacattc

SEQ ID NO: 52738 - DNA, 30 bp, Artificial Sequence
  Synthetic oligonucleotide
acagtacataaagaacgcgaaaagccattc

SEQ ID NO: 52739 - DNA, 30 bp, Artificial Sequence
  Synthetic oligonucleotide
aaggcgtagactaaatgtgacaacgcattc

SEQ ID NO: 52740 - DNA, 31 bp, Artificial Sequence
  Synthetic oligonucleotide
aataagatcgcacaccactaaggcggcattc

SEQ ID NO: 52741 - DNA, 30 bp, Artificial Sequence
  Synthetic oligonucleotide
ccgtgagtgagcatcacgacaatgagattc

SEQ ID NO: 52742 - DNA, 30 bp, Artificial Sequence
  Synthetic oligonucleotide
agtgctaagcctaaagaaggggctggattc

SEQ ID NO: 52743 - DNA, 30 bp, Artificial Sequence
  Synthetic oligonucleotide
cgagattaaaaatggcttggctacatattc

SEQ ID NO: 52744 - DNA, 30 bp, Artificial Sequence
  Synthetic oligonucleotide
cggaacgagaacattgcttaccagtacttc

SEQ ID NO: 52745 - DNA, 30 bp, Artificial Sequence
  Synthetic oligonucleotide
gtgtccagctaaactgcccaaaacagcttc

SEQ ID NO: 52746 - DNA, 30 bp, Artificial Sequence
  Synthetic oligonucleotide
ccgccacacgtcgaaataagagtatgcttc

SEQ ID NO: 52747 - DNA, 30 bp, Artificial Sequence
  Synthetic oligonucleotide
gaataaggtggactggatggcgaaatcttc

SEQ ID NO: 52748 - DNA, 30 bp, Artificial Sequence
  Synthetic oligonucleotide
aatggatcggaaggggacccaatcatcttc

SEQ ID NO: 52749 - DNA, 30 bp, Artificial Sequence
  Synthetic oligonucleotide
aagatccgaaaaatgaaaaggatcatcttc

SEQ ID NO: 52750 - DNA, 30 bp, Artificial Sequence
  Synthetic oligonucleotide
aacgagggggcgtggcgtcagggaaagttc

SEQ ID NO: 52751 - DNA, 30 bp, Artificial Sequence
  Synthetic oligonucleotide
gctaaagcattaagcacattactgcagttc

SEQ ID NO: 52752 - DNA, 30 bp, Artificial Sequence
  Synthetic oligonucleotide
cgttggggggaccatgcgcacggagagttc

SEQ ID NO: 52753 - DNA, 30 bp, Artificial Sequence
  Synthetic oligonucleotide
cgcggtcgatctggtacacaaagctagttc

SEQ ID NO: 52754 - DNA, 30 bp, Artificial Sequence
  Synthetic oligonucleotide
taacggaaagtggactaatgtatgtcgttc

SEQ ID NO: 52755 - DNA, 30 bp, Artificial Sequence
  Synthetic oligonucleotide
ggccgatatgaaacggagtcgcatgggttc

SEQ ID NO: 52756 - DNA, 30 bp, Artificial Sequence
  Synthetic oligonucleotide
tgaggggacgggatacgttcattgtggttc

SEQ ID NO: 52757 - DNA, 30 bp, Artificial Sequence
  Synthetic oligonucleotide
tgggagcttactagttcactaaatttgttc

SEQ ID NO: 52758 - DNA, 30 bp, Artificial Sequence
  Synthetic oligonucleotide
gctagccacgtgagaagctaagcggatttc

SEQ ID NO: 52759 - DNA, 30 bp, Artificial Sequence
  Synthetic oligonucleotide
gtcctaagtagaggagaaagggaatgtttc

SEQ ID NO: 52760 - DNA, 30 bp, Artificial Sequence
  Synthetic oligonucleotide
taggcgtaggcaatggagagaaccgttttc

SEQ ID NO: 52761 - DNA, 30 bp, Artificial Sequence
  Synthetic oligonucleotide
agcaaacgggagagcggcctggagtttttc

SEQ ID NO: 52762 - DNA, 30 bp, Artificial Sequence
  Synthetic oligonucleotide
ggcactgtcgtagcaaaggcgactaaaaag

SEQ ID NO: 52763 - DNA, 30 bp, Artificial Sequence
  Synthetic oligonucleotide
agctgatgaggtacaaaaaccgaggaaaag

SEQ ID NO: 52764 - DNA, 30 bp, Artificial Sequence
  Synthetic oligonucleotide
tgagcacgtcgacaacgtttgcgataaaag

SEQ ID NO: 52765 - DNA, 30 bp, Artificial Sequence
  Synthetic oligonucleotide
gtccagggcggtcagagatcgttgtaaaag

SEQ ID NO: 52766 - DNA, 30 bp, Artificial Sequence
  Synthetic oligonucleotide
agcgtaggctcttcgggaaaaagttaaaag

SEQ ID NO: 52767 - DNA, 30 bp, Artificial Sequence
  Synthetic oligonucleotide
ccggggaatcgaaattgtatcagttaaaag

SEQ ID NO: 52768 - DNA, 30 bp, Artificial Sequence
  Synthetic oligonucleotide
tgtccgaaagcggcacaggctcgcacaaag

SEQ ID NO: 52769 - DNA, 30 bp, Artificial Sequence
  Synthetic oligonucleotide
caaaatggagattgcaaaggggctgcaaag

SEQ ID NO: 52770 - DNA, 30 bp, Artificial Sequence
  Synthetic oligonucleotide
cgttggggcatctagaaacaaagctcaaag

SEQ ID NO: 52771 - DNA, 30 bp, Artificial Sequence
  Synthetic oligonucleotide
aggtccgcaggactgtagtaaccaagaaag

SEQ ID NO: 52772 - DNA, 30 bp, Artificial Sequence
  Synthetic oligonucleotide
gggtatcattgggtcaactctataagaaag

SEQ ID NO: 52773 - DNA, 30 bp, Artificial Sequence
  Synthetic oligonucleotide
tcgacctcagcctatgcgtaccttcgaaag

SEQ ID NO: 52774 - DNA, 30 bp, Artificial Sequence
  Synthetic oligonucleotide
cagactacggcagatcggcagcaaggaaag

SEQ ID NO: 52775 - DNA, 30 bp, Artificial Sequence
  Synthetic oligonucleotide
cgtgatacagagaattacgtttgatgaaag

SEQ ID NO: 52776 - DNA, 30 bp, Artificial Sequence
  Synthetic oligonucleotide
taaaaggccccaggtgcaggtgcgtgaaag

SEQ ID NO: 52777 - DNA, 30 bp, Artificial Sequence
  Synthetic oligonucleotide
tacccaaagagaagggcctactattgaaag

SEQ ID NO: 52778 - DNA, 30 bp, Artificial Sequence
  Synthetic oligonucleotide
aacagacacgctctaccgaacccttgaaag

SEQ ID NO: 52779 - DNA, 30 bp, Artificial Sequence
  Synthetic oligonucleotide
ggataacaaattgcgcgggcgagttgaaag

SEQ ID NO: 52780 - DNA, 30 bp, Artificial Sequence
  Synthetic oligonucleotide
aacagacacaagtgcaccctaactataaag

SEQ ID NO: 52781 - DNA, 30 bp, Artificial Sequence
  Synthetic oligonucleotide
gtcagtacatctcgtatctgagtgctaaag

SEQ ID NO: 52782 - DNA, 30 bp, Artificial Sequence
  Synthetic oligonucleotide
aacaaacacatggcatgttcggtgctaaag

SEQ ID NO: 52783 - DNA, 30 bp, Artificial Sequence
  Synthetic oligonucleotide
caacagaaggctcctgacgagttggtaaag

SEQ ID NO: 52784 - DNA, 30 bp, Artificial Sequence
  Synthetic oligonucleotide
ggagagaagactgtaggtcttaatttaaag

SEQ ID NO: 52785 - DNA, 30 bp, Artificial Sequence
  Synthetic oligonucleotide
attaaccatcaagcatagccaccaaacaag

SEQ ID NO: 52786 - DNA, 30 bp, Artificial Sequence
  Synthetic oligonucleotide
acaggtaacctcttgaatcaaataaacaag

SEQ ID NO: 52787 - DNA, 30 bp, Artificial Sequence
  Synthetic oligonucleotide
agagaagcgcgacgtatgacaataaacaag

SEQ ID NO: 52788 - DNA, 30 bp, Artificial Sequence
  Synthetic oligonucleotide
gagcgatcggtaaacaagttcatcaacaag

SEQ ID NO: 52789 - DNA, 30 bp, Artificial Sequence
  Synthetic oligonucleotide
tatgagactggactgaacaggcatcacaag

SEQ ID NO: 52790 - DNA, 30 bp, Artificial Sequence
  Synthetic oligonucleotide
tgttcaacggtaagactcagaaaagacaag

SEQ ID NO: 52791 - DNA, 30 bp, Artificial Sequence
  Synthetic oligonucleotide
aacggtcggataggcctgcggagcgacaag

SEQ ID NO: 52792 - DNA, 30 bp, Artificial Sequence
  Synthetic oligonucleotide
acaaaaacggatgtcgctcttctatacaag

SEQ ID NO: 52793 - DNA, 30 bp, Artificial Sequence
  Synthetic oligonucleotide
agtcgcctaaggtttggatttacgtacaag

SEQ ID NO: 52794 - DNA, 30 bp, Artificial Sequence
  Synthetic oligonucleotide
gatcaccctgaatgaggtggacacaccaag

SEQ ID NO: 52795 - DNA, 30 bp, Artificial Sequence
  Synthetic oligonucleotide
cgtactaactcttgacaatcaggccccaag

SEQ ID NO: 52796 - DNA, 30 bp, Artificial Sequence
  Synthetic oligonucleotide
cagttatgtaagtacgtctgggctcccaag

SEQ ID NO: 52797 - DNA, 30 bp, Artificial Sequence
  Synthetic oligonucleotide
tcgtgggatcgtcgattagactgtcccaag

SEQ ID NO: 52798 - DNA, 30 bp, Artificial Sequence
  Synthetic oligonucleotide
ctgagcgagccggttcccgctgcggccaag

SEQ ID NO: 52799 - DNA, 30 bp, Artificial Sequence
  Synthetic oligonucleotide
catccaaacggatggacagcgagggccaag

SEQ ID NO: 52800 - DNA, 30 bp, Artificial Sequence
  Synthetic oligonucleotide
cgaatccagttgtactaaagggaatccaag

SEQ ID NO: 52801 - DNA, 30 bp, Artificial Sequence
  Synthetic oligonucleotide
ttggagattaaagagtacaaataatccaag

SEQ ID NO: 52802 - DNA, 30 bp, Artificial Sequence
  Synthetic oligonucleotide
aactgcgatccggtgcgtctaaacagcaag

SEQ ID NO: 52803 - DNA, 30 bp, Artificial Sequence
  Synthetic oligonucleotide
cggcgctgcaacaaaagtatggcgagcaag

SEQ ID NO: 52804 - DNA, 30 bp, Artificial Sequence
  Synthetic oligonucleotide
atcagagggtgcatgactctattaggcaag

SEQ ID NO: 52805 - DNA, 30 bp, Artificial Sequence
  Synthetic oligonucleotide
agaaggctgtgggagccgccaaacggcaag

SEQ ID NO: 52806 - DNA, 30 bp, Artificial Sequence
  Synthetic oligonucleotide
tcgattggataggagggtgccaggggcaag

SEQ ID NO: 52807 - DNA, 30 bp, Artificial Sequence
  Synthetic oligonucleotide
cagacatgacgagcgggaggaggtggcaag

SEQ ID NO: 52808 - DNA, 30 bp, Artificial Sequence
  Synthetic oligonucleotide
gcttacgatagagagaacttgtaatgcaag

SEQ ID NO: 52809 - DNA, 30 bp, Artificial Sequence
  Synthetic oligonucleotide
tggagttcgctagcgcgctggtaactcaag

SEQ ID NO: 52810 - DNA, 30 bp, Artificial Sequence
  Synthetic oligonucleotide
cgcggaaaacagcgagtagtttttctcaag

SEQ ID NO: 52811 - DNA, 30 bp, Artificial Sequence
  Synthetic oligonucleotide
atatcaaagcccggccagatcttagtcaag

SEQ ID NO: 52812 - DNA, 30 bp, Artificial Sequence
  Synthetic oligonucleotide
caaggtttaggtggacagggaaccgtcaag

SEQ ID NO: 52813 - DNA, 30 bp, Artificial Sequence
  Synthetic oligonucleotide
cgtttgtgcaacggtgcgtctcaggtcaag

SEQ ID NO: 52814 - DNA, 30 bp, Artificial Sequence
  Synthetic oligonucleotide
tggcatggaaccccccaagcttgattcaag

SEQ ID NO: 52815 - DNA, 30 bp, Artificial Sequence
  Synthetic oligonucleotide
gtgtggcctggaccctaatgagccaagaag

SEQ ID NO: 52816 - DNA, 30 bp, Artificial Sequence
  Synthetic oligonucleotide
aaacttccacatcgcaagtaacataagaag

SEQ ID NO: 52817 - DNA, 30 bp, Artificial Sequence
  Synthetic oligonucleotide
ataacaaattcatttggggcatgtcagaag

SEQ ID NO: 52818 - DNA, 30 bp, Artificial Sequence
  Synthetic oligonucleotide
acagaggattcgtctaagcaggcagagaag

SEQ ID NO: 52819 - DNA, 30 bp, Artificial Sequence
  Synthetic oligonucleotide
aacaactgggtagctaaccactcagagaag

SEQ ID NO: 52820 - DNA, 30 bp, Artificial Sequence
  Synthetic oligonucleotide
ccacaccctgcggacgaattggccgagaag

SEQ ID NO: 52821 - DNA, 30 bp, Artificial Sequence
  Synthetic oligonucleotide
ataagggcgactcaacaacacacatagaag

SEQ ID NO: 52822 - DNA, 30 bp, Artificial Sequence
  Synthetic oligonucleotide
ctaagtaagtcgcgaccatagaagtagaag

SEQ ID NO: 52823 - DNA, 30 bp, Artificial Sequence
  Synthetic oligonucleotide
ctagcgccgaggtgtcatacgttttagaag

SEQ ID NO: 52824 - DNA, 30 bp, Artificial Sequence
  Synthetic oligonucleotide
gtggttagcgaatggtcagctatcgcgaag

SEQ ID NO: 52825 - DNA, 30 bp, Artificial Sequence
  Synthetic oligonucleotide
tcagattagggtaagaaagagaactcgaag

SEQ ID NO: 52826 - DNA, 30 bp, Artificial Sequence
  Synthetic oligonucleotide
ccccacaatttaatcatgatccagaggaag

SEQ ID NO: 52827 - DNA, 30 bp, Artificial Sequence
  Synthetic oligonucleotide
ggatatcctttatcgcccgaatgtcggaag

SEQ ID NO: 52828 - DNA, 30 bp, Artificial Sequence
  Synthetic oligonucleotide
gctgggtaaagatacgtactggaggggaag

SEQ ID NO: 52829 - DNA, 30 bp, Artificial Sequence
  Synthetic oligonucleotide
gatgcagatttaggattatgctgggggaag

SEQ ID NO: 52830 - DNA, 30 bp, Artificial Sequence
  Synthetic oligonucleotide
gtggaaaagtcctttcgtgttatggggaag

SEQ ID NO: 52831 - DNA, 30 bp, Artificial Sequence
  Synthetic oligonucleotide
attacgtgaggtttaactaaccttgggaag

SEQ ID NO: 52832 - DNA, 30 bp, Artificial Sequence
  Synthetic oligonucleotide
cgattgctcgccgtgccagctatctggaag

SEQ ID NO: 52833 - DNA, 30 bp, Artificial Sequence
  Synthetic oligonucleotide
ggcacgaatgaagggtggaatactatgaag

SEQ ID NO: 52834 - DNA, 30 bp, Artificial Sequence
  Synthetic oligonucleotide
gtatcgcgccgcgttacggcacaagtgaag

SEQ ID NO: 52835 - DNA, 30 bp, Artificial Sequence
  Synthetic oligonucleotide
gcgaagattaaggcggatgggacagtgaag

SEQ ID NO: 52836 - DNA, 30 bp, Artificial Sequence
  Synthetic oligonucleotide
tagttgcgcctatacgatgtccaattgaag

SEQ ID NO: 52837 - DNA, 31 bp, Artificial Sequence
  Synthetic oligonucleotide
ataaagcgacgcaactgagatggcattgaag

SEQ ID NO: 52838 - DNA, 30 bp, Artificial Sequence
  Synthetic oligonucleotide
ttctacagagctatggacagcaacaataag

SEQ ID NO: 52839 - DNA, 30 bp, Artificial Sequence
  Synthetic oligonucleotide
ctcagggcaagcttgcacatgatgaataag

SEQ ID NO: 52840 - DNA, 30 bp, Artificial Sequence
  Synthetic oligonucleotide
tcgagaaggaggggcgatcactctcataag

SEQ ID NO: 52841 - DNA, 30 bp, Artificial Sequence
  Synthetic oligonucleotide
tcccctcaatgaggtatcagaaaggataag

SEQ ID NO: 52842 - DNA, 30 bp, Artificial Sequence
  Synthetic oligonucleotide
ccgcgcagctagaagaacgccaaggataag

SEQ ID NO: 52843 - DNA, 30 bp, Artificial Sequence
  Synthetic oligonucleotide
gctcggcgaattccagataacctttataag

SEQ ID NO: 52844 - DNA, 30 bp, Artificial Sequence
  Synthetic oligonucleotide
tcaaagatgcgttccggttgccctgctaag

SEQ ID NO: 52845 - DNA, 30 bp, Artificial Sequence
  Synthetic oligonucleotide
gcgccgaacaaagattgatctagttctaag

SEQ ID NO: 52846 - DNA, 30 bp, Artificial Sequence
  Synthetic oligonucleotide
gcacgaattaacatatgatagttcagtaag

SEQ ID NO: 52847 - DNA, 30 bp, Artificial Sequence
  Synthetic oligonucleotide
cataggtgcgctgagtgtggtaagagtaag

SEQ ID NO: 52848 - DNA, 30 bp, Artificial Sequence
  Synthetic oligonucleotide
tcaatggggcatctggtgcaaagtagtaag

SEQ ID NO: 52849 - DNA, 30 bp, Artificial Sequence
  Synthetic oligonucleotide
cggacgatgagcggcaacttctcccgtaag

SEQ ID NO: 52850 - DNA, 30 bp, Artificial Sequence
  Synthetic oligonucleotide
ggtctcgtttagggaaagagactgcgtaag

SEQ ID NO: 52851 - DNA, 30 bp, Artificial Sequence
  Synthetic oligonucleotide
gggtaaaaaacgagagtcgacgatcgtaag

SEQ ID NO: 52852 - DNA, 30 bp, Artificial Sequence
  Synthetic oligonucleotide
cgtaaccataccaggggcacaaggggtaag

SEQ ID NO: 52853 - DNA, 30 bp, Artificial Sequence
  Synthetic oligonucleotide
gtgtaacaatgaggattcagtcacattaag

SEQ ID NO: 52854 - DNA, 30 bp, Artificial Sequence
  Synthetic oligonucleotide
gatgcttggtaggagatcaaccccattaag

SEQ ID NO: 52855 - DNA, 30 bp, Artificial Sequence
  Synthetic oligonucleotide
cgaggccaactccaactttcacgcattaag

SEQ ID NO: 52856 - DNA, 30 bp, Artificial Sequence
  Synthetic oligonucleotide
tcagggaagagaagcccaaatcgtattaag

SEQ ID NO: 52857 - DNA, 30 bp, Artificial Sequence
  Synthetic oligonucleotide
tccattcaaacgatgagacaaggatttaag

SEQ ID NO: 52858 - DNA, 30 bp, Artificial Sequence
  Synthetic oligonucleotide
taggacacgactgatcaaatacttaaacag

SEQ ID NO: 52859 - DNA, 30 bp, Artificial Sequence
  Synthetic oligonucleotide
gcgatgagcttatgatggaaatgacaacag

SEQ ID NO: 52860 - DNA, 30 bp, Artificial Sequence
  Synthetic oligonucleotide
ccaatgatggcaacctcaaatgtccaacag

SEQ ID NO: 52861 - DNA, 30 bp, Artificial Sequence
  Synthetic oligonucleotide
gcgtcctaggctatagctctagtgcaacag

SEQ ID NO: 52862 - DNA, 30 bp, Artificial Sequence
  Synthetic oligonucleotide
gaagtgctttggcgcgatataaaagaacag

SEQ ID NO: 52863 - DNA, 30 bp, Artificial Sequence
  Synthetic oligonucleotide
accacgatggccatccggataagctaacag

SEQ ID NO: 52864 - DNA, 30 bp, Artificial Sequence
  Synthetic oligonucleotide
ggtcgagtggttttcgatcgtcggtaacag

SEQ ID NO: 52865 - DNA, 30 bp, Artificial Sequence
  Synthetic oligonucleotide
tggtgagtgatcgaagtgctgtcttaacag

SEQ ID NO: 52866 - DNA, 30 bp, Artificial Sequence
  Synthetic oligonucleotide
ataggaagggtatacaaccaggtaacacag

SEQ ID NO: 52867 - DNA, 30 bp, Artificial Sequence
  Synthetic oligonucleotide
tgatgaggaaacggggcagctcacccacag

SEQ ID NO: 52868 - DNA, 30 bp, Artificial Sequence
  Synthetic oligonucleotide
aagccgatcgttattgatgaacatgcacag

SEQ ID NO: 52869 - DNA, 30 bp, Artificial Sequence
  Synthetic oligonucleotide
ggggtacgggaatagataaatgcaggacag

SEQ ID NO: 52870 - DNA, 29 bp, Artificial Sequence
  Synthetic oligonucleotide
gcctccatgaggaaggtgtttcgggacag

SEQ ID NO: 52871 - DNA, 30 bp, Artificial Sequence
  Synthetic oligonucleotide
agcggtgcaaacggacatctaaatatacag

SEQ ID NO: 52872 - DNA, 30 bp, Artificial Sequence
  Synthetic oligonucleotide
agggctaaaccaagaaagccacaaaaccag

SEQ ID NO: 52873 - DNA, 30 bp, Artificial Sequence
  Synthetic oligonucleotide
tcggaaatacatgtatggggaactcaccag

SEQ ID NO: 52874 - DNA, 30 bp, Artificial Sequence
  Synthetic oligonucleotide
attgaggcgcgatggaccaactctcaccag

SEQ ID NO: 52875 - DNA, 30 bp, Artificial Sequence
  Synthetic oligonucleotide
catgagctcggagctccgatgagagaccag

SEQ ID NO: 52876 - DNA, 30 bp, Artificial Sequence
  Synthetic oligonucleotide
ggttaggccgcaacgatccgtgccgaccag

SEQ ID NO: 52877 - DNA, 30 bp, Artificial Sequence
  Synthetic oligonucleotide
atggtacgaacccgtctacacaaataccag

SEQ ID NO: 52878 - DNA, 30 bp, Artificial Sequence
  Synthetic oligonucleotide
cgaacggggctgcgaagacttagataccag

SEQ ID NO: 52879 - DNA, 30 bp, Artificial Sequence
  Synthetic oligonucleotide
gcggtttcatccttgccaagacagtaccag

SEQ ID NO: 52880 - DNA, 30 bp, Artificial Sequence
  Synthetic oligonucleotide
tactggcagttgcaaaggaatataacccag

SEQ ID NO: 52881 - DNA, 30 bp, Artificial Sequence
  Synthetic oligonucleotide
cacgttcgtgacccgtttcaatcgacccag

SEQ ID NO: 52882 - DNA, 30 bp, Artificial Sequence
  Synthetic oligonucleotide
gcaacgcgtgtaactatgtgactagcccag

SEQ ID NO: 52883 - DNA, 30 bp, Artificial Sequence
  Synthetic oligonucleotide
tgaagtggctaagaaagttcctgtgcccag

SEQ ID NO: 52884 - DNA, 29 bp, Artificial Sequence
  Synthetic oligonucleotide
cgtcgatccggcggaatgtggcccgccag

SEQ ID NO: 52885 - DNA, 30 bp, Artificial Sequence
  Synthetic oligonucleotide
gtaaagggtcgcaccgacgggataggccag

SEQ ID NO: 52886 - DNA, 30 bp, Artificial Sequence
  Synthetic oligonucleotide
tgttgtacggtggagaacgccctaggccag

SEQ ID NO: 52887 - DNA, 30 bp, Artificial Sequence
  Synthetic oligonucleotide
tgtgacgtggtcgggtcgacaactggccag

SEQ ID NO: 52888 - DNA, 30 bp, Artificial Sequence
  Synthetic oligonucleotide
gatatacaaaagataagaggtactggccag

SEQ ID NO: 52889 - DNA, 30 bp, Artificial Sequence
  Synthetic oligonucleotide
gtcgtacatggccacaggggatcgtgccag

SEQ ID NO: 52890 - DNA, 30 bp, Artificial Sequence
  Synthetic oligonucleotide
acacaatgacccatttcggaacaaatccag

SEQ ID NO: 52891 - DNA, 30 bp, Artificial Sequence
  Synthetic oligonucleotide
accacctagaacatcaggtataacatccag

SEQ ID NO: 52892 - DNA, 30 bp, Artificial Sequence
  Synthetic oligonucleotide
aatcgaaccggatccaaatatgcgatccag

SEQ ID NO: 52893 - DNA, 30 bp, Artificial Sequence
  Synthetic oligonucleotide
agacacaactagagaacgggccgtatccag

SEQ ID NO: 52894 - DNA, 30 bp, Artificial Sequence
  Synthetic oligonucleotide
ggggttcaaaagggtcgaagaccactccag

SEQ ID NO: 52895 - DNA, 30 bp, Artificial Sequence
  Synthetic oligonucleotide
tacatccgacatgatgaatttggtctccag

SEQ ID NO: 52896 - DNA, 30 bp, Artificial Sequence
  Synthetic oligonucleotide
tcgatgggtcattaagcaggtccagtccag

SEQ ID NO: 52897 - DNA, 30 bp, Artificial Sequence
  Synthetic oligonucleotide
agcgcgagttcggcgatgcacagagtccag

SEQ ID NO: 52898 - DNA, 30 bp, Artificial Sequence
  Synthetic oligonucleotide
ataaatccaagcatgtgagtgcgggtccag

SEQ ID NO: 52899 - DNA, 30 bp, Artificial Sequence
  Synthetic oligonucleotide
ggtagactactaactacggaaggggtccag

SEQ ID NO: 52900 - DNA, 30 bp, Artificial Sequence
  Synthetic oligonucleotide
cgcacgcgatgggggagcgtttcaaagcag

SEQ ID NO: 52901 - DNA, 30 bp, Artificial Sequence
  Synthetic oligonucleotide
cggcaaccatccgtaggcgaataccagcag

SEQ ID NO: 52902 - DNA, 30 bp, Artificial Sequence
  Synthetic oligonucleotide
actatcaaatcggtctgagcgtaatagcag

SEQ ID NO: 52903 - DNA, 30 bp, Artificial Sequence
  Synthetic oligonucleotide
ccgcaaagatgggaggtcatcctatagcag

SEQ ID NO: 52904 - DNA, 30 bp, Artificial Sequence
  Synthetic oligonucleotide
gggatacaatcaaaaatttaactctagcag

SEQ ID NO: 52905 - DNA, 30 bp, Artificial Sequence
  Synthetic oligonucleotide
catgcccgtttggagaccgaggggtagcag

SEQ ID NO: 52906 - DNA, 30 bp, Artificial Sequence
  Synthetic oligonucleotide
gcgcgcaataaggtaagcatgctaacgcag

SEQ ID NO: 52907 - DNA, 30 bp, Artificial Sequence
  Synthetic oligonucleotide
tgagacttgattgggctgcaagactcgcag

SEQ ID NO: 52908 - DNA, 30 bp, Artificial Sequence
  Synthetic oligonucleotide
tcttcgacaggatcactatgtacaaggcag

SEQ ID NO: 52909 - DNA, 30 bp, Artificial Sequence
  Synthetic oligonucleotide
cctcgtgcttattttggctagataaggcag

SEQ ID NO: 52910 - DNA, 30 bp, Artificial Sequence
  Synthetic oligonucleotide
aaacgtcaaactgactgtccatagaggcag

SEQ ID NO: 52911 - DNA, 30 bp, Artificial Sequence
  Synthetic oligonucleotide
caatagtaatattacggaccagtccggcag

SEQ ID NO: 52912 - DNA, 30 bp, Artificial Sequence
  Synthetic oligonucleotide
acagcaataagtagaaggtggagatggcag

SEQ ID NO: 52913 - DNA, 30 bp, Artificial Sequence
  Synthetic oligonucleotide
gcaaccccatatcgatgtgtaccctggcag

SEQ ID NO: 52914 - DNA, 30 bp, Artificial Sequence
  Synthetic oligonucleotide
gtcagccgtaagcaggtacggatcatgcag

SEQ ID NO: 52915 - DNA, 30 bp, Artificial Sequence
  Synthetic oligonucleotide
tgggtcaaaacggtcaatagcaagatgcag

SEQ ID NO: 52916 - DNA, 30 bp, Artificial Sequence
  Synthetic oligonucleotide
tggtgtggctacgcttagagacctctgcag

SEQ ID NO: 52917 - DNA, 30 bp, Artificial Sequence
  Synthetic oligonucleotide
gcttaaatagaggtaacagggaacgtgcag

SEQ ID NO: 52918 - DNA, 30 bp, Artificial Sequence
  Synthetic oligonucleotide
tggatacgagtaagtatactggcattgcag

SEQ ID NO: 52919 - DNA, 30 bp, Artificial Sequence
  Synthetic oligonucleotide
tccaataagggcatacaaagatctttgcag

SEQ ID NO: 52920 - DNA, 30 bp, Artificial Sequence
  Synthetic oligonucleotide
tgagtacagaacacttgggagcttaatcag

SEQ ID NO: 52921 - DNA, 30 bp, Artificial Sequence
  Synthetic oligonucleotide
actggaacgtaaaagcggttgctccatcag

SEQ ID NO: 52922 - DNA, 30 bp, Artificial Sequence
  Synthetic oligonucleotide
ctgtgaagtacgtcatgaactcaagatcag

SEQ ID NO: 52923 - DNA, 30 bp, Artificial Sequence
  Synthetic oligonucleotide
acatgccaacaagggatcaaccccgatcag

SEQ ID NO: 52924 - DNA, 30 bp, Artificial Sequence
  Synthetic oligonucleotide
catagggtacgtgcgcaagcggctgatcag

SEQ ID NO: 52925 - DNA, 30 bp, Artificial Sequence
  Synthetic oligonucleotide
atagatgaatggtcaagctcaggcactcag

SEQ ID NO: 52926 - DNA, 30 bp, Artificial Sequence
  Synthetic oligonucleotide
aaacgggatgtattctagataggggctcag

SEQ ID NO: 52927 - DNA, 30 bp, Artificial Sequence
  Synthetic oligonucleotide
tgcaagaaatgaaaactgataatctctcag

SEQ ID NO: 52928 - DNA, 30 bp, Artificial Sequence
  Synthetic oligonucleotide
cctcgaagcatagcgtcggaactgagtcag

SEQ ID NO: 52929 - DNA, 30 bp, Artificial Sequence
  Synthetic oligonucleotide
actcgggtacaatgtgttgagttaggtcag

SEQ ID NO: 52930 - DNA, 30 bp, Artificial Sequence
  Synthetic oligonucleotide
gtccgatacaaatggtggatccccggtcag

SEQ ID NO: 52931 - DNA, 30 bp, Artificial Sequence
  Synthetic oligonucleotide
acgcaaccacgtagggatggacagtgtcag

SEQ ID NO: 52932 - DNA, 30 bp, Artificial Sequence
  Synthetic oligonucleotide
aatcgaatcggacagtttaccgattgtcag

SEQ ID NO: 52933 - DNA, 30 bp, Artificial Sequence
  Synthetic oligonucleotide
ggaagaggtaggagtcaagggactattcag

SEQ ID NO: 52934 - DNA, 30 bp, Artificial Sequence
  Synthetic oligonucleotide
aggggtgcgttgttgactcaatctattcag

SEQ ID NO: 52935 - DNA, 30 bp, Artificial Sequence
  Synthetic oligonucleotide
aagttcagatatccaaagcgtgaccttcag

SEQ ID NO: 52936 - DNA, 30 bp, Artificial Sequence
  Synthetic oligonucleotide
gacgagtccgggattccgtttgagtttcag

SEQ ID NO: 52937 - DNA, 30 bp, Artificial Sequence
  Synthetic oligonucleotide
gccggaacctcttacgattgaacaaaagag

SEQ ID NO: 52938 - DNA, 30 bp, Artificial Sequence
  Synthetic oligonucleotide
tgttcaataaagactagtgaattcaaagag

SEQ ID NO: 52939 - DNA, 30 bp, Artificial Sequence
  Synthetic oligonucleotide
gagtagtgcaatgcaaaagagaataaagag

SEQ ID NO: 52940 - DNA, 30 bp, Artificial Sequence
  Synthetic oligonucleotide
ttaagacgtcatctgcataactataaagag

SEQ ID NO: 52941 - DNA, 30 bp, Artificial Sequence
  Synthetic oligonucleotide
cgtgaaatccgaactgaaataagtaaagag

SEQ ID NO: 52942 - DNA, 30 bp, Artificial Sequence
  Synthetic oligonucleotide
ggactcccggaatccgtgacgtgacaagag

SEQ ID NO: 52943 - DNA, 30 bp, Artificial Sequence
  Synthetic oligonucleotide
tcaacggatcaggaaaacggcttctaagag

SEQ ID NO: 52944 - DNA, 30 bp, Artificial Sequence
  Synthetic oligonucleotide
cagatggactataatgcgaccgggtaagag

SEQ ID NO: 52945 - DNA, 30 bp, Artificial Sequence
  Synthetic oligonucleotide
aatgcagtcatacggagccggacaacagag

SEQ ID NO: 52946 - DNA, 30 bp, Artificial Sequence
  Synthetic oligonucleotide
gcaacaatgatggtgtctccaactacagag

SEQ ID NO: 52947 - DNA, 30 bp, Artificial Sequence
  Synthetic oligonucleotide
ttgcgacacgcaaaaagaatgactacagag

SEQ ID NO: 52948 - DNA, 30 bp, Artificial Sequence
  Synthetic oligonucleotide
ggtacacgatcgcgcgatgatgttacagag

SEQ ID NO: 52949 - DNA, 30 bp, Artificial Sequence
  Synthetic oligonucleotide
agttctaacacaatcgattgaagatcagag

SEQ ID NO: 52950 - DNA, 30 bp, Artificial Sequence
  Synthetic oligonucleotide
ggaaacgcgaatcagggtgtaggttcagag

SEQ ID NO: 52951 - DNA, 30 bp, Artificial Sequence
  Synthetic oligonucleotide
aaatgccctcatggataatgaagcagagag

SEQ ID NO: 52952 - DNA, 30 bp, Artificial Sequence
  Synthetic oligonucleotide
gaaatgaaaaaaccaataatatttggagag

SEQ ID NO: 52953 - DNA, 30 bp, Artificial Sequence
  Synthetic oligonucleotide
ggagcttaggcagatgcgtaacccatagag

SEQ ID NO: 52954 - DNA, 30 bp, Artificial Sequence
  Synthetic oligonucleotide
gcgacatgaggcgcaaaatccgccctagag

SEQ ID NO: 52955 - DNA, 30 bp, Artificial Sequence
  Synthetic oligonucleotide
tgaagtgggcgtatttatctcgtcctagag

SEQ ID NO: 52956 - DNA, 30 bp, Artificial Sequence
  Synthetic oligonucleotide
taggcagcccggtaaacagatgtgctagag

SEQ ID NO: 52957 - DNA, 29 bp, Artificial Sequence
  Synthetic oligonucleotide
cggtgaggaattccctattctgtctagag

SEQ ID NO: 52958 - DNA, 30 bp, Artificial Sequence
  Synthetic oligonucleotide
cgctaaaaaactacacatgtgttggtagag

SEQ ID NO: 52959 - DNA, 30 bp, Artificial Sequence
  Synthetic oligonucleotide
gcgccggtagccagtaaggcataaaacgag

SEQ ID NO: 52960 - DNA, 30 bp, Artificial Sequence
  Synthetic oligonucleotide
ccagcgtatagggggggcacttaaaacgag

SEQ ID NO: 52961 - DNA, 30 bp, Artificial Sequence
  Synthetic oligonucleotide
tggaaacagagaccctctggcttccacgag

SEQ ID NO: 52962 - DNA, 30 bp, Artificial Sequence
  Synthetic oligonucleotide
cgcatctttcagacaggccaccaagacgag

SEQ ID NO: 52963 - DNA, 30 bp, Artificial Sequence
  Synthetic oligonucleotide
gaacgcgacttgcccaaagtataagacgag

SEQ ID NO: 52964 - DNA, 30 bp, Artificial Sequence
  Synthetic oligonucleotide
aaaggcaaggactatgtgttggaggacgag

SEQ ID NO: 52965 - DNA, 31 bp, Artificial Sequence
  Synthetic oligonucleotide
tccatcgacgcgggttgtaagatgggacgag

SEQ ID NO: 52966 - DNA, 30 bp, Artificial Sequence
  Synthetic oligonucleotide
gtagctgaatggcccaaacgaccttacgag

SEQ ID NO: 52967 - DNA, 30 bp, Artificial Sequence
  Synthetic oligonucleotide
ttaggggaacaggcgtcctgggccaccgag

SEQ ID NO: 52968 - DNA, 30 bp, Artificial Sequence
  Synthetic oligonucleotide
gggcaggatgaccgacgcataatacccgag

SEQ ID NO: 52969 - DNA, 30 bp, Artificial Sequence
  Synthetic oligonucleotide
tcattcagtggttaactttccgtccccgag

SEQ ID NO: 52970 - DNA, 30 bp, Artificial Sequence
  Synthetic oligonucleotide
acggggccagagcttaaagcgaaggccgag

SEQ ID NO: 52971 - DNA, 30 bp, Artificial Sequence
  Synthetic oligonucleotide
taagagtattaggctacgtgaaatgccgag

SEQ ID NO: 52972 - DNA, 30 bp, Artificial Sequence
  Synthetic oligonucleotide
aaccttgtgtcccggcaatgagctgccgag

SEQ ID NO: 52973 - DNA, 30 bp, Artificial Sequence
  Synthetic oligonucleotide
ctaggtatagcaagaatttaatggtccgag

SEQ ID NO: 52974 - DNA, 30 bp, Artificial Sequence
  Synthetic oligonucleotide
caaactatgacacgtcagatcgattccgag

SEQ ID NO: 52975 - DNA, 30 bp, Artificial Sequence
  Synthetic oligonucleotide
aattaggtggggactggggacataagcgag

SEQ ID NO: 52976 - DNA, 30 bp, Artificial Sequence
  Synthetic oligonucleotide
taatcttcaggcggcgagcataggagcgag

SEQ ID NO: 52977 - DNA, 30 bp, Artificial Sequence
  Synthetic oligonucleotide
aggacaacagcaggtctcccgcggagcgag

SEQ ID NO: 52978 - DNA, 30 bp, Artificial Sequence
  Synthetic oligonucleotide
aaggttgtctaacaacaatattaacgcgag

SEQ ID NO: 52979 - DNA, 30 bp, Artificial Sequence
  Synthetic oligonucleotide
gcccgagttttgcgaaaaaaaagtcgcgag

SEQ ID NO: 52980 - DNA, 30 bp, Artificial Sequence
  Synthetic oligonucleotide
gacattgggatcattcagtacgtcggcgag

SEQ ID NO: 52981 - DNA, 30 bp, Artificial Sequence
  Synthetic oligonucleotide
ggatacatatgagtttcccctcggggcgag

SEQ ID NO: 52982 - DNA, 30 bp, Artificial Sequence
  Synthetic oligonucleotide
gctagaggatgataatttcgtcagtgcgag

SEQ ID NO: 52983 - DNA, 30 bp, Artificial Sequence
  Synthetic oligonucleotide
attacgtgttaagcaggaatcagttgcgag

SEQ ID NO: 52984 - DNA, 30 bp, Artificial Sequence
  Synthetic oligonucleotide
ggtacaaaactactatcccaagtcatcgag

SEQ ID NO: 52985 - DNA, 30 bp, Artificial Sequence
  Synthetic oligonucleotide
agctaacatttttactgggactggctcgag

SEQ ID NO: 52986 - DNA, 30 bp, Artificial Sequence
  Synthetic oligonucleotide
tcttgcagtgacggacggaatctgctcgag

SEQ ID NO: 52987 - DNA, 30 bp, Artificial Sequence
  Synthetic oligonucleotide
ccagccatgttttggcactagtacgtcgag

SEQ ID NO: 52988 - DNA, 30 bp, Artificial Sequence
  Synthetic oligonucleotide
acgccagcgccctaccccataggattcgag

SEQ ID NO: 52989 - DNA, 30 bp, Artificial Sequence
  Synthetic oligonucleotide
aaagtgagcgatagtggagattccttcgag

SEQ ID NO: 52990 - DNA, 30 bp, Artificial Sequence
  Synthetic oligonucleotide
aaggggaggtcttacaaatgggatttcgag

SEQ ID NO: 52991 - DNA, 30 bp, Artificial Sequence
  Synthetic oligonucleotide
agccacagggtagacctttggtatttcgag

SEQ ID NO: 52992 - DNA, 30 bp, Artificial Sequence
  Synthetic oligonucleotide
aactggaggcggttccgggggagcaaggag

SEQ ID NO: 52993 - DNA, 30 bp, Artificial Sequence
  Synthetic oligonucleotide
ggtccagctaaacatcagcgggagaaggag

SEQ ID NO: 52994 - DNA, 30 bp, Artificial Sequence
  Synthetic oligonucleotide
cagtaagatacagggtttacgaggaaggag

SEQ ID NO: 52995 - DNA, 30 bp, Artificial Sequence
  Synthetic oligonucleotide
aaacgaaccgcatatcacacggctaaggag

SEQ ID NO: 52996 - DNA, 30 bp, Artificial Sequence
  Synthetic oligonucleotide
agggctaatggtgacgtatatagtaaggag

SEQ ID NO: 52997 - DNA, 30 bp, Artificial Sequence
  Synthetic oligonucleotide
ctaagtatacgtaatccgtcaaccgaggag

SEQ ID NO: 52998 - DNA, 30 bp, Artificial Sequence
  Synthetic oligonucleotide
atgtctcggcagagtgcttacagcgaggag

SEQ ID NO: 52999 - DNA, 30 bp, Artificial Sequence
  Synthetic oligonucleotide
acaagggaaaggagtgtcgctagggaggag

SEQ ID NO: 53000 - DNA, 30 bp, Artificial Sequence
  Synthetic oligonucleotide
ttcaaccaaccaacagacttggtggaggag

SEQ ID NO: 53001 - DNA, 30 bp, Artificial Sequence
  Synthetic oligonucleotide
cgcaagttactgttggacagtgtggaggag

SEQ ID NO: 53002 - DNA, 30 bp, Artificial Sequence
  Synthetic oligonucleotide
gtctcgaatgggatgacgaagaggtaggag

SEQ ID NO: 53003 - DNA, 31 bp, Artificial Sequence
  Synthetic oligonucleotide
ctatcaggggtccgtgttgggaataacggag

SEQ ID NO: 53004 - DNA, 30 bp, Artificial Sequence
  Synthetic oligonucleotide
agcggtcaacagaagatgtgagccacggag

SEQ ID NO: 53005 - DNA, 30 bp, Artificial Sequence
  Synthetic oligonucleotide
agagtgtgccaccatcaatagcatgcggag

SEQ ID NO: 53006 - DNA, 30 bp, Artificial Sequence
  Synthetic oligonucleotide
aatgcatgggcgtgtggacactctgcggag

SEQ ID NO: 53007 - DNA, 30 bp, Artificial Sequence
  Synthetic oligonucleotide
gtggaacgttctgggttcatcccgtcggag

SEQ ID NO: 53008 - DNA, 30 bp, Artificial Sequence
  Synthetic oligonucleotide
ggtcctacctgttacatgagtggttcggag

SEQ ID NO: 53009 - DNA, 30 bp, Artificial Sequence
  Synthetic oligonucleotide
tgccttaggggaaaagatgtcttttcggag

SEQ ID NO: 53010 - DNA, 30 bp, Artificial Sequence
  Synthetic oligonucleotide
ttgtgggcttcagtgataggtgagagggag

SEQ ID NO: 53011 - DNA, 30 bp, Artificial Sequence
  Synthetic oligonucleotide
tggatctgccaaggcagggagacgagggag

SEQ ID NO: 53012 - DNA, 30 bp, Artificial Sequence
  Synthetic oligonucleotide
cgtggaaatttgttgttgaacacgcgggag

SEQ ID NO: 53013 - DNA, 30 bp, Artificial Sequence
  Synthetic oligonucleotide
ccgacttggaggcctacagtcgtgcgggag

SEQ ID NO: 53014 - DNA, 30 bp, Artificial Sequence
  Synthetic oligonucleotide
aggcatgatcaagcttgagcggctcgggag

SEQ ID NO: 53015 - DNA, 30 bp, Artificial Sequence
  Synthetic oligonucleotide
ttccagataaagtacgtgggtattcgggag

SEQ ID NO: 53016 - DNA, 30 bp, Artificial Sequence
  Synthetic oligonucleotide
tccagtcgaactggactaactatgggggag

SEQ ID NO: 53017 - DNA, 30 bp, Artificial Sequence
  Synthetic oligonucleotide
tcggcccgaaattgtctggcagtgggggag

SEQ ID NO: 53018 - DNA, 30 bp, Artificial Sequence
  Synthetic oligonucleotide
aatcagggcgcaggggtatcatcatgggag

SEQ ID NO: 53019 - DNA, 30 bp, Artificial Sequence
  Synthetic oligonucleotide
caggcacctcaataggcgtgatcatgggag

SEQ ID NO: 53020 - DNA, 30 bp, Artificial Sequence
  Synthetic oligonucleotide
cggtgtcgatgcgaccaagtccgatgggag

SEQ ID NO: 53021 - DNA, 30 bp, Artificial Sequence
  Synthetic oligonucleotide
atgttgccctaagttgggtagatatgggag

SEQ ID NO: 53022 - DNA, 30 bp, Artificial Sequence
  Synthetic oligonucleotide
cagtcagaggatcatccggcccgctgggag

SEQ ID NO: 53023 - DNA, 30 bp, Artificial Sequence
  Synthetic oligonucleotide
agtggtagatatgttcctggccagtgggag

SEQ ID NO: 53024 - DNA, 30 bp, Artificial Sequence
  Synthetic oligonucleotide
tcgtccgatgatgcgggcggtagttgggag

SEQ ID NO: 53025 - DNA, 30 bp, Artificial Sequence
  Synthetic oligonucleotide
cgtcctgataagcgggatccgatcatggag

SEQ ID NO: 53026 - DNA, 30 bp, Artificial Sequence
  Synthetic oligonucleotide
cgtacagccattcgaagcattgaactggag

SEQ ID NO: 53027 - DNA, 30 bp, Artificial Sequence
  Synthetic oligonucleotide
cgggggggtaagtctcggattagcctggag

SEQ ID NO: 53028 - DNA, 30 bp, Artificial Sequence
  Synthetic oligonucleotide
gtcggaaagggcttgattatccgaaatgag

SEQ ID NO: 53029 - DNA, 30 bp, Artificial Sequence
  Synthetic oligonucleotide
gaggaaactgccgttcaggtcctaaatgag

SEQ ID NO: 53030 - DNA, 30 bp, Artificial Sequence
  Synthetic oligonucleotide
tacagtcggtgtcgagctaccaggaatgag

SEQ ID NO: 53031 - DNA, 30 bp, Artificial Sequence
  Synthetic oligonucleotide
agatcaggaaggattggggactttaatgag

SEQ ID NO: 53032 - DNA, 30 bp, Artificial Sequence
  Synthetic oligonucleotide
agaaaaaatatcgaaacgatgcaacatgag

SEQ ID NO: 53033 - DNA, 30 bp, Artificial Sequence
  Synthetic oligonucleotide
acaacatggttagttgtacaagagcatgag

SEQ ID NO: 53034 - DNA, 30 bp, Artificial Sequence
  Synthetic oligonucleotide
tcctaggataaggatcaaaataaggatgag

SEQ ID NO: 53035 - DNA, 30 bp, Artificial Sequence
  Synthetic oligonucleotide
tcggtagaaggctgtcacagaagatatgag

SEQ ID NO: 53036 - DNA, 30 bp, Artificial Sequence
  Synthetic oligonucleotide
cgagtatattgcgtgttctgtaagtatgag

SEQ ID NO: 53037 - DNA, 30 bp, Artificial Sequence
  Synthetic oligonucleotide
cgcgcattacgaacccctgccgtttatgag

SEQ ID NO: 53038 - DNA, 30 bp, Artificial Sequence
  Synthetic oligonucleotide
tgcagcaatattgctcgatcagacactgag

SEQ ID NO: 53039 - DNA, 30 bp, Artificial Sequence
  Synthetic oligonucleotide
atacgtcagttgctgtcaggggccactgag

SEQ ID NO: 53040 - DNA, 30 bp, Artificial Sequence
  Synthetic oligonucleotide
ccatgaggtgtgatgagtgttttacctgag

SEQ ID NO: 53041 - DNA, 31 bp, Artificial Sequence
  Synthetic oligonucleotide
ctaaagctcaggataatgtggcaagcctgag

SEQ ID NO: 53042 - DNA, 30 bp, Artificial Sequence
  Synthetic oligonucleotide
gtccctgaaattacgactcacagctctgag

SEQ ID NO: 53043 - DNA, 30 bp, Artificial Sequence
  Synthetic oligonucleotide
ttgtggtctcctcaaaactcgggctctgag

SEQ ID NO: 53044 - DNA, 30 bp, Artificial Sequence
  Synthetic oligonucleotide
ggtcggtacaactggagaacataaagtgag

SEQ ID NO: 53045 - DNA, 30 bp, Artificial Sequence
  Synthetic oligonucleotide
tcgagagacagcacacgggtgttaagtgag

SEQ ID NO: 53046 - DNA, 30 bp, Artificial Sequence
  Synthetic oligonucleotide
cacaaggcaagcccaaccggccacagtgag

SEQ ID NO: 53047 - DNA, 30 bp, Artificial Sequence
  Synthetic oligonucleotide
cggcagtgggtaccaggaatcaggagtgag

SEQ ID NO: 53048 - DNA, 30 bp, Artificial Sequence
  Synthetic oligonucleotide
tgccggccttcaggcataacaattagtgag

SEQ ID NO: 53049 - DNA, 30 bp, Artificial Sequence
  Synthetic oligonucleotide
acacaggacgcccgcggcgggtgacgtgag

SEQ ID NO: 53050 - DNA, 30 bp, Artificial Sequence
  Synthetic oligonucleotide
ctgctagcgcctggcaagatagcccgtgag

SEQ ID NO: 53051 - DNA, 30 bp, Artificial Sequence
  Synthetic oligonucleotide
tactagccgaccccgcctccaagtcgtgag

SEQ ID NO: 53052 - DNA, 30 bp, Artificial Sequence
  Synthetic oligonucleotide
atggtaaaccgccgatctgatgccggtgag

SEQ ID NO: 53053 - DNA, 30 bp, Artificial Sequence
  Synthetic oligonucleotide
agggcagtgccttgactattaggtggtgag

SEQ ID NO: 53054 - DNA, 30 bp, Artificial Sequence
  Synthetic oligonucleotide
aaggagggcagtagcgctattctgtgtgag

SEQ ID NO: 53055 - DNA, 30 bp, Artificial Sequence
  Synthetic oligonucleotide
caagaacggcagcctagcggaatgattgag

SEQ ID NO: 53056 - DNA, 30 bp, Artificial Sequence
  Synthetic oligonucleotide
ttgcgttacatgggtcggttctaacttgag

SEQ ID NO: 53057 - DNA, 30 bp, Artificial Sequence
  Synthetic oligonucleotide
cgtactcaagggctgtagatgtttgttgag

SEQ ID NO: 53058 - DNA, 30 bp, Artificial Sequence
  Synthetic oligonucleotide
tcgaacgatcagggctgcgcaacaaaatag

SEQ ID NO: 53059 - DNA, 30 bp, Artificial Sequence
  Synthetic oligonucleotide
ttagtacatgcacggccgggaacgaaatag

SEQ ID NO: 53060 - DNA, 30 bp, Artificial Sequence
  Synthetic oligonucleotide
acaacctcaggtcattagggcaataaatag

SEQ ID NO: 53061 - DNA, 30 bp, Artificial Sequence
  Synthetic oligonucleotide
gcgaaggagcacacacgaggacgggaatag

SEQ ID NO: 53062 - DNA, 30 bp, Artificial Sequence
  Synthetic oligonucleotide
agcataggacaaaagaaactcggttaatag

SEQ ID NO: 53063 - DNA, 30 bp, Artificial Sequence
  Synthetic oligonucleotide
tagcggtgtcctgcgaagacggcgacatag

SEQ ID NO: 53064 - DNA, 30 bp, Artificial Sequence
  Synthetic oligonucleotide
aggcagttcaagagctaaatcgttacatag

SEQ ID NO: 53065 - DNA, 30 bp, Artificial Sequence
  Synthetic oligonucleotide
ccgtgtactgtctcggatcaatggccatag

SEQ ID NO: 53066 - DNA, 30 bp, Artificial Sequence
  Synthetic oligonucleotide
tatgccccgccatgcgacacaatatcatag

SEQ ID NO: 53067 - DNA, 30 bp, Artificial Sequence
  Synthetic oligonucleotide
tggttcacacgaggttgccggatctcatag

SEQ ID NO: 53068 - DNA, 30 bp, Artificial Sequence
  Synthetic oligonucleotide
acccataggaaagtctacaatcggagatag

SEQ ID NO: 53069 - DNA, 30 bp, Artificial Sequence
  Synthetic oligonucleotide
ttgtggcagatggtggaccgtgctagatag

SEQ ID NO: 53070 - DNA, 30 bp, Artificial Sequence
  Synthetic oligonucleotide
ccggtactcataaacaccgtctaacgatag

SEQ ID NO: 53071 - DNA, 30 bp, Artificial Sequence
  Synthetic oligonucleotide
agtcaaaaacgggtatatcccgtgcgatag

SEQ ID NO: 53072 - DNA, 30 bp, Artificial Sequence
  Synthetic oligonucleotide
ccagtaagctacattataccctagggatag

SEQ ID NO: 53073 - DNA, 30 bp, Artificial Sequence
  Synthetic oligonucleotide
aggcgcatccttacgagaacgatgggatag

SEQ ID NO: 53074 - DNA, 30 bp, Artificial Sequence
  Synthetic oligonucleotide
ccgactgaagggagcaaaatgcgcatatag

SEQ ID NO: 53075 - DNA, 30 bp, Artificial Sequence
  Synthetic oligonucleotide
cggatagttacaacggaatttaatctatag

SEQ ID NO: 53076 - DNA, 30 bp, Artificial Sequence
  Synthetic oligonucleotide
tgagcaaaagcgatgcgataaaccgtatag

SEQ ID NO: 53077 - DNA, 30 bp, Artificial Sequence
  Synthetic oligonucleotide
cgtatctcagcggctagctgtgcggtatag

SEQ ID NO: 53078 - DNA, 30 bp, Artificial Sequence
  Synthetic oligonucleotide
ggtggcgacagcgtcatcaggactgtatag

SEQ ID NO: 53079 - DNA, 30 bp, Artificial Sequence
  Synthetic oligonucleotide
ccggaactatacagctaaatgcgcttatag

SEQ ID NO: 53080 - DNA, 30 bp, Artificial Sequence
  Synthetic oligonucleotide
acactccgactaactatcccgaagttatag

SEQ ID NO: 53081 - DNA, 30 bp, Artificial Sequence
  Synthetic oligonucleotide
taggcgacggggcgcttatcaagaaactag

SEQ ID NO: 53082 - DNA, 30 bp, Artificial Sequence
  Synthetic oligonucleotide
aagggctaacggggtggtgtggcggactag

SEQ ID NO: 53083 - DNA, 30 bp, Artificial Sequence
  Synthetic oligonucleotide
tggatgaccgactcgatgcccgtatactag

SEQ ID NO: 53084 - DNA, 30 bp, Artificial Sequence
  Synthetic oligonucleotide
gggactgcgagactttctctagcttactag

SEQ ID NO: 53085 - DNA, 30 bp, Artificial Sequence
  Synthetic oligonucleotide
gtgaggagtaaccgggtaaacataccctag

SEQ ID NO: 53086 - DNA, 30 bp, Artificial Sequence
  Synthetic oligonucleotide
gcggatgctcgcgggcccatccccccctag

SEQ ID NO: 53087 - DNA, 30 bp, Artificial Sequence
  Synthetic oligonucleotide
cggtaggcgaccgttcgagtgtctgcctag

SEQ ID NO: 53088 - DNA, 30 bp, Artificial Sequence
  Synthetic oligonucleotide
acggtgattctttacttactgaaaagctag

SEQ ID NO: 53089 - DNA, 30 bp, Artificial Sequence
  Synthetic oligonucleotide
aacgaagctggtgatacagttttaagctag

SEQ ID NO: 53090 - DNA, 30 bp, Artificial Sequence
  Synthetic oligonucleotide
tgcgcaatatttctcaggcccacgagctag

SEQ ID NO: 53091 - DNA, 30 bp, Artificial Sequence
  Synthetic oligonucleotide
cttgccggcccaggggggaaattgagctag

SEQ ID NO: 53092 - DNA, 30 bp, Artificial Sequence
  Synthetic oligonucleotide
caagaacagaaactttgtactgagggctag

SEQ ID NO: 53093 - DNA, 30 bp, Artificial Sequence
  Synthetic oligonucleotide
gggtacaccgtcgtccgcccgaactgctag

SEQ ID NO: 53094 - DNA, 30 bp, Artificial Sequence
  Synthetic oligonucleotide
cgtgatcgggccgcgaaccgttcctgctag

SEQ ID NO: 53095 - DNA, 30 bp, Artificial Sequence
  Synthetic oligonucleotide
ccgatgggggttaggagccttaattgctag

SEQ ID NO: 53096 - DNA, 30 bp, Artificial Sequence
  Synthetic oligonucleotide
aaggtctccgaacgtctaatcacaatctag

SEQ ID NO: 53097 - DNA, 30 bp, Artificial Sequence
  Synthetic oligonucleotide
aacatgccaatgtctccagaacgcgtctag

SEQ ID NO: 53098 - DNA, 30 bp, Artificial Sequence
  Synthetic oligonucleotide
cgggtccgattacaggggttgctcgtctag

SEQ ID NO: 53099 - DNA, 30 bp, Artificial Sequence
  Synthetic oligonucleotide
tgtggggtcccggccaacacctcattctag

SEQ ID NO: 53100 - DNA, 30 bp, Artificial Sequence
  Synthetic oligonucleotide
acgaaaacgttaaggtttccgttattctag

SEQ ID NO: 53101 - DNA, 30 bp, Artificial Sequence
  Synthetic oligonucleotide
taggttggaacaaaaggcggctgcttctag

SEQ ID NO: 53102 - DNA, 30 bp, Artificial Sequence
  Synthetic oligonucleotide
taaacacgaccggattgtagggcccagtag

SEQ ID NO: 53103 - DNA, 30 bp, Artificial Sequence
  Synthetic oligonucleotide
cgtaacaagttatgaacggatatgcagtag

SEQ ID NO: 53104 - DNA, 30 bp, Artificial Sequence
  Synthetic oligonucleotide
taacggcatggggtgttggattactagtag

SEQ ID NO: 53105 - DNA, 30 bp, Artificial Sequence
  Synthetic oligonucleotide
gggcaacctgttgcgtcgacatcttagtag

SEQ ID NO: 53106 - DNA, 30 bp, Artificial Sequence
  Synthetic oligonucleotide
tcggcgcgctcacgggtgtgcgtaacgtag

SEQ ID NO: 53107 - DNA, 30 bp, Artificial Sequence
  Synthetic oligonucleotide
aacacgattccgtgctgaagaagagcgtag

SEQ ID NO: 53108 - DNA, 30 bp, Artificial Sequence
  Synthetic oligonucleotide
tgagtgggaaatgagggctggcaggcgtag

SEQ ID NO: 53109 - DNA, 31 bp, Artificial Sequence
  Synthetic oligonucleotide
acagaaatgacttgaaacctggtacaggtag

SEQ ID NO: 53110 - DNA, 30 bp, Artificial Sequence
  Synthetic oligonucleotide
tctccagtcaccagaggtctgggcaggtag

SEQ ID NO: 53111 - DNA, 30 bp, Artificial Sequence
  Synthetic oligonucleotide
acaacgatgtactaatatggacaccggtag

SEQ ID NO: 53112 - DNA, 30 bp, Artificial Sequence
  Synthetic oligonucleotide
gatgtagggaccgggctagtgaaagggtag

SEQ ID NO: 53113 - DNA, 30 bp, Artificial Sequence
  Synthetic oligonucleotide
ccgatacctgttgtaaacggcctagggtag

SEQ ID NO: 53114 - DNA, 30 bp, Artificial Sequence
  Synthetic oligonucleotide
acttaagacatgcccatctaaatttggtag

SEQ ID NO: 53115 - DNA, 30 bp, Artificial Sequence
  Synthetic oligonucleotide
acgtcggtccatctggaggaaggagtgtag

SEQ ID NO: 53116 - DNA, 30 bp, Artificial Sequence
  Synthetic oligonucleotide
agcgattaccagggtaaattaatagtgtag

SEQ ID NO: 53117 - DNA, 30 bp, Artificial Sequence
  Synthetic oligonucleotide
tgacccgctaataagagcgaaacgttgtag

SEQ ID NO: 53118 - DNA, 30 bp, Artificial Sequence
  Synthetic oligonucleotide
ctcagacaaactacaaggctaacgaattag

SEQ ID NO: 53119 - DNA, 30 bp, Artificial Sequence
  Synthetic oligonucleotide
cgttacagagtcgagacaatacgtcattag

SEQ ID NO: 53120 - DNA, 31 bp, Artificial Sequence
  Synthetic oligonucleotide
atgacgacacatgctgacctccctagattag

SEQ ID NO: 53121 - DNA, 30 bp, Artificial Sequence
  Synthetic oligonucleotide
tcagatagatcgtggtgaatccttacttag

SEQ ID NO: 53122 - DNA, 30 bp, Artificial Sequence
  Synthetic oligonucleotide
ccaacggaagggggacaggcgtaaccttag

SEQ ID NO: 53123 - DNA, 30 bp, Artificial Sequence
  Synthetic oligonucleotide
gggcgatccattttgcgtacattggcttag

SEQ ID NO: 53124 - DNA, 30 bp, Artificial Sequence
  Synthetic oligonucleotide
gaacccgacgaactgatagcaggaagttag

SEQ ID NO: 53125 - DNA, 30 bp, Artificial Sequence
  Synthetic oligonucleotide
gccgtcaatcgcagttaaaagtccagttag

SEQ ID NO: 53126 - DNA, 30 bp, Artificial Sequence
  Synthetic oligonucleotide
tcgaagtgtatgcatatctctgctagttag

SEQ ID NO: 53127 - DNA, 30 bp, Artificial Sequence
  Synthetic oligonucleotide
gcagagctgtggggacaacataagcgttag

SEQ ID NO: 53128 - DNA, 30 bp, Artificial Sequence
  Synthetic oligonucleotide
ggttcaccaagagtcggcggataaggttag

SEQ ID NO: 53129 - DNA, 30 bp, Artificial Sequence
  Synthetic oligonucleotide
gcaagtgcgtagtatttattagtaggttag

SEQ ID NO: 53130 - DNA, 30 bp, Artificial Sequence
  Synthetic oligonucleotide
cctagtcacgcgaagaattagtaatgttag

SEQ ID NO: 53131 - DNA, 30 bp, Artificial Sequence
  Synthetic oligonucleotide
aactaaaatgaagatggtgtggactgttag

SEQ ID NO: 53132 - DNA, 30 bp, Artificial Sequence
  Synthetic oligonucleotide
ggacaagtttgaacaggttgggatatttag

SEQ ID NO: 53133 - DNA, 30 bp, Artificial Sequence
  Synthetic oligonucleotide
agaggacgatacaacgggagcgttctttag

SEQ ID NO: 53134 - DNA, 30 bp, Artificial Sequence
  Synthetic oligonucleotide
acctgcggagaacgaatatccggcgtttag

SEQ ID NO: 53135 - DNA, 30 bp, Artificial Sequence
  Synthetic oligonucleotide
gctcgaagacgagaacgagtgagattttag

SEQ ID NO: 53136 - DNA, 30 bp, Artificial Sequence
  Synthetic oligonucleotide
agccggccagggttcgtaaaaaagttttag

SEQ ID NO: 53137 - DNA, 30 bp, Artificial Sequence
  Synthetic oligonucleotide
ttcggcgtagaccgccgagagacaaaaacg

SEQ ID NO: 53138 - DNA, 30 bp, Artificial Sequence
  Synthetic oligonucleotide
tgccactgctacgggataatgaggaaaacg

SEQ ID NO: 53139 - DNA, 30 bp, Artificial Sequence
  Synthetic oligonucleotide
tcatcaacccggggattaatctgtcaaacg

SEQ ID NO: 53140 - DNA, 30 bp, Artificial Sequence
  Synthetic oligonucleotide
agacagagtatatctggaacaggagaaacg

SEQ ID NO: 53141 - DNA, 30 bp, Artificial Sequence
  Synthetic oligonucleotide
cacacattacgtcgtggaatgaactaaacg

SEQ ID NO: 53142 - DNA, 30 bp, Artificial Sequence
  Synthetic oligonucleotide
tggagataacaaattgtaggattttaaacg

SEQ ID NO: 53143 - DNA, 30 bp, Artificial Sequence
  Synthetic oligonucleotide
aaccggacagggtacagatagtgcacaacg

SEQ ID NO: 53144 - DNA, 30 bp, Artificial Sequence
  Synthetic oligonucleotide
acgctacaagagtggtccttccagacaacg

SEQ ID NO: 53145 - DNA, 30 bp, Artificial Sequence
  Synthetic oligonucleotide
tctcggatgcgatagagcttgaggacaacg

SEQ ID NO: 53146 - DNA, 30 bp, Artificial Sequence
  Synthetic oligonucleotide
caaaagcgcacaacgttcgctaggacaacg

SEQ ID NO: 53147 - DNA, 30 bp, Artificial Sequence
  Synthetic oligonucleotide
tggagatacatgcgtatctacgatacaacg

SEQ ID NO: 53148 - DNA, 30 bp, Artificial Sequence
  Synthetic oligonucleotide
cagtgagtgtccgccagggatgtgccaacg

SEQ ID NO: 53149 - DNA, 30 bp, Artificial Sequence
  Synthetic oligonucleotide
ggtacgtgcgtaatgaaaccaggtccaacg

SEQ ID NO: 53150 - DNA, 30 bp, Artificial Sequence
  Synthetic oligonucleotide
cggactcgccaccggctcgaataagcaacg

SEQ ID NO: 53151 - DNA, 30 bp, Artificial Sequence
  Synthetic oligonucleotide
gggttagtgatgaaagctgatttcgcaacg

SEQ ID NO: 53152 - DNA, 30 bp, Artificial Sequence
  Synthetic oligonucleotide
tgtaagatacgaaattggtccaatgcaacg

SEQ ID NO: 53153 - DNA, 30 bp, Artificial Sequence
  Synthetic oligonucleotide
cacactccccgacgaaaatcgggtgcaacg

SEQ ID NO: 53154 - DNA, 30 bp, Artificial Sequence
  Synthetic oligonucleotide
agaaagccagaagtatccgcatcatcaacg

SEQ ID NO: 53155 - DNA, 30 bp, Artificial Sequence
  Synthetic oligonucleotide
gtgggcagtagacatagtcgaatgtcaacg

SEQ ID NO: 53156 - DNA, 30 bp, Artificial Sequence
  Synthetic oligonucleotide
ttcaacagcaggagggtttgcggttcaacg

SEQ ID NO: 53157 - DNA, 30 bp, Artificial Sequence
  Synthetic oligonucleotide
ccggtaaggatatggggaaacgatagaacg

SEQ ID NO: 53158 - DNA, 30 bp, Artificial Sequence
  Synthetic oligonucleotide
tggggatgagtaactctgaagaaccgaacg

SEQ ID NO: 53159 - DNA, 30 bp, Artificial Sequence
  Synthetic oligonucleotide
ggcgtaaattaggcaggatcttcttgaacg

SEQ ID NO: 53160 - DNA, 30 bp, Artificial Sequence
  Synthetic oligonucleotide
aacgaaatccaaaacgctgaatggttaacg

SEQ ID NO: 53161 - DNA, 30 bp, Artificial Sequence
  Synthetic oligonucleotide
gcttagtgacacccgagtctgtagaacacg

SEQ ID NO: 53162 - DNA, 30 bp, Artificial Sequence
  Synthetic oligonucleotide
tcagtagtaagtacacttcccgcacacacg

SEQ ID NO: 53163 - DNA, 30 bp, Artificial Sequence
  Synthetic oligonucleotide
tacggctgcgggaaaagtgaagttcacacg

SEQ ID NO: 53164 - DNA, 30 bp, Artificial Sequence
  Synthetic oligonucleotide
ctgcccaaatatagccaatacacttacacg

SEQ ID NO: 53165 - DNA, 30 bp, Artificial Sequence
  Synthetic oligonucleotide
tacgtaaaatgctgccgatcggcaaccacg

SEQ ID NO: 53166 - DNA, 30 bp, Artificial Sequence
  Synthetic oligonucleotide
aagtaacgcaaccgaaagcctgagaccacg

SEQ ID NO: 53167 - DNA, 30 bp, Artificial Sequence
  Synthetic oligonucleotide
gtacaaatcgcatcacaaccagcacccacg

SEQ ID NO: 53168 - DNA, 30 bp, Artificial Sequence
  Synthetic oligonucleotide
gaaagcctcgtgaagatacatgaccccacg

SEQ ID NO: 53169 - DNA, 30 bp, Artificial Sequence
  Synthetic oligonucleotide
atactcatatagaaacagaggacccccacg

SEQ ID NO: 53170 - DNA, 30 bp, Artificial Sequence
  Synthetic oligonucleotide
ttgcggtaaacaacagcaggggatcccacg

SEQ ID NO: 53171 - DNA, 30 bp, Artificial Sequence
  Synthetic oligonucleotide
ctaaggacggttacgcaagttacatccacg

SEQ ID NO: 53172 - DNA, 30 bp, Artificial Sequence
  Synthetic oligonucleotide
actatgcgcaaccaaatcgcggagggcacg

SEQ ID NO: 53173 - DNA, 30 bp, Artificial Sequence
  Synthetic oligonucleotide
cgagcgcgagtcgttgtgagatgttgcacg

SEQ ID NO: 53174 - DNA, 30 bp, Artificial Sequence
  Synthetic oligonucleotide
gcatgatgcatcatccgaagccacatcacg

SEQ ID NO: 53175 - DNA, 30 bp, Artificial Sequence
  Synthetic oligonucleotide
tcaaagaaatcacattcgcgccgcatcacg

SEQ ID NO: 53176 - DNA, 30 bp, Artificial Sequence
  Synthetic oligonucleotide
cacttcaaatcaagctggaggcgcgtcacg

SEQ ID NO: 53177 - DNA, 30 bp, Artificial Sequence
  Synthetic oligonucleotide
aggttcattgcggtcggaaagactgtcacg

SEQ ID NO: 53178 - DNA, 30 bp, Artificial Sequence
  Synthetic oligonucleotide
cgtaagtaaccacagcagacagcgttcacg

SEQ ID NO: 53179 - DNA, 30 bp, Artificial Sequence
  Synthetic oligonucleotide
gatggacaacatcagcttggcaccaagacg

SEQ ID NO: 53180 - DNA, 30 bp, Artificial Sequence
  Synthetic oligonucleotide
cgaggaaccgactatcaggtccagaagacg

SEQ ID NO: 53181 - DNA, 30 bp, Artificial Sequence
  Synthetic oligonucleotide
tacacgttcataaactggagcggtcagacg

SEQ ID NO: 53182 - DNA, 30 bp, Artificial Sequence
  Synthetic oligonucleotide
gttacagtacgatcaatacctagagagacg

SEQ ID NO: 53183 - DNA, 30 bp, Artificial Sequence
  Synthetic oligonucleotide
gtccaatgatacggagatgtaggcgagacg

SEQ ID NO: 53184 - DNA, 30 bp, Artificial Sequence
  Synthetic oligonucleotide
agccgggggagtgctaaccgatgggagacg

SEQ ID NO: 53185 - DNA, 30 bp, Artificial Sequence
  Synthetic oligonucleotide
ctacaaccaggtggaattctacgagcgacg

SEQ ID NO: 53186 - DNA, 30 bp, Artificial Sequence
  Synthetic oligonucleotide
ggacgggaggaatggcatgcgttcgcgacg

SEQ ID NO: 53187 - DNA, 30 bp, Artificial Sequence
  Synthetic oligonucleotide
catgttgacattcctccgggaaagaggacg

SEQ ID NO: 53188 - DNA, 30 bp, Artificial Sequence
  Synthetic oligonucleotide
taaaagtgaacctgtggtagagttaggacg

SEQ ID NO: 53189 - DNA, 30 bp, Artificial Sequence
  Synthetic oligonucleotide
cagacggcaattactgcaaaggcccggacg

SEQ ID NO: 53190 - DNA, 30 bp, Artificial Sequence
  Synthetic oligonucleotide
caagcctgtagctcgcgtgtaggagggacg

SEQ ID NO: 53191 - DNA, 30 bp, Artificial Sequence
  Synthetic oligonucleotide
acaatagcacaggtaatactgatagggacg

SEQ ID NO: 53192 - DNA, 30 bp, Artificial Sequence
  Synthetic oligonucleotide
gcctaagcgatcagtggcggactggggacg

SEQ ID NO: 53193 - DNA, 30 bp, Artificial Sequence
  Synthetic oligonucleotide
gtcgggaggcaagaatgagcttgttggacg

SEQ ID NO: 53194 - DNA, 30 bp, Artificial Sequence
  Synthetic oligonucleotide
tagacatcagaagagtaatgacgtctgacg

SEQ ID NO: 53195 - DNA, 30 bp, Artificial Sequence
  Synthetic oligonucleotide
tccaaggcatcatgtgtgacaacgttgacg

SEQ ID NO: 53196 - DNA, 30 bp, Artificial Sequence
  Synthetic oligonucleotide
cctccttgcaacaaaaggcataggaatacg

SEQ ID NO: 53197 - DNA, 30 bp, Artificial Sequence
  Synthetic oligonucleotide
gcgtcgagcggcgttactcagcctaatacg

SEQ ID NO: 53198 - DNA, 30 bp, Artificial Sequence
  Synthetic oligonucleotide
cgtgaatctgagatgattccgatggatacg

SEQ ID NO: 53199 - DNA, 30 bp, Artificial Sequence
  Synthetic oligonucleotide
cttgacggccaatgtaagtgagcatatacg

SEQ ID NO: 53200 - DNA, 30 bp, Artificial Sequence
  Synthetic oligonucleotide
accacgggggcaacgatgtttcgatatacg

SEQ ID NO: 53201 - DNA, 30 bp, Artificial Sequence
  Synthetic oligonucleotide
aggagagatgacagattatgagtgtatacg

SEQ ID NO: 53202 - DNA, 30 bp, Artificial Sequence
  Synthetic oligonucleotide
aggaggtgatccctttgtcctcattatacg

SEQ ID NO: 53203 - DNA, 30 bp, Artificial Sequence
  Synthetic oligonucleotide
cgatagcggcgatggcccgggaacactacg

SEQ ID NO: 53204 - DNA, 30 bp, Artificial Sequence
  Synthetic oligonucleotide
cgaggactaatcacccatctggacactacg

SEQ ID NO: 53205 - DNA, 30 bp, Artificial Sequence
  Synthetic oligonucleotide
attaaagcgatgaacagggaaggccctacg

SEQ ID NO: 53206 - DNA, 30 bp, Artificial Sequence
  Synthetic oligonucleotide
cccgaaacgacgaggacttcataaagtacg

SEQ ID NO: 53207 - DNA, 30 bp, Artificial Sequence
  Synthetic oligonucleotide
ggcaataaaggctggcttgcaggaagtacg

SEQ ID NO: 53208 - DNA, 30 bp, Artificial Sequence
  Synthetic oligonucleotide
tcacttcgggcacgggagtttggaagtacg

SEQ ID NO: 53209 - DNA, 29 bp, Artificial Sequence
  Synthetic oligonucleotide
ttggctcgagcaggtcagaatatagtacg

SEQ ID NO: 53210 - DNA, 30 bp, Artificial Sequence
  Synthetic oligonucleotide
taacgtgaaaggagactcatcaagcgtacg

SEQ ID NO: 53211 - DNA, 30 bp, Artificial Sequence
  Synthetic oligonucleotide
agaaaccttgaaaccggatggcaaggtacg

SEQ ID NO: 53212 - DNA, 30 bp, Artificial Sequence
  Synthetic oligonucleotide
tagcgatcggaacgggagtgaataggtacg

SEQ ID NO: 53213 - DNA, 30 bp, Artificial Sequence
  Synthetic oligonucleotide
cgcaatcctaactcgtagagcatcggtacg

SEQ ID NO: 53214 - DNA, 30 bp, Artificial Sequence
  Synthetic oligonucleotide
ggggaaaggagaatagcacctgatggtacg

SEQ ID NO: 53215 - DNA, 30 bp, Artificial Sequence
  Synthetic oligonucleotide
gtatgtggacgaggacgggatgcatgtacg

SEQ ID NO: 53216 - DNA, 29 bp, Artificial Sequence
  Synthetic oligonucleotide
caactagaacagatcggagtgtcattacg

SEQ ID NO: 53217 - DNA, 30 bp, Artificial Sequence
  Synthetic oligonucleotide
acgtacacactggcctgtgagcggattacg

SEQ ID NO: 53218 - DNA, 30 bp, Artificial Sequence
  Synthetic oligonucleotide
acaaggtaagccaccagaacatctattacg

SEQ ID NO: 53219 - DNA, 30 bp, Artificial Sequence
  Synthetic oligonucleotide
acggacttgaggataatccgataagttacg

SEQ ID NO: 53220 - DNA, 30 bp, Artificial Sequence
  Synthetic oligonucleotide
aactcaacaagcggggcatcgggaaaaccg

SEQ ID NO: 53221 - DNA, 30 bp, Artificial Sequence
  Synthetic oligonucleotide
tacaaaaggtcagactgcgcggacaaaccg

SEQ ID NO: 53222 - DNA, 30 bp, Artificial Sequence
  Synthetic oligonucleotide
ctgggacatttgatcgtgcaatcccaaccg

SEQ ID NO: 53223 - DNA, 30 bp, Artificial Sequence
  Synthetic oligonucleotide
acgaaggccacaaatttagttgtagaaccg

SEQ ID NO: 53224 - DNA, 30 bp, Artificial Sequence
  Synthetic oligonucleotide
cgtactaaaaagaatatgggccagtaaccg

SEQ ID NO: 53225 - DNA, 30 bp, Artificial Sequence
  Synthetic oligonucleotide
aatgaatcactccttataccagttagaccg

SEQ ID NO: 53226 - DNA, 30 bp, Artificial Sequence
  Synthetic oligonucleotide
aacggaatatagcctgtctggcgacgaccg

SEQ ID NO: 53227 - DNA, 30 bp, Artificial Sequence
  Synthetic oligonucleotide
aacagctttaacacaaaccacgtgggaccg

SEQ ID NO: 53228 - DNA, 27 bp, Artificial Sequence
  Synthetic oligonucleotide
agtgagttcacgcaaacagacataccg

SEQ ID NO: 53229 - DNA, 30 bp, Artificial Sequence
  Synthetic oligonucleotide
tagacaggaaaagaagaattcagtgtaccg

SEQ ID NO: 53230 - DNA, 30 bp, Artificial Sequence
  Synthetic oligonucleotide
gtagtgaacccaagacctagaaacaacccg

SEQ ID NO: 53231 - DNA, 30 bp, Artificial Sequence
  Synthetic oligonucleotide
agagggaatcctgtccgatgttgagacccg

SEQ ID NO: 53232 - DNA, 30 bp, Artificial Sequence
  Synthetic oligonucleotide
aaagcgaaggtcattattcaagcttacccg

SEQ ID NO: 53233 - DNA, 30 bp, Artificial Sequence
  Synthetic oligonucleotide
ggagggaagtcatagacaaatgccaccccg

SEQ ID NO: 53234 - DNA, 30 bp, Artificial Sequence
  Synthetic oligonucleotide
cagcgtccaggtacgatcttgactcccccg

SEQ ID NO: 53235 - DNA, 30 bp, Artificial Sequence
  Synthetic oligonucleotide
gttaaagagcagagatctgagaggtgcccg

SEQ ID NO: 53236 - DNA, 30 bp, Artificial Sequence
  Synthetic oligonucleotide
tgagtcagattagcatgtaagcggtgcccg

SEQ ID NO: 53237 - DNA, 31 bp, Artificial Sequence
  Synthetic oligonucleotide
taaggcttcgaggtgccaaagtttgttcccg

SEQ ID NO: 53238 - DNA, 30 bp, Artificial Sequence
  Synthetic oligonucleotide
gcaaggatttagctcaagccggaggcgccg

SEQ ID NO: 53239 - DNA, 30 bp, Artificial Sequence
  Synthetic oligonucleotide
tactgcgaacatttcggcacacaggggccg

SEQ ID NO: 53240 - DNA, 30 bp, Artificial Sequence
  Synthetic oligonucleotide
gactgggtgcgggaggaacttaaactgccg

SEQ ID NO: 53241 - DNA, 30 bp, Artificial Sequence
  Synthetic oligonucleotide
gatgagtgagacttaccattcaaggtgccg

SEQ ID NO: 53242 - DNA, 30 bp, Artificial Sequence
  Synthetic oligonucleotide
tgagatcagaacttcccggcctataatccg

SEQ ID NO: 53243 - DNA, 30 bp, Artificial Sequence
  Synthetic oligonucleotide
ctaagtccaggaaggtaaatgttggatccg

SEQ ID NO: 53244 - DNA, 30 bp, Artificial Sequence
  Synthetic oligonucleotide
accgttacggagtggtgctgatatgatccg

SEQ ID NO: 53245 - DNA, 30 bp, Artificial Sequence
  Synthetic oligonucleotide
aaagtcggagacacattagagctcactccg

SEQ ID NO: 53246 - DNA, 30 bp, Artificial Sequence
  Synthetic oligonucleotide
acagcaactgttaaaaagttgcagactccg

SEQ ID NO: 53247 - DNA, 30 bp, Artificial Sequence
  Synthetic oligonucleotide
tacgaaatgggtagcatgattggccctccg

SEQ ID NO: 53248 - DNA, 30 bp, Artificial Sequence
  Synthetic oligonucleotide
tcggatctgtcatcgatctgtgagcctccg

SEQ ID NO: 53249 - DNA, 30 bp, Artificial Sequence
  Synthetic oligonucleotide
cattcgccaaaggtggaaacgggaagtccg

SEQ ID NO: 53250 - DNA, 30 bp, Artificial Sequence
  Synthetic oligonucleotide
accgggttaacatagggcagatagcgtccg

SEQ ID NO: 53251 - DNA, 30 bp, Artificial Sequence
  Synthetic oligonucleotide
acaatagttcaccagaaaataccgcgtccg

SEQ ID NO: 53252 - DNA, 30 bp, Artificial Sequence
  Synthetic oligonucleotide
gaggtcgaacgtggagtgatcctgggtccg

SEQ ID NO: 53253 - DNA, 30 bp, Artificial Sequence
  Synthetic oligonucleotide
tagatgacaccaacgacgagcgtgtgtccg

SEQ ID NO: 53254 - DNA, 30 bp, Artificial Sequence
  Synthetic oligonucleotide
gggccgcgccctgcatgcggaacaattccg

SEQ ID NO: 53255 - DNA, 30 bp, Artificial Sequence
  Synthetic oligonucleotide
tagaacaccaaggaccacttggcaattccg

SEQ ID NO: 53256 - DNA, 30 bp, Artificial Sequence
  Synthetic oligonucleotide
tgccacgagcgtaaacagttcgtgattccg

SEQ ID NO: 53257 - DNA, 30 bp, Artificial Sequence
  Synthetic oligonucleotide
gcgtgtctagaagcaccactcccccttccg

SEQ ID NO: 53258 - DNA, 30 bp, Artificial Sequence
  Synthetic oligonucleotide
tgtcgacaaggtgtggcgggggtcaaagcg

SEQ ID NO: 53259 - DNA, 30 bp, Artificial Sequence
  Synthetic oligonucleotide
tgctaacaaatagatgccgttgagcaagcg

SEQ ID NO: 53260 - DNA, 30 bp, Artificial Sequence
  Synthetic oligonucleotide
ggtatgtagccgcagggaaacaaagaagcg

SEQ ID NO: 53261 - DNA, 30 bp, Artificial Sequence
  Synthetic oligonucleotide
gcggtagaagtgatcagtactgcagaagcg

SEQ ID NO: 53262 - DNA, 30 bp, Artificial Sequence
  Synthetic oligonucleotide
aaaacatgcgggacagtccacctagaagcg

SEQ ID NO: 53263 - DNA, 30 bp, Artificial Sequence
  Synthetic oligonucleotide
tggagctggcgttatataagggtcgaagcg

SEQ ID NO: 53264 - DNA, 30 bp, Artificial Sequence
  Synthetic oligonucleotide
tcagattaaggcaggccctcgtgaacagcg

SEQ ID NO: 53265 - DNA, 30 bp, Artificial Sequence
  Synthetic oligonucleotide
ataaggaccgactacaacacgttcacagcg

SEQ ID NO: 53266 - DNA, 30 bp, Artificial Sequence
  Synthetic oligonucleotide
agacgccgctaatatatcagagggccagcg

SEQ ID NO: 53267 - DNA, 30 bp, Artificial Sequence
  Synthetic oligonucleotide
aagcccgacttaattccgaaggctccagcg

SEQ ID NO: 53268 - DNA, 30 bp, Artificial Sequence
  Synthetic oligonucleotide
cagggggtaaaattaggagctagtccagcg

SEQ ID NO: 53269 - DNA, 30 bp, Artificial Sequence
  Synthetic oligonucleotide
catccgtggaaccacaggattattccagcg

SEQ ID NO: 53270 - DNA, 30 bp, Artificial Sequence
  Synthetic oligonucleotide
ataaaaagtggcatagggtgaaaatcagcg

SEQ ID NO: 53271 - DNA, 30 bp, Artificial Sequence
  Synthetic oligonucleotide
agtccagtattaaaacagtctacatcagcg

SEQ ID NO: 53272 - DNA, 30 bp, Artificial Sequence
  Synthetic oligonucleotide
tttcaaaaggcaagcgacaccgcatcagcg

SEQ ID NO: 53273 - DNA, 30 bp, Artificial Sequence
  Synthetic oligonucleotide
gatcgcgggaggtcctcgggtatgtcagcg

SEQ ID NO: 53274 - DNA, 30 bp, Artificial Sequence
  Synthetic oligonucleotide
gggaagcttctaagtcaccctgccagagcg

SEQ ID NO: 53275 - DNA, 30 bp, Artificial Sequence
  Synthetic oligonucleotide
catgtactgtccaaacacctagatagagcg

SEQ ID NO: 53276 - DNA, 30 bp, Artificial Sequence
  Synthetic oligonucleotide
cgatgattaggagaaactcaacggcgagcg

SEQ ID NO: 53277 - DNA, 30 bp, Artificial Sequence
  Synthetic oligonucleotide
tcgtcacttctcgacgtatgatagggagcg

SEQ ID NO: 53278 - DNA, 30 bp, Artificial Sequence
  Synthetic oligonucleotide
gtaaaagatctagaactctccctctgagcg

SEQ ID NO: 53279 - DNA, 30 bp, Artificial Sequence
  Synthetic oligonucleotide
gatgtggaggtgataagggcactgtgagcg

SEQ ID NO: 53280 - DNA, 30 bp, Artificial Sequence
  Synthetic oligonucleotide
cgatcgggagtctgcgtgtcgccagtagcg

SEQ ID NO: 53281 - DNA, 30 bp, Artificial Sequence
  Synthetic oligonucleotide
cgggaacgataataaggttagtacgtagcg

SEQ ID NO: 53282 - DNA, 30 bp, Artificial Sequence
  Synthetic oligonucleotide
accaaccatccgagttgcgtactggtagcg

SEQ ID NO: 53283 - DNA, 30 bp, Artificial Sequence
  Synthetic oligonucleotide
ctggcagaactgactaggccgtctgtagcg

SEQ ID NO: 53284 - DNA, 30 bp, Artificial Sequence
  Synthetic oligonucleotide
acgagttgttcgtcggacttctgattagcg

SEQ ID NO: 53285 - DNA, 30 bp, Artificial Sequence
  Synthetic oligonucleotide
gggcccacgtctactacagccagcttagcg

SEQ ID NO: 53286 - DNA, 30 bp, Artificial Sequence
  Synthetic oligonucleotide
aaggagcgggagtttaatccgagtttagcg

SEQ ID NO: 53287 - DNA, 30 bp, Artificial Sequence
  Synthetic oligonucleotide
tggatacaatccgaagtgatgcacaacgcg

SEQ ID NO: 53288 - DNA, 30 bp, Artificial Sequence
  Synthetic oligonucleotide
ggcagaccgtaagtcgtcctaaccaacgcg

SEQ ID NO: 53289 - DNA, 30 bp, Artificial Sequence
  Synthetic oligonucleotide
cagaccacaatagtgtcatgaagtaccgcg

SEQ ID NO: 53290 - DNA, 30 bp, Artificial Sequence
  Synthetic oligonucleotide
cgtaactatggcgtagctcaggaacccgcg

SEQ ID NO: 53291 - DNA, 30 bp, Artificial Sequence
  Synthetic oligonucleotide
gtggactgtaagatggacactactgccgcg

SEQ ID NO: 53292 - DNA, 30 bp, Artificial Sequence
  Synthetic oligonucleotide
acgtcacatggcggctagcatatgagcgcg

SEQ ID NO: 53293 - DNA, 30 bp, Artificial Sequence
  Synthetic oligonucleotide
caacgatgaatccggatactctcacgcgcg

SEQ ID NO: 53294 - DNA, 30 bp, Artificial Sequence
  Synthetic oligonucleotide
tggtctgaagatgataaaattgagggcgcg

SEQ ID NO: 53295 - DNA, 30 bp, Artificial Sequence
  Synthetic oligonucleotide
accattgaccgataaaatcatcagtgcgcg

SEQ ID NO: 53296 - DNA, 30 bp, Artificial Sequence
  Synthetic oligonucleotide
ctggcaagaaagaattacgaaaaaatcgcg

SEQ ID NO: 53297 - DNA, 30 bp, Artificial Sequence
  Synthetic oligonucleotide
aaagaaaaaatacctaaatcaagcatcgcg

SEQ ID NO: 53298 - DNA, 30 bp, Artificial Sequence
  Synthetic oligonucleotide
cgtaagggcgtgtagtgggttccacaggcg

SEQ ID NO: 53299 - DNA, 30 bp, Artificial Sequence
  Synthetic oligonucleotide
atggtgaaccaatctgatattctccaggcg

SEQ ID NO: 53300 - DNA, 30 bp, Artificial Sequence
  Synthetic oligonucleotide
atggtaggcttcagctatgccaatcaggcg

SEQ ID NO: 53301 - DNA, 30 bp, Artificial Sequence
  Synthetic oligonucleotide
ggatacgaaaacgagacctgagctcaggcg

SEQ ID NO: 53302 - DNA, 30 bp, Artificial Sequence
  Synthetic oligonucleotide
tcggtataacaaggcttgaactaataggcg

SEQ ID NO: 53303 - DNA, 30 bp, Artificial Sequence
  Synthetic oligonucleotide
cgacacagcatgtgagaagaaccataggcg

SEQ ID NO: 53304 - DNA, 30 bp, Artificial Sequence
  Synthetic oligonucleotide
gcctgggagcgtcgaagatcgtgataggcg

SEQ ID NO: 53305 - DNA, 30 bp, Artificial Sequence
  Synthetic oligonucleotide
cgcaggcgaagcacaacgaggtcttaggcg

SEQ ID NO: 53306 - DNA, 31 bp, Artificial Sequence
  Synthetic oligonucleotide
tccggtgaaacggcaatgactaactacggcg

SEQ ID NO: 53307 - DNA, 30 bp, Artificial Sequence
  Synthetic oligonucleotide
tttcgcgagcatactaaataagaaagggcg

SEQ ID NO: 53308 - DNA, 30 bp, Artificial Sequence
  Synthetic oligonucleotide
tgcggaacatctaaataagaccgtcgggcg

SEQ ID NO: 53309 - DNA, 30 bp, Artificial Sequence
  Synthetic oligonucleotide
ggagcggcttagaatgacacaaaaggggcg

SEQ ID NO: 53310 - DNA, 30 bp, Artificial Sequence
  Synthetic oligonucleotide
taccaaccggacgatctggggacaggggcg

SEQ ID NO: 53311 - DNA, 30 bp, Artificial Sequence
  Synthetic oligonucleotide
tctttacgcgcggaatatggaggcggggcg

SEQ ID NO: 53312 - DNA, 30 bp, Artificial Sequence
  Synthetic oligonucleotide
ataggagtcgatccgtgcgtacatatggcg

SEQ ID NO: 53313 - DNA, 30 bp, Artificial Sequence
  Synthetic oligonucleotide
catgcccgaaatcacgcaagtgcactggcg

SEQ ID NO: 53314 - DNA, 30 bp, Artificial Sequence
  Synthetic oligonucleotide
ttgaaagggaggaacaataggctagtggcg

SEQ ID NO: 53315 - DNA, 30 bp, Artificial Sequence
  Synthetic oligonucleotide
actggtgagcatcgactaaaatcgaatgcg

SEQ ID NO: 53316 - DNA, 30 bp, Artificial Sequence
  Synthetic oligonucleotide
acctacagtgggtgaactaatgtacatgcg

SEQ ID NO: 53317 - DNA, 30 bp, Artificial Sequence
  Synthetic oligonucleotide
aggcattctaatagtgacggacgggatgcg

SEQ ID NO: 53318 - DNA, 30 bp, Artificial Sequence
  Synthetic oligonucleotide
aaccaggtacacctgcagagggatgatgcg

SEQ ID NO: 53319 - DNA, 30 bp, Artificial Sequence
  Synthetic oligonucleotide
ctttgcgggcgtcataaaaggagaactgcg

SEQ ID NO: 53320 - DNA, 30 bp, Artificial Sequence
  Synthetic oligonucleotide
acggcgggaaggtaaactaaccgaactgcg

SEQ ID NO: 53321 - DNA, 30 bp, Artificial Sequence
  Synthetic oligonucleotide
ccgtgtggtcgtgagagtctaacagctgcg

SEQ ID NO: 53322 - DNA, 30 bp, Artificial Sequence
  Synthetic oligonucleotide
aagtgggggtgagacgtttatcgggctgcg

SEQ ID NO: 53323 - DNA, 30 bp, Artificial Sequence
  Synthetic oligonucleotide
ccatactgtggaagtcgcgaagtggctgcg

SEQ ID NO: 53324 - DNA, 30 bp, Artificial Sequence
  Synthetic oligonucleotide
agtgcataaggatcatttgaaacatctgcg

SEQ ID NO: 53325 - DNA, 30 bp, Artificial Sequence
  Synthetic oligonucleotide
gtccgaccaactacaaccccctagagtgcg

SEQ ID NO: 53326 - DNA, 30 bp, Artificial Sequence
  Synthetic oligonucleotide
catcagggtgaaaaaactctctaaggtgcg

SEQ ID NO: 53327 - DNA, 30 bp, Artificial Sequence
  Synthetic oligonucleotide
cttaatttagtcaaagtaagtgcgggtgcg

SEQ ID NO: 53328 - DNA, 30 bp, Artificial Sequence
  Synthetic oligonucleotide
caatgatctagggtaccgattgcgtttgcg

SEQ ID NO: 53329 - DNA, 30 bp, Artificial Sequence
  Synthetic oligonucleotide
taacagggatagtccatcgatttcaaatcg

SEQ ID NO: 53330 - DNA, 30 bp, Artificial Sequence
  Synthetic oligonucleotide
gggaagcgagattaaactgtacgacaatcg

SEQ ID NO: 53331 - DNA, 30 bp, Artificial Sequence
  Synthetic oligonucleotide
taagcgtatctgataagagaaaagcaatcg

SEQ ID NO: 53332 - DNA, 30 bp, Artificial Sequence
  Synthetic oligonucleotide
aggatacgactcggataggttacgcaatcg

SEQ ID NO: 53333 - DNA, 30 bp, Artificial Sequence
  Synthetic oligonucleotide
tgataatgggaggcacctcgaggtcaatcg

SEQ ID NO: 53334 - DNA, 30 bp, Artificial Sequence
  Synthetic oligonucleotide
aggccttgctcacgtggcaataaggaatcg

SEQ ID NO: 53335 - DNA, 30 bp, Artificial Sequence
  Synthetic oligonucleotide
caacaatgggggtccatcgcatgttaatcg

SEQ ID NO: 53336 - DNA, 30 bp, Artificial Sequence
  Synthetic oligonucleotide
tgtggatatgaagaagtccagagtacatcg

SEQ ID NO: 53337 - DNA, 30 bp, Artificial Sequence
  Synthetic oligonucleotide
gctcggtttcaaaattctagagaaccatcg

SEQ ID NO: 53338 - DNA, 30 bp, Artificial Sequence
  Synthetic oligonucleotide
ctgctagccctagtagtgggatatccatcg

SEQ ID NO: 53339 - DNA, 30 bp, Artificial Sequence
  Synthetic oligonucleotide
ttgacgagaccatgttcgtgacgtccatcg

SEQ ID NO: 53340 - DNA, 30 bp, Artificial Sequence
  Synthetic oligonucleotide
gccaggaatcggggaaacagggaggcatcg

SEQ ID NO: 53341 - DNA, 30 bp, Artificial Sequence
  Synthetic oligonucleotide
tcaaagggagatgagtcggtcccatcatcg

SEQ ID NO: 53342 - DNA, 30 bp, Artificial Sequence
  Synthetic oligonucleotide
tcagcgaacggggcatgcacccgatcatcg

SEQ ID NO: 53343 - DNA, 30 bp, Artificial Sequence
  Synthetic oligonucleotide
tggaagagtttgttccggcagtagagatcg

SEQ ID NO: 53344 - DNA, 30 bp, Artificial Sequence
  Synthetic oligonucleotide
gtacgaaaggggtggggctatgtgagatcg

SEQ ID NO: 53345 - DNA, 30 bp, Artificial Sequence
  Synthetic oligonucleotide
gataacaggcgcgaaatagcgtaccgatcg

SEQ ID NO: 53346 - DNA, 30 bp, Artificial Sequence
  Synthetic oligonucleotide
tactctggtccgcggtaaaccacaggatcg

SEQ ID NO: 53347 - DNA, 30 bp, Artificial Sequence
  Synthetic oligonucleotide
agccgagtaagggcactactgagaggatcg

SEQ ID NO: 53348 - DNA, 30 bp, Artificial Sequence
  Synthetic oligonucleotide
tcggtccaacgagaggtcgtagggggatcg

SEQ ID NO: 53349 - DNA, 30 bp, Artificial Sequence
  Synthetic oligonucleotide
ggttccgggtcagaagacatgggttgatcg

SEQ ID NO: 53350 - DNA, 30 bp, Artificial Sequence
  Synthetic oligonucleotide
agattctaaggtgatagccgcgaagtatcg

SEQ ID NO: 53351 - DNA, 30 bp, Artificial Sequence
  Synthetic oligonucleotide
ccttgtcgataggtcaacataggcgtatcg

SEQ ID NO: 53352 - DNA, 30 bp, Artificial Sequence
  Synthetic oligonucleotide
aactgactcaaggagcatccagcaaactcg

SEQ ID NO: 53353 - DNA, 30 bp, Artificial Sequence
  Synthetic oligonucleotide
gcgaattcacacacaggtactcgtaactcg

SEQ ID NO: 53354 - DNA, 30 bp, Artificial Sequence
  Synthetic oligonucleotide
tagcgataagaaccaaacgccgcacactcg

SEQ ID NO: 53355 - DNA, 30 bp, Artificial Sequence
  Synthetic oligonucleotide
acaagcaaaaattacctagattcagactcg

SEQ ID NO: 53356 - DNA, 30 bp, Artificial Sequence
  Synthetic oligonucleotide
ctcggtagtaaacggaacctaactgactcg

SEQ ID NO: 53357 - DNA, 30 bp, Artificial Sequence
  Synthetic oligonucleotide
tcatcgcgttgattattgactccgtactcg

SEQ ID NO: 53358 - DNA, 30 bp, Artificial Sequence
  Synthetic oligonucleotide
cgatatggctcttaggatcattggccctcg

SEQ ID NO: 53359 - DNA, 30 bp, Artificial Sequence
  Synthetic oligonucleotide
cggcgggaaagaggaaaccttagggcctcg

SEQ ID NO: 53360 - DNA, 30 bp, Artificial Sequence
  Synthetic oligonucleotide
atctgtcgcgggcttgccatccagagctcg

SEQ ID NO: 53361 - DNA, 30 bp, Artificial Sequence
  Synthetic oligonucleotide
gcacactattatcatgtgaccgaaggctcg

SEQ ID NO: 53362 - DNA, 30 bp, Artificial Sequence
  Synthetic oligonucleotide
actgcagagaatcccgtattcaactgctcg

SEQ ID NO: 53363 - DNA, 30 bp, Artificial Sequence
  Synthetic oligonucleotide
cggagtcgcatatcgcgctcgacttgctcg

SEQ ID NO: 53364 - DNA, 30 bp, Artificial Sequence
  Synthetic oligonucleotide
tgactactaggctgtaaagagacgatctcg

SEQ ID NO: 53365 - DNA, 30 bp, Artificial Sequence
  Synthetic oligonucleotide
tacgggcccaacccttagtcctccctctcg

SEQ ID NO: 53366 - DNA, 30 bp, Artificial Sequence
  Synthetic oligonucleotide
ggtgtgcaattgatttgacaaatcgtctcg

SEQ ID NO: 53367 - DNA, 30 bp, Artificial Sequence
  Synthetic oligonucleotide
tggccagcgaagtatcgcgctggaaagtcg

SEQ ID NO: 53368 - DNA, 30 bp, Artificial Sequence
  Synthetic oligonucleotide
taccaagctcagtagcgaatgtgaaagtcg

SEQ ID NO: 53369 - DNA, 30 bp, Artificial Sequence
  Synthetic oligonucleotide
agcccagtgatgtcttcggttttcaagtcg

SEQ ID NO: 53370 - DNA, 30 bp, Artificial Sequence
  Synthetic oligonucleotide
ctggtgatgagaggcgccaagcaagagtcg

SEQ ID NO: 53371 - DNA, 30 bp, Artificial Sequence
  Synthetic oligonucleotide
gatgccacagtataggagcggtccgagtcg

SEQ ID NO: 53372 - DNA, 30 bp, Artificial Sequence
  Synthetic oligonucleotide
taacagatgaatagcgtccgtcctgagtcg

SEQ ID NO: 53373 - DNA, 30 bp, Artificial Sequence
  Synthetic oligonucleotide
catgttgcagtaatgggcgtgagctagtcg

SEQ ID NO: 53374 - DNA, 30 bp, Artificial Sequence
  Synthetic oligonucleotide
cgggagatggtaatgtttcttggctagtcg

SEQ ID NO: 53375 - DNA, 30 bp, Artificial Sequence
  Synthetic oligonucleotide
ctacaggcgacagatttgcgtaggtagtcg

SEQ ID NO: 53376 - DNA, 30 bp, Artificial Sequence
  Synthetic oligonucleotide
caacgcccgaagttaggcctggcgccgtcg

SEQ ID NO: 53377 - DNA, 30 bp, Artificial Sequence
  Synthetic oligonucleotide
tgcaccacagggtcccatgatgaagcgtcg

SEQ ID NO: 53378 - DNA, 30 bp, Artificial Sequence
  Synthetic oligonucleotide
agagcacctgaactcgtcagtaacaggtcg

SEQ ID NO: 53379 - DNA, 30 bp, Artificial Sequence
  Synthetic oligonucleotide
gtggtcataggatgtactagtcagcggtcg

SEQ ID NO: 53380 - DNA, 30 bp, Artificial Sequence
  Synthetic oligonucleotide
accaggggatagctctctcaagtaatgtcg

SEQ ID NO: 53381 - DNA, 30 bp, Artificial Sequence
  Synthetic oligonucleotide
caaagacgtggctacaactgacccatgtcg

SEQ ID NO: 53382 - DNA, 30 bp, Artificial Sequence
  Synthetic oligonucleotide
atggggggcggcgaaaccggaggactgtcg

SEQ ID NO: 53383 - DNA, 30 bp, Artificial Sequence
  Synthetic oligonucleotide
cggcaccttggtgcattctgacgattgtcg

SEQ ID NO: 53384 - DNA, 30 bp, Artificial Sequence
  Synthetic oligonucleotide
gtaagggaggatgtgtcattggggttgtcg

SEQ ID NO: 53385 - DNA, 30 bp, Artificial Sequence
  Synthetic oligonucleotide
gctaagtacacgtcccgacgactacattcg

SEQ ID NO: 53386 - DNA, 30 bp, Artificial Sequence
  Synthetic oligonucleotide
ggtgagctgagggactgtaccctagattcg

SEQ ID NO: 53387 - DNA, 30 bp, Artificial Sequence
  Synthetic oligonucleotide
cgtcagtgtggtatgcaaaaagaggattcg

SEQ ID NO: 53388 - DNA, 30 bp, Artificial Sequence
  Synthetic oligonucleotide
cacaaagaaggcctgtccccaagggattcg

SEQ ID NO: 53389 - DNA, 30 bp, Artificial Sequence
  Synthetic oligonucleotide
ccgaggtgctagtcccaacatgctccttcg

SEQ ID NO: 53390 - DNA, 30 bp, Artificial Sequence
  Synthetic oligonucleotide
agaacaccagcatagggcaacccatcttcg

SEQ ID NO: 53391 - DNA, 30 bp, Artificial Sequence
  Synthetic oligonucleotide
ccaagtcacagagaactaagagcaagttcg

SEQ ID NO: 53392 - DNA, 30 bp, Artificial Sequence
  Synthetic oligonucleotide
tgcccgaggtagtcagacgagagaagttcg

SEQ ID NO: 53393 - DNA, 30 bp, Artificial Sequence
  Synthetic oligonucleotide
tgaacttacaggatgcgaagtaagagttcg

SEQ ID NO: 53394 - DNA, 30 bp, Artificial Sequence
  Synthetic oligonucleotide
gcagaatctagattcggtcgagtgagttcg

SEQ ID NO: 53395 - DNA, 30 bp, Artificial Sequence
  Synthetic oligonucleotide
ttacgaccgattcttggcgatagaatttcg

SEQ ID NO: 53396 - DNA, 30 bp, Artificial Sequence
  Synthetic oligonucleotide
cgaaggtcgtagacaaccatgcttatttcg

SEQ ID NO: 53397 - DNA, 30 bp, Artificial Sequence
  Synthetic oligonucleotide
tagccaacgtaacttgaaccggaattttcg

SEQ ID NO: 53398 - DNA, 30 bp, Artificial Sequence
  Synthetic oligonucleotide
cgatgtatcgtctatggagtcacaaaaagg

SEQ ID NO: 53399 - DNA, 30 bp, Artificial Sequence
  Synthetic oligonucleotide
caggccgggattgcaatatggcagaaaagg

SEQ ID NO: 53400 - DNA, 30 bp, Artificial Sequence
  Synthetic oligonucleotide
ggggggccgggacatgatcggcggaaaagg

SEQ ID NO: 53401 - DNA, 30 bp, Artificial Sequence
  Synthetic oligonucleotide
tcggcactgtgtgtcagtggaacacaaagg

SEQ ID NO: 53402 - DNA, 30 bp, Artificial Sequence
  Synthetic oligonucleotide
agggtgacaaatgtttttcctatccaaagg

SEQ ID NO: 53403 - DNA, 30 bp, Artificial Sequence
  Synthetic oligonucleotide
tacaggccgattggcgtttactcagaaagg

SEQ ID NO: 53404 - DNA, 29 bp, Artificial Sequence
  Synthetic oligonucleotide
gagtcatcgtcttgaacacgacataaagg

SEQ ID NO: 53405 - DNA, 30 bp, Artificial Sequence
  Synthetic oligonucleotide
gataaaccgcttgagtaggcgtcataaagg

SEQ ID NO: 53406 - DNA, 30 bp, Artificial Sequence
  Synthetic oligonucleotide
ccaaacggcgtacatgaccagttctaaagg

SEQ ID NO: 53407 - DNA, 30 bp, Artificial Sequence
  Synthetic oligonucleotide
acgatctggtatcgatgtgtctggtaaagg

SEQ ID NO: 53408 - DNA, 30 bp, Artificial Sequence
  Synthetic oligonucleotide
tgcgaagttcatactcaagatgattaaagg

SEQ ID NO: 53409 - DNA, 30 bp, Artificial Sequence
  Synthetic oligonucleotide
agacgtcttctgccatcatcgacttaaagg

SEQ ID NO: 53410 - DNA, 30 bp, Artificial Sequence
  Synthetic oligonucleotide
cgtacgtgaatcgagcaggtaacgacaagg

SEQ ID NO: 53411 - DNA, 30 bp, Artificial Sequence
  Synthetic oligonucleotide
tcagaaggaggcacccgcgaggtcgcaagg

SEQ ID NO: 53412 - DNA, 30 bp, Artificial Sequence
  Synthetic oligonucleotide
ccaagagggagtgtggttaacggacgaagg

SEQ ID NO: 53413 - DNA, 30 bp, Artificial Sequence
  Synthetic oligonucleotide
gggcggagatattttcactgagtatgaagg

SEQ ID NO: 53414 - DNA, 30 bp, Artificial Sequence
  Synthetic oligonucleotide
cagggaatcgtctgggctgtacagataagg

SEQ ID NO: 53415 - DNA, 30 bp, Artificial Sequence
  Synthetic oligonucleotide
acctggaaggggtagtctacatcactaagg

SEQ ID NO: 53416 - DNA, 30 bp, Artificial Sequence
  Synthetic oligonucleotide
atagctaagaattatgtagaccccgtaagg

SEQ ID NO: 53417 - DNA, 30 bp, Artificial Sequence
  Synthetic oligonucleotide
aaacgatgtacgcgtaacatcgtggtaagg

SEQ ID NO: 53418 - DNA, 30 bp, Artificial Sequence
  Synthetic oligonucleotide
tcggttatacacagaaaggcatttgtaagg

SEQ ID NO: 53419 - DNA, 30 bp, Artificial Sequence
  Synthetic oligonucleotide
accaagctaaaaccatgcgttacattaagg

SEQ ID NO: 53420 - DNA, 30 bp, Artificial Sequence
  Synthetic oligonucleotide
tcccgagcaagacaatcttgttacttaagg

SEQ ID NO: 53421 - DNA, 30 bp, Artificial Sequence
  Synthetic oligonucleotide
cagcaagtccaccgaatatgagagttaagg

SEQ ID NO: 53422 - DNA, 30 bp, Artificial Sequence
  Synthetic oligonucleotide
tggggacccgagataaccgctggtttaagg

SEQ ID NO: 53423 - DNA, 30 bp, Artificial Sequence
  Synthetic oligonucleotide
tggtaacacatccggcagtccgacaacagg

SEQ ID NO: 53424 - DNA, 30 bp, Artificial Sequence
  Synthetic oligonucleotide
gtacacatcgacttgtacgctctcaacagg

SEQ ID NO: 53425 - DNA, 30 bp, Artificial Sequence
  Synthetic oligonucleotide
gtaacgccagggatgacagacaataacagg

SEQ ID NO: 53426 - DNA, 30 bp, Artificial Sequence
  Synthetic oligonucleotide
ggaggacccaaatgtttcaaaaaccacagg

SEQ ID NO: 53427 - DNA, 30 bp, Artificial Sequence
  Synthetic oligonucleotide
gcgcatagtacagtttgcggattgcacagg

SEQ ID NO: 53428 - DNA, 30 bp, Artificial Sequence
  Synthetic oligonucleotide
accgagtgggagccaattagtcctcacagg

SEQ ID NO: 53429 - DNA, 31 bp, Artificial Sequence
  Synthetic oligonucleotide
acgcggatcaagatcagtaggcaaggacagg

SEQ ID NO: 53430 - DNA, 30 bp, Artificial Sequence
  Synthetic oligonucleotide
cctaaacaatcggtgtaggattcatacagg

SEQ ID NO: 53431 - DNA, 30 bp, Artificial Sequence
  Synthetic oligonucleotide
ttaaatccaatacggggtaccaacaccagg

SEQ ID NO: 53432 - DNA, 30 bp, Artificial Sequence
  Synthetic oligonucleotide
tcgggagacggacctacaggctgcaccagg

SEQ ID NO: 53433 - DNA, 30 bp, Artificial Sequence
  Synthetic oligonucleotide
ttacgagcatagttcgaccaggggcccagg

SEQ ID NO: 53434 - DNA, 30 bp, Artificial Sequence
  Synthetic oligonucleotide
acgatgaggtgcaatgcctactatcccagg

SEQ ID NO: 53435 - DNA, 30 bp, Artificial Sequence
  Synthetic oligonucleotide
agccaggaagggcaagctagggcagccagg

SEQ ID NO: 53436 - DNA, 30 bp, Artificial Sequence
  Synthetic oligonucleotide
atcaagaatccggcttgaatcagtgccagg

SEQ ID NO: 53437 - DNA, 30 bp, Artificial Sequence
  Synthetic oligonucleotide
aagagggggtcgcaggatagaacccgcagg

SEQ ID NO: 53438 - DNA, 30 bp, Artificial Sequence
  Synthetic oligonucleotide
cgacgggctgggtgtaatgttcagcgcagg

SEQ ID NO: 53439 - DNA, 30 bp, Artificial Sequence
  Synthetic oligonucleotide
aaagagcgggtagagtacaaggatggcagg

SEQ ID NO: 53440 - DNA, 30 bp, Artificial Sequence
  Synthetic oligonucleotide
gtgaaaaggggacgacaatagcactgcagg

SEQ ID NO: 53441 - DNA, 30 bp, Artificial Sequence
  Synthetic oligonucleotide
acgttggtggcgggaaattagtagtgcagg

SEQ ID NO: 53442 - DNA, 30 bp, Artificial Sequence
  Synthetic oligonucleotide
gggaagatgtgaccgtgcattatgtgcagg

SEQ ID NO: 53443 - DNA, 30 bp, Artificial Sequence
  Synthetic oligonucleotide
cataggctagtatttgcgagagattgcagg

SEQ ID NO: 53444 - DNA, 31 bp, Artificial Sequence
  Synthetic oligonucleotide
cgagtatcggcgtcatataggcgcaatcagg

SEQ ID NO: 53445 - DNA, 30 bp, Artificial Sequence
  Synthetic oligonucleotide
aatgcgttgtgggaagaggccaacgtcagg

SEQ ID NO: 53446 - DNA, 30 bp, Artificial Sequence
  Synthetic oligonucleotide
gccaacatggaaacggacacacacgtcagg

SEQ ID NO: 53447 - DNA, 30 bp, Artificial Sequence
  Synthetic oligonucleotide
caggatgtcgacggggggatcccgttcagg

SEQ ID NO: 53448 - DNA, 30 bp, Artificial Sequence
  Synthetic oligonucleotide
gagatgctaggacatcgggctatcaagagg

SEQ ID NO: 53449 - DNA, 30 bp, Artificial Sequence
  Synthetic oligonucleotide
ttggcgattctgggtactttttcgaagagg

SEQ ID NO: 53450 - DNA, 30 bp, Artificial Sequence
  Synthetic oligonucleotide
gtcagcaatgaaagccgaattttgaagagg

SEQ ID NO: 53451 - DNA, 30 bp, Artificial Sequence
  Synthetic oligonucleotide
tgggtcaacccggacgacgaataggagagg

SEQ ID NO: 53452 - DNA, 30 bp, Artificial Sequence
  Synthetic oligonucleotide
taaaatatgcctaaaatcgaaacggagagg

SEQ ID NO: 53453 - DNA, 30 bp, Artificial Sequence
  Synthetic oligonucleotide
cgcgaccagggcggatctttgcctgagagg

SEQ ID NO: 53454 - DNA, 30 bp, Artificial Sequence
  Synthetic oligonucleotide
caactcgggtacatgactggcccatagagg

SEQ ID NO: 53455 - DNA, 30 bp, Artificial Sequence
  Synthetic oligonucleotide
ttaaggattacgttagttgttgcatagagg

SEQ ID NO: 53456 - DNA, 30 bp, Artificial Sequence
  Synthetic oligonucleotide
aggggcccaaaggtggggatgttcgcgagg

SEQ ID NO: 53457 - DNA, 30 bp, Artificial Sequence
  Synthetic oligonucleotide
aggcatgcgcttactacaaatgtgtcgagg

SEQ ID NO: 53458 - DNA, 30 bp, Artificial Sequence
  Synthetic oligonucleotide
caaggatggttcagagggctggccaggagg

SEQ ID NO: 53459 - DNA, 30 bp, Artificial Sequence
  Synthetic oligonucleotide
ccaaatttcagactaaagaatggtaggagg

SEQ ID NO: 53460 - DNA, 30 bp, Artificial Sequence
  Synthetic oligonucleotide
aaccgaatatcatccgcgtcagttaggagg

SEQ ID NO: 53461 - DNA, 30 bp, Artificial Sequence
  Synthetic oligonucleotide
tgtagtgatcgacaagggggtcaacggagg

SEQ ID NO: 53462 - DNA, 30 bp, Artificial Sequence
  Synthetic oligonucleotide
agtccaaaggcccgaaacagacgtcggagg

SEQ ID NO: 53463 - DNA, 30 bp, Artificial Sequence
  Synthetic oligonucleotide
tggtaggctaagtcaaagtacgaagggagg

SEQ ID NO: 53464 - DNA, 30 bp, Artificial Sequence
  Synthetic oligonucleotide
ggggtacatgcttgctgcaaaccagggagg

SEQ ID NO: 53465 - DNA, 30 bp, Artificial Sequence
  Synthetic oligonucleotide
ttacggtaaactcgcaatgaggacgggagg

SEQ ID NO: 53466 - DNA, 30 bp, Artificial Sequence
  Synthetic oligonucleotide
tgcgggattcattcgacggaatgcgggagg

SEQ ID NO: 53467 - DNA, 30 bp, Artificial Sequence
  Synthetic oligonucleotide
ccgtctgagcaagtgtggagctgggggagg

SEQ ID NO: 53468 - DNA, 30 bp, Artificial Sequence
  Synthetic oligonucleotide
attgtaacacaacatacgcgagctgggagg

SEQ ID NO: 53469 - DNA, 30 bp, Artificial Sequence
  Synthetic oligonucleotide
gatagtccaaggccgaaccgggagtggagg

SEQ ID NO: 53470 - DNA, 30 bp, Artificial Sequence
  Synthetic oligonucleotide
ctgtgagcacacccggaaagtcacatgagg

SEQ ID NO: 53471 - DNA, 30 bp, Artificial Sequence
  Synthetic oligonucleotide
caaatgcataattaggtcaggaggatgagg

SEQ ID NO: 53472 - DNA, 30 bp, Artificial Sequence
  Synthetic oligonucleotide
gcaatcagccgacaaaccgtgatgatgagg

SEQ ID NO: 53473 - DNA, 30 bp, Artificial Sequence
  Synthetic oligonucleotide
cgtgatgcgtcctagatagtgaatatgagg

SEQ ID NO: 53474 - DNA, 30 bp, Artificial Sequence
  Synthetic oligonucleotide
caaggaacaagactaggacctcggctgagg

SEQ ID NO: 53475 - DNA, 30 bp, Artificial Sequence
  Synthetic oligonucleotide
ctgtcgaggtcctgcaaaaaaggtctgagg

SEQ ID NO: 53476 - DNA, 30 bp, Artificial Sequence
  Synthetic oligonucleotide
caaacaaaggtaattcctcgttccaatagg

SEQ ID NO: 53477 - DNA, 30 bp, Artificial Sequence
  Synthetic oligonucleotide
agtaatcataccaaaggctacaaacatagg

SEQ ID NO: 53478 - DNA, 30 bp, Artificial Sequence
  Synthetic oligonucleotide
gtgcgttacaaatttcagcgcacagatagg

SEQ ID NO: 53479 - DNA, 30 bp, Artificial Sequence
  Synthetic oligonucleotide
aacggatggtaaggaggtagtcgggatagg

SEQ ID NO: 53480 - DNA, 30 bp, Artificial Sequence
  Synthetic oligonucleotide
aatacacctgggaaatatagggatgatagg

SEQ ID NO: 53481 - DNA, 30 bp, Artificial Sequence
  Synthetic oligonucleotide
caagaggtcagggtggggtgtactgatagg

SEQ ID NO: 53482 - DNA, 30 bp, Artificial Sequence
  Synthetic oligonucleotide
gaatgagactgaaatgagggaatttatagg

SEQ ID NO: 53483 - DNA, 30 bp, Artificial Sequence
  Synthetic oligonucleotide
ggcgtataactgtatctgaacgacactagg

SEQ ID NO: 53484 - DNA, 30 bp, Artificial Sequence
  Synthetic oligonucleotide
cggaacggttcgcaaggtcttgaagctagg

SEQ ID NO: 53485 - DNA, 30 bp, Artificial Sequence
  Synthetic oligonucleotide
ccaaattagagtgcattacttcatgctagg

SEQ ID NO: 53486 - DNA, 30 bp, Artificial Sequence
  Synthetic oligonucleotide
tggtaaaaagtcagaagggggcctagtagg

SEQ ID NO: 53487 - DNA, 30 bp, Artificial Sequence
  Synthetic oligonucleotide
gcgaaaacctacacgaaaatggggcgtagg

SEQ ID NO: 53488 - DNA, 30 bp, Artificial Sequence
  Synthetic oligonucleotide
ttcgcgggttatggtcgcaaagatcgtagg

SEQ ID NO: 53489 - DNA, 30 bp, Artificial Sequence
  Synthetic oligonucleotide
cacggtaatgcattcgctactgtaattagg

SEQ ID NO: 53490 - DNA, 30 bp, Artificial Sequence
  Synthetic oligonucleotide
agctgacattggtccgacaatggcattagg

SEQ ID NO: 53491 - DNA, 30 bp, Artificial Sequence
  Synthetic oligonucleotide
ccggaaaggtttggtgcgcatatccttagg

SEQ ID NO: 53492 - DNA, 30 bp, Artificial Sequence
  Synthetic oligonucleotide
gggagactactgcagaacgacatgtttagg

SEQ ID NO: 53493 - DNA, 30 bp, Artificial Sequence
  Synthetic oligonucleotide
aggggaggcgaatagcaacggatttttagg

SEQ ID NO: 53494 - DNA, 30 bp, Artificial Sequence
  Synthetic oligonucleotide
atgtaaggcgatatgccgtgataaaaacgg

SEQ ID NO: 53495 - DNA, 30 bp, Artificial Sequence
  Synthetic oligonucleotide
ggcaatcgagtcgcatgggcgtcaaaacgg

SEQ ID NO: 53496 - DNA, 30 bp, Artificial Sequence
  Synthetic oligonucleotide
atcgaaatctccctagtaaatcacaaacgg

SEQ ID NO: 53497 - DNA, 30 bp, Artificial Sequence
  Synthetic oligonucleotide
cggatttaaagaataacgggaatgaaacgg

SEQ ID NO: 53498 - DNA, 30 bp, Artificial Sequence
  Synthetic oligonucleotide
gggcgatggcgcttcacacactagcaacgg

SEQ ID NO: 53499 - DNA, 30 bp, Artificial Sequence
  Synthetic oligonucleotide
ttagctactagcgggagtcgaggttaacgg

SEQ ID NO: 53500 - DNA, 30 bp, Artificial Sequence
  Synthetic oligonucleotide
actcaggacaagatgatggagggcacacgg

SEQ ID NO: 53501 - DNA, 30 bp, Artificial Sequence
  Synthetic oligonucleotide
ccaaagacaccaacgcgtagcccatcacgg

SEQ ID NO: 53502 - DNA, 30 bp, Artificial Sequence
  Synthetic oligonucleotide
ccgcaagaaaactctccaggacccatacgg

SEQ ID NO: 53503 - DNA, 30 bp, Artificial Sequence
  Synthetic oligonucleotide
gtcgctcaaacagagtgtctatccctacgg

SEQ ID NO: 53504 - DNA, 30 bp, Artificial Sequence
  Synthetic oligonucleotide
gtaaagccgtatagtaatgacaggctacgg

SEQ ID NO: 53505 - DNA, 30 bp, Artificial Sequence
  Synthetic oligonucleotide
tgagaagtagccagacttgactagaaccgg

SEQ ID NO: 53506 - DNA, 30 bp, Artificial Sequence
  Synthetic oligonucleotide
cggcacacagcgacagttttggcccaccgg

SEQ ID NO: 53507 - DNA, 30 bp, Artificial Sequence
  Synthetic oligonucleotide
acggtattacacgggggaccgacctcccgg

SEQ ID NO: 53508 - DNA, 30 bp, Artificial Sequence
  Synthetic oligonucleotide
caaaggaccattaacaacacatgctcccgg

SEQ ID NO: 53509 - DNA, 30 bp, Artificial Sequence
  Synthetic oligonucleotide
cacaagaagttaaaactaactaggagccgg

SEQ ID NO: 53510 - DNA, 30 bp, Artificial Sequence
  Synthetic oligonucleotide
aggaaatctgcgtgatgtatggtccgccgg

SEQ ID NO: 53511 - DNA, 30 bp, Artificial Sequence
  Synthetic oligonucleotide
acacggcaaagatcccgtggttgaggccgg

SEQ ID NO: 53512 - DNA, 30 bp, Artificial Sequence
  Synthetic oligonucleotide
tccttagacgagacttaagatgggggccgg

SEQ ID NO: 53513 - DNA, 30 bp, Artificial Sequence
  Synthetic oligonucleotide
tctgacgctctataactagagtcttgccgg

SEQ ID NO: 53514 - DNA, 30 bp, Artificial Sequence
  Synthetic oligonucleotide
cctataagagtcaaagcagtcacaatccgg

SEQ ID NO: 53515 - DNA, 30 bp, Artificial Sequence
  Synthetic oligonucleotide
ttagggccaggctacatctaccctctccgg

SEQ ID NO: 53516 - DNA, 30 bp, Artificial Sequence
  Synthetic oligonucleotide
ggaaagcaggtccgccatcaacgagtccgg

SEQ ID NO: 53517 - DNA, 30 bp, Artificial Sequence
  Synthetic oligonucleotide
cgatgtccaatccaggcaacaatagtccgg

SEQ ID NO: 53518 - DNA, 30 bp, Artificial Sequence
  Synthetic oligonucleotide
ctttggacctgctaaagagaggacgtccgg

SEQ ID NO: 53519 - DNA, 30 bp, Artificial Sequence
  Synthetic oligonucleotide
aacgtccgctaggtacatgatggattccgg

SEQ ID NO: 53520 - DNA, 30 bp, Artificial Sequence
  Synthetic oligonucleotide
actgggcacgattgtagcaggcctcagcgg

SEQ ID NO: 53521 - DNA, 30 bp, Artificial Sequence
  Synthetic oligonucleotide
atagagctgccttagtggagtagagagcgg

SEQ ID NO: 53522 - DNA, 30 bp, Artificial Sequence
  Synthetic oligonucleotide
attagagctgaagtactgtgtcaatagcgg

SEQ ID NO: 53523 - DNA, 30 bp, Artificial Sequence
  Synthetic oligonucleotide
gagactccggtcacataagggagaacgcgg

SEQ ID NO: 53524 - DNA, 30 bp, Artificial Sequence
  Synthetic oligonucleotide
tctaaggcgggcaattcagtggaagcgcgg

SEQ ID NO: 53525 - DNA, 30 bp, Artificial Sequence
  Synthetic oligonucleotide
actggaatagcattaaatgtgttcgcgcgg

SEQ ID NO: 53526 - DNA, 30 bp, Artificial Sequence
  Synthetic oligonucleotide
cgtaaagttcaggtctccattgcggcgcgg

SEQ ID NO: 53527 - DNA, 30 bp, Artificial Sequence
  Synthetic oligonucleotide
acaaattgaggaaagatcaacatcaggcgg

SEQ ID NO: 53528 - DNA, 30 bp, Artificial Sequence
  Synthetic oligonucleotide
actaatccttaacgtggggacaagaggcgg

SEQ ID NO: 53529 - DNA, 30 bp, Artificial Sequence
  Synthetic oligonucleotide
gctcaaggtgtggcgtgatatggtcggcgg

SEQ ID NO: 53530 - DNA, 30 bp, Artificial Sequence
  Synthetic oligonucleotide
agcgcaatcggacaagtggtaacaatgcgg

SEQ ID NO: 53531 - DNA, 30 bp, Artificial Sequence
  Synthetic oligonucleotide
acgtaggggtcagggcaagagactctgcgg

SEQ ID NO: 53532 - DNA, 30 bp, Artificial Sequence
  Synthetic oligonucleotide
gcgaagggtagatcgaacacatacgtgcgg

SEQ ID NO: 53533 - DNA, 30 bp, Artificial Sequence
  Synthetic oligonucleotide
cggacagacgagcggtaaacgcgcgtgcgg

SEQ ID NO: 53534 - DNA, 30 bp, Artificial Sequence
  Synthetic oligonucleotide
gtgacagacagcgaaatttcaaagttgcgg

SEQ ID NO: 53535 - DNA, 30 bp, Artificial Sequence
  Synthetic oligonucleotide
cgtgattcgctaaaagaggaaactttgcgg

SEQ ID NO: 53536 - DNA, 30 bp, Artificial Sequence
  Synthetic oligonucleotide
gaggcctgggagccgaacacgatcaatcgg

SEQ ID NO: 53537 - DNA, 30 bp, Artificial Sequence
  Synthetic oligonucleotide
agacctcaaatctaaggttgaatgcatcgg

SEQ ID NO: 53538 - DNA, 30 bp, Artificial Sequence
  Synthetic oligonucleotide
aggttggcatacgggacgacggacgatcgg

SEQ ID NO: 53539 - DNA, 30 bp, Artificial Sequence
  Synthetic oligonucleotide
gagatgggttaagaatttcgcgcaactcgg

SEQ ID NO: 53540 - DNA, 30 bp, Artificial Sequence
  Synthetic oligonucleotide
ctcatgtgtaagggattagtcactgctcgg

SEQ ID NO: 53541 - DNA, 30 bp, Artificial Sequence
  Synthetic oligonucleotide
aatgcaagtagtgctcaaaaaacctctcgg

SEQ ID NO: 53542 - DNA, 30 bp, Artificial Sequence
  Synthetic oligonucleotide
gcgaccgctggagacggacgtatacgtcgg

SEQ ID NO: 53543 - DNA, 30 bp, Artificial Sequence
  Synthetic oligonucleotide
tgagtaacaaagaagatctacgtccgtcgg

SEQ ID NO: 53544 - DNA, 30 bp, Artificial Sequence
  Synthetic oligonucleotide
tgcgtagataagcacgtgaaaatctgtcgg

SEQ ID NO: 53545 - DNA, 30 bp, Artificial Sequence
  Synthetic oligonucleotide
cggcccgtccgcatactggttgagattcgg

SEQ ID NO: 53546 - DNA, 30 bp, Artificial Sequence
  Synthetic oligonucleotide
agcttagattgagaggatattccctttcgg

SEQ ID NO: 53547 - DNA, 30 bp, Artificial Sequence
  Synthetic oligonucleotide
cggagcggtgtgtcatgcggatggtttcgg

SEQ ID NO: 53548 - DNA, 30 bp, Artificial Sequence
  Synthetic oligonucleotide
acggctgccggcacggagagttaaaaaggg

SEQ ID NO: 53549 - DNA, 30 bp, Artificial Sequence
  Synthetic oligonucleotide
gttatgcaagcaaaattaaacggaaaaggg

SEQ ID NO: 53550 - DNA, 30 bp, Artificial Sequence
  Synthetic oligonucleotide
agccatcttacgagtcatacgaacaaaggg

SEQ ID NO: 53551 - DNA, 30 bp, Artificial Sequence
  Synthetic oligonucleotide
attgaactacgccgatacaactggaaaggg

SEQ ID NO: 53552 - DNA, 30 bp, Artificial Sequence
  Synthetic oligonucleotide
tgaggcattcgagatcgggttagtaaaggg

SEQ ID NO: 53553 - DNA, 30 bp, Artificial Sequence
  Synthetic oligonucleotide
gaggtaggccttagtcggtgtgtacaaggg

SEQ ID NO: 53554 - DNA, 30 bp, Artificial Sequence
  Synthetic oligonucleotide
tacccccgcgcaatcaccagggggcaaggg

SEQ ID NO: 53555 - DNA, 30 bp, Artificial Sequence
  Synthetic oligonucleotide
attcaggggaatgtctgtgatctggaaggg

SEQ ID NO: 53556 - DNA, 30 bp, Artificial Sequence
  Synthetic oligonucleotide
cgacggtgaattggtataaaccatgaaggg

SEQ ID NO: 53557 - DNA, 30 bp, Artificial Sequence
  Synthetic oligonucleotide
atgagaaggcaaaagcgtggaaaataaggg

SEQ ID NO: 53558 - DNA, 30 bp, Artificial Sequence
  Synthetic oligonucleotide
tgaaaagagcttcgagaatatccgtaaggg

SEQ ID NO: 53559 - DNA, 30 bp, Artificial Sequence
  Synthetic oligonucleotide
acgtctactcgggggccaatctaaacaggg

SEQ ID NO: 53560 - DNA, 30 bp, Artificial Sequence
  Synthetic oligonucleotide
attattgagagcctaagaaaacatccaggg

SEQ ID NO: 53561 - DNA, 30 bp, Artificial Sequence
  Synthetic oligonucleotide
gagcaatccaggcatcatggtggagcaggg

SEQ ID NO: 53562 - DNA, 30 bp, Artificial Sequence
  Synthetic oligonucleotide
gggtcgtaaatccattggacacatgcaggg

SEQ ID NO: 53563 - DNA, 30 bp, Artificial Sequence
  Synthetic oligonucleotide
aggtggtaaggaatcaatgattgatcaggg

SEQ ID NO: 53564 - DNA, 30 bp, Artificial Sequence
  Synthetic oligonucleotide
accgatgtgactgagttaataacgtcaggg

SEQ ID NO: 53565 - DNA, 30 bp, Artificial Sequence
  Synthetic oligonucleotide
aatacaagagcacgcaacagaagaagaggg

SEQ ID NO: 53566 - DNA, 30 bp, Artificial Sequence
  Synthetic oligonucleotide
agaagtcgctccccaatgagctgaagaggg

SEQ ID NO: 53567 - DNA, 30 bp, Artificial Sequence
  Synthetic oligonucleotide
ggggtcggactaattctttctataagaggg

SEQ ID NO: 53568 - DNA, 30 bp, Artificial Sequence
  Synthetic oligonucleotide
agaggagctacgtgcggtgggtggagaggg

SEQ ID NO: 53569 - DNA, 30 bp, Artificial Sequence
  Synthetic oligonucleotide
tcgagtgagtggattaaaatgtcacgaggg

SEQ ID NO: 53570 - DNA, 30 bp, Artificial Sequence
  Synthetic oligonucleotide
aagtaacgggggttttgccatatacgaggg

SEQ ID NO: 53571 - DNA, 30 bp, Artificial Sequence
  Synthetic oligonucleotide
ccatcgactgcagaagtttccgagcgaggg

SEQ ID NO: 53572 - DNA, 30 bp, Artificial Sequence
  Synthetic oligonucleotide
tatggcaaacctttcgagtgctggcgaggg

SEQ ID NO: 53573 - DNA, 30 bp, Artificial Sequence
  Synthetic oligonucleotide
ccggggtggtatgcacgatcaagtcgaggg

SEQ ID NO: 53574 - DNA, 30 bp, Artificial Sequence
  Synthetic oligonucleotide
gcacgagagacactgtcagacattcgaggg

SEQ ID NO: 53575 - DNA, 30 bp, Artificial Sequence
  Synthetic oligonucleotide
ataggtgagtggaaactagccaagggaggg

SEQ ID NO: 53576 - DNA, 30 bp, Artificial Sequence
  Synthetic oligonucleotide
cggaggagctgggctttaagtatgtgaggg

SEQ ID NO: 53577 - DNA, 30 bp, Artificial Sequence
  Synthetic oligonucleotide
cggtattttatcgggtacgagaagataggg

SEQ ID NO: 53578 - DNA, 30 bp, Artificial Sequence
  Synthetic oligonucleotide
cgtggcagccggaacctgtgcgtactaggg

SEQ ID NO: 53579 - DNA, 30 bp, Artificial Sequence
  Synthetic oligonucleotide
agtgtctacaccatcactatccgagtaggg

SEQ ID NO: 53580 - DNA, 30 bp, Artificial Sequence
  Synthetic oligonucleotide
cactatgatgtggtagcgcgaactgtaggg

SEQ ID NO: 53581 - DNA, 30 bp, Artificial Sequence
  Synthetic oligonucleotide
tgagtacaatcggccaggcgtaagcacggg

SEQ ID NO: 53582 - DNA, 30 bp, Artificial Sequence
  Synthetic oligonucleotide
tgtaaggtgaggagaagtcttcaatacggg

SEQ ID NO: 53583 - DNA, 30 bp, Artificial Sequence
  Synthetic oligonucleotide
aggttaggaccgatactgatggtagccggg

SEQ ID NO: 53584 - DNA, 30 bp, Artificial Sequence
  Synthetic oligonucleotide
acttgcacgctaattgttaaagccgccggg

SEQ ID NO: 53585 - DNA, 30 bp, Artificial Sequence
  Synthetic oligonucleotide
aggaaataacgtagattctaaaatagcggg

SEQ ID NO: 53586 - DNA, 30 bp, Artificial Sequence
  Synthetic oligonucleotide
ggcaggatttcgtaagtgcaattgcgcggg

SEQ ID NO: 53587 - DNA, 30 bp, Artificial Sequence
  Synthetic oligonucleotide
gcttctggacggttaatatgccatcgcggg

SEQ ID NO: 53588 - DNA, 30 bp, Artificial Sequence
  Synthetic oligonucleotide
gcgtcgatcagcttttaccacaagggcggg

SEQ ID NO: 53589 - DNA, 30 bp, Artificial Sequence
  Synthetic oligonucleotide
atatacttgcagcatagcaaaacgatcggg

SEQ ID NO: 53590 - DNA, 30 bp, Artificial Sequence
  Synthetic oligonucleotide
ggagaccgcaatctgaattggatactcggg

SEQ ID NO: 53591 - DNA, 30 bp, Artificial Sequence
  Synthetic oligonucleotide
tacggcacgatgtcacgacctgggctcggg

SEQ ID NO: 53592 - DNA, 30 bp, Artificial Sequence
  Synthetic oligonucleotide
cgctgtgagatacggtgtatgaaggtcggg

SEQ ID NO: 53593 - DNA, 31 bp, Artificial Sequence
  Synthetic oligonucleotide
atggttctaacaacaataatcggcggtcggg

SEQ ID NO: 53594 - DNA, 30 bp, Artificial Sequence
  Synthetic oligonucleotide
atcgctattaacctggaaaatgcattcggg

SEQ ID NO: 53595 - DNA, 30 bp, Artificial Sequence
  Synthetic oligonucleotide
gaacgatgcgggtggaaagatctgttcggg

SEQ ID NO: 53596 - DNA, 30 bp, Artificial Sequence
  Synthetic oligonucleotide
catttcgggtggatagttcaggcaaagggg

SEQ ID NO: 53597 - DNA, 30 bp, Artificial Sequence
  Synthetic oligonucleotide
cgcgttcacgcagtggtctcatcgaagggg

SEQ ID NO: 53598 - DNA, 30 bp, Artificial Sequence
  Synthetic oligonucleotide
ctccgaaccaaggagtgccagtataagggg

SEQ ID NO: 53599 - DNA, 30 bp, Artificial Sequence
  Synthetic oligonucleotide
caagggttgaccggttctacggaagagggg

SEQ ID NO: 53600 - DNA, 30 bp, Artificial Sequence
  Synthetic oligonucleotide
tcgatactggctagcggtaggtaggagggg

SEQ ID NO: 53601 - DNA, 30 bp, Artificial Sequence
  Synthetic oligonucleotide
atgggtgggctaaacgctacgattgagggg

SEQ ID NO: 53602 - DNA, 30 bp, Artificial Sequence
  Synthetic oligonucleotide
tctgtgcatgaaagtggcgacatttagggg

SEQ ID NO: 53603 - DNA, 30 bp, Artificial Sequence
  Synthetic oligonucleotide
cggatacatgtcggagttaagtgtacgggg

SEQ ID NO: 53604 - DNA, 30 bp, Artificial Sequence
  Synthetic oligonucleotide
gagagaaacaatgcccgttgtgtcgcgggg

SEQ ID NO: 53605 - DNA, 30 bp, Artificial Sequence
  Synthetic oligonucleotide
agtggcaaaagaactcttaaattctcgggg

SEQ ID NO: 53606 - DNA, 30 bp, Artificial Sequence
  Synthetic oligonucleotide
aaaaaatcgcttgtaagccgtgtaaggggg

SEQ ID NO: 53607 - DNA, 30 bp, Artificial Sequence
  Synthetic oligonucleotide
tcagcggagaaggtccgctattagcggggg

SEQ ID NO: 53608 - DNA, 30 bp, Artificial Sequence
  Synthetic oligonucleotide
atgcgcgtgaaagaggtctgtcggcggggg

SEQ ID NO: 53609 - DNA, 30 bp, Artificial Sequence
  Synthetic oligonucleotide
cactacatagtgtgtggtagccgtgggggg

SEQ ID NO: 53610 - DNA, 29 bp, Artificial Sequence
  Synthetic oligonucleotide
tagggggcatgaataatgggaagtggggg

SEQ ID NO: 53611 - DNA, 30 bp, Artificial Sequence
  Synthetic oligonucleotide
tgagccaatgtcatccgacagcgttggggg

SEQ ID NO: 53612 - DNA, 30 bp, Artificial Sequence
  Synthetic oligonucleotide
cgtaatggtgttaaataagtacggatgggg

SEQ ID NO: 53613 - DNA, 30 bp, Artificial Sequence
  Synthetic oligonucleotide
cgaaaaccgaggagtgggtgcagcgtgggg

SEQ ID NO: 53614 - DNA, 30 bp, Artificial Sequence
  Synthetic oligonucleotide
atcgtacgtcactatgattcgaggttgggg

SEQ ID NO: 53615 - DNA, 30 bp, Artificial Sequence
  Synthetic oligonucleotide
aagtgtcaggaataaccacattttttgggg

SEQ ID NO: 53616 - DNA, 30 bp, Artificial Sequence
  Synthetic oligonucleotide
tcaatgtatgggaggatagtggtaaatggg

SEQ ID NO: 53617 - DNA, 30 bp, Artificial Sequence
  Synthetic oligonucleotide
accgcctcgatgtgaagtattgtaaatggg

SEQ ID NO: 53618 - DNA, 31 bp, Artificial Sequence
  Synthetic oligonucleotide
aacgaacgaggctttcgcagggtacaatggg

SEQ ID NO: 53619 - DNA, 30 bp, Artificial Sequence
  Synthetic oligonucleotide
ccttgggcttccaggtgcgatgccaatggg

SEQ ID NO: 53620 - DNA, 30 bp, Artificial Sequence
  Synthetic oligonucleotide
acaatgcgcgctaccaggtggaaggatggg

SEQ ID NO: 53621 - DNA, 32 bp, Artificial Sequence
  Synthetic oligonucleotide
gacagctcggtttaagggccagaagctatggg

SEQ ID NO: 53622 - DNA, 30 bp, Artificial Sequence
  Synthetic oligonucleotide
gggaatcgcgaagactcatcgacaactggg

SEQ ID NO: 53623 - DNA, 30 bp, Artificial Sequence
  Synthetic oligonucleotide
tcactacgaggataaggcattggaactggg

SEQ ID NO: 53624 - DNA, 30 bp, Artificial Sequence
  Synthetic oligonucleotide
gtacgtcctactaagtgcggtaagactggg

SEQ ID NO: 53625 - DNA, 30 bp, Artificial Sequence
  Synthetic oligonucleotide
aggtcggaaaccaacgtaggaggtactggg

SEQ ID NO: 53626 - DNA, 30 bp, Artificial Sequence
  Synthetic oligonucleotide
actggtaaatactaggcgtatttggctggg

SEQ ID NO: 53627 - DNA, 30 bp, Artificial Sequence
  Synthetic oligonucleotide
acaccgagtcaaatgaaaccaacatctggg

SEQ ID NO: 53628 - DNA, 30 bp, Artificial Sequence
  Synthetic oligonucleotide
agaagctcagatggtgcggaaaagagtggg

SEQ ID NO: 53629 - DNA, 30 bp, Artificial Sequence
  Synthetic oligonucleotide
gctcaggatactgaaagcaatacgagtggg

SEQ ID NO: 53630 - DNA, 30 bp, Artificial Sequence
  Synthetic oligonucleotide
agctcaataagatgcgcaagccttcgtggg

SEQ ID NO: 53631 - DNA, 30 bp, Artificial Sequence
  Synthetic oligonucleotide
atgaggtcgaaggttgataatatgggtggg

SEQ ID NO: 53632 - DNA, 30 bp, Artificial Sequence
  Synthetic oligonucleotide
tcagtgcgagttaaatgcttgcgctgtggg

SEQ ID NO: 53633 - DNA, 31 bp, Artificial Sequence
  Synthetic oligonucleotide
gactcaaaacagtacaaccgtaatctgtggg

SEQ ID NO: 53634 - DNA, 30 bp, Artificial Sequence
  Synthetic oligonucleotide
tacttccacctgatgaaagaaaagcttggg

SEQ ID NO: 53635 - DNA, 30 bp, Artificial Sequence
  Synthetic oligonucleotide
tcgtacggcgggcgagtgtaaactaaatgg

SEQ ID NO: 53636 - DNA, 30 bp, Artificial Sequence
  Synthetic oligonucleotide
ggtaacaaaatgcgaatctgccgagaatgg

SEQ ID NO: 53637 - DNA, 30 bp, Artificial Sequence
  Synthetic oligonucleotide
gtccgaaacctctgttatagatgagaatgg

SEQ ID NO: 53638 - DNA, 30 bp, Artificial Sequence
  Synthetic oligonucleotide
catcaggattcgaacgttacatttacatgg

SEQ ID NO: 53639 - DNA, 30 bp, Artificial Sequence
  Synthetic oligonucleotide
cgctgccagataaccaagaggtaagcatgg

SEQ ID NO: 53640 - DNA, 30 bp, Artificial Sequence
  Synthetic oligonucleotide
aacgagccaattaagggggttcaggcatgg

SEQ ID NO: 53641 - DNA, 30 bp, Artificial Sequence
  Synthetic oligonucleotide
ctgacgggacagagaaagatcaatgcatgg

SEQ ID NO: 53642 - DNA, 30 bp, Artificial Sequence
  Synthetic oligonucleotide
tccgtatagaaacgccatagagagtcatgg

SEQ ID NO: 53643 - DNA, 30 bp, Artificial Sequence
  Synthetic oligonucleotide
tctcgagcgtcggcttaaagggagagatgg

SEQ ID NO: 53644 - DNA, 30 bp, Artificial Sequence
  Synthetic oligonucleotide
cgtatcagaatgttgggagctaatagatgg

SEQ ID NO: 53645 - DNA, 30 bp, Artificial Sequence
  Synthetic oligonucleotide
cacgaacgaagtctggccggggctcgatgg

SEQ ID NO: 53646 - DNA, 30 bp, Artificial Sequence
  Synthetic oligonucleotide
aaaggtaaaacacgcatatggctctgatgg

SEQ ID NO: 53647 - DNA, 30 bp, Artificial Sequence
  Synthetic oligonucleotide
ggactaccactcagttgttagaagatatgg

SEQ ID NO: 53648 - DNA, 30 bp, Artificial Sequence
  Synthetic oligonucleotide
tcagataaacagtaaacgggcgggatatgg

SEQ ID NO: 53649 - DNA, 30 bp, Artificial Sequence
  Synthetic oligonucleotide
gttgaagaacttcatctgttacaggtatgg

SEQ ID NO: 53650 - DNA, 30 bp, Artificial Sequence
  Synthetic oligonucleotide
gcagtcaagtgagtaaggctgggggtatgg

SEQ ID NO: 53651 - DNA, 30 bp, Artificial Sequence
  Synthetic oligonucleotide
taagggagctaaattataactcgcaactgg

SEQ ID NO: 53652 - DNA, 30 bp, Artificial Sequence
  Synthetic oligonucleotide
acagcaggggaaatgaacgagtcgaactgg

SEQ ID NO: 53653 - DNA, 30 bp, Artificial Sequence
  Synthetic oligonucleotide
tacacgggatgaagttcggtggccgactgg

SEQ ID NO: 53654 - DNA, 30 bp, Artificial Sequence
  Synthetic oligonucleotide
gtggtaccattttatcagtcaggggactgg

SEQ ID NO: 53655 - DNA, 30 bp, Artificial Sequence
  Synthetic oligonucleotide
ggcctccactacaagatacctcgctactgg

SEQ ID NO: 53656 - DNA, 30 bp, Artificial Sequence
  Synthetic oligonucleotide
tgagcaacccgttgggacagcgcgtactgg

SEQ ID NO: 53657 - DNA, 30 bp, Artificial Sequence
  Synthetic oligonucleotide
ctgagacgggcgtaaagaggttccggctgg

SEQ ID NO: 53658 - DNA, 30 bp, Artificial Sequence
  Synthetic oligonucleotide
ccatcagtagagcttccgtcatctggctgg

SEQ ID NO: 53659 - DNA, 30 bp, Artificial Sequence
  Synthetic oligonucleotide
tcgccgggaaaggtctacggtaaatgctgg

SEQ ID NO: 53660 - DNA, 30 bp, Artificial Sequence
  Synthetic oligonucleotide
acaggtgacaccgtccacaaagcatgctgg

SEQ ID NO: 53661 - DNA, 30 bp, Artificial Sequence
  Synthetic oligonucleotide
cgggatgggggatacggcgacaggatctgg

SEQ ID NO: 53662 - DNA, 30 bp, Artificial Sequence
  Synthetic oligonucleotide
atcggcacgaactcatttgcatacctctgg

SEQ ID NO: 53663 - DNA, 30 bp, Artificial Sequence
  Synthetic oligonucleotide
gaggctcataaaatatatagggtagtctgg

SEQ ID NO: 53664 - DNA, 30 bp, Artificial Sequence
  Synthetic oligonucleotide
attagccacaagaatagcataggggtctgg

SEQ ID NO: 53665 - DNA, 30 bp, Artificial Sequence
  Synthetic oligonucleotide
tacgaaatatccaagccccgaggacagtgg

SEQ ID NO: 53666 - DNA, 30 bp, Artificial Sequence
  Synthetic oligonucleotide
atgccctgggtcgagggcgcctgttagtgg

SEQ ID NO: 53667 - DNA, 30 bp, Artificial Sequence
  Synthetic oligonucleotide
ggcaacatggtgatccatgccctagcgtgg

SEQ ID NO: 53668 - DNA, 30 bp, Artificial Sequence
  Synthetic oligonucleotide
ccaggacccaactagggtaatctggcgtgg

SEQ ID NO: 53669 - DNA, 30 bp, Artificial Sequence
  Synthetic oligonucleotide
ggaaaagtgccgggatacatggctgcgtgg

SEQ ID NO: 53670 - DNA, 30 bp, Artificial Sequence
  Synthetic oligonucleotide
aggggacgtgctaagtgtttcatctcgtgg

SEQ ID NO: 53671 - DNA, 30 bp, Artificial Sequence
  Synthetic oligonucleotide
cgccgctatgttcaatacaaaaggaggtgg

SEQ ID NO: 53672 - DNA, 30 bp, Artificial Sequence
  Synthetic oligonucleotide
aggggtccacaccactgagtcatagggtgg

SEQ ID NO: 53673 - DNA, 30 bp, Artificial Sequence
  Synthetic oligonucleotide
ggaggcgcatattggcaggacggttggtgg

SEQ ID NO: 53674 - DNA, 30 bp, Artificial Sequence
  Synthetic oligonucleotide
aggtgctggttgctgaggagttgttggtgg

SEQ ID NO: 53675 - DNA, 30 bp, Artificial Sequence
  Synthetic oligonucleotide
gggtccgcgtgcacgaaataatccatgtgg

SEQ ID NO: 53676 - DNA, 30 bp, Artificial Sequence
  Synthetic oligonucleotide
acaagtattggatggcattaccggatgtgg

SEQ ID NO: 53677 - DNA, 30 bp, Artificial Sequence
  Synthetic oligonucleotide
cggaggacgaaattcgcaggactcttgtgg

SEQ ID NO: 53678 - DNA, 30 bp, Artificial Sequence
  Synthetic oligonucleotide
catagaaccatggcgaacggccgtttgtgg

SEQ ID NO: 53679 - DNA, 30 bp, Artificial Sequence
  Synthetic oligonucleotide
tcacagtagtctcctaagccgacaaattgg

SEQ ID NO: 53680 - DNA, 30 bp, Artificial Sequence
  Synthetic oligonucleotide
cgcgaggagtatacgggtaattgaaattgg

SEQ ID NO: 53681 - DNA, 30 bp, Artificial Sequence
  Synthetic oligonucleotide
gcagtagtggggacaaatatggtacattgg

SEQ ID NO: 53682 - DNA, 30 bp, Artificial Sequence
  Synthetic oligonucleotide
cgcaatttcatcgtaaaaaaaatagattgg

SEQ ID NO: 53683 - DNA, 30 bp, Artificial Sequence
  Synthetic oligonucleotide
tggtcggctctactgatctcgttggcttgg

SEQ ID NO: 53684 - DNA, 30 bp, Artificial Sequence
  Synthetic oligonucleotide
acgctagtcctacagagtcaccgatcttgg

SEQ ID NO: 53685 - DNA, 30 bp, Artificial Sequence
  Synthetic oligonucleotide
ggttcgcaggaagaaccgaccaattcttgg

SEQ ID NO: 53686 - DNA, 30 bp, Artificial Sequence
  Synthetic oligonucleotide
aatgacagtcgcaaagtttagattagttgg

SEQ ID NO: 53687 - DNA, 30 bp, Artificial Sequence
  Synthetic oligonucleotide
ctgaacggatggcaaaggttgtagtgttgg

SEQ ID NO: 53688 - DNA, 30 bp, Artificial Sequence
  Synthetic oligonucleotide
accaaagcagtagaaaaaaatccgtgttgg

SEQ ID NO: 53689 - DNA, 30 bp, Artificial Sequence
  Synthetic oligonucleotide
actggcgggagtacatcatatgagctttgg

SEQ ID NO: 53690 - DNA, 30 bp, Artificial Sequence
  Synthetic oligonucleotide
aaatggggtaatagagtaaacaaagtttgg

SEQ ID NO: 53691 - DNA, 30 bp, Artificial Sequence
  Synthetic oligonucleotide
aacataaacatagacaaacaatcattttgg

SEQ ID NO: 53692 - DNA, 30 bp, Artificial Sequence
  Synthetic oligonucleotide
tactagtcggtgatttcgtccgcaaaaatg

SEQ ID NO: 53693 - DNA, 30 bp, Artificial Sequence
  Synthetic oligonucleotide
catgtgaggacctagcgacaggcaaaaatg

SEQ ID NO: 53694 - DNA, 30 bp, Artificial Sequence
  Synthetic oligonucleotide
ccaagcaatgcgtgtgctgttcgcaaaatg

SEQ ID NO: 53695 - DNA, 30 bp, Artificial Sequence
  Synthetic oligonucleotide
tctaggtgcggtgtactaaacaagaaaatg

SEQ ID NO: 53696 - DNA, 30 bp, Artificial Sequence
  Synthetic oligonucleotide
tgctccaagtgctcaactgctcagaaaatg

SEQ ID NO: 53697 - DNA, 30 bp, Artificial Sequence
  Synthetic oligonucleotide
cctcccagactacttcacctagaacaaatg

SEQ ID NO: 53698 - DNA, 30 bp, Artificial Sequence
  Synthetic oligonucleotide
gttcggcacgaccgatgactcctacaaatg

SEQ ID NO: 53699 - DNA, 30 bp, Artificial Sequence
  Synthetic oligonucleotide
cgacatagaaccggacgattaaagcaaatg

SEQ ID NO: 53700 - DNA, 30 bp, Artificial Sequence
  Synthetic oligonucleotide
gttgaatcaccgaacttcagaattcaaatg

SEQ ID NO: 53701 - DNA, 30 bp, Artificial Sequence
  Synthetic oligonucleotide
gcccaccagcgccggtcaaagaaagaaatg

SEQ ID NO: 53702 - DNA, 30 bp, Artificial Sequence
  Synthetic oligonucleotide
cgtgtcgatagtagtattctacgcgaaatg

SEQ ID NO: 53703 - DNA, 30 bp, Artificial Sequence
  Synthetic oligonucleotide
ggccagacaatacagaagccatcgtaaatg

SEQ ID NO: 53704 - DNA, 30 bp, Artificial Sequence
  Synthetic oligonucleotide
ctacctagccacgcgtgtcgggaatcaatg

SEQ ID NO: 53705 - DNA, 30 bp, Artificial Sequence
  Synthetic oligonucleotide
cacagaacgactcaaccaaatgaatcaatg

SEQ ID NO: 53706 - DNA, 30 bp, Artificial Sequence
  Synthetic oligonucleotide
tcagtagtgatagagaaagtctaaagaatg

SEQ ID NO: 53707 - DNA, 30 bp, Artificial Sequence
  Synthetic oligonucleotide
tgggagtatcactcagtgagcgctagaatg

SEQ ID NO: 53708 - DNA, 30 bp, Artificial Sequence
  Synthetic oligonucleotide
taggggaactggatcagaacgcgatgaatg

SEQ ID NO: 53709 - DNA, 30 bp, Artificial Sequence
  Synthetic oligonucleotide
atgatcagtagtaagacgagggattgaatg

SEQ ID NO: 53710 - DNA, 30 bp, Artificial Sequence
  Synthetic oligonucleotide
cggaggggggtaggagttacgacaataatg

SEQ ID NO: 53711 - DNA, 30 bp, Artificial Sequence
  Synthetic oligonucleotide
agaggcaaggagcgcacctgggtaataatg

SEQ ID NO: 53712 - DNA, 30 bp, Artificial Sequence
  Synthetic oligonucleotide
gaggtgggtgctacatcgacggccataatg

SEQ ID NO: 53713 - DNA, 30 bp, Artificial Sequence
  Synthetic oligonucleotide
agaagtaaggacgcctggactgccataatg

SEQ ID NO: 53714 - DNA, 30 bp, Artificial Sequence
  Synthetic oligonucleotide
tgtcagtcaccggtggaacttcagataatg

SEQ ID NO: 53715 - DNA, 30 bp, Artificial Sequence
  Synthetic oligonucleotide
gagaattgtccaccaaaagagagagtaatg

SEQ ID NO: 53716 - DNA, 30 bp, Artificial Sequence
  Synthetic oligonucleotide
gatggaaagttcggtgcgccgtcggtaatg

SEQ ID NO: 53717 - DNA, 30 bp, Artificial Sequence
  Synthetic oligonucleotide
cggtttactcacttggtaagaagggtaatg

SEQ ID NO: 53718 - DNA, 30 bp, Artificial Sequence
  Synthetic oligonucleotide
ttgcggggtcaatagcacaaggcattaatg

SEQ ID NO: 53719 - DNA, 30 bp, Artificial Sequence
  Synthetic oligonucleotide
ctagagtgtcgtcgtataggttccttaatg

SEQ ID NO: 53720 - DNA, 30 bp, Artificial Sequence
  Synthetic oligonucleotide
gctataacagaaatgtgcagctggaacatg

SEQ ID NO: 53721 - DNA, 30 bp, Artificial Sequence
  Synthetic oligonucleotide
gggtgaagtgttgacagaatacgtaacatg

SEQ ID NO: 53722 - DNA, 30 bp, Artificial Sequence
  Synthetic oligonucleotide
tacataggtaaagcttaacaagcccacatg

SEQ ID NO: 53723 - DNA, 30 bp, Artificial Sequence
  Synthetic oligonucleotide
taataaaccggtcgggaacgatcatacatg

SEQ ID NO: 53724 - DNA, 30 bp, Artificial Sequence
  Synthetic oligonucleotide
ggaccccgtcgcactacgagacgatacatg

SEQ ID NO: 53725 - DNA, 30 bp, Artificial Sequence
  Synthetic oligonucleotide
cctatctgggaagcgggagtagattacatg

SEQ ID NO: 53726 - DNA, 30 bp, Artificial Sequence
  Synthetic oligonucleotide
gactacggaggaaatatcgtgccttacatg

SEQ ID NO: 53727 - DNA, 30 bp, Artificial Sequence
  Synthetic oligonucleotide
aacgtgtgggatattatgggaccaaccatg

SEQ ID NO: 53728 - DNA, 30 bp, Artificial Sequence
  Synthetic oligonucleotide
cacggacccgttcatgccaaaggtaccatg

SEQ ID NO: 53729 - DNA, 30 bp, Artificial Sequence
  Synthetic oligonucleotide
ttaacttctcggaggtaggaaagatccatg

SEQ ID NO: 53730 - DNA, 30 bp, Artificial Sequence
  Synthetic oligonucleotide
gggatgggagggggagatctaaaccgcatg

SEQ ID NO: 53731 - DNA, 30 bp, Artificial Sequence
  Synthetic oligonucleotide
caattactgaaatgggaatcgagccgcatg

SEQ ID NO: 53732 - DNA, 30 bp, Artificial Sequence
  Synthetic oligonucleotide
ggagcgccacaccgtaggcaaggccgcatg

SEQ ID NO: 53733 - DNA, 30 bp, Artificial Sequence
  Synthetic oligonucleotide
caacagagccaatgagattgattgtgcatg

SEQ ID NO: 53734 - DNA, 30 bp, Artificial Sequence
  Synthetic oligonucleotide
acactgggtcagtgaaaccatgcgatcatg

SEQ ID NO: 53735 - DNA, 30 bp, Artificial Sequence
  Synthetic oligonucleotide
gcaccacgggaacagtaccgatgactcatg

SEQ ID NO: 53736 - DNA, 30 bp, Artificial Sequence
  Synthetic oligonucleotide
tatggacagtaaattgaagtacgcttcatg

SEQ ID NO: 53737 - DNA, 30 bp, Artificial Sequence
  Synthetic oligonucleotide
tcaacgataacccggagttaacctttcatg

SEQ ID NO: 53738 - DNA, 30 bp, Artificial Sequence
  Synthetic oligonucleotide
accatttacacaagtttccgcggaaagatg

SEQ ID NO: 53739 - DNA, 30 bp, Artificial Sequence
  Synthetic oligonucleotide
taggtgtaccccgcgttagaggataagatg

SEQ ID NO: 53740 - DNA, 30 bp, Artificial Sequence
  Synthetic oligonucleotide
caacaagtgtcaacgggttctgtagagatg

SEQ ID NO: 53741 - DNA, 30 bp, Artificial Sequence
  Synthetic oligonucleotide
cgattcgtatagcaccgttttaaggagatg

SEQ ID NO: 53742 - DNA, 30 bp, Artificial Sequence
  Synthetic oligonucleotide
acaaggagggattccatatctgcggagatg

SEQ ID NO: 53743 - DNA, 30 bp, Artificial Sequence
  Synthetic oligonucleotide
ccaaaatacctggaatgatcatcggagatg

SEQ ID NO: 53744 - DNA, 30 bp, Artificial Sequence
  Synthetic oligonucleotide
aggtcaattaaggatattacgagtgagatg

SEQ ID NO: 53745 - DNA, 30 bp, Artificial Sequence
  Synthetic oligonucleotide
cgtcgaactgtcaatcagagtagttagatg

SEQ ID NO: 53746 - DNA, 30 bp, Artificial Sequence
  Synthetic oligonucleotide
gtgtgaaccggaaagtattttccaccgatg

SEQ ID NO: 53747 - DNA, 30 bp, Artificial Sequence
  Synthetic oligonucleotide
ttagaagaatacaaagcagatgagccgatg

SEQ ID NO: 53748 - DNA, 30 bp, Artificial Sequence
  Synthetic oligonucleotide
ggaggtcgggataaagatgcattatcgatg

SEQ ID NO: 53749 - DNA, 30 bp, Artificial Sequence
  Synthetic oligonucleotide
cgctcttaagagcgccagtgcagctcgatg

SEQ ID NO: 53750 - DNA, 30 bp, Artificial Sequence
  Synthetic oligonucleotide
tatgtaatgcgaagtcagagcccaaggatg

SEQ ID NO: 53751 - DNA, 30 bp, Artificial Sequence
  Synthetic oligonucleotide
tgagtcggatgagtacagtgcaccaggatg

SEQ ID NO: 53752 - DNA, 30 bp, Artificial Sequence
  Synthetic oligonucleotide
gcgacaaaactattattgcttattaggatg

SEQ ID NO: 53753 - DNA, 30 bp, Artificial Sequence
  Synthetic oligonucleotide
gtcgacctggcaccaggcaaagtacggatg

SEQ ID NO: 53754 - DNA, 30 bp, Artificial Sequence
  Synthetic oligonucleotide
actaggactgtgcaagtaggttcgcggatg

SEQ ID NO: 53755 - DNA, 30 bp, Artificial Sequence
  Synthetic oligonucleotide
gcgcgcatgaacgatagatacgtcgggatg

SEQ ID NO: 53756 - DNA, 30 bp, Artificial Sequence
  Synthetic oligonucleotide
cctgatggtagttctaatcggaattggatg

SEQ ID NO: 53757 - DNA, 30 bp, Artificial Sequence
  Synthetic oligonucleotide
actggcgatacggaaaatccggagatgatg

SEQ ID NO: 53758 - DNA, 30 bp, Artificial Sequence
  Synthetic oligonucleotide
gtgtaacactttgtgggtggtcacctgatg

SEQ ID NO: 53759 - DNA, 30 bp, Artificial Sequence
  Synthetic oligonucleotide
ggtcagccgacaatttttacctacctgatg

SEQ ID NO: 53760 - DNA, 30 bp, Artificial Sequence
  Synthetic oligonucleotide
gaaatcaaactcggagaacgggtagtgatg

SEQ ID NO: 53761 - DNA, 30 bp, Artificial Sequence
  Synthetic oligonucleotide
aagaacggggcagaaaatgaaaagttgatg

SEQ ID NO: 53762 - DNA, 30 bp, Artificial Sequence
  Synthetic oligonucleotide
cttactagtgcaacagagaatataaatatg

SEQ ID NO: 53763 - DNA, 30 bp, Artificial Sequence
  Synthetic oligonucleotide
tctatcgaccaatcaaaaataagcaatatg

SEQ ID NO: 53764 - DNA, 30 bp, Artificial Sequence
  Synthetic oligonucleotide
gctgtcctaagcattgagggtggtaatatg

SEQ ID NO: 53765 - DNA, 30 bp, Artificial Sequence
  Synthetic oligonucleotide
agcaaatttgtcggctgtaggaaggatatg

SEQ ID NO: 53766 - DNA, 30 bp, Artificial Sequence
  Synthetic oligonucleotide
cctgttgagccataacaactcgtggatatg

SEQ ID NO: 53767 - DNA, 30 bp, Artificial Sequence
  Synthetic oligonucleotide
ggcatgacgtagaggagcacgcactatatg

SEQ ID NO: 53768 - DNA, 30 bp, Artificial Sequence
  Synthetic oligonucleotide
tcttgttcaagaagataagccgagtatatg

SEQ ID NO: 53769 - DNA, 30 bp, Artificial Sequence
  Synthetic oligonucleotide
caaacgtcccactacggaagacctgctatg

SEQ ID NO: 53770 - DNA, 30 bp, Artificial Sequence
  Synthetic oligonucleotide
atgccggtggtaatggcaaagctgcgtatg

SEQ ID NO: 53771 - DNA, 30 bp, Artificial Sequence
  Synthetic oligonucleotide
caaaagctggactagcgttaaagcggtatg

SEQ ID NO: 53772 - DNA, 30 bp, Artificial Sequence
  Synthetic oligonucleotide
cagtgagcatttcaaggggaagctggtatg

SEQ ID NO: 53773 - DNA, 30 bp, Artificial Sequence
  Synthetic oligonucleotide
agagacgtccaaaggggtgatccgattatg

SEQ ID NO: 53774 - DNA, 30 bp, Artificial Sequence
  Synthetic oligonucleotide
ctggaaccaatcgaggtgactattattatg

SEQ ID NO: 53775 - DNA, 31 bp, Artificial Sequence
  Synthetic oligonucleotide
gcctcccaagtttaccacaccgagacttatg

SEQ ID NO: 53776 - DNA, 30 bp, Artificial Sequence
  Synthetic oligonucleotide
gcgtgtaaaccagtactaggtgtccaactg

SEQ ID NO: 53777 - DNA, 30 bp, Artificial Sequence
  Synthetic oligonucleotide
gtgggtctactcatgaggaataatcaactg

SEQ ID NO: 53778 - DNA, 30 bp, Artificial Sequence
  Synthetic oligonucleotide
agatgcaatcatatgaagcacctagaactg

SEQ ID NO: 53779 - DNA, 30 bp, Artificial Sequence
  Synthetic oligonucleotide
ggccgtaaacctatggtagtaagggaactg

SEQ ID NO: 53780 - DNA, 30 bp, Artificial Sequence
  Synthetic oligonucleotide
cacggtaggattgtcgacctattataactg

SEQ ID NO: 53781 - DNA, 30 bp, Artificial Sequence
  Synthetic oligonucleotide
accagtggacgagtcagaagacagtaactg

SEQ ID NO: 53782 - DNA, 30 bp, Artificial Sequence
  Synthetic oligonucleotide
tagggaagcgagtagggggatccgtaactg

SEQ ID NO: 53783 - DNA, 30 bp, Artificial Sequence
  Synthetic oligonucleotide
accctaaggatacgagggctgccaacactg

SEQ ID NO: 53784 - DNA, 30 bp, Artificial Sequence
  Synthetic oligonucleotide
agggcatctcgtgagtctaagaacccactg

SEQ ID NO: 53785 - DNA, 30 bp, Artificial Sequence
  Synthetic oligonucleotide
tagaggccccacgcctgccgtaccagactg

SEQ ID NO: 53786 - DNA, 30 bp, Artificial Sequence
  Synthetic oligonucleotide
acgtagcagacgatccggtacctgagactg

SEQ ID NO: 53787 - DNA, 30 bp, Artificial Sequence
  Synthetic oligonucleotide
cgcgtaacggtacggtcaaaaaatagactg

SEQ ID NO: 53788 - DNA, 30 bp, Artificial Sequence
  Synthetic oligonucleotide
gaggcggacatactttgcgaaaatagactg

SEQ ID NO: 53789 - DNA, 30 bp, Artificial Sequence
  Synthetic oligonucleotide
gagcgttgcgtaccaagcgatgaatgactg

SEQ ID NO: 53790 - DNA, 30 bp, Artificial Sequence
  Synthetic oligonucleotide
cacgaccctatttgccgtccgtacatactg

SEQ ID NO: 53791 - DNA, 30 bp, Artificial Sequence
  Synthetic oligonucleotide
catgcactgccttgcgaaataaacgtactg

SEQ ID NO: 53792 - DNA, 30 bp, Artificial Sequence
  Synthetic oligonucleotide
ggtcgagagcttaagcacacatctgtactg

SEQ ID NO: 53793 - DNA, 30 bp, Artificial Sequence
  Synthetic oligonucleotide
atggtaattaccactgagtccgaccacctg

SEQ ID NO: 53794 - DNA, 30 bp, Artificial Sequence
  Synthetic oligonucleotide
cgaattatgccaagacccgggaagcacctg

SEQ ID NO: 53795 - DNA, 30 bp, Artificial Sequence
  Synthetic oligonucleotide
aggcgtgctcgtccagcaaggggctacctg

SEQ ID NO: 53796 - DNA, 30 bp, Artificial Sequence
  Synthetic oligonucleotide
cacgcgaacatgagatcacaagacaccctg

SEQ ID NO: 53797 - DNA, 31 bp, Artificial Sequence
  Synthetic oligonucleotide
tcatgactctatctggtaactatatcgcctg

SEQ ID NO: 53798 - DNA, 30 bp, Artificial Sequence
  Synthetic oligonucleotide
tgcagagctctgaaggcaaagggaggcctg

SEQ ID NO: 53799 - DNA, 30 bp, Artificial Sequence
  Synthetic oligonucleotide
ggacgacgcctaacttaggtatcatgcctg

SEQ ID NO: 53800 - DNA, 30 bp, Artificial Sequence
  Synthetic oligonucleotide
gacggaaaagagaaataaatatgttgcctg

SEQ ID NO: 53801 - DNA, 30 bp, Artificial Sequence
  Synthetic oligonucleotide
gcagatgatgatcaaaaattcgaattcctg

SEQ ID NO: 53802 - DNA, 30 bp, Artificial Sequence
  Synthetic oligonucleotide
accggttaccgtcaaggaaacatgttcctg

SEQ ID NO: 53803 - DNA, 30 bp, Artificial Sequence
  Synthetic oligonucleotide
ctgataatccggcggaagagtcaaaagctg

SEQ ID NO: 53804 - DNA, 30 bp, Artificial Sequence
  Synthetic oligonucleotide
ccgtgaattgtgcactatcaatttaagctg

SEQ ID NO: 53805 - DNA, 30 bp, Artificial Sequence
  Synthetic oligonucleotide
acgctcacgagttgagagatgggacagctg

SEQ ID NO: 53806 - DNA, 30 bp, Artificial Sequence
  Synthetic oligonucleotide
acgccgcgttcaatcaagtgacatgcgctg

SEQ ID NO: 53807 - DNA, 30 bp, Artificial Sequence
  Synthetic oligonucleotide
ggtccatcgtccaataacgggtcaaggctg

SEQ ID NO: 53808 - DNA, 30 bp, Artificial Sequence
  Synthetic oligonucleotide
catagtgcgttgaagcacgtgaggaggctg

SEQ ID NO: 53809 - DNA, 30 bp, Artificial Sequence
  Synthetic oligonucleotide
tgggtgttgagctataacgagcgtaggctg

SEQ ID NO: 53810 - DNA, 30 bp, Artificial Sequence
  Synthetic oligonucleotide
ctgcatacaccacagacggtaaagcggctg

SEQ ID NO: 53811 - DNA, 30 bp, Artificial Sequence
  Synthetic oligonucleotide
catgtgtgggacgactaccaccgcgggctg

SEQ ID NO: 53812 - DNA, 30 bp, Artificial Sequence
  Synthetic oligonucleotide
gttacaaggtaagggcatgtgaaaatgctg

SEQ ID NO: 53813 - DNA, 30 bp, Artificial Sequence
  Synthetic oligonucleotide
cgtgtcccagtcgggtgcgcgtggatgctg

SEQ ID NO: 53814 - DNA, 30 bp, Artificial Sequence
  Synthetic oligonucleotide
aagtaacagtccgaaaaggcatagctgctg

SEQ ID NO: 53815 - DNA, 30 bp, Artificial Sequence
  Synthetic oligonucleotide
tgtactttgggacccaggcgtgacttgctg

SEQ ID NO: 53816 - DNA, 30 bp, Artificial Sequence
  Synthetic oligonucleotide
atccagactaggagacataccaccttgctg

SEQ ID NO: 53817 - DNA, 30 bp, Artificial Sequence
  Synthetic oligonucleotide
ggtatggacaacaacggctaaagtttgctg

SEQ ID NO: 53818 - DNA, 30 bp, Artificial Sequence
  Synthetic oligonucleotide
acggcagtcagattaggaggacttttgctg

SEQ ID NO: 53819 - DNA, 30 bp, Artificial Sequence
  Synthetic oligonucleotide
aagtcactgcgtctagcaaagatacatctg

SEQ ID NO: 53820 - DNA, 30 bp, Artificial Sequence
  Synthetic oligonucleotide
catctagtggtgtaagatcggttccatctg

SEQ ID NO: 53821 - DNA, 30 bp, Artificial Sequence
  Synthetic oligonucleotide
agtagtgggctggttgggcaccaaactctg

SEQ ID NO: 53822 - DNA, 30 bp, Artificial Sequence
  Synthetic oligonucleotide
tcaacgcatctacatgcaagggggcctctg

SEQ ID NO: 53823 - DNA, 30 bp, Artificial Sequence
  Synthetic oligonucleotide
ctcgaaaacgagtgcccaaatcactctctg

SEQ ID NO: 53824 - DNA, 30 bp, Artificial Sequence
  Synthetic oligonucleotide
gcactaaactggtaaggggttgaaggtctg

SEQ ID NO: 53825 - DNA, 30 bp, Artificial Sequence
  Synthetic oligonucleotide
ctgtccaaatcgttctagcccggaggtctg

SEQ ID NO: 53826 - DNA, 30 bp, Artificial Sequence
  Synthetic oligonucleotide
tgagtgtaagcccaagatcaatgctgtctg

SEQ ID NO: 53827 - DNA, 30 bp, Artificial Sequence
  Synthetic oligonucleotide
tgctggatcaagcgtcgtgctagaattctg

SEQ ID NO: 53828 - DNA, 30 bp, Artificial Sequence
  Synthetic oligonucleotide
cgtcgggatcaggagatgtagaatattctg

SEQ ID NO: 53829 - DNA, 30 bp, Artificial Sequence
  Synthetic oligonucleotide
ggcatacaagacaggacactcgaaaaagtg

SEQ ID NO: 53830 - DNA, 30 bp, Artificial Sequence
  Synthetic oligonucleotide
aagtaaagtcccaccgaccccgctaaagtg

SEQ ID NO: 53831 - DNA, 30 bp, Artificial Sequence
  Synthetic oligonucleotide
ttagaacacgtcacttcgcaatcagaagtg

SEQ ID NO: 53832 - DNA, 30 bp, Artificial Sequence
  Synthetic oligonucleotide
cgcggactggcccaaacgtgacgagaagtg

SEQ ID NO: 53833 - DNA, 30 bp, Artificial Sequence
  Synthetic oligonucleotide
cgtagactgcccagtcgaatcaaataagtg

SEQ ID NO: 53834 - DNA, 30 bp, Artificial Sequence
  Synthetic oligonucleotide
gtgcgttcacgacttggcatggtctaagtg

SEQ ID NO: 53835 - DNA, 30 bp, Artificial Sequence
  Synthetic oligonucleotide
agtagaaagggtcctgaaggggagccagtg

SEQ ID NO: 53836 - DNA, 30 bp, Artificial Sequence
  Synthetic oligonucleotide
tgtagctcgactactgtaataatgccagtg

SEQ ID NO: 53837 - DNA, 30 bp, Artificial Sequence
  Synthetic oligonucleotide
catgtagtagttctcgtcccggaatcagtg

SEQ ID NO: 53838 - DNA, 30 bp, Artificial Sequence
  Synthetic oligonucleotide
aaggacataaggatggcagattcgtcagtg

SEQ ID NO: 53839 - DNA, 30 bp, Artificial Sequence
  Synthetic oligonucleotide
atggccgatatttgtcacaagcattcagtg

SEQ ID NO: 53840 - DNA, 30 bp, Artificial Sequence
  Synthetic oligonucleotide
aggaaggtgtgttggaattctgagtgagtg

SEQ ID NO: 53841 - DNA, 30 bp, Artificial Sequence
  Synthetic oligonucleotide
caaacccctgcggctggaaggaggtgagtg

SEQ ID NO: 53842 - DNA, 30 bp, Artificial Sequence
  Synthetic oligonucleotide
ctgagccaacgagttgaaatatgttgagtg

SEQ ID NO: 53843 - DNA, 30 bp, Artificial Sequence
  Synthetic oligonucleotide
catattgtagctgaacatcagaatatagtg

SEQ ID NO: 53844 - DNA, 30 bp, Artificial Sequence
  Synthetic oligonucleotide
ctgtgtgcgcaaactccgccaactatagtg

SEQ ID NO: 53845 - DNA, 30 bp, Artificial Sequence
  Synthetic oligonucleotide
tatcatcgactcgggcggacgggagtagtg

SEQ ID NO: 53846 - DNA, 30 bp, Artificial Sequence
  Synthetic oligonucleotide
agttcaagtcgaccgagccataaggtagtg

SEQ ID NO: 53847 - DNA, 30 bp, Artificial Sequence
  Synthetic oligonucleotide
taatatgggcgtatgcatgtaatggtagtg

SEQ ID NO: 53848 - DNA, 30 bp, Artificial Sequence
  Synthetic oligonucleotide
caaaggcattcgcgtctgaatcacttagtg

SEQ ID NO: 53849 - DNA, 30 bp, Artificial Sequence
  Synthetic oligonucleotide
tcatgatactcgtttgcataagggaacgtg

SEQ ID NO: 53850 - DNA, 30 bp, Artificial Sequence
  Synthetic oligonucleotide
caacattcagttagattgccgatccacgtg

SEQ ID NO: 53851 - DNA, 30 bp, Artificial Sequence
  Synthetic oligonucleotide
acctcgatccacacattgatattgcacgtg

SEQ ID NO: 53852 - DNA, 30 bp, Artificial Sequence
  Synthetic oligonucleotide
ctttagccggaggttagccgaaacgacgtg

SEQ ID NO: 53853 - DNA, 30 bp, Artificial Sequence
  Synthetic oligonucleotide
ttgcgtgttagtgattggcgatactacgtg

SEQ ID NO: 53854 - DNA, 30 bp, Artificial Sequence
  Synthetic oligonucleotide
gtcagaagaagtaatcatgtgatctacgtg

SEQ ID NO: 53855 - DNA, 30 bp, Artificial Sequence
  Synthetic oligonucleotide
acggaatcgttgacaagtacatcacccgtg

SEQ ID NO: 53856 - DNA, 30 bp, Artificial Sequence
  Synthetic oligonucleotide
tcctggacgaaacgacattaaggacccgtg

SEQ ID NO: 53857 - DNA, 30 bp, Artificial Sequence
  Synthetic oligonucleotide
aacgattggaagtcggatgaacgatccgtg

SEQ ID NO: 53858 - DNA, 30 bp, Artificial Sequence
  Synthetic oligonucleotide
aagcctcgcgcggcaaagagaagcagcgtg

SEQ ID NO: 53859 - DNA, 30 bp, Artificial Sequence
  Synthetic oligonucleotide
aggctaggtgggatcttccgattcagcgtg

SEQ ID NO: 53860 - DNA, 30 bp, Artificial Sequence
  Synthetic oligonucleotide
cgggaatgagaggcccaagagtaccgcgtg

SEQ ID NO: 53861 - DNA, 30 bp, Artificial Sequence
  Synthetic oligonucleotide
ggatgcatcatatctccaaaagagcgcgtg

SEQ ID NO: 53862 - DNA, 30 bp, Artificial Sequence
  Synthetic oligonucleotide
accctagcgtacaaaaataaagggcgcgtg

SEQ ID NO: 53863 - DNA, 30 bp, Artificial Sequence
  Synthetic oligonucleotide
atcagggcagcggaatagtcaattcgcgtg

SEQ ID NO: 53864 - DNA, 30 bp, Artificial Sequence
  Synthetic oligonucleotide
gggggaaacttgcatggttgtcaaggcgtg

SEQ ID NO: 53865 - DNA, 30 bp, Artificial Sequence
  Synthetic oligonucleotide
tagacggggtcactacgacggaggggcgtg

SEQ ID NO: 53866 - DNA, 29 bp, Artificial Sequence
  Synthetic oligonucleotide
tccggtataagcgagactaagttggcgtg

SEQ ID NO: 53867 - DNA, 30 bp, Artificial Sequence
  Synthetic oligonucleotide
tcaccgtaagtcgcacaagtaacgtgcgtg

SEQ ID NO: 53868 - DNA, 30 bp, Artificial Sequence
  Synthetic oligonucleotide
ggaggcccagtggattgtcgatattgcgtg

SEQ ID NO: 53869 - DNA, 30 bp, Artificial Sequence
  Synthetic oligonucleotide
tagatggagcgacaagaaatgcggatcgtg

SEQ ID NO: 53870 - DNA, 30 bp, Artificial Sequence
  Synthetic oligonucleotide
catcaaagaggcgagaacgggcatatcgtg

SEQ ID NO: 53871 - DNA, 30 bp, Artificial Sequence
  Synthetic oligonucleotide
tgacgtcctccccgtctgttcgtgctcgtg

SEQ ID NO: 53872 - DNA, 30 bp, Artificial Sequence
  Synthetic oligonucleotide
cgtaagcgcgtgtttgatggctcagtcgtg

SEQ ID NO: 53873 - DNA, 30 bp, Artificial Sequence
  Synthetic oligonucleotide
ccaaaaccaacgtaggatatgactttcgtg

SEQ ID NO: 53874 - DNA, 30 bp, Artificial Sequence
  Synthetic oligonucleotide
cgctcacaaatgttggagatcctcaaggtg

SEQ ID NO: 53875 - DNA, 30 bp, Artificial Sequence
  Synthetic oligonucleotide
tggttttacaaacggaacagtaggaaggtg

SEQ ID NO: 53876 - DNA, 30 bp, Artificial Sequence
  Synthetic oligonucleotide
aaatgagatacgaggctgagagggaaggtg

SEQ ID NO: 53877 - DNA, 30 bp, Artificial Sequence
  Synthetic oligonucleotide
ttgaactctatccagtgatcgtggaaggtg

SEQ ID NO: 53878 - DNA, 30 bp, Artificial Sequence
  Synthetic oligonucleotide
caatgaggggtagagttgggttatcaggtg

SEQ ID NO: 53879 - DNA, 30 bp, Artificial Sequence
  Synthetic oligonucleotide
tgaatccccaatagggtagaggctcaggtg

SEQ ID NO: 53880 - DNA, 30 bp, Artificial Sequence
  Synthetic oligonucleotide
tcagaagggcatttataaacggttcaggtg

SEQ ID NO: 53881 - DNA, 29 bp, Artificial Sequence
  Synthetic oligonucleotide
ctatggctgatgagacccatcaagaggtg

SEQ ID NO: 53882 - DNA, 30 bp, Artificial Sequence
  Synthetic oligonucleotide
gcttagataagccattagccgttggaggtg

SEQ ID NO: 53883 - DNA, 30 bp, Artificial Sequence
  Synthetic oligonucleotide
caggtgctactcatgtcagcaattgaggtg

SEQ ID NO: 53884 - DNA, 30 bp, Artificial Sequence
  Synthetic oligonucleotide
taaaggacaaaaagattctaggcataggtg

SEQ ID NO: 53885 - DNA, 30 bp, Artificial Sequence
  Synthetic oligonucleotide
tgcaagtagaaaatgaacgtcgattaggtg

SEQ ID NO: 53886 - DNA, 30 bp, Artificial Sequence
  Synthetic oligonucleotide
atcgtatgaagttagatcagcaggacggtg

SEQ ID NO: 53887 - DNA, 30 bp, Artificial Sequence
  Synthetic oligonucleotide
tctgtaaaagacgaactgaatacagcggtg

SEQ ID NO: 53888 - DNA, 30 bp, Artificial Sequence
  Synthetic oligonucleotide
agaacaactgcacgtgcatatagagcggtg

SEQ ID NO: 53889 - DNA, 30 bp, Artificial Sequence
  Synthetic oligonucleotide
gcgtccggcgtacaagaattgagttcggtg

SEQ ID NO: 53890 - DNA, 30 bp, Artificial Sequence
  Synthetic oligonucleotide
cggcttacgcgagtatataaatgaagggtg

SEQ ID NO: 53891 - DNA, 30 bp, Artificial Sequence
  Synthetic oligonucleotide
ggctataaacctacgaggtatatcagggtg

SEQ ID NO: 53892 - DNA, 30 bp, Artificial Sequence
  Synthetic oligonucleotide
taggtaaacaaacttgacacgtaaatggtg

SEQ ID NO: 53893 - DNA, 30 bp, Artificial Sequence
  Synthetic oligonucleotide
agaagcaacgtgattgcttgaagtatggtg

SEQ ID NO: 53894 - DNA, 30 bp, Artificial Sequence
  Synthetic oligonucleotide
cgaaaaaggctctgatgaagaaacctggtg

SEQ ID NO: 53895 - DNA, 30 bp, Artificial Sequence
  Synthetic oligonucleotide
ctaggaagggacccttttaggctcgtggtg

SEQ ID NO: 53896 - DNA, 30 bp, Artificial Sequence
  Synthetic oligonucleotide
gggcaacgatacacaataggtattttggtg

SEQ ID NO: 53897 - DNA, 30 bp, Artificial Sequence
  Synthetic oligonucleotide
actagggtgatggatctatacaacaatgtg

SEQ ID NO: 53898 - DNA, 30 bp, Artificial Sequence
  Synthetic oligonucleotide
tgggtaaaatggagcgcgcgacataatgtg

SEQ ID NO: 53899 - DNA, 30 bp, Artificial Sequence
  Synthetic oligonucleotide
gaggggcatcttgagaccgtatacgatgtg

SEQ ID NO: 53900 - DNA, 30 bp, Artificial Sequence
  Synthetic oligonucleotide
gcagtgataaatgtatcgaaataggatgtg

SEQ ID NO: 53901 - DNA, 30 bp, Artificial Sequence
  Synthetic oligonucleotide
gggattcaagtgagttgaaagaatgatgtg

SEQ ID NO: 53902 - DNA, 30 bp, Artificial Sequence
  Synthetic oligonucleotide
ggcggaggttcgaggaacaaggttgatgtg

SEQ ID NO: 53903 - DNA, 30 bp, Artificial Sequence
  Synthetic oligonucleotide
gggagttggttaagatcggaaacgtatgtg

SEQ ID NO: 53904 - DNA, 30 bp, Artificial Sequence
  Synthetic oligonucleotide
cttaaaacaactatgggattaacgactgtg

SEQ ID NO: 53905 - DNA, 30 bp, Artificial Sequence
  Synthetic oligonucleotide
taaggcatcggcgtatcgcggtcagctgtg

SEQ ID NO: 53906 - DNA, 29 bp, Artificial Sequence
  Synthetic oligonucleotide
atggcgagatacatgaatattacgctgtg

SEQ ID NO: 53907 - DNA, 30 bp, Artificial Sequence
  Synthetic oligonucleotide
ggactcggactgagataagtacttgctgtg

SEQ ID NO: 53908 - DNA, 30 bp, Artificial Sequence
  Synthetic oligonucleotide
acgtagatacaagtcaatgtcctgtctgtg

SEQ ID NO: 53909 - DNA, 30 bp, Artificial Sequence
  Synthetic oligonucleotide
gtgcctcagcaagtggtttccagaagtgtg

SEQ ID NO: 53910 - DNA, 30 bp, Artificial Sequence
  Synthetic oligonucleotide
agaagtagcgaatccgataatataggtgtg

SEQ ID NO: 53911 - DNA, 30 bp, Artificial Sequence
  Synthetic oligonucleotide
acagcggccggcttcaaaacgactggtgtg

SEQ ID NO: 53912 - DNA, 30 bp, Artificial Sequence
  Synthetic oligonucleotide
cactataatcggccatgaattgcatgtgtg

SEQ ID NO: 53913 - DNA, 30 bp, Artificial Sequence
  Synthetic oligonucleotide
gtgggtaaaatacaccaaagagggtgtgtg

SEQ ID NO: 53914 - DNA, 30 bp, Artificial Sequence
  Synthetic oligonucleotide
ccaattacgagccagataggacatcttgtg

SEQ ID NO: 53915 - DNA, 29 bp, Artificial Sequence
  Synthetic oligonucleotide
cgtgagtaggactatgagttacatttgtg

SEQ ID NO: 53916 - DNA, 30 bp, Artificial Sequence
  Synthetic oligonucleotide
atacacgctcccacgtatcgtaagaaattg

SEQ ID NO: 53917 - DNA, 30 bp, Artificial Sequence
  Synthetic oligonucleotide
accacgataggcacaacttaaatccaattg

SEQ ID NO: 53918 - DNA, 30 bp, Artificial Sequence
  Synthetic oligonucleotide
gcacataaccgaagacatatctgctaattg

SEQ ID NO: 53919 - DNA, 30 bp, Artificial Sequence
  Synthetic oligonucleotide
gggtcgacagccctacattcggcaacattg

SEQ ID NO: 53920 - DNA, 30 bp, Artificial Sequence
  Synthetic oligonucleotide
cacgatcatataccaaacacggacacattg

SEQ ID NO: 53921 - DNA, 30 bp, Artificial Sequence
  Synthetic oligonucleotide
gacgtgagaacaagctgcgctcggacattg

SEQ ID NO: 53922 - DNA, 30 bp, Artificial Sequence
  Synthetic oligonucleotide
tgatgtgctcgaaccagttagccgccattg

SEQ ID NO: 53923 - DNA, 30 bp, Artificial Sequence
  Synthetic oligonucleotide
gggcacactctgtcacatgtgagagcattg

SEQ ID NO: 53924 - DNA, 30 bp, Artificial Sequence
  Synthetic oligonucleotide
caactgcagtacatacgggggtgtgcattg

SEQ ID NO: 53925 - DNA, 30 bp, Artificial Sequence
  Synthetic oligonucleotide
aaaaccagtccatcgccaagaattgcattg

SEQ ID NO: 53926 - DNA, 30 bp, Artificial Sequence
  Synthetic oligonucleotide
tcatagtaaccaacgtaggaaagatcattg

SEQ ID NO: 53927 - DNA, 30 bp, Artificial Sequence
  Synthetic oligonucleotide
gaagtagtaaagtggtggaatatgagattg

SEQ ID NO: 53928 - DNA, 30 bp, Artificial Sequence
  Synthetic oligonucleotide
aaggtacctcgatcagtaatgtcgcgattg

SEQ ID NO: 53929 - DNA, 30 bp, Artificial Sequence
  Synthetic oligonucleotide
cggcgcacagctataataaagcattgattg

SEQ ID NO: 53930 - DNA, 30 bp, Artificial Sequence
  Synthetic oligonucleotide
gacgtaataaccacgcagggaaagatattg

SEQ ID NO: 53931 - DNA, 30 bp, Artificial Sequence
  Synthetic oligonucleotide
agaacactggttgcggcgtgcatgatattg

SEQ ID NO: 53932 - DNA, 30 bp, Artificial Sequence
  Synthetic oligonucleotide
acggaagcaggctccaaaaaacttatattg

SEQ ID NO: 53933 - DNA, 30 bp, Artificial Sequence
  Synthetic oligonucleotide
ggatactcatctcgtctcagactagtattg

SEQ ID NO: 53934 - DNA, 30 bp, Artificial Sequence
  Synthetic oligonucleotide
ctaatgcaagaggggagagttaccgtattg

SEQ ID NO: 53935 - DNA, 30 bp, Artificial Sequence
  Synthetic oligonucleotide
cgtggttgaacaccaaaaattatggtattg

SEQ ID NO: 53936 - DNA, 30 bp, Artificial Sequence
  Synthetic oligonucleotide
caagaaacattaggattgaagctacacttg

SEQ ID NO: 53937 - DNA, 30 bp, Artificial Sequence
  Synthetic oligonucleotide
aagaggggaccgacgacaggagcgtacttg

SEQ ID NO: 53938 - DNA, 30 bp, Artificial Sequence
  Synthetic oligonucleotide
ggacgaaatgattaagtgcgaaaaaccttg

SEQ ID NO: 53939 - DNA, 30 bp, Artificial Sequence
  Synthetic oligonucleotide
gctataaataaatcaaggacaggcaccttg

SEQ ID NO: 53940 - DNA, 30 bp, Artificial Sequence
  Synthetic oligonucleotide
cgtcccgtactgctgttccgtaagaccttg

SEQ ID NO: 53941 - DNA, 30 bp, Artificial Sequence
  Synthetic oligonucleotide
gtgggcgatgatcataacctctagggcttg

SEQ ID NO: 53942 - DNA, 30 bp, Artificial Sequence
  Synthetic oligonucleotide
tgagtgccattgtaaaaaccgcgatgcttg

SEQ ID NO: 53943 - DNA, 30 bp, Artificial Sequence
  Synthetic oligonucleotide
cgtaaggggctatcgcaccataaactcttg

SEQ ID NO: 53944 - DNA, 30 bp, Artificial Sequence
  Synthetic oligonucleotide
ccagccttgacaggtctgcaatgcctcttg

SEQ ID NO: 53945 - DNA, 30 bp, Artificial Sequence
  Synthetic oligonucleotide
cgcgcaatccggtaatttacgaatctcttg

SEQ ID NO: 53946 - DNA, 30 bp, Artificial Sequence
  Synthetic oligonucleotide
tggggaagaagttcacgataggtattcttg

SEQ ID NO: 53947 - DNA, 30 bp, Artificial Sequence
  Synthetic oligonucleotide
tcacggcaacaaccagagaagcagaagttg

SEQ ID NO: 53948 - DNA, 30 bp, Artificial Sequence
  Synthetic oligonucleotide
gcgaggccaaggttgggggcaaaagagttg

SEQ ID NO: 53949 - DNA, 30 bp, Artificial Sequence
  Synthetic oligonucleotide
tgcgtcagccaataggtggtgagggagttg

SEQ ID NO: 53950 - DNA, 30 bp, Artificial Sequence
  Synthetic oligonucleotide
aagttcgcgacagccatttggagctagttg

SEQ ID NO: 53951 - DNA, 30 bp, Artificial Sequence
  Synthetic oligonucleotide
aagtggagggcttgagcaacaagtccgttg

SEQ ID NO: 53952 - DNA, 30 bp, Artificial Sequence
  Synthetic oligonucleotide
tactaagggaagctcataccacccgcgttg

SEQ ID NO: 53953 - DNA, 30 bp, Artificial Sequence
  Synthetic oligonucleotide
acccagacgaagggcggatagtgtgcgttg

SEQ ID NO: 53954 - DNA, 30 bp, Artificial Sequence
  Synthetic oligonucleotide
acgaccgtccgacatgttgtgccatcgttg

SEQ ID NO: 53955 - DNA, 30 bp, Artificial Sequence
  Synthetic oligonucleotide
gaagcaacagttacaattcgattctcgttg

SEQ ID NO: 53956 - DNA, 30 bp, Artificial Sequence
  Synthetic oligonucleotide
acatccggacctggacgaaggttgtggttg

SEQ ID NO: 53957 - DNA, 30 bp, Artificial Sequence
  Synthetic oligonucleotide
aaggaacgggtacacagtattgctatgttg

SEQ ID NO: 53958 - DNA, 30 bp, Artificial Sequence
  Synthetic oligonucleotide
acctgatcaagcgtgttaaccgacctgttg

SEQ ID NO: 53959 - DNA, 30 bp, Artificial Sequence
  Synthetic oligonucleotide
taagcgtcgaacgtcgacggcatagtgttg

SEQ ID NO: 53960 - DNA, 30 bp, Artificial Sequence
  Synthetic oligonucleotide
atcgttagtaacaggtccgagagggtgttg

SEQ ID NO: 53961 - DNA, 30 bp, Artificial Sequence
  Synthetic oligonucleotide
acctgacacaatgccagtggacagttgttg

SEQ ID NO: 53962 - DNA, 30 bp, Artificial Sequence
  Synthetic oligonucleotide
agcacgataaaggtagagttgcgtttgttg

SEQ ID NO: 53963 - DNA, 30 bp, Artificial Sequence
  Synthetic oligonucleotide
tcttatcgcggtgtagtccaaggaaatttg

SEQ ID NO: 53964 - DNA, 30 bp, Artificial Sequence
  Synthetic oligonucleotide
accgtaagagcatgtttgtgaggaaatttg

SEQ ID NO: 53965 - DNA, 30 bp, Artificial Sequence
  Synthetic oligonucleotide
cttagggtggtggggaaacgaatgaatttg

SEQ ID NO: 53966 - DNA, 30 bp, Artificial Sequence
  Synthetic oligonucleotide
caggtatccgccatgtcgggattgaatttg

SEQ ID NO: 53967 - DNA, 30 bp, Artificial Sequence
  Synthetic oligonucleotide
gaaagaccaaagctaagtgcattcgatttg

SEQ ID NO: 53968 - DNA, 30 bp, Artificial Sequence
  Synthetic oligonucleotide
ggcacgccacccttccccattatctatttg

SEQ ID NO: 53969 - DNA, 30 bp, Artificial Sequence
  Synthetic oligonucleotide
cgactgctaaggactcgcgttggtgctttg

SEQ ID NO: 53970 - DNA, 30 bp, Artificial Sequence
  Synthetic oligonucleotide
acgggaatgcgtaacagggtttcaagtttg

SEQ ID NO: 53971 - DNA, 30 bp, Artificial Sequence
  Synthetic oligonucleotide
ggtaagtgacccgtagagggatggagtttg

SEQ ID NO: 53972 - DNA, 30 bp, Artificial Sequence
  Synthetic oligonucleotide
ggcagcccgcgcggaatgaaactacgtttg

SEQ ID NO: 53973 - DNA, 30 bp, Artificial Sequence
  Synthetic oligonucleotide
tagcgcaccagggaacacgtcttttgtttg

SEQ ID NO: 53974 - DNA, 30 bp, Artificial Sequence
  Synthetic oligonucleotide
tggaaagatctaaatactgagtacattttg

SEQ ID NO: 53975 - DNA, 30 bp, Artificial Sequence
  Synthetic oligonucleotide
ttaaggaatgggaagtaggaattcgttttg

SEQ ID NO: 53976 - DNA, 30 bp, Artificial Sequence
  Synthetic oligonucleotide
cgcagatgcggtgtaggatggtatgttttg

SEQ ID NO: 53977 - DNA, 30 bp, Artificial Sequence
  Synthetic oligonucleotide
accgagtccattgggaaacttgataaaaat

SEQ ID NO: 53978 - DNA, 30 bp, Artificial Sequence
  Synthetic oligonucleotide
gggacaaatcggccacttcgtctggaaaat

SEQ ID NO: 53979 - DNA, 30 bp, Artificial Sequence
  Synthetic oligonucleotide
acgagtcagtatagcgggcaccttgaaaat

SEQ ID NO: 53980 - DNA, 30 bp, Artificial Sequence
  Synthetic oligonucleotide
tcacaagctaaattgaaggtaacataaaat

SEQ ID NO: 53981 - DNA, 30 bp, Artificial Sequence
  Synthetic oligonucleotide
gccgacacaggaaacatctaagattaaaat

SEQ ID NO: 53982 - DNA, 30 bp, Artificial Sequence
  Synthetic oligonucleotide
gcagtacgggcagggtatattatgacaaat

SEQ ID NO: 53983 - DNA, 30 bp, Artificial Sequence
  Synthetic oligonucleotide
cagtcaggccgagggcccggacagccaaat

SEQ ID NO: 53984 - DNA, 30 bp, Artificial Sequence
  Synthetic oligonucleotide
tcgaacagaagggagggaattgcatcaaat

SEQ ID NO: 53985 - DNA, 30 bp, Artificial Sequence
  Synthetic oligonucleotide
atgcataaagtgtatgtgacagcctcaaat

SEQ ID NO: 53986 - DNA, 30 bp, Artificial Sequence
  Synthetic oligonucleotide
taggtataccaaaggagggagacgcgaaat

SEQ ID NO: 53987 - DNA, 30 bp, Artificial Sequence
  Synthetic oligonucleotide
tggtaggactgtagctaacttgggcgaaat

SEQ ID NO: 53988 - DNA, 30 bp, Artificial Sequence
  Synthetic oligonucleotide
cggggacttcatttagaaagcagcggaaat

SEQ ID NO: 53989 - DNA, 30 bp, Artificial Sequence
  Synthetic oligonucleotide
agtccagattcagtgaataggaagggaaat

SEQ ID NO: 53990 - DNA, 30 bp, Artificial Sequence
  Synthetic oligonucleotide
cgagggcatcaatgctaaattatgggaaat

SEQ ID NO: 53991 - DNA, 30 bp, Artificial Sequence
  Synthetic oligonucleotide
tggagaatagtggaccgtaagcatggaaat

SEQ ID NO: 53992 - DNA, 30 bp, Artificial Sequence
  Synthetic oligonucleotide
cgactcggatccaggtggttcctatgaaat

SEQ ID NO: 53993 - DNA, 30 bp, Artificial Sequence
  Synthetic oligonucleotide
gcccgtttggaccaggaggtaagctgaaat

SEQ ID NO: 53994 - DNA, 30 bp, Artificial Sequence
  Synthetic oligonucleotide
atcgcatcgggggagatgggaatgttaaat

SEQ ID NO: 53995 - DNA, 30 bp, Artificial Sequence
  Synthetic oligonucleotide
tcgcgaggttaggtgtaggaccgccacaat

SEQ ID NO: 53996 - DNA, 30 bp, Artificial Sequence
  Synthetic oligonucleotide
gaagactcaacggcaaagaagctagacaat

SEQ ID NO: 53997 - DNA, 30 bp, Artificial Sequence
  Synthetic oligonucleotide
acgagaacaagcaagccatgtaaatacaat

SEQ ID NO: 53998 - DNA, 30 bp, Artificial Sequence
  Synthetic oligonucleotide
cggaggggcagtcctctgtgaccctacaat

SEQ ID NO: 53999 - DNA, 30 bp, Artificial Sequence
  Synthetic oligonucleotide
gggcgagagtcaaaaactaggacgtacaat

SEQ ID NO: 54000 - DNA, 30 bp, Artificial Sequence
  Synthetic oligonucleotide
ggatgggaagccgaacggatgtttaccaat

SEQ ID NO: 54001 - DNA, 30 bp, Artificial Sequence
  Synthetic oligonucleotide
acaagcatccacgaggtgcaaaaacccaat

SEQ ID NO: 54002 - DNA, 30 bp, Artificial Sequence
  Synthetic oligonucleotide
tgcatctggaaatccaacaatgtccccaat

SEQ ID NO: 54003 - DNA, 30 bp, Artificial Sequence
  Synthetic oligonucleotide
gggccagtgcgtggctggactaacgccaat

SEQ ID NO: 54004 - DNA, 38 bp, Artificial Sequence
  Synthetic oligonucleotide
gaccaagcatgcatcctacattttaccgagcgtccaat

SEQ ID NO: 54005 - DNA, 30 bp, Artificial Sequence
  Synthetic oligonucleotide
agtagcagctacgtcgagagaaacaagaat

SEQ ID NO: 54006 - DNA, 30 bp, Artificial Sequence
  Synthetic oligonucleotide
tgcgttgcaaaaaaggccgatcccaagaat

SEQ ID NO: 54007 - DNA, 30 bp, Artificial Sequence
  Synthetic oligonucleotide
tgtgaggacagtagctagaaggataagaat

SEQ ID NO: 54008 - DNA, 30 bp, Artificial Sequence
  Synthetic oligonucleotide
taggaaaagaccgaggctgatattaagaat

SEQ ID NO: 54009 - DNA, 30 bp, Artificial Sequence
  Synthetic oligonucleotide
tccagggaactagccgattcttctgagaat

SEQ ID NO: 54010 - DNA, 30 bp, Artificial Sequence
  Synthetic oligonucleotide
cgaaggggacaaattaacgggcacacgaat

SEQ ID NO: 54011 - DNA, 30 bp, Artificial Sequence
  Synthetic oligonucleotide
gcagccacacgaagtggtagtcgggcgaat

SEQ ID NO: 54012 - DNA, 30 bp, Artificial Sequence
  Synthetic oligonucleotide
tacagcggtggggcccaggttgctgcgaat

SEQ ID NO: 54013 - DNA, 30 bp, Artificial Sequence
  Synthetic oligonucleotide
cctggcttgagctgcggacctacttcgaat

SEQ ID NO: 54014 - DNA, 30 bp, Artificial Sequence
  Synthetic oligonucleotide
atcgaaggtgagagggccaattcaaggaat

SEQ ID NO: 54015 - DNA, 30 bp, Artificial Sequence
  Synthetic oligonucleotide
tcgcgaaacggttctagcgccctaaggaat

SEQ ID NO: 54016 - DNA, 30 bp, Artificial Sequence
  Synthetic oligonucleotide
ttaactgaggagtaagaagaaaaggggaat

SEQ ID NO: 54017 - DNA, 30 bp, Artificial Sequence
  Synthetic oligonucleotide
ggggaaaagagcggtacatccatatggaat

SEQ ID NO: 54018 - DNA, 30 bp, Artificial Sequence
  Synthetic oligonucleotide
tgcgttgaaggcgccatcaaagaaatgaat

SEQ ID NO: 54019 - DNA, 30 bp, Artificial Sequence
  Synthetic oligonucleotide
aacgggaactgagggtcgaagctgatgaat

SEQ ID NO: 54020 - DNA, 30 bp, Artificial Sequence
  Synthetic oligonucleotide
acggacgaatattgcaggagattgcataat

SEQ ID NO: 54021 - DNA, 30 bp, Artificial Sequence
  Synthetic oligonucleotide
ggagtcatatgggcttcacagagtgataat

SEQ ID NO: 54022 - DNA, 30 bp, Artificial Sequence
  Synthetic oligonucleotide
gcttagacaactcgaaatgtgaaatataat

SEQ ID NO: 54023 - DNA, 30 bp, Artificial Sequence
  Synthetic oligonucleotide
aggtatgcgagctatgggattagaggtaat

SEQ ID NO: 54024 - DNA, 30 bp, Artificial Sequence
  Synthetic oligonucleotide
cggacccagacacacagtacaaatgttaat

SEQ ID NO: 54025 - DNA, 30 bp, Artificial Sequence
  Synthetic oligonucleotide
cgaccctaacgactagcccgacccaaacat

SEQ ID NO: 54026 - DNA, 30 bp, Artificial Sequence
  Synthetic oligonucleotide
ccaaaacacttcggtcatgagattgaacat

SEQ ID NO: 54027 - DNA, 30 bp, Artificial Sequence
  Synthetic oligonucleotide
cgcgagaaatcaaaagctaatcaataacat

SEQ ID NO: 54028 - DNA, 30 bp, Artificial Sequence
  Synthetic oligonucleotide
atgagggggcaggaattctacgtataacat

SEQ ID NO: 54029 - DNA, 30 bp, Artificial Sequence
  Synthetic oligonucleotide
gaatccaaacagcatacgtaagtgacacat

SEQ ID NO: 54030 - DNA, 30 bp, Artificial Sequence
  Synthetic oligonucleotide
ggcgggccacctacgcccgtgccgccacat

SEQ ID NO: 54031 - DNA, 30 bp, Artificial Sequence
  Synthetic oligonucleotide
cgtaagcgcttccgcgtactcagagcacat

SEQ ID NO: 54032 - DNA, 30 bp, Artificial Sequence
  Synthetic oligonucleotide
tgggcacggccctggcaatagcgatcacat

SEQ ID NO: 54033 - DNA, 30 bp, Artificial Sequence
  Synthetic oligonucleotide
gcagaggagtacgtgaaggtgcactgacat

SEQ ID NO: 54034 - DNA, 30 bp, Artificial Sequence
  Synthetic oligonucleotide
ggcacacgttcatagcgtaaacgactacat

SEQ ID NO: 54035 - DNA, 30 bp, Artificial Sequence
  Synthetic oligonucleotide
agaggttgtggcaagcctcatcacctacat

SEQ ID NO: 54036 - DNA, 30 bp, Artificial Sequence
  Synthetic oligonucleotide
tgacacagtagatataacgtagtcctacat

SEQ ID NO: 54037 - DNA, 30 bp, Artificial Sequence
  Synthetic oligonucleotide
cgagatcggaatgataattaagagaaccat

SEQ ID NO: 54038 - DNA, 30 bp, Artificial Sequence
  Synthetic oligonucleotide
acgcctggcaggtcgcaagcggaggaccat

SEQ ID NO: 54039 - DNA, 30 bp, Artificial Sequence
  Synthetic oligonucleotide
acagacgcgggtacgtgaccgtcggaccat

SEQ ID NO: 54040 - DNA, 28 bp, Artificial Sequence
  Synthetic oligonucleotide
tggcccaagtaagctaagtcttgcccat

SEQ ID NO: 54041 - DNA, 30 bp, Artificial Sequence
  Synthetic oligonucleotide
cggtcaaaaaatcgaaagagcggtagccat

SEQ ID NO: 54042 - DNA, 30 bp, Artificial Sequence
  Synthetic oligonucleotide
tcgaagaaatggtacattcaaaacggccat

SEQ ID NO: 54043 - DNA, 30 bp, Artificial Sequence
  Synthetic oligonucleotide
gggcaacccgccaaaccaaaagtaaagcat

SEQ ID NO: 54044 - DNA, 30 bp, Artificial Sequence
  Synthetic oligonucleotide
gcaacaacgaggtcactctgtgagaagcat

SEQ ID NO: 54045 - DNA, 30 bp, Artificial Sequence
  Synthetic oligonucleotide
acaacaattagatggtccgtgggtaagcat

SEQ ID NO: 54046 - DNA, 30 bp, Artificial Sequence
  Synthetic oligonucleotide
acggtcacaacctaaagaggaagctagcat

SEQ ID NO: 54047 - DNA, 30 bp, Artificial Sequence
  Synthetic oligonucleotide
gtctggcggtgaaaaatggagataacgcat

SEQ ID NO: 54048 - DNA, 30 bp, Artificial Sequence
  Synthetic oligonucleotide
caaggcagacctataagattaaagtcgcat

SEQ ID NO: 54049 - DNA, 31 bp, Artificial Sequence
  Synthetic oligonucleotide
agggtcgaaatcctgtcgaactctccggcat

SEQ ID NO: 54050 - DNA, 30 bp, Artificial Sequence
  Synthetic oligonucleotide
gaaggagttcatagacatatccatcggcat

SEQ ID NO: 54051 - DNA, 30 bp, Artificial Sequence
  Synthetic oligonucleotide
ccggcaagctatcatcacgtggtagggcat

SEQ ID NO: 54052 - DNA, 30 bp, Artificial Sequence
  Synthetic oligonucleotide
gattagggcgatttgagtccagtgtggcat

SEQ ID NO: 54053 - DNA, 30 bp, Artificial Sequence
  Synthetic oligonucleotide
gttggggtccccaatcagaataaactgcat

SEQ ID NO: 54054 - DNA, 30 bp, Artificial Sequence
  Synthetic oligonucleotide
gtggtaggagtccactgtcggccaaatcat

SEQ ID NO: 54055 - DNA, 30 bp, Artificial Sequence
  Synthetic oligonucleotide
cgagcgtcatgggtgggtaacagtcatcat

SEQ ID NO: 54056 - DNA, 30 bp, Artificial Sequence
  Synthetic oligonucleotide
ctgaagatagcaacggcagatgaacctcat

SEQ ID NO: 54057 - DNA, 30 bp, Artificial Sequence
  Synthetic oligonucleotide
gcttaaagcacgcccatattacatcctcat

SEQ ID NO: 54058 - DNA, 30 bp, Artificial Sequence
  Synthetic oligonucleotide
ggcgagcacccggccctcgaaaatgctcat

SEQ ID NO: 54059 - DNA, 30 bp, Artificial Sequence
  Synthetic oligonucleotide
gggcggcggcgtacctatgacacatctcat

SEQ ID NO: 54060 - DNA, 30 bp, Artificial Sequence
  Synthetic oligonucleotide
cctcccccttattgaaaaaatggcagtcat

SEQ ID NO: 54061 - DNA, 30 bp, Artificial Sequence
  Synthetic oligonucleotide
acatctagtggcataggcgacttcagtcat

SEQ ID NO: 54062 - DNA, 30 bp, Artificial Sequence
  Synthetic oligonucleotide
acaacagggaatcgtctgagtagaggtcat

SEQ ID NO: 54063 - DNA, 30 bp, Artificial Sequence
  Synthetic oligonucleotide
gacgattcgtttggactgtgaagatgtcat

SEQ ID NO: 54064 - DNA, 30 bp, Artificial Sequence
  Synthetic oligonucleotide
agaggcgatccgaagatgggaagttgtcat

SEQ ID NO: 54065 - DNA, 30 bp, Artificial Sequence
  Synthetic oligonucleotide
tggtccaagatcaaaacgggcaggattcat

SEQ ID NO: 54066 - DNA, 30 bp, Artificial Sequence
  Synthetic oligonucleotide
tgacatacagcgggaaattttacacaagat

SEQ ID NO: 54067 - DNA, 30 bp, Artificial Sequence
  Synthetic oligonucleotide
cgtatacgaagacgggctacggaagaagat

SEQ ID NO: 54068 - DNA, 30 bp, Artificial Sequence
  Synthetic oligonucleotide
ggcagatgtttcaacgctagccgagaagat

SEQ ID NO: 54069 - DNA, 30 bp, Artificial Sequence
  Synthetic oligonucleotide
ggcgggtgctagacacgcaaagacgaagat

SEQ ID NO: 54070 - DNA, 30 bp, Artificial Sequence
  Synthetic oligonucleotide
cataaaatcaggtaggaaatcaagacagat

SEQ ID NO: 54071 - DNA, 30 bp, Artificial Sequence
  Synthetic oligonucleotide
agaatgtacttgtacaacatacggacagat

SEQ ID NO: 54072 - DNA, 30 bp, Artificial Sequence
  Synthetic oligonucleotide
cacaacggttaattaagcgaaagcccagat

SEQ ID NO: 54073 - DNA, 31 bp, Artificial Sequence
  Synthetic oligonucleotide
acaccttggctgcactttagaacatccagat

SEQ ID NO: 54074 - DNA, 30 bp, Artificial Sequence
  Synthetic oligonucleotide
atggtatcgacaacagaaaattatgcagat

SEQ ID NO: 54075 - DNA, 30 bp, Artificial Sequence
  Synthetic oligonucleotide
ggtcgggaacactttgatagtagatcagat

SEQ ID NO: 54076 - DNA, 30 bp, Artificial Sequence
  Synthetic oligonucleotide
gcggatcgccgcacgttggatgcctcagat

SEQ ID NO: 54077 - DNA, 30 bp, Artificial Sequence
  Synthetic oligonucleotide
ttaaactcaccggaggagaccgtctcagat

SEQ ID NO: 54078 - DNA, 30 bp, Artificial Sequence
  Synthetic oligonucleotide
gctagacaccagcagcaccacagccgagat

SEQ ID NO: 54079 - DNA, 30 bp, Artificial Sequence
  Synthetic oligonucleotide
tgcgtagaagtggtcacgcctgatcgagat

SEQ ID NO: 54080 - DNA, 30 bp, Artificial Sequence
  Synthetic oligonucleotide
ataagcgaacagtgggacatcatgggagat

SEQ ID NO: 54081 - DNA, 30 bp, Artificial Sequence
  Synthetic oligonucleotide
ccgcggaaactagatatctatggtggagat

SEQ ID NO: 54082 - DNA, 30 bp, Artificial Sequence
  Synthetic oligonucleotide
ggcaaagtctaccaactgccagtctgagat

SEQ ID NO: 54083 - DNA, 30 bp, Artificial Sequence
  Synthetic oligonucleotide
ggcgacactgcgcgaaaaacggaagtagat

SEQ ID NO: 54084 - DNA, 30 bp, Artificial Sequence
  Synthetic oligonucleotide
agtaagtagagcatgcctcagggcttagat

SEQ ID NO: 54085 - DNA, 30 bp, Artificial Sequence
  Synthetic oligonucleotide
taagtgacggccgtcaggagtggtaacgat

SEQ ID NO: 54086 - DNA, 30 bp, Artificial Sequence
  Synthetic oligonucleotide
agctaagcgacccaactcggaattaacgat

SEQ ID NO: 54087 - DNA, 30 bp, Artificial Sequence
  Synthetic oligonucleotide
caggaattccgaacgaataggagcgacgat

SEQ ID NO: 54088 - DNA, 30 bp, Artificial Sequence
  Synthetic oligonucleotide
tactaactgagagtggtagtagaggacgat

SEQ ID NO: 54089 - DNA, 30 bp, Artificial Sequence
  Synthetic oligonucleotide
agactaaggagcgatttggtgcagtacgat

SEQ ID NO: 54090 - DNA, 30 bp, Artificial Sequence
  Synthetic oligonucleotide
tcgaccacagttgtaatatagcctcccgat

SEQ ID NO: 54091 - DNA, 30 bp, Artificial Sequence
  Synthetic oligonucleotide
aggcttaactgaagaccctcaaattccgat

SEQ ID NO: 54092 - DNA, 30 bp, Artificial Sequence
  Synthetic oligonucleotide
agcaggtaaggcaacgaatgggccagcgat

SEQ ID NO: 54093 - DNA, 30 bp, Artificial Sequence
  Synthetic oligonucleotide
ctggacgttcgagatgccctgctcagcgat

SEQ ID NO: 54094 - DNA, 30 bp, Artificial Sequence
  Synthetic oligonucleotide
tgagtttttcggcaacccagaaagcgcgat

SEQ ID NO: 54095 - DNA, 30 bp, Artificial Sequence
  Synthetic oligonucleotide
acggcaaccattttgggccaactcggcgat

SEQ ID NO: 54096 - DNA, 30 bp, Artificial Sequence
  Synthetic oligonucleotide
cggcctgatccgtaataagttatgtgcgat

SEQ ID NO: 54097 - DNA, 30 bp, Artificial Sequence
  Synthetic oligonucleotide
cgggacgagcttgggtggagctgttgcgat

SEQ ID NO: 54098 - DNA, 30 bp, Artificial Sequence
  Synthetic oligonucleotide
agtcaagagtgacttgcttctctttgcgat

SEQ ID NO: 54099 - DNA, 30 bp, Artificial Sequence
  Synthetic oligonucleotide
aaggactgaacgcaaacgtggatgttcgat

SEQ ID NO: 54100 - DNA, 30 bp, Artificial Sequence
  Synthetic oligonucleotide
cgggcaggtagcgaatttgccgggaaggat

SEQ ID NO: 54101 - DNA, 30 bp, Artificial Sequence
  Synthetic oligonucleotide
gcaacgatttgggccaaaaacattaaggat

SEQ ID NO: 54102 - DNA, 30 bp, Artificial Sequence
  Synthetic oligonucleotide
cagtggagaactatgctgtggtttaaggat

SEQ ID NO: 54103 - DNA, 30 bp, Artificial Sequence
  Synthetic oligonucleotide
atgagaagaagaccggtaaaggaaacggat

SEQ ID NO: 54104 - DNA, 30 bp, Artificial Sequence
  Synthetic oligonucleotide
gtgagtacccagaagttcagaaagccggat

SEQ ID NO: 54105 - DNA, 30 bp, Artificial Sequence
  Synthetic oligonucleotide
gtagagctggaattgagactgtaacgggat

SEQ ID NO: 54106 - DNA, 30 bp, Artificial Sequence
  Synthetic oligonucleotide
ccaagagggaggttactacgccttcgggat

SEQ ID NO: 54107 - DNA, 30 bp, Artificial Sequence
  Synthetic oligonucleotide
gtaggcaaccctattgcgatacacctggat

SEQ ID NO: 54108 - DNA, 30 bp, Artificial Sequence
  Synthetic oligonucleotide
gatacctaacagggatcgacacacttggat

SEQ ID NO: 54109 - DNA, 30 bp, Artificial Sequence
  Synthetic oligonucleotide
acacctaatcggaatctgggacaccctgat

SEQ ID NO: 54110 - DNA, 30 bp, Artificial Sequence
  Synthetic oligonucleotide
gccagggaccgaaaaccaatccatagtgat

SEQ ID NO: 54111 - DNA, 30 bp, Artificial Sequence
  Synthetic oligonucleotide
ctaatgcttagtgggcgaaggttgcgtgat

SEQ ID NO: 54112 - DNA, 30 bp, Artificial Sequence
  Synthetic oligonucleotide
gtgtgggacaagaagagggttcaatgtgat

SEQ ID NO: 54113 - DNA, 30 bp, Artificial Sequence
  Synthetic oligonucleotide
ctcgtccgaatcgagagtagccacattgat

SEQ ID NO: 54114 - DNA, 30 bp, Artificial Sequence
  Synthetic oligonucleotide
cgcttaactaaatagaggatatcagttgat

SEQ ID NO: 54115 - DNA, 30 bp, Artificial Sequence
  Synthetic oligonucleotide
cctgcacgattgcgattaaggagggttgat

SEQ ID NO: 54116 - DNA, 30 bp, Artificial Sequence
  Synthetic oligonucleotide
cgtgacggtgtgggcgtcaatgacacatat

SEQ ID NO: 54117 - DNA, 30 bp, Artificial Sequence
  Synthetic oligonucleotide
cgattagtacacccgtcaagcgtcccatat

SEQ ID NO: 54118 - DNA, 30 bp, Artificial Sequence
  Synthetic oligonucleotide
ttcgtaaaacattgcgtccaaggggcatat

SEQ ID NO: 54119 - DNA, 30 bp, Artificial Sequence
  Synthetic oligonucleotide
agatgagttggaggaaacccgcaaagatat

SEQ ID NO: 54120 - DNA, 30 bp, Artificial Sequence
  Synthetic oligonucleotide
aacatcacgctcagtgcctagcgaagatat

SEQ ID NO: 54121 - DNA, 30 bp, Artificial Sequence
  Synthetic oligonucleotide
tgtcatgaccttcaaaatgaacgtcgatat

SEQ ID NO: 54122 - DNA, 30 bp, Artificial Sequence
  Synthetic oligonucleotide
aagagaggcctcgcccgaccgataggatat

SEQ ID NO: 54123 - DNA, 30 bp, Artificial Sequence
  Synthetic oligonucleotide
cagaagagaacgtattctgagcatggatat

SEQ ID NO: 54124 - DNA, 30 bp, Artificial Sequence
  Synthetic oligonucleotide
cagtgagggaacttcaaagtgatactatat

SEQ ID NO: 54125 - DNA, 30 bp, Artificial Sequence
  Synthetic oligonucleotide
agaccatgtctgggagattggtgtttatat

SEQ ID NO: 54126 - DNA, 31 bp, Artificial Sequence
  Synthetic oligonucleotide
acttattaagcaatacggtgagtaaaactat

SEQ ID NO: 54127 - DNA, 30 bp, Artificial Sequence
  Synthetic oligonucleotide
ggaagacaggggcacttaggaccaaactat

SEQ ID NO: 54128 - DNA, 30 bp, Artificial Sequence
  Synthetic oligonucleotide
cggatgggagcaccgcaagcctgtaactat

SEQ ID NO: 54129 - DNA, 30 bp, Artificial Sequence
  Synthetic oligonucleotide
agagtgcgcacaaaactacttattcactat

SEQ ID NO: 54130 - DNA, 30 bp, Artificial Sequence
  Synthetic oligonucleotide
ctgaaactggcaagagagctctcggactat

SEQ ID NO: 54131 - DNA, 30 bp, Artificial Sequence
  Synthetic oligonucleotide
cagggagccattgcgataacggtatactat

SEQ ID NO: 54132 - DNA, 30 bp, Artificial Sequence
  Synthetic oligonucleotide
cgttgtggtaggaacgttgatatagcctat

SEQ ID NO: 54133 - DNA, 30 bp, Artificial Sequence
  Synthetic oligonucleotide
ttgttttgttctctttttgtgttttcctat

SEQ ID NO: 54134 - DNA, 30 bp, Artificial Sequence
  Synthetic oligonucleotide
gcgaccatgaaattcgcaaaaggatgctat

SEQ ID NO: 54135 - DNA, 30 bp, Artificial Sequence
  Synthetic oligonucleotide
acaaaccggaacccaggaaaagatgtctat

SEQ ID NO: 54136 - DNA, 30 bp, Artificial Sequence
  Synthetic oligonucleotide
gggactagatatttctgaaaagtgaagtat

SEQ ID NO: 54137 - DNA, 30 bp, Artificial Sequence
  Synthetic oligonucleotide
acatcatcggctctacagagatcagagtat

SEQ ID NO: 54138 - DNA, 30 bp, Artificial Sequence
  Synthetic oligonucleotide
atcaacgcaaggcaccgcaagtccgagtat

SEQ ID NO: 54139 - DNA, 30 bp, Artificial Sequence
  Synthetic oligonucleotide
acaatagggtaagaaggtttaaagtagtat

SEQ ID NO: 54140 - DNA, 30 bp, Artificial Sequence
  Synthetic oligonucleotide
acaaagccgggaacaacggctgaaacgtat

SEQ ID NO: 54141 - DNA, 30 bp, Artificial Sequence
  Synthetic oligonucleotide
gagaaacaattatgtagaacccccgcgtat

SEQ ID NO: 54142 - DNA, 30 bp, Artificial Sequence
  Synthetic oligonucleotide
tgacccaggtgacttaacagttgtgcgtat

SEQ ID NO: 54143 - DNA, 30 bp, Artificial Sequence
  Synthetic oligonucleotide
gcagtataagagacgataatggatatgtat

SEQ ID NO: 54144 - DNA, 30 bp, Artificial Sequence
  Synthetic oligonucleotide
ctgaatcgatgtaacgaacaggggaattat

SEQ ID NO: 54145 - DNA, 30 bp, Artificial Sequence
  Synthetic oligonucleotide
tggcccggaagggaaaatcactgttgttat

SEQ ID NO: 54146 - DNA, 30 bp, Artificial Sequence
  Synthetic oligonucleotide
cgccctagagcacagtgcgctaacatttat

SEQ ID NO: 54147 - DNA, 30 bp, Artificial Sequence
  Synthetic oligonucleotide
actggcgcgcgtgcggggcgagaaaaaact

SEQ ID NO: 54148 - DNA, 30 bp, Artificial Sequence
  Synthetic oligonucleotide
ggtagcagaatacgagatgttacaaaaact

SEQ ID NO: 54149 - DNA, 30 bp, Artificial Sequence
  Synthetic oligonucleotide
tgcagggtcgagtaacaccatgatgaaact

SEQ ID NO: 54150 - DNA, 30 bp, Artificial Sequence
  Synthetic oligonucleotide
caaaaacataagagaaaagcgcgtccaact

SEQ ID NO: 54151 - DNA, 30 bp, Artificial Sequence
  Synthetic oligonucleotide
ggggacaacgcgacgccgtataccagaact

SEQ ID NO: 54152 - DNA, 30 bp, Artificial Sequence
  Synthetic oligonucleotide
ggtggcgacggaatctgtattctacgaact

SEQ ID NO: 54153 - DNA, 30 bp, Artificial Sequence
  Synthetic oligonucleotide
ccgtggaggcaggggctagcgggaggaact

SEQ ID NO: 54154 - DNA, 30 bp, Artificial Sequence
  Synthetic oligonucleotide
aagatggtgcgcctacagccagcgggaact

SEQ ID NO: 54155 - DNA, 30 bp, Artificial Sequence
  Synthetic oligonucleotide
tgggacagcccactcgccttcatctgaact

SEQ ID NO: 54156 - DNA, 30 bp, Artificial Sequence
  Synthetic oligonucleotide
acctcgagcaccgagagcggctaaataact

SEQ ID NO: 54157 - DNA, 30 bp, Artificial Sequence
  Synthetic oligonucleotide
catgtgaagaaatagctcagaagattaact

SEQ ID NO: 54158 - DNA, 30 bp, Artificial Sequence
  Synthetic oligonucleotide
gtccacaggttggtctcgatggtgaacact

SEQ ID NO: 54159 - DNA, 30 bp, Artificial Sequence
  Synthetic oligonucleotide
tcagggatacaaggagacagaactaacact

SEQ ID NO: 54160 - DNA, 30 bp, Artificial Sequence
  Synthetic oligonucleotide
cgggttgctgaatcgccagagatctacact

SEQ ID NO: 54161 - DNA, 30 bp, Artificial Sequence
  Synthetic oligonucleotide
gccatacagttcaaacaaaatcaaggcact

SEQ ID NO: 54162 - DNA, 30 bp, Artificial Sequence
  Synthetic oligonucleotide
atcgagggagtgaaccagatgagttgcact

SEQ ID NO: 54163 - DNA, 31 bp, Artificial Sequence
  Synthetic oligonucleotide
agaactccgcgatgtcgaaacagctctcact

SEQ ID NO: 54164 - DNA, 30 bp, Artificial Sequence
  Synthetic oligonucleotide
gcacacaacgagggcaaactggggttcact

SEQ ID NO: 54165 - DNA, 31 bp, Artificial Sequence
  Synthetic oligonucleotide
catttacgaaggtgacaaataagctttcact

SEQ ID NO: 54166 - DNA, 30 bp, Artificial Sequence
  Synthetic oligonucleotide
acgcgactactcaatcgtgagaataagact

SEQ ID NO: 54167 - DNA, 30 bp, Artificial Sequence
  Synthetic oligonucleotide
ctgaagcgagggattgcaactggacagact

SEQ ID NO: 54168 - DNA, 30 bp, Artificial Sequence
  Synthetic oligonucleotide
taccggtagtagaggtgcgacatacagact

SEQ ID NO: 54169 - DNA, 30 bp, Artificial Sequence
  Synthetic oligonucleotide
atggtggaagtgagagtcctaccgcagact

SEQ ID NO: 54170 - DNA, 30 bp, Artificial Sequence
  Synthetic oligonucleotide
gcgacacggacacgacttaccaggcagact

SEQ ID NO: 54171 - DNA, 30 bp, Artificial Sequence
  Synthetic oligonucleotide
cgtcaaattactctccaaataggtcagact

SEQ ID NO: 54172 - DNA, 30 bp, Artificial Sequence
  Synthetic oligonucleotide
tatgcttgaaacagaattcgtagctagact

SEQ ID NO: 54173 - DNA, 30 bp, Artificial Sequence
  Synthetic oligonucleotide
tacatcatggtaaagaatcagctaccgact

SEQ ID NO: 54174 - DNA, 30 bp, Artificial Sequence
  Synthetic oligonucleotide
gctgaagagcgagactcagtcagatcgact

SEQ ID NO: 54175 - DNA, 30 bp, Artificial Sequence
  Synthetic oligonucleotide
catgataacttggacaacaaggaaaggact

SEQ ID NO: 54176 - DNA, 30 bp, Artificial Sequence
  Synthetic oligonucleotide
gcttacacatcgacatcaatacccaggact

SEQ ID NO: 54177 - DNA, 30 bp, Artificial Sequence
  Synthetic oligonucleotide
ctaggctccagcgagcagttacaacggact

SEQ ID NO: 54178 - DNA, 30 bp, Artificial Sequence
  Synthetic oligonucleotide
gggagtcttaatacacattaaaagcggact

SEQ ID NO: 54179 - DNA, 30 bp, Artificial Sequence
  Synthetic oligonucleotide
tcgcgtgacaagaatgacgcatgaatgact

SEQ ID NO: 54180 - DNA, 30 bp, Artificial Sequence
  Synthetic oligonucleotide
tcgttatccggaggaaacgtatggatgact

SEQ ID NO: 54181 - DNA, 30 bp, Artificial Sequence
  Synthetic oligonucleotide
ccaacgggaattataatcaaaccagtgact

SEQ ID NO: 54182 - DNA, 30 bp, Artificial Sequence
  Synthetic oligonucleotide
tgtgtgtgctggagacttaggtcgaatact

SEQ ID NO: 54183 - DNA, 30 bp, Artificial Sequence
  Synthetic oligonucleotide
tggggattctgaaatagaacactgcatact

SEQ ID NO: 54184 - DNA, 30 bp, Artificial Sequence
  Synthetic oligonucleotide
actcagctccggaaactagacaacgatact

SEQ ID NO: 54185 - DNA, 30 bp, Artificial Sequence
  Synthetic oligonucleotide
gcgcctagcaggagaggccgtgtttatact

SEQ ID NO: 54186 - DNA, 30 bp, Artificial Sequence
  Synthetic oligonucleotide
agccgaaggagcttatcaaaatagactact

SEQ ID NO: 54187 - DNA, 30 bp, Artificial Sequence
  Synthetic oligonucleotide
cataacggggagcggacgactgactttact

SEQ ID NO: 54188 - DNA, 30 bp, Artificial Sequence
  Synthetic oligonucleotide
caatagtgaaacacggagaaaccacaacct

SEQ ID NO: 54189 - DNA, 30 bp, Artificial Sequence
  Synthetic oligonucleotide
gggtcagcgggaaaaaaaatctaggaacct

SEQ ID NO: 54190 - DNA, 30 bp, Artificial Sequence
  Synthetic oligonucleotide
ggcattgacaccaatgcgaagggtgaacct

SEQ ID NO: 54191 - DNA, 30 bp, Artificial Sequence
  Synthetic oligonucleotide
ggactgagatgctcttcatgggagacacct

SEQ ID NO: 54192 - DNA, 30 bp, Artificial Sequence
  Synthetic oligonucleotide
ccgtcaaaaaggatacgggcctcagcacct

SEQ ID NO: 54193 - DNA, 30 bp, Artificial Sequence
  Synthetic oligonucleotide
ctcatgtcatagaggggagtcggttcacct

SEQ ID NO: 54194 - DNA, 30 bp, Artificial Sequence
  Synthetic oligonucleotide
tctgaacagagtgagcggagtatcggacct

SEQ ID NO: 54195 - DNA, 30 bp, Artificial Sequence
  Synthetic oligonucleotide
acgcactaaaaatatgtgccaggataccct

SEQ ID NO: 54196 - DNA, 30 bp, Artificial Sequence
  Synthetic oligonucleotide
ggataagtggcctgacacgttgaggagcct

SEQ ID NO: 54197 - DNA, 30 bp, Artificial Sequence
  Synthetic oligonucleotide
gttaaaagaggggcggggatcgatgagcct

SEQ ID NO: 54198 - DNA, 30 bp, Artificial Sequence
  Synthetic oligonucleotide
ccggggagcaaagatacactatttgagcct

SEQ ID NO: 54199 - DNA, 30 bp, Artificial Sequence
  Synthetic oligonucleotide
aggcagactttcataaacgtgcaagcgcct

SEQ ID NO: 54200 - DNA, 30 bp, Artificial Sequence
  Synthetic oligonucleotide
tcgagcaaagtgggctttgtcagcgtgcct

SEQ ID NO: 54201 - DNA, 30 bp, Artificial Sequence
  Synthetic oligonucleotide
gcaccgagaggcttaaacttgggcgtgcct

SEQ ID NO: 54202 - DNA, 30 bp, Artificial Sequence
  Synthetic oligonucleotide
tcgacactgaagagagattcaaagttgcct

SEQ ID NO: 54203 - DNA, 30 bp, Artificial Sequence
  Synthetic oligonucleotide
gataatgggctcctcaaggcaaaacatcct

SEQ ID NO: 54204 - DNA, 30 bp, Artificial Sequence
  Synthetic oligonucleotide
agaataccgagaaactacttctaccatcct

SEQ ID NO: 54205 - DNA, 30 bp, Artificial Sequence
  Synthetic oligonucleotide
ctaggaatctacgtgaggtaagtagctcct

SEQ ID NO: 54206 - DNA, 30 bp, Artificial Sequence
  Synthetic oligonucleotide
aatgtgtaagagaaagcgcgtaattgtcct

SEQ ID NO: 54207 - DNA, 30 bp, Artificial Sequence
  Synthetic oligonucleotide
actggaaacgtaaggccaatggatgttcct

SEQ ID NO: 54208 - DNA, 30 bp, Artificial Sequence
  Synthetic oligonucleotide
ttggtatacggctaactcggaacaaaagct

SEQ ID NO: 54209 - DNA, 30 bp, Artificial Sequence
  Synthetic oligonucleotide
ggtcaatgtaattagccaatcaggcaagct

SEQ ID NO: 54210 - DNA, 30 bp, Artificial Sequence
  Synthetic oligonucleotide
tccttaacgcgaatatcctattgcgaagct

SEQ ID NO: 54211 - DNA, 30 bp, Artificial Sequence
  Synthetic oligonucleotide
tggacccgggcataaactaagggaacagct

SEQ ID NO: 54212 - DNA, 30 bp, Artificial Sequence
  Synthetic oligonucleotide
tgaactggtcacaacgcgtgggttacagct

SEQ ID NO: 54213 - DNA, 30 bp, Artificial Sequence
  Synthetic oligonucleotide
tccatggaccacaaaatagcaaatccagct

SEQ ID NO: 54214 - DNA, 30 bp, Artificial Sequence
  Synthetic oligonucleotide
cgctgacacatgtatgagagacagtcagct

SEQ ID NO: 54215 - DNA, 30 bp, Artificial Sequence
  Synthetic oligonucleotide
ggggagtaagcagcataaaggggacgagct

SEQ ID NO: 54216 - DNA, 30 bp, Artificial Sequence
  Synthetic oligonucleotide
tatagaaggcaccatgattccatgcgagct

SEQ ID NO: 54217 - DNA, 30 bp, Artificial Sequence
  Synthetic oligonucleotide
ggtcaacgaggctaaacagacgtgcgagct

SEQ ID NO: 54218 - DNA, 30 bp, Artificial Sequence
  Synthetic oligonucleotide
acgtcgtgcctacatacatgtgactgagct

SEQ ID NO: 54219 - DNA, 30 bp, Artificial Sequence
  Synthetic oligonucleotide
cagttggggacatagacctgagtcatagct

SEQ ID NO: 54220 - DNA, 30 bp, Artificial Sequence
  Synthetic oligonucleotide
tggatccagtcactcgaggtgacaaacgct

SEQ ID NO: 54221 - DNA, 30 bp, Artificial Sequence
  Synthetic oligonucleotide
gatgaaaagaagatgcaatgcgtatacgct

SEQ ID NO: 54222 - DNA, 30 bp, Artificial Sequence
  Synthetic oligonucleotide
ccctaattaacaccgtcctacggcaccgct

SEQ ID NO: 54223 - DNA, 30 bp, Artificial Sequence
  Synthetic oligonucleotide
tggacacttgggactgagtcttcctccgct

SEQ ID NO: 54224 - DNA, 30 bp, Artificial Sequence
  Synthetic oligonucleotide
tcgggcacgtgccaaaagcaaccaatcgct

SEQ ID NO: 54225 - DNA, 30 bp, Artificial Sequence
  Synthetic oligonucleotide
gcgagcatcgttcatggatccacgttcgct

SEQ ID NO: 54226 - DNA, 30 bp, Artificial Sequence
  Synthetic oligonucleotide
tgtgacttgaagaatagtgcgataaaggct

SEQ ID NO: 54227 - DNA, 30 bp, Artificial Sequence
  Synthetic oligonucleotide
aggctggcccaaaccaggtcagccaaggct

SEQ ID NO: 54228 - DNA, 30 bp, Artificial Sequence
  Synthetic oligonucleotide
agtagcgggtacgaagtaaacggacaggct

SEQ ID NO: 54229 - DNA, 30 bp, Artificial Sequence
  Synthetic oligonucleotide
accgagtcgaattggccagacacgcaggct

SEQ ID NO: 54230 - DNA, 30 bp, Artificial Sequence
  Synthetic oligonucleotide
acagggaatagatcaaccccgagataggct

SEQ ID NO: 54231 - DNA, 30 bp, Artificial Sequence
  Synthetic oligonucleotide
tcaaagagaaaggcggacatctctacggct

SEQ ID NO: 54232 - DNA, 30 bp, Artificial Sequence
  Synthetic oligonucleotide
ccaactcgacgaatggagagaagcgcggct

SEQ ID NO: 54233 - DNA, 30 bp, Artificial Sequence
  Synthetic oligonucleotide
gaatgacctaagacgaaactaactgcggct

SEQ ID NO: 54234 - DNA, 30 bp, Artificial Sequence
  Synthetic oligonucleotide
atcgtgaaaagtggtggcaatgtttcggct

SEQ ID NO: 54235 - DNA, 30 bp, Artificial Sequence
  Synthetic oligonucleotide
gggactcgacacgtccgactgtgaagggct

SEQ ID NO: 54236 - DNA, 30 bp, Artificial Sequence
  Synthetic oligonucleotide
gtaagaggagccacaaagagcctacgggct

SEQ ID NO: 54237 - DNA, 30 bp, Artificial Sequence
  Synthetic oligonucleotide
acaattgggccgggaactactcagatggct

SEQ ID NO: 54238 - DNA, 30 bp, Artificial Sequence
  Synthetic oligonucleotide
aacacgctgaaacaatgtcctgatatggct

SEQ ID NO: 54239 - DNA, 30 bp, Artificial Sequence
  Synthetic oligonucleotide
tggggcatggagaacgtgctcaggctggct

SEQ ID NO: 54240 - DNA, 30 bp, Artificial Sequence
  Synthetic oligonucleotide
cgacgaccaggcttttgcgccatgttggct

SEQ ID NO: 54241 - DNA, 30 bp, Artificial Sequence
  Synthetic oligonucleotide
cgggatattagggcacaatgcgcaaatgct

SEQ ID NO: 54242 - DNA, 30 bp, Artificial Sequence
  Synthetic oligonucleotide
gacaatggtttggaccacgctacgcctgct

SEQ ID NO: 54243 - DNA, 30 bp, Artificial Sequence
  Synthetic oligonucleotide
taaaacatcattcatctaagtctgcgtgct

SEQ ID NO: 54244 - DNA, 30 bp, Artificial Sequence
  Synthetic oligonucleotide
agtaggctgcatgttagaggaaggggtgct

SEQ ID NO: 54245 - DNA, 30 bp, Artificial Sequence
  Synthetic oligonucleotide
gtcgaaaccggtggtacacggagggttgct

SEQ ID NO: 54246 - DNA, 30 bp, Artificial Sequence
  Synthetic oligonucleotide
tccatacaggataccttcgaaccacaatct

SEQ ID NO: 54247 - DNA, 30 bp, Artificial Sequence
  Synthetic oligonucleotide
tgagggtcaggaggaatgttttacgaatct

SEQ ID NO: 54248 - DNA, 30 bp, Artificial Sequence
  Synthetic oligonucleotide
cgacgtcgtgaagcgccggctacatcatct

SEQ ID NO: 54249 - DNA, 30 bp, Artificial Sequence
  Synthetic oligonucleotide
tgaccacgaacacctgtatctgtgcgatct

SEQ ID NO: 54250 - DNA, 30 bp, Artificial Sequence
  Synthetic oligonucleotide
ggcaaaagcggcaacagggtaaaaggatct

SEQ ID NO: 54251 - DNA, 30 bp, Artificial Sequence
  Synthetic oligonucleotide
tctgaacaaaaagaacacataagctgatct

SEQ ID NO: 54252 - DNA, 30 bp, Artificial Sequence
  Synthetic oligonucleotide
acgtatccgagataaggtgtcgggtgatct

SEQ ID NO: 54253 - DNA, 30 bp, Artificial Sequence
  Synthetic oligonucleotide
acgtacctgtgaagcgccatagtgtgatct

SEQ ID NO: 54254 - DNA, 30 bp, Artificial Sequence
  Synthetic oligonucleotide
cgaaaattgcaatatggtgacggaatatct

SEQ ID NO: 54255 - DNA, 30 bp, Artificial Sequence
  Synthetic oligonucleotide
tagagggactaacacatctgatcagactct

SEQ ID NO: 54256 - DNA, 30 bp, Artificial Sequence
  Synthetic oligonucleotide
ggggctgtgtgcgaacctactctacagtct

SEQ ID NO: 54257 - DNA, 30 bp, Artificial Sequence
  Synthetic oligonucleotide
gtagcgcgatcgtgtggtcttgttccgtct

SEQ ID NO: 54258 - DNA, 30 bp, Artificial Sequence
  Synthetic oligonucleotide
tgggcactctattgcaaagtgagagcgtct

SEQ ID NO: 54259 - DNA, 30 bp, Artificial Sequence
  Synthetic oligonucleotide
cggaatataagcttggtgcgtacctcgtct

SEQ ID NO: 54260 - DNA, 30 bp, Artificial Sequence
  Synthetic oligonucleotide
tgtcccggctctggttggaaaagctcgtct

SEQ ID NO: 54261 - DNA, 30 bp, Artificial Sequence
  Synthetic oligonucleotide
gcgtaaaacgctgagtactaccagaggtct

SEQ ID NO: 54262 - DNA, 30 bp, Artificial Sequence
  Synthetic oligonucleotide
agataactttaacgaaggtcggatggttct

SEQ ID NO: 54263 - DNA, 30 bp, Artificial Sequence
  Synthetic oligonucleotide
atcgcaggccagaggaagatgtaaaaaagt

SEQ ID NO: 54264 - DNA, 30 bp, Artificial Sequence
  Synthetic oligonucleotide
tcggggtacgttctgaaccaggccaaaagt

SEQ ID NO: 54265 - DNA, 31 bp, Artificial Sequence
  Synthetic oligonucleotide
ggcccgatgtacaataaacgggtatcaaagt

SEQ ID NO: 54266 - DNA, 30 bp, Artificial Sequence
  Synthetic oligonucleotide
aaggtagatctcgatatatcctaaacaagt

SEQ ID NO: 54267 - DNA, 31 bp, Artificial Sequence
  Synthetic oligonucleotide
aaagaatgaagtgaaagtactgaacacaagt

SEQ ID NO: 54268 - DNA, 30 bp, Artificial Sequence
  Synthetic oligonucleotide
tgggcttagatctcatcggcgtggacaagt

SEQ ID NO: 54269 - DNA, 30 bp, Artificial Sequence
  Synthetic oligonucleotide
tctggagagcctccgactcatggtacaagt

SEQ ID NO: 54270 - DNA, 30 bp, Artificial Sequence
  Synthetic oligonucleotide
aaaggcaagtgccagttctagtcggcaagt

SEQ ID NO: 54271 - DNA, 30 bp, Artificial Sequence
  Synthetic oligonucleotide
aggaggacctggcatttaatccgatcaagt

SEQ ID NO: 54272 - DNA, 30 bp, Artificial Sequence
  Synthetic oligonucleotide
tgtccgagatcctagtagaacagaagaagt

SEQ ID NO: 54273 - DNA, 30 bp, Artificial Sequence
  Synthetic oligonucleotide
gtcaggctgggaatccgtgtgaagcgaagt

SEQ ID NO: 54274 - DNA, 30 bp, Artificial Sequence
  Synthetic oligonucleotide
taccaggcactgtcaaaacgatcgcgaagt

SEQ ID NO: 54275 - DNA, 30 bp, Artificial Sequence
  Synthetic oligonucleotide
gaaacgtctctgagcaaataaaggtgaagt

SEQ ID NO: 54276 - DNA, 30 bp, Artificial Sequence
  Synthetic oligonucleotide
agctaaaggcgtgtacaataggtcctaagt

SEQ ID NO: 54277 - DNA, 30 bp, Artificial Sequence
  Synthetic oligonucleotide
taacggtatagtcgagattgctttgtaagt

SEQ ID NO: 54278 - DNA, 30 bp, Artificial Sequence
  Synthetic oligonucleotide
tatgcacactataaacaggtgatattaagt

SEQ ID NO: 54279 - DNA, 30 bp, Artificial Sequence
  Synthetic oligonucleotide
tgaagttcaaagaccctgttacctcacagt

SEQ ID NO: 54280 - DNA, 30 bp, Artificial Sequence
  Synthetic oligonucleotide
agatacttaaacgaacaatatgtagacagt

SEQ ID NO: 54281 - DNA, 30 bp, Artificial Sequence
  Synthetic oligonucleotide
cgtcgggcggaccaatatcaccggaccagt

SEQ ID NO: 54282 - DNA, 30 bp, Artificial Sequence
  Synthetic oligonucleotide
cgatgcacctgacacgtaataaactccagt

SEQ ID NO: 54283 - DNA, 31 bp, Artificial Sequence
  Synthetic oligonucleotide
tgaccaacggattgaggctcacccgagcagt

SEQ ID NO: 54284 - DNA, 30 bp, Artificial Sequence
  Synthetic oligonucleotide
agggtaacatagtgaactccgctgagcagt

SEQ ID NO: 54285 - DNA, 30 bp, Artificial Sequence
  Synthetic oligonucleotide
tccaaaaaacagaacaggcgtgggggcagt

SEQ ID NO: 54286 - DNA, 30 bp, Artificial Sequence
  Synthetic oligonucleotide
caccttatgcaagaaaggcacatagtcagt

SEQ ID NO: 54287 - DNA, 30 bp, Artificial Sequence
  Synthetic oligonucleotide
ttgggatgtgggtcaaaaggtcgattcagt

SEQ ID NO: 54288 - DNA, 30 bp, Artificial Sequence
  Synthetic oligonucleotide
aacggcagctagacttcatgcatcttcagt

SEQ ID NO: 54289 - DNA, 30 bp, Artificial Sequence
  Synthetic oligonucleotide
aggcagagattatgagtaacaaagttcagt

SEQ ID NO: 54290 - DNA, 30 bp, Artificial Sequence
  Synthetic oligonucleotide
gcgtgggtcagtgtacgtcatagaaagagt

SEQ ID NO: 54291 - DNA, 30 bp, Artificial Sequence
  Synthetic oligonucleotide
aaccagctatggcggaaggtgcgaaagagt

SEQ ID NO: 54292 - DNA, 30 bp, Artificial Sequence
  Synthetic oligonucleotide
gaggttaacaagcatcaaacagccaagagt

SEQ ID NO: 54293 - DNA, 30 bp, Artificial Sequence
  Synthetic oligonucleotide
aatcacataaacgacgtgacggcacagagt

SEQ ID NO: 54294 - DNA, 30 bp, Artificial Sequence
  Synthetic oligonucleotide
gaagcgagcaattaaatggggactcagagt

SEQ ID NO: 54295 - DNA, 30 bp, Artificial Sequence
  Synthetic oligonucleotide
aactagggaattcggtgctaccacgagagt

SEQ ID NO: 54296 - DNA, 30 bp, Artificial Sequence
  Synthetic oligonucleotide
cttaaggcttaaagaagtagccatgagagt

SEQ ID NO: 54297 - DNA, 30 bp, Artificial Sequence
  Synthetic oligonucleotide
ggcgcaccgactacgcgtgcgtgtgagagt

SEQ ID NO: 54298 - DNA, 30 bp, Artificial Sequence
  Synthetic oligonucleotide
aagagtgtcggggaataggataggtagagt

SEQ ID NO: 54299 - DNA, 28 bp, Artificial Sequence
  Synthetic oligonucleotide
tccagatctggggactgtgcgaacgagt

SEQ ID NO: 54300 - DNA, 30 bp, Artificial Sequence
  Synthetic oligonucleotide
acaaagagccctcgccaatataatacgagt

SEQ ID NO: 54301 - DNA, 30 bp, Artificial Sequence
  Synthetic oligonucleotide
cgaatgtcgacggaattagccaacccgagt

SEQ ID NO: 54302 - DNA, 30 bp, Artificial Sequence
  Synthetic oligonucleotide
tcagagcattcgagctgggtggggccgagt

SEQ ID NO: 54303 - DNA, 30 bp, Artificial Sequence
  Synthetic oligonucleotide
aatgacagagcgaccagaccgtgagcgagt

SEQ ID NO: 54304 - DNA, 30 bp, Artificial Sequence
  Synthetic oligonucleotide
aacatcgcggaatggacttgtcgtcggagt

SEQ ID NO: 54305 - DNA, 30 bp, Artificial Sequence
  Synthetic oligonucleotide
tatcaggcaagccggatctctagagggagt

SEQ ID NO: 54306 - DNA, 30 bp, Artificial Sequence
  Synthetic oligonucleotide
gttaaggaataaggtatctagtagtggagt

SEQ ID NO: 54307 - DNA, 30 bp, Artificial Sequence
  Synthetic oligonucleotide
ggcgggagtagttatttcgccttgtggagt

SEQ ID NO: 54308 - DNA, 30 bp, Artificial Sequence
  Synthetic oligonucleotide
gggacgatcaatattagaatgaagatgagt

SEQ ID NO: 54309 - DNA, 30 bp, Artificial Sequence
  Synthetic oligonucleotide
gcacaaatagagggggatgtagatctgagt

SEQ ID NO: 54310 - DNA, 30 bp, Artificial Sequence
  Synthetic oligonucleotide
ggcggatgctggatgtgataccggttgagt

SEQ ID NO: 54311 - DNA, 30 bp, Artificial Sequence
  Synthetic oligonucleotide
cgaccacggagtcagtgagatcaggatagt

SEQ ID NO: 54312 - DNA, 30 bp, Artificial Sequence
  Synthetic oligonucleotide
tccgtggagatctcccactagagcggtagt

SEQ ID NO: 54313 - DNA, 30 bp, Artificial Sequence
  Synthetic oligonucleotide
gggaatctagaacagaaaggtgtgtgtagt

SEQ ID NO: 54314 - DNA, 30 bp, Artificial Sequence
  Synthetic oligonucleotide
acggagcgtattacctgtaaggctcaacgt

SEQ ID NO: 54315 - DNA, 30 bp, Artificial Sequence
  Synthetic oligonucleotide
cgctatgtgcccgaacagattaaaacacgt

SEQ ID NO: 54316 - DNA, 30 bp, Artificial Sequence
  Synthetic oligonucleotide
tacggggaaacacggaataacataacacgt

SEQ ID NO: 54317 - DNA, 30 bp, Artificial Sequence
  Synthetic oligonucleotide
gtacgagcatctgaaatcaggctcacacgt

SEQ ID NO: 54318 - DNA, 30 bp, Artificial Sequence
  Synthetic oligonucleotide
caggaggctgaatcctcacataatgcacgt

SEQ ID NO: 54319 - DNA, 30 bp, Artificial Sequence
  Synthetic oligonucleotide
aggccttagggggagggatcgttgagacgt

SEQ ID NO: 54320 - DNA, 30 bp, Artificial Sequence
  Synthetic oligonucleotide
atataggggcgtcaaatcccaggaggacgt

SEQ ID NO: 54321 - DNA, 30 bp, Artificial Sequence
  Synthetic oligonucleotide
gacgatctagaccaagtatgagcatgacgt

SEQ ID NO: 54322 - DNA, 30 bp, Artificial Sequence
  Synthetic oligonucleotide
atccagtgctgcagtcggacaatggtacgt

SEQ ID NO: 54323 - DNA, 30 bp, Artificial Sequence
  Synthetic oligonucleotide
gccagggacgatatatgagtatgtgtacgt

SEQ ID NO: 54324 - DNA, 30 bp, Artificial Sequence
  Synthetic oligonucleotide
gcgagcgccctaatgaatctgaagttacgt

SEQ ID NO: 54325 - DNA, 30 bp, Artificial Sequence
  Synthetic oligonucleotide
ttgtgaaaggacaataagaagtagcaccgt

SEQ ID NO: 54326 - DNA, 30 bp, Artificial Sequence
  Synthetic oligonucleotide
ctgatacggcgaaccgtggcagaatgccgt

SEQ ID NO: 54327 - DNA, 30 bp, Artificial Sequence
  Synthetic oligonucleotide
gtagatccagaaactaccgttagcatccgt

SEQ ID NO: 54328 - DNA, 30 bp, Artificial Sequence
  Synthetic oligonucleotide
ggtgcacgtcaataggaccaggagttccgt

SEQ ID NO: 54329 - DNA, 30 bp, Artificial Sequence
  Synthetic oligonucleotide
tttgaccggaactcgaatacagaagagcgt

SEQ ID NO: 54330 - DNA, 30 bp, Artificial Sequence
  Synthetic oligonucleotide
tggtgtgctacagggcgaggaaccacgcgt

SEQ ID NO: 54331 - DNA, 30 bp, Artificial Sequence
  Synthetic oligonucleotide
gtaagggccagcgacgagaataaaccgcgt

SEQ ID NO: 54332 - DNA, 30 bp, Artificial Sequence
  Synthetic oligonucleotide
atccacgtcatccaggacgaaatcgcgcgt

SEQ ID NO: 54333 - DNA, 30 bp, Artificial Sequence
  Synthetic oligonucleotide
catctgaccactaacatgtaaatatcgcgt

SEQ ID NO: 54334 - DNA, 30 bp, Artificial Sequence
  Synthetic oligonucleotide
cgtaatgagggggcaacatagagacggcgt

SEQ ID NO: 54335 - DNA, 30 bp, Artificial Sequence
  Synthetic oligonucleotide
agggcaagacctaaaccggcctggctgcgt

SEQ ID NO: 54336 - DNA, 30 bp, Artificial Sequence
  Synthetic oligonucleotide
tcgtcatagggaaaaggctgatctctgcgt

SEQ ID NO: 54337 - DNA, 30 bp, Artificial Sequence
  Synthetic oligonucleotide
tcaatagagtccggcggtacggtagtgcgt

SEQ ID NO: 54338 - DNA, 30 bp, Artificial Sequence
  Synthetic oligonucleotide
agccaaaactcagagctagtgaccgtgcgt

SEQ ID NO: 54339 - DNA, 30 bp, Artificial Sequence
  Synthetic oligonucleotide
atcgtccatgtttatctcgtcggggtgcgt

SEQ ID NO: 54340 - DNA, 30 bp, Artificial Sequence
  Synthetic oligonucleotide
ggctgatctcaaaagatacaaggattgcgt

SEQ ID NO: 54341 - DNA, 30 bp, Artificial Sequence
  Synthetic oligonucleotide
tcggctgacgatgggtctgggtctaatcgt

SEQ ID NO: 54342 - DNA, 30 bp, Artificial Sequence
  Synthetic oligonucleotide
agggccccctgccagaaagtgtctaatcgt

SEQ ID NO: 54343 - DNA, 30 bp, Artificial Sequence
  Synthetic oligonucleotide
tatcgaacatccctggctagcggacatcgt

SEQ ID NO: 54344 - DNA, 30 bp, Artificial Sequence
  Synthetic oligonucleotide
gcaagtaggctacacgaagacttcgatcgt

SEQ ID NO: 54345 - DNA, 30 bp, Artificial Sequence
  Synthetic oligonucleotide
ggacgaaatcaagagccttagcaggatcgt

SEQ ID NO: 54346 - DNA, 30 bp, Artificial Sequence
  Synthetic oligonucleotide
tggtctgtagacagattaaactcacctcgt

SEQ ID NO: 54347 - DNA, 30 bp, Artificial Sequence
  Synthetic oligonucleotide
cacagagaactcttttggaagtggagtcgt

SEQ ID NO: 54348 - DNA, 30 bp, Artificial Sequence
  Synthetic oligonucleotide
agggaatacaaaggttccggaaccattcgt

SEQ ID NO: 54349 - DNA, 30 bp, Artificial Sequence
  Synthetic oligonucleotide
tcgttagctgggggatctggccgaaaaggt

SEQ ID NO: 54350 - DNA, 30 bp, Artificial Sequence
  Synthetic oligonucleotide
caacggccaaagctaatttcaggaaaaggt

SEQ ID NO: 54351 - DNA, 30 bp, Artificial Sequence
  Synthetic oligonucleotide
tgcgggctggtacatgacatcgtcaaaggt

SEQ ID NO: 54352 - DNA, 30 bp, Artificial Sequence
  Synthetic oligonucleotide
atggagggcacacaaaagcaaatagaaggt

SEQ ID NO: 54353 - DNA, 30 bp, Artificial Sequence
  Synthetic oligonucleotide
ctacacaggtggggaccagcggaggaaggt

SEQ ID NO: 54354 - DNA, 30 bp, Artificial Sequence
  Synthetic oligonucleotide
gcttgtagccgagggtactgcaatgaaggt

SEQ ID NO: 54355 - DNA, 30 bp, Artificial Sequence
  Synthetic oligonucleotide
atgtaaggtcatcagtcgagtagctaaggt

SEQ ID NO: 54356 - DNA, 30 bp, Artificial Sequence
  Synthetic oligonucleotide
tatcgtctactgaaataagtaaggtcaggt

SEQ ID NO: 54357 - DNA, 30 bp, Artificial Sequence
  Synthetic oligonucleotide
gctacgacagatgccaggattaggtcaggt

SEQ ID NO: 54358 - DNA, 30 bp, Artificial Sequence
  Synthetic oligonucleotide
tcgttccaacagcacgacatgtgaagaggt

SEQ ID NO: 54359 - DNA, 30 bp, Artificial Sequence
  Synthetic oligonucleotide
tagagctagacggctgaagatatcagaggt

SEQ ID NO: 54360 - DNA, 30 bp, Artificial Sequence
  Synthetic oligonucleotide
aacgggcgggataaaggaagcgtaggaggt

SEQ ID NO: 54361 - DNA, 30 bp, Artificial Sequence
  Synthetic oligonucleotide
acgaatggcgtcgatgtgttagggtgaggt

SEQ ID NO: 54362 - DNA, 30 bp, Artificial Sequence
  Synthetic oligonucleotide
cgaagtgttaattgcccgctgttcataggt

SEQ ID NO: 54363 - DNA, 30 bp, Artificial Sequence
  Synthetic oligonucleotide
agtatacaacgcaaggtaagaaagataggt

SEQ ID NO: 54364 - DNA, 30 bp, Artificial Sequence
  Synthetic oligonucleotide
gcagtcgcgtatccaactagaactataggt

SEQ ID NO: 54365 - DNA, 30 bp, Artificial Sequence
  Synthetic oligonucleotide
gactacggtccatagggcagaattttaggt

SEQ ID NO: 54366 - DNA, 30 bp, Artificial Sequence
  Synthetic oligonucleotide
tgagttcgccaggcaaaaacgtgtgccggt

SEQ ID NO: 54367 - DNA, 30 bp, Artificial Sequence
  Synthetic oligonucleotide
acagcactacgagaatagggggcgagcggt

SEQ ID NO: 54368 - DNA, 30 bp, Artificial Sequence
  Synthetic oligonucleotide
gtaagtcagaactaggggagtagcggcggt

SEQ ID NO: 54369 - DNA, 30 bp, Artificial Sequence
  Synthetic oligonucleotide
gcgtgcgtggttaatagtccaagaatcggt

SEQ ID NO: 54370 - DNA, 30 bp, Artificial Sequence
  Synthetic oligonucleotide
gagccgggagggtgagggagggtactcggt

SEQ ID NO: 54371 - DNA, 30 bp, Artificial Sequence
  Synthetic oligonucleotide
tacgtggaaaagtccgcgggctcagtcggt

SEQ ID NO: 54372 - DNA, 30 bp, Artificial Sequence
  Synthetic oligonucleotide
cagaaccagagtcctacagtgagtgtcggt

SEQ ID NO: 54373 - DNA, 30 bp, Artificial Sequence
  Synthetic oligonucleotide
atgccgtgagtcaaatacagccgggagggt

SEQ ID NO: 54374 - DNA, 30 bp, Artificial Sequence
  Synthetic oligonucleotide
agatatagcgagggaagcttgaatgagggt

SEQ ID NO: 54375 - DNA, 30 bp, Artificial Sequence
  Synthetic oligonucleotide
tcgcgggctgactgtaggtccgaatagggt

SEQ ID NO: 54376 - DNA, 30 bp, Artificial Sequence
  Synthetic oligonucleotide
cgacggacgagttaaactgtcgaatagggt

SEQ ID NO: 54377 - DNA, 30 bp, Artificial Sequence
  Synthetic oligonucleotide
ggaagagcgggtccacttggagggtcgggt

SEQ ID NO: 54378 - DNA, 30 bp, Artificial Sequence
  Synthetic oligonucleotide
aggagcgcagtcctccgaaaggatatgggt

SEQ ID NO: 54379 - DNA, 30 bp, Artificial Sequence
  Synthetic oligonucleotide
aggaaccttgagaagtgacttaacctgggt

SEQ ID NO: 54380 - DNA, 30 bp, Artificial Sequence
  Synthetic oligonucleotide
aaaagagatcaaattaagatggtagtgggt

SEQ ID NO: 54381 - DNA, 30 bp, Artificial Sequence
  Synthetic oligonucleotide
cgaaagctctacaggtggggaggggtgggt

SEQ ID NO: 54382 - DNA, 30 bp, Artificial Sequence
  Synthetic oligonucleotide
tatagcgacagcggtcagcacgatgtgggt

SEQ ID NO: 54383 - DNA, 30 bp, Artificial Sequence
  Synthetic oligonucleotide
acaatggtaactagttgagacagattgggt

SEQ ID NO: 54384 - DNA, 30 bp, Artificial Sequence
  Synthetic oligonucleotide
tgagagcaggaggcaaacttacgctatggt

SEQ ID NO: 54385 - DNA, 30 bp, Artificial Sequence
  Synthetic oligonucleotide
aggtcgaaaacggataagcatatggctggt

SEQ ID NO: 54386 - DNA, 30 bp, Artificial Sequence
  Synthetic oligonucleotide
cgagacatcacgtatcatgggtcaagtggt

SEQ ID NO: 54387 - DNA, 30 bp, Artificial Sequence
  Synthetic oligonucleotide
taacaccgaggctatacgatcagttttggt

SEQ ID NO: 54388 - DNA, 30 bp, Artificial Sequence
  Synthetic oligonucleotide
gagactgggaaggacatcagggaaaaatgt

SEQ ID NO: 54389 - DNA, 30 bp, Artificial Sequence
  Synthetic oligonucleotide
atacattggggagaatcaggggcaaaatgt

SEQ ID NO: 54390 - DNA, 30 bp, Artificial Sequence
  Synthetic oligonucleotide
tgaacacgcaaatttattataactgcatgt

SEQ ID NO: 54391 - DNA, 30 bp, Artificial Sequence
  Synthetic oligonucleotide
gctgaggactagatatattggtaccgatgt

SEQ ID NO: 54392 - DNA, 30 bp, Artificial Sequence
  Synthetic oligonucleotide
ggcgagctcgttggaactgattaccgatgt

SEQ ID NO: 54393 - DNA, 30 bp, Artificial Sequence
  Synthetic oligonucleotide
agtacagccgccaaatatgaagcgcgatgt

SEQ ID NO: 54394 - DNA, 30 bp, Artificial Sequence
  Synthetic oligonucleotide
taccgcgggttgatcaaggatccaggatgt

SEQ ID NO: 54395 - DNA, 30 bp, Artificial Sequence
  Synthetic oligonucleotide
ggagaggtaagtgtcatcgcagacggatgt

SEQ ID NO: 54396 - DNA, 30 bp, Artificial Sequence
  Synthetic oligonucleotide
agagaaaatttcacacagccgggtcactgt

SEQ ID NO: 54397 - DNA, 30 bp, Artificial Sequence
  Synthetic oligonucleotide
ttgggggcaaggcaagtacttaaaccctgt

SEQ ID NO: 54398 - DNA, 30 bp, Artificial Sequence
  Synthetic oligonucleotide
tccgacgaggtcaggagtaactgtggctgt

SEQ ID NO: 54399 - DNA, 30 bp, Artificial Sequence
  Synthetic oligonucleotide
aacggtgaggaatcagtacccacattctgt

SEQ ID NO: 54400 - DNA, 30 bp, Artificial Sequence
  Synthetic oligonucleotide
cgaacacgaagggagtataatggtaagtgt

SEQ ID NO: 54401 - DNA, 30 bp, Artificial Sequence
  Synthetic oligonucleotide
catgctactagattcaggagaaggtagtgt

SEQ ID NO: 54402 - DNA, 30 bp, Artificial Sequence
  Synthetic oligonucleotide
aggctgaggccatcttgagcatcgacgtgt

SEQ ID NO: 54403 - DNA, 30 bp, Artificial Sequence
  Synthetic oligonucleotide
cagggagagtggaatgtcttcggcccgtgt

SEQ ID NO: 54404 - DNA, 30 bp, Artificial Sequence
  Synthetic oligonucleotide
cgtgaccgaatgttcgtgaaaggtgcgtgt

SEQ ID NO: 54405 - DNA, 30 bp, Artificial Sequence
  Synthetic oligonucleotide
tggactacaggctacgcgttgcgatcgtgt

SEQ ID NO: 54406 - DNA, 30 bp, Artificial Sequence
  Synthetic oligonucleotide
cctgacctcaaggagaggtgagaaaggtgt

SEQ ID NO: 54407 - DNA, 30 bp, Artificial Sequence
  Synthetic oligonucleotide
aaaccggtgaaccacaaaatcgcgaggtgt

SEQ ID NO: 54408 - DNA, 30 bp, Artificial Sequence
  Synthetic oligonucleotide
catgcccgtgaactacggttgggtgggtgt

SEQ ID NO: 54409 - DNA, 30 bp, Artificial Sequence
  Synthetic oligonucleotide
aggcggactagacgccggatcaattggtgt

SEQ ID NO: 54410 - DNA, 30 bp, Artificial Sequence
  Synthetic oligonucleotide
agagtctaccaagggtcaggttcgctgtgt

SEQ ID NO: 54411 - DNA, 30 bp, Artificial Sequence
  Synthetic oligonucleotide
gcagtgcagccatggaggattgtggtgtgt

SEQ ID NO: 54412 - DNA, 30 bp, Artificial Sequence
  Synthetic oligonucleotide
tcgtcaaacggaaggtgaacgaaattgtgt

SEQ ID NO: 54413 - DNA, 30 bp, Artificial Sequence
  Synthetic oligonucleotide
gaggaaaaagaaagtgaggtctatttgtgt

SEQ ID NO: 54414 - DNA, 30 bp, Artificial Sequence
  Synthetic oligonucleotide
tcaggagcaattcggcaaccacgaaattgt

SEQ ID NO: 54415 - DNA, 30 bp, Artificial Sequence
  Synthetic oligonucleotide
gggagttacggctgagtaacgtccaattgt

SEQ ID NO: 54416 - DNA, 30 bp, Artificial Sequence
  Synthetic oligonucleotide
agggtcaacgatacaaggtcatactattgt

SEQ ID NO: 54417 - DNA, 30 bp, Artificial Sequence
  Synthetic oligonucleotide
ggttaatattgaaaaaagaggcccacttgt

SEQ ID NO: 54418 - DNA, 30 bp, Artificial Sequence
  Synthetic oligonucleotide
tgtcaggggcgtgatgggcatgctggttgt

SEQ ID NO: 54419 - DNA, 30 bp, Artificial Sequence
  Synthetic oligonucleotide
cacgtactttcgaaaaagcactaagtttgt

SEQ ID NO: 54420 - DNA, 30 bp, Artificial Sequence
  Synthetic oligonucleotide
aacgatacgagtgtacagatagaggtttgt

SEQ ID NO: 54421 - DNA, 30 bp, Artificial Sequence
  Synthetic oligonucleotide
ttgggtgtggcaaggcgatatgtaaaaatt

SEQ ID NO: 54422 - DNA, 30 bp, Artificial Sequence
  Synthetic oligonucleotide
gggtggcgacgatgtgagagacacgaaatt

SEQ ID NO: 54423 - DNA, 30 bp, Artificial Sequence
  Synthetic oligonucleotide
cgtcatttgctttaagccaataccgaaatt

SEQ ID NO: 54424 - DNA, 30 bp, Artificial Sequence
  Synthetic oligonucleotide
cactgacaatcggcaagatggtgcgaaatt

SEQ ID NO: 54425 - DNA, 30 bp, Artificial Sequence
  Synthetic oligonucleotide
gctgaatccagtcagtctatccgtgaaatt

SEQ ID NO: 54426 - DNA, 31 bp, Artificial Sequence
  Synthetic oligonucleotide
ggatacgttgtgcaacgcctccactccaatt

SEQ ID NO: 54427 - DNA, 30 bp, Artificial Sequence
  Synthetic oligonucleotide
gcgtcaaggattagtgaagacatggcaatt

SEQ ID NO: 54428 - DNA, 31 bp, Artificial Sequence
  Synthetic oligonucleotide
cctgaatagcatgtatatcaagatctcaatt

SEQ ID NO: 54429 - DNA, 30 bp, Artificial Sequence
  Synthetic oligonucleotide
ggccggggcagtatcaacctatacagaatt

SEQ ID NO: 54430 - DNA, 30 bp, Artificial Sequence
  Synthetic oligonucleotide
gcaagggtatattagtaacggcatggaatt

SEQ ID NO: 54431 - DNA, 30 bp, Artificial Sequence
  Synthetic oligonucleotide
ggagacctgtctcatcaaggagaatgaatt

SEQ ID NO: 54432 - DNA, 30 bp, Artificial Sequence
  Synthetic oligonucleotide
cacccaccactaatgtcgaaagtatgaatt

SEQ ID NO: 54433 - DNA, 30 bp, Artificial Sequence
  Synthetic oligonucleotide
cccatcctgataaaaccatcgagctgaatt

SEQ ID NO: 54434 - DNA, 30 bp, Artificial Sequence
  Synthetic oligonucleotide
caccgacaagattgagttggcaacgacatt

SEQ ID NO: 54435 - DNA, 30 bp, Artificial Sequence
  Synthetic oligonucleotide
gcgacacgcaaattggaaaacgtgtacatt

SEQ ID NO: 54436 - DNA, 30 bp, Artificial Sequence
  Synthetic oligonucleotide
cgttacatcaagcgcgatcagcacagcatt

SEQ ID NO: 54437 - DNA, 30 bp, Artificial Sequence
  Synthetic oligonucleotide
aataggaagacccggaccgaaaatagcatt

SEQ ID NO: 54438 - DNA, 30 bp, Artificial Sequence
  Synthetic oligonucleotide
tcgcaaaggaagggacgtgacaaaatcatt

SEQ ID NO: 54439 - DNA, 30 bp, Artificial Sequence
  Synthetic oligonucleotide
caacataggaagtgcgtctcattgatcatt

SEQ ID NO: 54440 - DNA, 30 bp, Artificial Sequence
  Synthetic oligonucleotide
accaaagtgcatcaaaaatgtcgtatcatt

SEQ ID NO: 54441 - DNA, 30 bp, Artificial Sequence
  Synthetic oligonucleotide
gtgacacagagtgtgtaaagcttcttcatt

SEQ ID NO: 54442 - DNA, 30 bp, Artificial Sequence
  Synthetic oligonucleotide
cgaccagggtgagcgcctccctgcaagatt

SEQ ID NO: 54443 - DNA, 30 bp, Artificial Sequence
  Synthetic oligonucleotide
agggcagcccaggatactcataagaagatt

SEQ ID NO: 54444 - DNA, 30 bp, Artificial Sequence
  Synthetic oligonucleotide
gagaccgaatacctgggtgcccacgagatt

SEQ ID NO: 54445 - DNA, 30 bp, Artificial Sequence
  Synthetic oligonucleotide
ggaaccatggaacgagcccactgggagatt

SEQ ID NO: 54446 - DNA, 30 bp, Artificial Sequence
  Synthetic oligonucleotide
tactagcgaggacgactcgcaacctagatt

SEQ ID NO: 54447 - DNA, 30 bp, Artificial Sequence
  Synthetic oligonucleotide
cagcggtatgcaaaacaacatgagaggatt

SEQ ID NO: 54448 - DNA, 30 bp, Artificial Sequence
  Synthetic oligonucleotide
agccatggggacggtgtgacagataggatt

SEQ ID NO: 54449 - DNA, 30 bp, Artificial Sequence
  Synthetic oligonucleotide
cagggtgaacttaatctagcgagtaggatt

SEQ ID NO: 54450 - DNA, 30 bp, Artificial Sequence
  Synthetic oligonucleotide
ttgccgaaaagatctgcgagaggacggatt

SEQ ID NO: 54451 - DNA, 30 bp, Artificial Sequence
  Synthetic oligonucleotide
tgaggaacatatagtctagaatcgcggatt

SEQ ID NO: 54452 - DNA, 31 bp, Artificial Sequence
  Synthetic oligonucleotide
tcgtctaaatatctactagtttagcgggatt

SEQ ID NO: 54453 - DNA, 30 bp, Artificial Sequence
  Synthetic oligonucleotide
acaatgactgtggcaagagcaatgttgatt

SEQ ID NO: 54454 - DNA, 30 bp, Artificial Sequence
  Synthetic oligonucleotide
cgtcggccagaataacaggagcgaaatatt

SEQ ID NO: 54455 - DNA, 30 bp, Artificial Sequence
  Synthetic oligonucleotide
ggcgagactcacgttgacctccgccatatt

SEQ ID NO: 54456 - DNA, 30 bp, Artificial Sequence
  Synthetic oligonucleotide
tggcgtaaagccattcttcctagcagtatt

SEQ ID NO: 54457 - DNA, 31 bp, Artificial Sequence
  Synthetic oligonucleotide
acgcaaaagaacaccaggtcatagggaactt

SEQ ID NO: 54458 - DNA, 30 bp, Artificial Sequence
  Synthetic oligonucleotide
cggacgaacagtgcagactaagcctaactt

SEQ ID NO: 54459 - DNA, 30 bp, Artificial Sequence
  Synthetic oligonucleotide
cacgaaaagcatatgcgtgccaccgcactt

SEQ ID NO: 54460 - DNA, 30 bp, Artificial Sequence
  Synthetic oligonucleotide
acaagttaagggagtggacaagcccgactt

SEQ ID NO: 54461 - DNA, 30 bp, Artificial Sequence
  Synthetic oligonucleotide
cggagagagcaagcgtactatgagggactt

SEQ ID NO: 54462 - DNA, 30 bp, Artificial Sequence
  Synthetic oligonucleotide
gtcaatccattatcgtatcgggggggactt

SEQ ID NO: 54463 - DNA, 30 bp, Artificial Sequence
  Synthetic oligonucleotide
gtgtaaggaaggggtgacgttgtgcacctt

SEQ ID NO: 54464 - DNA, 30 bp, Artificial Sequence
  Synthetic oligonucleotide
cgaacgccagtggaaactgccatatacctt

SEQ ID NO: 54465 - DNA, 30 bp, Artificial Sequence
  Synthetic oligonucleotide
cgctaactatgcatataaaagggctgcctt

SEQ ID NO: 54466 - DNA, 30 bp, Artificial Sequence
  Synthetic oligonucleotide
tgggggcgaaaaccatttggcaccgagctt

SEQ ID NO: 54467 - DNA, 30 bp, Artificial Sequence
  Synthetic oligonucleotide
catgttgggtaacagttaatagggtagctt

SEQ ID NO: 54468 - DNA, 31 bp, Artificial Sequence
  Synthetic oligonucleotide
ctaaaaaagcgagctacgtaacccacggctt

SEQ ID NO: 54469 - DNA, 30 bp, Artificial Sequence
  Synthetic oligonucleotide
atgaggagtgatgggagatagtccgtgctt

SEQ ID NO: 54470 - DNA, 30 bp, Artificial Sequence
  Synthetic oligonucleotide
ccgaaacggtacgggactggcaatttgctt

SEQ ID NO: 54471 - DNA, 30 bp, Artificial Sequence
  Synthetic oligonucleotide
aggcttatggcgaaaactgtagcggctctt

SEQ ID NO: 54472 - DNA, 30 bp, Artificial Sequence
  Synthetic oligonucleotide
gtaggaggtgcgccaaagctaacaagtctt

SEQ ID NO: 54473 - DNA, 30 bp, Artificial Sequence
  Synthetic oligonucleotide
agaagaagatcagcccaagtgcggagtctt

SEQ ID NO: 54474 - DNA, 30 bp, Artificial Sequence
  Synthetic oligonucleotide
aacgcgggcaccatgagtcatgatcgtctt

SEQ ID NO: 54475 - DNA, 31 bp, Artificial Sequence
  Synthetic oligonucleotide
tgtgcatatcgatggaacacggaccaaagtt

SEQ ID NO: 54476 - DNA, 30 bp, Artificial Sequence
  Synthetic oligonucleotide
ggtacagaagtcaggaggtgggaaacagtt

SEQ ID NO: 54477 - DNA, 30 bp, Artificial Sequence
  Synthetic oligonucleotide
aggaaactataagcatagttctcaacagtt

SEQ ID NO: 54478 - DNA, 30 bp, Artificial Sequence
  Synthetic oligonucleotide
tacgtggtgatagtagtgtgagctacagtt

SEQ ID NO: 54479 - DNA, 30 bp, Artificial Sequence
  Synthetic oligonucleotide
gggcgcgtgctaccgactaggagaccagtt

SEQ ID NO: 54480 - DNA, 30 bp, Artificial Sequence
  Synthetic oligonucleotide
attcgattctcagaaagcataaatgcagtt

SEQ ID NO: 54481 - DNA, 30 bp, Artificial Sequence
  Synthetic oligonucleotide
gtacactacacaatgcccaatggatcagtt

SEQ ID NO: 54482 - DNA, 30 bp, Artificial Sequence
  Synthetic oligonucleotide
cggctagacagagtcactaagaagtcagtt

SEQ ID NO: 54483 - DNA, 30 bp, Artificial Sequence
  Synthetic oligonucleotide
ctgcgttcgagggtgcggataggacgagtt

SEQ ID NO: 54484 - DNA, 31 bp, Artificial Sequence
  Synthetic oligonucleotide
acgtatactgaagatcgcgacgtctatagtt

SEQ ID NO: 54485 - DNA, 30 bp, Artificial Sequence
  Synthetic oligonucleotide
gcctaggctggaataagtaaggtagtagtt

SEQ ID NO: 54486 - DNA, 30 bp, Artificial Sequence
  Synthetic oligonucleotide
cagagcacaactaaattcggggtggtagtt

SEQ ID NO: 54487 - DNA, 30 bp, Artificial Sequence
  Synthetic oligonucleotide
acaggcgggttagtgatacgagtcttagtt

SEQ ID NO: 54488 - DNA, 30 bp, Artificial Sequence
  Synthetic oligonucleotide
agtattggcgtaaccgaatgcaaaaacgtt

SEQ ID NO: 54489 - DNA, 30 bp, Artificial Sequence
  Synthetic oligonucleotide
gtgtttagcatccagctgccacagcacgtt

SEQ ID NO: 54490 - DNA, 30 bp, Artificial Sequence
  Synthetic oligonucleotide
atgaatgggaggtcgattaggagcgacgtt

SEQ ID NO: 54491 - DNA, 30 bp, Artificial Sequence
  Synthetic oligonucleotide
acggaaaaaggtgaatcagaaactgtcgtt

SEQ ID NO: 54492 - DNA, 30 bp, Artificial Sequence
  Synthetic oligonucleotide
gcaggatgtgccttacaagtgacgttcgtt

SEQ ID NO: 54493 - DNA, 30 bp, Artificial Sequence
  Synthetic oligonucleotide
acgaatacggagcagaggttaagccaggtt

SEQ ID NO: 54494 - DNA, 30 bp, Artificial Sequence
  Synthetic oligonucleotide
taattacacggaaatcagtcaaaagaggtt

SEQ ID NO: 54495 - DNA, 31 bp, Artificial Sequence
  Synthetic oligonucleotide
gtagggactaccgtaagacatacaataggtt

SEQ ID NO: 54496 - DNA, 30 bp, Artificial Sequence
  Synthetic oligonucleotide
ctaagagagttggtcgttgaaccgtaggtt

SEQ ID NO: 54497 - DNA, 30 bp, Artificial Sequence
  Synthetic oligonucleotide
aaggaaggaaaggtgagcacaacgacggtt

SEQ ID NO: 54498 - DNA, 30 bp, Artificial Sequence
  Synthetic oligonucleotide
gttcggagttacgtgcacaaaataccggtt

SEQ ID NO: 54499 - DNA, 30 bp, Artificial Sequence
  Synthetic oligonucleotide
tgtcaaagtaggctggcggactaaagggtt

SEQ ID NO: 54500 - DNA, 30 bp, Artificial Sequence
  Synthetic oligonucleotide
cggtgcttacgaaatatagtatgccgggtt

SEQ ID NO: 54501 - DNA, 30 bp, Artificial Sequence
  Synthetic oligonucleotide
cgctgggagaactaactgtggaaatgggtt

SEQ ID NO: 54502 - DNA, 30 bp, Artificial Sequence
  Synthetic oligonucleotide
cgaatcgagcgatcagcataaatgatggtt

SEQ ID NO: 54503 - DNA, 30 bp, Artificial Sequence
  Synthetic oligonucleotide
aaggtcgaagtcagaaaagcgtgtgatgtt

SEQ ID NO: 54504 - DNA, 30 bp, Artificial Sequence
  Synthetic oligonucleotide
gcaaggtgaggggtaacgagggcatatgtt

SEQ ID NO: 54505 - DNA, 30 bp, Artificial Sequence
  Synthetic oligonucleotide
cgcacgttcagtggcagccaaatgactgtt

SEQ ID NO: 54506 - DNA, 30 bp, Artificial Sequence
  Synthetic oligonucleotide
tggaggtcgaggatgcttattaatgctgtt

SEQ ID NO: 54507 - DNA, 30 bp, Artificial Sequence
  Synthetic oligonucleotide
cgaacctatcaacagaatcgatgaagtgtt

SEQ ID NO: 54508 - DNA, 30 bp, Artificial Sequence
  Synthetic oligonucleotide
aaggtaaatccctacatcagaaatagtgtt

SEQ ID NO: 54509 - DNA, 30 bp, Artificial Sequence
  Synthetic oligonucleotide
gaaccagtgtggaggcgatcagagtgtgtt

SEQ ID NO: 54510 - DNA, 30 bp, Artificial Sequence
  Synthetic oligonucleotide
cgtaaaggaatggtgtgctaaacaattgtt

SEQ ID NO: 54511 - DNA, 30 bp, Artificial Sequence
  Synthetic oligonucleotide
agaccgaacgtaggccagagggctaaattt

SEQ ID NO: 54512 - DNA, 30 bp, Artificial Sequence
  Synthetic oligonucleotide
tggatcgacgatggggaatgcggggaattt

SEQ ID NO: 54513 - DNA, 30 bp, Artificial Sequence
  Synthetic oligonucleotide
tcgaacgagattctaggaaaacggtaattt

SEQ ID NO: 54514 - DNA, 30 bp, Artificial Sequence
  Synthetic oligonucleotide
gcgacgaaggagggactgggaaacacattt

SEQ ID NO: 54515 - DNA, 30 bp, Artificial Sequence
  Synthetic oligonucleotide
acaggctgtcaaaaggagtgcgcgtcattt

SEQ ID NO: 54516 - DNA, 30 bp, Artificial Sequence
  Synthetic oligonucleotide
atgggcgactcgaaagttactgggtcattt

SEQ ID NO: 54517 - DNA, 30 bp, Artificial Sequence
  Synthetic oligonucleotide
tcacatgtaggtcgtgctggtgagtgattt

SEQ ID NO: 54518 - DNA, 30 bp, Artificial Sequence
  Synthetic oligonucleotide
gttcgaccgaaaagaagaaattacctattt

SEQ ID NO: 54519 - DNA, 30 bp, Artificial Sequence
  Synthetic oligonucleotide
aaggactcggactgggttgttaccagcttt

SEQ ID NO: 54520 - DNA, 30 bp, Artificial Sequence
  Synthetic oligonucleotide
atcgcatcatggcgataccacgcgaagttt

SEQ ID NO: 54521 - DNA, 30 bp, Artificial Sequence
  Synthetic oligonucleotide
agacgaaggaatgggatacgggtcacgttt

SEQ ID NO: 54522 - DNA, 30 bp, Artificial Sequence
  Synthetic oligonucleotide
gcaatgggaggacaatgagcctattcgttt

SEQ ID NO: 54523 - DNA, 30 bp, Artificial Sequence
  Synthetic oligonucleotide
tggaatgatccagaagacgagaaggggttt

SEQ ID NO: 54524 - DNA, 30 bp, Artificial Sequence
  Synthetic oligonucleotide
aatgtaggtcacagtgagcacggaatgttt

SEQ ID NO: 54525 - DNA, 30 bp, Artificial Sequence
  Synthetic oligonucleotide
cttaagtggagggatggtaacaggctgttt

SEQ ID NO: 54526 - DNA, 30 bp, Artificial Sequence
  Synthetic oligonucleotide
cctgacataaggggcaaaagggatgctttt

SEQ ID NO: 54527 - DNA, 30 bp, Artificial Sequence
  Synthetic oligonucleotide
cgccagtcctcgaactaagaacccaaaaaa

SEQ ID NO: 54528 - DNA, 30 bp, Artificial Sequence
  Synthetic oligonucleotide
gtaggaacctataacagtcgtggacaaaaa

SEQ ID NO: 54529 - DNA, 30 bp, Artificial Sequence
  Synthetic oligonucleotide
agtaacatcggagtacggttcctgcaaaaa

SEQ ID NO: 54530 - DNA, 30 bp, Artificial Sequence
  Synthetic oligonucleotide
gaacgttccattgtaaagatggacgaaaaa

SEQ ID NO: 54531 - DNA, 30 bp, Artificial Sequence
  Synthetic oligonucleotide
tgagctctcagttaagagattagcgaaaaa

SEQ ID NO: 54532 - DNA, 30 bp, Artificial Sequence
  Synthetic oligonucleotide
ataaaatcgataacacaggcatgggaaaaa

SEQ ID NO: 54533 - DNA, 30 bp, Artificial Sequence
  Synthetic oligonucleotide
aataagagaactgctagaatgcctgaaaaa

SEQ ID NO: 54534 - DNA, 31 bp, Artificial Sequence
  Synthetic oligonucleotide
aggcgacaaggaaagcgcagggtgataaaaa

SEQ ID NO: 54535 - DNA, 30 bp, Artificial Sequence
  Synthetic oligonucleotide
tcatcgatcaaggcttagtactcgtaaaaa

SEQ ID NO: 54536 - DNA, 30 bp, Artificial Sequence
  Synthetic oligonucleotide
tcaagggggcaaaacagtcgtaaaacaaaa

SEQ ID NO: 54537 - DNA, 31 bp, Artificial Sequence
  Synthetic oligonucleotide
ggagaacgtcgtggacatgaagcaaacaaaa

SEQ ID NO: 54538 - DNA, 30 bp, Artificial Sequence
  Synthetic oligonucleotide
tcgctgtaagaccacgagaggacaacaaaa

SEQ ID NO: 54539 - DNA, 30 bp, Artificial Sequence
  Synthetic oligonucleotide
acggtaccggggcgtaattcccccacaaaa

SEQ ID NO: 54540 - DNA, 30 bp, Artificial Sequence
  Synthetic oligonucleotide
aacgtcccaccgttcgtcacacggacaaaa

SEQ ID NO: 54541 - DNA, 30 bp, Artificial Sequence
  Synthetic oligonucleotide
cgatgaccggctcaagtaacctggacaaaa

SEQ ID NO: 54542 - DNA, 30 bp, Artificial Sequence
  Synthetic oligonucleotide
cgtcaagggggtacgtagcgtctgacaaaa

SEQ ID NO: 54543 - DNA, 30 bp, Artificial Sequence
  Synthetic oligonucleotide
aggtaacagctagattaacggttaccaaaa

SEQ ID NO: 54544 - DNA, 30 bp, Artificial Sequence
  Synthetic oligonucleotide
ggttcaggatcggtgaggagaacagcaaaa

SEQ ID NO: 54545 - DNA, 30 bp, Artificial Sequence
  Synthetic oligonucleotide
tccagtcaaacgcgcgatgacctagcaaaa

SEQ ID NO: 54546 - DNA, 30 bp, Artificial Sequence
  Synthetic oligonucleotide
cgcctatcagcacagagttcgaacgcaaaa

SEQ ID NO: 54547 - DNA, 30 bp, Artificial Sequence
  Synthetic oligonucleotide
aagaaatcttgtcctatgcccacatcaaaa

SEQ ID NO: 54548 - DNA, 30 bp, Artificial Sequence
  Synthetic oligonucleotide
gcataagataggcatatacaagagtcaaaa

SEQ ID NO: 54549 - DNA, 30 bp, Artificial Sequence
  Synthetic oligonucleotide
ggagtagtatatcagagagaatattcaaaa

SEQ ID NO: 54550 - DNA, 30 bp, Artificial Sequence
  Synthetic oligonucleotide
cttaggagagaggatacaacttcttcaaaa

SEQ ID NO: 54551 - DNA, 30 bp, Artificial Sequence
  Synthetic oligonucleotide
tcccattgcgtgatatgcgaaacgagaaaa

SEQ ID NO: 54552 - DNA, 30 bp, Artificial Sequence
  Synthetic oligonucleotide
cctcgaccccaacatgccctgggccgaaaa

SEQ ID NO: 54553 - DNA, 30 bp, Artificial Sequence
  Synthetic oligonucleotide
tgaagaggggcggaccggatgaaatgaaaa

SEQ ID NO: 54554 - DNA, 30 bp, Artificial Sequence
  Synthetic oligonucleotide
aagggtgggacttgtgcacgacattgaaaa

SEQ ID NO: 54555 - DNA, 30 bp, Artificial Sequence
  Synthetic oligonucleotide
aagtcacgcaacccttcccccacgataaaa

SEQ ID NO: 54556 - DNA, 30 bp, Artificial Sequence
  Synthetic oligonucleotide
agtaggcaggaaggtggcctagagctaaaa

SEQ ID NO: 54557 - DNA, 30 bp, Artificial Sequence
  Synthetic oligonucleotide
aaggcgcagtgtatgtcggcatatctaaaa

SEQ ID NO: 54558 - DNA, 30 bp, Artificial Sequence
  Synthetic oligonucleotide
tccacaacaccaggcacgtcagaagtaaaa

SEQ ID NO: 54559 - DNA, 30 bp, Artificial Sequence
  Synthetic oligonucleotide
tcggttgctccgagggtgggaagcaacaaa

SEQ ID NO: 54560 - DNA, 30 bp, Artificial Sequence
  Synthetic oligonucleotide
taggaggcacatctatgaagttaacacaaa

SEQ ID NO: 54561 - DNA, 30 bp, Artificial Sequence
  Synthetic oligonucleotide
ggacagacaaattacgatttaacgcacaaa

SEQ ID NO: 54562 - DNA, 30 bp, Artificial Sequence
  Synthetic oligonucleotide
agagactcgacgagctacgcaatgcacaaa

SEQ ID NO: 54563 - DNA, 30 bp, Artificial Sequence
  Synthetic oligonucleotide
ctacgcagagaggtacgaggggcatacaaa

SEQ ID NO: 54564 - DNA, 30 bp, Artificial Sequence
  Synthetic oligonucleotide
cacttcatcgagtcattccatctctacaaa

SEQ ID NO: 54565 - DNA, 30 bp, Artificial Sequence
  Synthetic oligonucleotide
ggcactatcagaggggactaaaatgccaaa

SEQ ID NO: 54566 - DNA, 30 bp, Artificial Sequence
  Synthetic oligonucleotide
caggggataagtgtatccggagctgccaaa

SEQ ID NO: 54567 - DNA, 30 bp, Artificial Sequence
  Synthetic oligonucleotide
cacccccacaatgacaaagtgacatccaaa

SEQ ID NO: 54568 - DNA, 30 bp, Artificial Sequence
  Synthetic oligonucleotide
ctgcagtgtctagcagagggaggatccaaa

SEQ ID NO: 54569 - DNA, 30 bp, Artificial Sequence
  Synthetic oligonucleotide
tgccgcgaagatctagaactattctccaaa

SEQ ID NO: 54570 - DNA, 30 bp, Artificial Sequence
  Synthetic oligonucleotide
ggtgtaagtctgcctagagtcgagcgcaaa

SEQ ID NO: 54571 - DNA, 30 bp, Artificial Sequence
  Synthetic oligonucleotide
acctgtaaacattacacgctcgaaggcaaa

SEQ ID NO: 54572 - DNA, 30 bp, Artificial Sequence
  Synthetic oligonucleotide
gaggacaagagtgtacagtcccaatgcaaa

SEQ ID NO: 54573 - DNA, 30 bp, Artificial Sequence
  Synthetic oligonucleotide
cggcccacgcgatcgtgagtatcttgcaaa

SEQ ID NO: 54574 - DNA, 30 bp, Artificial Sequence
  Synthetic oligonucleotide
atgccggtaagggactgcaacatcatcaaa

SEQ ID NO: 54575 - DNA, 30 bp, Artificial Sequence
  Synthetic oligonucleotide
cctcaggcccccaagccaacttcagtcaaa

SEQ ID NO: 54576 - DNA, 30 bp, Artificial Sequence
  Synthetic oligonucleotide
tggagactagttcggttagccctcgtcaaa

SEQ ID NO: 54577 - DNA, 30 bp, Artificial Sequence
  Synthetic oligonucleotide
agggagattaccagcacaatagtcgtcaaa

SEQ ID NO: 54578 - DNA, 30 bp, Artificial Sequence
  Synthetic oligonucleotide
tgagaagactaccaccacggacgggtcaaa

SEQ ID NO: 54579 - DNA, 30 bp, Artificial Sequence
  Synthetic oligonucleotide
gaaagtgaggcgcccagtaaccgggtcaaa

SEQ ID NO: 54580 - DNA, 30 bp, Artificial Sequence
  Synthetic oligonucleotide
taagtctcgggacagattcattaaaagaaa

SEQ ID NO: 54581 - DNA, 30 bp, Artificial Sequence
  Synthetic oligonucleotide
acatacaggaataagaggacccgaaagaaa

SEQ ID NO: 54582 - DNA, 30 bp, Artificial Sequence
  Synthetic oligonucleotide
acacttgccacagccggtaactacaagaaa

SEQ ID NO: 54583 - DNA, 30 bp, Artificial Sequence
  Synthetic oligonucleotide
ggaatcgtcacaccgttacagcttaagaaa

SEQ ID NO: 54584 - DNA, 30 bp, Artificial Sequence
  Synthetic oligonucleotide
tcacgtaaaatgcctatcgcgttgcagaaa

SEQ ID NO: 54585 - DNA, 30 bp, Artificial Sequence
  Synthetic oligonucleotide
cctcaagtggctatgtcagaagcagagaaa

SEQ ID NO: 54586 - DNA, 30 bp, Artificial Sequence
  Synthetic oligonucleotide
atatatcgataatacaaccaacaggagaaa

SEQ ID NO: 54587 - DNA, 30 bp, Artificial Sequence
  Synthetic oligonucleotide
cgaactggaacaaatagtcggtcggagaaa

SEQ ID NO: 54588 - DNA, 30 bp, Artificial Sequence
  Synthetic oligonucleotide
actgagaacatgctgctgtgactggagaaa

SEQ ID NO: 54589 - DNA, 30 bp, Artificial Sequence
  Synthetic oligonucleotide
acgacctgagtggagatacgccgatagaaa

SEQ ID NO: 54590 - DNA, 31 bp, Artificial Sequence
  Synthetic oligonucleotide
gcgtcgacaatggatcatcttgctttagaaa

SEQ ID NO: 54591 - DNA, 30 bp, Artificial Sequence
  Synthetic oligonucleotide
aagagggaaagagccctgtgggtaccgaaa

SEQ ID NO: 54592 - DNA, 30 bp, Artificial Sequence
  Synthetic oligonucleotide
cttgcgccaaaaccaccctgcttaccgaaa

SEQ ID NO: 54593 - DNA, 30 bp, Artificial Sequence
  Synthetic oligonucleotide
agcaatagcatagatatagatttaccgaaa

SEQ ID NO: 54594 - DNA, 30 bp, Artificial Sequence
  Synthetic oligonucleotide
cataccgcacagccacataagcagccgaaa

SEQ ID NO: 54595 - DNA, 30 bp, Artificial Sequence
  Synthetic oligonucleotide
agacaacactctcggaacggaacggcgaaa

SEQ ID NO: 54596 - DNA, 30 bp, Artificial Sequence
  Synthetic oligonucleotide
tagaacagcaaaatgatgtacagtgcgaaa

SEQ ID NO: 54597 - DNA, 30 bp, Artificial Sequence
  Synthetic oligonucleotide
gacagcggagaagtgccatacgcgtcgaaa

SEQ ID NO: 54598 - DNA, 31 bp, Artificial Sequence
  Synthetic oligonucleotide
ttagcagtagaaaatcacagttccaaggaaa

SEQ ID NO: 54599 - DNA, 30 bp, Artificial Sequence
  Synthetic oligonucleotide
tggacaattgataatggttgtataaggaaa

SEQ ID NO: 54600 - DNA, 30 bp, Artificial Sequence
  Synthetic oligonucleotide
gtatgcgtgaatagagaaattcagaggaaa

SEQ ID NO: 54601 - DNA, 30 bp, Artificial Sequence
  Synthetic oligonucleotide
caaacccagacgtaataggtgaggaggaaa

SEQ ID NO: 54602 - DNA, 30 bp, Artificial Sequence
  Synthetic oligonucleotide
aacaagcagagatttaagtgtcttaggaaa

SEQ ID NO: 54603 - DNA, 30 bp, Artificial Sequence
  Synthetic oligonucleotide
ggcgttatagtgacacgggttacatggaaa

SEQ ID NO: 54604 - DNA, 30 bp, Artificial Sequence
  Synthetic oligonucleotide
aggcgacccactcaggatcgagtgtggaaa

SEQ ID NO: 54605 - DNA, 30 bp, Artificial Sequence
  Synthetic oligonucleotide
taggttgtcccgaatgcaagtagaatgaaa

SEQ ID NO: 54606 - DNA, 30 bp, Artificial Sequence
  Synthetic oligonucleotide
aggaagatggatttcgtagaaggaatgaaa

SEQ ID NO: 54607 - DNA, 30 bp, Artificial Sequence
  Synthetic oligonucleotide
cagtgagtggtggtcttagtcaagatgaaa

SEQ ID NO: 54608 - DNA, 30 bp, Artificial Sequence
  Synthetic oligonucleotide
gtcacgacacagggtgcttcggaactgaaa

SEQ ID NO: 54609 - DNA, 30 bp, Artificial Sequence
  Synthetic oligonucleotide
ggttggaccatattgccttagaagctgaaa

SEQ ID NO: 54610 - DNA, 30 bp, Artificial Sequence
  Synthetic oligonucleotide
atgtctggtaccacgatacgataggtgaaa

SEQ ID NO: 54611 - DNA, 30 bp, Artificial Sequence
  Synthetic oligonucleotide
aactaagggtggaatatcggcttggtgaaa

SEQ ID NO: 54612 - DNA, 30 bp, Artificial Sequence
  Synthetic oligonucleotide
cgaactcgaggtcggtcttcatgattgaaa

SEQ ID NO: 54613 - DNA, 30 bp, Artificial Sequence
  Synthetic oligonucleotide
gggaagatgactgaaaccactcaacataaa

SEQ ID NO: 54614 - DNA, 30 bp, Artificial Sequence
  Synthetic oligonucleotide
gactacctctcgagggaggctaagcataaa

SEQ ID NO: 54615 - DNA, 35 bp, Artificial Sequence
  Synthetic oligonucleotide
ggttgccgggtgtgtctccaaagttgtcgtataaa

SEQ ID NO: 54616 - DNA, 29 bp, Artificial Sequence
  Synthetic oligonucleotide
tttgttgtgtaggtttactcccttataaa

SEQ ID NO: 54617 - DNA, 30 bp, Artificial Sequence
  Synthetic oligonucleotide
agtacaactaactcgctcgtacgttataaa

SEQ ID NO: 54618 - DNA, 30 bp, Artificial Sequence
  Synthetic oligonucleotide
actagaaacagacaactaaccaaggctaaa

SEQ ID NO: 54619 - DNA, 30 bp, Artificial Sequence
  Synthetic oligonucleotide
aggatttacgctaggacatccgagtctaaa

SEQ ID NO: 54620 - DNA, 30 bp, Artificial Sequence
  Synthetic oligonucleotide
acgtgtcatacgatacagttatggtctaaa

SEQ ID NO: 54621 - DNA, 30 bp, Artificial Sequence
  Synthetic oligonucleotide
tggacacaaaggacgcgccccgagagtaaa

SEQ ID NO: 54622 - DNA, 30 bp, Artificial Sequence
  Synthetic oligonucleotide
tcgcagtcaaggctgagggtatgtcgtaaa

SEQ ID NO: 54623 - DNA, 30 bp, Artificial Sequence
  Synthetic oligonucleotide
gagagaatatgaaacggcaaacggggtaaa

SEQ ID NO: 54624 - DNA, 30 bp, Artificial Sequence
  Synthetic oligonucleotide
cctcgaccatcacgggaagagggtggtaaa

SEQ ID NO: 54625 - DNA, 29 bp, Artificial Sequence
  Synthetic oligonucleotide
tttgttgtgtaggtttactcccgtgtaaa

SEQ ID NO: 54626 - DNA, 30 bp, Artificial Sequence
  Synthetic oligonucleotide
tcggaagcacggtaggagggacggattaaa

SEQ ID NO: 54627 - DNA, 30 bp, Artificial Sequence
  Synthetic oligonucleotide
gcatgaagcaatctacgtagaatgattaaa

SEQ ID NO: 54628 - DNA, 30 bp, Artificial Sequence
  Synthetic oligonucleotide
gaccgaatcggagatactggatgtattaaa

SEQ ID NO: 54629 - DNA, 30 bp, Artificial Sequence
  Synthetic oligonucleotide
gaagccccgaagacaggaccgaatcttaaa

SEQ ID NO: 54630 - DNA, 30 bp, Artificial Sequence
  Synthetic oligonucleotide
actaaagtcaatgggatgactacaaaacaa

SEQ ID NO: 54631 - DNA, 30 bp, Artificial Sequence
  Synthetic oligonucleotide
agatccggatgagattactccttgaaacaa

SEQ ID NO: 54632 - DNA, 30 bp, Artificial Sequence
  Synthetic oligonucleotide
agcggtcagtagggcaatagtcatgaacaa

SEQ ID NO: 54633 - DNA, 30 bp, Artificial Sequence
  Synthetic oligonucleotide
agaacgagcgatggtgctcacagttaacaa

SEQ ID NO: 54634 - DNA, 30 bp, Artificial Sequence
  Synthetic oligonucleotide
gtggtagtagtgatcagtcgccgaacacaa

SEQ ID NO: 54635 - DNA, 30 bp, Artificial Sequence
  Synthetic oligonucleotide
acaagatgcgagtgggtggaatatacacaa

SEQ ID NO: 54636 - DNA, 30 bp, Artificial Sequence
  Synthetic oligonucleotide
gaggctgcccataggcgactccccccacaa

SEQ ID NO: 54637 - DNA, 30 bp, Artificial Sequence
  Synthetic oligonucleotide
tgtacgggcccagacagcgagtacgcacaa

SEQ ID NO: 54638 - DNA, 30 bp, Artificial Sequence
  Synthetic oligonucleotide
tagagtggttgcagcgggagcgatgcacaa

SEQ ID NO: 54639 - DNA, 30 bp, Artificial Sequence
  Synthetic oligonucleotide
taacatggaagctgaagaactaggagacaa

SEQ ID NO: 54640 - DNA, 30 bp, Artificial Sequence
  Synthetic oligonucleotide
tgggaaaaataacatgttctcggtagacaa

SEQ ID NO: 54641 - DNA, 30 bp, Artificial Sequence
  Synthetic oligonucleotide
aaccttacagcaaaaaggaatattagacaa

SEQ ID NO: 54642 - DNA, 30 bp, Artificial Sequence
  Synthetic oligonucleotide
agtattggcgggatgccacaataacgacaa

SEQ ID NO: 54643 - DNA, 30 bp, Artificial Sequence
  Synthetic oligonucleotide
cgcgattaggcctgagacaacactcgacaa

SEQ ID NO: 54644 - DNA, 30 bp, Artificial Sequence
  Synthetic oligonucleotide
taataagaatgcgataacgttgttcgacaa

SEQ ID NO: 54645 - DNA, 30 bp, Artificial Sequence
  Synthetic oligonucleotide
atcatctccagtagattaacaccaggacaa

SEQ ID NO: 54646 - DNA, 30 bp, Artificial Sequence
  Synthetic oligonucleotide
acagtggaatgcaccccggtagactgacaa

SEQ ID NO: 54647 - DNA, 31 bp, Artificial Sequence
  Synthetic oligonucleotide
gagacatggatgttcttaaggatgaatacaa

SEQ ID NO: 54648 - DNA, 30 bp, Artificial Sequence
  Synthetic oligonucleotide
aattgggcatgcaaggggaagaagatacaa

SEQ ID NO: 54649 - DNA, 30 bp, Artificial Sequence
  Synthetic oligonucleotide
ttgtaagcgaagttaagcgctaggatacaa

SEQ ID NO: 54650 - DNA, 30 bp, Artificial Sequence
  Synthetic oligonucleotide
cggtcgtctcggagattagttatgatacaa

SEQ ID NO: 54651 - DNA, 30 bp, Artificial Sequence
  Synthetic oligonucleotide
cataagctaaaggatcgcctaactatacaa

SEQ ID NO: 54652 - DNA, 30 bp, Artificial Sequence
  Synthetic oligonucleotide
ctacgagctatcgggggtgagagagtacaa

SEQ ID NO: 54653 - DNA, 30 bp, Artificial Sequence
  Synthetic oligonucleotide
aaggaccgtgcggtacgccaggtggtacaa

SEQ ID NO: 54654 - DNA, 30 bp, Artificial Sequence
  Synthetic oligonucleotide
cgccagcgagcaaaaacaccatggcaccaa

SEQ ID NO: 54655 - DNA, 30 bp, Artificial Sequence
  Synthetic oligonucleotide
cactccccgataggtgtgacctccgaccaa

SEQ ID NO: 54656 - DNA, 30 bp, Artificial Sequence
  Synthetic oligonucleotide
cgtgtaagggataccatgacttagacccaa

SEQ ID NO: 54657 - DNA, 30 bp, Artificial Sequence
  Synthetic oligonucleotide
cgcacgctagtagactacgtcgtgacccaa

SEQ ID NO: 54658 - DNA, 30 bp, Artificial Sequence
  Synthetic oligonucleotide
cggagattatagtagaaacgtctaccccaa

SEQ ID NO: 54659 - DNA, 30 bp, Artificial Sequence
  Synthetic oligonucleotide
atggctaaacctggacgaaagatatcccaa

SEQ ID NO: 54660 - DNA, 30 bp, Artificial Sequence
  Synthetic oligonucleotide
cgatggacgttagtacatccaagctcccaa

SEQ ID NO: 54661 - DNA, 30 bp, Artificial Sequence
  Synthetic oligonucleotide
gtactctccgaaacagagtgtagacgccaa

SEQ ID NO: 54662 - DNA, 30 bp, Artificial Sequence
  Synthetic oligonucleotide
gtaccccaggacaagatagcgtaaggccaa

SEQ ID NO: 54663 - DNA, 30 bp, Artificial Sequence
  Synthetic oligonucleotide
acgttataatcacaaatacaactgtgccaa

SEQ ID NO: 54664 - DNA, 30 bp, Artificial Sequence
  Synthetic oligonucleotide
tggtcatcaaacagacgaataggcatccaa

SEQ ID NO: 54665 - DNA, 30 bp, Artificial Sequence
  Synthetic oligonucleotide
gggcgagacgggaagcgttgctgtatccaa

SEQ ID NO: 54666 - DNA, 30 bp, Artificial Sequence
  Synthetic oligonucleotide
agttcaaagggtcgacgaatcaacctccaa

SEQ ID NO: 54667 - DNA, 30 bp, Artificial Sequence
  Synthetic oligonucleotide
actagaatgcgtgtgctcgtcctgttccaa

SEQ ID NO: 54668 - DNA, 30 bp, Artificial Sequence
  Synthetic oligonucleotide
tcggtcaaggaaggatgaggtcataagcaa

SEQ ID NO: 54669 - DNA, 30 bp, Artificial Sequence
  Synthetic oligonucleotide
ccgaggggcgtgtaaaagtagtgtaagcaa

SEQ ID NO: 54670 - DNA, 30 bp, Artificial Sequence
  Synthetic oligonucleotide
tagagggtaacaacgctaccattacagcaa

SEQ ID NO: 54671 - DNA, 30 bp, Artificial Sequence
  Synthetic oligonucleotide
gcaagtcgacgtgatgttacattccagcaa

SEQ ID NO: 54672 - DNA, 30 bp, Artificial Sequence
  Synthetic oligonucleotide
cgactatcacgttaactcgaggaagagcaa

SEQ ID NO: 54673 - DNA, 30 bp, Artificial Sequence
  Synthetic oligonucleotide
ctgtggcgtgaagtgcctagactggagcaa

SEQ ID NO: 54674 - DNA, 30 bp, Artificial Sequence
  Synthetic oligonucleotide
tagaccgactttaaggaaaaggcttagcaa

SEQ ID NO: 54675 - DNA, 30 bp, Artificial Sequence
  Synthetic oligonucleotide
gacgcggtgaaggccatcttacgtacgcaa

SEQ ID NO: 54676 - DNA, 30 bp, Artificial Sequence
  Synthetic oligonucleotide
acctaggggattccctcgcgcaaaccgcaa

SEQ ID NO: 54677 - DNA, 30 bp, Artificial Sequence
  Synthetic oligonucleotide
caaccaggaggagatgatatataaccgcaa

SEQ ID NO: 54678 - DNA, 30 bp, Artificial Sequence
  Synthetic oligonucleotide
tataggaggacgtttagaaagtcagcgcaa

SEQ ID NO: 54679 - DNA, 30 bp, Artificial Sequence
  Synthetic oligonucleotide
accgttctgcaatatggactcactgcgcaa

SEQ ID NO: 54680 - DNA, 30 bp, Artificial Sequence
  Synthetic oligonucleotide
tccggacataaaagataatttcgtgcgcaa

SEQ ID NO: 54681 - DNA, 30 bp, Artificial Sequence
  Synthetic oligonucleotide
aacgtaggaaccactcacagaccaaggcaa

SEQ ID NO: 54682 - DNA, 30 bp, Artificial Sequence
  Synthetic oligonucleotide
agcgggggcacacgaaagtcaattaggcaa

SEQ ID NO: 54683 - DNA, 30 bp, Artificial Sequence
  Synthetic oligonucleotide
aggatggtgtggatctccatatccgggcaa

SEQ ID NO: 54684 - DNA, 30 bp, Artificial Sequence
  Synthetic oligonucleotide
aaggttgacaaggttatgttggctgggcaa

SEQ ID NO: 54685 - DNA, 30 bp, Artificial Sequence
  Synthetic oligonucleotide
tcattgggcatgaactacatacgtgggcaa

SEQ ID NO: 54686 - DNA, 30 bp, Artificial Sequence
  Synthetic oligonucleotide
ggagtcttcgaacatacctacggttggcaa

SEQ ID NO: 54687 - DNA, 30 bp, Artificial Sequence
  Synthetic oligonucleotide
tcccttcaaggtggggagaggggactgcaa

SEQ ID NO: 54688 - DNA, 30 bp, Artificial Sequence
  Synthetic oligonucleotide
ggtagacaggagcgaacctcgattctgcaa

SEQ ID NO: 54689 - DNA, 30 bp, Artificial Sequence
  Synthetic oligonucleotide
gtacgaccaaaaagcaacacaaaagtgcaa

SEQ ID NO: 54690 - DNA, 30 bp, Artificial Sequence
  Synthetic oligonucleotide
aatggggattacaatcgttaggccgtgcaa

SEQ ID NO: 54691 - DNA, 30 bp, Artificial Sequence
  Synthetic oligonucleotide
caataagcgaaaatcgagacaaatttgcaa

SEQ ID NO: 54692 - DNA, 30 bp, Artificial Sequence
  Synthetic oligonucleotide
gcatccaaatcaatacgttgggaacatcaa

SEQ ID NO: 54693 - DNA, 30 bp, Artificial Sequence
  Synthetic oligonucleotide
tcgtcagaatcaatagttaccacacatcaa

SEQ ID NO: 54694 - DNA, 30 bp, Artificial Sequence
  Synthetic oligonucleotide
cgagcaaactcccgtaagatcagacatcaa

SEQ ID NO: 54695 - DNA, 30 bp, Artificial Sequence
  Synthetic oligonucleotide
ccaccatttaagtctagaggagtgcatcaa

SEQ ID NO: 54696 - DNA, 30 bp, Artificial Sequence
  Synthetic oligonucleotide
tcagaaaacgtctcattagcttcggatcaa

SEQ ID NO: 54697 - DNA, 30 bp, Artificial Sequence
  Synthetic oligonucleotide
agctagagggactgcattagctaatatcaa

SEQ ID NO: 54698 - DNA, 30 bp, Artificial Sequence
  Synthetic oligonucleotide
ttcggcaaactagtgcgataatcgtatcaa

SEQ ID NO: 54699 - DNA, 30 bp, Artificial Sequence
  Synthetic oligonucleotide
acagtagggtctgtggaacaacggtatcaa

SEQ ID NO: 54700 - DNA, 30 bp, Artificial Sequence
  Synthetic oligonucleotide
tcatcggcaagctccaaattcaggactcaa

SEQ ID NO: 54701 - DNA, 30 bp, Artificial Sequence
  Synthetic oligonucleotide
acaccggaacaagtcaccgaccagcctcaa

SEQ ID NO: 54702 - DNA, 30 bp, Artificial Sequence
  Synthetic oligonucleotide
ggagtgagttacgacgaacaagaagctcaa

SEQ ID NO: 54703 - DNA, 30 bp, Artificial Sequence
  Synthetic oligonucleotide
atgtgtacagaaggcatctgcatcgctcaa

SEQ ID NO: 54704 - DNA, 30 bp, Artificial Sequence
  Synthetic oligonucleotide
accactcggtcgcaaacagagaatgctcaa

SEQ ID NO: 54705 - DNA, 30 bp, Artificial Sequence
  Synthetic oligonucleotide
agacgagctgacgattatcaagtttctcaa

SEQ ID NO: 54706 - DNA, 30 bp, Artificial Sequence
  Synthetic oligonucleotide
gcggaacacgcgtattgttcggtccgtcaa

SEQ ID NO: 54707 - DNA, 30 bp, Artificial Sequence
  Synthetic oligonucleotide
tagcctgagcgaggagatggaacgcgtcaa

SEQ ID NO: 54708 - DNA, 30 bp, Artificial Sequence
  Synthetic oligonucleotide
atcgggaaagaatccctgagccatcgtcaa

SEQ ID NO: 54709 - DNA, 30 bp, Artificial Sequence
  Synthetic oligonucleotide
gtatgtgtgaatatgagatgggctcgtcaa

SEQ ID NO: 54710 - DNA, 30 bp, Artificial Sequence
  Synthetic oligonucleotide
actggccagtcaaaaagtatgaggcttcaa

SEQ ID NO: 54711 - DNA, 30 bp, Artificial Sequence
  Synthetic oligonucleotide
ggggcggtgtagacatacaattcgaaagaa

SEQ ID NO: 54712 - DNA, 30 bp, Artificial Sequence
  Synthetic oligonucleotide
ctggtggtatatagtgtaatcaaacaagaa

SEQ ID NO: 54713 - DNA, 30 bp, Artificial Sequence
  Synthetic oligonucleotide
cacaacgtccttttaaacactgggcaagaa

SEQ ID NO: 54714 - DNA, 30 bp, Artificial Sequence
  Synthetic oligonucleotide
tggtacgtgtaactcaggccacatcaagaa

SEQ ID NO: 54715 - DNA, 30 bp, Artificial Sequence
  Synthetic oligonucleotide
ctgtgaaactacgatttgctttaagaagaa

SEQ ID NO: 54716 - DNA, 30 bp, Artificial Sequence
  Synthetic oligonucleotide
agacactacttggccaaatgcgtagaagaa

SEQ ID NO: 54717 - DNA, 30 bp, Artificial Sequence
  Synthetic oligonucleotide
gcaaaagtgggcgttgccgttaccgaagaa

SEQ ID NO: 54718 - DNA, 30 bp, Artificial Sequence
  Synthetic oligonucleotide
cacaatcggggcgtactgtattgggaagaa

SEQ ID NO: 54719 - DNA, 30 bp, Artificial Sequence
  Synthetic oligonucleotide
taggctgggaaagcgacgtcagtgtaagaa

SEQ ID NO: 54720 - DNA, 30 bp, Artificial Sequence
  Synthetic oligonucleotide
agttgaccaggtctgcaatgcgaaacagaa

SEQ ID NO: 54721 - DNA, 30 bp, Artificial Sequence
  Synthetic oligonucleotide
cgggaaggttctgttacaaactcaacagaa

SEQ ID NO: 54722 - DNA, 30 bp, Artificial Sequence
  Synthetic oligonucleotide
tcgattacttagatctcaaagactacagaa

SEQ ID NO: 54723 - DNA, 30 bp, Artificial Sequence
  Synthetic oligonucleotide
ttagtctacaacgaagcgaatgttacagaa

SEQ ID NO: 54724 - DNA, 30 bp, Artificial Sequence
  Synthetic oligonucleotide
aacatgggaagcgaggcggcaggcccagaa

SEQ ID NO: 54725 - DNA, 30 bp, Artificial Sequence
  Synthetic oligonucleotide
attataaatcggaaggaaggatctccagaa

SEQ ID NO: 54726 - DNA, 30 bp, Artificial Sequence
  Synthetic oligonucleotide
agtatcacacgggggtgaaggcctgcagaa

SEQ ID NO: 54727 - DNA, 30 bp, Artificial Sequence
  Synthetic oligonucleotide
ccgggggggtcgagtcgcgctagtgcagaa

SEQ ID NO: 54728 - DNA, 30 bp, Artificial Sequence
  Synthetic oligonucleotide
agaggaaaaacgtgaacgatgcgatcagaa

SEQ ID NO: 54729 - DNA, 30 bp, Artificial Sequence
  Synthetic oligonucleotide
accttgacctggcgaaagtggaattcagaa

SEQ ID NO: 54730 - DNA, 30 bp, Artificial Sequence
  Synthetic oligonucleotide
tcgactttacgcttacggtaaacttcagaa

SEQ ID NO: 54731 - DNA, 30 bp, Artificial Sequence
  Synthetic oligonucleotide
ggcgtcgatacggtgtttatctccagagaa

SEQ ID NO: 54732 - DNA, 30 bp, Artificial Sequence
  Synthetic oligonucleotide
tacagccttggcgactacgataatcgagaa

SEQ ID NO: 54733 - DNA, 30 bp, Artificial Sequence
  Synthetic oligonucleotide
caagaaaacgatggttatacgattcgagaa

SEQ ID NO: 54734 - DNA, 30 bp, Artificial Sequence
  Synthetic oligonucleotide
ggtgagaaatctcagaggataagcggagaa

SEQ ID NO: 54735 - DNA, 30 bp, Artificial Sequence
  Synthetic oligonucleotide
cggaacgtttgtcagccacgttatggagaa

SEQ ID NO: 54736 - DNA, 30 bp, Artificial Sequence
  Synthetic oligonucleotide
accacgctaaattatctacgttcgtgagaa

SEQ ID NO: 54737 - DNA, 30 bp, Artificial Sequence
  Synthetic oligonucleotide
caccggaatagggggcgacttcgttgagaa

SEQ ID NO: 54738 - DNA, 30 bp, Artificial Sequence
  Synthetic oligonucleotide
acgacggggcgctaaaacagcgatatagaa

SEQ ID NO: 54739 - DNA, 30 bp, Artificial Sequence
  Synthetic oligonucleotide
taaaagtgcggtacggatgttaatgtagaa

SEQ ID NO: 54740 - DNA, 30 bp, Artificial Sequence
  Synthetic oligonucleotide
ataggtggtggtctcaggacaattgtagaa

SEQ ID NO: 54741 - DNA, 30 bp, Artificial Sequence
  Synthetic oligonucleotide
tcgtatcaacgtaaggctacactattagaa

SEQ ID NO: 54742 - DNA, 30 bp, Artificial Sequence
  Synthetic oligonucleotide
aggaactataagactgttcatcgcttagaa

SEQ ID NO: 54743 - DNA, 30 bp, Artificial Sequence
  Synthetic oligonucleotide
aagggattgttcccattaaattgcttagaa

SEQ ID NO: 54744 - DNA, 30 bp, Artificial Sequence
  Synthetic oligonucleotide
gtggttacgacagtaagatgttcaaacgaa

SEQ ID NO: 54745 - DNA, 30 bp, Artificial Sequence
  Synthetic oligonucleotide
caccgcaacagacatgataagaagcacgaa

SEQ ID NO: 54746 - DNA, 30 bp, Artificial Sequence
  Synthetic oligonucleotide
tctgaatagggcgggaacgtgtcagacgaa

SEQ ID NO: 54747 - DNA, 30 bp, Artificial Sequence
  Synthetic oligonucleotide
cgtgctcggacatggtataactgctacgaa

SEQ ID NO: 54748 - DNA, 30 bp, Artificial Sequence
  Synthetic oligonucleotide
cgtcaagatgtctcgacgggcggagccgaa

SEQ ID NO: 54749 - DNA, 30 bp, Artificial Sequence
  Synthetic oligonucleotide
ggataaggctaatgtgtgcacgcatccgaa

SEQ ID NO: 54750 - DNA, 30 bp, Artificial Sequence
  Synthetic oligonucleotide
agttcggggcggcgtatcatgcacagcgaa

SEQ ID NO: 54751 - DNA, 30 bp, Artificial Sequence
  Synthetic oligonucleotide
acgtctatattccggcatagttacagcgaa

SEQ ID NO: 54752 - DNA, 30 bp, Artificial Sequence
  Synthetic oligonucleotide
gcgttgattccggaaatgggggtgagcgaa

SEQ ID NO: 54753 - DNA, 30 bp, Artificial Sequence
  Synthetic oligonucleotide
aatggtcaatcgggggaactcgtacgcgaa

SEQ ID NO: 54754 - DNA, 30 bp, Artificial Sequence
  Synthetic oligonucleotide
ctggtccgaaattgtgggagaacttgcgaa

SEQ ID NO: 54755 - DNA, 30 bp, Artificial Sequence
  Synthetic oligonucleotide
tgctagagtcattaagtcaccgtgctcgaa

SEQ ID NO: 54756 - DNA, 30 bp, Artificial Sequence
  Synthetic oligonucleotide
acgtccatcttcagatatctggccgtcgaa

SEQ ID NO: 54757 - DNA, 30 bp, Artificial Sequence
  Synthetic oligonucleotide
tgacagtgtcgggaggcccgctcattcgaa

SEQ ID NO: 54758 - DNA, 30 bp, Artificial Sequence
  Synthetic oligonucleotide
tgtagggctgataaattttggactttcgaa

SEQ ID NO: 54759 - DNA, 30 bp, Artificial Sequence
  Synthetic oligonucleotide
ggttcgaagatagatcgttagagacaggaa

SEQ ID NO: 54760 - DNA, 30 bp, Artificial Sequence
  Synthetic oligonucleotide
gctcgagatgagaccgcgatgaagcaggaa

SEQ ID NO: 54761 - DNA, 30 bp, Artificial Sequence
  Synthetic oligonucleotide
gtgtgaacgtattcggggagggtgcaggaa

SEQ ID NO: 54762 - DNA, 30 bp, Artificial Sequence
  Synthetic oligonucleotide
aggaagatcagatgcgccgtcaaagaggaa

SEQ ID NO: 54763 - DNA, 30 bp, Artificial Sequence
  Synthetic oligonucleotide
cgtgctacgtggctgcccaagcccgaggaa

SEQ ID NO: 54764 - DNA, 30 bp, Artificial Sequence
  Synthetic oligonucleotide
gtccagcgctatacgtcaagagtggaggaa

SEQ ID NO: 54765 - DNA, 30 bp, Artificial Sequence
  Synthetic oligonucleotide
taaggtgcgagtctgtacggcctaacggaa

SEQ ID NO: 54766 - DNA, 30 bp, Artificial Sequence
  Synthetic oligonucleotide
ctgcgtacgataaacccaggcactacggaa

SEQ ID NO: 54767 - DNA, 30 bp, Artificial Sequence
  Synthetic oligonucleotide
gcgtagcgactgacgtgctgtggtacggaa

SEQ ID NO: 54768 - DNA, 30 bp, Artificial Sequence
  Synthetic oligonucleotide
gcggggttcagtaggcgcgaacatccggaa

SEQ ID NO: 54769 - DNA, 30 bp, Artificial Sequence
  Synthetic oligonucleotide
tgacttcacacttaaatcaaatgtgcggaa

SEQ ID NO: 54770 - DNA, 30 bp, Artificial Sequence
  Synthetic oligonucleotide
tgcctagttagtccttgagacccgtcggaa

SEQ ID NO: 54771 - DNA, 30 bp, Artificial Sequence
  Synthetic oligonucleotide
tactggcgattgtatagtgggactagggaa

SEQ ID NO: 54772 - DNA, 30 bp, Artificial Sequence
  Synthetic oligonucleotide
ggtcaaagagtgctaaaggagcgtagggaa

SEQ ID NO: 54773 - DNA, 30 bp, Artificial Sequence
  Synthetic oligonucleotide
tgaacaaggcgtgagcgcaacggccgggaa

SEQ ID NO: 54774 - DNA, 30 bp, Artificial Sequence
  Synthetic oligonucleotide
tgaacgtggaacgggtaatcggtaggggaa

SEQ ID NO: 54775 - DNA, 30 bp, Artificial Sequence
  Synthetic oligonucleotide
tcatatcaagtaccaaccccagccggggaa

SEQ ID NO: 54776 - DNA, 30 bp, Artificial Sequence
  Synthetic oligonucleotide
ggaagtagaacgctctggtagcgatgggaa

SEQ ID NO: 54777 - DNA, 30 bp, Artificial Sequence
  Synthetic oligonucleotide
gcaggggatggcataagttcatgctgggaa

SEQ ID NO: 54778 - DNA, 30 bp, Artificial Sequence
  Synthetic oligonucleotide
tcggaacggacagaaactagagattgggaa

SEQ ID NO: 54779 - DNA, 30 bp, Artificial Sequence
  Synthetic oligonucleotide
tcgtaacttgcacgactaaaagatctggaa

SEQ ID NO: 54780 - DNA, 31 bp, Artificial Sequence
  Synthetic oligonucleotide
cgactcaagaaatcatacccctgaggtggaa

SEQ ID NO: 54781 - DNA, 30 bp, Artificial Sequence
  Synthetic oligonucleotide
actgcgtagaaacatgagataagggtggaa

SEQ ID NO: 54782 - DNA, 30 bp, Artificial Sequence
  Synthetic oligonucleotide
tagacctacaaacggaggtatatggtggaa

SEQ ID NO: 54783 - DNA, 30 bp, Artificial Sequence
  Synthetic oligonucleotide
aaagggaggtaggtagaagctgatgtggaa

SEQ ID NO: 54784 - DNA, 30 bp, Artificial Sequence
  Synthetic oligonucleotide
cacgatctagtacttccgagggaattggaa

SEQ ID NO: 54785 - DNA, 30 bp, Artificial Sequence
  Synthetic oligonucleotide
ggcgtcatatgagggatgcagtcaaatgaa

SEQ ID NO: 54786 - DNA, 30 bp, Artificial Sequence
  Synthetic oligonucleotide
cgacccgtgatgcttattagagtaaatgaa

SEQ ID NO: 54787 - DNA, 30 bp, Artificial Sequence
  Synthetic oligonucleotide
tccaatgtaagggcaaagtgctacaatgaa

SEQ ID NO: 54788 - DNA, 30 bp, Artificial Sequence
  Synthetic oligonucleotide
cttagcgaaaagcacagcacagccgatgaa

SEQ ID NO: 54789 - DNA, 30 bp, Artificial Sequence
  Synthetic oligonucleotide
caggggaggtgacacaccgcttaggatgaa

SEQ ID NO: 54790 - DNA, 30 bp, Artificial Sequence
  Synthetic oligonucleotide
tatctaaggcattgagtggaatcggatgaa

SEQ ID NO: 54791 - DNA, 30 bp, Artificial Sequence
  Synthetic oligonucleotide
tagtgctagacataatacggggactatgaa

SEQ ID NO: 54792 - DNA, 30 bp, Artificial Sequence
  Synthetic oligonucleotide
ctagcctgtaaagtcagagttagctatgaa

SEQ ID NO: 54793 - DNA, 30 bp, Artificial Sequence
  Synthetic oligonucleotide
caggggtgccgcgggaactggatgtatgaa

SEQ ID NO: 54794 - DNA, 30 bp, Artificial Sequence
  Synthetic oligonucleotide
acctggaacggacctgcggcgttagctgaa

SEQ ID NO: 54795 - DNA, 30 bp, Artificial Sequence
  Synthetic oligonucleotide
gggcgtgagcgtcggttttcagtcagtgaa

SEQ ID NO: 54796 - DNA, 30 bp, Artificial Sequence
  Synthetic oligonucleotide
agagcatagggcgctgcgtgggggagtgaa

SEQ ID NO: 54797 - DNA, 30 bp, Artificial Sequence
  Synthetic oligonucleotide
tgcgagcacagtgtgtagggtgtccgtgaa

SEQ ID NO: 54798 - DNA, 30 bp, Artificial Sequence
  Synthetic oligonucleotide
aggcaaggggccggcccccagtagcgtgaa

SEQ ID NO: 54799 - DNA, 31 bp, Artificial Sequence
  Synthetic oligonucleotide
aaggaggacacaagtcatattgtcgggtgaa

SEQ ID NO: 54800 - DNA, 30 bp, Artificial Sequence
  Synthetic oligonucleotide
cgggtgtaaaatcggtacgacgtcattgaa

SEQ ID NO: 54801 - DNA, 30 bp, Artificial Sequence
  Synthetic oligonucleotide
taattggcacctaagagtatagagattgaa

SEQ ID NO: 54802 - DNA, 30 bp, Artificial Sequence
  Synthetic oligonucleotide
actaaaggggctgaggtgacactctttgaa

SEQ ID NO: 54803 - DNA, 30 bp, Artificial Sequence
  Synthetic oligonucleotide
taaggtcagcaatgtgggtgcataaaataa

SEQ ID NO: 54804 - DNA, 30 bp, Artificial Sequence
  Synthetic oligonucleotide
cgatcatgggcaggtaaccatccgaaataa

SEQ ID NO: 54805 - DNA, 30 bp, Artificial Sequence
  Synthetic oligonucleotide
agaacgaacgtatcgctgctaactaaataa

SEQ ID NO: 54806 - DNA, 30 bp, Artificial Sequence
  Synthetic oligonucleotide
ccacgcaagaggagcttgaccgtccaataa

SEQ ID NO: 54807 - DNA, 30 bp, Artificial Sequence
  Synthetic oligonucleotide
aaggggagagtttcttccgtgtcgcaataa

SEQ ID NO: 54808 - DNA, 30 bp, Artificial Sequence
  Synthetic oligonucleotide
cgacggtatcggcatcaatgccaataataa

SEQ ID NO: 54809 - DNA, 30 bp, Artificial Sequence
  Synthetic oligonucleotide
gatgaggcatatggcacacaaaaaccataa

SEQ ID NO: 54810 - DNA, 30 bp, Artificial Sequence
  Synthetic oligonucleotide
catacttagataatactatctccgccataa

SEQ ID NO: 54811 - DNA, 30 bp, Artificial Sequence
  Synthetic oligonucleotide
ctctaaagagacataggcaataccgcataa

SEQ ID NO: 54812 - DNA, 31 bp, Artificial Sequence
  Synthetic oligonucleotide
aaggaaagatgcagtcactgagtatgcataa

SEQ ID NO: 54813 - DNA, 30 bp, Artificial Sequence
  Synthetic oligonucleotide
acgtcagtcggtgatctggtagggtcataa

SEQ ID NO: 54814 - DNA, 30 bp, Artificial Sequence
  Synthetic oligonucleotide
acgagaggtaaccagtcacaactttcataa

SEQ ID NO: 54815 - DNA, 30 bp, Artificial Sequence
  Synthetic oligonucleotide
gttatcgcgcgaagaggctgtcccagataa

SEQ ID NO: 54816 - DNA, 30 bp, Artificial Sequence
  Synthetic oligonucleotide
tgaaaactgaataaggagccggccagataa

SEQ ID NO: 54817 - DNA, 31 bp, Artificial Sequence
  Synthetic oligonucleotide
ggacatcgtaaccagaactcggagtagataa

SEQ ID NO: 54818 - DNA, 30 bp, Artificial Sequence
  Synthetic oligonucleotide
ctcaatactgggggatggggtttacgataa

SEQ ID NO: 54819 - DNA, 30 bp, Artificial Sequence
  Synthetic oligonucleotide
taagcgagtacagcaactcttgtgcgataa

SEQ ID NO: 54820 - DNA, 30 bp, Artificial Sequence
  Synthetic oligonucleotide
gacgataggaaatggttccaggtaatataa

SEQ ID NO: 54821 - DNA, 30 bp, Artificial Sequence
  Synthetic oligonucleotide
gtgggatgttctatttaaagtagagtataa

SEQ ID NO: 54822 - DNA, 30 bp, Artificial Sequence
  Synthetic oligonucleotide
gtggtggacagaaaataagaatgagtataa

SEQ ID NO: 54823 - DNA, 30 bp, Artificial Sequence
  Synthetic oligonucleotide
gtctgaagagggcgtcatgccatcgtataa

SEQ ID NO: 54824 - DNA, 30 bp, Artificial Sequence
  Synthetic oligonucleotide
gggcgaaagcacagaaaatcttcggtataa

SEQ ID NO: 54825 - DNA, 30 bp, Artificial Sequence
  Synthetic oligonucleotide
ctggagacaagccgtatactggcattataa

SEQ ID NO: 54826 - DNA, 30 bp, Artificial Sequence
  Synthetic oligonucleotide
ctgaacacgttacgggtatgaaacttataa

SEQ ID NO: 54827 - DNA, 30 bp, Artificial Sequence
  Synthetic oligonucleotide
gaacggataaatccgagttcgcatttataa

SEQ ID NO: 54828 - DNA, 30 bp, Artificial Sequence
  Synthetic oligonucleotide
accacaccacttacttatggcgacaactaa

SEQ ID NO: 54829 - DNA, 30 bp, Artificial Sequence
  Synthetic oligonucleotide
aacgacgagtttaacccgaatatgcactaa

SEQ ID NO: 54830 - DNA, 30 bp, Artificial Sequence
  Synthetic oligonucleotide
cgaccctctcataacagctatgatcactaa

SEQ ID NO: 54831 - DNA, 30 bp, Artificial Sequence
  Synthetic oligonucleotide
cgaccagctgacgcaatctggcgcgactaa

SEQ ID NO: 54832 - DNA, 30 bp, Artificial Sequence
  Synthetic oligonucleotide
ggtctgattctgtgggcgagaaggtactaa

SEQ ID NO: 54833 - DNA, 30 bp, Artificial Sequence
  Synthetic oligonucleotide
aacacaattaatcccagcgcgttgacctaa

SEQ ID NO: 54834 - DNA, 30 bp, Artificial Sequence
  Synthetic oligonucleotide
ctagggtgcacgcaaataacaacaccctaa

SEQ ID NO: 54835 - DNA, 30 bp, Artificial Sequence
  Synthetic oligonucleotide
ccgtcaggtaggagagaaagtatgtcctaa

SEQ ID NO: 54836 - DNA, 30 bp, Artificial Sequence
  Synthetic oligonucleotide
tacaggcatgttagatgcccactttcctaa

SEQ ID NO: 54837 - DNA, 30 bp, Artificial Sequence
  Synthetic oligonucleotide
agcgaacggaatgacagctatctcagctaa

SEQ ID NO: 54838 - DNA, 30 bp, Artificial Sequence
  Synthetic oligonucleotide
acgctaaccaaatatgaaggtctccgctaa

SEQ ID NO: 54839 - DNA, 30 bp, Artificial Sequence
  Synthetic oligonucleotide
tcgtacattaacctagagtacgtccgctaa

SEQ ID NO: 54840 - DNA, 30 bp, Artificial Sequence
  Synthetic oligonucleotide
agggtcacctcccctctacatgtactctaa

SEQ ID NO: 54841 - DNA, 30 bp, Artificial Sequence
  Synthetic oligonucleotide
tcataatcacgacaacaacgggatgtctaa

SEQ ID NO: 54842 - DNA, 30 bp, Artificial Sequence
  Synthetic oligonucleotide
aggaacacccattaagttgatcgaaagtaa

SEQ ID NO: 54843 - DNA, 30 bp, Artificial Sequence
  Synthetic oligonucleotide
tataagctgggtaacctacgtataaagtaa

SEQ ID NO: 54844 - DNA, 30 bp, Artificial Sequence
  Synthetic oligonucleotide
ggtcccaaccctaggaatcgtcctcagtaa

SEQ ID NO: 54845 - DNA, 30 bp, Artificial Sequence
  Synthetic oligonucleotide
acgcaaccgagagagtcaaaaacggagtaa

SEQ ID NO: 54846 - DNA, 30 bp, Artificial Sequence
  Synthetic oligonucleotide
cgatatgacgctaaattgcaatgctagtaa

SEQ ID NO: 54847 - DNA, 30 bp, Artificial Sequence
  Synthetic oligonucleotide
cgccgaccggaaagggaaacgctgtagtaa

SEQ ID NO: 54848 - DNA, 30 bp, Artificial Sequence
  Synthetic oligonucleotide
caaaggtctcaccgaatgttaaaagcgtaa

SEQ ID NO: 54849 - DNA, 30 bp, Artificial Sequence
  Synthetic oligonucleotide
gggcgtagtgagcatattgaagaagcgtaa

SEQ ID NO: 54850 - DNA, 30 bp, Artificial Sequence
  Synthetic oligonucleotide
ttaggcaggaggtgacgaggatgggcgtaa

SEQ ID NO: 54851 - DNA, 30 bp, Artificial Sequence
  Synthetic oligonucleotide
acaggaagacgagttaggctcgcctcgtaa

SEQ ID NO: 54852 - DNA, 30 bp, Artificial Sequence
  Synthetic oligonucleotide
tagctgagtggggtaggaaaccattcgtaa

SEQ ID NO: 54853 - DNA, 30 bp, Artificial Sequence
  Synthetic oligonucleotide
gctaagcttcggaatacgtgagggaggtaa

SEQ ID NO: 54854 - DNA, 30 bp, Artificial Sequence
  Synthetic oligonucleotide
agagtgaagaaacgcagttacaatcggtaa

SEQ ID NO: 54855 - DNA, 31 bp, Artificial Sequence
  Synthetic oligonucleotide
gggggtccgaaataacgaccacgaggggtaa

SEQ ID NO: 54856 - DNA, 30 bp, Artificial Sequence
  Synthetic oligonucleotide
cgagtacatcgaaaatgctcaagggggtaa

SEQ ID NO: 54857 - DNA, 30 bp, Artificial Sequence
  Synthetic oligonucleotide
aggcatctggtagccagctaggatgggtaa

SEQ ID NO: 54858 - DNA, 30 bp, Artificial Sequence
  Synthetic oligonucleotide
cagcgactaaggaacaaagtgaaatggtaa

SEQ ID NO: 54859 - DNA, 30 bp, Artificial Sequence
  Synthetic oligonucleotide
tcgatcatgtgatgctgccagccgatgtaa

SEQ ID NO: 54860 - DNA, 30 bp, Artificial Sequence
  Synthetic oligonucleotide
agctataaagtgcgcaaaccgtcattgtaa

SEQ ID NO: 54861 - DNA, 30 bp, Artificial Sequence
  Synthetic oligonucleotide
taccatgagaaagaatgtgggcgattgtaa

SEQ ID NO: 54862 - DNA, 30 bp, Artificial Sequence
  Synthetic oligonucleotide
ggagtagaaagaggtaagctgctgaattaa

SEQ ID NO: 54863 - DNA, 30 bp, Artificial Sequence
  Synthetic oligonucleotide
agccaagccaatggtccactgaataattaa

SEQ ID NO: 54864 - DNA, 30 bp, Artificial Sequence
  Synthetic oligonucleotide
aacgtaccgttccagactggtcaccattaa

SEQ ID NO: 54865 - DNA, 30 bp, Artificial Sequence
  Synthetic oligonucleotide
atgtcagccgcacgtcaacaaactcattaa

SEQ ID NO: 54866 - DNA, 30 bp, Artificial Sequence
  Synthetic oligonucleotide
aggaaggggtgtgtaccgaattctcattaa

SEQ ID NO: 54867 - DNA, 30 bp, Artificial Sequence
  Synthetic oligonucleotide
gtgggtagggtaacgtatgtcagatattaa

SEQ ID NO: 54868 - DNA, 30 bp, Artificial Sequence
  Synthetic oligonucleotide
gcacgtaaaggaagtagttgaatctattaa

SEQ ID NO: 54869 - DNA, 30 bp, Artificial Sequence
  Synthetic oligonucleotide
taacaagacaagactggtctaggaacttaa

SEQ ID NO: 54870 - DNA, 30 bp, Artificial Sequence
  Synthetic oligonucleotide
tccgcgggatacacacgaatagctcgttaa

SEQ ID NO: 54871 - DNA, 30 bp, Artificial Sequence
  Synthetic oligonucleotide
acaggcttcggcaaggatgtctctcgttaa

SEQ ID NO: 54872 - DNA, 30 bp, Artificial Sequence
  Synthetic oligonucleotide
accagcaacacttcactatgatacggttaa

SEQ ID NO: 54873 - DNA, 30 bp, Artificial Sequence
  Synthetic oligonucleotide
ggcgaaacgcaagataggcctaagggttaa

SEQ ID NO: 54874 - DNA, 30 bp, Artificial Sequence
  Synthetic oligonucleotide
agccggaacttgacaacttacgagggttaa

SEQ ID NO: 54875 - DNA, 30 bp, Artificial Sequence
  Synthetic oligonucleotide
tctaaagtcaagcatgatcacacggtttaa

SEQ ID NO: 54876 - DNA, 30 bp, Artificial Sequence
  Synthetic oligonucleotide
ccattataaaacacgattcgagagaaaaca

SEQ ID NO: 54877 - DNA, 31 bp, Artificial Sequence
  Synthetic oligonucleotide
gtcacacactcatgacttccagtgacaaaca

SEQ ID NO: 54878 - DNA, 30 bp, Artificial Sequence
  Synthetic oligonucleotide
taaacccactaccgtgaaacacttcaaaca

SEQ ID NO: 54879 - DNA, 30 bp, Artificial Sequence
  Synthetic oligonucleotide
gagcgaagaaacccattctataaagaaaca

SEQ ID NO: 54880 - DNA, 30 bp, Artificial Sequence
  Synthetic oligonucleotide
acagatgcagttagcaagcccacggaaaca

SEQ ID NO: 54881 - DNA, 30 bp, Artificial Sequence
  Synthetic oligonucleotide
gccacaccgcgttacgataaaagggaaaca

SEQ ID NO: 54882 - DNA, 30 bp, Artificial Sequence
  Synthetic oligonucleotide
tgaggcgcagaacatggtcaaaggtaaaca

SEQ ID NO: 54883 - DNA, 30 bp, Artificial Sequence
  Synthetic oligonucleotide
aggaaaaacattagctgctattgtacaaca

SEQ ID NO: 54884 - DNA, 30 bp, Artificial Sequence
  Synthetic oligonucleotide
tagtaagatgaaagtcaccctcaaccaaca

SEQ ID NO: 54885 - DNA, 30 bp, Artificial Sequence
  Synthetic oligonucleotide
atataaaacatgttccaataagtcccaaca

SEQ ID NO: 54886 - DNA, 30 bp, Artificial Sequence
  Synthetic oligonucleotide
ggtctatgcccctgatcatgtaaagcaaca

SEQ ID NO: 54887 - DNA, 30 bp, Artificial Sequence
  Synthetic oligonucleotide
ccaggccggataaactatcttaaggcaaca

SEQ ID NO: 54888 - DNA, 30 bp, Artificial Sequence
  Synthetic oligonucleotide
aggaacttgcgggaaaagtatttggcaaca

SEQ ID NO: 54889 - DNA, 30 bp, Artificial Sequence
  Synthetic oligonucleotide
ctcgaaaaaacgctaaaacacgattcaaca

SEQ ID NO: 54890 - DNA, 30 bp, Artificial Sequence
  Synthetic oligonucleotide
tcgtacaagcgatcgtcctaggattcaaca

SEQ ID NO: 54891 - DNA, 30 bp, Artificial Sequence
  Synthetic oligonucleotide
cgctatatagtagtgggatagggacgaaca

SEQ ID NO: 54892 - DNA, 30 bp, Artificial Sequence
  Synthetic oligonucleotide
aacgctcagaaaagtcgaccaaagcgaaca

SEQ ID NO: 54893 - DNA, 30 bp, Artificial Sequence
  Synthetic oligonucleotide
tcagggagagagcagcctctaataggaaca

SEQ ID NO: 54894 - DNA, 30 bp, Artificial Sequence
  Synthetic oligonucleotide
ggcgatacgtccttagatccaacgtgaaca

SEQ ID NO: 54895 - DNA, 30 bp, Artificial Sequence
  Synthetic oligonucleotide
aggtggattacatataacccgaggtgaaca

SEQ ID NO: 54896 - DNA, 30 bp, Artificial Sequence
  Synthetic oligonucleotide
cgttggatcctcgcatagagtatgtgaaca

SEQ ID NO: 54897 - DNA, 30 bp, Artificial Sequence
  Synthetic oligonucleotide
caagtcctaaaactaagaacggtttgaaca

SEQ ID NO: 54898 - DNA, 30 bp, Artificial Sequence
  Synthetic oligonucleotide
tagcgatagctgatgaggggcgcggtaaca

SEQ ID NO: 54899 - DNA, 30 bp, Artificial Sequence
  Synthetic oligonucleotide
cggccaaggattcatctgagcgtaaacaca

SEQ ID NO: 54900 - DNA, 30 bp, Artificial Sequence
  Synthetic oligonucleotide
acaactgcagccagccgggtgggcaacaca

SEQ ID NO: 54901 - DNA, 30 bp, Artificial Sequence
  Synthetic oligonucleotide
gagatagtcaccaaaccgtgtggcaacaca

SEQ ID NO: 54902 - DNA, 30 bp, Artificial Sequence
  Synthetic oligonucleotide
gggaccgctggagtacgtcgtctcaacaca

SEQ ID NO: 54903 - DNA, 30 bp, Artificial Sequence
  Synthetic oligonucleotide
ctaccgacgaagggtaccaaccgtaacaca

SEQ ID NO: 54904 - DNA, 30 bp, Artificial Sequence
  Synthetic oligonucleotide
ctccagcgtcacgcctaccatggtcacaca

SEQ ID NO: 54905 - DNA, 30 bp, Artificial Sequence
  Synthetic oligonucleotide
tgttcgccgaaatccacggactggaccaca

SEQ ID NO: 54906 - DNA, 30 bp, Artificial Sequence
  Synthetic oligonucleotide
cgcgtcaacactattgagtgatgtgccaca

SEQ ID NO: 54907 - DNA, 30 bp, Artificial Sequence
  Synthetic oligonucleotide
catcgtaacagtcgtcccccgtcatccaca

SEQ ID NO: 54908 - DNA, 30 bp, Artificial Sequence
  Synthetic oligonucleotide
atgagatcaaggatcgatagtcgttccaca

SEQ ID NO: 54909 - DNA, 30 bp, Artificial Sequence
  Synthetic oligonucleotide
acgcatcacaacgaacccgacagcagcaca

SEQ ID NO: 54910 - DNA, 30 bp, Artificial Sequence
  Synthetic oligonucleotide
aacggggacctggaggcgtgtagccgcaca

SEQ ID NO: 54911 - DNA, 30 bp, Artificial Sequence
  Synthetic oligonucleotide
ttatcgggaaaaagagttttaaggcgcaca

SEQ ID NO: 54912 - DNA, 30 bp, Artificial Sequence
  Synthetic oligonucleotide
gagaatgaatcatcataacggcaaggcaca

SEQ ID NO: 54913 - DNA, 30 bp, Artificial Sequence
  Synthetic oligonucleotide
ggaacattagggccgtcaccagcactcaca

SEQ ID NO: 54914 - DNA, 32 bp, Artificial Sequence
  Synthetic oligonucleotide
tgttttccttcttacctttatgctgcgtcaca

SEQ ID NO: 54915 - DNA, 30 bp, Artificial Sequence
  Synthetic oligonucleotide
tccaggataccgtctaggagatccaagaca

SEQ ID NO: 54916 - DNA, 30 bp, Artificial Sequence
  Synthetic oligonucleotide
ggcaacgttactaacgccccctccaagaca

SEQ ID NO: 54917 - DNA, 30 bp, Artificial Sequence
  Synthetic oligonucleotide
gtacaaagatcgggccagtatagtaagaca

SEQ ID NO: 54918 - DNA, 30 bp, Artificial Sequence
  Synthetic oligonucleotide
gtagctggtaactaaacagactaacagaca

SEQ ID NO: 54919 - DNA, 30 bp, Artificial Sequence
  Synthetic oligonucleotide
ttgccgagagctagctccaatccccagaca

SEQ ID NO: 54920 - DNA, 30 bp, Artificial Sequence
  Synthetic oligonucleotide
tgcgataaatctgagactcagagccagaca

SEQ ID NO: 54921 - DNA, 30 bp, Artificial Sequence
  Synthetic oligonucleotide
ttataaacggtggatagccagggggagaca

SEQ ID NO: 54922 - DNA, 30 bp, Artificial Sequence
  Synthetic oligonucleotide
aaaagtggtgctagccaactgcgtgagaca

SEQ ID NO: 54923 - DNA, 30 bp, Artificial Sequence
  Synthetic oligonucleotide
aatggaacattcaggtgtcgggtctagaca

SEQ ID NO: 54924 - DNA, 30 bp, Artificial Sequence
  Synthetic oligonucleotide
ttaaaaggccaacgtgggagggttccgaca

SEQ ID NO: 54925 - DNA, 30 bp, Artificial Sequence
  Synthetic oligonucleotide
cgtgagtggacctcggatcagtttccgaca

SEQ ID NO: 54926 - DNA, 30 bp, Artificial Sequence
  Synthetic oligonucleotide
gtgacagtgaacgaggggagagttgcgaca

SEQ ID NO: 54927 - DNA, 30 bp, Artificial Sequence
  Synthetic oligonucleotide
cgacaaaagtcttatagggagcaccggaca

SEQ ID NO: 54928 - DNA, 30 bp, Artificial Sequence
  Synthetic oligonucleotide
tcgctagcgaaagatacccatgcgcggaca

SEQ ID NO: 54929 - DNA, 30 bp, Artificial Sequence
  Synthetic oligonucleotide
gcatgcatatggtcacgttagccagggaca

SEQ ID NO: 54930 - DNA, 30 bp, Artificial Sequence
  Synthetic oligonucleotide
caaatagaattgctgaattctagagggaca

SEQ ID NO: 54931 - DNA, 30 bp, Artificial Sequence
  Synthetic oligonucleotide
tctgtaagcaacaaagctgtggccgggaca

SEQ ID NO: 54932 - DNA, 30 bp, Artificial Sequence
  Synthetic oligonucleotide
taccgggttcacgtgacgagtagtgggaca

SEQ ID NO: 54933 - DNA, 30 bp, Artificial Sequence
  Synthetic oligonucleotide
gtatcaataagttcgagcaatgttgggaca

SEQ ID NO: 54934 - DNA, 30 bp, Artificial Sequence
  Synthetic oligonucleotide
gggacagactagcggaggaaataatggaca

SEQ ID NO: 54935 - DNA, 30 bp, Artificial Sequence
  Synthetic oligonucleotide
cgggcagacggctcatcgaccacatggaca

SEQ ID NO: 54936 - DNA, 30 bp, Artificial Sequence
  Synthetic oligonucleotide
gagaggcggtcttggcaaagcagaatgaca

SEQ ID NO: 54937 - DNA, 30 bp, Artificial Sequence
  Synthetic oligonucleotide
cgagggtagggtgaccacggctacctgaca

SEQ ID NO: 54938 - DNA, 30 bp, Artificial Sequence
  Synthetic oligonucleotide
gtggagagtggcccctgtaacaaagtgaca

SEQ ID NO: 54939 - DNA, 30 bp, Artificial Sequence
  Synthetic oligonucleotide
ggtgtatagtaaccatcagcaccagtgaca

SEQ ID NO: 54940 - DNA, 30 bp, Artificial Sequence
  Synthetic oligonucleotide
gggtacgtcggtggataggcaggtgtgaca

SEQ ID NO: 54941 - DNA, 30 bp, Artificial Sequence
  Synthetic oligonucleotide
agagtcgtacggcgtttggatgggttgaca

SEQ ID NO: 54942 - DNA, 30 bp, Artificial Sequence
  Synthetic oligonucleotide
ccctgatctgacagggctcggacaaataca

SEQ ID NO: 54943 - DNA, 30 bp, Artificial Sequence
  Synthetic oligonucleotide
acggtacaagaatccgtcgtacacaataca

SEQ ID NO: 54944 - DNA, 30 bp, Artificial Sequence
  Synthetic oligonucleotide
gggaattgatggcccatcgtgattcataca

SEQ ID NO: 54945 - DNA, 30 bp, Artificial Sequence
  Synthetic oligonucleotide
acacaaattgcagagggaggggaagataca

SEQ ID NO: 54946 - DNA, 30 bp, Artificial Sequence
  Synthetic oligonucleotide
tacttccagtgccgacagttgctggataca

SEQ ID NO: 54947 - DNA, 30 bp, Artificial Sequence
  Synthetic oligonucleotide
gggaccaggaaacaagtgcgtctcactaca

SEQ ID NO: 54948 - DNA, 30 bp, Artificial Sequence
  Synthetic oligonucleotide
caggaatcgcccacgaggaacagacctaca

SEQ ID NO: 54949 - DNA, 30 bp, Artificial Sequence
  Synthetic oligonucleotide
aggtgtaggaaggctactgtcactcctaca

SEQ ID NO: 54950 - DNA, 30 bp, Artificial Sequence
  Synthetic oligonucleotide
aaggtagagtatatttgtaacaacgctaca

SEQ ID NO: 54951 - DNA, 30 bp, Artificial Sequence
  Synthetic oligonucleotide
gatccaagtccgactgaaaaaaaggctaca

SEQ ID NO: 54952 - DNA, 30 bp, Artificial Sequence
  Synthetic oligonucleotide
tggtgagagtgccatcagctagaatctaca

SEQ ID NO: 54953 - DNA, 30 bp, Artificial Sequence
  Synthetic oligonucleotide
cttcgtactaggagaagtggggagtctaca

SEQ ID NO: 54954 - DNA, 30 bp, Artificial Sequence
  Synthetic oligonucleotide
gaaggttaaaacgggggaggcgggtctaca

SEQ ID NO: 54955 - DNA, 30 bp, Artificial Sequence
  Synthetic oligonucleotide
ttcgtctcaacgtagatggtggcgagtaca

SEQ ID NO: 54956 - DNA, 30 bp, Artificial Sequence
  Synthetic oligonucleotide
caaacggcggaaggaaacgcggatagtaca

SEQ ID NO: 54957 - DNA, 30 bp, Artificial Sequence
  Synthetic oligonucleotide
gcagcagagtgtgcacacctagaaattaca

SEQ ID NO: 54958 - DNA, 30 bp, Artificial Sequence
  Synthetic oligonucleotide
caacgtgattaccagaactcaaagtttaca

SEQ ID NO: 54959 - DNA, 30 bp, Artificial Sequence
  Synthetic oligonucleotide
gatcgctagatgtcagctcaaaggcaacca

SEQ ID NO: 54960 - DNA, 30 bp, Artificial Sequence
  Synthetic oligonucleotide
caagacacggttcgtagcgaaaatcaacca

SEQ ID NO: 54961 - DNA, 30 bp, Artificial Sequence
  Synthetic oligonucleotide
aaaacgaacacaggcgatgcgaacacacca

SEQ ID NO: 54962 - DNA, 30 bp, Artificial Sequence
  Synthetic oligonucleotide
agtcggaaatcagcggtgatagcctcacca

SEQ ID NO: 54963 - DNA, 31 bp, Artificial Sequence
  Synthetic oligonucleotide
cactcttcatcagcagaaaaccatccgacca

SEQ ID NO: 54964 - DNA, 30 bp, Artificial Sequence
  Synthetic oligonucleotide
attggggcaatacatgcgttaacgggacca

SEQ ID NO: 54965 - DNA, 30 bp, Artificial Sequence
  Synthetic oligonucleotide
tatggacgcgctgatcgagctgggggacca

SEQ ID NO: 54966 - DNA, 30 bp, Artificial Sequence
  Synthetic oligonucleotide
aagtccaactggcgtattatcacgtgacca

SEQ ID NO: 54967 - DNA, 30 bp, Artificial Sequence
  Synthetic oligonucleotide
aggtcccactgtagaatcacgtcgtgacca

SEQ ID NO: 54968 - DNA, 30 bp, Artificial Sequence
  Synthetic oligonucleotide
gcgtgcaggctgcgttgtacaccttgacca

SEQ ID NO: 54969 - DNA, 30 bp, Artificial Sequence
  Synthetic oligonucleotide
ttatgtgcaaacctagacgggacgatacca

SEQ ID NO: 54970 - DNA, 30 bp, Artificial Sequence
  Synthetic oligonucleotide
cgaggtcatagagataggtagctgctacca

SEQ ID NO: 54971 - DNA, 30 bp, Artificial Sequence
  Synthetic oligonucleotide
atacacaaactgagttaatcatgagtacca

SEQ ID NO: 54972 - DNA, 30 bp, Artificial Sequence
  Synthetic oligonucleotide
caggtggcgatacgaatgagactgaaccca

SEQ ID NO: 54973 - DNA, 30 bp, Artificial Sequence
  Synthetic oligonucleotide
gtaggggaaggggccgtccatggccaccca

SEQ ID NO: 54974 - DNA, 30 bp, Artificial Sequence
  Synthetic oligonucleotide
agggatcagagagtttatgggctagaccca

SEQ ID NO: 54975 - DNA, 30 bp, Artificial Sequence
  Synthetic oligonucleotide
gcctgcgaaccccgaggtcaataagcccca

SEQ ID NO: 54976 - DNA, 30 bp, Artificial Sequence
  Synthetic oligonucleotide
agcggaggaagtaaaatgcaccgatcccca

SEQ ID NO: 54977 - DNA, 30 bp, Artificial Sequence
  Synthetic oligonucleotide
acggatgagcacccagaaaatactagccca

SEQ ID NO: 54978 - DNA, 30 bp, Artificial Sequence
  Synthetic oligonucleotide
gacaaccttccgaggaaccaggaacgccca

SEQ ID NO: 54979 - DNA, 30 bp, Artificial Sequence
  Synthetic oligonucleotide
acagccgacagggacctagggcgacgccca

SEQ ID NO: 54980 - DNA, 30 bp, Artificial Sequence
  Synthetic oligonucleotide
acgactccaatcgtaagccagcatggccca

SEQ ID NO: 54981 - DNA, 30 bp, Artificial Sequence
  Synthetic oligonucleotide
tgagcaggacacgaagctccatggtgccca

SEQ ID NO: 54982 - DNA, 30 bp, Artificial Sequence
  Synthetic oligonucleotide
cacagggtgagtgaaactcaatgaatccca

SEQ ID NO: 54983 - DNA, 30 bp, Artificial Sequence
  Synthetic oligonucleotide
aggactaaaggccgaggagtggaactccca

SEQ ID NO: 54984 - DNA, 30 bp, Artificial Sequence
  Synthetic oligonucleotide
ggcaaagaggtccagaggaacttgctccca

SEQ ID NO: 54985 - DNA, 30 bp, Artificial Sequence
  Synthetic oligonucleotide
cacgatggtacacctaggttcaataagcca

SEQ ID NO: 54986 - DNA, 30 bp, Artificial Sequence
  Synthetic oligonucleotide
acggtagatttcgtccggcatcctaagcca

SEQ ID NO: 54987 - DNA, 30 bp, Artificial Sequence
  Synthetic oligonucleotide
cacttttcccagacaacaccacaccagcca

SEQ ID NO: 54988 - DNA, 30 bp, Artificial Sequence
  Synthetic oligonucleotide
ggatgaaacggacccccgtcccgagagcca

SEQ ID NO: 54989 - DNA, 30 bp, Artificial Sequence
  Synthetic oligonucleotide
aacggatcgtcgatgttatccatgtagcca

SEQ ID NO: 54990 - DNA, 30 bp, Artificial Sequence
  Synthetic oligonucleotide
gtcgaccgtcaacctcggacaagttagcca

SEQ ID NO: 54991 - DNA, 30 bp, Artificial Sequence
  Synthetic oligonucleotide
agagggcctaagtgttttacggtgccgcca

SEQ ID NO: 54992 - DNA, 30 bp, Artificial Sequence
  Synthetic oligonucleotide
gccgtgcaccgaccaggaaggacgtcgcca

SEQ ID NO: 54993 - DNA, 30 bp, Artificial Sequence
  Synthetic oligonucleotide
tgaggttgaacatacttacgtgcgtcgcca

SEQ ID NO: 54994 - DNA, 30 bp, Artificial Sequence
  Synthetic oligonucleotide
cacaattcacaggcacatccgacgaggcca

SEQ ID NO: 54995 - DNA, 30 bp, Artificial Sequence
  Synthetic oligonucleotide
ccgaaaacatttccaacaatcaaacggcca

SEQ ID NO: 54996 - DNA, 30 bp, Artificial Sequence
  Synthetic oligonucleotide
caccaagaaattcgcacaacaccgcggcca

SEQ ID NO: 54997 - DNA, 30 bp, Artificial Sequence
  Synthetic oligonucleotide
ccttagtaaataacgttaaattgtcggcca

SEQ ID NO: 54998 - DNA, 30 bp, Artificial Sequence
  Synthetic oligonucleotide
agtacttggatagaaaggtgttcgctgcca

SEQ ID NO: 54999 - DNA, 30 bp, Artificial Sequence
  Synthetic oligonucleotide
tcagctcgacagtcccaaaatagtcatcca

SEQ ID NO: 55000 - DNA, 30 bp, Artificial Sequence
  Synthetic oligonucleotide
agaaatcagccggcagggtcttcagatcca

SEQ ID NO: 55001 - DNA, 30 bp, Artificial Sequence
  Synthetic oligonucleotide
acgaatgcgtaaagagtaatcgtagatcca

SEQ ID NO: 55002 - DNA, 30 bp, Artificial Sequence
  Synthetic oligonucleotide
aacaggagcgtgtacaaaggtgtggatcca

SEQ ID NO: 55003 - DNA, 30 bp, Artificial Sequence
  Synthetic oligonucleotide
acaccagtgaccggacactaaacatatcca

SEQ ID NO: 55004 - DNA, 30 bp, Artificial Sequence
  Synthetic oligonucleotide
tgaagagagatagggatgaacttgtatcca

SEQ ID NO: 55005 - DNA, 30 bp, Artificial Sequence
  Synthetic oligonucleotide
tctgctgcgatcggaataggaaacactcca

SEQ ID NO: 55006 - DNA, 30 bp, Artificial Sequence
  Synthetic oligonucleotide
tcatcgcgattataccccgcaatccctcca

SEQ ID NO: 55007 - DNA, 30 bp, Artificial Sequence
  Synthetic oligonucleotide
tctatgcgacttaagagagattcggctcca

SEQ ID NO: 55008 - DNA, 30 bp, Artificial Sequence
  Synthetic oligonucleotide
aaagagcggcactaggaacacagtagtcca

SEQ ID NO: 55009 - DNA, 30 bp, Artificial Sequence
  Synthetic oligonucleotide
cggcaggcaactattggtatggcacgtcca

SEQ ID NO: 55010 - DNA, 30 bp, Artificial Sequence
  Synthetic oligonucleotide
ccagccactaatctcggacgtcgccgtcca

SEQ ID NO: 55011 - DNA, 30 bp, Artificial Sequence
  Synthetic oligonucleotide
gaaacgatataagtgcgtctcggcggtcca

SEQ ID NO: 55012 - DNA, 30 bp, Artificial Sequence
  Synthetic oligonucleotide
ggctaaggtgtgtaacgagtatctaaagca

SEQ ID NO: 55013 - DNA, 30 bp, Artificial Sequence
  Synthetic oligonucleotide
gtcgatcacgggcgaggctaagtacaagca

SEQ ID NO: 55014 - DNA, 30 bp, Artificial Sequence
  Synthetic oligonucleotide
attgggcgacgaccactggcctcggaagca

SEQ ID NO: 55015 - DNA, 30 bp, Artificial Sequence
  Synthetic oligonucleotide
tgaggtaaagtaagcgtggtaatctaagca

SEQ ID NO: 55016 - DNA, 30 bp, Artificial Sequence
  Synthetic oligonucleotide
gccgtaacagtcaattacccagggtaagca

SEQ ID NO: 55017 - DNA, 30 bp, Artificial Sequence
  Synthetic oligonucleotide
cagaagggtactctgctcgggcaaacagca

SEQ ID NO: 55018 - DNA, 30 bp, Artificial Sequence
  Synthetic oligonucleotide
aaaggtcacgttacgaattaggtgacagca

SEQ ID NO: 55019 - DNA, 30 bp, Artificial Sequence
  Synthetic oligonucleotide
taacaagtatcatggtacgagaatacagca

SEQ ID NO: 55020 - DNA, 30 bp, Artificial Sequence
  Synthetic oligonucleotide
caggaccgaatctatgaggaatttccagca

SEQ ID NO: 55021 - DNA, 30 bp, Artificial Sequence
  Synthetic oligonucleotide
cgagactaaacgagcccactacctgcagca

SEQ ID NO: 55022 - DNA, 30 bp, Artificial Sequence
  Synthetic oligonucleotide
tggagcgcaggcactcgtcacggttcagca

SEQ ID NO: 55023 - DNA, 30 bp, Artificial Sequence
  Synthetic oligonucleotide
gttgagaaaacaggggatgctcgccgagca

SEQ ID NO: 55024 - DNA, 30 bp, Artificial Sequence
  Synthetic oligonucleotide
gggcagagatactagttaccacatcgagca

SEQ ID NO: 55025 - DNA, 30 bp, Artificial Sequence
  Synthetic oligonucleotide
aagtcacagcgcgtcagggtggccggagca

SEQ ID NO: 55026 - DNA, 30 bp, Artificial Sequence
  Synthetic oligonucleotide
gtgcaaccaggttaagggtggtagggagca

SEQ ID NO: 55027 - DNA, 30 bp, Artificial Sequence
  Synthetic oligonucleotide
gggtagtttgggtataattatcgtggagca

SEQ ID NO: 55028 - DNA, 30 bp, Artificial Sequence
  Synthetic oligonucleotide
catagttactttgggaaaaaggaatgagca

SEQ ID NO: 55029 - DNA, 30 bp, Artificial Sequence
  Synthetic oligonucleotide
catatggtgaatttgaaatgctactgagca

SEQ ID NO: 55030 - DNA, 30 bp, Artificial Sequence
  Synthetic oligonucleotide
acttcgctaagaaccatgcgaatctgagca

SEQ ID NO: 55031 - DNA, 30 bp, Artificial Sequence
  Synthetic oligonucleotide
acgagttggtatagttgatgcagttgagca

SEQ ID NO: 55032 - DNA, 30 bp, Artificial Sequence
  Synthetic oligonucleotide
gtggatttggcagaacataaagtttgagca

SEQ ID NO: 55033 - DNA, 30 bp, Artificial Sequence
  Synthetic oligonucleotide
gtacttcatgagccaatacgggagatagca

SEQ ID NO: 55034 - DNA, 30 bp, Artificial Sequence
  Synthetic oligonucleotide
cgctcgggccagccgttgggaagtatagca

SEQ ID NO: 55035 - DNA, 30 bp, Artificial Sequence
  Synthetic oligonucleotide
agggatttggtactccgagtctatgtagca

SEQ ID NO: 55036 - DNA, 30 bp, Artificial Sequence
  Synthetic oligonucleotide
ggacggtcacgacgtaatgccgccttagca

SEQ ID NO: 55037 - DNA, 30 bp, Artificial Sequence
  Synthetic oligonucleotide
agataggcccacacgaggatcaagttagca

SEQ ID NO: 55038 - DNA, 30 bp, Artificial Sequence
  Synthetic oligonucleotide
gcacgggaagtcatggaatggaagttagca

SEQ ID NO: 55039 - DNA, 30 bp, Artificial Sequence
  Synthetic oligonucleotide
caggttacgccagatggaggagagaacgca

SEQ ID NO: 55040 - DNA, 30 bp, Artificial Sequence
  Synthetic oligonucleotide
agtcagatgtagccttcaatacttaacgca

SEQ ID NO: 55041 - DNA, 30 bp, Artificial Sequence
  Synthetic oligonucleotide
tcgaccaaggtgcctgtaaaataacacgca

SEQ ID NO: 55042 - DNA, 30 bp, Artificial Sequence
  Synthetic oligonucleotide
gctggataccaagatgcactacaccacgca

SEQ ID NO: 55043 - DNA, 30 bp, Artificial Sequence
  Synthetic oligonucleotide
gacgagcttaacgcccccaaagagcacgca

SEQ ID NO: 55044 - DNA, 30 bp, Artificial Sequence
  Synthetic oligonucleotide
aggattgctctgagataaaggccatacgca

SEQ ID NO: 55045 - DNA, 30 bp, Artificial Sequence
  Synthetic oligonucleotide
tgtaggaggagccacaatacatgatacgca

SEQ ID NO: 55046 - DNA, 30 bp, Artificial Sequence
  Synthetic oligonucleotide
tcgagaaccagctttggccaatcctacgca

SEQ ID NO: 55047 - DNA, 30 bp, Artificial Sequence
  Synthetic oligonucleotide
aggggtgtacagattcatctgcagtacgca

SEQ ID NO: 55048 - DNA, 30 bp, Artificial Sequence
  Synthetic oligonucleotide
gtgccagagcagaagtacggtgtgaccgca

SEQ ID NO: 55049 - DNA, 30 bp, Artificial Sequence
  Synthetic oligonucleotide
catatcacaagtgggaagaattataccgca

SEQ ID NO: 55050 - DNA, 31 bp, Artificial Sequence
  Synthetic oligonucleotide
ggatggctgatacacactgactcatgccgca

SEQ ID NO: 55051 - DNA, 30 bp, Artificial Sequence
  Synthetic oligonucleotide
tggtcggtcagaggccatgaataacgcgca

SEQ ID NO: 55052 - DNA, 30 bp, Artificial Sequence
  Synthetic oligonucleotide
acagaagtcatctattaacatcgaggcgca

SEQ ID NO: 55053 - DNA, 30 bp, Artificial Sequence
  Synthetic oligonucleotide
cttgaagcgtgtgcagcaaatcagggcgca

SEQ ID NO: 55054 - DNA, 30 bp, Artificial Sequence
  Synthetic oligonucleotide
agcaactaaggctctgcggcccgatgcgca

SEQ ID NO: 55055 - DNA, 30 bp, Artificial Sequence
  Synthetic oligonucleotide
gattgggagacagccaacggctactgcgca

SEQ ID NO: 55056 - DNA, 30 bp, Artificial Sequence
  Synthetic oligonucleotide
gtaaacggcattcgaggttaacagtgcgca

SEQ ID NO: 55057 - DNA, 29 bp, Artificial Sequence
  Synthetic oligonucleotide
ataaagaggtcgataggcccgggatcgca

SEQ ID NO: 55058 - DNA, 30 bp, Artificial Sequence
  Synthetic oligonucleotide
accgattgcaacgatcaataggcggtcgca

SEQ ID NO: 55059 - DNA, 30 bp, Artificial Sequence
  Synthetic oligonucleotide
acttagcaggacaaccagatagcattcgca

SEQ ID NO: 55060 - DNA, 30 bp, Artificial Sequence
  Synthetic oligonucleotide
agatctaaacccgcatatcagcagaaggca

SEQ ID NO: 55061 - DNA, 30 bp, Artificial Sequence
  Synthetic oligonucleotide
agagtagtagcatgtcactattcgaaggca

SEQ ID NO: 55062 - DNA, 30 bp, Artificial Sequence
  Synthetic oligonucleotide
gcgggaaaagtccgagttttcagtaaggca

SEQ ID NO: 55063 - DNA, 30 bp, Artificial Sequence
  Synthetic oligonucleotide
agtcaaacgatacgatcctatgctcaggca

SEQ ID NO: 55064 - DNA, 30 bp, Artificial Sequence
  Synthetic oligonucleotide
ctagacaggtctcggttaagccaggaggca

SEQ ID NO: 55065 - DNA, 30 bp, Artificial Sequence
  Synthetic oligonucleotide
aaggggcgcaaaagacgtgcaccttaggca

SEQ ID NO: 55066 - DNA, 30 bp, Artificial Sequence
  Synthetic oligonucleotide
accgcgaataagccaatggtcaaaacggca

SEQ ID NO: 55067 - DNA, 30 bp, Artificial Sequence
  Synthetic oligonucleotide
cgacaaatcagctagcgaaacattccggca

SEQ ID NO: 55068 - DNA, 30 bp, Artificial Sequence
  Synthetic oligonucleotide
tctcacattcaaaagatccaaatttcggca

SEQ ID NO: 55069 - DNA, 30 bp, Artificial Sequence
  Synthetic oligonucleotide
atacagaaaaataaacaatatgcaagggca

SEQ ID NO: 55070 - DNA, 30 bp, Artificial Sequence
  Synthetic oligonucleotide
aacgagctgtgcgtcaaacacacgcgggca

SEQ ID NO: 55071 - DNA, 30 bp, Artificial Sequence
  Synthetic oligonucleotide
tcgctaaggactaacaggtagtcaggggca

SEQ ID NO: 55072 - DNA, 30 bp, Artificial Sequence
  Synthetic oligonucleotide
ggattaccgcttcaaaagacaaacggggca

SEQ ID NO: 55073 - DNA, 30 bp, Artificial Sequence
  Synthetic oligonucleotide
ctgcttgcaagacgtctcaaacggggggca

SEQ ID NO: 55074 - DNA, 30 bp, Artificial Sequence
  Synthetic oligonucleotide
agtagccatagcgtatgctgcacctgggca

SEQ ID NO: 55075 - DNA, 30 bp, Artificial Sequence
  Synthetic oligonucleotide
gcctagctgtactgatcatgggattgggca

SEQ ID NO: 55076 - DNA, 30 bp, Artificial Sequence
  Synthetic oligonucleotide
cctgtgctgtcaacattctatcgcatggca

SEQ ID NO: 55077 - DNA, 30 bp, Artificial Sequence
  Synthetic oligonucleotide
catccctaagtatcctcaatggaagtggca

SEQ ID NO: 55078 - DNA, 30 bp, Artificial Sequence
  Synthetic oligonucleotide
gacggtatgtcagcgactcgtaaggtggca

SEQ ID NO: 55079 - DNA, 30 bp, Artificial Sequence
  Synthetic oligonucleotide
aaattcaaaagtggcaggaacgatgtggca

SEQ ID NO: 55080 - DNA, 30 bp, Artificial Sequence
  Synthetic oligonucleotide
aggagttcaaagaggcaatggattgtggca

SEQ ID NO: 55081 - DNA, 30 bp, Artificial Sequence
  Synthetic oligonucleotide
tgcgtatagggaattatgaaggttgtggca

SEQ ID NO: 55082 - DNA, 30 bp, Artificial Sequence
  Synthetic oligonucleotide
atgtcagtcgtgtactcgtcatcgttggca

SEQ ID NO: 55083 - DNA, 30 bp, Artificial Sequence
  Synthetic oligonucleotide
aaagcctaatgagtggtagcggatcatgca

SEQ ID NO: 55084 - DNA, 30 bp, Artificial Sequence
  Synthetic oligonucleotide
tgggaaaattctggagcagatcacgatgca

SEQ ID NO: 55085 - DNA, 30 bp, Artificial Sequence
  Synthetic oligonucleotide
agacaacgggtcaagcactacattgatgca

SEQ ID NO: 55086 - DNA, 30 bp, Artificial Sequence
  Synthetic oligonucleotide
aaagttagagaaacacgagcgtatagtgca

SEQ ID NO: 55087 - DNA, 30 bp, Artificial Sequence
  Synthetic oligonucleotide
agaagggataacaagcaatggtaccgtgca

SEQ ID NO: 55088 - DNA, 30 bp, Artificial Sequence
  Synthetic oligonucleotide
attaagcggccccgagcattagaaggtgca

SEQ ID NO: 55089 - DNA, 30 bp, Artificial Sequence
  Synthetic oligonucleotide
tgacaacatcacatgcgaaaggaagttgca

SEQ ID NO: 55090 - DNA, 30 bp, Artificial Sequence
  Synthetic oligonucleotide
tgactacggatgatgttattgggagttgca

SEQ ID NO: 55091 - DNA, 30 bp, Artificial Sequence
  Synthetic oligonucleotide
gtgaggactactatcctcgagcatgttgca

SEQ ID NO: 55092 - DNA, 30 bp, Artificial Sequence
  Synthetic oligonucleotide
ggaatgcgatttcgtattccggagaaatca

SEQ ID NO: 55093 - DNA, 30 bp, Artificial Sequence
  Synthetic oligonucleotide
gctgaagtcatcactacccttgaacaatca

SEQ ID NO: 55094 - DNA, 30 bp, Artificial Sequence
  Synthetic oligonucleotide
aaacagagaaagtccaggtgtccacaatca

SEQ ID NO: 55095 - DNA, 30 bp, Artificial Sequence
  Synthetic oligonucleotide
actgatgaagcgtggaaggctggccaatca

SEQ ID NO: 55096 - DNA, 30 bp, Artificial Sequence
  Synthetic oligonucleotide
ggaatggggtataaaatcgaagcgcaatca

SEQ ID NO: 55097 - DNA, 30 bp, Artificial Sequence
  Synthetic oligonucleotide
aaaggtgtgtaacgcactattcgtcaatca

SEQ ID NO: 55098 - DNA, 30 bp, Artificial Sequence
  Synthetic oligonucleotide
cagtcaggatttgcgtcagggtgtccatca

SEQ ID NO: 55099 - DNA, 40 bp, Artificial Sequence
  Synthetic oligonucleotide
cggtaaggagggtcaccgacgtcgcgccgttgctgcatca

SEQ ID NO: 55100 - DNA, 30 bp, Artificial Sequence
  Synthetic oligonucleotide
tatggcttatggataaaacaactcggatca

SEQ ID NO: 55101 - DNA, 30 bp, Artificial Sequence
  Synthetic oligonucleotide
tcaggcaatcgcaatccaagacaaatatca

SEQ ID NO: 55102 - DNA, 30 bp, Artificial Sequence
  Synthetic oligonucleotide
gaagggtgactgggcctggctgacgtatca

SEQ ID NO: 55103 - DNA, 30 bp, Artificial Sequence
  Synthetic oligonucleotide
aagtcaccaagccagcggcgggcaaactca

SEQ ID NO: 55104 - DNA, 30 bp, Artificial Sequence
  Synthetic oligonucleotide
tacgacataaacaaaatcccggaacactca

SEQ ID NO: 55105 - DNA, 30 bp, Artificial Sequence
  Synthetic oligonucleotide
tcggtaataatgattcatagacacgactca

SEQ ID NO: 55106 - DNA, 30 bp, Artificial Sequence
  Synthetic oligonucleotide
tatagcaagaagatataagcgggcgactca

SEQ ID NO: 55107 - DNA, 30 bp, Artificial Sequence
  Synthetic oligonucleotide
ccagcccaaagaaagcagttagcgtactca

SEQ ID NO: 55108 - DNA, 30 bp, Artificial Sequence
  Synthetic oligonucleotide
aaagagcaaaacccagcgtatgtgtactca

SEQ ID NO: 55109 - DNA, 30 bp, Artificial Sequence
  Synthetic oligonucleotide
cgagaaactcagtcgttagtacttgcctca

SEQ ID NO: 55110 - DNA, 30 bp, Artificial Sequence
  Synthetic oligonucleotide
aatgcgggtaaaacgagcaaccttgcctca

SEQ ID NO: 55111 - DNA, 30 bp, Artificial Sequence
  Synthetic oligonucleotide
gaagggaaatctcgaagcatcacgagctca

SEQ ID NO: 55112 - DNA, 30 bp, Artificial Sequence
  Synthetic oligonucleotide
cgcaagagaaggataaaagattgcggctca

SEQ ID NO: 55113 - DNA, 30 bp, Artificial Sequence
  Synthetic oligonucleotide
tgagacaagcgcaactagaagctcggctca

SEQ ID NO: 55114 - DNA, 30 bp, Artificial Sequence
  Synthetic oligonucleotide
ggtgcgtgggctacagaaagtgcatgctca

SEQ ID NO: 55115 - DNA, 30 bp, Artificial Sequence
  Synthetic oligonucleotide
aggggaaggttcttccaagtgggatgctca

SEQ ID NO: 55116 - DNA, 30 bp, Artificial Sequence
  Synthetic oligonucleotide
aaacaggagcaaataagaagcgaattctca

SEQ ID NO: 55117 - DNA, 30 bp, Artificial Sequence
  Synthetic oligonucleotide
gggggctatgcacatcaatttacaaagtca

SEQ ID NO: 55118 - DNA, 30 bp, Artificial Sequence
  Synthetic oligonucleotide
gtggaagggaagaagtgaggctgaaagtca

SEQ ID NO: 55119 - DNA, 30 bp, Artificial Sequence
  Synthetic oligonucleotide
atggatcagctggcgccctggaacaagtca

SEQ ID NO: 55120 - DNA, 30 bp, Artificial Sequence
  Synthetic oligonucleotide
actacatctcgttactgagactccaagtca

SEQ ID NO: 55121 - DNA, 30 bp, Artificial Sequence
  Synthetic oligonucleotide
acgatcgctttcccgaagtctaggaagtca

SEQ ID NO: 55122 - DNA, 30 bp, Artificial Sequence
  Synthetic oligonucleotide
gtgaagcgaggacagtaactaagcgagtca

SEQ ID NO: 55123 - DNA, 30 bp, Artificial Sequence
  Synthetic oligonucleotide
accggaacgataatagcatgttcgtagtca

SEQ ID NO: 55124 - DNA, 30 bp, Artificial Sequence
  Synthetic oligonucleotide
gggacacaagtctgtaaaacgaggtagtca

SEQ ID NO: 55125 - DNA, 30 bp, Artificial Sequence
  Synthetic oligonucleotide
ccaaatccacacaatcatcaggatacgtca

SEQ ID NO: 55126 - DNA, 27 bp, Artificial Sequence
  Synthetic oligonucleotide
tgtgactgctaagaagagcctacgtca

SEQ ID NO: 55127 - DNA, 30 bp, Artificial Sequence
  Synthetic oligonucleotide
agtgcgtaagtcaaattagactgagcgtca

SEQ ID NO: 55128 - DNA, 30 bp, Artificial Sequence
  Synthetic oligonucleotide
taggttgtcggaactggaagaattgcgtca

SEQ ID NO: 55129 - DNA, 30 bp, Artificial Sequence
  Synthetic oligonucleotide
cagcggtatcgtctgtagtcctttgcgtca

SEQ ID NO: 55130 - DNA, 30 bp, Artificial Sequence
  Synthetic oligonucleotide
gtttccatcgaaatagatccacgatcgtca

SEQ ID NO: 55131 - DNA, 30 bp, Artificial Sequence
  Synthetic oligonucleotide
ataatcgaaccaagccatctattctcgtca

SEQ ID NO: 55132 - DNA, 30 bp, Artificial Sequence
  Synthetic oligonucleotide
ctacgtactcctagagtcttaaagtcgtca

SEQ ID NO: 55133 - DNA, 30 bp, Artificial Sequence
  Synthetic oligonucleotide
tcggggggcgcgctgtggtacgtcaggtca

SEQ ID NO: 55134 - DNA, 30 bp, Artificial Sequence
  Synthetic oligonucleotide
gagggggtctccgttaaaatcgcgaggtca

SEQ ID NO: 55135 - DNA, 30 bp, Artificial Sequence
  Synthetic oligonucleotide
ccaagatataagcaaagcacagggcggtca

SEQ ID NO: 55136 - DNA, 30 bp, Artificial Sequence
  Synthetic oligonucleotide
actattaaagagcataccggtcagtggtca

SEQ ID NO: 55137 - DNA, 30 bp, Artificial Sequence
  Synthetic oligonucleotide
tgggggagttggacacgtcctgagtggtca

SEQ ID NO: 55138 - DNA, 30 bp, Artificial Sequence
  Synthetic oligonucleotide
gctggtgtaaagtggaccaggctactgtca

SEQ ID NO: 55139 - DNA, 30 bp, Artificial Sequence
  Synthetic oligonucleotide
tcggcgcgtgagggcgtcgagtttctgtca

SEQ ID NO: 55140 - DNA, 30 bp, Artificial Sequence
  Synthetic oligonucleotide
gggctacaacaatttgactgagagttgtca

SEQ ID NO: 55141 - DNA, 30 bp, Artificial Sequence
  Synthetic oligonucleotide
gagatgcgaagagtctgtttaatgcattca

SEQ ID NO: 55142 - DNA, 30 bp, Artificial Sequence
  Synthetic oligonucleotide
cgttgtaagtcgatcaggagcgacgattca

SEQ ID NO: 55143 - DNA, 30 bp, Artificial Sequence
  Synthetic oligonucleotide
ccttcccgacaataggagaaaattgattca

SEQ ID NO: 55144 - DNA, 30 bp, Artificial Sequence
  Synthetic oligonucleotide
gtggtaggcgacccttgtgaaacgtattca

SEQ ID NO: 55145 - DNA, 30 bp, Artificial Sequence
  Synthetic oligonucleotide
gggcaaagcggaactccgagtacttattca

SEQ ID NO: 55146 - DNA, 30 bp, Artificial Sequence
  Synthetic oligonucleotide
aggagatgaaaacaaggtccgtccacttca

SEQ ID NO: 55147 - DNA, 30 bp, Artificial Sequence
  Synthetic oligonucleotide
aggccgtcacgaagaaaaaatcagagttca

SEQ ID NO: 55148 - DNA, 30 bp, Artificial Sequence
  Synthetic oligonucleotide
gaccgtaggccataagcgtcaccgagttca

SEQ ID NO: 55149 - DNA, 31 bp, Artificial Sequence
  Synthetic oligonucleotide
cgccgatgagtccaactcataaaaccgttca

SEQ ID NO: 55150 - DNA, 30 bp, Artificial Sequence
  Synthetic oligonucleotide
tggtgacttgctacatgaagcttgggttca

SEQ ID NO: 55151 - DNA, 30 bp, Artificial Sequence
  Synthetic oligonucleotide
tcaatattggatgctataccagagtgttca

SEQ ID NO: 55152 - DNA, 30 bp, Artificial Sequence
  Synthetic oligonucleotide
cgggtaaaggctaatgctagaatttgttca

SEQ ID NO: 55153 - DNA, 30 bp, Artificial Sequence
  Synthetic oligonucleotide
gaagcataccagggttagactaagatttca

SEQ ID NO: 55154 - DNA, 30 bp, Artificial Sequence
  Synthetic oligonucleotide
cggacaacggactgattagatacactttca

SEQ ID NO: 55155 - DNA, 30 bp, Artificial Sequence
  Synthetic oligonucleotide
ccttcccaagacataccggtggaattttca

SEQ ID NO: 55156 - DNA, 30 bp, Artificial Sequence
  Synthetic oligonucleotide
catgataaaggggcagagacgggaaaaaga

SEQ ID NO: 55157 - DNA, 30 bp, Artificial Sequence
  Synthetic oligonucleotide
gatcggggatgtagggaggatgctcaaaga

SEQ ID NO: 55158 - DNA, 30 bp, Artificial Sequence
  Synthetic oligonucleotide
ccctgcgtatgtttataaaccatggaaaga

SEQ ID NO: 55159 - DNA, 30 bp, Artificial Sequence
  Synthetic oligonucleotide
aggttgagcacaaggcgggacttataaaga

SEQ ID NO: 55160 - DNA, 30 bp, Artificial Sequence
  Synthetic oligonucleotide
gacccaaccacgcgatattagataacaaga

SEQ ID NO: 55161 - DNA, 30 bp, Artificial Sequence
  Synthetic oligonucleotide
gcttaagcaacgggtcggtatttaacaaga

SEQ ID NO: 55162 - DNA, 30 bp, Artificial Sequence
  Synthetic oligonucleotide
ggggctgggcgacgcgttattgacacaaga

SEQ ID NO: 55163 - DNA, 30 bp, Artificial Sequence
  Synthetic oligonucleotide
agtagtcgaaatactaaggggtatacaaga

SEQ ID NO: 55164 - DNA, 30 bp, Artificial Sequence
  Synthetic oligonucleotide
aagaagggggcacctatgacctaagcaaga

SEQ ID NO: 55165 - DNA, 30 bp, Artificial Sequence
  Synthetic oligonucleotide
taccgtactcggtacctgatacgagcaaga

SEQ ID NO: 55166 - DNA, 30 bp, Artificial Sequence
  Synthetic oligonucleotide
aacggcacccaccagactctaagttcaaga

SEQ ID NO: 55167 - DNA, 30 bp, Artificial Sequence
  Synthetic oligonucleotide
tgtcgagagattcgtatagaaataagaaga

SEQ ID NO: 55168 - DNA, 30 bp, Artificial Sequence
  Synthetic oligonucleotide
aattcggacgagtaccaaatatgcagaaga

SEQ ID NO: 55169 - DNA, 30 bp, Artificial Sequence
  Synthetic oligonucleotide
caaagccgagtaattggagagagccgaaga

SEQ ID NO: 55170 - DNA, 30 bp, Artificial Sequence
  Synthetic oligonucleotide
taaaagtaggcgagagaaaccagaggaaga

SEQ ID NO: 55171 - DNA, 30 bp, Artificial Sequence
  Synthetic oligonucleotide
cagagcaagaccacaactacggagggaaga

SEQ ID NO: 55172 - DNA, 30 bp, Artificial Sequence
  Synthetic oligonucleotide
ccagaacggaggactccggaacttctaaga

SEQ ID NO: 55173 - DNA, 30 bp, Artificial Sequence
  Synthetic oligonucleotide
cgcaccaggattttcagtcggtgggtaaga

SEQ ID NO: 55174 - DNA, 30 bp, Artificial Sequence
  Synthetic oligonucleotide
ctcggattgttaacggcgagcgagttaaga

SEQ ID NO: 55175 - DNA, 30 bp, Artificial Sequence
  Synthetic oligonucleotide
tgacgatccgggcgaaaatcgttgttaaga

SEQ ID NO: 55176 - DNA, 30 bp, Artificial Sequence
  Synthetic oligonucleotide
agaggcgatttcgagccttgcagcaacaga

SEQ ID NO: 55177 - DNA, 30 bp, Artificial Sequence
  Synthetic oligonucleotide
caaattgaactcaaagtgtagcgcaacaga

SEQ ID NO: 55178 - DNA, 30 bp, Artificial Sequence
  Synthetic oligonucleotide
atggaaatactaagactaggacaacacaga

SEQ ID NO: 55179 - DNA, 30 bp, Artificial Sequence
  Synthetic oligonucleotide
ggtccagtttcagttactacgatacacaga

SEQ ID NO: 55180 - DNA, 30 bp, Artificial Sequence
  Synthetic oligonucleotide
ctcatcaggcagtaagggtttgtgaccaga

SEQ ID NO: 55181 - DNA, 30 bp, Artificial Sequence
  Synthetic oligonucleotide
ttgggtgaatgcgtgaccaagttgaccaga

SEQ ID NO: 55182 - DNA, 30 bp, Artificial Sequence
  Synthetic oligonucleotide
gtgtaaatatgttgccggtaaggtaccaga

SEQ ID NO: 55183 - DNA, 30 bp, Artificial Sequence
  Synthetic oligonucleotide
gcgccatggttcgacctagttcagcccaga

SEQ ID NO: 55184 - DNA, 30 bp, Artificial Sequence
  Synthetic oligonucleotide
acggatgttacattttcctttcgagccaga

SEQ ID NO: 55185 - DNA, 30 bp, Artificial Sequence
  Synthetic oligonucleotide
ccgatgtggcaatcaaagataaatgccaga

SEQ ID NO: 55186 - DNA, 30 bp, Artificial Sequence
  Synthetic oligonucleotide
tcgccagtgtcttaatcggccgatgccaga

SEQ ID NO: 55187 - DNA, 30 bp, Artificial Sequence
  Synthetic oligonucleotide
acgcgttgtagagcgatagatgtttccaga

SEQ ID NO: 55188 - DNA, 30 bp, Artificial Sequence
  Synthetic oligonucleotide
cggcaacgacatgtgcgggagatgcgcaga

SEQ ID NO: 55189 - DNA, 30 bp, Artificial Sequence
  Synthetic oligonucleotide
acgaagacacgattcggctgcagatgcaga

SEQ ID NO: 55190 - DNA, 30 bp, Artificial Sequence
  Synthetic oligonucleotide
gccgagcaacaacgtggcaacccttgcaga

SEQ ID NO: 55191 - DNA, 30 bp, Artificial Sequence
  Synthetic oligonucleotide
ggactaaaggaaataactgctagttgcaga

SEQ ID NO: 55192 - DNA, 30 bp, Artificial Sequence
  Synthetic oligonucleotide
ggacggggtctgcccgtgctcaaaatcaga

SEQ ID NO: 55193 - DNA, 30 bp, Artificial Sequence
  Synthetic oligonucleotide
acgatgtcgcttggggcgtgttgactcaga

SEQ ID NO: 55194 - DNA, 30 bp, Artificial Sequence
  Synthetic oligonucleotide
acggcaccgaattgttgccggtccctcaga

SEQ ID NO: 55195 - DNA, 30 bp, Artificial Sequence
  Synthetic oligonucleotide
cgatggagtaaatgcgcgaccgggctcaga

SEQ ID NO: 55196 - DNA, 30 bp, Artificial Sequence
  Synthetic oligonucleotide
gaagcgccggttggaatcagagtggtcaga

SEQ ID NO: 55197 - DNA, 30 bp, Artificial Sequence
  Synthetic oligonucleotide
acgttgattgggttcatcaattcattcaga

SEQ ID NO: 55198 - DNA, 30 bp, Artificial Sequence
  Synthetic oligonucleotide
catacgacgactaaatagcctgagttcaga

SEQ ID NO: 55199 - DNA, 30 bp, Artificial Sequence
  Synthetic oligonucleotide
caggcgctacatcaaacaagagctttcaga

SEQ ID NO: 55200 - DNA, 30 bp, Artificial Sequence
  Synthetic oligonucleotide
caagagggcaaatatcagttgtacaagaga

SEQ ID NO: 55201 - DNA, 30 bp, Artificial Sequence
  Synthetic oligonucleotide
ctagtctaacacaagatatacgaagagaga

SEQ ID NO: 55202 - DNA, 30 bp, Artificial Sequence
  Synthetic oligonucleotide
caggacactttaacacgagaacacgagaga

SEQ ID NO: 55203 - DNA, 30 bp, Artificial Sequence
  Synthetic oligonucleotide
tattaaggcctaattagcagacacgagaga

SEQ ID NO: 55204 - DNA, 30 bp, Artificial Sequence
  Synthetic oligonucleotide
ttaaactgacggggacggccaagatagaga

SEQ ID NO: 55205 - DNA, 30 bp, Artificial Sequence
  Synthetic oligonucleotide
cataaaagcctcatataggatgggacgaga

SEQ ID NO: 55206 - DNA, 30 bp, Artificial Sequence
  Synthetic oligonucleotide
gggggtgtgcttggagagacaaatacgaga

SEQ ID NO: 55207 - DNA, 30 bp, Artificial Sequence
  Synthetic oligonucleotide
caagcgaattattgaaaagaaccaccgaga

SEQ ID NO: 55208 - DNA, 30 bp, Artificial Sequence
  Synthetic oligonucleotide
gacagggtcgacaagttatacaacgcgaga

SEQ ID NO: 55209 - DNA, 30 bp, Artificial Sequence
  Synthetic oligonucleotide
agaactcgggtgcgatcttccggcgcgaga

SEQ ID NO: 55210 - DNA, 30 bp, Artificial Sequence
  Synthetic oligonucleotide
gagaggggttgccggtaggataactcgaga

SEQ ID NO: 55211 - DNA, 30 bp, Artificial Sequence
  Synthetic oligonucleotide
ctgtcacgaaaggccatccgggagtcgaga

SEQ ID NO: 55212 - DNA, 30 bp, Artificial Sequence
  Synthetic oligonucleotide
acgattgtgacttggatcagttagaggaga

SEQ ID NO: 55213 - DNA, 30 bp, Artificial Sequence
  Synthetic oligonucleotide
ccatgggggtggggaggcaccaataggaga

SEQ ID NO: 55214 - DNA, 30 bp, Artificial Sequence
  Synthetic oligonucleotide
ctgctttgagcaaacaatgaacgagggaga

SEQ ID NO: 55215 - DNA, 30 bp, Artificial Sequence
  Synthetic oligonucleotide
aaataaatggggaaactgagcggagggaga

SEQ ID NO: 55216 - DNA, 32 bp, Artificial Sequence
  Synthetic oligonucleotide
aagataatacattcatggtatggtcggggaga

SEQ ID NO: 55217 - DNA, 30 bp, Artificial Sequence
  Synthetic oligonucleotide
cgcttagtctggagggtaagttgctggaga

SEQ ID NO: 55218 - DNA, 30 bp, Artificial Sequence
  Synthetic oligonucleotide
ttgaaggtggggtaaccgtgtgtcatgaga

SEQ ID NO: 55219 - DNA, 30 bp, Artificial Sequence
  Synthetic oligonucleotide
caatcccgatatcactgtgctatagtgaga

SEQ ID NO: 55220 - DNA, 30 bp, Artificial Sequence
  Synthetic oligonucleotide
tcgtggtgcacccaagcgaatgtggtgaga

SEQ ID NO: 55221 - DNA, 30 bp, Artificial Sequence
  Synthetic oligonucleotide
tcatccagtatcccgccaggcgagttgaga

SEQ ID NO: 55222 - DNA, 30 bp, Artificial Sequence
  Synthetic oligonucleotide
gcctatcataaggaagaaaacgggttgaga

SEQ ID NO: 55223 - DNA, 30 bp, Artificial Sequence
  Synthetic oligonucleotide
acattaggccgcaataacgtaactttgaga

SEQ ID NO: 55224 - DNA, 30 bp, Artificial Sequence
  Synthetic oligonucleotide
taacgcgtcacgtaaaccactggcaataga

SEQ ID NO: 55225 - DNA, 30 bp, Artificial Sequence
  Synthetic oligonucleotide
gtcggtcaatgctccgactaacttaataga

SEQ ID NO: 55226 - DNA, 30 bp, Artificial Sequence
  Synthetic oligonucleotide
ggctgttgtgcatttaaagggagacataga

SEQ ID NO: 55227 - DNA, 30 bp, Artificial Sequence
  Synthetic oligonucleotide
cgaagaatgcggaccgtcactgctgataga

SEQ ID NO: 55228 - DNA, 30 bp, Artificial Sequence
  Synthetic oligonucleotide
acaaacgggcgggccattccagttgataga

SEQ ID NO: 55229 - DNA, 30 bp, Artificial Sequence
  Synthetic oligonucleotide
gcgtatctggatcgaaccagggcgactaga

SEQ ID NO: 55230 - DNA, 30 bp, Artificial Sequence
  Synthetic oligonucleotide
acggcatgacatgtgtttgtaggacctaga

SEQ ID NO: 55231 - DNA, 30 bp, Artificial Sequence
  Synthetic oligonucleotide
cacaggcatcgaaccgaaatctgagctaga

SEQ ID NO: 55232 - DNA, 30 bp, Artificial Sequence
  Synthetic oligonucleotide
cacgagagcatcggcgcctgtgtagctaga

SEQ ID NO: 55233 - DNA, 30 bp, Artificial Sequence
  Synthetic oligonucleotide
accgagaagtgcattaccgcactcgctaga

SEQ ID NO: 55234 - DNA, 30 bp, Artificial Sequence
  Synthetic oligonucleotide
agctgcctcagctgttgcaataggagtaga

SEQ ID NO: 55235 - DNA, 30 bp, Artificial Sequence
  Synthetic oligonucleotide
gtaagacggagggtgaggtatcggagtaga

SEQ ID NO: 55236 - DNA, 30 bp, Artificial Sequence
  Synthetic oligonucleotide
gctcgcggagaattgtaggtgcatattaga

SEQ ID NO: 55237 - DNA, 30 bp, Artificial Sequence
  Synthetic oligonucleotide
ggatgtaaccgggaccaggattagcttaga

SEQ ID NO: 55238 - DNA, 30 bp, Artificial Sequence
  Synthetic oligonucleotide
gccagcaaacttaattcgaaagcaaaacga

SEQ ID NO: 55239 - DNA, 30 bp, Artificial Sequence
  Synthetic oligonucleotide
tcggtgaaaaacgacgagggccggaaacga

SEQ ID NO: 55240 - DNA, 30 bp, Artificial Sequence
  Synthetic oligonucleotide
gagggatcacagataatactgagacaacga

SEQ ID NO: 55241 - DNA, 30 bp, Artificial Sequence
  Synthetic oligonucleotide
gagtcggaagcgacaagcggaccgcaacga

SEQ ID NO: 55242 - DNA, 30 bp, Artificial Sequence
  Synthetic oligonucleotide
tcgactggactcgcactgacagaagaacga

SEQ ID NO: 55243 - DNA, 30 bp, Artificial Sequence
  Synthetic oligonucleotide
gggatgggtacagggttaaagtcagaacga

SEQ ID NO: 55244 - DNA, 30 bp, Artificial Sequence
  Synthetic oligonucleotide
tgccaatgagcgcatcaatggccataacga

SEQ ID NO: 55245 - DNA, 30 bp, Artificial Sequence
  Synthetic oligonucleotide
gagggcatacgggccatatgtgaaacacga

SEQ ID NO: 55246 - DNA, 30 bp, Artificial Sequence
  Synthetic oligonucleotide
ataggtgatgataaatcaaactaaacacga

SEQ ID NO: 55247 - DNA, 30 bp, Artificial Sequence
  Synthetic oligonucleotide
ttagcaattttcatcacaggagtaacacga

SEQ ID NO: 55248 - DNA, 30 bp, Artificial Sequence
  Synthetic oligonucleotide
gtaaggccataccaaaaggggattgcacga

SEQ ID NO: 55249 - DNA, 30 bp, Artificial Sequence
  Synthetic oligonucleotide
ggagggcgtcaagataccctctgctcacga

SEQ ID NO: 55250 - DNA, 30 bp, Artificial Sequence
  Synthetic oligonucleotide
gatgtacacttcagacgatatacacgacga

SEQ ID NO: 55251 - DNA, 30 bp, Artificial Sequence
  Synthetic oligonucleotide
taccgaagggttctttcgaagcagggacga

SEQ ID NO: 55252 - DNA, 30 bp, Artificial Sequence
  Synthetic oligonucleotide
gcagggcatgatatagtcaggcatggacga

SEQ ID NO: 55253 - DNA, 30 bp, Artificial Sequence
  Synthetic oligonucleotide
ccggaaggacgatcgcgtcgtggaatacga

SEQ ID NO: 55254 - DNA, 30 bp, Artificial Sequence
  Synthetic oligonucleotide
acggtatagcttaccagcgatgccatacga

SEQ ID NO: 55255 - DNA, 30 bp, Artificial Sequence
  Synthetic oligonucleotide
tagcagttagggaagtagagagggatacga

SEQ ID NO: 55256 - DNA, 30 bp, Artificial Sequence
  Synthetic oligonucleotide
ccagccatggaccgcctgggaaccgtacga

SEQ ID NO: 55257 - DNA, 30 bp, Artificial Sequence
  Synthetic oligonucleotide
catagggaacggtgtgtaaatcggaaccga

SEQ ID NO: 55258 - DNA, 30 bp, Artificial Sequence
  Synthetic oligonucleotide
agagggcagagtcactgaggttaccaccga

SEQ ID NO: 55259 - DNA, 30 bp, Artificial Sequence
  Synthetic oligonucleotide
gttaaggcaagaaacagtgagtggcaccga

SEQ ID NO: 55260 - DNA, 30 bp, Artificial Sequence
  Synthetic oligonucleotide
acgagccttggtttcatcggccccgaccga

SEQ ID NO: 55261 - DNA, 30 bp, Artificial Sequence
  Synthetic oligonucleotide
gagccaagcggcgtgcggtgttaggaccga

SEQ ID NO: 55262 - DNA, 30 bp, Artificial Sequence
  Synthetic oligonucleotide
caggctgaaggtgattcgtttccggaccga

SEQ ID NO: 55263 - DNA, 30 bp, Artificial Sequence
  Synthetic oligonucleotide
gcacacatactcgagacaggactataccga

SEQ ID NO: 55264 - DNA, 30 bp, Artificial Sequence
  Synthetic oligonucleotide
cacaattaggaccacgagtgcatttaccga

SEQ ID NO: 55265 - DNA, 30 bp, Artificial Sequence
  Synthetic oligonucleotide
tcgtgagtccggcaggaaccacatacccga

SEQ ID NO: 55266 - DNA, 30 bp, Artificial Sequence
  Synthetic oligonucleotide
cgtgacaacagtcgcctctcatatagccga

SEQ ID NO: 55267 - DNA, 30 bp, Artificial Sequence
  Synthetic oligonucleotide
ctatcgtaggagcaaggaacgatatgccga

SEQ ID NO: 55268 - DNA, 30 bp, Artificial Sequence
  Synthetic oligonucleotide
cgtgatgtaatgctcgtttaataaatccga

SEQ ID NO: 55269 - DNA, 30 bp, Artificial Sequence
  Synthetic oligonucleotide
gtgggaccgaagactaattctgccatccga

SEQ ID NO: 55270 - DNA, 30 bp, Artificial Sequence
  Synthetic oligonucleotide
gacactcgtcttaacgagaaagcgctccga

SEQ ID NO: 55271 - DNA, 30 bp, Artificial Sequence
  Synthetic oligonucleotide
ctaactgggagggcacttgggcatctccga

SEQ ID NO: 55272 - DNA, 30 bp, Artificial Sequence
  Synthetic oligonucleotide
agaaccccacgatatcaaagtctagtccga

SEQ ID NO: 55273 - DNA, 30 bp, Artificial Sequence
  Synthetic oligonucleotide
aaccaagcctcaggccaaaaggaggtccga

SEQ ID NO: 55274 - DNA, 30 bp, Artificial Sequence
  Synthetic oligonucleotide
cagaacggtattacccgaacagggaagcga

SEQ ID NO: 55275 - DNA, 30 bp, Artificial Sequence
  Synthetic oligonucleotide
atatacgttaaaaatctcagaaagcagcga

SEQ ID NO: 55276 - DNA, 30 bp, Artificial Sequence
  Synthetic oligonucleotide
tcgcatcataccacgtcatcataatagcga

SEQ ID NO: 55277 - DNA, 30 bp, Artificial Sequence
  Synthetic oligonucleotide
caaagaggggacatatgacagactccgcga

SEQ ID NO: 55278 - DNA, 30 bp, Artificial Sequence
  Synthetic oligonucleotide
cccacaccaggaggaagagaaatggcgcga

SEQ ID NO: 55279 - DNA, 30 bp, Artificial Sequence
  Synthetic oligonucleotide
aggtcggattagcgctaatatatggcgcga

SEQ ID NO: 55280 - DNA, 30 bp, Artificial Sequence
  Synthetic oligonucleotide
acgttcttaagtacggaaaggctggcgcga

SEQ ID NO: 55281 - DNA, 29 bp, Artificial Sequence
  Synthetic oligonucleotide
taaagtggaaggtaaccgactaaaggcga

SEQ ID NO: 55282 - DNA, 30 bp, Artificial Sequence
  Synthetic oligonucleotide
catgcactgagcaaatggatttcaaggcga

SEQ ID NO: 55283 - DNA, 30 bp, Artificial Sequence
  Synthetic oligonucleotide
caaaagaactacaaggtcgagtctaggcga

SEQ ID NO: 55284 - DNA, 30 bp, Artificial Sequence
  Synthetic oligonucleotide
tttaggagtaatcgtggtggccatcggcga

SEQ ID NO: 55285 - DNA, 30 bp, Artificial Sequence
  Synthetic oligonucleotide
tcgacagggatggaccagaagtgagggcga

SEQ ID NO: 55286 - DNA, 30 bp, Artificial Sequence
  Synthetic oligonucleotide
gcttaacggaatatcgtgactgttgggcga

SEQ ID NO: 55287 - DNA, 30 bp, Artificial Sequence
  Synthetic oligonucleotide
agtagtgtacacacagaggtccgttggcga

SEQ ID NO: 55288 - DNA, 30 bp, Artificial Sequence
  Synthetic oligonucleotide
aggacagtagaaaattggtacactatgcga

SEQ ID NO: 55289 - DNA, 30 bp, Artificial Sequence
  Synthetic oligonucleotide
cacaccaaccgatgctggagacgggtgcga

SEQ ID NO: 55290 - DNA, 30 bp, Artificial Sequence
  Synthetic oligonucleotide
agaactacccgatttgaattaggtgtgcga

SEQ ID NO: 55291 - DNA, 30 bp, Artificial Sequence
  Synthetic oligonucleotide
caattaagaaagggggagtcgagcaatcga

SEQ ID NO: 55292 - DNA, 30 bp, Artificial Sequence
  Synthetic oligonucleotide
ctggttgggcgaggcgtagtggaggatcga

SEQ ID NO: 55293 - DNA, 30 bp, Artificial Sequence
  Synthetic oligonucleotide
taacccgactgttcgttgctgagtgatcga

SEQ ID NO: 55294 - DNA, 30 bp, Artificial Sequence
  Synthetic oligonucleotide
ggtgtgtaaagagcagcgcgagaatatcga

SEQ ID NO: 55295 - DNA, 30 bp, Artificial Sequence
  Synthetic oligonucleotide
tgccgggccaaactcagagtaaaacctcga

SEQ ID NO: 55296 - DNA, 30 bp, Artificial Sequence
  Synthetic oligonucleotide
gaggataagttggctctgtcttcccctcga

SEQ ID NO: 55297 - DNA, 30 bp, Artificial Sequence
  Synthetic oligonucleotide
cgcggaaggtaaataatactcagcgctcga

SEQ ID NO: 55298 - DNA, 30 bp, Artificial Sequence
  Synthetic oligonucleotide
agaaaccgaaggaggccgacatgcgctcga

SEQ ID NO: 55299 - DNA, 30 bp, Artificial Sequence
  Synthetic oligonucleotide
acattgtgtaagctaagcgtcaaatctcga

SEQ ID NO: 55300 - DNA, 30 bp, Artificial Sequence
  Synthetic oligonucleotide
tccttgaaatatgccacactcctttctcga

SEQ ID NO: 55301 - DNA, 30 bp, Artificial Sequence
  Synthetic oligonucleotide
agggcgacgacatgatccccttcccgtcga

SEQ ID NO: 55302 - DNA, 30 bp, Artificial Sequence
  Synthetic oligonucleotide
taggacatatagcaatgaatccgacttcga

SEQ ID NO: 55303 - DNA, 30 bp, Artificial Sequence
  Synthetic oligonucleotide
cactggacagcggaagtgaggtagcttcga

SEQ ID NO: 55304 - DNA, 30 bp, Artificial Sequence
  Synthetic oligonucleotide
gtcatttccaagatagagagaagggttcga

SEQ ID NO: 55305 - DNA, 30 bp, Artificial Sequence
  Synthetic oligonucleotide
aggtaataagatctggtgttcgtctttcga

SEQ ID NO: 55306 - DNA, 30 bp, Artificial Sequence
  Synthetic oligonucleotide
tcagacatagtccaagtttaaccgaaagga

SEQ ID NO: 55307 - DNA, 30 bp, Artificial Sequence
  Synthetic oligonucleotide
cacggcgaaaaggtaaagttattacaagga

SEQ ID NO: 55308 - DNA, 30 bp, Artificial Sequence
  Synthetic oligonucleotide
aataaatcagtctcggaataacaggaagga

SEQ ID NO: 55309 - DNA, 30 bp, Artificial Sequence
  Synthetic oligonucleotide
ttaacaccgtcagattgaacatgtgaagga

SEQ ID NO: 55310 - DNA, 30 bp, Artificial Sequence
  Synthetic oligonucleotide
tggatagactctaaggaataacagtaagga

SEQ ID NO: 55311 - DNA, 30 bp, Artificial Sequence
  Synthetic oligonucleotide
tggaggtaatgtaaagattaacccccagga

SEQ ID NO: 55312 - DNA, 30 bp, Artificial Sequence
  Synthetic oligonucleotide
tcgagtcacagtcgtcagcaggggccagga

SEQ ID NO: 55313 - DNA, 30 bp, Artificial Sequence
  Synthetic oligonucleotide
aaaggccggggctaggggaagagtgcagga

SEQ ID NO: 55314 - DNA, 30 bp, Artificial Sequence
  Synthetic oligonucleotide
gtcaaacaataggtctacatgcgctcagga

SEQ ID NO: 55315 - DNA, 30 bp, Artificial Sequence
  Synthetic oligonucleotide
actgcgacaagggcatgactaaagtcagga

SEQ ID NO: 55316 - DNA, 30 bp, Artificial Sequence
  Synthetic oligonucleotide
ggctgtgataaacgcgaattgacaagagga

SEQ ID NO: 55317 - DNA, 30 bp, Artificial Sequence
  Synthetic oligonucleotide
actcgggataaatcgtgatgctggagagga

SEQ ID NO: 55318 - DNA, 30 bp, Artificial Sequence
  Synthetic oligonucleotide
caggacacagaaaaattagaccttagagga

SEQ ID NO: 55319 - DNA, 30 bp, Artificial Sequence
  Synthetic oligonucleotide
aacaccgatagtattccattcaaccgagga

SEQ ID NO: 55320 - DNA, 30 bp, Artificial Sequence
  Synthetic oligonucleotide
ctacgatgggttcgccactggaggcgagga

SEQ ID NO: 55321 - DNA, 30 bp, Artificial Sequence
  Synthetic oligonucleotide
tgtgcaacattgaacaaggaccaaatagga

SEQ ID NO: 55322 - DNA, 30 bp, Artificial Sequence
  Synthetic oligonucleotide
cgattgggaatttaaagaacagacatagga

SEQ ID NO: 55323 - DNA, 30 bp, Artificial Sequence
  Synthetic oligonucleotide
gtagatttaaggcagtcaggcactatagga

SEQ ID NO: 55324 - DNA, 30 bp, Artificial Sequence
  Synthetic oligonucleotide
gggaatcagtctgtagtaaccgccctagga

SEQ ID NO: 55325 - DNA, 30 bp, Artificial Sequence
  Synthetic oligonucleotide
tcgggaatcaaaaattattaaagcctagga

SEQ ID NO: 55326 - DNA, 30 bp, Artificial Sequence
  Synthetic oligonucleotide
cgccgtgggtttcatcgtgtagaagtagga

SEQ ID NO: 55327 - DNA, 30 bp, Artificial Sequence
  Synthetic oligonucleotide
tagaagggatcaaccgttatcatcgtagga

SEQ ID NO: 55328 - DNA, 30 bp, Artificial Sequence
  Synthetic oligonucleotide
ataaccagagagagaaacttagagttagga

SEQ ID NO: 55329 - DNA, 30 bp, Artificial Sequence
  Synthetic oligonucleotide
aggtcaaaggcgacgccataattagacgga

SEQ ID NO: 55330 - DNA, 30 bp, Artificial Sequence
  Synthetic oligonucleotide
tagagtgcgctatctttgggaatttacgga

SEQ ID NO: 55331 - DNA, 30 bp, Artificial Sequence
  Synthetic oligonucleotide
cgttcggagcgagaacgttcatggaccgga

SEQ ID NO: 55332 - DNA, 30 bp, Artificial Sequence
  Synthetic oligonucleotide
cgggggatatcattgtgaccgaaagccgga

SEQ ID NO: 55333 - DNA, 30 bp, Artificial Sequence
  Synthetic oligonucleotide
ggagatcgcgaaggcttgctaagaagcgga

SEQ ID NO: 55334 - DNA, 30 bp, Artificial Sequence
  Synthetic oligonucleotide
actaaggggggccgcgtatctggaagcgga

SEQ ID NO: 55335 - DNA, 30 bp, Artificial Sequence
  Synthetic oligonucleotide
catgaggatgtgatgggctaatctagcgga

SEQ ID NO: 55336 - DNA, 30 bp, Artificial Sequence
  Synthetic oligonucleotide
cgtgaggctatcacaagtcaattacgcgga

SEQ ID NO: 55337 - DNA, 30 bp, Artificial Sequence
  Synthetic oligonucleotide
taatacagactgatcagggatacaggcgga

SEQ ID NO: 55338 - DNA, 30 bp, Artificial Sequence
  Synthetic oligonucleotide
ttatgaagtgatactgggggatggtgcgga

SEQ ID NO: 55339 - DNA, 30 bp, Artificial Sequence
  Synthetic oligonucleotide
cgagattaaaaggtgctcatggatatcgga

SEQ ID NO: 55340 - DNA, 30 bp, Artificial Sequence
  Synthetic oligonucleotide
tcgaagcacggtgccgatggagacgtcgga

SEQ ID NO: 55341 - DNA, 30 bp, Artificial Sequence
  Synthetic oligonucleotide
gaacgagaatatgtacagtaatgattcgga

SEQ ID NO: 55342 - DNA, 30 bp, Artificial Sequence
  Synthetic oligonucleotide
agaaaggaagtgtccgtctaagccaaggga

SEQ ID NO: 55343 - DNA, 30 bp, Artificial Sequence
  Synthetic oligonucleotide
aacacttgcgaggcgaactctgccaaggga

SEQ ID NO: 55344 - DNA, 30 bp, Artificial Sequence
  Synthetic oligonucleotide
tgtaactgagctactctccgggtcaaggga

SEQ ID NO: 55345 - DNA, 30 bp, Artificial Sequence
  Synthetic oligonucleotide
gcccgtgcaaagggtccgcaccgtaaggga

SEQ ID NO: 55346 - DNA, 30 bp, Artificial Sequence
  Synthetic oligonucleotide
ccggctgtgtcatttaaggtcaaccaggga

SEQ ID NO: 55347 - DNA, 30 bp, Artificial Sequence
  Synthetic oligonucleotide
atgtataactcgttcagagaggaccaggga

SEQ ID NO: 55348 - DNA, 30 bp, Artificial Sequence
  Synthetic oligonucleotide
ataagaagggtaacctaaacctgccaggga

SEQ ID NO: 55349 - DNA, 30 bp, Artificial Sequence
  Synthetic oligonucleotide
agggagataaccataaattggttgcaggga

SEQ ID NO: 55350 - DNA, 30 bp, Artificial Sequence
  Synthetic oligonucleotide
gcaatgatgaaaaaaatgggtcctcaggga

SEQ ID NO: 55351 - DNA, 30 bp, Artificial Sequence
  Synthetic oligonucleotide
atcgtacatcactcgggggctggtcaggga

SEQ ID NO: 55352 - DNA, 30 bp, Artificial Sequence
  Synthetic oligonucleotide
cccacgcatggtgtaaagtccggtgaggga

SEQ ID NO: 55353 - DNA, 30 bp, Artificial Sequence
  Synthetic oligonucleotide
cagccatgacgtgaaatagactcgtaggga

SEQ ID NO: 55354 - DNA, 30 bp, Artificial Sequence
  Synthetic oligonucleotide
tcagactatgttattgaatcataaagggga

SEQ ID NO: 55355 - DNA, 30 bp, Artificial Sequence
  Synthetic oligonucleotide
tgcgttagtcaactggactgttgaagggga

SEQ ID NO: 55356 - DNA, 30 bp, Artificial Sequence
  Synthetic oligonucleotide
accgattttcagagggaggggaagagggga

SEQ ID NO: 55357 - DNA, 30 bp, Artificial Sequence
  Synthetic oligonucleotide
ccgccgaagttctgaagagatatgagggga

SEQ ID NO: 55358 - DNA, 40 bp, Artificial Sequence
  Synthetic oligonucleotide
aagataatacattcatggtatggtgggggatcggggggga

SEQ ID NO: 55359 - DNA, 30 bp, Artificial Sequence
  Synthetic oligonucleotide
cttgcaaggaacggatgatactctggggga

SEQ ID NO: 55360 - DNA, 30 bp, Artificial Sequence
  Synthetic oligonucleotide
gtgaattcgggtggatacctagggtgggga

SEQ ID NO: 55361 - DNA, 30 bp, Artificial Sequence
  Synthetic oligonucleotide
atcaggggagagaactctaaggccatggga

SEQ ID NO: 55362 - DNA, 30 bp, Artificial Sequence
  Synthetic oligonucleotide
tagggctacctagataccaggattatggga

SEQ ID NO: 55363 - DNA, 30 bp, Artificial Sequence
  Synthetic oligonucleotide
cagaatcatacaatggaaactaacgtggga

SEQ ID NO: 55364 - DNA, 30 bp, Artificial Sequence
  Synthetic oligonucleotide
tgcgcagtgctaaacgtatctcaggtggga

SEQ ID NO: 55365 - DNA, 30 bp, Artificial Sequence
  Synthetic oligonucleotide
gcgctcacggggaagagaaaatatgtggga

SEQ ID NO: 55366 - DNA, 30 bp, Artificial Sequence
  Synthetic oligonucleotide
gtgattgcgaaactgcgtgcccagaatgga

SEQ ID NO: 55367 - DNA, 30 bp, Artificial Sequence
  Synthetic oligonucleotide
cgggatcatcttggctcggaagaagatgga

SEQ ID NO: 55368 - DNA, 30 bp, Artificial Sequence
  Synthetic oligonucleotide
tctgccaaaatcggagccgtgctcgatgga

SEQ ID NO: 55369 - DNA, 30 bp, Artificial Sequence
  Synthetic oligonucleotide
cgcagaaaaacgctttctcctaacactgga

SEQ ID NO: 55370 - DNA, 30 bp, Artificial Sequence
  Synthetic oligonucleotide
ctcgtggacgggggctgcaaatgcactgga

SEQ ID NO: 55371 - DNA, 30 bp, Artificial Sequence
  Synthetic oligonucleotide
agtatgtgtactaagaaatgcatacctgga

SEQ ID NO: 55372 - DNA, 30 bp, Artificial Sequence
  Synthetic oligonucleotide
tgaaactgaacggggcgacaagaccctgga

SEQ ID NO: 55373 - DNA, 30 bp, Artificial Sequence
  Synthetic oligonucleotide
ggatcatcggattcagattagtgcgctgga

SEQ ID NO: 55374 - DNA, 30 bp, Artificial Sequence
  Synthetic oligonucleotide
tcaagtataatggccagcaaagaatctgga

SEQ ID NO: 55375 - DNA, 30 bp, Artificial Sequence
  Synthetic oligonucleotide
caatgagtggtccggttgaaaagttctgga

SEQ ID NO: 55376 - DNA, 30 bp, Artificial Sequence
  Synthetic oligonucleotide
gcagctgcaaaactaagtgttgtaagtgga

SEQ ID NO: 55377 - DNA, 30 bp, Artificial Sequence
  Synthetic oligonucleotide
aaacagagggtgggggccgtgatgagtgga

SEQ ID NO: 55378 - DNA, 30 bp, Artificial Sequence
  Synthetic oligonucleotide
ggtcattcggtgctacaagggctgagtgga

SEQ ID NO: 55379 - DNA, 30 bp, Artificial Sequence
  Synthetic oligonucleotide
aacgggcgacgtgaaaaaggtgaacgtgga

SEQ ID NO: 55380 - DNA, 30 bp, Artificial Sequence
  Synthetic oligonucleotide
agtctcaataagaatttcgtgttccgtgga

SEQ ID NO: 55381 - DNA, 30 bp, Artificial Sequence
  Synthetic oligonucleotide
cgatatagaagcccatgatgcctaggtgga

SEQ ID NO: 55382 - DNA, 30 bp, Artificial Sequence
  Synthetic oligonucleotide
gggccgcatatgtcaaactagcattgtgga

SEQ ID NO: 55383 - DNA, 30 bp, Artificial Sequence
  Synthetic oligonucleotide
cgttagcatgtgagagttcggcgttgtgga

SEQ ID NO: 55384 - DNA, 30 bp, Artificial Sequence
  Synthetic oligonucleotide
gatacgtataacgggcgagcaggttgtgga

SEQ ID NO: 55385 - DNA, 30 bp, Artificial Sequence
  Synthetic oligonucleotide
ggatcagcgacgagacagagatgttgtgga

SEQ ID NO: 55386 - DNA, 30 bp, Artificial Sequence
  Synthetic oligonucleotide
caaatggcgtgagacatagaagagattgga

SEQ ID NO: 55387 - DNA, 30 bp, Artificial Sequence
  Synthetic oligonucleotide
cgtagaagaccggagggttcattggttgga

SEQ ID NO: 55388 - DNA, 30 bp, Artificial Sequence
  Synthetic oligonucleotide
ccaacaaagggggcccagaagatgtttgga

SEQ ID NO: 55389 - DNA, 30 bp, Artificial Sequence
  Synthetic oligonucleotide
cgggcgccaagaaacttctcggacaaatga

SEQ ID NO: 55390 - DNA, 30 bp, Artificial Sequence
  Synthetic oligonucleotide
agcaggtccagacagaagagttgtaaatga

SEQ ID NO: 55391 - DNA, 30 bp, Artificial Sequence
  Synthetic oligonucleotide
agagtggcggggggatacagaggtgaatga

SEQ ID NO: 55392 - DNA, 30 bp, Artificial Sequence
  Synthetic oligonucleotide
cacgttgcagacaccggacggtgctaatga

SEQ ID NO: 55393 - DNA, 30 bp, Artificial Sequence
  Synthetic oligonucleotide
tcacgcctaagatcattagcaatgacatga

SEQ ID NO: 55394 - DNA, 30 bp, Artificial Sequence
  Synthetic oligonucleotide
gaatgaagacggcacaacgcaaatacatga

SEQ ID NO: 55395 - DNA, 30 bp, Artificial Sequence
  Synthetic oligonucleotide
agctcactaacagtcaaaggagatacatga

SEQ ID NO: 55396 - DNA, 30 bp, Artificial Sequence
  Synthetic oligonucleotide
gaacagttaggtcacaaccaattgccatga

SEQ ID NO: 55397 - DNA, 30 bp, Artificial Sequence
  Synthetic oligonucleotide
gtaacagcaattatagccacatacagatga

SEQ ID NO: 55398 - DNA, 30 bp, Artificial Sequence
  Synthetic oligonucleotide
accagcagaaacgctatgggataccgatga

SEQ ID NO: 55399 - DNA, 30 bp, Artificial Sequence
  Synthetic oligonucleotide
tgggtatcgcgaaaaagtggaggtcgatga

SEQ ID NO: 55400 - DNA, 30 bp, Artificial Sequence
  Synthetic oligonucleotide
tacgtggttatgtactacagtccgatatga

SEQ ID NO: 55401 - DNA, 30 bp, Artificial Sequence
  Synthetic oligonucleotide
tcgattacggaggtggaataagggctatga

SEQ ID NO: 55402 - DNA, 30 bp, Artificial Sequence
  Synthetic oligonucleotide
atcaaggccaatggatgagtagccgtatga

SEQ ID NO: 55403 - DNA, 30 bp, Artificial Sequence
  Synthetic oligonucleotide
cgtgcgtctgaatcacagtaaaatgtatga

SEQ ID NO: 55404 - DNA, 30 bp, Artificial Sequence
  Synthetic oligonucleotide
tgtaacggtaaaagtacctgtaataactga

SEQ ID NO: 55405 - DNA, 30 bp, Artificial Sequence
  Synthetic oligonucleotide
cgtggcccaccatactttgcatcacactga

SEQ ID NO: 55406 - DNA, 30 bp, Artificial Sequence
  Synthetic oligonucleotide
agactgttcgagcgtgtggcggaagactga

SEQ ID NO: 55407 - DNA, 30 bp, Artificial Sequence
  Synthetic oligonucleotide
ggaggacttgcctactttgaagacgactga

SEQ ID NO: 55408 - DNA, 30 bp, Artificial Sequence
  Synthetic oligonucleotide
cggggtaaagaagctttcaagtgatactga

SEQ ID NO: 55409 - DNA, 31 bp, Artificial Sequence
  Synthetic oligonucleotide
ctggaagtgggcgcgtttattccacacctga

SEQ ID NO: 55410 - DNA, 30 bp, Artificial Sequence
  Synthetic oligonucleotide
gatgggatgaggggcgggagcaggacctga

SEQ ID NO: 55411 - DNA, 30 bp, Artificial Sequence
  Synthetic oligonucleotide
gggggagcgacagcggaaagcggtgcctga

SEQ ID NO: 55412 - DNA, 30 bp, Artificial Sequence
  Synthetic oligonucleotide
aacaaactcacaggtcaaaaagtcagctga

SEQ ID NO: 55413 - DNA, 30 bp, Artificial Sequence
  Synthetic oligonucleotide
cctacaaaggaagagtccgtcgaacgctga

SEQ ID NO: 55414 - DNA, 30 bp, Artificial Sequence
  Synthetic oligonucleotide
caacgagattcgacggggcttagaggctga

SEQ ID NO: 55415 - DNA, 30 bp, Artificial Sequence
  Synthetic oligonucleotide
acaagattataggtgagttacttcggctga

SEQ ID NO: 55416 - DNA, 30 bp, Artificial Sequence
  Synthetic oligonucleotide
gcagtgtggtcgtgaaatgtggtgggctga

SEQ ID NO: 55417 - DNA, 30 bp, Artificial Sequence
  Synthetic oligonucleotide
agttagagaccgatcggcccagtaatctga

SEQ ID NO: 55418 - DNA, 31 bp, Artificial Sequence
  Synthetic oligonucleotide
agcacagagggccagaccggaggtaatctga

SEQ ID NO: 55419 - DNA, 30 bp, Artificial Sequence
  Synthetic oligonucleotide
tggcggatagcggagctaggacagatctga

SEQ ID NO: 55420 - DNA, 30 bp, Artificial Sequence
  Synthetic oligonucleotide
acgcgtgagagtctatacgccaaagtctga

SEQ ID NO: 55421 - DNA, 30 bp, Artificial Sequence
  Synthetic oligonucleotide
aaagggtggtccaagctcagtaaagtctga

SEQ ID NO: 55422 - DNA, 30 bp, Artificial Sequence
  Synthetic oligonucleotide
gcgttggaaagcagcgcgctaagagtctga

SEQ ID NO: 55423 - DNA, 30 bp, Artificial Sequence
  Synthetic oligonucleotide
acgggaacacaaaaatgagtccgagtctga

SEQ ID NO: 55424 - DNA, 30 bp, Artificial Sequence
  Synthetic oligonucleotide
gtagagaagtgtgaaggtgcagaattctga

SEQ ID NO: 55425 - DNA, 30 bp, Artificial Sequence
  Synthetic oligonucleotide
ctgacgattcgggaaacatggagccagtga

SEQ ID NO: 55426 - DNA, 30 bp, Artificial Sequence
  Synthetic oligonucleotide
cgaggagtgggaacctagttttgccagtga

SEQ ID NO: 55427 - DNA, 30 bp, Artificial Sequence
  Synthetic oligonucleotide
tgaagtggcccctgatcagagagtcagtga

SEQ ID NO: 55428 - DNA, 30 bp, Artificial Sequence
  Synthetic oligonucleotide
gcgcaagcgacattcaagttcgatgagtga

SEQ ID NO: 55429 - DNA, 30 bp, Artificial Sequence
  Synthetic oligonucleotide
tatggatgcgtaagtccacgctgatagtga

SEQ ID NO: 55430 - DNA, 30 bp, Artificial Sequence
  Synthetic oligonucleotide
acgggatcggtaacgaagactgtatagtga

SEQ ID NO: 55431 - DNA, 30 bp, Artificial Sequence
  Synthetic oligonucleotide
cgagcgaaagctaaatcgatcccctagtga

SEQ ID NO: 55432 - DNA, 30 bp, Artificial Sequence
  Synthetic oligonucleotide
ccctaggcaacaatcgatgtgtcgtagtga

SEQ ID NO: 55433 - DNA, 30 bp, Artificial Sequence
  Synthetic oligonucleotide
agcgatacgaaactaaatgagggaacgtga

SEQ ID NO: 55434 - DNA, 30 bp, Artificial Sequence
  Synthetic oligonucleotide
cgcagtcgaagtatatagctggaggcgtga

SEQ ID NO: 55435 - DNA, 30 bp, Artificial Sequence
  Synthetic oligonucleotide
ctgagacagaactgaggccgtgctgcgtga

SEQ ID NO: 55436 - DNA, 30 bp, Artificial Sequence
  Synthetic oligonucleotide
gcgcacgggagctgctgatgattatggtga

SEQ ID NO: 55437 - DNA, 30 bp, Artificial Sequence
  Synthetic oligonucleotide
gcaattggaagctaaacgggacggtggtga

SEQ ID NO: 55438 - DNA, 30 bp, Artificial Sequence
  Synthetic oligonucleotide
ttggtaataggggtccagtcgacgatgtga

SEQ ID NO: 55439 - DNA, 30 bp, Artificial Sequence
  Synthetic oligonucleotide
acgtgccgccagggggattgcgatatgtga

SEQ ID NO: 55440 - DNA, 30 bp, Artificial Sequence
  Synthetic oligonucleotide
cacttataccgcgtgcctagaaaactgtga

SEQ ID NO: 55441 - DNA, 30 bp, Artificial Sequence
  Synthetic oligonucleotide
ataaacgattgtaaggtatcatcactgtga

SEQ ID NO: 55442 - DNA, 30 bp, Artificial Sequence
  Synthetic oligonucleotide
ctggaaggggtgcacacaggtaaagtgtga

SEQ ID NO: 55443 - DNA, 30 bp, Artificial Sequence
  Synthetic oligonucleotide
ttaaaggaagggtccgaggcaaaacattga

SEQ ID NO: 55444 - DNA, 30 bp, Artificial Sequence
  Synthetic oligonucleotide
agtctcggtaacgtcggaccagcgcattga

SEQ ID NO: 55445 - DNA, 30 bp, Artificial Sequence
  Synthetic oligonucleotide
gctagaggtctagatgatcagctggattga

SEQ ID NO: 55446 - DNA, 30 bp, Artificial Sequence
  Synthetic oligonucleotide
cgtcacagacaatgttagcctcattattga

SEQ ID NO: 55447 - DNA, 30 bp, Artificial Sequence
  Synthetic oligonucleotide
atcaaagggacaggctgagttacttattga

SEQ ID NO: 55448 - DNA, 30 bp, Artificial Sequence
  Synthetic oligonucleotide
accgtcaacaatttacccgccccagcttga

SEQ ID NO: 55449 - DNA, 30 bp, Artificial Sequence
  Synthetic oligonucleotide
cggctgagtctcacatacccgcgcagttga

SEQ ID NO: 55450 - DNA, 30 bp, Artificial Sequence
  Synthetic oligonucleotide
atcacctaactaggaagataccgtcgttga

SEQ ID NO: 55451 - DNA, 30 bp, Artificial Sequence
  Synthetic oligonucleotide
aaaaccgatcacagcgaagggccgggttga

SEQ ID NO: 55452 - DNA, 30 bp, Artificial Sequence
  Synthetic oligonucleotide
tgatgagtgtaacaacggagacatggttga

SEQ ID NO: 55453 - DNA, 30 bp, Artificial Sequence
  Synthetic oligonucleotide
cagatgtatccagcgagaatacgcatttga

SEQ ID NO: 55454 - DNA, 30 bp, Artificial Sequence
  Synthetic oligonucleotide
tcaaccttaggagattccagtggcgtttga

SEQ ID NO: 55455 - DNA, 30 bp, Artificial Sequence
  Synthetic oligonucleotide
tacggtgacgtgatgaatcaggaaaaaata

SEQ ID NO: 55456 - DNA, 30 bp, Artificial Sequence
  Synthetic oligonucleotide
ggcttcgtcggacagttaggcgaggaaata

SEQ ID NO: 55457 - DNA, 30 bp, Artificial Sequence
  Synthetic oligonucleotide
gcgaccaagggtattcatggccatccaata

SEQ ID NO: 55458 - DNA, 30 bp, Artificial Sequence
  Synthetic oligonucleotide
accccaagttaagtatcgttcctggcaata

SEQ ID NO: 55459 - DNA, 30 bp, Artificial Sequence
  Synthetic oligonucleotide
ggatcggtcagtaggctgcgagcatcaata

SEQ ID NO: 55460 - DNA, 30 bp, Artificial Sequence
  Synthetic oligonucleotide
catgccaagtgcaagtatgagtactcaata

SEQ ID NO: 55461 - DNA, 30 bp, Artificial Sequence
  Synthetic oligonucleotide
atgcgtgtgcaacatcacatatcaagaata

SEQ ID NO: 55462 - DNA, 30 bp, Artificial Sequence
  Synthetic oligonucleotide
aggactcaacaactagattcattcagaata

SEQ ID NO: 55463 - DNA, 30 bp, Artificial Sequence
  Synthetic oligonucleotide
cacgactcagagatacgtggcaggagaata

SEQ ID NO: 55464 - DNA, 30 bp, Artificial Sequence
  Synthetic oligonucleotide
gtagcaagtaggcccgcacaccttcgaata

SEQ ID NO: 55465 - DNA, 30 bp, Artificial Sequence
  Synthetic oligonucleotide
agacgtacaaagtgtagaagtacgggaata

SEQ ID NO: 55466 - DNA, 30 bp, Artificial Sequence
  Synthetic oligonucleotide
ggtgcccaccctcatatcatcagatgaata

SEQ ID NO: 55467 - DNA, 30 bp, Artificial Sequence
  Synthetic oligonucleotide
tatagatgttaatagtgcaccaggataata

SEQ ID NO: 55468 - DNA, 30 bp, Artificial Sequence
  Synthetic oligonucleotide
caagctcaagaattaccaggggccgtaata

SEQ ID NO: 55469 - DNA, 30 bp, Artificial Sequence
  Synthetic oligonucleotide
tgggcaatacgcactcgccccgtcttaata

SEQ ID NO: 55470 - DNA, 30 bp, Artificial Sequence
  Synthetic oligonucleotide
aacgaagggggtctcatggacctcaacata

SEQ ID NO: 55471 - DNA, 30 bp, Artificial Sequence
  Synthetic oligonucleotide
tgacataatctcaggctacaagagaacata

SEQ ID NO: 55472 - DNA, 30 bp, Artificial Sequence
  Synthetic oligonucleotide
ccggcgatctaagggcctcctgctaacata

SEQ ID NO: 55473 - DNA, 30 bp, Artificial Sequence
  Synthetic oligonucleotide
gaatagggcggtaacagaaccccacacata

SEQ ID NO: 55474 - DNA, 30 bp, Artificial Sequence
  Synthetic oligonucleotide
cgggaaagcccgttcacgcattgccccata

SEQ ID NO: 55475 - DNA, 30 bp, Artificial Sequence
  Synthetic oligonucleotide
cgacgtgttgaagtgttgccgtggcccata

SEQ ID NO: 55476 - DNA, 30 bp, Artificial Sequence
  Synthetic oligonucleotide
gcaggggggcaccgtatatggaaggccata

SEQ ID NO: 55477 - DNA, 30 bp, Artificial Sequence
  Synthetic oligonucleotide
cggaccaggtgtgcttaacactcgtccata

SEQ ID NO: 55478 - DNA, 30 bp, Artificial Sequence
  Synthetic oligonucleotide
tcgtaatgacattagctgtataagagcata

SEQ ID NO: 55479 - DNA, 30 bp, Artificial Sequence
  Synthetic oligonucleotide
ttaaggtagtatcgagaagagaagcgcata

SEQ ID NO: 55480 - DNA, 30 bp, Artificial Sequence
  Synthetic oligonucleotide
cagtctcaaggggcgtaacttcggcgcata

SEQ ID NO: 55481 - DNA, 30 bp, Artificial Sequence
  Synthetic oligonucleotide
gaagcacaatcaagtcgacgtcatcgcata

SEQ ID NO: 55482 - DNA, 30 bp, Artificial Sequence
  Synthetic oligonucleotide
agggctggatggtatatggcgtgtcgcata

SEQ ID NO: 55483 - DNA, 30 bp, Artificial Sequence
  Synthetic oligonucleotide
caaacaggccgtagtagccctcacatcata

SEQ ID NO: 55484 - DNA, 30 bp, Artificial Sequence
  Synthetic oligonucleotide
gaagcggatacttcaggagaagagatcata

SEQ ID NO: 55485 - DNA, 30 bp, Artificial Sequence
  Synthetic oligonucleotide
cttgggcacgtaggagattcgagtcagata

SEQ ID NO: 55486 - DNA, 30 bp, Artificial Sequence
  Synthetic oligonucleotide
ataagtaaatgaagaggagcacttgagata

SEQ ID NO: 55487 - DNA, 30 bp, Artificial Sequence
  Synthetic oligonucleotide
gagcgggggttgattgtcctactaccgata

SEQ ID NO: 55488 - DNA, 30 bp, Artificial Sequence
  Synthetic oligonucleotide
gagggtgcgaactctgtcgggatggcgata

SEQ ID NO: 55489 - DNA, 30 bp, Artificial Sequence
  Synthetic oligonucleotide
gaggtgttcataacagtatggccaaggata

SEQ ID NO: 55490 - DNA, 30 bp, Artificial Sequence
  Synthetic oligonucleotide
gcgtgctgggtaccctaacgatcgaggata

SEQ ID NO: 55491 - DNA, 30 bp, Artificial Sequence
  Synthetic oligonucleotide
atggaggccgccgccaaacctcccatgata

SEQ ID NO: 55492 - DNA, 30 bp, Artificial Sequence
  Synthetic oligonucleotide
gagcgtcacatccatggaaacgaactgata

SEQ ID NO: 55493 - DNA, 30 bp, Artificial Sequence
  Synthetic oligonucleotide
cacgggtcactcgacccatacgaagtgata

SEQ ID NO: 55494 - DNA, 30 bp, Artificial Sequence
  Synthetic oligonucleotide
aggtctagagccaatgaggacccagtgata

SEQ ID NO: 55495 - DNA, 30 bp, Artificial Sequence
  Synthetic oligonucleotide
cggaggccaatagctggttagttcgtgata

SEQ ID NO: 55496 - DNA, 30 bp, Artificial Sequence
  Synthetic oligonucleotide
cgacgacgattacatgcaggggggttgata

SEQ ID NO: 55497 - DNA, 30 bp, Artificial Sequence
  Synthetic oligonucleotide
ggtggagtcgagggcaggcaagcaaatata

SEQ ID NO: 55498 - DNA, 30 bp, Artificial Sequence
  Synthetic oligonucleotide
caggtaaaagcaattggagaaagacatata

SEQ ID NO: 55499 - DNA, 30 bp, Artificial Sequence
  Synthetic oligonucleotide
tcggacccgcacgagacatagcgccatata

SEQ ID NO: 55500 - DNA, 30 bp, Artificial Sequence
  Synthetic oligonucleotide
atggcgtgggtgaagttcgtgagcgatata

SEQ ID NO: 55501 - DNA, 30 bp, Artificial Sequence
  Synthetic oligonucleotide
tcgaagaacgaagccattgactaagctata

SEQ ID NO: 55502 - DNA, 30 bp, Artificial Sequence
  Synthetic oligonucleotide
cctccgtcaccgtaccgtaacagcgctata

SEQ ID NO: 55503 - DNA, 29 bp, Artificial Sequence
  Synthetic oligonucleotide
tggcgaagcttagaggagtaggggctata

SEQ ID NO: 55504 - DNA, 30 bp, Artificial Sequence
  Synthetic oligonucleotide
agtgggggatggactttaaatacgagtata

SEQ ID NO: 55505 - DNA, 30 bp, Artificial Sequence
  Synthetic oligonucleotide
tggcgggaattgcgctataaaatgagtata

SEQ ID NO: 55506 - DNA, 30 bp, Artificial Sequence
  Synthetic oligonucleotide
tcggcagtcgaactcgacacgaaccgtata

SEQ ID NO: 55507 - DNA, 30 bp, Artificial Sequence
  Synthetic oligonucleotide
aagccggcgtcagagaaagtgttgcgtata

SEQ ID NO: 55508 - DNA, 30 bp, Artificial Sequence
  Synthetic oligonucleotide
ggtaggtgggcactatcaaatactggtata

SEQ ID NO: 55509 - DNA, 30 bp, Artificial Sequence
  Synthetic oligonucleotide
gagatagggagggtgaaattcgaatgtata

SEQ ID NO: 55510 - DNA, 30 bp, Artificial Sequence
  Synthetic oligonucleotide
atggcaacagagaggaggatgacttgtata

SEQ ID NO: 55511 - DNA, 30 bp, Artificial Sequence
  Synthetic oligonucleotide
atggtcgggagcggacactattagattata

SEQ ID NO: 55512 - DNA, 30 bp, Artificial Sequence
  Synthetic oligonucleotide
tgacttgaagcttagccagtgtcgattata

SEQ ID NO: 55513 - DNA, 30 bp, Artificial Sequence
  Synthetic oligonucleotide
tgagacggctaacaaattaatgcacttata

SEQ ID NO: 55514 - DNA, 30 bp, Artificial Sequence
  Synthetic oligonucleotide
acgtaacgcttgtgagggacctgcaaacta

SEQ ID NO: 55515 - DNA, 30 bp, Artificial Sequence
  Synthetic oligonucleotide
ctgaaatgggaaatgaaatccgctcaacta

SEQ ID NO: 55516 - DNA, 30 bp, Artificial Sequence
  Synthetic oligonucleotide
tgagagagtgggggcgcggacgtcgaacta

SEQ ID NO: 55517 - DNA, 30 bp, Artificial Sequence
  Synthetic oligonucleotide
gtgaggagcgagaagaacggtcattaacta

SEQ ID NO: 55518 - DNA, 30 bp, Artificial Sequence
  Synthetic oligonucleotide
gagaaaagggactagtcatggggttaacta

SEQ ID NO: 55519 - DNA, 30 bp, Artificial Sequence
  Synthetic oligonucleotide
agaaactaagtaggtgccagcagttcacta

SEQ ID NO: 55520 - DNA, 30 bp, Artificial Sequence
  Synthetic oligonucleotide
ttacgaagaggaaggaacaggtggagacta

SEQ ID NO: 55521 - DNA, 30 bp, Artificial Sequence
  Synthetic oligonucleotide
ggcatcaggcagaagtattggttgagacta

SEQ ID NO: 55522 - DNA, 30 bp, Artificial Sequence
  Synthetic oligonucleotide
ctaccagattgaacgttaatgagtagacta

SEQ ID NO: 55523 - DNA, 30 bp, Artificial Sequence
  Synthetic oligonucleotide
agcaagagcgtgagcattagagtacgacta

SEQ ID NO: 55524 - DNA, 30 bp, Artificial Sequence
  Synthetic oligonucleotide
tggtcaagcaagatagggcaaacttgacta

SEQ ID NO: 55525 - DNA, 30 bp, Artificial Sequence
  Synthetic oligonucleotide
atagaggccgaagcgattacgggttgacta

SEQ ID NO: 55526 - DNA, 30 bp, Artificial Sequence
  Synthetic oligonucleotide
aatagaagaaggatctctagcgcaatacta

SEQ ID NO: 55527 - DNA, 30 bp, Artificial Sequence
  Synthetic oligonucleotide
tgtagatgagatatccagtaaaccatacta

SEQ ID NO: 55528 - DNA, 30 bp, Artificial Sequence
  Synthetic oligonucleotide
acacggacgtggtccaaaccaggtttacta

SEQ ID NO: 55529 - DNA, 30 bp, Artificial Sequence
  Synthetic oligonucleotide
cgagaccagggcacactggggcagaaccta

SEQ ID NO: 55530 - DNA, 30 bp, Artificial Sequence
  Synthetic oligonucleotide
ggtagaaagctgctcaacaacatcgaccta

SEQ ID NO: 55531 - DNA, 30 bp, Artificial Sequence
  Synthetic oligonucleotide
acctggagacactgttggataatgtaccta

SEQ ID NO: 55532 - DNA, 30 bp, Artificial Sequence
  Synthetic oligonucleotide
cgaaaagaagacaagagaactgggacccta

SEQ ID NO: 55533 - DNA, 30 bp, Artificial Sequence
  Synthetic oligonucleotide
acagggaccagggaggtgaatgctcgccta

SEQ ID NO: 55534 - DNA, 30 bp, Artificial Sequence
  Synthetic oligonucleotide
aggggcgacttcgtaaagctaattcgccta

SEQ ID NO: 55535 - DNA, 30 bp, Artificial Sequence
  Synthetic oligonucleotide
actgatacgaggagattcagaccaatccta

SEQ ID NO: 55536 - DNA, 30 bp, Artificial Sequence
  Synthetic oligonucleotide
acatgcagatgcttaacattaacagtccta

SEQ ID NO: 55537 - DNA, 30 bp, Artificial Sequence
  Synthetic oligonucleotide
atctagggaaacagaccaaatcgcgtccta

SEQ ID NO: 55538 - DNA, 30 bp, Artificial Sequence
  Synthetic oligonucleotide
aggacttacaggtgtacgcacgtaaagcta

SEQ ID NO: 55539 - DNA, 30 bp, Artificial Sequence
  Synthetic oligonucleotide
aagggggaattatcaaatgtatagaagcta

SEQ ID NO: 55540 - DNA, 30 bp, Artificial Sequence
  Synthetic oligonucleotide
caaggggtaaaccgaatcgaataccagcta

SEQ ID NO: 55541 - DNA, 30 bp, Artificial Sequence
  Synthetic oligonucleotide
tgggctagataaatcaaagtaggctagcta

SEQ ID NO: 55542 - DNA, 30 bp, Artificial Sequence
  Synthetic oligonucleotide
gatacattacacgtagtcgacagggcgcta

SEQ ID NO: 55543 - DNA, 30 bp, Artificial Sequence
  Synthetic oligonucleotide
ctgcacagaaaaaaggagcgagcgcggcta

SEQ ID NO: 55544 - DNA, 30 bp, Artificial Sequence
  Synthetic oligonucleotide
gagactagggagttaagagatttagggcta

SEQ ID NO: 55545 - DNA, 30 bp, Artificial Sequence
  Synthetic oligonucleotide
agatatcggaaaaatggtccaaaactgcta

SEQ ID NO: 55546 - DNA, 30 bp, Artificial Sequence
  Synthetic oligonucleotide
ggttcattcgcgcgaaaaatgaatctgcta

SEQ ID NO: 55547 - DNA, 30 bp, Artificial Sequence
  Synthetic oligonucleotide
cgttcgagtgtgtgagggaacatggtgcta

SEQ ID NO: 55548 - DNA, 30 bp, Artificial Sequence
  Synthetic oligonucleotide
accgtaagctatcaacagttaccattgcta

SEQ ID NO: 55549 - DNA, 30 bp, Artificial Sequence
  Synthetic oligonucleotide
tgccaggaagacgatacacatgcttatcta

SEQ ID NO: 55550 - DNA, 30 bp, Artificial Sequence
  Synthetic oligonucleotide
cggtcatggtacggcggatcaacaactcta

SEQ ID NO: 55551 - DNA, 30 bp, Artificial Sequence
  Synthetic oligonucleotide
taagacacaataggtgctcgtagccctcta

SEQ ID NO: 55552 - DNA, 30 bp, Artificial Sequence
  Synthetic oligonucleotide
gcgccacgaaaggctagagtctggcctcta

SEQ ID NO: 55553 - DNA, 30 bp, Artificial Sequence
  Synthetic oligonucleotide
agcacggagcagaatgagcgaaaacgtcta

SEQ ID NO: 55554 - DNA, 30 bp, Artificial Sequence
  Synthetic oligonucleotide
taggctgatcacgtcgtagggccatgtcta

SEQ ID NO: 55555 - DNA, 30 bp, Artificial Sequence
  Synthetic oligonucleotide
ccaacgccaatatcgacttcacaaattcta

SEQ ID NO: 55556 - DNA, 30 bp, Artificial Sequence
  Synthetic oligonucleotide
acgcgtgcccgggttatccaccgaaaagta

SEQ ID NO: 55557 - DNA, 31 bp, Artificial Sequence
  Synthetic oligonucleotide
tcgtgaagcgtctttctacgtaagccaagta

SEQ ID NO: 55558 - DNA, 30 bp, Artificial Sequence
  Synthetic oligonucleotide
aggagcacaggaccgtcaatgaacacagta

SEQ ID NO: 55559 - DNA, 30 bp, Artificial Sequence
  Synthetic oligonucleotide
ctgacagggagggaggctcagcagacagta

SEQ ID NO: 55560 - DNA, 30 bp, Artificial Sequence
  Synthetic oligonucleotide
gggccactcttcaggtgtagaggaccagta

SEQ ID NO: 55561 - DNA, 30 bp, Artificial Sequence
  Synthetic oligonucleotide
tctcgccaaaggatggcagtccgtgcagta

SEQ ID NO: 55562 - DNA, 30 bp, Artificial Sequence
  Synthetic oligonucleotide
tacatacgcgaaagaggccgctgttcagta

SEQ ID NO: 55563 - DNA, 31 bp, Artificial Sequence
  Synthetic oligonucleotide
cagatggaccaacaacatgttctccagagta

SEQ ID NO: 55564 - DNA, 30 bp, Artificial Sequence
  Synthetic oligonucleotide
atggcgattgctcctggaggcgggagagta

SEQ ID NO: 55565 - DNA, 30 bp, Artificial Sequence
  Synthetic oligonucleotide
tcaggggctggggatagcacaagtcgagta

SEQ ID NO: 55566 - DNA, 30 bp, Artificial Sequence
  Synthetic oligonucleotide
ggcaccggacgcggttggtggtaaggagta

SEQ ID NO: 55567 - DNA, 30 bp, Artificial Sequence
  Synthetic oligonucleotide
acgtacttgcgtaaccatcttcgaggagta

SEQ ID NO: 55568 - DNA, 30 bp, Artificial Sequence
  Synthetic oligonucleotide
gtgcaatggtcgacgctcgagcggggagta

SEQ ID NO: 55569 - DNA, 30 bp, Artificial Sequence
  Synthetic oligonucleotide
cagtctatgagtcaaaatcgtgctggagta

SEQ ID NO: 55570 - DNA, 30 bp, Artificial Sequence
  Synthetic oligonucleotide
ccgagcaaccgcaaagtcgaaccatgagta

SEQ ID NO: 55571 - DNA, 30 bp, Artificial Sequence
  Synthetic oligonucleotide
cttagagcgttgatagagtagaattgagta

SEQ ID NO: 55572 - DNA, 30 bp, Artificial Sequence
  Synthetic oligonucleotide
tgcaacgaacatgggtaggccacaatagta

SEQ ID NO: 55573 - DNA, 30 bp, Artificial Sequence
  Synthetic oligonucleotide
cgcggagagtggcgaccatgactaatagta

SEQ ID NO: 55574 - DNA, 30 bp, Artificial Sequence
  Synthetic oligonucleotide
tatggcacgagagataagaaggcgatagta

SEQ ID NO: 55575 - DNA, 30 bp, Artificial Sequence
  Synthetic oligonucleotide
ggtaggaccatacgatggaatcgactagta

SEQ ID NO: 55576 - DNA, 30 bp, Artificial Sequence
  Synthetic oligonucleotide
cgtacgtggagagccagacagatactagta

SEQ ID NO: 55577 - DNA, 30 bp, Artificial Sequence
  Synthetic oligonucleotide
tgagtgatgcgtgaatataaaacgctagta

SEQ ID NO: 55578 - DNA, 30 bp, Artificial Sequence
  Synthetic oligonucleotide
cctgatcgagtagccatcccctcagtagta

SEQ ID NO: 55579 - DNA, 30 bp, Artificial Sequence
  Synthetic oligonucleotide
gtggagtagaattgtggtgggggattagta

SEQ ID NO: 55580 - DNA, 30 bp, Artificial Sequence
  Synthetic oligonucleotide
accagagcatgacaacaggttacgttagta

SEQ ID NO: 55581 - DNA, 30 bp, Artificial Sequence
  Synthetic oligonucleotide
ttagaaacactactagattgtgggaacgta

SEQ ID NO: 55582 - DNA, 30 bp, Artificial Sequence
  Synthetic oligonucleotide
tcacatggtggggtccgtggatttaacgta

SEQ ID NO: 55583 - DNA, 30 bp, Artificial Sequence
  Synthetic oligonucleotide
tctaaagttacggggtaggcggtgcacgta

SEQ ID NO: 55584 - DNA, 30 bp, Artificial Sequence
  Synthetic oligonucleotide
aggcgagacgggattcgtaacggtcacgta

SEQ ID NO: 55585 - DNA, 30 bp, Artificial Sequence
  Synthetic oligonucleotide
aacggcgcggtgcgcatcgacggggacgta

SEQ ID NO: 55586 - DNA, 30 bp, Artificial Sequence
  Synthetic oligonucleotide
gggagagcttaatggaggcacgtgtacgta

SEQ ID NO: 55587 - DNA, 30 bp, Artificial Sequence
  Synthetic oligonucleotide
ggttgatgaagcacaaaaacaggttacgta

SEQ ID NO: 55588 - DNA, 30 bp, Artificial Sequence
  Synthetic oligonucleotide
tttcactgcgaatctaagacggatggcgta

SEQ ID NO: 55589 - DNA, 30 bp, Artificial Sequence
  Synthetic oligonucleotide
gtggtaatcacgagagtacattggatcgta

SEQ ID NO: 55590 - DNA, 30 bp, Artificial Sequence
  Synthetic oligonucleotide
cgaaagatcggtcatcaggatcggctcgta

SEQ ID NO: 55591 - DNA, 30 bp, Artificial Sequence
  Synthetic oligonucleotide
ggagaacactggatagttattatagtcgta

SEQ ID NO: 55592 - DNA, 30 bp, Artificial Sequence
  Synthetic oligonucleotide
cacgcgtttaacttataatacccattcgta

SEQ ID NO: 55593 - DNA, 30 bp, Artificial Sequence
  Synthetic oligonucleotide
acggtctctcccatcgcggaaagaaaggta

SEQ ID NO: 55594 - DNA, 30 bp, Artificial Sequence
  Synthetic oligonucleotide
cggcactatgggaagggttaccgacaggta

SEQ ID NO: 55595 - DNA, 30 bp, Artificial Sequence
  Synthetic oligonucleotide
tactggagcaaggtaggtctatcccaggta

SEQ ID NO: 55596 - DNA, 30 bp, Artificial Sequence
  Synthetic oligonucleotide
cacgtggttacattactcagagtgcaggta

SEQ ID NO: 55597 - DNA, 30 bp, Artificial Sequence
  Synthetic oligonucleotide
agtgcgtgagataaagctacacatcaggta

SEQ ID NO: 55598 - DNA, 30 bp, Artificial Sequence
  Synthetic oligonucleotide
tcctggcaccgtaaatcattataagaggta

SEQ ID NO: 55599 - DNA, 30 bp, Artificial Sequence
  Synthetic oligonucleotide
tcgttgacaggtgctcagactagagaggta

SEQ ID NO: 55600 - DNA, 30 bp, Artificial Sequence
  Synthetic oligonucleotide
gtgggctcagcaagggaaaaaggcgaggta

SEQ ID NO: 55601 - DNA, 30 bp, Artificial Sequence
  Synthetic oligonucleotide
atcagggaaatcggtgatctcgtttaggta

SEQ ID NO: 55602 - DNA, 30 bp, Artificial Sequence
  Synthetic oligonucleotide
cacaatcatggtgtaagatcaaatccggta

SEQ ID NO: 55603 - DNA, 30 bp, Artificial Sequence
  Synthetic oligonucleotide
tgatgtgattggtgcgatgacataagggta

SEQ ID NO: 55604 - DNA, 30 bp, Artificial Sequence
  Synthetic oligonucleotide
gacaacgaagtaggtaccaaatccagggta

SEQ ID NO: 55605 - DNA, 30 bp, Artificial Sequence
  Synthetic oligonucleotide
aggacatgcctcgtagataattagagggta

SEQ ID NO: 55606 - DNA, 30 bp, Artificial Sequence
  Synthetic oligonucleotide
aaacgacgaagagggtagggtcctggggta

SEQ ID NO: 55607 - DNA, 30 bp, Artificial Sequence
  Synthetic oligonucleotide
tctgcacacaaagagttccgcccatgggta

SEQ ID NO: 55608 - DNA, 30 bp, Artificial Sequence
  Synthetic oligonucleotide
cacgacatacggagatatacgggctgggta

SEQ ID NO: 55609 - DNA, 30 bp, Artificial Sequence
  Synthetic oligonucleotide
ctatcgggagggcatgaattcgacatggta

SEQ ID NO: 55610 - DNA, 30 bp, Artificial Sequence
  Synthetic oligonucleotide
ggagctcaacgcgagggtctacatgtggta

SEQ ID NO: 55611 - DNA, 30 bp, Artificial Sequence
  Synthetic oligonucleotide
tccaggcgaacatctggtgatcaaaatgta

SEQ ID NO: 55612 - DNA, 30 bp, Artificial Sequence
  Synthetic oligonucleotide
ttcgagaaggctcagtgcactccaaatgta

SEQ ID NO: 55613 - DNA, 30 bp, Artificial Sequence
  Synthetic oligonucleotide
ggctagcgcaaaatttgtcaagaaagtgta

SEQ ID NO: 55614 - DNA, 30 bp, Artificial Sequence
  Synthetic oligonucleotide
atcaggctggagttggaataatcgcgtgta

SEQ ID NO: 55615 - DNA, 30 bp, Artificial Sequence
  Synthetic oligonucleotide
gggacgtgcaataaggggagtcgaggtgta

SEQ ID NO: 55616 - DNA, 30 bp, Artificial Sequence
  Synthetic oligonucleotide
cccgtcggcgaagacagtcgaactggtgta

SEQ ID NO: 55617 - DNA, 30 bp, Artificial Sequence
  Synthetic oligonucleotide
tcgagtagccagcataaccaaaactgtgta

SEQ ID NO: 55618 - DNA, 30 bp, Artificial Sequence
  Synthetic oligonucleotide
tacgttaggtaagtaaagtcccactgtgta

SEQ ID NO: 55619 - DNA, 30 bp, Artificial Sequence
  Synthetic oligonucleotide
ggcgaaagaggccctaagggcagctgtgta

SEQ ID NO: 55620 - DNA, 30 bp, Artificial Sequence
  Synthetic oligonucleotide
ccgtcctccgtcgtcttatgggagtgtgta

SEQ ID NO: 55621 - DNA, 30 bp, Artificial Sequence
  Synthetic oligonucleotide
gcgaatggcactatcagcgtgtagtgtgta

SEQ ID NO: 55622 - DNA, 30 bp, Artificial Sequence
  Synthetic oligonucleotide
acaggcgggcagtacttagaactttgtgta

SEQ ID NO: 55623 - DNA, 30 bp, Artificial Sequence
  Synthetic oligonucleotide
ttggaacgaggtaccagtcatacggttgta

SEQ ID NO: 55624 - DNA, 30 bp, Artificial Sequence
  Synthetic oligonucleotide
aaagacagacggtacaagcaaaattttgta

SEQ ID NO: 55625 - DNA, 30 bp, Artificial Sequence
  Synthetic oligonucleotide
gtcgaagtggagtaatggctcgcgaaatta

SEQ ID NO: 55626 - DNA, 30 bp, Artificial Sequence
  Synthetic oligonucleotide
gtctgtggagggcccagtactaggcaatta

SEQ ID NO: 55627 - DNA, 30 bp, Artificial Sequence
  Synthetic oligonucleotide
cagggtaatcccgttcaacgcgatcaatta

SEQ ID NO: 55628 - DNA, 30 bp, Artificial Sequence
  Synthetic oligonucleotide
cgtcgatattcgtgagaggatgccgaatta

SEQ ID NO: 55629 - DNA, 30 bp, Artificial Sequence
  Synthetic oligonucleotide
tggatgcgggggcacgatcatattccatta

SEQ ID NO: 55630 - DNA, 30 bp, Artificial Sequence
  Synthetic oligonucleotide
gtgcgcaagcgcgataggtcattggcatta

SEQ ID NO: 55631 - DNA, 30 bp, Artificial Sequence
  Synthetic oligonucleotide
catggcaagatggcctgcaaccgtgcatta

SEQ ID NO: 55632 - DNA, 30 bp, Artificial Sequence
  Synthetic oligonucleotide
ttgtgctgtgacagggaaacgtcgggatta

SEQ ID NO: 55633 - DNA, 30 bp, Artificial Sequence
  Synthetic oligonucleotide
agagaaatgtattcaagctgtattggatta

SEQ ID NO: 55634 - DNA, 30 bp, Artificial Sequence
  Synthetic oligonucleotide
cggggtagctgagcattccgtccgtgatta

SEQ ID NO: 55635 - DNA, 30 bp, Artificial Sequence
  Synthetic oligonucleotide
tcgaagactacgagcccgaaaggccactta

SEQ ID NO: 55636 - DNA, 30 bp, Artificial Sequence
  Synthetic oligonucleotide
cttgggcaggatcactaaacatcagactta

SEQ ID NO: 55637 - DNA, 30 bp, Artificial Sequence
  Synthetic oligonucleotide
tggcaaaccgaataagttaacgccgactta

SEQ ID NO: 55638 - DNA, 30 bp, Artificial Sequence
  Synthetic oligonucleotide
caaaagaccgtcacgtgaatacactactta

SEQ ID NO: 55639 - DNA, 30 bp, Artificial Sequence
  Synthetic oligonucleotide
gaagccggggagcccaactaagtaccctta

SEQ ID NO: 55640 - DNA, 30 bp, Artificial Sequence
  Synthetic oligonucleotide
cacagcactaatgtgtaagtaggaggctta

SEQ ID NO: 55641 - DNA, 30 bp, Artificial Sequence
  Synthetic oligonucleotide
gaatagacgccgtggaggagtgtcggctta

SEQ ID NO: 55642 - DNA, 30 bp, Artificial Sequence
  Synthetic oligonucleotide
cgtgtgaggcaaaggataattctcatctta

SEQ ID NO: 55643 - DNA, 30 bp, Artificial Sequence
  Synthetic oligonucleotide
aggggccaacccaggtaaaccaccgtctta

SEQ ID NO: 55644 - DNA, 30 bp, Artificial Sequence
  Synthetic oligonucleotide
cgtaggaagcagggaggacgctcgaagtta

SEQ ID NO: 55645 - DNA, 30 bp, Artificial Sequence
  Synthetic oligonucleotide
tggcgaacgttcatgtaagaattccagtta

SEQ ID NO: 55646 - DNA, 30 bp, Artificial Sequence
  Synthetic oligonucleotide
caacgatgtccagtaaggtgatggcagtta

SEQ ID NO: 55647 - DNA, 30 bp, Artificial Sequence
  Synthetic oligonucleotide
tagtggtgtagcacagatatgacagagtta

SEQ ID NO: 55648 - DNA, 30 bp, Artificial Sequence
  Synthetic oligonucleotide
acaagcgaggttacctgaacacgatagtta

SEQ ID NO: 55649 - DNA, 30 bp, Artificial Sequence
  Synthetic oligonucleotide
tcgacaggacaaccattccgcccagcgtta

SEQ ID NO: 55650 - DNA, 30 bp, Artificial Sequence
  Synthetic oligonucleotide
ggccgttgacctccaggtgccagggcgtta

SEQ ID NO: 55651 - DNA, 30 bp, Artificial Sequence
  Synthetic oligonucleotide
cgcgttggagacataggggcattatcgtta

SEQ ID NO: 55652 - DNA, 30 bp, Artificial Sequence
  Synthetic oligonucleotide
accgagagcgacaggaatgatggttcgtta

SEQ ID NO: 55653 - DNA, 30 bp, Artificial Sequence
  Synthetic oligonucleotide
agcaaagtataattgtccgtgagacggtta

SEQ ID NO: 55654 - DNA, 30 bp, Artificial Sequence
  Synthetic oligonucleotide
ttggacgaaccgagtgttcaaagagggtta

SEQ ID NO: 55655 - DNA, 30 bp, Artificial Sequence
  Synthetic oligonucleotide
gaaaggtaacaatggggaaggttgaattta

SEQ ID NO: 55656 - DNA, 30 bp, Artificial Sequence
  Synthetic oligonucleotide
aatgtggcgaaaaaaaggcacagatattta

SEQ ID NO: 55657 - DNA, 30 bp, Artificial Sequence
  Synthetic oligonucleotide
ggggtttacctccagaagtagacaacttta

SEQ ID NO: 55658 - DNA, 30 bp, Artificial Sequence
  Synthetic oligonucleotide
ctgaggcaaagggaggaattatgtagttta

SEQ ID NO: 55659 - DNA, 30 bp, Artificial Sequence
  Synthetic oligonucleotide
gaacaggaaggtaggtgagtcccgaaaaac

SEQ ID NO: 55660 - DNA, 30 bp, Artificial Sequence
  Synthetic oligonucleotide
aagagtcatacaagtggaaccattaaaaac

SEQ ID NO: 55661 - DNA, 30 bp, Artificial Sequence
  Synthetic oligonucleotide
cgatgtataaaaacacgaaaacatcaaaac

SEQ ID NO: 55662 - DNA, 30 bp, Artificial Sequence
  Synthetic oligonucleotide
gcatccagcggggtttagccgatagaaaac

SEQ ID NO: 55663 - DNA, 30 bp, Artificial Sequence
  Synthetic oligonucleotide
taagcgagcgctgaccattcacgctaaaac

SEQ ID NO: 55664 - DNA, 30 bp, Artificial Sequence
  Synthetic oligonucleotide
cgaccacaatgggcacgccatcgaacaaac

SEQ ID NO: 55665 - DNA, 30 bp, Artificial Sequence
  Synthetic oligonucleotide
gacagaacaaacgatctaagtagcacaaac

SEQ ID NO: 55666 - DNA, 30 bp, Artificial Sequence
  Synthetic oligonucleotide
aggccaagcgacgcgaatatgcacgcaaac

SEQ ID NO: 55667 - DNA, 30 bp, Artificial Sequence
  Synthetic oligonucleotide
gcaccataagaggtaatgtaagtcgcaaac

SEQ ID NO: 55668 - DNA, 30 bp, Artificial Sequence
  Synthetic oligonucleotide
atcagttggggaaagtgcgaggtcgcaaac

SEQ ID NO: 55669 - DNA, 30 bp, Artificial Sequence
  Synthetic oligonucleotide
gcagagagcgtcttctggtgtggggcaaac

SEQ ID NO: 55670 - DNA, 30 bp, Artificial Sequence
  Synthetic oligonucleotide
atcaggagctactcgccactaagaagaaac

SEQ ID NO: 55671 - DNA, 30 bp, Artificial Sequence
  Synthetic oligonucleotide
atgatgctatacgagtagcattaacgaaac

SEQ ID NO: 55672 - DNA, 30 bp, Artificial Sequence
  Synthetic oligonucleotide
accgagactacgggctttcacgggggaaac

SEQ ID NO: 55673 - DNA, 31 bp, Artificial Sequence
  Synthetic oligonucleotide
agcgagttgaaggatgaacgtcggcgtaaac

SEQ ID NO: 55674 - DNA, 30 bp, Artificial Sequence
  Synthetic oligonucleotide
taaggggcggacgccaactgtggcgtaaac

SEQ ID NO: 55675 - DNA, 30 bp, Artificial Sequence
  Synthetic oligonucleotide
tctgcggaagctaataagagtagtgtaaac

SEQ ID NO: 55676 - DNA, 30 bp, Artificial Sequence
  Synthetic oligonucleotide
acgctaggtagtccgaggcgtcagaacaac

SEQ ID NO: 55677 - DNA, 30 bp, Artificial Sequence
  Synthetic oligonucleotide
cgaaaacggctcggggtaagtagcgacaac

SEQ ID NO: 55678 - DNA, 30 bp, Artificial Sequence
  Synthetic oligonucleotide
gggcgtcacaaatttctcaacaaatacaac

SEQ ID NO: 55679 - DNA, 30 bp, Artificial Sequence
  Synthetic oligonucleotide
gtggcaacaaagattgaccttaggtacaac

SEQ ID NO: 55680 - DNA, 30 bp, Artificial Sequence
  Synthetic oligonucleotide
tcttcaggaatgttaaagtagtaagccaac

SEQ ID NO: 55681 - DNA, 31 bp, Artificial Sequence
  Synthetic oligonucleotide
taggagagcccagtgtccacaaaagcgcaac

SEQ ID NO: 55682 - DNA, 30 bp, Artificial Sequence
  Synthetic oligonucleotide
gacgggaaataggtgggcgtgagtcgcaac

SEQ ID NO: 55683 - DNA, 30 bp, Artificial Sequence
  Synthetic oligonucleotide
agtagataagtctaccgatcggccggcaac

SEQ ID NO: 55684 - DNA, 30 bp, Artificial Sequence
  Synthetic oligonucleotide
cgtagtaagatcggagaaaaaaatatcaac

SEQ ID NO: 55685 - DNA, 30 bp, Artificial Sequence
  Synthetic oligonucleotide
cgtgcaccgcatgaacttactactatcaac

SEQ ID NO: 55686 - DNA, 30 bp, Artificial Sequence
  Synthetic oligonucleotide
agtacatgtacgggggcactgggccagaac

SEQ ID NO: 55687 - DNA, 30 bp, Artificial Sequence
  Synthetic oligonucleotide
taatggctaaccagcaacaacgtatagaac

SEQ ID NO: 55688 - DNA, 30 bp, Artificial Sequence
  Synthetic oligonucleotide
aagacatgagggattgcggtttaaccgaac

SEQ ID NO: 55689 - DNA, 30 bp, Artificial Sequence
  Synthetic oligonucleotide
caatcgtaagcgcacacattgcgaccgaac

SEQ ID NO: 55690 - DNA, 30 bp, Artificial Sequence
  Synthetic oligonucleotide
aggggataggatcgggacaatccgccgaac

SEQ ID NO: 55691 - DNA, 30 bp, Artificial Sequence
  Synthetic oligonucleotide
ccgaataacggtacttgagtctggccgaac

SEQ ID NO: 55692 - DNA, 30 bp, Artificial Sequence
  Synthetic oligonucleotide
ctacgtatacgagaagtacctacagcgaac

SEQ ID NO: 55693 - DNA, 30 bp, Artificial Sequence
  Synthetic oligonucleotide
gcgatattactggttggagatggcgcgaac

SEQ ID NO: 55694 - DNA, 30 bp, Artificial Sequence
  Synthetic oligonucleotide
gacatctgatttgtaagaaacgagaggaac

SEQ ID NO: 55695 - DNA, 30 bp, Artificial Sequence
  Synthetic oligonucleotide
cgtgcctccctttacgaggaccataggaac

SEQ ID NO: 55696 - DNA, 30 bp, Artificial Sequence
  Synthetic oligonucleotide
agctggtgaaaagacctacggactaggaac

SEQ ID NO: 55697 - DNA, 30 bp, Artificial Sequence
  Synthetic oligonucleotide
agacagaattcgtgatgacctacagggaac

SEQ ID NO: 55698 - DNA, 30 bp, Artificial Sequence
  Synthetic oligonucleotide
caaggtgtgggaactctatatattgggaac

SEQ ID NO: 55699 - DNA, 30 bp, Artificial Sequence
  Synthetic oligonucleotide
ggctgattgcgctcaggctcgtgatggaac

SEQ ID NO: 55700 - DNA, 30 bp, Artificial Sequence
  Synthetic oligonucleotide
ggcccccagtaaagtttaaccaggtggaac

SEQ ID NO: 55701 - DNA, 30 bp, Artificial Sequence
  Synthetic oligonucleotide
atcaagggaatggaaatccgagtgatgaac

SEQ ID NO: 55702 - DNA, 30 bp, Artificial Sequence
  Synthetic oligonucleotide
taaggaggtctacaccaaatggagctgaac

SEQ ID NO: 55703 - DNA, 30 bp, Artificial Sequence
  Synthetic oligonucleotide
aaagactcatccggctatcatcaagtgaac

SEQ ID NO: 55704 - DNA, 30 bp, Artificial Sequence
  Synthetic oligonucleotide
ccttcgagaccggccaacaccaaggtgaac

SEQ ID NO: 55705 - DNA, 30 bp, Artificial Sequence
  Synthetic oligonucleotide
ccagatttgcgaacgtgacataagttgaac

SEQ ID NO: 55706 - DNA, 30 bp, Artificial Sequence
  Synthetic oligonucleotide
atatggcggttacgtcgcccagagttgaac

SEQ ID NO: 55707 - DNA, 30 bp, Artificial Sequence
  Synthetic oligonucleotide
aaccagtaccaaaagtgtcaggagaataac

SEQ ID NO: 55708 - DNA, 30 bp, Artificial Sequence
  Synthetic oligonucleotide
ctagacgccaaaactaagccgattaataac

SEQ ID NO: 55709 - DNA, 30 bp, Artificial Sequence
  Synthetic oligonucleotide
ggatggagttaatagaatctagaacataac

SEQ ID NO: 55710 - DNA, 30 bp, Artificial Sequence
  Synthetic oligonucleotide
agagggtctacacgccccggataagataac

SEQ ID NO: 55711 - DNA, 30 bp, Artificial Sequence
  Synthetic oligonucleotide
agcgggcgggatgtctcattccattataac

SEQ ID NO: 55712 - DNA, 30 bp, Artificial Sequence
  Synthetic oligonucleotide
acgggggtacaactgagatggtttactaac

SEQ ID NO: 55713 - DNA, 30 bp, Artificial Sequence
  Synthetic oligonucleotide
cggtacgatgcgagatgtcgtcgccctaac

SEQ ID NO: 55714 - DNA, 30 bp, Artificial Sequence
  Synthetic oligonucleotide
ggctcctagagggatcatgtgcaagctaac

SEQ ID NO: 55715 - DNA, 30 bp, Artificial Sequence
  Synthetic oligonucleotide
agccagagccaagtaagttgcttgagtaac

SEQ ID NO: 55716 - DNA, 30 bp, Artificial Sequence
  Synthetic oligonucleotide
taacagaatcggaattcccaaatgcgtaac

SEQ ID NO: 55717 - DNA, 30 bp, Artificial Sequence
  Synthetic oligonucleotide
tctcctaaatcagtgcataggggtcgtaac

SEQ ID NO: 55718 - DNA, 30 bp, Artificial Sequence
  Synthetic oligonucleotide
cgtagtggatacagtttgaggcgaggtaac

SEQ ID NO: 55719 - DNA, 30 bp, Artificial Sequence
  Synthetic oligonucleotide
aagcagaaggtgaggagtaacccttgtaac

SEQ ID NO: 55720 - DNA, 30 bp, Artificial Sequence
  Synthetic oligonucleotide
gcggtctaaaggagcttgaggcgttgtaac

SEQ ID NO: 55721 - DNA, 30 bp, Artificial Sequence
  Synthetic oligonucleotide
caggggaatgacaccaaagtgagcattaac

SEQ ID NO: 55722 - DNA, 30 bp, Artificial Sequence
  Synthetic oligonucleotide
ccactaccccgaatccacaaatcaaaacac

SEQ ID NO: 55723 - DNA, 30 bp, Artificial Sequence
  Synthetic oligonucleotide
acgggaccataatgatcttcagtaaaacac

SEQ ID NO: 55724 - DNA, 30 bp, Artificial Sequence
  Synthetic oligonucleotide
ccttgtagaccgaggctcgcgatgcaacac

SEQ ID NO: 55725 - DNA, 30 bp, Artificial Sequence
  Synthetic oligonucleotide
ctgacgagatggctattgctagagtaacac

SEQ ID NO: 55726 - DNA, 30 bp, Artificial Sequence
  Synthetic oligonucleotide
tagcgggtaagtaattaatacatttaacac

SEQ ID NO: 55727 - DNA, 30 bp, Artificial Sequence
  Synthetic oligonucleotide
cgttatacctagcgggatctacgaccacac

SEQ ID NO: 55728 - DNA, 30 bp, Artificial Sequence
  Synthetic oligonucleotide
gttgaagaaaattaagaaaacaggccacac

SEQ ID NO: 55729 - DNA, 30 bp, Artificial Sequence
  Synthetic oligonucleotide
tgtgagataagagaggagataaccgcacac

SEQ ID NO: 55730 - DNA, 30 bp, Artificial Sequence
  Synthetic oligonucleotide
tacatgatccttacatatccaggtgcacac

SEQ ID NO: 55731 - DNA, 31 bp, Artificial Sequence
  Synthetic oligonucleotide
gaggttggaagtaacacgcccaacgtcacac

SEQ ID NO: 55732 - DNA, 30 bp, Artificial Sequence
  Synthetic oligonucleotide
acgaccagtcatgcaagatgcccacgacac

SEQ ID NO: 55733 - DNA, 30 bp, Artificial Sequence
  Synthetic oligonucleotide
gtaagcgcttcagtaaggaggtaaggacac

SEQ ID NO: 55734 - DNA, 30 bp, Artificial Sequence
  Synthetic oligonucleotide
catggcgactcggctacactgggaggacac

SEQ ID NO: 55735 - DNA, 30 bp, Artificial Sequence
  Synthetic oligonucleotide
aagggcatacacaggccgaattgactacac

SEQ ID NO: 55736 - DNA, 30 bp, Artificial Sequence
  Synthetic oligonucleotide
gggatagcgacctcctgcagaactgaccac

SEQ ID NO: 55737 - DNA, 30 bp, Artificial Sequence
  Synthetic oligonucleotide
ccgtaggtcgacagcacggtaaagccccac

SEQ ID NO: 55738 - DNA, 30 bp, Artificial Sequence
  Synthetic oligonucleotide
ggagcaaccagcaacattaagtcaagccac

SEQ ID NO: 55739 - DNA, 30 bp, Artificial Sequence
  Synthetic oligonucleotide
actatactgtccactaaaaccatcagccac

SEQ ID NO: 55740 - DNA, 30 bp, Artificial Sequence
  Synthetic oligonucleotide
agcaaggataccgaagctcgttccatccac

SEQ ID NO: 55741 - DNA, 30 bp, Artificial Sequence
  Synthetic oligonucleotide
gcgagcgaaatgatcggcctacgtatccac

SEQ ID NO: 55742 - DNA, 30 bp, Artificial Sequence
  Synthetic oligonucleotide
cttgtactaagcaacgattgtgggaagcac

SEQ ID NO: 55743 - DNA, 30 bp, Artificial Sequence
  Synthetic oligonucleotide
aaaaaggtcaccctgaacatcccacagcac

SEQ ID NO: 55744 - DNA, 30 bp, Artificial Sequence
  Synthetic oligonucleotide
tgtaagattcccgtccgatcgagagagcac

SEQ ID NO: 55745 - DNA, 31 bp, Artificial Sequence
  Synthetic oligonucleotide
tggggatgatagagcggtatccattgagcac

SEQ ID NO: 55746 - DNA, 30 bp, Artificial Sequence
  Synthetic oligonucleotide
cctacaacgatggtcggagacaaaccgcac

SEQ ID NO: 55747 - DNA, 30 bp, Artificial Sequence
  Synthetic oligonucleotide
cgcgagactagcggtttgttggaaaggcac

SEQ ID NO: 55748 - DNA, 30 bp, Artificial Sequence
  Synthetic oligonucleotide
agagagatacaaagtggtatacagaggcac

SEQ ID NO: 55749 - DNA, 30 bp, Artificial Sequence
  Synthetic oligonucleotide
agaaggctatcaccaaaaaatggtaggcac

SEQ ID NO: 55750 - DNA, 30 bp, Artificial Sequence
  Synthetic oligonucleotide
gtgaagtcaaggcatttggtgatacggcac

SEQ ID NO: 55751 - DNA, 30 bp, Artificial Sequence
  Synthetic oligonucleotide
acaggacgaccaatgtggcgagaagggcac

SEQ ID NO: 55752 - DNA, 30 bp, Artificial Sequence
  Synthetic oligonucleotide
aacgatacacaggcatagaagtcttggcac

SEQ ID NO: 55753 - DNA, 30 bp, Artificial Sequence
  Synthetic oligonucleotide
ttgggcatagtaactcgaacaaaaatgcac

SEQ ID NO: 55754 - DNA, 29 bp, Artificial Sequence
  Synthetic oligonucleotide
tcggaactaagggtggcagaagccatcac

SEQ ID NO: 55755 - DNA, 30 bp, Artificial Sequence
  Synthetic oligonucleotide
cgtacgacggattagggtggcatagatcac

SEQ ID NO: 55756 - DNA, 30 bp, Artificial Sequence
  Synthetic oligonucleotide
tcgttgggagacggtctacgtaagactcac

SEQ ID NO: 55757 - DNA, 30 bp, Artificial Sequence
  Synthetic oligonucleotide
ttcggccggggcataagtatcaggactcac

SEQ ID NO: 55758 - DNA, 30 bp, Artificial Sequence
  Synthetic oligonucleotide
tcggtcatccaggtagtacagataagtcac

SEQ ID NO: 55759 - DNA, 30 bp, Artificial Sequence
  Synthetic oligonucleotide
ggaaggtcctgcgatgaattaatacgtcac

SEQ ID NO: 55760 - DNA, 30 bp, Artificial Sequence
  Synthetic oligonucleotide
tttacgggcccggggcaacttgcgcgtcac

SEQ ID NO: 55761 - DNA, 30 bp, Artificial Sequence
  Synthetic oligonucleotide
ctcaggttagaacagacaatcaagtgtcac

SEQ ID NO: 55762 - DNA, 30 bp, Artificial Sequence
  Synthetic oligonucleotide
aggcgctagaacacgtattcaactattcac

SEQ ID NO: 55763 - DNA, 30 bp, Artificial Sequence
  Synthetic oligonucleotide
acgccaaggtcgatgggcccaggatttcac

SEQ ID NO: 55764 - DNA, 30 bp, Artificial Sequence
  Synthetic oligonucleotide
ctagggtgaaatccgttgtcctcaaaagac

SEQ ID NO: 55765 - DNA, 30 bp, Artificial Sequence
  Synthetic oligonucleotide
agaaaggcaaaagtagtggttgcgaaagac

SEQ ID NO: 55766 - DNA, 30 bp, Artificial Sequence
  Synthetic oligonucleotide
agtaagggagtcagcacatgacagcaagac

SEQ ID NO: 55767 - DNA, 30 bp, Artificial Sequence
  Synthetic oligonucleotide
ttaaggcagtgaaccatagggactcaagac

SEQ ID NO: 55768 - DNA, 30 bp, Artificial Sequence
  Synthetic oligonucleotide
gggagaaaaactggcgcatactctgaagac

SEQ ID NO: 55769 - DNA, 30 bp, Artificial Sequence
  Synthetic oligonucleotide
cgactcatgaaaagcgtcaatattacagac

SEQ ID NO: 55770 - DNA, 30 bp, Artificial Sequence
  Synthetic oligonucleotide
agaaacgccggaattaagagagtggcagac

SEQ ID NO: 55771 - DNA, 30 bp, Artificial Sequence
  Synthetic oligonucleotide
actgagatgctcagaatctaacatgcagac

SEQ ID NO: 55772 - DNA, 30 bp, Artificial Sequence
  Synthetic oligonucleotide
ggaggccagccaagataagcttaatcagac

SEQ ID NO: 55773 - DNA, 30 bp, Artificial Sequence
  Synthetic oligonucleotide
agatgatcgggtgtcaacgcaaactcagac

SEQ ID NO: 55774 - DNA, 30 bp, Artificial Sequence
  Synthetic oligonucleotide
tctaacagggaccatccgcaaatctcagac

SEQ ID NO: 55775 - DNA, 30 bp, Artificial Sequence
  Synthetic oligonucleotide
atcgcaaaatgccaatgccctgacagagac

SEQ ID NO: 55776 - DNA, 30 bp, Artificial Sequence
  Synthetic oligonucleotide
acggcgggttaattcacagcatagggagac

SEQ ID NO: 55777 - DNA, 30 bp, Artificial Sequence
  Synthetic oligonucleotide
cagataggaccggtttcagctacctgagac

SEQ ID NO: 55778 - DNA, 30 bp, Artificial Sequence
  Synthetic oligonucleotide
ggaaaaccagcaggcaacagtagttgagac

SEQ ID NO: 55779 - DNA, 30 bp, Artificial Sequence
  Synthetic oligonucleotide
cgtaacccatagaagactcaacacatagac

SEQ ID NO: 55780 - DNA, 30 bp, Artificial Sequence
  Synthetic oligonucleotide
gcgccaaacaaccactctatgttcatagac

SEQ ID NO: 55781 - DNA, 30 bp, Artificial Sequence
  Synthetic oligonucleotide
caaacgtacacgaccctccggtgaaacgac

SEQ ID NO: 55782 - DNA, 30 bp, Artificial Sequence
  Synthetic oligonucleotide
caatgacccatggtcaaggccccagacgac

SEQ ID NO: 55783 - DNA, 30 bp, Artificial Sequence
  Synthetic oligonucleotide
taaggttcagcgtgctggactaacgacgac

SEQ ID NO: 55784 - DNA, 30 bp, Artificial Sequence
  Synthetic oligonucleotide
ggctcaatcgtggtaaacatattgtacgac

SEQ ID NO: 55785 - DNA, 30 bp, Artificial Sequence
  Synthetic oligonucleotide
cacctgctgccaggataggtcggaaccgac

SEQ ID NO: 55786 - DNA, 30 bp, Artificial Sequence
  Synthetic oligonucleotide
ggggtgccgatacgaatgaaaagtagcgac

SEQ ID NO: 55787 - DNA, 31 bp, Artificial Sequence
  Synthetic oligonucleotide
aaaccgacggatggattaacccagcatcgac

SEQ ID NO: 55788 - DNA, 30 bp, Artificial Sequence
  Synthetic oligonucleotide
gcttcgatgagggaacaacggaggatcgac

SEQ ID NO: 55789 - DNA, 30 bp, Artificial Sequence
  Synthetic oligonucleotide
tactaagcgctgtcaaatcacacgctcgac

SEQ ID NO: 55790 - DNA, 30 bp, Artificial Sequence
  Synthetic oligonucleotide
aacgcttgagagaggtgacgtggggtcgac

SEQ ID NO: 55791 - DNA, 30 bp, Artificial Sequence
  Synthetic oligonucleotide
tacgaagatggaggatacataatgttcgac

SEQ ID NO: 55792 - DNA, 30 bp, Artificial Sequence
  Synthetic oligonucleotide
atgcggagaccaagagccggctaaaaggac

SEQ ID NO: 55793 - DNA, 30 bp, Artificial Sequence
  Synthetic oligonucleotide
cacgaacagtatctaataaggatcaaggac

SEQ ID NO: 55794 - DNA, 30 bp, Artificial Sequence
  Synthetic oligonucleotide
agagagcaagaatatggagtcatgaaggac

SEQ ID NO: 55795 - DNA, 30 bp, Artificial Sequence
  Synthetic oligonucleotide
atacaacaggtcggtattccacggcaggac

SEQ ID NO: 55796 - DNA, 30 bp, Artificial Sequence
  Synthetic oligonucleotide
ttacatggaatcactcttagagaggaggac

SEQ ID NO: 55797 - DNA, 30 bp, Artificial Sequence
  Synthetic oligonucleotide
cgaaactcaagcggaacagggacataggac

SEQ ID NO: 55798 - DNA, 30 bp, Artificial Sequence
  Synthetic oligonucleotide
catcgagaatatgaataagcatcttaggac

SEQ ID NO: 55799 - DNA, 30 bp, Artificial Sequence
  Synthetic oligonucleotide
gcctgcaaacgctaatcgaaatacccggac

SEQ ID NO: 55800 - DNA, 30 bp, Artificial Sequence
  Synthetic oligonucleotide
cgtagtcggtacaggaacttctcgccggac

SEQ ID NO: 55801 - DNA, 30 bp, Artificial Sequence
  Synthetic oligonucleotide
tacggtaagctgtgggtctaaaggccggac

SEQ ID NO: 55802 - DNA, 30 bp, Artificial Sequence
  Synthetic oligonucleotide
aggcgtcagcataatatcaaaagttcggac

SEQ ID NO: 55803 - DNA, 30 bp, Artificial Sequence
  Synthetic oligonucleotide
gttagcttaccacaaagtactaagagggac

SEQ ID NO: 55804 - DNA, 30 bp, Artificial Sequence
  Synthetic oligonucleotide
tttggagcgttgccgtaacacaggagggac

SEQ ID NO: 55805 - DNA, 30 bp, Artificial Sequence
  Synthetic oligonucleotide
agcatgagcaagggggataagggaggggac

SEQ ID NO: 55806 - DNA, 30 bp, Artificial Sequence
  Synthetic oligonucleotide
cttgtgcggagatgattaggaccatgggac

SEQ ID NO: 55807 - DNA, 30 bp, Artificial Sequence
  Synthetic oligonucleotide
acctatagccaacaaggcatcgcatgggac

SEQ ID NO: 55808 - DNA, 30 bp, Artificial Sequence
  Synthetic oligonucleotide
gtgctaagtagggattgacattaaatggac

SEQ ID NO: 55809 - DNA, 30 bp, Artificial Sequence
  Synthetic oligonucleotide
ggccgtacgccggatatagaaaagatggac

SEQ ID NO: 55810 - DNA, 30 bp, Artificial Sequence
  Synthetic oligonucleotide
cattatttgaacaaaggtgatcagatggac

SEQ ID NO: 55811 - DNA, 30 bp, Artificial Sequence
  Synthetic oligonucleotide
tggggctaaaaaatttcgcagtcgatggac

SEQ ID NO: 55812 - DNA, 31 bp, Artificial Sequence
  Synthetic oligonucleotide
agaattatagcaagccaacatcgaactggac

SEQ ID NO: 55813 - DNA, 30 bp, Artificial Sequence
  Synthetic oligonucleotide
gcgtgtgcttcaacatcactacagaatgac

SEQ ID NO: 55814 - DNA, 30 bp, Artificial Sequence
  Synthetic oligonucleotide
ggagacttagaaaagtcccagcattatgac

SEQ ID NO: 55815 - DNA, 30 bp, Artificial Sequence
  Synthetic oligonucleotide
gcttgataaaagtcgggacagggaactgac

SEQ ID NO: 55816 - DNA, 30 bp, Artificial Sequence
  Synthetic oligonucleotide
ggacttatagcattaaaagggacgactgac

SEQ ID NO: 55817 - DNA, 30 bp, Artificial Sequence
  Synthetic oligonucleotide
ccttgtaagtaagaagaacttagttctgac

SEQ ID NO: 55818 - DNA, 30 bp, Artificial Sequence
  Synthetic oligonucleotide
tgatacccaaacgcttgatcgtacagtgac

SEQ ID NO: 55819 - DNA, 30 bp, Artificial Sequence
  Synthetic oligonucleotide
ttgaagaaatagccgtatgtgcaacgtgac

SEQ ID NO: 55820 - DNA, 30 bp, Artificial Sequence
  Synthetic oligonucleotide
atcatgagcaatcgagtaaggatacgtgac

SEQ ID NO: 55821 - DNA, 30 bp, Artificial Sequence
  Synthetic oligonucleotide
agaagagggttggaccgggacgatcgtgac

SEQ ID NO: 55822 - DNA, 30 bp, Artificial Sequence
  Synthetic oligonucleotide
aagtgcgttcagggagttcgtagaggtgac

SEQ ID NO: 55823 - DNA, 30 bp, Artificial Sequence
  Synthetic oligonucleotide
ggaaccagctcaaatggggagcacggtgac

SEQ ID NO: 55824 - DNA, 30 bp, Artificial Sequence
  Synthetic oligonucleotide
cgcactaagccaagtggagacggcggtgac

SEQ ID NO: 55825 - DNA, 30 bp, Artificial Sequence
  Synthetic oligonucleotide
gggaaacacgcctgatcgatgcgtggtgac

SEQ ID NO: 55826 - DNA, 30 bp, Artificial Sequence
  Synthetic oligonucleotide
gtcgggcatacacttaccatcgaatgtgac

SEQ ID NO: 55827 - DNA, 31 bp, Artificial Sequence
  Synthetic oligonucleotide
ggattgagagtttgaatcctggcagtgtgac

SEQ ID NO: 55828 - DNA, 30 bp, Artificial Sequence
  Synthetic oligonucleotide
agtggtcgcgacatcacttgcctgaaatac

SEQ ID NO: 55829 - DNA, 30 bp, Artificial Sequence
  Synthetic oligonucleotide
tacgagcgtgggcacaggccacttcaatac

SEQ ID NO: 55830 - DNA, 30 bp, Artificial Sequence
  Synthetic oligonucleotide
tgggaggtagataacattagcactgaatac

SEQ ID NO: 55831 - DNA, 30 bp, Artificial Sequence
  Synthetic oligonucleotide
gtgatgcataacaggaaaggggctgaatac

SEQ ID NO: 55832 - DNA, 30 bp, Artificial Sequence
  Synthetic oligonucleotide
cggtcgatgaggtatttccgagacacatac

SEQ ID NO: 55833 - DNA, 30 bp, Artificial Sequence
  Synthetic oligonucleotide
attgcgcagtcgaactcaacacactcatac

SEQ ID NO: 55834 - DNA, 30 bp, Artificial Sequence
  Synthetic oligonucleotide
aggcatccatcggagagcttatcctcatac

SEQ ID NO: 55835 - DNA, 30 bp, Artificial Sequence
  Synthetic oligonucleotide
actgaggagacaggctactaggctagatac

SEQ ID NO: 55836 - DNA, 30 bp, Artificial Sequence
  Synthetic oligonucleotide
cattaggacagtcggaactcaccacgatac

SEQ ID NO: 55837 - DNA, 30 bp, Artificial Sequence
  Synthetic oligonucleotide
gggaggcgagcaagtgggaatgccggatac

SEQ ID NO: 55838 - DNA, 30 bp, Artificial Sequence
  Synthetic oligonucleotide
ctcgaaaggaccataaatactaggggatac

SEQ ID NO: 55839 - DNA, 30 bp, Artificial Sequence
  Synthetic oligonucleotide
gaaacacatggagggtcgattactggatac

SEQ ID NO: 55840 - DNA, 30 bp, Artificial Sequence
  Synthetic oligonucleotide
cagagctaagagcaaggaaggttgtgatac

SEQ ID NO: 55841 - DNA, 30 bp, Artificial Sequence
  Synthetic oligonucleotide
tcgctgattgagtgaatgcggagaatatac

SEQ ID NO: 55842 - DNA, 30 bp, Artificial Sequence
  Synthetic oligonucleotide
taaaggatatcgaactatggcaagctatac

SEQ ID NO: 55843 - DNA, 30 bp, Artificial Sequence
  Synthetic oligonucleotide
gcaacgctggcgcatcttaaagacgtatac

SEQ ID NO: 55844 - DNA, 30 bp, Artificial Sequence
  Synthetic oligonucleotide
acactagacgcgacgaggctctccgtatac

SEQ ID NO: 55845 - DNA, 30 bp, Artificial Sequence
  Synthetic oligonucleotide
ggatagcgtcagagtcaatcgggtgtatac

SEQ ID NO: 55846 - DNA, 30 bp, Artificial Sequence
  Synthetic oligonucleotide
aggcttggttacggacgaacatctaactac

SEQ ID NO: 55847 - DNA, 30 bp, Artificial Sequence
  Synthetic oligonucleotide
gagacaactctcttcaggctatcagactac

SEQ ID NO: 55848 - DNA, 30 bp, Artificial Sequence
  Synthetic oligonucleotide
ccacagaaatgggggcaaagtagggactac

SEQ ID NO: 55849 - DNA, 30 bp, Artificial Sequence
  Synthetic oligonucleotide
aggaccggtcataaaacagagcattactac

SEQ ID NO: 55850 - DNA, 30 bp, Artificial Sequence
  Synthetic oligonucleotide
atgggacaccagacaatctggaaggcctac

SEQ ID NO: 55851 - DNA, 30 bp, Artificial Sequence
  Synthetic oligonucleotide
tggaggcaaaaggaagaggcgcaaggctac

SEQ ID NO: 55852 - DNA, 30 bp, Artificial Sequence
  Synthetic oligonucleotide
catggttgttcgtggggataagcatgctac

SEQ ID NO: 55853 - DNA, 30 bp, Artificial Sequence
  Synthetic oligonucleotide
agggcaagtttgagtagtaccgtatgctac

SEQ ID NO: 55854 - DNA, 30 bp, Artificial Sequence
  Synthetic oligonucleotide
agaaagccaaaataagaaaagccgttctac

SEQ ID NO: 55855 - DNA, 30 bp, Artificial Sequence
  Synthetic oligonucleotide
caacagcgaccgaggttgacccgaaagtac

SEQ ID NO: 55856 - DNA, 30 bp, Artificial Sequence
  Synthetic oligonucleotide
aggcaatttaggacccgaaattgatagtac

SEQ ID NO: 55857 - DNA, 30 bp, Artificial Sequence
  Synthetic oligonucleotide
atgagcatgcggttggtcactctttagtac

SEQ ID NO: 55858 - DNA, 30 bp, Artificial Sequence
  Synthetic oligonucleotide
tagtaaacatgcataataaatccgcggtac

SEQ ID NO: 55859 - DNA, 30 bp, Artificial Sequence
  Synthetic oligonucleotide
ggagatgtagattaactggcaattgggtac

SEQ ID NO: 55860 - DNA, 30 bp, Artificial Sequence
  Synthetic oligonucleotide
ataagggcaaaggtaagaatctacctgtac

SEQ ID NO: 55861 - DNA, 30 bp, Artificial Sequence
  Synthetic oligonucleotide
tgaactgaacattaaaagaaacacacttac

SEQ ID NO: 55862 - DNA, 30 bp, Artificial Sequence
  Synthetic oligonucleotide
taattcgtgaacagggtgggggttgcttac

SEQ ID NO: 55863 - DNA, 30 bp, Artificial Sequence
  Synthetic oligonucleotide
cggcttataagtaaagtagctaggagttac

SEQ ID NO: 55864 - DNA, 31 bp, Artificial Sequence
  Synthetic oligonucleotide
agtgaactggaagcattgaagctctagttac

SEQ ID NO: 55865 - DNA, 30 bp, Artificial Sequence
  Synthetic oligonucleotide
gtgaggtgacaaccgttagtgtgacgttac

SEQ ID NO: 55866 - DNA, 30 bp, Artificial Sequence
  Synthetic oligonucleotide
ttaagggaagaactgtaatgctctcaaacc

SEQ ID NO: 55867 - DNA, 30 bp, Artificial Sequence
  Synthetic oligonucleotide
cacgcgttatgcgagcaacaacagtaaacc

SEQ ID NO: 55868 - DNA, 30 bp, Artificial Sequence
  Synthetic oligonucleotide
gacgtcatcgggtcggcgctaataagaacc

SEQ ID NO: 55869 - DNA, 30 bp, Artificial Sequence
  Synthetic oligonucleotide
cgtccactcctagagttcaacaacagaacc

SEQ ID NO: 55870 - DNA, 30 bp, Artificial Sequence
  Synthetic oligonucleotide
agtgcattgatgtgtaaacggggacgaacc

SEQ ID NO: 55871 - DNA, 30 bp, Artificial Sequence
  Synthetic oligonucleotide
cgtgagaccagtcaaattagaccaggaacc

SEQ ID NO: 55872 - DNA, 30 bp, Artificial Sequence
  Synthetic oligonucleotide
gccactaggtcgagggcgaaacggggaacc

SEQ ID NO: 55873 - DNA, 30 bp, Artificial Sequence
  Synthetic oligonucleotide
agctaaggccgagactttaaggtgggaacc

SEQ ID NO: 55874 - DNA, 30 bp, Artificial Sequence
  Synthetic oligonucleotide
ctcgccagatcatgcgtacaacctataacc

SEQ ID NO: 55875 - DNA, 30 bp, Artificial Sequence
  Synthetic oligonucleotide
ccacgaaatttgaacaatgtggtgctaacc

SEQ ID NO: 55876 - DNA, 30 bp, Artificial Sequence
  Synthetic oligonucleotide
tgctagcaatacctatgaaaatacgacacc

SEQ ID NO: 55877 - DNA, 30 bp, Artificial Sequence
  Synthetic oligonucleotide
agtaaagactgggtcaacgttcccgacacc

SEQ ID NO: 55878 - DNA, 30 bp, Artificial Sequence
  Synthetic oligonucleotide
cacgatatagatagggtttcataaaccacc

SEQ ID NO: 55879 - DNA, 30 bp, Artificial Sequence
  Synthetic oligonucleotide
agctaataataatacagtcaaggaagcacc

SEQ ID NO: 55880 - DNA, 30 bp, Artificial Sequence
  Synthetic oligonucleotide
gggaacatagacatcgcggaatggagcacc

SEQ ID NO: 55881 - DNA, 30 bp, Artificial Sequence
  Synthetic oligonucleotide
cctcaaatgaggcaaaaagcccgcggcacc

SEQ ID NO: 55882 - DNA, 30 bp, Artificial Sequence
  Synthetic oligonucleotide
aggggggattcacggaaacagccactcacc

SEQ ID NO: 55883 - DNA, 30 bp, Artificial Sequence
  Synthetic oligonucleotide
tggaaagggataaaggatctcgcgctcacc

SEQ ID NO: 55884 - DNA, 30 bp, Artificial Sequence
  Synthetic oligonucleotide
aaaaaggttgagtgatctgagccgaagacc

SEQ ID NO: 55885 - DNA, 30 bp, Artificial Sequence
  Synthetic oligonucleotide
tcaaaacacggtttaaagcaccctaagacc

SEQ ID NO: 55886 - DNA, 30 bp, Artificial Sequence
  Synthetic oligonucleotide
taggacaatatggcagccagataacagacc

SEQ ID NO: 55887 - DNA, 30 bp, Artificial Sequence
  Synthetic oligonucleotide
tcatgagtgcgcacggctttgaagcagacc

SEQ ID NO: 55888 - DNA, 30 bp, Artificial Sequence
  Synthetic oligonucleotide
cttaacccagggcaaatggctagtcagacc

SEQ ID NO: 55889 - DNA, 30 bp, Artificial Sequence
  Synthetic oligonucleotide
caggagagcgtgactaaagaaatttagacc

SEQ ID NO: 55890 - DNA, 30 bp, Artificial Sequence
  Synthetic oligonucleotide
gagaactattaaatagggcgtgtgacgacc

SEQ ID NO: 55891 - DNA, 30 bp, Artificial Sequence
  Synthetic oligonucleotide
tagtaggcactatcacagggcaacgcgacc

SEQ ID NO: 55892 - DNA, 30 bp, Artificial Sequence
  Synthetic oligonucleotide
tcactcgatttgcatgcttactgttcgacc

SEQ ID NO: 55893 - DNA, 30 bp, Artificial Sequence
  Synthetic oligonucleotide
tgatctatccgggccacatatatcaggacc

SEQ ID NO: 55894 - DNA, 30 bp, Artificial Sequence
  Synthetic oligonucleotide
aatcggggagagatcgcggtcgcgaggacc

SEQ ID NO: 55895 - DNA, 30 bp, Artificial Sequence
  Synthetic oligonucleotide
tgcacaactcggagaggccagtagcggacc

SEQ ID NO: 55896 - DNA, 30 bp, Artificial Sequence
  Synthetic oligonucleotide
agaatgtgagaggcgccggaaatagggacc

SEQ ID NO: 55897 - DNA, 30 bp, Artificial Sequence
  Synthetic oligonucleotide
aaatggaaagtataatggaagaatgggacc

SEQ ID NO: 55898 - DNA, 30 bp, Artificial Sequence
  Synthetic oligonucleotide
gcggcaagcgaaccgagacaaggctggacc

SEQ ID NO: 55899 - DNA, 30 bp, Artificial Sequence
  Synthetic oligonucleotide
tcgtgtaggttgggcacgaaatggttgacc

SEQ ID NO: 55900 - DNA, 30 bp, Artificial Sequence
  Synthetic oligonucleotide
acacgacccacagacacggttagtttgacc

SEQ ID NO: 55901 - DNA, 30 bp, Artificial Sequence
  Synthetic oligonucleotide
tcctgaacaatgggaacccacggacatacc

SEQ ID NO: 55902 - DNA, 30 bp, Artificial Sequence
  Synthetic oligonucleotide
gggattcaaaacaaacagtgctagcatacc

SEQ ID NO: 55903 - DNA, 30 bp, Artificial Sequence
  Synthetic oligonucleotide
aaacgaaaggaggacatatcagtccctacc

SEQ ID NO: 55904 - DNA, 30 bp, Artificial Sequence
  Synthetic oligonucleotide
tcgggggatgtatcaataacctgacgtacc

SEQ ID NO: 55905 - DNA, 30 bp, Artificial Sequence
  Synthetic oligonucleotide
aaacgaacgggcatcttgataggtggtacc

SEQ ID NO: 55906 - DNA, 30 bp, Artificial Sequence
  Synthetic oligonucleotide
gttcgacagagcgctacactggaacttacc

SEQ ID NO: 55907 - DNA, 30 bp, Artificial Sequence
  Synthetic oligonucleotide
cataattggaaaaagagtcgggagaaaccc

SEQ ID NO: 55908 - DNA, 30 bp, Artificial Sequence
  Synthetic oligonucleotide
ccatccttaatcttagagcatgtaacaccc

SEQ ID NO: 55909 - DNA, 30 bp, Artificial Sequence
  Synthetic oligonucleotide
tggagccggccaagaaagatagctacaccc

SEQ ID NO: 55910 - DNA, 30 bp, Artificial Sequence
  Synthetic oligonucleotide
aacaagtatagcgagagtcaaaatccaccc

SEQ ID NO: 55911 - DNA, 30 bp, Artificial Sequence
  Synthetic oligonucleotide
acagcaacggagaaaaatagtcctccaccc

SEQ ID NO: 55912 - DNA, 30 bp, Artificial Sequence
  Synthetic oligonucleotide
atgatcggtagtgagaacagtcaacgaccc

SEQ ID NO: 55913 - DNA, 30 bp, Artificial Sequence
  Synthetic oligonucleotide
ggagcgtacatcgacccgaagacacgaccc

SEQ ID NO: 55914 - DNA, 30 bp, Artificial Sequence
  Synthetic oligonucleotide
aagctagctagaccttcgttgatctgaccc

SEQ ID NO: 55915 - DNA, 30 bp, Artificial Sequence
  Synthetic oligonucleotide
cgggcgaatcttatacacaaagggtgaccc

SEQ ID NO: 55916 - DNA, 30 bp, Artificial Sequence
  Synthetic oligonucleotide
gcgcggtatgagagtgccacatcttgaccc

SEQ ID NO: 55917 - DNA, 30 bp, Artificial Sequence
  Synthetic oligonucleotide
catgccgagtcctaagtagagctaataccc

SEQ ID NO: 55918 - DNA, 30 bp, Artificial Sequence
  Synthetic oligonucleotide
taaagaatcataagaacatacagcgtaccc

SEQ ID NO: 55919 - DNA, 30 bp, Artificial Sequence
  Synthetic oligonucleotide
gatgtatccggaaacagagtcaggttaccc

SEQ ID NO: 55920 - DNA, 30 bp, Artificial Sequence
  Synthetic oligonucleotide
gtggctaggcgcggacactcatagcacccc

SEQ ID NO: 55921 - DNA, 30 bp, Artificial Sequence
  Synthetic oligonucleotide
tcacccaaaaaacaaccttactcagacccc

SEQ ID NO: 55922 - DNA, 30 bp, Artificial Sequence
  Synthetic oligonucleotide
cgagataactgtctaattgtcataaccccc

SEQ ID NO: 55923 - DNA, 30 bp, Artificial Sequence
  Synthetic oligonucleotide
cgccgaagtaccaacataaaaatcatcccc

SEQ ID NO: 55924 - DNA, 30 bp, Artificial Sequence
  Synthetic oligonucleotide
ggtgcgaaagttactgatcggggagtcccc

SEQ ID NO: 55925 - DNA, 30 bp, Artificial Sequence
  Synthetic oligonucleotide
ctgctacgacaaaacaaaaattcatggccc

SEQ ID NO: 55926 - DNA, 30 bp, Artificial Sequence
  Synthetic oligonucleotide
tacagagtgcacattgtgattggactgccc

SEQ ID NO: 55927 - DNA, 30 bp, Artificial Sequence
  Synthetic oligonucleotide
ggtgctattaacgatatcaaatcattgccc

SEQ ID NO: 55928 - DNA, 30 bp, Artificial Sequence
  Synthetic oligonucleotide
aggagggtatgtgtagcgtgcaagttgccc

SEQ ID NO: 55929 - DNA, 30 bp, Artificial Sequence
  Synthetic oligonucleotide
tcacataatggtagtctcaagaaagatccc

SEQ ID NO: 55930 - DNA, 30 bp, Artificial Sequence
  Synthetic oligonucleotide
caacattagcgactcccaatctgtgatccc

SEQ ID NO: 55931 - DNA, 30 bp, Artificial Sequence
  Synthetic oligonucleotide
aggtgagttaggagatacgttatctatccc

SEQ ID NO: 55932 - DNA, 30 bp, Artificial Sequence
  Synthetic oligonucleotide
ccattacgacaggctttcaacacagctccc

SEQ ID NO: 55933 - DNA, 30 bp, Artificial Sequence
  Synthetic oligonucleotide
gtgcaaatactgaatgtgcgtagccgtccc

SEQ ID NO: 55934 - DNA, 30 bp, Artificial Sequence
  Synthetic oligonucleotide
gtccagcccatcaagcacatccgtcgtccc

SEQ ID NO: 55935 - DNA, 30 bp, Artificial Sequence
  Synthetic oligonucleotide
acgtcgtcatgcttcaacaaggcgtgtccc

SEQ ID NO: 55936 - DNA, 30 bp, Artificial Sequence
  Synthetic oligonucleotide
tcgatcgggaaagatcgatttctacaagcc

SEQ ID NO: 55937 - DNA, 30 bp, Artificial Sequence
  Synthetic oligonucleotide
acgagttgtgttaagatccaaggttcagcc

SEQ ID NO: 55938 - DNA, 30 bp, Artificial Sequence
  Synthetic oligonucleotide
cgcccaaagtggagatgtatcgtttcagcc

SEQ ID NO: 55939 - DNA, 30 bp, Artificial Sequence
  Synthetic oligonucleotide
cctagtcaggagcagagatgacagagagcc

SEQ ID NO: 55940 - DNA, 30 bp, Artificial Sequence
  Synthetic oligonucleotide
tgcatcaaccctgacactatgcggagagcc

SEQ ID NO: 55941 - DNA, 30 bp, Artificial Sequence
  Synthetic oligonucleotide
ggccataagggcctagctctcatccgagcc

SEQ ID NO: 55942 - DNA, 30 bp, Artificial Sequence
  Synthetic oligonucleotide
gcttgattcgaagacatcctggtgcgagcc

SEQ ID NO: 55943 - DNA, 30 bp, Artificial Sequence
  Synthetic oligonucleotide
atgtgaagattgtgacctcatcctcgagcc

SEQ ID NO: 55944 - DNA, 30 bp, Artificial Sequence
  Synthetic oligonucleotide
ggaaactaggtctggactctgtgatgagcc

SEQ ID NO: 55945 - DNA, 30 bp, Artificial Sequence
  Synthetic oligonucleotide
gggtagctcgtccatgaacagggctgagcc

SEQ ID NO: 55946 - DNA, 30 bp, Artificial Sequence
  Synthetic oligonucleotide
tcttgttaaccgagaccagtaaggtgagcc

SEQ ID NO: 55947 - DNA, 30 bp, Artificial Sequence
  Synthetic oligonucleotide
tagtaatcgcaccaacggagccacatagcc

SEQ ID NO: 55948 - DNA, 30 bp, Artificial Sequence
  Synthetic oligonucleotide
gctggtacagtgtgaatgatggatttagcc

SEQ ID NO: 55949 - DNA, 30 bp, Artificial Sequence
  Synthetic oligonucleotide
caaagcacgcgaagttacacaggaaacgcc

SEQ ID NO: 55950 - DNA, 30 bp, Artificial Sequence
  Synthetic oligonucleotide
caattaccatggaagttgtgaccgcacgcc

SEQ ID NO: 55951 - DNA, 30 bp, Artificial Sequence
  Synthetic oligonucleotide
gcaagccgacaactagaaggagcgcacgcc

SEQ ID NO: 55952 - DNA, 30 bp, Artificial Sequence
  Synthetic oligonucleotide
ggaatgcagtccataagtcatcatcacgcc

SEQ ID NO: 55953 - DNA, 30 bp, Artificial Sequence
  Synthetic oligonucleotide
tgatccgagaatgcaattgcggagtacgcc

SEQ ID NO: 55954 - DNA, 30 bp, Artificial Sequence
  Synthetic oligonucleotide
taggagagcaaggggactgcggagcccgcc

SEQ ID NO: 55955 - DNA, 30 bp, Artificial Sequence
  Synthetic oligonucleotide
gcgagtcggcatggcacattgtgaagcgcc

SEQ ID NO: 55956 - DNA, 30 bp, Artificial Sequence
  Synthetic oligonucleotide
gaagatcgccatcatggcaaaagcagcgcc

SEQ ID NO: 55957 - DNA, 30 bp, Artificial Sequence
  Synthetic oligonucleotide
gctacggtaaaattctctaaatcgcgcgcc

SEQ ID NO: 55958 - DNA, 30 bp, Artificial Sequence
  Synthetic oligonucleotide
ccgtgtgagttccgtggcctagcgggcgcc

SEQ ID NO: 55959 - DNA, 30 bp, Artificial Sequence
  Synthetic oligonucleotide
actaaggcacgcaaagtgtcactctgcgcc

SEQ ID NO: 55960 - DNA, 30 bp, Artificial Sequence
  Synthetic oligonucleotide
cgcggatataacgtcgggcaatgcctcgcc

SEQ ID NO: 55961 - DNA, 30 bp, Artificial Sequence
  Synthetic oligonucleotide
aaagaagctcgccggattcgaaggctcgcc

SEQ ID NO: 55962 - DNA, 30 bp, Artificial Sequence
  Synthetic oligonucleotide
tctctagcacgaacgaacagacagcaggcc

SEQ ID NO: 55963 - DNA, 30 bp, Artificial Sequence
  Synthetic oligonucleotide
agcttaatcagacactgtaatgagcaggcc

SEQ ID NO: 55964 - DNA, 31 bp, Artificial Sequence
  Synthetic oligonucleotide
gggaacctgacccagcgttatagcagcggcc

SEQ ID NO: 55965 - DNA, 30 bp, Artificial Sequence
  Synthetic oligonucleotide
catactaatgacacttggagaaaatcggcc

SEQ ID NO: 55966 - DNA, 30 bp, Artificial Sequence
  Synthetic oligonucleotide
atcggagacaagggctccctgctgagggcc

SEQ ID NO: 55967 - DNA, 30 bp, Artificial Sequence
  Synthetic oligonucleotide
ttgagtcaagcgagacaaagtttccgggcc

SEQ ID NO: 55968 - DNA, 30 bp, Artificial Sequence
  Synthetic oligonucleotide
gatcgggatactatgcgaaacaggtgggcc

SEQ ID NO: 55969 - DNA, 30 bp, Artificial Sequence
  Synthetic oligonucleotide
cgtgggtgggatgcgaaagtctccgtggcc

SEQ ID NO: 55970 - DNA, 30 bp, Artificial Sequence
  Synthetic oligonucleotide
aacgacacgtcccatttggcaggtcatgcc

SEQ ID NO: 55971 - DNA, 30 bp, Artificial Sequence
  Synthetic oligonucleotide
atcgaaggttcacgatcgccatactgtgcc

SEQ ID NO: 55972 - DNA, 30 bp, Artificial Sequence
  Synthetic oligonucleotide
cggcaagtgaggggactaatacatcaatcc

SEQ ID NO: 55973 - DNA, 30 bp, Artificial Sequence
  Synthetic oligonucleotide
cggattaaagcgaagaggttcatcgaatcc

SEQ ID NO: 55974 - DNA, 30 bp, Artificial Sequence
  Synthetic oligonucleotide
attggaacgggcccggtgaagccaccatcc

SEQ ID NO: 55975 - DNA, 30 bp, Artificial Sequence
  Synthetic oligonucleotide
caacataggggcgcattcgacttagcatcc

SEQ ID NO: 55976 - DNA, 30 bp, Artificial Sequence
  Synthetic oligonucleotide
ggaacaaagggtcgcggaaaccagcgatcc

SEQ ID NO: 55977 - DNA, 30 bp, Artificial Sequence
  Synthetic oligonucleotide
agtcgtaggaacgaaaacatgcactgatcc

SEQ ID NO: 55978 - DNA, 30 bp, Artificial Sequence
  Synthetic oligonucleotide
tccagcaatggaccacaatacagctgatcc

SEQ ID NO: 55979 - DNA, 30 bp, Artificial Sequence
  Synthetic oligonucleotide
taccgggaagacctcagagacactaactcc

SEQ ID NO: 55980 - DNA, 30 bp, Artificial Sequence
  Synthetic oligonucleotide
gtgttggcacagatctccttgctcatctcc

SEQ ID NO: 55981 - DNA, 30 bp, Artificial Sequence
  Synthetic oligonucleotide
cactgaaatcagctattagaaccattctcc

SEQ ID NO: 55982 - DNA, 30 bp, Artificial Sequence
  Synthetic oligonucleotide
gggccccacgacagaaaccttaaaaagtcc

SEQ ID NO: 55983 - DNA, 30 bp, Artificial Sequence
  Synthetic oligonucleotide
ctttgagaactgcactatgaagaagagtcc

SEQ ID NO: 55984 - DNA, 30 bp, Artificial Sequence
  Synthetic oligonucleotide
caaaccagagaggaggactccaacgagtcc

SEQ ID NO: 55985 - DNA, 30 bp, Artificial Sequence
  Synthetic oligonucleotide
gtggcatggtgcacaattgtaaatgagtcc

SEQ ID NO: 55986 - DNA, 30 bp, Artificial Sequence
  Synthetic oligonucleotide
cgacgcctacaatactcggtcggaacgtcc

SEQ ID NO: 55987 - DNA, 30 bp, Artificial Sequence
  Synthetic oligonucleotide
cctaatgatgaagggcacagtttggcgtcc

SEQ ID NO: 55988 - DNA, 30 bp, Artificial Sequence
  Synthetic oligonucleotide
acaagccataagattcactaccgtgcgtcc

SEQ ID NO: 55989 - DNA, 30 bp, Artificial Sequence
  Synthetic oligonucleotide
tacatgaaagttcgcgtcatacaatcgtcc

SEQ ID NO: 55990 - DNA, 30 bp, Artificial Sequence
  Synthetic oligonucleotide
cctcaccggaaaacaccctagccgtcgtcc

SEQ ID NO: 55991 - DNA, 30 bp, Artificial Sequence
  Synthetic oligonucleotide
accgaagttgcatgtaacgagtaccggtcc

SEQ ID NO: 55992 - DNA, 30 bp, Artificial Sequence
  Synthetic oligonucleotide
aagcggagtggtagaggagctatagtgtcc

SEQ ID NO: 55993 - DNA, 30 bp, Artificial Sequence
  Synthetic oligonucleotide
tctcagagagaacgaagtggtctagtgtcc

SEQ ID NO: 55994 - DNA, 30 bp, Artificial Sequence
  Synthetic oligonucleotide
tcaatacgccaacaggcatgggccgtgtcc

SEQ ID NO: 55995 - DNA, 30 bp, Artificial Sequence
  Synthetic oligonucleotide
actagaaaaatattgggtcgcgtcgtgtcc

SEQ ID NO: 55996 - DNA, 30 bp, Artificial Sequence
  Synthetic oligonucleotide
cgataggatatcgtaactcacaggaattcc

SEQ ID NO: 55997 - DNA, 30 bp, Artificial Sequence
  Synthetic oligonucleotide
ggcacgaagatcaagcgtcgtagtccttcc

SEQ ID NO: 55998 - DNA, 30 bp, Artificial Sequence
  Synthetic oligonucleotide
accgcctggcaacgcaccttccagagttcc

SEQ ID NO: 55999 - DNA, 30 bp, Artificial Sequence
  Synthetic oligonucleotide
cagtggaagtaagtggggggcgacggttcc

SEQ ID NO: 56000 - DNA, 30 bp, Artificial Sequence
  Synthetic oligonucleotide
caacgggtataaggatcgattcggaaaagc

SEQ ID NO: 56001 - DNA, 30 bp, Artificial Sequence
  Synthetic oligonucleotide
gcgacactggtccaaatgcataataaaagc

SEQ ID NO: 56002 - DNA, 30 bp, Artificial Sequence
  Synthetic oligonucleotide
cggataccataaaccagtggattacaaagc

SEQ ID NO: 56003 - DNA, 30 bp, Artificial Sequence
  Synthetic oligonucleotide
tcgattacgaaactaagaaacgaccaaagc

SEQ ID NO: 56004 - DNA, 30 bp, Artificial Sequence
  Synthetic oligonucleotide
acgatgtgtacaatatctttaatccaaagc

SEQ ID NO: 56005 - DNA, 30 bp, Artificial Sequence
  Synthetic oligonucleotide
acggggtaaaggactctgggtgaggaaagc

SEQ ID NO: 56006 - DNA, 30 bp, Artificial Sequence
  Synthetic oligonucleotide
acctaccaacgacgacatcgggcggaaagc

SEQ ID NO: 56007 - DNA, 30 bp, Artificial Sequence
  Synthetic oligonucleotide
aggttcgcgtgtaactcaatccgggaaagc

SEQ ID NO: 56008 - DNA, 30 bp, Artificial Sequence
  Synthetic oligonucleotide
tgactgggtcaccacatgtgcgcataaagc

SEQ ID NO: 56009 - DNA, 30 bp, Artificial Sequence
  Synthetic oligonucleotide
agcaatgacataagaagaaccttcacaagc

SEQ ID NO: 56010 - DNA, 30 bp, Artificial Sequence
  Synthetic oligonucleotide
ctgagtgaaggtgcaaggtaaaggacaagc

SEQ ID NO: 56011 - DNA, 30 bp, Artificial Sequence
  Synthetic oligonucleotide
cataagtacgcgaaaatggatccagcaagc

SEQ ID NO: 56012 - DNA, 30 bp, Artificial Sequence
  Synthetic oligonucleotide
cctagtggacagcaaaaaactacggcaagc

SEQ ID NO: 56013 - DNA, 30 bp, Artificial Sequence
  Synthetic oligonucleotide
tgtcagcgacaccaataaaaggcatcaagc

SEQ ID NO: 56014 - DNA, 30 bp, Artificial Sequence
  Synthetic oligonucleotide
acaagggatatacgaggctgcataagaagc

SEQ ID NO: 56015 - DNA, 30 bp, Artificial Sequence
  Synthetic oligonucleotide
ggcagttgaagataggggtcgtggagaagc

SEQ ID NO: 56016 - DNA, 30 bp, Artificial Sequence
  Synthetic oligonucleotide
ttctttgcacgatattaacggggaggaagc

SEQ ID NO: 56017 - DNA, 30 bp, Artificial Sequence
  Synthetic oligonucleotide
tctggcacaccggcatgactggtcggaagc

SEQ ID NO: 56018 - DNA, 30 bp, Artificial Sequence
  Synthetic oligonucleotide
ctagatgatgtgcgtagcaaaagagtaagc

SEQ ID NO: 56019 - DNA, 30 bp, Artificial Sequence
  Synthetic oligonucleotide
ggcccgccaacgttataatcgatagtaagc

SEQ ID NO: 56020 - DNA, 30 bp, Artificial Sequence
  Synthetic oligonucleotide
cgttagtggattcatgtcatagacgtaagc

SEQ ID NO: 56021 - DNA, 30 bp, Artificial Sequence
  Synthetic oligonucleotide
atcccggaaggatcctcggacgaattaagc

SEQ ID NO: 56022 - DNA, 30 bp, Artificial Sequence
  Synthetic oligonucleotide
aaaggactacacaatgtgtaacgattaagc

SEQ ID NO: 56023 - DNA, 30 bp, Artificial Sequence
  Synthetic oligonucleotide
tggtcaaccaggagcgacagtcttcacagc

SEQ ID NO: 56024 - DNA, 30 bp, Artificial Sequence
  Synthetic oligonucleotide
ggcgatatacggcaaagcacgtagtacagc

SEQ ID NO: 56025 - DNA, 30 bp, Artificial Sequence
  Synthetic oligonucleotide
tagcgaggagtctcatggctaaccaccagc

SEQ ID NO: 56026 - DNA, 30 bp, Artificial Sequence
  Synthetic oligonucleotide
tatcgacaaggctctcaacaggtaagcagc

SEQ ID NO: 56027 - DNA, 30 bp, Artificial Sequence
  Synthetic oligonucleotide
cctagtgggattaatgtaccatagagcagc

SEQ ID NO: 56028 - DNA, 30 bp, Artificial Sequence
  Synthetic oligonucleotide
acatagccaaagaatgttgccatccgcagc

SEQ ID NO: 56029 - DNA, 30 bp, Artificial Sequence
  Synthetic oligonucleotide
agagagaaggatgtcagaatgcaatgcagc

SEQ ID NO: 56030 - DNA, 30 bp, Artificial Sequence
  Synthetic oligonucleotide
tcggaaagaagatgttgaatccaaatcagc

SEQ ID NO: 56031 - DNA, 30 bp, Artificial Sequence
  Synthetic oligonucleotide
ggacgtgagggccagatatcctccatcagc

SEQ ID NO: 56032 - DNA, 30 bp, Artificial Sequence
  Synthetic oligonucleotide
tgaggaacttattcgcggtggcagatcagc

SEQ ID NO: 56033 - DNA, 30 bp, Artificial Sequence
  Synthetic oligonucleotide
cagcgacagggtgataagaagtggctcagc

SEQ ID NO: 56034 - DNA, 30 bp, Artificial Sequence
  Synthetic oligonucleotide
cacgagtatcttggaatctccattctcagc

SEQ ID NO: 56035 - DNA, 30 bp, Artificial Sequence
  Synthetic oligonucleotide
aaggcacaatcccaattcagattagtcagc

SEQ ID NO: 56036 - DNA, 27 bp, Artificial Sequence
  Synthetic oligonucleotide
cgatctaatacacgaggatccgtcagc

SEQ ID NO: 56037 - DNA, 30 bp, Artificial Sequence
  Synthetic oligonucleotide
ttaactgacattagatagaggaacttcagc

SEQ ID NO: 56038 - DNA, 30 bp, Artificial Sequence
  Synthetic oligonucleotide
agaaatgtacacacgcctgaggacaagagc

SEQ ID NO: 56039 - DNA, 30 bp, Artificial Sequence
  Synthetic oligonucleotide
acacctcggagcgtattagtcgggaagagc

SEQ ID NO: 56040 - DNA, 30 bp, Artificial Sequence
  Synthetic oligonucleotide
cggacaaaggtgtcgccacatgtgcagagc

SEQ ID NO: 56041 - DNA, 30 bp, Artificial Sequence
  Synthetic oligonucleotide
cataaaaggcaacggatatgctcatagagc

SEQ ID NO: 56042 - DNA, 30 bp, Artificial Sequence
  Synthetic oligonucleotide
ctcatgcctgtacaatcaccagcaccgagc

SEQ ID NO: 56043 - DNA, 30 bp, Artificial Sequence
  Synthetic oligonucleotide
acattagcacttgccgagtctccagcgagc

SEQ ID NO: 56044 - DNA, 30 bp, Artificial Sequence
  Synthetic oligonucleotide
tccagatataagggacataaatcttcgagc

SEQ ID NO: 56045 - DNA, 30 bp, Artificial Sequence
  Synthetic oligonucleotide
tcgtaaggtggggccagcaagtaatggagc

SEQ ID NO: 56046 - DNA, 30 bp, Artificial Sequence
  Synthetic oligonucleotide
cgtgaagcacggataaatttcgtatggagc

SEQ ID NO: 56047 - DNA, 30 bp, Artificial Sequence
  Synthetic oligonucleotide
actagtgcaatggctaagtgggggtggagc

SEQ ID NO: 56048 - DNA, 30 bp, Artificial Sequence
  Synthetic oligonucleotide
ggagcgattaacaggggattgaacctgagc

SEQ ID NO: 56049 - DNA, 30 bp, Artificial Sequence
  Synthetic oligonucleotide
aactgagtaggggagtcgggaagagtgagc

SEQ ID NO: 56050 - DNA, 30 bp, Artificial Sequence
  Synthetic oligonucleotide
gtgggaccgtaacctcggggatcggtgagc

SEQ ID NO: 56051 - DNA, 30 bp, Artificial Sequence
  Synthetic oligonucleotide
ttaaggaacagattaggaaaggcattgagc

SEQ ID NO: 56052 - DNA, 30 bp, Artificial Sequence
  Synthetic oligonucleotide
ccacaacttcagatgtagaggtaaaatagc

SEQ ID NO: 56053 - DNA, 30 bp, Artificial Sequence
  Synthetic oligonucleotide
tgaaatgctgtccccgagttcgtaaatagc

SEQ ID NO: 56054 - DNA, 30 bp, Artificial Sequence
  Synthetic oligonucleotide
cgcgtctcgatactagtggaaccgaatagc

SEQ ID NO: 56055 - DNA, 30 bp, Artificial Sequence
  Synthetic oligonucleotide
aaaagtgagctccaaaagagcggagatagc

SEQ ID NO: 56056 - DNA, 30 bp, Artificial Sequence
  Synthetic oligonucleotide
ttaaaacacggtcaggcaagaaccgatagc

SEQ ID NO: 56057 - DNA, 30 bp, Artificial Sequence
  Synthetic oligonucleotide
taaacaacaggcgtatcgacgagcgatagc

SEQ ID NO: 56058 - DNA, 30 bp, Artificial Sequence
  Synthetic oligonucleotide
atcgcctataaagggagcgagcgtgatagc

SEQ ID NO: 56059 - DNA, 30 bp, Artificial Sequence
  Synthetic oligonucleotide
aagcataagttagtacaagaccaaactagc

SEQ ID NO: 56060 - DNA, 30 bp, Artificial Sequence
  Synthetic oligonucleotide
cataaatgtgggcctctagtcacaactagc

SEQ ID NO: 56061 - DNA, 30 bp, Artificial Sequence
  Synthetic oligonucleotide
ccaacctgttacagaaggtacgccactagc

SEQ ID NO: 56062 - DNA, 30 bp, Artificial Sequence
  Synthetic oligonucleotide
ttaccacatcctactaagcagagtgctagc

SEQ ID NO: 56063 - DNA, 30 bp, Artificial Sequence
  Synthetic oligonucleotide
tcgaatgctagtactaccccgagatctagc

SEQ ID NO: 56064 - DNA, 30 bp, Artificial Sequence
  Synthetic oligonucleotide
ggctcgtgaacaggaatgtaggaccgtagc

SEQ ID NO: 56065 - DNA, 30 bp, Artificial Sequence
  Synthetic oligonucleotide
gtaaacaaagaaacatggtggtgtcgtagc

SEQ ID NO: 56066 - DNA, 30 bp, Artificial Sequence
  Synthetic oligonucleotide
cgatagtacttcggctgataaaaaggtagc

SEQ ID NO: 56067 - DNA, 30 bp, Artificial Sequence
  Synthetic oligonucleotide
gcctcgagatgtgcattccaccagtttagc

SEQ ID NO: 56068 - DNA, 30 bp, Artificial Sequence
  Synthetic oligonucleotide
acgccacggaaggccaaactcgcttttagc

SEQ ID NO: 56069 - DNA, 30 bp, Artificial Sequence
  Synthetic oligonucleotide
gtgtcagagacaggaaatattcagacacgc

SEQ ID NO: 56070 - DNA, 30 bp, Artificial Sequence
  Synthetic oligonucleotide
agacagtcggacataatgtcggaagcacgc

SEQ ID NO: 56071 - DNA, 30 bp, Artificial Sequence
  Synthetic oligonucleotide
ccatagataatagaaggagggcgttcacgc

SEQ ID NO: 56072 - DNA, 30 bp, Artificial Sequence
  Synthetic oligonucleotide
ccgagaataagccggaggaagctaagacgc

SEQ ID NO: 56073 - DNA, 30 bp, Artificial Sequence
  Synthetic oligonucleotide
ggcgatggggggaatgagtgacttgtacgc

SEQ ID NO: 56074 - DNA, 30 bp, Artificial Sequence
  Synthetic oligonucleotide
cctcggaaacgaactagaccgttattacgc

SEQ ID NO: 56075 - DNA, 30 bp, Artificial Sequence
  Synthetic oligonucleotide
tctagggcgaggagcacccccagcttacgc

SEQ ID NO: 56076 - DNA, 30 bp, Artificial Sequence
  Synthetic oligonucleotide
acgtgccaccaatacgaacaggaaaaccgc

SEQ ID NO: 56077 - DNA, 30 bp, Artificial Sequence
  Synthetic oligonucleotide
gctggaagtgacgggagtattgcgtaccgc

SEQ ID NO: 56078 - DNA, 30 bp, Artificial Sequence
  Synthetic oligonucleotide
taaaaagatgctgaaccatatgatacccgc

SEQ ID NO: 56079 - DNA, 31 bp, Artificial Sequence
  Synthetic oligonucleotide
aaaggctgttgtaggagaaactccagcccgc

SEQ ID NO: 56080 - DNA, 30 bp, Artificial Sequence
  Synthetic oligonucleotide
tccaagaacacgattaccgtgatggcccgc

SEQ ID NO: 56081 - DNA, 30 bp, Artificial Sequence
  Synthetic oligonucleotide
aacgaagttggcgtgagagacccgagccgc

SEQ ID NO: 56082 - DNA, 30 bp, Artificial Sequence
  Synthetic oligonucleotide
gaaaggtcgggttagtagacaaagatccgc

SEQ ID NO: 56083 - DNA, 30 bp, Artificial Sequence
  Synthetic oligonucleotide
catatcagagacgtcgaagaaagcgtccgc

SEQ ID NO: 56084 - DNA, 30 bp, Artificial Sequence
  Synthetic oligonucleotide
tgcgagtctttgagaaaaaagatggtccgc

SEQ ID NO: 56085 - DNA, 30 bp, Artificial Sequence
  Synthetic oligonucleotide
gggcgtacgtataacacgtcccatgtccgc

SEQ ID NO: 56086 - DNA, 30 bp, Artificial Sequence
  Synthetic oligonucleotide
cgtagtgcacatcgctgtgtaagcttccgc

SEQ ID NO: 56087 - DNA, 30 bp, Artificial Sequence
  Synthetic oligonucleotide
gtcctagagggatgaaggacggcgttccgc

SEQ ID NO: 56088 - DNA, 30 bp, Artificial Sequence
  Synthetic oligonucleotide
aggatcaaggtagtcgatcggtagaagcgc

SEQ ID NO: 56089 - DNA, 30 bp, Artificial Sequence
  Synthetic oligonucleotide
atcgtggggtatggactggactaagagcgc

SEQ ID NO: 56090 - DNA, 30 bp, Artificial Sequence
  Synthetic oligonucleotide
aacgaacgacaaagtcgtgagcttgagcgc

SEQ ID NO: 56091 - DNA, 30 bp, Artificial Sequence
  Synthetic oligonucleotide
cgtagccgatagaagacgagtgcatagcgc

SEQ ID NO: 56092 - DNA, 30 bp, Artificial Sequence
  Synthetic oligonucleotide
ccagcgaggctgaaaaggcagaacacgcgc

SEQ ID NO: 56093 - DNA, 30 bp, Artificial Sequence
  Synthetic oligonucleotide
agagatgtgaaaagaaattgagactcgcgc

SEQ ID NO: 56094 - DNA, 30 bp, Artificial Sequence
  Synthetic oligonucleotide
gtgcagctcgagaaggtgatctgcaggcgc

SEQ ID NO: 56095 - DNA, 30 bp, Artificial Sequence
  Synthetic oligonucleotide
accgttgcttgaactcaaagagaatggcgc

SEQ ID NO: 56096 - DNA, 30 bp, Artificial Sequence
  Synthetic oligonucleotide
aactcacgagggttcagcctcaaatatcgc

SEQ ID NO: 56097 - DNA, 30 bp, Artificial Sequence
  Synthetic oligonucleotide
ccacggcttggtcaaaggctccttcctcgc

SEQ ID NO: 56098 - DNA, 30 bp, Artificial Sequence
  Synthetic oligonucleotide
gcgaccccgctatcgccagaatgatctcgc

SEQ ID NO: 56099 - DNA, 30 bp, Artificial Sequence
  Synthetic oligonucleotide
tgactagtgaattcgggtagcccgtctcgc

SEQ ID NO: 56100 - DNA, 30 bp, Artificial Sequence
  Synthetic oligonucleotide
cgcaccaaccaggcgctgggtaaaagtcgc

SEQ ID NO: 56101 - DNA, 30 bp, Artificial Sequence
  Synthetic oligonucleotide
acaatcaggaagcaatagtctcgaattcgc

SEQ ID NO: 56102 - DNA, 30 bp, Artificial Sequence
  Synthetic oligonucleotide
ggtccaaatggtggcacatcggggattcgc

SEQ ID NO: 56103 - DNA, 30 bp, Artificial Sequence
  Synthetic oligonucleotide
aggcaatttcaggcgagagacggtattcgc

SEQ ID NO: 56104 - DNA, 30 bp, Artificial Sequence
  Synthetic oligonucleotide
taagtatgcatgagattagcaagagttcgc

SEQ ID NO: 56105 - DNA, 30 bp, Artificial Sequence
  Synthetic oligonucleotide
cattggactgagtggatgagaaacgttcgc

SEQ ID NO: 56106 - DNA, 30 bp, Artificial Sequence
  Synthetic oligonucleotide
tgcccgatccacaaacgtctccaggttcgc

SEQ ID NO: 56107 - DNA, 30 bp, Artificial Sequence
  Synthetic oligonucleotide
ggccaccaaaaagcaagaagggccaaaggc

SEQ ID NO: 56108 - DNA, 30 bp, Artificial Sequence
  Synthetic oligonucleotide
tggaaataggtatactagtggcctgaaggc

SEQ ID NO: 56109 - DNA, 30 bp, Artificial Sequence
  Synthetic oligonucleotide
acggctaaccggtaaaatatacgtgaaggc

SEQ ID NO: 56110 - DNA, 30 bp, Artificial Sequence
  Synthetic oligonucleotide
cggtgatggcaatgaccatctgttgaaggc

SEQ ID NO: 56111 - DNA, 30 bp, Artificial Sequence
  Synthetic oligonucleotide
atgtggaggagaagtatgagctactaaggc

SEQ ID NO: 56112 - DNA, 30 bp, Artificial Sequence
  Synthetic oligonucleotide
aggatggtagacttgtgcggccaaacaggc

SEQ ID NO: 56113 - DNA, 30 bp, Artificial Sequence
  Synthetic oligonucleotide
gataacgttgggctaacataaaaatcaggc

SEQ ID NO: 56114 - DNA, 30 bp, Artificial Sequence
  Synthetic oligonucleotide
gtggtagggtcaagacccggcaaacgaggc

SEQ ID NO: 56115 - DNA, 30 bp, Artificial Sequence
  Synthetic oligonucleotide
cgatgacctagacgagttccagtccgaggc

SEQ ID NO: 56116 - DNA, 30 bp, Artificial Sequence
  Synthetic oligonucleotide
tgatcggaacgagaatcagttggaataggc

SEQ ID NO: 56117 - DNA, 31 bp, Artificial Sequence
  Synthetic oligonucleotide
cggactactaaccacatgtatgagcataggc

SEQ ID NO: 56118 - DNA, 30 bp, Artificial Sequence
  Synthetic oligonucleotide
ggtcacgaactggttaaccgcaatataggc

SEQ ID NO: 56119 - DNA, 30 bp, Artificial Sequence
  Synthetic oligonucleotide
agcgtcagaactatgagcaaggttataggc

SEQ ID NO: 56120 - DNA, 30 bp, Artificial Sequence
  Synthetic oligonucleotide
gacacgagaaggggattgcaggtagtaggc

SEQ ID NO: 56121 - DNA, 30 bp, Artificial Sequence
  Synthetic oligonucleotide
gcgacatgaccagaaaattctgaattaggc

SEQ ID NO: 56122 - DNA, 30 bp, Artificial Sequence
  Synthetic oligonucleotide
taaagtataaagaggacgaccgagtacggc

SEQ ID NO: 56123 - DNA, 30 bp, Artificial Sequence
  Synthetic oligonucleotide
cacgtgactcgcgagggtaagctgtacggc

SEQ ID NO: 56124 - DNA, 30 bp, Artificial Sequence
  Synthetic oligonucleotide
catcatacattctttaaaggggcgtccggc

SEQ ID NO: 56125 - DNA, 30 bp, Artificial Sequence
  Synthetic oligonucleotide
aaaatgagttctcgccaaaaattcatcggc

SEQ ID NO: 56126 - DNA, 30 bp, Artificial Sequence
  Synthetic oligonucleotide
ttctggtaacataatgagcgaggtgtcggc

SEQ ID NO: 56127 - DNA, 30 bp, Artificial Sequence
  Synthetic oligonucleotide
caccaaagtccggcctagcgttcgttcggc

SEQ ID NO: 56128 - DNA, 30 bp, Artificial Sequence
  Synthetic oligonucleotide
accaggcagctcagagagggaacaaagggc

SEQ ID NO: 56129 - DNA, 30 bp, Artificial Sequence
  Synthetic oligonucleotide
cgaagaataagctcccactcgggcaagggc

SEQ ID NO: 56130 - DNA, 30 bp, Artificial Sequence
  Synthetic oligonucleotide
accatgtaagcaaaatatgtatcgaagggc

SEQ ID NO: 56131 - DNA, 30 bp, Artificial Sequence
  Synthetic oligonucleotide
agatggagaagtaaaattcgtttgaagggc

SEQ ID NO: 56132 - DNA, 30 bp, Artificial Sequence
  Synthetic oligonucleotide
gggggatcctaatgaaacagtgttcagggc

SEQ ID NO: 56133 - DNA, 30 bp, Artificial Sequence
  Synthetic oligonucleotide
cgctttgagagcgtagagatgtaggagggc

SEQ ID NO: 56134 - DNA, 30 bp, Artificial Sequence
  Synthetic oligonucleotide
tataccaaggtgcgaaagtcttaaacgggc

SEQ ID NO: 56135 - DNA, 30 bp, Artificial Sequence
  Synthetic oligonucleotide
gaccgaaggtcggtttgcagatgagcgggc

SEQ ID NO: 56136 - DNA, 30 bp, Artificial Sequence
  Synthetic oligonucleotide
ccatccagaacacctaagattggtgcgggc

SEQ ID NO: 56137 - DNA, 30 bp, Artificial Sequence
  Synthetic oligonucleotide
ttagatgcactgcaaattatctggaggggc

SEQ ID NO: 56138 - DNA, 30 bp, Artificial Sequence
  Synthetic oligonucleotide
cagaaaaggacgacggatcttgaacggggc

SEQ ID NO: 56139 - DNA, 30 bp, Artificial Sequence
  Synthetic oligonucleotide
gagatgtggacgattggcggatgccggggc

SEQ ID NO: 56140 - DNA, 30 bp, Artificial Sequence
  Synthetic oligonucleotide
tatgcggctgaaaacactacaaagcggggc

SEQ ID NO: 56141 - DNA, 30 bp, Artificial Sequence
  Synthetic oligonucleotide
tgtgccagaaatatagtgcatccatggggc

SEQ ID NO: 56142 - DNA, 30 bp, Artificial Sequence
  Synthetic oligonucleotide
ttgtggaggtgagtaccgcaaaacatgggc

SEQ ID NO: 56143 - DNA, 30 bp, Artificial Sequence
  Synthetic oligonucleotide
gcaagtctaccaatagtgggataagtgggc

SEQ ID NO: 56144 - DNA, 30 bp, Artificial Sequence
  Synthetic oligonucleotide
tgagcagacgcgctagaacgaaaaaatggc

SEQ ID NO: 56145 - DNA, 30 bp, Artificial Sequence
  Synthetic oligonucleotide
cgagtttaggggtattatatgctacatggc

SEQ ID NO: 56146 - DNA, 30 bp, Artificial Sequence
  Synthetic oligonucleotide
ccaagtatcgagatccctgaatgcgatggc

SEQ ID NO: 56147 - DNA, 30 bp, Artificial Sequence
  Synthetic oligonucleotide
tgagacaggggggagactgagggctatggc

SEQ ID NO: 56148 - DNA, 30 bp, Artificial Sequence
  Synthetic oligonucleotide
tcacgcaagtaaccgtaagcgtaggctggc

SEQ ID NO: 56149 - DNA, 30 bp, Artificial Sequence
  Synthetic oligonucleotide
cactgtagcgctaaataccttaactctggc

SEQ ID NO: 56150 - DNA, 30 bp, Artificial Sequence
  Synthetic oligonucleotide
tgaagagctatcggtgtcgtattcggtggc

SEQ ID NO: 56151 - DNA, 30 bp, Artificial Sequence
  Synthetic oligonucleotide
tgtgaacagggataaattacccggtgtggc

SEQ ID NO: 56152 - DNA, 30 bp, Artificial Sequence
  Synthetic oligonucleotide
tacgagtaggaagacataccgcattgtggc

SEQ ID NO: 56153 - DNA, 30 bp, Artificial Sequence
  Synthetic oligonucleotide
cgtctcacgctaaggcaaattgggcttggc

SEQ ID NO: 56154 - DNA, 30 bp, Artificial Sequence
  Synthetic oligonucleotide
gaagggtcctgcagtataggcttagttggc

SEQ ID NO: 56155 - DNA, 30 bp, Artificial Sequence
  Synthetic oligonucleotide
aaggagaccgataagacgttccggaaatgc

SEQ ID NO: 56156 - DNA, 30 bp, Artificial Sequence
  Synthetic oligonucleotide
ccgtagtgcgtcagagttagcacagaatgc

SEQ ID NO: 56157 - DNA, 30 bp, Artificial Sequence
  Synthetic oligonucleotide
ggtgaggtgcagatgaattagccaagatgc

SEQ ID NO: 56158 - DNA, 30 bp, Artificial Sequence
  Synthetic oligonucleotide
tgggccgggatacaaaccaaagcaagatgc

SEQ ID NO: 56159 - DNA, 30 bp, Artificial Sequence
  Synthetic oligonucleotide
gaagtgtgaccacgaacgaatgcacgatgc

SEQ ID NO: 56160 - DNA, 30 bp, Artificial Sequence
  Synthetic oligonucleotide
aaacgaccagttatcgcatcccaaggatgc

SEQ ID NO: 56161 - DNA, 30 bp, Artificial Sequence
  Synthetic oligonucleotide
ggggccgagtaggagacggaaccatgatgc

SEQ ID NO: 56162 - DNA, 31 bp, Artificial Sequence
  Synthetic oligonucleotide
gtcccaggacatgaaaacgaaggcaatatgc

SEQ ID NO: 56163 - DNA, 30 bp, Artificial Sequence
  Synthetic oligonucleotide
cggggccggatctcattcgttagagtatgc

SEQ ID NO: 56164 - DNA, 30 bp, Artificial Sequence
  Synthetic oligonucleotide
acataggcagattaaatgtcgcgcgtatgc

SEQ ID NO: 56165 - DNA, 30 bp, Artificial Sequence
  Synthetic oligonucleotide
agcgaaacaaatgcccgtaatactttatgc

SEQ ID NO: 56166 - DNA, 30 bp, Artificial Sequence
  Synthetic oligonucleotide
ctacagtgtatggatggggagatcaactgc

SEQ ID NO: 56167 - DNA, 30 bp, Artificial Sequence
  Synthetic oligonucleotide
atggggttgagaaattcgttccgaagctgc

SEQ ID NO: 56168 - DNA, 30 bp, Artificial Sequence
  Synthetic oligonucleotide
ccctattgaaagcgaatcaggaaacgctgc

SEQ ID NO: 56169 - DNA, 30 bp, Artificial Sequence
  Synthetic oligonucleotide
agaggggtcccgagatactaaaagggctgc

SEQ ID NO: 56170 - DNA, 30 bp, Artificial Sequence
  Synthetic oligonucleotide
cgcgcttagtgaacaccgaaggcaatctgc

SEQ ID NO: 56171 - DNA, 30 bp, Artificial Sequence
  Synthetic oligonucleotide
cagtggacgaaccatttcgcacccatctgc

SEQ ID NO: 56172 - DNA, 30 bp, Artificial Sequence
  Synthetic oligonucleotide
ctaagtcattccgcggaacatagacagtgc

SEQ ID NO: 56173 - DNA, 30 bp, Artificial Sequence
  Synthetic oligonucleotide
tacttgagcttaacaaatcgcgcgcagtgc

SEQ ID NO: 56174 - DNA, 30 bp, Artificial Sequence
  Synthetic oligonucleotide
tcgatggaaaacggacgatagcgtcagtgc

SEQ ID NO: 56175 - DNA, 30 bp, Artificial Sequence
  Synthetic oligonucleotide
gggacgagggattgtcggaaatgagagtgc

SEQ ID NO: 56176 - DNA, 30 bp, Artificial Sequence
  Synthetic oligonucleotide
cgtaattaacaggtaccggggtgggagtgc

SEQ ID NO: 56177 - DNA, 30 bp, Artificial Sequence
  Synthetic oligonucleotide
aggcaactaatgctgcgactattcacgtgc

SEQ ID NO: 56178 - DNA, 30 bp, Artificial Sequence
  Synthetic oligonucleotide
ggggaaggtcaattctccaagtttccgtgc

SEQ ID NO: 56179 - DNA, 30 bp, Artificial Sequence
  Synthetic oligonucleotide
aaaagcaaacgagggatcaatcagcggtgc

SEQ ID NO: 56180 - DNA, 30 bp, Artificial Sequence
  Synthetic oligonucleotide
aacacgagtctaaggtaagctgtgcggtgc

SEQ ID NO: 56181 - DNA, 30 bp, Artificial Sequence
  Synthetic oligonucleotide
gtataaggggaaataacgttaaatcggtgc

SEQ ID NO: 56182 - DNA, 30 bp, Artificial Sequence
  Synthetic oligonucleotide
agagtatagtggttatctaggtcagggtgc

SEQ ID NO: 56183 - DNA, 30 bp, Artificial Sequence
  Synthetic oligonucleotide
attaaagtggatcacacgtcaaaggggtgc

SEQ ID NO: 56184 - DNA, 30 bp, Artificial Sequence
  Synthetic oligonucleotide
actatacgtgaatgacagaggtaatggtgc

SEQ ID NO: 56185 - DNA, 30 bp, Artificial Sequence
  Synthetic oligonucleotide
aggtctggttgcgatactataccactgtgc

SEQ ID NO: 56186 - DNA, 30 bp, Artificial Sequence
  Synthetic oligonucleotide
tgcgaggtacgcctaacccggattaattgc

SEQ ID NO: 56187 - DNA, 30 bp, Artificial Sequence
  Synthetic oligonucleotide
gagaagcaaactaatctaacccttgattgc

SEQ ID NO: 56188 - DNA, 30 bp, Artificial Sequence
  Synthetic oligonucleotide
gacgtggcgactcaagatgtgggctattgc

SEQ ID NO: 56189 - DNA, 30 bp, Artificial Sequence
  Synthetic oligonucleotide
atggcatactgtataagaaacttgtattgc

SEQ ID NO: 56190 - DNA, 30 bp, Artificial Sequence
  Synthetic oligonucleotide
agaaatggagcgagatccagtcgttattgc

SEQ ID NO: 56191 - DNA, 30 bp, Artificial Sequence
  Synthetic oligonucleotide
caggattcggtttattcgcaccagagttgc

SEQ ID NO: 56192 - DNA, 30 bp, Artificial Sequence
  Synthetic oligonucleotide
cctctggacaaaccgaggaaagcgagttgc

SEQ ID NO: 56193 - DNA, 30 bp, Artificial Sequence
  Synthetic oligonucleotide
agctttgtgccacacgaaacagggagttgc

SEQ ID NO: 56194 - DNA, 30 bp, Artificial Sequence
  Synthetic oligonucleotide
cgcttcggacaaacgtatggctggagttgc

SEQ ID NO: 56195 - DNA, 30 bp, Artificial Sequence
  Synthetic oligonucleotide
cgtctcgtggtccaaggcggactccgttgc

SEQ ID NO: 56196 - DNA, 30 bp, Artificial Sequence
  Synthetic oligonucleotide
cgtgagagagttcatcgggattctcgttgc

SEQ ID NO: 56197 - DNA, 30 bp, Artificial Sequence
  Synthetic oligonucleotide
tgagcgaattcctatagatcacaattttgc

SEQ ID NO: 56198 - DNA, 30 bp, Artificial Sequence
  Synthetic oligonucleotide
gcgatgcgtaatgggcatgttcaagaaatc

SEQ ID NO: 56199 - DNA, 31 bp, Artificial Sequence
  Synthetic oligonucleotide
catgccgcaggacaaggcctagcaggaaatc

SEQ ID NO: 56200 - DNA, 30 bp, Artificial Sequence
  Synthetic oligonucleotide
tgcatgaattaggcttgcacaatcacaatc

SEQ ID NO: 56201 - DNA, 30 bp, Artificial Sequence
  Synthetic oligonucleotide
acgccgtccatcttcgaccaggtgccaatc

SEQ ID NO: 56202 - DNA, 30 bp, Artificial Sequence
  Synthetic oligonucleotide
ctatggggtacaatatagggcacatcaatc

SEQ ID NO: 56203 - DNA, 30 bp, Artificial Sequence
  Synthetic oligonucleotide
gctcaattaaaccacagtggcctcagaatc

SEQ ID NO: 56204 - DNA, 30 bp, Artificial Sequence
  Synthetic oligonucleotide
cgtatacgcgtgaagctaatatagagaatc

SEQ ID NO: 56205 - DNA, 30 bp, Artificial Sequence
  Synthetic oligonucleotide
gggctggcatcggacaaagtgtggagaatc

SEQ ID NO: 56206 - DNA, 30 bp, Artificial Sequence
  Synthetic oligonucleotide
atacaaagctgggcctcgcgaacacgaatc

SEQ ID NO: 56207 - DNA, 30 bp, Artificial Sequence
  Synthetic oligonucleotide
cgtcatagtcatgtgtgcgagctgcgaatc

SEQ ID NO: 56208 - DNA, 30 bp, Artificial Sequence
  Synthetic oligonucleotide
aacgttaccggccggctggcgtgcataatc

SEQ ID NO: 56209 - DNA, 30 bp, Artificial Sequence
  Synthetic oligonucleotide
ctgctagggatcgtggtatcgtgtgacatc

SEQ ID NO: 56210 - DNA, 30 bp, Artificial Sequence
  Synthetic oligonucleotide
tcagacaaacgtgagcgaccgcttgacatc

SEQ ID NO: 56211 - DNA, 30 bp, Artificial Sequence
  Synthetic oligonucleotide
agtcccgacgagaaaacagtctacaccatc

SEQ ID NO: 56212 - DNA, 30 bp, Artificial Sequence
  Synthetic oligonucleotide
aaggtcgccggtgaacctgtggaacgcatc

SEQ ID NO: 56213 - DNA, 30 bp, Artificial Sequence
  Synthetic oligonucleotide
aggacttcttcccctagcactaaaggcatc

SEQ ID NO: 56214 - DNA, 30 bp, Artificial Sequence
  Synthetic oligonucleotide
agcatgaatatatattatcgcgaaggcatc

SEQ ID NO: 56215 - DNA, 30 bp, Artificial Sequence
  Synthetic oligonucleotide
ccagatgcgattatcaaacacatgttcatc

SEQ ID NO: 56216 - DNA, 30 bp, Artificial Sequence
  Synthetic oligonucleotide
acaccgccactcaaacctccagtcaagatc

SEQ ID NO: 56217 - DNA, 30 bp, Artificial Sequence
  Synthetic oligonucleotide
cgagagccataataatggtggatgaagatc

SEQ ID NO: 56218 - DNA, 30 bp, Artificial Sequence
  Synthetic oligonucleotide
tttaagggtacgacaaaaccactaacgatc

SEQ ID NO: 56219 - DNA, 30 bp, Artificial Sequence
  Synthetic oligonucleotide
ccgcaacggctccgagactacttagcgatc

SEQ ID NO: 56220 - DNA, 30 bp, Artificial Sequence
  Synthetic oligonucleotide
taaccgtggaccaagacagtactttcgatc

SEQ ID NO: 56221 - DNA, 30 bp, Artificial Sequence
  Synthetic oligonucleotide
aagggcttgaacggaggaatgggtaggatc

SEQ ID NO: 56222 - DNA, 30 bp, Artificial Sequence
  Synthetic oligonucleotide
cggaaacgatgaactccttgatgtaggatc

SEQ ID NO: 56223 - DNA, 30 bp, Artificial Sequence
  Synthetic oligonucleotide
ttaggtaattatcgagagcaggccatgatc

SEQ ID NO: 56224 - DNA, 30 bp, Artificial Sequence
  Synthetic oligonucleotide
agatccgaagcggattgcgaagttatgatc

SEQ ID NO: 56225 - DNA, 31 bp, Artificial Sequence
  Synthetic oligonucleotide
cgacgaatcatgagtctcgaccgacctgatc

SEQ ID NO: 56226 - DNA, 30 bp, Artificial Sequence
  Synthetic oligonucleotide
gccgtgagaaacacgatgaccgacgtgatc

SEQ ID NO: 56227 - DNA, 30 bp, Artificial Sequence
  Synthetic oligonucleotide
gaggccgggtgtcagtagcgtgcggtgatc

SEQ ID NO: 56228 - DNA, 30 bp, Artificial Sequence
  Synthetic oligonucleotide
tcgataatgatcggataacggcccactatc

SEQ ID NO: 56229 - DNA, 30 bp, Artificial Sequence
  Synthetic oligonucleotide
gagaaaccaaggtgggtcattaaggctatc

SEQ ID NO: 56230 - DNA, 30 bp, Artificial Sequence
  Synthetic oligonucleotide
cgcaaaaataggcctacaccctatgctatc

SEQ ID NO: 56231 - DNA, 30 bp, Artificial Sequence
  Synthetic oligonucleotide
tgctgttaagggtgcacgtaaacaagtatc

SEQ ID NO: 56232 - DNA, 30 bp, Artificial Sequence
  Synthetic oligonucleotide
cgcgaacgtacgttcgtaacatccaaactc

SEQ ID NO: 56233 - DNA, 30 bp, Artificial Sequence
  Synthetic oligonucleotide
cagggtgaggggcctccccgctaacaactc

SEQ ID NO: 56234 - DNA, 30 bp, Artificial Sequence
  Synthetic oligonucleotide
aatcgggggcagtgctttctagcggaactc

SEQ ID NO: 56235 - DNA, 30 bp, Artificial Sequence
  Synthetic oligonucleotide
cgggttcgtacagacactgaggctgaactc

SEQ ID NO: 56236 - DNA, 31 bp, Artificial Sequence
  Synthetic oligonucleotide
caggccgggaaattcaagggtcgatccactc

SEQ ID NO: 56237 - DNA, 30 bp, Artificial Sequence
  Synthetic oligonucleotide
gtaggcacttacttccaggatatccgactc

SEQ ID NO: 56238 - DNA, 30 bp, Artificial Sequence
  Synthetic oligonucleotide
tgttgccacaggggcggcgacaagtgactc

SEQ ID NO: 56239 - DNA, 30 bp, Artificial Sequence
  Synthetic oligonucleotide
agattcctaaggatcatggttgcgatactc

SEQ ID NO: 56240 - DNA, 30 bp, Artificial Sequence
  Synthetic oligonucleotide
acgttgttagcagaaactaggcgtctactc

SEQ ID NO: 56241 - DNA, 30 bp, Artificial Sequence
  Synthetic oligonucleotide
actattcataaggtgaaagggtaagtactc

SEQ ID NO: 56242 - DNA, 30 bp, Artificial Sequence
  Synthetic oligonucleotide
tgtccgtggacaacatcctcctaattactc

SEQ ID NO: 56243 - DNA, 30 bp, Artificial Sequence
  Synthetic oligonucleotide
agggttagaggggtccatcagctattactc

SEQ ID NO: 56244 - DNA, 30 bp, Artificial Sequence
  Synthetic oligonucleotide
ctaccgagacaatctaatgcggcatacctc

SEQ ID NO: 56245 - DNA, 30 bp, Artificial Sequence
  Synthetic oligonucleotide
caaggcccgttactgcacgatccttacctc

SEQ ID NO: 56246 - DNA, 30 bp, Artificial Sequence
  Synthetic oligonucleotide
aaggcgctccacaacatacaccgacccctc

SEQ ID NO: 56247 - DNA, 30 bp, Artificial Sequence
  Synthetic oligonucleotide
ctcaactcaaaaggcgataacgtcagcctc

SEQ ID NO: 56248 - DNA, 30 bp, Artificial Sequence
  Synthetic oligonucleotide
tcaaggggcgtacgccgcgacatacgcctc

SEQ ID NO: 56249 - DNA, 30 bp, Artificial Sequence
  Synthetic oligonucleotide
tgtcaattgtatgagtaggataccggcctc

SEQ ID NO: 56250 - DNA, 30 bp, Artificial Sequence
  Synthetic oligonucleotide
cgtcgtatgccataccgggaatctctcctc

SEQ ID NO: 56251 - DNA, 30 bp, Artificial Sequence
  Synthetic oligonucleotide
cgtcaaatcggcatgagcgagagcgtcctc

SEQ ID NO: 56252 - DNA, 30 bp, Artificial Sequence
  Synthetic oligonucleotide
ggtatgcggcatccccaaggtgtgtagctc

SEQ ID NO: 56253 - DNA, 30 bp, Artificial Sequence
  Synthetic oligonucleotide
gccaaacgaccgagcacctccgaaatgctc

SEQ ID NO: 56254 - DNA, 30 bp, Artificial Sequence
  Synthetic oligonucleotide
gttcagaacaattagatgtgatgtatgctc

SEQ ID NO: 56255 - DNA, 30 bp, Artificial Sequence
  Synthetic oligonucleotide
gcgatattggttagcattaaaggcaatctc

SEQ ID NO: 56256 - DNA, 30 bp, Artificial Sequence
  Synthetic oligonucleotide
gtggccgaacacgaggggcgttcccatctc

SEQ ID NO: 56257 - DNA, 30 bp, Artificial Sequence
  Synthetic oligonucleotide
gaaaggtaaacgattcgcatccatcatctc

SEQ ID NO: 56258 - DNA, 30 bp, Artificial Sequence
  Synthetic oligonucleotide
tcaggactaatgcttaggctcggtgatctc

SEQ ID NO: 56259 - DNA, 30 bp, Artificial Sequence
  Synthetic oligonucleotide
accatgcacagcgtgcgcgagctaactctc

SEQ ID NO: 56260 - DNA, 30 bp, Artificial Sequence
  Synthetic oligonucleotide
cacgagtaatccatagagatgtgctctctc

SEQ ID NO: 56261 - DNA, 30 bp, Artificial Sequence
  Synthetic oligonucleotide
caatgaaatggggtgacaataaccagtctc

SEQ ID NO: 56262 - DNA, 30 bp, Artificial Sequence
  Synthetic oligonucleotide
tgcgccaaatgaggggaagagccttgtctc

SEQ ID NO: 56263 - DNA, 30 bp, Artificial Sequence
  Synthetic oligonucleotide
gcggtgtcccgtaaaggccatcaaaaagtc

SEQ ID NO: 56264 - DNA, 30 bp, Artificial Sequence
  Synthetic oligonucleotide
ctcataaaacagtgcgtccggataaaagtc

SEQ ID NO: 56265 - DNA, 30 bp, Artificial Sequence
  Synthetic oligonucleotide
tagccggagtatgcatggaaggctaaagtc

SEQ ID NO: 56266 - DNA, 30 bp, Artificial Sequence
  Synthetic oligonucleotide
gtcgacatactgaagccactacaacaagtc

SEQ ID NO: 56267 - DNA, 30 bp, Artificial Sequence
  Synthetic oligonucleotide
gtaggtacgtatttagtatagggacaagtc

SEQ ID NO: 56268 - DNA, 30 bp, Artificial Sequence
  Synthetic oligonucleotide
acaaaacgacaatccgagagcaagcaagtc

SEQ ID NO: 56269 - DNA, 30 bp, Artificial Sequence
  Synthetic oligonucleotide
agggcggtcttccaaaaaactcatcaagtc

SEQ ID NO: 56270 - DNA, 30 bp, Artificial Sequence
  Synthetic oligonucleotide
gcagtttcgagtgaataagagaaggaagtc

SEQ ID NO: 56271 - DNA, 30 bp, Artificial Sequence
  Synthetic oligonucleotide
ggttacaaccagcgtttcgagaaagcagtc

SEQ ID NO: 56272 - DNA, 30 bp, Artificial Sequence
  Synthetic oligonucleotide
ggcgagctttgagcccggctaccagcagtc

SEQ ID NO: 56273 - DNA, 30 bp, Artificial Sequence
  Synthetic oligonucleotide
agacataaacgtactatgataggttcagtc

SEQ ID NO: 56274 - DNA, 30 bp, Artificial Sequence
  Synthetic oligonucleotide
gggccagcggcattgataagaatttcagtc

SEQ ID NO: 56275 - DNA, 30 bp, Artificial Sequence
  Synthetic oligonucleotide
gagcgcgaccaccttgattatgtcagagtc

SEQ ID NO: 56276 - DNA, 30 bp, Artificial Sequence
  Synthetic oligonucleotide
ccgatacacggtaacccaatagaaggagtc

SEQ ID NO: 56277 - DNA, 30 bp, Artificial Sequence
  Synthetic oligonucleotide
ggaagagacaccaaagttctggcaggagtc

SEQ ID NO: 56278 - DNA, 30 bp, Artificial Sequence
  Synthetic oligonucleotide
caagggcgagaatacagttgcaagatagtc

SEQ ID NO: 56279 - DNA, 30 bp, Artificial Sequence
  Synthetic oligonucleotide
tctgggtatagtgtgggtcgagagatagtc

SEQ ID NO: 56280 - DNA, 30 bp, Artificial Sequence
  Synthetic oligonucleotide
tggtgaaaagagtgagacaagtagctagtc

SEQ ID NO: 56281 - DNA, 30 bp, Artificial Sequence
  Synthetic oligonucleotide
cctcacggacaggaaattagaatattagtc

SEQ ID NO: 56282 - DNA, 30 bp, Artificial Sequence
  Synthetic oligonucleotide
accatataacaataaaaaattactttagtc

SEQ ID NO: 56283 - DNA, 30 bp, Artificial Sequence
  Synthetic oligonucleotide
gacactgtctacacttgaagccaacacgtc

SEQ ID NO: 56284 - DNA, 30 bp, Artificial Sequence
  Synthetic oligonucleotide
gaggcagccaaatgaggaatccggcacgtc

SEQ ID NO: 56285 - DNA, 30 bp, Artificial Sequence
  Synthetic oligonucleotide
aacgtggttcgaacgtcatctagtcacgtc

SEQ ID NO: 56286 - DNA, 30 bp, Artificial Sequence
  Synthetic oligonucleotide
agggcgaatggggagctttaccaatacgtc

SEQ ID NO: 56287 - DNA, 30 bp, Artificial Sequence
  Synthetic oligonucleotide
cagcgcatataaatgtgaggagcctacgtc

SEQ ID NO: 56288 - DNA, 30 bp, Artificial Sequence
  Synthetic oligonucleotide
cgggtctagaaaatggaacgctataccgtc

SEQ ID NO: 56289 - DNA, 30 bp, Artificial Sequence
  Synthetic oligonucleotide
gaagcaataactagctagcgtcaatccgtc

SEQ ID NO: 56290 - DNA, 30 bp, Artificial Sequence
  Synthetic oligonucleotide
gaccagaaaaagagtgctgttcgaagcgtc

SEQ ID NO: 56291 - DNA, 30 bp, Artificial Sequence
  Synthetic oligonucleotide
tggcaaatactcaaactacatgtcagcgtc

SEQ ID NO: 56292 - DNA, 30 bp, Artificial Sequence
  Synthetic oligonucleotide
acctggggcggagaaaagatgttaggcgtc

SEQ ID NO: 56293 - DNA, 30 bp, Artificial Sequence
  Synthetic oligonucleotide
cgaactgatggggtatcgcatcgtggcgtc

SEQ ID NO: 56294 - DNA, 30 bp, Artificial Sequence
  Synthetic oligonucleotide
tcagggagatgtgtactgaccgttggcgtc

SEQ ID NO: 56295 - DNA, 30 bp, Artificial Sequence
  Synthetic oligonucleotide
ctgatgtgaaaatttgccgtgaaatgcgtc

SEQ ID NO: 56296 - DNA, 30 bp, Artificial Sequence
  Synthetic oligonucleotide
tgctgtcccaggcaccgaaacttgctcgtc

SEQ ID NO: 56297 - DNA, 30 bp, Artificial Sequence
  Synthetic oligonucleotide
tacgagggtgaaacttagcaacctaaggtc

SEQ ID NO: 56298 - DNA, 30 bp, Artificial Sequence
  Synthetic oligonucleotide
ctgagatcgaaccgttcgtgcagacaggtc

SEQ ID NO: 56299 - DNA, 30 bp, Artificial Sequence
  Synthetic oligonucleotide
agggatgagaacagaacatcgtcgcaggtc

SEQ ID NO: 56300 - DNA, 30 bp, Artificial Sequence
  Synthetic oligonucleotide
ctgaagtagtcgatacgagtcgaataggtc

SEQ ID NO: 56301 - DNA, 30 bp, Artificial Sequence
  Synthetic oligonucleotide
cgggagctcaggtgttcggtcctcacggtc

SEQ ID NO: 56302 - DNA, 29 bp, Artificial Sequence
  Synthetic oligonucleotide
ccgtgggttcagcaccatagattacggtc

SEQ ID NO: 56303 - DNA, 30 bp, Artificial Sequence
  Synthetic oligonucleotide
tgaccacgggtaggggactgcaactcggtc

SEQ ID NO: 56304 - DNA, 30 bp, Artificial Sequence
  Synthetic oligonucleotide
ggatgagttctacttgtgcgtctgtcggtc

SEQ ID NO: 56305 - DNA, 30 bp, Artificial Sequence
  Synthetic oligonucleotide
tcgggggactgactactgctaaggagggtc

SEQ ID NO: 56306 - DNA, 30 bp, Artificial Sequence
  Synthetic oligonucleotide
aggtgcgaatatttaaaatacaggagggtc

SEQ ID NO: 56307 - DNA, 30 bp, Artificial Sequence
  Synthetic oligonucleotide
ttcaggcggaaggacgaactacgaggggtc

SEQ ID NO: 56308 - DNA, 30 bp, Artificial Sequence
  Synthetic oligonucleotide
ctgaggggatacaatgagaacaccggggtc

SEQ ID NO: 56309 - DNA, 30 bp, Artificial Sequence
  Synthetic oligonucleotide
ggaacatgagattagagcaggtacatggtc

SEQ ID NO: 56310 - DNA, 30 bp, Artificial Sequence
  Synthetic oligonucleotide
agagtagtattgcgaatcggtacattggtc

SEQ ID NO: 56311 - DNA, 30 bp, Artificial Sequence
  Synthetic oligonucleotide
tgcttaagaacgagtaggctagcattggtc

SEQ ID NO: 56312 - DNA, 30 bp, Artificial Sequence
  Synthetic oligonucleotide
taagcgaggttaatgcaagttctattggtc

SEQ ID NO: 56313 - DNA, 30 bp, Artificial Sequence
  Synthetic oligonucleotide
gacaccagatatcagcgtaccgggttggtc

SEQ ID NO: 56314 - DNA, 30 bp, Artificial Sequence
  Synthetic oligonucleotide
tatgaaacacacggatccccacggaatgtc

SEQ ID NO: 56315 - DNA, 30 bp, Artificial Sequence
  Synthetic oligonucleotide
gagggggaagctgccagaggggaccatgtc

SEQ ID NO: 56316 - DNA, 30 bp, Artificial Sequence
  Synthetic oligonucleotide
taagggcagggcgttagacagatgcatgtc

SEQ ID NO: 56317 - DNA, 30 bp, Artificial Sequence
  Synthetic oligonucleotide
ctacaacgtgggctccgatagacgtatgtc

SEQ ID NO: 56318 - DNA, 30 bp, Artificial Sequence
  Synthetic oligonucleotide
accgtgaggggagttcctaaatccgctgtc

SEQ ID NO: 56319 - DNA, 30 bp, Artificial Sequence
  Synthetic oligonucleotide
acttcctgggtcaagcaactcgaaagtgtc

SEQ ID NO: 56320 - DNA, 30 bp, Artificial Sequence
  Synthetic oligonucleotide
agggcttggacgtattaaatgccgcgtgtc

SEQ ID NO: 56321 - DNA, 30 bp, Artificial Sequence
  Synthetic oligonucleotide
catgaggtaacgatgcatgtatgcggtgtc

SEQ ID NO: 56322 - DNA, 30 bp, Artificial Sequence
  Synthetic oligonucleotide
tcggtgaaggtgtttgtatatgaatgtgtc

SEQ ID NO: 56323 - DNA, 30 bp, Artificial Sequence
  Synthetic oligonucleotide
aaaggcgggtgccatggaagaacggttgtc

SEQ ID NO: 56324 - DNA, 30 bp, Artificial Sequence
  Synthetic oligonucleotide
aatagatccggggactaggaagatgttgtc

SEQ ID NO: 56325 - DNA, 30 bp, Artificial Sequence
  Synthetic oligonucleotide
agtccatagtcgtcgaaatgaaccaaattc

SEQ ID NO: 56326 - DNA, 30 bp, Artificial Sequence
  Synthetic oligonucleotide
tatagtgagcttatagagctagccaaattc

SEQ ID NO: 56327 - DNA, 30 bp, Artificial Sequence
  Synthetic oligonucleotide
ctagagagagtggtcttgctttgtaaattc

SEQ ID NO: 56328 - DNA, 30 bp, Artificial Sequence
  Synthetic oligonucleotide
ccgaagactgtattactgggggccgaattc

SEQ ID NO: 56329 - DNA, 30 bp, Artificial Sequence
  Synthetic oligonucleotide
cttggacaggaccattgcactgccgaattc

SEQ ID NO: 56330 - DNA, 30 bp, Artificial Sequence
  Synthetic oligonucleotide
tggtggcgacttgaagccttcccgacattc

SEQ ID NO: 56331 - DNA, 30 bp, Artificial Sequence
  Synthetic oligonucleotide
acctagatcgtctcgaagtaaggagcattc

SEQ ID NO: 56332 - DNA, 30 bp, Artificial Sequence
  Synthetic oligonucleotide
aatgcaagccatcgaacgtgctgcagattc

SEQ ID NO: 56333 - DNA, 31 bp, Artificial Sequence
  Synthetic oligonucleotide
caaaacgaactatggtagtgctactagattc

SEQ ID NO: 56334 - DNA, 30 bp, Artificial Sequence
  Synthetic oligonucleotide
acgccacaattctatgaacggttgggattc

SEQ ID NO: 56335 - DNA, 30 bp, Artificial Sequence
  Synthetic oligonucleotide
acccagggttacaaagtagcaagaatattc

SEQ ID NO: 56336 - DNA, 30 bp, Artificial Sequence
  Synthetic oligonucleotide
agtaggccggtacgtatccaaggactattc

SEQ ID NO: 56337 - DNA, 30 bp, Artificial Sequence
  Synthetic oligonucleotide
atggcactaacacggtagaaatgcgtattc

SEQ ID NO: 56338 - DNA, 30 bp, Artificial Sequence
  Synthetic oligonucleotide
cgacaccgatctgaacggaaactagacttc

SEQ ID NO: 56339 - DNA, 30 bp, Artificial Sequence
  Synthetic oligonucleotide
catgcaaagtccgggtcggtgctctacttc

SEQ ID NO: 56340 - DNA, 30 bp, Artificial Sequence
  Synthetic oligonucleotide
atcgcatgtcaatgggaatgcgaccccttc

SEQ ID NO: 56341 - DNA, 30 bp, Artificial Sequence
  Synthetic oligonucleotide
cgcggatgacactgtgcataaaaaggcttc

SEQ ID NO: 56342 - DNA, 30 bp, Artificial Sequence
  Synthetic oligonucleotide
tcacgggccatgcagggtggtcaatgcttc

SEQ ID NO: 56343 - DNA, 30 bp, Artificial Sequence
  Synthetic oligonucleotide
tagagacgagggtctgtttgcgattagttc

SEQ ID NO: 56344 - DNA, 30 bp, Artificial Sequence
  Synthetic oligonucleotide
agcaagcagagaaatatgataattacgttc

SEQ ID NO: 56345 - DNA, 30 bp, Artificial Sequence
  Synthetic oligonucleotide
attacgatgccagtagttccgcgctatttc

SEQ ID NO: 56346 - DNA, 30 bp, Artificial Sequence
  Synthetic oligonucleotide
cagaagaatccatatgctgtccaacctttc

SEQ ID NO: 56347 - DNA, 30 bp, Artificial Sequence
  Synthetic oligonucleotide
cagcagaaagcgatcaaattgttgaaaaag

SEQ ID NO: 56348 - DNA, 30 bp, Artificial Sequence
  Synthetic oligonucleotide
tccagagggggatttaatttgacacaaaag

SEQ ID NO: 56349 - DNA, 30 bp, Artificial Sequence
  Synthetic oligonucleotide
caacggtagaattgggatgcatcgcaaaag

SEQ ID NO: 56350 - DNA, 30 bp, Artificial Sequence
  Synthetic oligonucleotide
tctcgaacaaactaagcccacaggcaaaag

SEQ ID NO: 56351 - DNA, 30 bp, Artificial Sequence
  Synthetic oligonucleotide
tactcggtcaggctattcgagaaagaaaag

SEQ ID NO: 56352 - DNA, 30 bp, Artificial Sequence
  Synthetic oligonucleotide
gcatatgagagggtgcacagacgggaaaag

SEQ ID NO: 56353 - DNA, 30 bp, Artificial Sequence
  Synthetic oligonucleotide
tcgcactgtggaaagaacaaacagtaaaag

SEQ ID NO: 56354 - DNA, 30 bp, Artificial Sequence
  Synthetic oligonucleotide
agtgggagttgtgcttgacgaacgtaaaag

SEQ ID NO: 56355 - DNA, 30 bp, Artificial Sequence
  Synthetic oligonucleotide
agcgggacattatcgtaataccggtaaaag

SEQ ID NO: 56356 - DNA, 30 bp, Artificial Sequence
  Synthetic oligonucleotide
tgtctacatataggcgtgccgagttaaaag

SEQ ID NO: 56357 - DNA, 30 bp, Artificial Sequence
  Synthetic oligonucleotide
gggacacagccgcaagaagtaaaaacaaag

SEQ ID NO: 56358 - DNA, 30 bp, Artificial Sequence
  Synthetic oligonucleotide
acactcgtaaccgggttagacaagacaaag

SEQ ID NO: 56359 - DNA, 30 bp, Artificial Sequence
  Synthetic oligonucleotide
aggttggccggcgccaatatagtgacaaag

SEQ ID NO: 56360 - DNA, 30 bp, Artificial Sequence
  Synthetic oligonucleotide
aagcatttgaacatatgcaactatacaaag

SEQ ID NO: 56361 - DNA, 30 bp, Artificial Sequence
  Synthetic oligonucleotide
gttacgattagccagattacccgtacaaag

SEQ ID NO: 56362 - DNA, 30 bp, Artificial Sequence
  Synthetic oligonucleotide
acatcggcgatgattggcacgcaaccaaag

SEQ ID NO: 56363 - DNA, 30 bp, Artificial Sequence
  Synthetic oligonucleotide
gaactgtcagaaaccatggaggtgccaaag

SEQ ID NO: 56364 - DNA, 30 bp, Artificial Sequence
  Synthetic oligonucleotide
gcgatctggtttattatatacaaggcaaag

SEQ ID NO: 56365 - DNA, 30 bp, Artificial Sequence
  Synthetic oligonucleotide
agactgcaggatcctgatgccgatgcaaag

SEQ ID NO: 56366 - DNA, 30 bp, Artificial Sequence
  Synthetic oligonucleotide
gagagccgttgacggattatcaggtcaaag

SEQ ID NO: 56367 - DNA, 30 bp, Artificial Sequence
  Synthetic oligonucleotide
aagcgaattcgctacgagggcgtgtcaaag

SEQ ID NO: 56368 - DNA, 30 bp, Artificial Sequence
  Synthetic oligonucleotide
cgtaactagaaatgcatcgcacgttcaaag

SEQ ID NO: 56369 - DNA, 30 bp, Artificial Sequence
  Synthetic oligonucleotide
tttgctggaaaggtaagccaagtttcaaag

SEQ ID NO: 56370 - DNA, 30 bp, Artificial Sequence
  Synthetic oligonucleotide
tatgaaacactgaatccacggcaaagaaag

SEQ ID NO: 56371 - DNA, 30 bp, Artificial Sequence
  Synthetic oligonucleotide
tgtacgtgatagaggacggtggacagaaag

SEQ ID NO: 56372 - DNA, 30 bp, Artificial Sequence
  Synthetic oligonucleotide
gtaggacccagttatttgcggatgagaaag

SEQ ID NO: 56373 - DNA, 30 bp, Artificial Sequence
  Synthetic oligonucleotide
gaaactcgtgaggtatgaagcggtagaaag

SEQ ID NO: 56374 - DNA, 30 bp, Artificial Sequence
  Synthetic oligonucleotide
cactacgaaaacgtcatgatggcacgaaag

SEQ ID NO: 56375 - DNA, 30 bp, Artificial Sequence
  Synthetic oligonucleotide
ttacaggtacatcgtctccaacggcgaaag

SEQ ID NO: 56376 - DNA, 30 bp, Artificial Sequence
  Synthetic oligonucleotide
cgaggacttgttatccacgtcccttgaaag

SEQ ID NO: 56377 - DNA, 30 bp, Artificial Sequence
  Synthetic oligonucleotide
acagatagcaaaaggaacggatgtataaag

SEQ ID NO: 56378 - DNA, 30 bp, Artificial Sequence
  Synthetic oligonucleotide
tgccgagttgttcgattcgtcggactaaag

SEQ ID NO: 56379 - DNA, 30 bp, Artificial Sequence
  Synthetic oligonucleotide
cgtaggtcgggcataccttccacattaaag

SEQ ID NO: 56380 - DNA, 30 bp, Artificial Sequence
  Synthetic oligonucleotide
tcgtgatgtacaggatcagtggagttaaag

SEQ ID NO: 56381 - DNA, 30 bp, Artificial Sequence
  Synthetic oligonucleotide
cgataagccgctggacatcagtcgaacaag

SEQ ID NO: 56382 - DNA, 30 bp, Artificial Sequence
  Synthetic oligonucleotide
tggtttgcgataacgtcacacatacacaag

SEQ ID NO: 56383 - DNA, 30 bp, Artificial Sequence
  Synthetic oligonucleotide
ccgatgaatgttgagcccttatgtcacaag

SEQ ID NO: 56384 - DNA, 30 bp, Artificial Sequence
  Synthetic oligonucleotide
ggtcagtaacttggatctggggacgacaag

SEQ ID NO: 56385 - DNA, 30 bp, Artificial Sequence
  Synthetic oligonucleotide
taggtagtctggctagctcatctcgacaag

SEQ ID NO: 56386 - DNA, 30 bp, Artificial Sequence
  Synthetic oligonucleotide
ggcccaattagtgtacactgtacggacaag

SEQ ID NO: 56387 - DNA, 30 bp, Artificial Sequence
  Synthetic oligonucleotide
cgagcatctatttaaatgaccgtatacaag

SEQ ID NO: 56388 - DNA, 30 bp, Artificial Sequence
  Synthetic oligonucleotide
aagccatcatcggcctgtctaaactacaag

SEQ ID NO: 56389 - DNA, 30 bp, Artificial Sequence
  Synthetic oligonucleotide
ggggaactgtgagaagctgcgtattacaag

SEQ ID NO: 56390 - DNA, 30 bp, Artificial Sequence
  Synthetic oligonucleotide
cggactctcagactactaaggggaaccaag

SEQ ID NO: 56391 - DNA, 30 bp, Artificial Sequence
  Synthetic oligonucleotide
ccgcgaaaagaaggagacctcacgaccaag

SEQ ID NO: 56392 - DNA, 30 bp, Artificial Sequence
  Synthetic oligonucleotide
acgcaacaatgtccagtacctgataccaag

SEQ ID NO: 56393 - DNA, 30 bp, Artificial Sequence
  Synthetic oligonucleotide
cggctatcatagaacctcgttactaccaag

SEQ ID NO: 56394 - DNA, 30 bp, Artificial Sequence
  Synthetic oligonucleotide
gaccgtccaaatagtgttggctcgcccaag

SEQ ID NO: 56395 - DNA, 30 bp, Artificial Sequence
  Synthetic oligonucleotide
aggtaacacgaacgggcaagatatcccaag

SEQ ID NO: 56396 - DNA, 30 bp, Artificial Sequence
  Synthetic oligonucleotide
tgctgatggaaagctgttttacaagccaag

SEQ ID NO: 56397 - DNA, 30 bp, Artificial Sequence
  Synthetic oligonucleotide
ttcaaaagtgcggtaaggctcctagccaag

SEQ ID NO: 56398 - DNA, 30 bp, Artificial Sequence
  Synthetic oligonucleotide
tcagccattaaatgtcggcatgtcgccaag

SEQ ID NO: 56399 - DNA, 30 bp, Artificial Sequence
  Synthetic oligonucleotide
gcgggggaagagaatgttcgcacgtccaag

SEQ ID NO: 56400 - DNA, 30 bp, Artificial Sequence
  Synthetic oligonucleotide
gaaggttcacatgctaccgttgggtccaag

SEQ ID NO: 56401 - DNA, 30 bp, Artificial Sequence
  Synthetic oligonucleotide
ggacgtgcacgacagccggaaaaaagcaag

SEQ ID NO: 56402 - DNA, 30 bp, Artificial Sequence
  Synthetic oligonucleotide
gggttccgatgggtacctcagccaggcaag

SEQ ID NO: 56403 - DNA, 30 bp, Artificial Sequence
  Synthetic oligonucleotide
agatttagaatacgtaggaccacgggcaag

SEQ ID NO: 56404 - DNA, 30 bp, Artificial Sequence
  Synthetic oligonucleotide
ttcggagcggtgaacatggaatggggcaag

SEQ ID NO: 56405 - DNA, 30 bp, Artificial Sequence
  Synthetic oligonucleotide
ttaaggcatactgctgcaataatgggcaag

SEQ ID NO: 56406 - DNA, 30 bp, Artificial Sequence
  Synthetic oligonucleotide
ccgctaagggattgagtgtaataatgcaag

SEQ ID NO: 56407 - DNA, 30 bp, Artificial Sequence
  Synthetic oligonucleotide
agctgagctctgctcagtcgcgtttgcaag

SEQ ID NO: 56408 - DNA, 30 bp, Artificial Sequence
  Synthetic oligonucleotide
tacggtaacccggtctttagccgaatcaag

SEQ ID NO: 56409 - DNA, 30 bp, Artificial Sequence
  Synthetic oligonucleotide
tccaggacagggcaactgcttttgatcaag

SEQ ID NO: 56410 - DNA, 30 bp, Artificial Sequence
  Synthetic oligonucleotide
gttaaaaggtgttggcggaggaggctcaag

SEQ ID NO: 56411 - DNA, 30 bp, Artificial Sequence
  Synthetic oligonucleotide
actaggggagaattgaatctggtgctcaag

SEQ ID NO: 56412 - DNA, 30 bp, Artificial Sequence
  Synthetic oligonucleotide
agagaactcctcgttgcacgcgatctcaag

SEQ ID NO: 56413 - DNA, 30 bp, Artificial Sequence
  Synthetic oligonucleotide
ctccgtacgtacgagagcgggggtgtcaag

SEQ ID NO: 56414 - DNA, 30 bp, Artificial Sequence
  Synthetic oligonucleotide
ccgaaaatattttaagcgtatattgtcaag

SEQ ID NO: 56415 - DNA, 30 bp, Artificial Sequence
  Synthetic oligonucleotide
cggaatgttgccacttatacgcttgtcaag

SEQ ID NO: 56416 - DNA, 30 bp, Artificial Sequence
  Synthetic oligonucleotide
ccaggtaaggcagggaaacgccgattcaag

SEQ ID NO: 56417 - DNA, 30 bp, Artificial Sequence
  Synthetic oligonucleotide
agcccatcagggacgtcggtaataaagaag

SEQ ID NO: 56418 - DNA, 30 bp, Artificial Sequence
  Synthetic oligonucleotide
tgtactcccgactgagcaagacacaagaag

SEQ ID NO: 56419 - DNA, 30 bp, Artificial Sequence
  Synthetic oligonucleotide
aagagttactctagcgatgtgtagaagaag

SEQ ID NO: 56420 - DNA, 30 bp, Artificial Sequence
  Synthetic oligonucleotide
cggccggctatcaatcatacgttgaagaag

SEQ ID NO: 56421 - DNA, 30 bp, Artificial Sequence
  Synthetic oligonucleotide
tcgatcctcagccggacacaagcccagaag

SEQ ID NO: 56422 - DNA, 30 bp, Artificial Sequence
  Synthetic oligonucleotide
cataagaggcagacattggggtgcgagaag

SEQ ID NO: 56423 - DNA, 30 bp, Artificial Sequence
  Synthetic oligonucleotide
caaatgagtccacactcatcgcactagaag

SEQ ID NO: 56424 - DNA, 30 bp, Artificial Sequence
  Synthetic oligonucleotide
tcagtacagagaacatggttccttacgaag

SEQ ID NO: 56425 - DNA, 30 bp, Artificial Sequence
  Synthetic oligonucleotide
gcgagaaaagggcataagacgtttacgaag

SEQ ID NO: 56426 - DNA, 30 bp, Artificial Sequence
  Synthetic oligonucleotide
agaattttagacacaattgtaaacccgaag

SEQ ID NO: 56427 - DNA, 30 bp, Artificial Sequence
  Synthetic oligonucleotide
cagctgacgaaaattcaccacgccccgaag

SEQ ID NO: 56428 - DNA, 30 bp, Artificial Sequence
  Synthetic oligonucleotide
aaggcgcggatgtccacgggatgcgcgaag

SEQ ID NO: 56429 - DNA, 30 bp, Artificial Sequence
  Synthetic oligonucleotide
aggagattaccaaactgataccgctcgaag

SEQ ID NO: 56430 - DNA, 30 bp, Artificial Sequence
  Synthetic oligonucleotide
ggccgacttggagtaagagggtggtcgaag

SEQ ID NO: 56431 - DNA, 29 bp, Artificial Sequence
  Synthetic oligonucleotide
gcagtcggggccgtatcaacggaaggaag

SEQ ID NO: 56432 - DNA, 30 bp, Artificial Sequence
  Synthetic oligonucleotide
tggcccatacatgccaaatacccgaggaag

SEQ ID NO: 56433 - DNA, 30 bp, Artificial Sequence
  Synthetic oligonucleotide
gataacatatgattggggcgggtgaggaag

SEQ ID NO: 56434 - DNA, 30 bp, Artificial Sequence
  Synthetic oligonucleotide
ggcggcgtaaatagtaatgaacctaggaag

SEQ ID NO: 56435 - DNA, 30 bp, Artificial Sequence
  Synthetic oligonucleotide
ggctgatcgttcacgatacctcttcggaag

SEQ ID NO: 56436 - DNA, 30 bp, Artificial Sequence
  Synthetic oligonucleotide
tccaatatgatcgctaaaccgagcgggaag

SEQ ID NO: 56437 - DNA, 30 bp, Artificial Sequence
  Synthetic oligonucleotide
agctcgtgaggtccaccaattcctgggaag

SEQ ID NO: 56438 - DNA, 30 bp, Artificial Sequence
  Synthetic oligonucleotide
cacatgggatgagatcaacaaaactggaag

SEQ ID NO: 56439 - DNA, 30 bp, Artificial Sequence
  Synthetic oligonucleotide
gatccaatccgccgtcgattgaagtggaag

SEQ ID NO: 56440 - DNA, 30 bp, Artificial Sequence
  Synthetic oligonucleotide
cgacgttgagctaaaacttagacgtggaag

SEQ ID NO: 56441 - DNA, 30 bp, Artificial Sequence
  Synthetic oligonucleotide
agatatgaaaacttagaggcgacgtggaag

SEQ ID NO: 56442 - DNA, 30 bp, Artificial Sequence
  Synthetic oligonucleotide
cagccgtaagaagacaggggaccgatgaag

SEQ ID NO: 56443 - DNA, 30 bp, Artificial Sequence
  Synthetic oligonucleotide
agccgctcaacgcgaagccggttagtgaag

SEQ ID NO: 56444 - DNA, 30 bp, Artificial Sequence
  Synthetic oligonucleotide
cccatgaaaccaagagatggcgtattgaag

SEQ ID NO: 56445 - DNA, 30 bp, Artificial Sequence
  Synthetic oligonucleotide
gggttgagacatcagaccgactacttgaag

SEQ ID NO: 56446 - DNA, 30 bp, Artificial Sequence
  Synthetic oligonucleotide
attcgaacggcggcaactcaaacaaataag

SEQ ID NO: 56447 - DNA, 30 bp, Artificial Sequence
  Synthetic oligonucleotide
cgtaagtcgcatctcagttgggacaataag

SEQ ID NO: 56448 - DNA, 30 bp, Artificial Sequence
  Synthetic oligonucleotide
tgactcatcccggatcaaaatagacataag

SEQ ID NO: 56449 - DNA, 30 bp, Artificial Sequence
  Synthetic oligonucleotide
aaggccattgtccagcataactgccataag

SEQ ID NO: 56450 - DNA, 30 bp, Artificial Sequence
  Synthetic oligonucleotide
atgtgagagccccaaaactgggctgataag

SEQ ID NO: 56451 - DNA, 30 bp, Artificial Sequence
  Synthetic oligonucleotide
cccatctcgtaacgggagacatcgcctaag

SEQ ID NO: 56452 - DNA, 30 bp, Artificial Sequence
  Synthetic oligonucleotide
cactaattgccaacaggatttactcctaag

SEQ ID NO: 56453 - DNA, 30 bp, Artificial Sequence
  Synthetic oligonucleotide
agaaccggacccggacaataactggctaag

SEQ ID NO: 56454 - DNA, 30 bp, Artificial Sequence
  Synthetic oligonucleotide
gacgcgaaaaaccgattggacctggctaag

SEQ ID NO: 56455 - DNA, 30 bp, Artificial Sequence
  Synthetic oligonucleotide
agcccgtttgtacgaaatgggctggctaag

SEQ ID NO: 56456 - DNA, 30 bp, Artificial Sequence
  Synthetic oligonucleotide
accatgaatatgaggactgccacgtctaag

SEQ ID NO: 56457 - DNA, 30 bp, Artificial Sequence
  Synthetic oligonucleotide
ccgcaactgccggagctgtgagtgtctaag

SEQ ID NO: 56458 - DNA, 30 bp, Artificial Sequence
  Synthetic oligonucleotide
ggcggtccgaatctcacggatcaccgtaag

SEQ ID NO: 56459 - DNA, 30 bp, Artificial Sequence
  Synthetic oligonucleotide
agggactccgccaattactgtgcatgtaag

SEQ ID NO: 56460 - DNA, 30 bp, Artificial Sequence
  Synthetic oligonucleotide
gatgatatggcaggatagaaggcctgtaag

SEQ ID NO: 56461 - DNA, 30 bp, Artificial Sequence
  Synthetic oligonucleotide
ggccgtagggttgcgcgctagtgctgtaag

SEQ ID NO: 56462 - DNA, 30 bp, Artificial Sequence
  Synthetic oligonucleotide
caggggcacgtaagattggtaaacattaag

SEQ ID NO: 56463 - DNA, 30 bp, Artificial Sequence
  Synthetic oligonucleotide
ttgggagcattagcagactgggccattaag

SEQ ID NO: 56464 - DNA, 30 bp, Artificial Sequence
  Synthetic oligonucleotide
cataagagttgaagtattagacagattaag

SEQ ID NO: 56465 - DNA, 30 bp, Artificial Sequence
  Synthetic oligonucleotide
tggagcttcgaaaccccgcccaatattaag

SEQ ID NO: 56466 - DNA, 30 bp, Artificial Sequence
  Synthetic oligonucleotide
catagcgcattcaccaagcattaagttaag

SEQ ID NO: 56467 - DNA, 30 bp, Artificial Sequence
  Synthetic oligonucleotide
tgggtcttgggtacatattgcttcgttaag

SEQ ID NO: 56468 - DNA, 30 bp, Artificial Sequence
  Synthetic oligonucleotide
aacattggaatgccgtgtatcaaggttaag

SEQ ID NO: 56469 - DNA, 30 bp, Artificial Sequence
  Synthetic oligonucleotide
tcatcgcgtacagccctcgtcgcaaaacag

SEQ ID NO: 56470 - DNA, 30 bp, Artificial Sequence
  Synthetic oligonucleotide
taggccgaaggtctttggcgtacgaaacag

SEQ ID NO: 56471 - DNA, 30 bp, Artificial Sequence
  Synthetic oligonucleotide
ttgtaagtgagactaccagcctagcaacag

SEQ ID NO: 56472 - DNA, 31 bp, Artificial Sequence
  Synthetic oligonucleotide
agaatggtggaaaaaaatatcgagctaacag

SEQ ID NO: 56473 - DNA, 30 bp, Artificial Sequence
  Synthetic oligonucleotide
gtgagggaaggggccatgtaaataacacag

SEQ ID NO: 56474 - DNA, 30 bp, Artificial Sequence
  Synthetic oligonucleotide
tggaaaaatcggtcgcaaattcacacacag

SEQ ID NO: 56475 - DNA, 30 bp, Artificial Sequence
  Synthetic oligonucleotide
atcaatacaccagggtcacaagcggcacag

SEQ ID NO: 56476 - DNA, 30 bp, Artificial Sequence
  Synthetic oligonucleotide
ttacgagggtagaaggaaaatgcggcacag

SEQ ID NO: 56477 - DNA, 30 bp, Artificial Sequence
  Synthetic oligonucleotide
atgggtataaggagtatttaaaatgcacag

SEQ ID NO: 56478 - DNA, 30 bp, Artificial Sequence
  Synthetic oligonucleotide
caggggcactattagtggggttaatcacag

SEQ ID NO: 56479 - DNA, 30 bp, Artificial Sequence
  Synthetic oligonucleotide
agtcaccgttggagcaactatgagagacag

SEQ ID NO: 56480 - DNA, 30 bp, Artificial Sequence
  Synthetic oligonucleotide
gcgcgaccacgtgaggctgcaactagacag

SEQ ID NO: 56481 - DNA, 30 bp, Artificial Sequence
  Synthetic oligonucleotide
gaaagtggaaaagtgccttctcctggacag

SEQ ID NO: 56482 - DNA, 30 bp, Artificial Sequence
  Synthetic oligonucleotide
gagcgaacagtgttccttatgcttggacag

SEQ ID NO: 56483 - DNA, 30 bp, Artificial Sequence
  Synthetic oligonucleotide
gaacccttgcacctggttagaagatgacag

SEQ ID NO: 56484 - DNA, 30 bp, Artificial Sequence
  Synthetic oligonucleotide
gacgtcggtgtccaagggtgtcctatacag

SEQ ID NO: 56485 - DNA, 30 bp, Artificial Sequence
  Synthetic oligonucleotide
cgttacatcatatcaccacatctcctacag

SEQ ID NO: 56486 - DNA, 30 bp, Artificial Sequence
  Synthetic oligonucleotide
gtttaatctaagatacaacggagagtacag

SEQ ID NO: 56487 - DNA, 30 bp, Artificial Sequence
  Synthetic oligonucleotide
atgaaattgcttaaacgcgttggcgtacag

SEQ ID NO: 56488 - DNA, 30 bp, Artificial Sequence
  Synthetic oligonucleotide
aggctagtgtctgatcctctcgcggtacag

SEQ ID NO: 56489 - DNA, 30 bp, Artificial Sequence
  Synthetic oligonucleotide
gcgactaccggatgtgaagaccaattacag

SEQ ID NO: 56490 - DNA, 30 bp, Artificial Sequence
  Synthetic oligonucleotide
acgagctcagagtaataggcaaagttacag

SEQ ID NO: 56491 - DNA, 30 bp, Artificial Sequence
  Synthetic oligonucleotide
gggcagtcagggaaacggtttgggaaccag

SEQ ID NO: 56492 - DNA, 30 bp, Artificial Sequence
  Synthetic oligonucleotide
acgtaggcccggagccacgacgaacaccag

SEQ ID NO: 56493 - DNA, 30 bp, Artificial Sequence
  Synthetic oligonucleotide
cgagtagctcaaaatttctcggaccaccag

SEQ ID NO: 56494 - DNA, 30 bp, Artificial Sequence
  Synthetic oligonucleotide
aacggtcttatgtacaatacacgcgaccag

SEQ ID NO: 56495 - DNA, 30 bp, Artificial Sequence
  Synthetic oligonucleotide
gtaccgcaaggaatagttcgggcataccag

SEQ ID NO: 56496 - DNA, 30 bp, Artificial Sequence
  Synthetic oligonucleotide
ggcgacctagaaggggagagttgataccag

SEQ ID NO: 56497 - DNA, 30 bp, Artificial Sequence
  Synthetic oligonucleotide
taggtaacggagttttaccgtacgtaccag

SEQ ID NO: 56498 - DNA, 30 bp, Artificial Sequence
  Synthetic oligonucleotide
acgaaaacgtaatactttatttcgacccag

SEQ ID NO: 56499 - DNA, 30 bp, Artificial Sequence
  Synthetic oligonucleotide
cacgttgatgggtatgaatcatagtcccag

SEQ ID NO: 56500 - DNA, 30 bp, Artificial Sequence
  Synthetic oligonucleotide
tagtagatagaatcaacctagacttcccag

SEQ ID NO: 56501 - DNA, 30 bp, Artificial Sequence
  Synthetic oligonucleotide
tagcacccatatgggggtaagatacgccag

SEQ ID NO: 56502 - DNA, 30 bp, Artificial Sequence
  Synthetic oligonucleotide
tactgagaacctcagtcgcgccggcgccag

SEQ ID NO: 56503 - DNA, 30 bp, Artificial Sequence
  Synthetic oligonucleotide
gtcacaggtgggagcctaactttgcgccag

SEQ ID NO: 56504 - DNA, 30 bp, Artificial Sequence
  Synthetic oligonucleotide
acgggatttctgaccagcggaaaatgccag

SEQ ID NO: 56505 - DNA, 30 bp, Artificial Sequence
  Synthetic oligonucleotide
ccgactaggtcgacatattaggaaatccag

SEQ ID NO: 56506 - DNA, 30 bp, Artificial Sequence
  Synthetic oligonucleotide
atacgtcactccagaaccaaagtgatccag

SEQ ID NO: 56507 - DNA, 30 bp, Artificial Sequence
  Synthetic oligonucleotide
tcagacgcgatggacggattgcgcctccag

SEQ ID NO: 56508 - DNA, 30 bp, Artificial Sequence
  Synthetic oligonucleotide
ctaaaaacacaccaggcggtgaagctccag

SEQ ID NO: 56509 - DNA, 30 bp, Artificial Sequence
  Synthetic oligonucleotide
gggcgctagtccaggtaggcgattgtccag

SEQ ID NO: 56510 - DNA, 30 bp, Artificial Sequence
  Synthetic oligonucleotide
taggagacaagttaccacaggcacttccag

SEQ ID NO: 56511 - DNA, 30 bp, Artificial Sequence
  Synthetic oligonucleotide
catcaaattagctcgcgaaacagtttccag

SEQ ID NO: 56512 - DNA, 30 bp, Artificial Sequence
  Synthetic oligonucleotide
taatagcaatcagcacaggggtgaaagcag

SEQ ID NO: 56513 - DNA, 30 bp, Artificial Sequence
  Synthetic oligonucleotide
tgtcgggatgctttgaatccgggcaagcag

SEQ ID NO: 56514 - DNA, 30 bp, Artificial Sequence
  Synthetic oligonucleotide
acctcaggaataccgtattaagggaagcag

SEQ ID NO: 56515 - DNA, 30 bp, Artificial Sequence
  Synthetic oligonucleotide
ggcatagcactgaggtaaggcaataagcag

SEQ ID NO: 56516 - DNA, 30 bp, Artificial Sequence
  Synthetic oligonucleotide
aaccattcaggcgacagacaacgtaagcag

SEQ ID NO: 56517 - DNA, 30 bp, Artificial Sequence
  Synthetic oligonucleotide
atcgggcaaagttagcagagtgtacagcag

SEQ ID NO: 56518 - DNA, 30 bp, Artificial Sequence
  Synthetic oligonucleotide
ctttgaaatcctttacaaagagtcgagcag

SEQ ID NO: 56519 - DNA, 30 bp, Artificial Sequence
  Synthetic oligonucleotide
agaaccctatcgacatgggtaagggagcag

SEQ ID NO: 56520 - DNA, 30 bp, Artificial Sequence
  Synthetic oligonucleotide
tggggtcataaatactatagtttgtagcag

SEQ ID NO: 56521 - DNA, 30 bp, Artificial Sequence
  Synthetic oligonucleotide
ggatcgcagatctcctttctcagttagcag

SEQ ID NO: 56522 - DNA, 30 bp, Artificial Sequence
  Synthetic oligonucleotide
aaacatagtcgtgacatgagccaaacgcag

SEQ ID NO: 56523 - DNA, 30 bp, Artificial Sequence
  Synthetic oligonucleotide
agcgttgtcacgcgatataaccaaaggcag

SEQ ID NO: 56524 - DNA, 30 bp, Artificial Sequence
  Synthetic oligonucleotide
ttacctgctggtgagcaccttcaaaggcag

SEQ ID NO: 56525 - DNA, 30 bp, Artificial Sequence
  Synthetic oligonucleotide
gttcacggctgatgatgtctaggtaggcag

SEQ ID NO: 56526 - DNA, 30 bp, Artificial Sequence
  Synthetic oligonucleotide
cccaaggtcttggttaagagtgtatggcag

SEQ ID NO: 56527 - DNA, 30 bp, Artificial Sequence
  Synthetic oligonucleotide
cacatactctatgtgcgtagagaaatgcag

SEQ ID NO: 56528 - DNA, 30 bp, Artificial Sequence
  Synthetic oligonucleotide
tgttggggaggaccggctagttatgtgcag

SEQ ID NO: 56529 - DNA, 30 bp, Artificial Sequence
  Synthetic oligonucleotide
cagagccgagtgagagttacccgattgcag

SEQ ID NO: 56530 - DNA, 30 bp, Artificial Sequence
  Synthetic oligonucleotide
cgtcattcttggtcgtctataatgttgcag

SEQ ID NO: 56531 - DNA, 30 bp, Artificial Sequence
  Synthetic oligonucleotide
aagcgttgccgatccgcgcattaaaatcag

SEQ ID NO: 56532 - DNA, 30 bp, Artificial Sequence
  Synthetic oligonucleotide
aggtttgcctctcgaacccggctcaatcag

SEQ ID NO: 56533 - DNA, 30 bp, Artificial Sequence
  Synthetic oligonucleotide
ggcagggtctacatccctaagtggcatcag

SEQ ID NO: 56534 - DNA, 30 bp, Artificial Sequence
  Synthetic oligonucleotide
gcatctcgaacacgatggggaatgcatcag

SEQ ID NO: 56535 - DNA, 30 bp, Artificial Sequence
  Synthetic oligonucleotide
tagttaaagtcttcacaggcatgggatcag

SEQ ID NO: 56536 - DNA, 30 bp, Artificial Sequence
  Synthetic oligonucleotide
tcggccacctgtcaattacctggatatcag

SEQ ID NO: 56537 - DNA, 30 bp, Artificial Sequence
  Synthetic oligonucleotide
tggcgggagggagcgagtagcacaactcag

SEQ ID NO: 56538 - DNA, 30 bp, Artificial Sequence
  Synthetic oligonucleotide
gtgttgaggcgtcgtcgtgggtcaactcag

SEQ ID NO: 56539 - DNA, 30 bp, Artificial Sequence
  Synthetic oligonucleotide
cgttacccgttacttcagcggatgtctcag

SEQ ID NO: 56540 - DNA, 30 bp, Artificial Sequence
  Synthetic oligonucleotide
cgacttcaaagtaactcgctagtgtctcag

SEQ ID NO: 56541 - DNA, 31 bp, Artificial Sequence
  Synthetic oligonucleotide
tatggtagagagtaacgttgagaacagtcag

SEQ ID NO: 56542 - DNA, 30 bp, Artificial Sequence
  Synthetic oligonucleotide
ggacttgcaatgcatttgcgatccagtcag

SEQ ID NO: 56543 - DNA, 30 bp, Artificial Sequence
  Synthetic oligonucleotide
gtacggccaaatggaatctgagttagtcag

SEQ ID NO: 56544 - DNA, 30 bp, Artificial Sequence
  Synthetic oligonucleotide
ctaacagatgacgaatcgttaaaaggtcag

SEQ ID NO: 56545 - DNA, 30 bp, Artificial Sequence
  Synthetic oligonucleotide
aactagagggatcgagaaagtgtaggtcag

SEQ ID NO: 56546 - DNA, 30 bp, Artificial Sequence
  Synthetic oligonucleotide
agctaacattatatcgggactaccggtcag

SEQ ID NO: 56547 - DNA, 30 bp, Artificial Sequence
  Synthetic oligonucleotide
cggttatgcgtcacaacatcgcgcggtcag

SEQ ID NO: 56548 - DNA, 30 bp, Artificial Sequence
  Synthetic oligonucleotide
attcagtagaacaaaatgggcatgggtcag

SEQ ID NO: 56549 - DNA, 30 bp, Artificial Sequence
  Synthetic oligonucleotide
atacggctcgggggaggggctaaatgtcag

SEQ ID NO: 56550 - DNA, 30 bp, Artificial Sequence
  Synthetic oligonucleotide
catgtcggctaacggtactacgtgtgtcag

SEQ ID NO: 56551 - DNA, 30 bp, Artificial Sequence
  Synthetic oligonucleotide
acggagacgaagtacgcgtagggcattcag

SEQ ID NO: 56552 - DNA, 30 bp, Artificial Sequence
  Synthetic oligonucleotide
ccgcgaaagttcagacgtaatcttattcag

SEQ ID NO: 56553 - DNA, 30 bp, Artificial Sequence
  Synthetic oligonucleotide
tcgttgccgcgaaagctcggttgagttcag

SEQ ID NO: 56554 - DNA, 30 bp, Artificial Sequence
  Synthetic oligonucleotide
cgctcgcgatgtgaaatatcaacttttcag

SEQ ID NO: 56555 - DNA, 31 bp, Artificial Sequence
  Synthetic oligonucleotide
gaggcggtttcggcgttcaggtaaaaaagag

SEQ ID NO: 56556 - DNA, 30 bp, Artificial Sequence
  Synthetic oligonucleotide
tatcgggccatcggcactcatcaaaaagag

SEQ ID NO: 56557 - DNA, 30 bp, Artificial Sequence
  Synthetic oligonucleotide
gcaatacggtcagtgacggccagaaaagag

SEQ ID NO: 56558 - DNA, 30 bp, Artificial Sequence
  Synthetic oligonucleotide
cgatctgggataatgttaacaggaaaagag

SEQ ID NO: 56559 - DNA, 30 bp, Artificial Sequence
  Synthetic oligonucleotide
tgggattcttagtctagcgaagtaaaagag

SEQ ID NO: 56560 - DNA, 30 bp, Artificial Sequence
  Synthetic oligonucleotide
tcgtcggggaggaccggcctgaacaaagag

SEQ ID NO: 56561 - DNA, 30 bp, Artificial Sequence
  Synthetic oligonucleotide
acgcgcgttagggtttagtaagcacaagag

SEQ ID NO: 56562 - DNA, 30 bp, Artificial Sequence
  Synthetic oligonucleotide
aacgtcgcataaacgtctacacgccaagag

SEQ ID NO: 56563 - DNA, 30 bp, Artificial Sequence
  Synthetic oligonucleotide
ggggcccccagtctccaagcactgcaagag

SEQ ID NO: 56564 - DNA, 30 bp, Artificial Sequence
  Synthetic oligonucleotide
taagcgtagatgcgggacgcgaactaagag

SEQ ID NO: 56565 - DNA, 30 bp, Artificial Sequence
  Synthetic oligonucleotide
atgggggtggacataataaccgactaagag

SEQ ID NO: 56566 - DNA, 30 bp, Artificial Sequence
  Synthetic oligonucleotide
tatacgaaaaaacgttcgagatactaagag

SEQ ID NO: 56567 - DNA, 30 bp, Artificial Sequence
  Synthetic oligonucleotide
cgttggtatacgcccggcagcaagtaagag

SEQ ID NO: 56568 - DNA, 30 bp, Artificial Sequence
  Synthetic oligonucleotide
ttatgccgacatccaatgtgggcttaagag

SEQ ID NO: 56569 - DNA, 30 bp, Artificial Sequence
  Synthetic oligonucleotide
ccgttagggaaatgggaaggtagaacagag

SEQ ID NO: 56570 - DNA, 30 bp, Artificial Sequence
  Synthetic oligonucleotide
gttcaagaacgaagcgatggcaccacagag

SEQ ID NO: 56571 - DNA, 30 bp, Artificial Sequence
  Synthetic oligonucleotide
gcaagggctagagaccgcacaaatacagag

SEQ ID NO: 56572 - DNA, 30 bp, Artificial Sequence
  Synthetic oligonucleotide
taagggattgggtcaacgtaagcggcagag

SEQ ID NO: 56573 - DNA, 30 bp, Artificial Sequence
  Synthetic oligonucleotide
tctaccatctaaaattgcgtccactcagag

SEQ ID NO: 56574 - DNA, 30 bp, Artificial Sequence
  Synthetic oligonucleotide
cgtgcaccgctggttacagatgagtcagag

SEQ ID NO: 56575 - DNA, 30 bp, Artificial Sequence
  Synthetic oligonucleotide
ggcaaattaactatgtaaatagggtcagag

SEQ ID NO: 56576 - DNA, 30 bp, Artificial Sequence
  Synthetic oligonucleotide
cctaagttctgcgcgggctaacaaagagag

SEQ ID NO: 56577 - DNA, 30 bp, Artificial Sequence
  Synthetic oligonucleotide
cgccgtggtctagactaatgtgtcagagag

SEQ ID NO: 56578 - DNA, 30 bp, Artificial Sequence
  Synthetic oligonucleotide
gtctcccgcggcttaaggaacaaaggagag

SEQ ID NO: 56579 - DNA, 30 bp, Artificial Sequence
  Synthetic oligonucleotide
tcagttggagtgcccttaatataaggagag

SEQ ID NO: 56580 - DNA, 30 bp, Artificial Sequence
  Synthetic oligonucleotide
ggggtgatcaacaactgcataccgtgagag

SEQ ID NO: 56581 - DNA, 30 bp, Artificial Sequence
  Synthetic oligonucleotide
agactcagctggcggaattgtagaatagag

SEQ ID NO: 56582 - DNA, 30 bp, Artificial Sequence
  Synthetic oligonucleotide
tgcacaacatatgtcacggtacgcctagag

SEQ ID NO: 56583 - DNA, 30 bp, Artificial Sequence
  Synthetic oligonucleotide
ggacaacaagaagtgtactacgtcctagag

SEQ ID NO: 56584 - DNA, 30 bp, Artificial Sequence
  Synthetic oligonucleotide
cgtggtgagtgccccgcattcccagtagag

SEQ ID NO: 56585 - DNA, 30 bp, Artificial Sequence
  Synthetic oligonucleotide
taacgagcgataggacaattacgtgtagag

SEQ ID NO: 56586 - DNA, 30 bp, Artificial Sequence
  Synthetic oligonucleotide
tggctagacgccactagataagcattagag

SEQ ID NO: 56587 - DNA, 30 bp, Artificial Sequence
  Synthetic oligonucleotide
tcgagctttcaagtaaactcagccttagag

SEQ ID NO: 56588 - DNA, 30 bp, Artificial Sequence
  Synthetic oligonucleotide
ggactatagggtaggaaaagtgtgttagag

SEQ ID NO: 56589 - DNA, 30 bp, Artificial Sequence
  Synthetic oligonucleotide
actccatacagagattcaggagtaaacgag

SEQ ID NO: 56590 - DNA, 30 bp, Artificial Sequence
  Synthetic oligonucleotide
tgaaacgagttatcttcaacgaagaacgag

SEQ ID NO: 56591 - DNA, 30 bp, Artificial Sequence
  Synthetic oligonucleotide
gcaggtacaggtgcggcttccgagcacgag

SEQ ID NO: 56592 - DNA, 30 bp, Artificial Sequence
  Synthetic oligonucleotide
ggaaccgggtgtatagtcggacacaccgag

SEQ ID NO: 56593 - DNA, 30 bp, Artificial Sequence
  Synthetic oligonucleotide
aatcagacctccgatacagaagacaccgag

SEQ ID NO: 56594 - DNA, 30 bp, Artificial Sequence
  Synthetic oligonucleotide
cgtccttaagtaagttctttacttaccgag

SEQ ID NO: 56595 - DNA, 30 bp, Artificial Sequence
  Synthetic oligonucleotide
gcatgtcccgacccaacgtggcgacccgag

SEQ ID NO: 56596 - DNA, 30 bp, Artificial Sequence
  Synthetic oligonucleotide
cccatagggttaggggccaagtaagccgag

SEQ ID NO: 56597 - DNA, 30 bp, Artificial Sequence
  Synthetic oligonucleotide
agtaaaaggtgacaattttgtcgctccgag

SEQ ID NO: 56598 - DNA, 30 bp, Artificial Sequence
  Synthetic oligonucleotide
taacaatgtggaaccgttgtggcaagcgag

SEQ ID NO: 56599 - DNA, 30 bp, Artificial Sequence
  Synthetic oligonucleotide
tctaaacggtgctttgtacgatagagcgag

SEQ ID NO: 56600 - DNA, 30 bp, Artificial Sequence
  Synthetic oligonucleotide
tagcaaccgagataattctcaaaccgcgag

SEQ ID NO: 56601 - DNA, 30 bp, Artificial Sequence
  Synthetic oligonucleotide
aagagttcagaaattggcagggctcgcgag

SEQ ID NO: 56602 - DNA, 30 bp, Artificial Sequence
  Synthetic oligonucleotide
ccggtaatgcttagcgagttgcgtcgcgag

SEQ ID NO: 56603 - DNA, 30 bp, Artificial Sequence
  Synthetic oligonucleotide
gggagctgagtttgtatatgttaaggcgag

SEQ ID NO: 56604 - DNA, 30 bp, Artificial Sequence
  Synthetic oligonucleotide
ggcagctcccagagaaagttgttcggcgag

SEQ ID NO: 56605 - DNA, 30 bp, Artificial Sequence
  Synthetic oligonucleotide
agagtgcattccattaacattgggtgcgag

SEQ ID NO: 56606 - DNA, 30 bp, Artificial Sequence
  Synthetic oligonucleotide
atagttcgtgcggaattggggctgatcgag

SEQ ID NO: 56607 - DNA, 30 bp, Artificial Sequence
  Synthetic oligonucleotide
tcgatccggctgtagcgcactgcagtcgag

SEQ ID NO: 56608 - DNA, 30 bp, Artificial Sequence
  Synthetic oligonucleotide
accatgaactaggaagttcctgccgtcgag

SEQ ID NO: 56609 - DNA, 30 bp, Artificial Sequence
  Synthetic oligonucleotide
ggagtgcgaattaagacacagggggtcgag

SEQ ID NO: 56610 - DNA, 30 bp, Artificial Sequence
  Synthetic oligonucleotide
ccgcacggagggcagggggtccccttcgag

SEQ ID NO: 56611 - DNA, 30 bp, Artificial Sequence
  Synthetic oligonucleotide
tggtgacacactatgcaggtgcccttcgag

SEQ ID NO: 56612 - DNA, 30 bp, Artificial Sequence
  Synthetic oligonucleotide
gggaatcgcggaacagacttcgccaaggag

SEQ ID NO: 56613 - DNA, 30 bp, Artificial Sequence
  Synthetic oligonucleotide
catactattgaatgcggatgacagaaggag

SEQ ID NO: 56614 - DNA, 30 bp, Artificial Sequence
  Synthetic oligonucleotide
tgcgctacatccaatcctaggatgaaggag

SEQ ID NO: 56615 - DNA, 30 bp, Artificial Sequence
  Synthetic oligonucleotide
aacggctagttcgttagacgagataaggag

SEQ ID NO: 56616 - DNA, 30 bp, Artificial Sequence
  Synthetic oligonucleotide
gggtgggtgggaatgagccgacaacaggag

SEQ ID NO: 56617 - DNA, 30 bp, Artificial Sequence
  Synthetic oligonucleotide
gagacccttgaggatcaaaatccacaggag

SEQ ID NO: 56618 - DNA, 30 bp, Artificial Sequence
  Synthetic oligonucleotide
taggaaacctcaattcaatgaggacaggag

SEQ ID NO: 56619 - DNA, 30 bp, Artificial Sequence
  Synthetic oligonucleotide
aatatggatgaactaggctacttacaggag

SEQ ID NO: 56620 - DNA, 30 bp, Artificial Sequence
  Synthetic oligonucleotide
tcaggcacgactttaaggaggatgcaggag

SEQ ID NO: 56621 - DNA, 30 bp, Artificial Sequence
  Synthetic oligonucleotide
cgacgattgattacgacggtgttagaggag

SEQ ID NO: 56622 - DNA, 30 bp, Artificial Sequence
  Synthetic oligonucleotide
tccgtcatggtgttagacacaggcgaggag

SEQ ID NO: 56623 - DNA, 30 bp, Artificial Sequence
  Synthetic oligonucleotide
ttcgaagcaagagggaatatgaatgaggag

SEQ ID NO: 56624 - DNA, 30 bp, Artificial Sequence
  Synthetic oligonucleotide
acgcaccgactagatttgtgttactaggag

SEQ ID NO: 56625 - DNA, 30 bp, Artificial Sequence
  Synthetic oligonucleotide
gggcgtgcccagtcgggcaatgcctaggag

SEQ ID NO: 56626 - DNA, 30 bp, Artificial Sequence
  Synthetic oligonucleotide
cctcagcttggtgacgtaattgattaggag

SEQ ID NO: 56627 - DNA, 30 bp, Artificial Sequence
  Synthetic oligonucleotide
caagcccgtggtctagcaggaccttaggag

SEQ ID NO: 56628 - DNA, 30 bp, Artificial Sequence
  Synthetic oligonucleotide
acgtacgagccggcacagacgggaacggag

SEQ ID NO: 56629 - DNA, 30 bp, Artificial Sequence
  Synthetic oligonucleotide
tgccgtgagagagagaacgtggctgcggag

SEQ ID NO: 56630 - DNA, 30 bp, Artificial Sequence
  Synthetic oligonucleotide
aactgccgaggtaaaaggacctctgcggag

SEQ ID NO: 56631 - DNA, 30 bp, Artificial Sequence
  Synthetic oligonucleotide
tgacccagcaatggtaagttgcgtgcggag

SEQ ID NO: 56632 - DNA, 30 bp, Artificial Sequence
  Synthetic oligonucleotide
gtggcttgagtaaatcgagcaggatcggag

SEQ ID NO: 56633 - DNA, 30 bp, Artificial Sequence
  Synthetic oligonucleotide
tcaatcagtccgtcgattcgaaggtcggag

SEQ ID NO: 56634 - DNA, 30 bp, Artificial Sequence
  Synthetic oligonucleotide
ctgcgtagtcaacagatcgatccaagggag

SEQ ID NO: 56635 - DNA, 30 bp, Artificial Sequence
  Synthetic oligonucleotide
cgtctgaggaatccacgaaattccagggag

SEQ ID NO: 56636 - DNA, 30 bp, Artificial Sequence
  Synthetic oligonucleotide
aacgcacatgggcctcagcccgtccgggag

SEQ ID NO: 56637 - DNA, 30 bp, Artificial Sequence
  Synthetic oligonucleotide
gttcgcagacaacagtgataggcgcgggag

SEQ ID NO: 56638 - DNA, 30 bp, Artificial Sequence
  Synthetic oligonucleotide
ggtactccatgtagccgaaaacgtggggag

SEQ ID NO: 56639 - DNA, 30 bp, Artificial Sequence
  Synthetic oligonucleotide
aaggaccggacaatctccacctgtggggag

SEQ ID NO: 56640 - DNA, 30 bp, Artificial Sequence
  Synthetic oligonucleotide
agggcagttctatatagaggaatctgggag

SEQ ID NO: 56641 - DNA, 30 bp, Artificial Sequence
  Synthetic oligonucleotide
cgataccgtgtcctccgtactatctgggag

SEQ ID NO: 56642 - DNA, 30 bp, Artificial Sequence
  Synthetic oligonucleotide
acatagagctctgttaacgtacagtgggag

SEQ ID NO: 56643 - DNA, 30 bp, Artificial Sequence
  Synthetic oligonucleotide
aagggcgtctaagacaacaggttaatggag

SEQ ID NO: 56644 - DNA, 30 bp, Artificial Sequence
  Synthetic oligonucleotide
ggctataaggaggttagaaaaaggctggag

SEQ ID NO: 56645 - DNA, 30 bp, Artificial Sequence
  Synthetic oligonucleotide
cctgattcgttcctcggatattgattggag

SEQ ID NO: 56646 - DNA, 30 bp, Artificial Sequence
  Synthetic oligonucleotide
ggtaagcacagtaagaattggcccttggag

SEQ ID NO: 56647 - DNA, 30 bp, Artificial Sequence
  Synthetic oligonucleotide
tcaacgaccggatccagttcgaaaaatgag

SEQ ID NO: 56648 - DNA, 30 bp, Artificial Sequence
  Synthetic oligonucleotide
aggtctgtatgggagccagaagagaatgag

SEQ ID NO: 56649 - DNA, 30 bp, Artificial Sequence
  Synthetic oligonucleotide
aggtgggaataatgctcgatagagaatgag

SEQ ID NO: 56650 - DNA, 30 bp, Artificial Sequence
  Synthetic oligonucleotide
cacgcgtgttttgtagtgtctagacatgag

SEQ ID NO: 56651 - DNA, 30 bp, Artificial Sequence
  Synthetic oligonucleotide
ctcccgacatcatgtcgcccgacccatgag

SEQ ID NO: 56652 - DNA, 30 bp, Artificial Sequence
  Synthetic oligonucleotide
tctcgcgttgttggtgcaggcggtcatgag

SEQ ID NO: 56653 - DNA, 30 bp, Artificial Sequence
  Synthetic oligonucleotide
ctatcgaagaacggggataacacagatgag

SEQ ID NO: 56654 - DNA, 30 bp, Artificial Sequence
  Synthetic oligonucleotide
acgattatagtagggtaacaacgagatgag

SEQ ID NO: 56655 - DNA, 30 bp, Artificial Sequence
  Synthetic oligonucleotide
acatcttcgcggaagcaagatagggatgag

SEQ ID NO: 56656 - DNA, 30 bp, Artificial Sequence
  Synthetic oligonucleotide
agctacggttcgtcgtccgaggtggatgag

SEQ ID NO: 56657 - DNA, 30 bp, Artificial Sequence
  Synthetic oligonucleotide
tgacgtagacgtttcttgggtataactgag

SEQ ID NO: 56658 - DNA, 30 bp, Artificial Sequence
  Synthetic oligonucleotide
tcgaacctatggttgaatggcgagactgag

SEQ ID NO: 56659 - DNA, 30 bp, Artificial Sequence
  Synthetic oligonucleotide
gtatggaacatagtagaagggaatactgag

SEQ ID NO: 56660 - DNA, 30 bp, Artificial Sequence
  Synthetic oligonucleotide
gtgggaactacgagagtgtcctcccctgag

SEQ ID NO: 56661 - DNA, 30 bp, Artificial Sequence
  Synthetic oligonucleotide
gtggggagcaggtctgcgaagtatcctgag

SEQ ID NO: 56662 - DNA, 31 bp, Artificial Sequence
  Synthetic oligonucleotide
ccttgggcccaaatggagcagaccagctgag

SEQ ID NO: 56663 - DNA, 30 bp, Artificial Sequence
  Synthetic oligonucleotide
agatatgccgaataattctcccattctgag

SEQ ID NO: 56664 - DNA, 30 bp, Artificial Sequence
  Synthetic oligonucleotide
acccgaccgaaggaaacaggcaaaagtgag

SEQ ID NO: 56665 - DNA, 30 bp, Artificial Sequence
  Synthetic oligonucleotide
cgtaagggtggcggactagtcgacagtgag

SEQ ID NO: 56666 - DNA, 30 bp, Artificial Sequence
  Synthetic oligonucleotide
atacttacgggcaggttggcgcgacgtgag

SEQ ID NO: 56667 - DNA, 30 bp, Artificial Sequence
  Synthetic oligonucleotide
ttggcaccctgacattactggcctcgtgag

SEQ ID NO: 56668 - DNA, 30 bp, Artificial Sequence
  Synthetic oligonucleotide
catgtgggtttagtgcaatcagccggtgag

SEQ ID NO: 56669 - DNA, 30 bp, Artificial Sequence
  Synthetic oligonucleotide
ggaggctggcgaaggtcacgttagggtgag

SEQ ID NO: 56670 - DNA, 30 bp, Artificial Sequence
  Synthetic oligonucleotide
aaacgtaaactatgtgcttcaccaattgag

SEQ ID NO: 56671 - DNA, 30 bp, Artificial Sequence
  Synthetic oligonucleotide
ttacggagtgaagataactatgtaattgag

SEQ ID NO: 56672 - DNA, 30 bp, Artificial Sequence
  Synthetic oligonucleotide
tgattaacgtatggggttccacggattgag

SEQ ID NO: 56673 - DNA, 30 bp, Artificial Sequence
  Synthetic oligonucleotide
catgaaaaatcgggcccaacgacccttgag

SEQ ID NO: 56674 - DNA, 30 bp, Artificial Sequence
  Synthetic oligonucleotide
caatagatacatgatgttgacaagcttgag

SEQ ID NO: 56675 - DNA, 30 bp, Artificial Sequence
  Synthetic oligonucleotide
agatggtcgaatagctaaataaatcttgag

SEQ ID NO: 56676 - DNA, 30 bp, Artificial Sequence
  Synthetic oligonucleotide
agccgggcacgggaggtgatgcatgttgag

SEQ ID NO: 56677 - DNA, 30 bp, Artificial Sequence
  Synthetic oligonucleotide
tcgaagatcgcctagcccatcaattttgag

SEQ ID NO: 56678 - DNA, 30 bp, Artificial Sequence
  Synthetic oligonucleotide
ctcagtctacgaggatatggaccaaaatag

SEQ ID NO: 56679 - DNA, 30 bp, Artificial Sequence
  Synthetic oligonucleotide
ctgtgtggagccgacgttacgggaaaatag

SEQ ID NO: 56680 - DNA, 30 bp, Artificial Sequence
  Synthetic oligonucleotide
tgtaagatgttaaacgtgctcgctaaatag

SEQ ID NO: 56681 - DNA, 30 bp, Artificial Sequence
  Synthetic oligonucleotide
ctgcaaagctgccgggacgattttaaatag

SEQ ID NO: 56682 - DNA, 30 bp, Artificial Sequence
  Synthetic oligonucleotide
accacccagtacagccctgttcaccaatag

SEQ ID NO: 56683 - DNA, 30 bp, Artificial Sequence
  Synthetic oligonucleotide
ccttgggctagctaccgaggcgagtaatag

SEQ ID NO: 56684 - DNA, 30 bp, Artificial Sequence
  Synthetic oligonucleotide
gaacattgagacatgatattggggacatag

SEQ ID NO: 56685 - DNA, 30 bp, Artificial Sequence
  Synthetic oligonucleotide
caagaatctttaaagtgtgttaacccatag

SEQ ID NO: 56686 - DNA, 30 bp, Artificial Sequence
  Synthetic oligonucleotide
tattcctcaagaaaacagtatgacccatag

SEQ ID NO: 56687 - DNA, 30 bp, Artificial Sequence
  Synthetic oligonucleotide
agttcgggggcctgacaccggaggccatag

SEQ ID NO: 56688 - DNA, 30 bp, Artificial Sequence
  Synthetic oligonucleotide
aaccttagccacctgcaggagattccatag

SEQ ID NO: 56689 - DNA, 30 bp, Artificial Sequence
  Synthetic oligonucleotide
gtgaaacgagtatggacgcgacaggcatag

SEQ ID NO: 56690 - DNA, 30 bp, Artificial Sequence
  Synthetic oligonucleotide
gtcggatagatggaagccacactggcatag

SEQ ID NO: 56691 - DNA, 30 bp, Artificial Sequence
  Synthetic oligonucleotide
gaagataagaattaccgagtgcttgcatag

SEQ ID NO: 56692 - DNA, 30 bp, Artificial Sequence
  Synthetic oligonucleotide
actcgtgtcgatggaacattagttgcatag

SEQ ID NO: 56693 - DNA, 30 bp, Artificial Sequence
  Synthetic oligonucleotide
taccggttaggtggttcagtacgctcatag

SEQ ID NO: 56694 - DNA, 30 bp, Artificial Sequence
  Synthetic oligonucleotide
agtattcaacagtctgtcatcgagtcatag

SEQ ID NO: 56695 - DNA, 30 bp, Artificial Sequence
  Synthetic oligonucleotide
cgtgggatagatcacggatcggggtcatag

SEQ ID NO: 56696 - DNA, 30 bp, Artificial Sequence
  Synthetic oligonucleotide
gtaaggcatatacacgtctctacgagatag

SEQ ID NO: 56697 - DNA, 30 bp, Artificial Sequence
  Synthetic oligonucleotide
gtgcccaggcagggacgttaagggcgatag

SEQ ID NO: 56698 - DNA, 30 bp, Artificial Sequence
  Synthetic oligonucleotide
gggaaatcccaatgttgctctagtggatag

SEQ ID NO: 56699 - DNA, 30 bp, Artificial Sequence
  Synthetic oligonucleotide
tctcatcggggcaaccgttccacatgatag

SEQ ID NO: 56700 - DNA, 30 bp, Artificial Sequence
  Synthetic oligonucleotide
tcgggatattcatacggtgcggaaatatag

SEQ ID NO: 56701 - DNA, 30 bp, Artificial Sequence
  Synthetic oligonucleotide
agaggatggtaaacaaaatggaatatatag

SEQ ID NO: 56702 - DNA, 30 bp, Artificial Sequence
  Synthetic oligonucleotide
ataaggtaagagaatgtgcgctccctatag

SEQ ID NO: 56703 - DNA, 31 bp, Artificial Sequence
  Synthetic oligonucleotide
aaccaatacggagtgacccgaagagctatag

SEQ ID NO: 56704 - DNA, 30 bp, Artificial Sequence
  Synthetic oligonucleotide
agttcgtaaacaccgtgaatctaagtatag

SEQ ID NO: 56705 - DNA, 30 bp, Artificial Sequence
  Synthetic oligonucleotide
ggtgtaagcaacttgacccaccccgtatag

SEQ ID NO: 56706 - DNA, 30 bp, Artificial Sequence
  Synthetic oligonucleotide
gggagccagggccttagttagcacttatag

SEQ ID NO: 56707 - DNA, 30 bp, Artificial Sequence
  Synthetic oligonucleotide
aggcaaagggtgaaaaggacgtgtttatag

SEQ ID NO: 56708 - DNA, 30 bp, Artificial Sequence
  Synthetic oligonucleotide
aagggcaacggtaaagcgcttgaaaactag

SEQ ID NO: 56709 - DNA, 30 bp, Artificial Sequence
  Synthetic oligonucleotide
gaaggagccttatgtccagttgaacactag

SEQ ID NO: 56710 - DNA, 30 bp, Artificial Sequence
  Synthetic oligonucleotide
gcgtaagtactgtggactttacaagactag

SEQ ID NO: 56711 - DNA, 30 bp, Artificial Sequence
  Synthetic oligonucleotide
catcagagcaagcgctaagcttggtactag

SEQ ID NO: 56712 - DNA, 30 bp, Artificial Sequence
  Synthetic oligonucleotide
gtccacagcggggcataatatacaacctag

SEQ ID NO: 56713 - DNA, 30 bp, Artificial Sequence
  Synthetic oligonucleotide
agagtaacggtaattatgggggcaacctag

SEQ ID NO: 56714 - DNA, 30 bp, Artificial Sequence
  Synthetic oligonucleotide
cggagcttatactgtcatctagacacctag

SEQ ID NO: 56715 - DNA, 30 bp, Artificial Sequence
  Synthetic oligonucleotide
ggcaggaccgacgcgctcactcatacctag

SEQ ID NO: 56716 - DNA, 30 bp, Artificial Sequence
  Synthetic oligonucleotide
ggtacggaagtatactggccagagccctag

SEQ ID NO: 56717 - DNA, 30 bp, Artificial Sequence
  Synthetic oligonucleotide
tgggcgaacgcgcaagtttcggcagcctag

SEQ ID NO: 56718 - DNA, 30 bp, Artificial Sequence
  Synthetic oligonucleotide
gtggccaaacaatgtggtaaacttgcctag

SEQ ID NO: 56719 - DNA, 30 bp, Artificial Sequence
  Synthetic oligonucleotide
cattgagaccgcatcgacaacatcagctag

SEQ ID NO: 56720 - DNA, 30 bp, Artificial Sequence
  Synthetic oligonucleotide
tcgaaaacaaaacattgattaatccgctag

SEQ ID NO: 56721 - DNA, 30 bp, Artificial Sequence
  Synthetic oligonucleotide
cacggatctgaagtacctccagcgcgctag

SEQ ID NO: 56722 - DNA, 30 bp, Artificial Sequence
  Synthetic oligonucleotide
cgaatgaaagttaacggtaccacaggctag

SEQ ID NO: 56723 - DNA, 30 bp, Artificial Sequence
  Synthetic oligonucleotide
ccacattcagctatatgaatctactgctag

SEQ ID NO: 56724 - DNA, 30 bp, Artificial Sequence
  Synthetic oligonucleotide
tgacaaaattatgatccatcgaattgctag

SEQ ID NO: 56725 - DNA, 29 bp, Artificial Sequence
  Synthetic oligonucleotide
tgctcaggcaaacaaccatacgcatctag

SEQ ID NO: 56726 - DNA, 30 bp, Artificial Sequence
  Synthetic oligonucleotide
ctcgaggtgtcgtgggaaatcaatctctag

SEQ ID NO: 56727 - DNA, 30 bp, Artificial Sequence
  Synthetic oligonucleotide
gacgcatattgtggggagaatgtagtctag

SEQ ID NO: 56728 - DNA, 30 bp, Artificial Sequence
  Synthetic oligonucleotide
ttgcggcgactaaacggacagggtttctag

SEQ ID NO: 56729 - DNA, 30 bp, Artificial Sequence
  Synthetic oligonucleotide
gtgggtcatgcgactatgggtcataagtag

SEQ ID NO: 56730 - DNA, 30 bp, Artificial Sequence
  Synthetic oligonucleotide
cattaccccgtgctgtttggtcaacagtag

SEQ ID NO: 56731 - DNA, 30 bp, Artificial Sequence
  Synthetic oligonucleotide
tgttcccggaactcagggaaggaccagtag

SEQ ID NO: 56732 - DNA, 30 bp, Artificial Sequence
  Synthetic oligonucleotide
taccaatcgttggcatagtaaattcagtag

SEQ ID NO: 56733 - DNA, 30 bp, Artificial Sequence
  Synthetic oligonucleotide
ggggcccccggttacgtatgtggagagtag

SEQ ID NO: 56734 - DNA, 30 bp, Artificial Sequence
  Synthetic oligonucleotide
agcgcaggcaaatcgatgtccgctgagtag

SEQ ID NO: 56735 - DNA, 30 bp, Artificial Sequence
  Synthetic oligonucleotide
gacctggccgttatgttgggcgaatagtag

SEQ ID NO: 56736 - DNA, 30 bp, Artificial Sequence
  Synthetic oligonucleotide
aggttgtgctccgtattagaagctacgtag

SEQ ID NO: 56737 - DNA, 30 bp, Artificial Sequence
  Synthetic oligonucleotide
gtcgcgtaaacggcggtaaaaattccgtag

SEQ ID NO: 56738 - DNA, 30 bp, Artificial Sequence
  Synthetic oligonucleotide
tgctagcaagatccagttacaactgcgtag

SEQ ID NO: 56739 - DNA, 30 bp, Artificial Sequence
  Synthetic oligonucleotide
caggggaggcttgtcatcctccggtcgtag

SEQ ID NO: 56740 - DNA, 30 bp, Artificial Sequence
  Synthetic oligonucleotide
gggagaaagatggtatgtcgatggtcgtag

SEQ ID NO: 56741 - DNA, 30 bp, Artificial Sequence
  Synthetic oligonucleotide
ctagcggcgcaaggctgtatacgaaggtag

SEQ ID NO: 56742 - DNA, 30 bp, Artificial Sequence
  Synthetic oligonucleotide
ggtgtcgtgcaatggcacctatccaggtag

SEQ ID NO: 56743 - DNA, 30 bp, Artificial Sequence
  Synthetic oligonucleotide
ccactattcggtaaattcgagcagcggtag

SEQ ID NO: 56744 - DNA, 30 bp, Artificial Sequence
  Synthetic oligonucleotide
aaagggtggatgtagacatcggccgggtag

SEQ ID NO: 56745 - DNA, 30 bp, Artificial Sequence
  Synthetic oligonucleotide
tccgaaggagccacaagaacaggcgggtag

SEQ ID NO: 56746 - DNA, 31 bp, Artificial Sequence
  Synthetic oligonucleotide
gcctaaccaaggtggtaacgcggaggggtag

SEQ ID NO: 56747 - DNA, 30 bp, Artificial Sequence
  Synthetic oligonucleotide
aggtcaaaggagtcatgtgacggtgggtag

SEQ ID NO: 56748 - DNA, 30 bp, Artificial Sequence
  Synthetic oligonucleotide
acatggttcgaagatgtgcgaattgggtag

SEQ ID NO: 56749 - DNA, 30 bp, Artificial Sequence
  Synthetic oligonucleotide
aaatccttccaagaacagccgggaatgtag

SEQ ID NO: 56750 - DNA, 30 bp, Artificial Sequence
  Synthetic oligonucleotide
cgcctaatgagatcaatccatgagatgtag

SEQ ID NO: 56751 - DNA, 30 bp, Artificial Sequence
  Synthetic oligonucleotide
caatgaacttggaacccgcgtcaagtgtag

SEQ ID NO: 56752 - DNA, 30 bp, Artificial Sequence
  Synthetic oligonucleotide
catcgctagcataccgcaaggttcgtgtag

SEQ ID NO: 56753 - DNA, 30 bp, Artificial Sequence
  Synthetic oligonucleotide
gcagcatgctggcttggtaaatgggtgtag

SEQ ID NO: 56754 - DNA, 30 bp, Artificial Sequence
  Synthetic oligonucleotide
gacacaggtccaaagtgctaaattaattag

SEQ ID NO: 56755 - DNA, 30 bp, Artificial Sequence
  Synthetic oligonucleotide
cgggccacgaggtaacaggtgtcagattag

SEQ ID NO: 56756 - DNA, 30 bp, Artificial Sequence
  Synthetic oligonucleotide
ttgtgtaggtagagagctagccgcgattag

SEQ ID NO: 56757 - DNA, 30 bp, Artificial Sequence
  Synthetic oligonucleotide
gtgccttacggtgctgaacatgcatattag

SEQ ID NO: 56758 - DNA, 30 bp, Artificial Sequence
  Synthetic oligonucleotide
gaacatgcgttcgtggggtttcgttattag

SEQ ID NO: 56759 - DNA, 30 bp, Artificial Sequence
  Synthetic oligonucleotide
tccgggcaaggatgcgcggactcaagttag

SEQ ID NO: 56760 - DNA, 30 bp, Artificial Sequence
  Synthetic oligonucleotide
ctgcattgaggggagaaaattggaggttag

SEQ ID NO: 56761 - DNA, 30 bp, Artificial Sequence
  Synthetic oligonucleotide
tacttccggaactaaagtgccaggggttag

SEQ ID NO: 56762 - DNA, 30 bp, Artificial Sequence
  Synthetic oligonucleotide
gggggtgggtgagcgaaccgtatatgttag

SEQ ID NO: 56763 - DNA, 30 bp, Artificial Sequence
  Synthetic oligonucleotide
ggcgtgttttcagtcgaggatgcctgttag

SEQ ID NO: 56764 - DNA, 30 bp, Artificial Sequence
  Synthetic oligonucleotide
cgcgtgcaggcatagaaatacagttgttag

SEQ ID NO: 56765 - DNA, 30 bp, Artificial Sequence
  Synthetic oligonucleotide
cgagacaaacaaggacctgaaaacgtttag

SEQ ID NO: 56766 - DNA, 30 bp, Artificial Sequence
  Synthetic oligonucleotide
ccacaggacagatcgtatctgttcgtttag

SEQ ID NO: 56767 - DNA, 30 bp, Artificial Sequence
  Synthetic oligonucleotide
caccagtgtggtagagcaagagaattttag

SEQ ID NO: 56768 - DNA, 30 bp, Artificial Sequence
  Synthetic oligonucleotide
atatcggagggacgtatatggaataaaacg

SEQ ID NO: 56769 - DNA, 30 bp, Artificial Sequence
  Synthetic oligonucleotide
actcgccaaggaagacggggatggcaaacg

SEQ ID NO: 56770 - DNA, 30 bp, Artificial Sequence
  Synthetic oligonucleotide
tcagatgggcctaccccagaactgcaaacg

SEQ ID NO: 56771 - DNA, 30 bp, Artificial Sequence
  Synthetic oligonucleotide
attgcaatgtcgtgcaaacggtaagaaacg

SEQ ID NO: 56772 - DNA, 30 bp, Artificial Sequence
  Synthetic oligonucleotide
acaaaggtcaaactaggagtttaagaaacg

SEQ ID NO: 56773 - DNA, 30 bp, Artificial Sequence
  Synthetic oligonucleotide
gattaagacatgcgtatgggcgaggaaacg

SEQ ID NO: 56774 - DNA, 30 bp, Artificial Sequence
  Synthetic oligonucleotide
attgcaacaatgttagtacaccattaaacg

SEQ ID NO: 56775 - DNA, 30 bp, Artificial Sequence
  Synthetic oligonucleotide
aagggtgcagggactcgctgtcattaaacg

SEQ ID NO: 56776 - DNA, 30 bp, Artificial Sequence
  Synthetic oligonucleotide
ttagaatagtcaactgagaccagaacaacg

SEQ ID NO: 56777 - DNA, 30 bp, Artificial Sequence
  Synthetic oligonucleotide
catttgaaagtgaaggtttggttaacaacg

SEQ ID NO: 56778 - DNA, 30 bp, Artificial Sequence
  Synthetic oligonucleotide
ggcacggagaccctagccgtgtgcacaacg

SEQ ID NO: 56779 - DNA, 30 bp, Artificial Sequence
  Synthetic oligonucleotide
cgattcgggacagcattcaggactccaacg

SEQ ID NO: 56780 - DNA, 30 bp, Artificial Sequence
  Synthetic oligonucleotide
gtcgagatgcgagaaagcatacctgcaacg

SEQ ID NO: 56781 - DNA, 30 bp, Artificial Sequence
  Synthetic oligonucleotide
tagatggagactgggtctgtcatatcaacg

SEQ ID NO: 56782 - DNA, 30 bp, Artificial Sequence
  Synthetic oligonucleotide
taaagtctcccagaggacaagtgctcaacg

SEQ ID NO: 56783 - DNA, 30 bp, Artificial Sequence
  Synthetic oligonucleotide
ataagtaggtgggtcacattttacagaacg

SEQ ID NO: 56784 - DNA, 30 bp, Artificial Sequence
  Synthetic oligonucleotide
tcggacaggttaggacgttttatcagaacg

SEQ ID NO: 56785 - DNA, 30 bp, Artificial Sequence
  Synthetic oligonucleotide
cgcctgcctggaaggcgaatgcaccgaacg

SEQ ID NO: 56786 - DNA, 30 bp, Artificial Sequence
  Synthetic oligonucleotide
gtatgaagggatcatgtggctcagcgaacg

SEQ ID NO: 56787 - DNA, 30 bp, Artificial Sequence
  Synthetic oligonucleotide
agaagacggacctactttgaggagggaacg

SEQ ID NO: 56788 - DNA, 30 bp, Artificial Sequence
  Synthetic oligonucleotide
gatgagataaaatgtactacggagtgaacg

SEQ ID NO: 56789 - DNA, 30 bp, Artificial Sequence
  Synthetic oligonucleotide
gtgcggtataacatgtagcggatttgaacg

SEQ ID NO: 56790 - DNA, 30 bp, Artificial Sequence
  Synthetic oligonucleotide
ccaagtccccccgacacttcaaacataacg

SEQ ID NO: 56791 - DNA, 30 bp, Artificial Sequence
  Synthetic oligonucleotide
tgtggcgaaggaaggaatatgtacataacg

SEQ ID NO: 56792 - DNA, 30 bp, Artificial Sequence
  Synthetic oligonucleotide
gaagttactagagaacaagtaagcataacg

SEQ ID NO: 56793 - DNA, 30 bp, Artificial Sequence
  Synthetic oligonucleotide
ctactggttcaaaagcatattgaagtaacg

SEQ ID NO: 56794 - DNA, 30 bp, Artificial Sequence
  Synthetic oligonucleotide
tgatttcggatgggcaagacaatcgtaacg

SEQ ID NO: 56795 - DNA, 30 bp, Artificial Sequence
  Synthetic oligonucleotide
tgcttccaaactaatacggagggggtaacg

SEQ ID NO: 56796 - DNA, 30 bp, Artificial Sequence
  Synthetic oligonucleotide
cggcaacacctgagtaatccacaattaacg

SEQ ID NO: 56797 - DNA, 30 bp, Artificial Sequence
  Synthetic oligonucleotide
ccgaacttcgccggacgagagatgttaacg

SEQ ID NO: 56798 - DNA, 30 bp, Artificial Sequence
  Synthetic oligonucleotide
catcacactgaaataggtgaagaaaacacg

SEQ ID NO: 56799 - DNA, 30 bp, Artificial Sequence
  Synthetic oligonucleotide
cgagaaggcaggctgtgctactgaaacacg

SEQ ID NO: 56800 - DNA, 30 bp, Artificial Sequence
  Synthetic oligonucleotide
ggtactaccggcaccgcaagttgaaacacg

SEQ ID NO: 56801 - DNA, 30 bp, Artificial Sequence
  Synthetic oligonucleotide
atagaagtgagtctctaggatctacacacg

SEQ ID NO: 56802 - DNA, 30 bp, Artificial Sequence
  Synthetic oligonucleotide
ctccccgtgaagtaaaagggtacatacacg

SEQ ID NO: 56803 - DNA, 30 bp, Artificial Sequence
  Synthetic oligonucleotide
actacgcgtgggaatcaatgagcatacacg

SEQ ID NO: 56804 - DNA, 30 bp, Artificial Sequence
  Synthetic oligonucleotide
acagtggttggtcaggcgaacagatacacg

SEQ ID NO: 56805 - DNA, 30 bp, Artificial Sequence
  Synthetic oligonucleotide
gaacgcgtaacatgttacgggagctacacg

SEQ ID NO: 56806 - DNA, 30 bp, Artificial Sequence
  Synthetic oligonucleotide
cgtatcgacatgcggggaaaggatgccacg

SEQ ID NO: 56807 - DNA, 30 bp, Artificial Sequence
  Synthetic oligonucleotide
cgttcgaaccgataacattcctgtgccacg

SEQ ID NO: 56808 - DNA, 30 bp, Artificial Sequence
  Synthetic oligonucleotide
agcggccacctggcggaacggctatccacg

SEQ ID NO: 56809 - DNA, 30 bp, Artificial Sequence
  Synthetic oligonucleotide
accaattggaaggggcctgggccgtccacg

SEQ ID NO: 56810 - DNA, 31 bp, Artificial Sequence
  Synthetic oligonucleotide
tattgcgctaaggagcgtacgagtgagcacg

SEQ ID NO: 56811 - DNA, 30 bp, Artificial Sequence
  Synthetic oligonucleotide
tcgactgtagacccacacaagacgggcacg

SEQ ID NO: 56812 - DNA, 30 bp, Artificial Sequence
  Synthetic oligonucleotide
agagagaaccgtcatatatcttttggcacg

SEQ ID NO: 56813 - DNA, 30 bp, Artificial Sequence
  Synthetic oligonucleotide
gatggttcaaaaatggggaaatgctgcacg

SEQ ID NO: 56814 - DNA, 30 bp, Artificial Sequence
  Synthetic oligonucleotide
tcgtgcgccgaaaaaagtcattgttgcacg

SEQ ID NO: 56815 - DNA, 30 bp, Artificial Sequence
  Synthetic oligonucleotide
ccgggtggtcggagatgacatctcatcacg

SEQ ID NO: 56816 - DNA, 30 bp, Artificial Sequence
  Synthetic oligonucleotide
acctaaagcgacaacaggagtgaggtcacg

SEQ ID NO: 56817 - DNA, 30 bp, Artificial Sequence
  Synthetic oligonucleotide
atgggtgctcagctgattcattgattcacg

SEQ ID NO: 56818 - DNA, 30 bp, Artificial Sequence
  Synthetic oligonucleotide
gagcactgaggctttgggcaggtgttcacg

SEQ ID NO: 56819 - DNA, 30 bp, Artificial Sequence
  Synthetic oligonucleotide
cgtatcgataaggctgttccttaaaagacg

SEQ ID NO: 56820 - DNA, 30 bp, Artificial Sequence
  Synthetic oligonucleotide
ggtacaagggccatgctccatgcaaagacg

SEQ ID NO: 56821 - DNA, 30 bp, Artificial Sequence
  Synthetic oligonucleotide
gaacgaacattcgtagggccggtcgagacg

SEQ ID NO: 56822 - DNA, 30 bp, Artificial Sequence
  Synthetic oligonucleotide
atcaaccaaggtcgaaaacttgttgagacg

SEQ ID NO: 56823 - DNA, 30 bp, Artificial Sequence
  Synthetic oligonucleotide
acggatagcgcagtgtcctgaatgtagacg

SEQ ID NO: 56824 - DNA, 30 bp, Artificial Sequence
  Synthetic oligonucleotide
tcatgaatcattaaggtcagggaaacgacg

SEQ ID NO: 56825 - DNA, 30 bp, Artificial Sequence
  Synthetic oligonucleotide
aacaaatagccatggcggatgaatccgacg

SEQ ID NO: 56826 - DNA, 30 bp, Artificial Sequence
  Synthetic oligonucleotide
gcgtaaagcagaagcgaacaggtttcgacg

SEQ ID NO: 56827 - DNA, 30 bp, Artificial Sequence
  Synthetic oligonucleotide
acgaacataagttgaatttggcgtcggacg

SEQ ID NO: 56828 - DNA, 30 bp, Artificial Sequence
  Synthetic oligonucleotide
acgttttaagcggggtgagcaggtcggacg

SEQ ID NO: 56829 - DNA, 30 bp, Artificial Sequence
  Synthetic oligonucleotide
ttcagagtccaacgagacggcgagatgacg

SEQ ID NO: 56830 - DNA, 30 bp, Artificial Sequence
  Synthetic oligonucleotide
cggcgaactgcgcacggaagcttcctgacg

SEQ ID NO: 56831 - DNA, 30 bp, Artificial Sequence
  Synthetic oligonucleotide
tcaggtgcatgaccgtaaattacgctgacg

SEQ ID NO: 56832 - DNA, 30 bp, Artificial Sequence
  Synthetic oligonucleotide
acggtgcctgtcgtgacaatgacacatacg

SEQ ID NO: 56833 - DNA, 30 bp, Artificial Sequence
  Synthetic oligonucleotide
agttggaatctatatacggcggaagatacg

SEQ ID NO: 56834 - DNA, 30 bp, Artificial Sequence
  Synthetic oligonucleotide
agcgggtgacgcgtagccaatggcgatacg

SEQ ID NO: 56835 - DNA, 30 bp, Artificial Sequence
  Synthetic oligonucleotide
acattcgcgagaggatcccgtcagtatacg

SEQ ID NO: 56836 - DNA, 30 bp, Artificial Sequence
  Synthetic oligonucleotide
aatgaaaaagagtatgtgacaatacgtacg

SEQ ID NO: 56837 - DNA, 30 bp, Artificial Sequence
  Synthetic oligonucleotide
gggaatctaggcacccttcaaacaggtacg

SEQ ID NO: 56838 - DNA, 30 bp, Artificial Sequence
  Synthetic oligonucleotide
ggacctaggccaaaaagtgaatcgggtacg

SEQ ID NO: 56839 - DNA, 30 bp, Artificial Sequence
  Synthetic oligonucleotide
aggtgaatagtttccggtccattagttacg

SEQ ID NO: 56840 - DNA, 30 bp, Artificial Sequence
  Synthetic oligonucleotide
acaagaacatctttagaggtgacggttacg

SEQ ID NO: 56841 - DNA, 30 bp, Artificial Sequence
  Synthetic oligonucleotide
gacaatacatacagccgtgcgataaaaccg

SEQ ID NO: 56842 - DNA, 30 bp, Artificial Sequence
  Synthetic oligonucleotide
ggttagtgaccaactaaatgtcccaaaccg

SEQ ID NO: 56843 - DNA, 30 bp, Artificial Sequence
  Synthetic oligonucleotide
ctggcatcgctctagacttcccggaaaccg

SEQ ID NO: 56844 - DNA, 30 bp, Artificial Sequence
  Synthetic oligonucleotide
gaagagcgaatggcatgattggcgcaaccg

SEQ ID NO: 56845 - DNA, 30 bp, Artificial Sequence
  Synthetic oligonucleotide
tcgaacgtagttccaacctcggaggaaccg

SEQ ID NO: 56846 - DNA, 30 bp, Artificial Sequence
  Synthetic oligonucleotide
ccacgtgtacgaaactaacgggctgaaccg

SEQ ID NO: 56847 - DNA, 30 bp, Artificial Sequence
  Synthetic oligonucleotide
cgggatacgtcggggataacggcataaccg

SEQ ID NO: 56848 - DNA, 30 bp, Artificial Sequence
  Synthetic oligonucleotide
cgttagcatcacagcctaaagtattaaccg

SEQ ID NO: 56849 - DNA, 30 bp, Artificial Sequence
  Synthetic oligonucleotide
caaagatgaaaggactatcagatgacaccg

SEQ ID NO: 56850 - DNA, 30 bp, Artificial Sequence
  Synthetic oligonucleotide
agaactatagatagcgcggaggacccaccg

SEQ ID NO: 56851 - DNA, 30 bp, Artificial Sequence
  Synthetic oligonucleotide
ggaagagagaggcaagttgttgtatcaccg

SEQ ID NO: 56852 - DNA, 30 bp, Artificial Sequence
  Synthetic oligonucleotide
taaaggagtttcgtgtcaaagaagagaccg

SEQ ID NO: 56853 - DNA, 30 bp, Artificial Sequence
  Synthetic oligonucleotide
gtcatgaggatacgaagtaaatgtagaccg

SEQ ID NO: 56854 - DNA, 30 bp, Artificial Sequence
  Synthetic oligonucleotide
ccgagctgcatcgaattgcataacggaccg

SEQ ID NO: 56855 - DNA, 30 bp, Artificial Sequence
  Synthetic oligonucleotide
ttcgcgagccacacagaggatatatgaccg

SEQ ID NO: 56856 - DNA, 30 bp, Artificial Sequence
  Synthetic oligonucleotide
agtgactataaggcacacaggagagtaccg

SEQ ID NO: 56857 - DNA, 30 bp, Artificial Sequence
  Synthetic oligonucleotide
ggatgacgatgtagttgtggccgcgtaccg

SEQ ID NO: 56858 - DNA, 30 bp, Artificial Sequence
  Synthetic oligonucleotide
acgtctaaggagggattggcaacaaacccg

SEQ ID NO: 56859 - DNA, 30 bp, Artificial Sequence
  Synthetic oligonucleotide
ggaaacgtggatctttctgatctaaacccg

SEQ ID NO: 56860 - DNA, 30 bp, Artificial Sequence
  Synthetic oligonucleotide
cgatgagacccgggatgcaaatctgacccg

SEQ ID NO: 56861 - DNA, 30 bp, Artificial Sequence
  Synthetic oligonucleotide
tgtccaaacaatgaatatatgagatacccg

SEQ ID NO: 56862 - DNA, 30 bp, Artificial Sequence
  Synthetic oligonucleotide
cctcatctagggcaggaagactgatacccg

SEQ ID NO: 56863 - DNA, 30 bp, Artificial Sequence
  Synthetic oligonucleotide
ttgattccgagcgacacagggccctacccg

SEQ ID NO: 56864 - DNA, 30 bp, Artificial Sequence
  Synthetic oligonucleotide
tgacacttgtcagttcctttacacaccccg

SEQ ID NO: 56865 - DNA, 30 bp, Artificial Sequence
  Synthetic oligonucleotide
agtcctcgggcacacaggtatacgaccccg

SEQ ID NO: 56866 - DNA, 30 bp, Artificial Sequence
  Synthetic oligonucleotide
acttgcaaaggcatagtagcgactgccccg

SEQ ID NO: 56867 - DNA, 30 bp, Artificial Sequence
  Synthetic oligonucleotide
tgagagaacaattttcgcgctgatagcccg

SEQ ID NO: 56868 - DNA, 30 bp, Artificial Sequence
  Synthetic oligonucleotide
acctatatccgagcgcaagaccatcgcccg

SEQ ID NO: 56869 - DNA, 30 bp, Artificial Sequence
  Synthetic oligonucleotide
gatcacagacaactaaacttttcatgcccg

SEQ ID NO: 56870 - DNA, 30 bp, Artificial Sequence
  Synthetic oligonucleotide
catgatgagtgttacgagtatagttgcccg

SEQ ID NO: 56871 - DNA, 30 bp, Artificial Sequence
  Synthetic oligonucleotide
ccactcgatatcataataagtaagctcccg

SEQ ID NO: 56872 - DNA, 30 bp, Artificial Sequence
  Synthetic oligonucleotide
tacatagtccaagtcgggggataagtcccg

SEQ ID NO: 56873 - DNA, 30 bp, Artificial Sequence
  Synthetic oligonucleotide
acggacttgggagcggttgacatagtcccg

SEQ ID NO: 56874 - DNA, 30 bp, Artificial Sequence
  Synthetic oligonucleotide
cagcccagtccaaagggatgagaggtcccg

SEQ ID NO: 56875 - DNA, 30 bp, Artificial Sequence
  Synthetic oligonucleotide
cctaggtggaatgaaggttggcgcaagccg

SEQ ID NO: 56876 - DNA, 30 bp, Artificial Sequence
  Synthetic oligonucleotide
aatgagccacatcctggcaaaggaccgccg

SEQ ID NO: 56877 - DNA, 31 bp, Artificial Sequence
  Synthetic oligonucleotide
gactagcagcgaatcacaaaccggcgcgccg

SEQ ID NO: 56878 - DNA, 30 bp, Artificial Sequence
  Synthetic oligonucleotide
gaagtcaccagtcgtgctaaggaaaggccg

SEQ ID NO: 56879 - DNA, 30 bp, Artificial Sequence
  Synthetic oligonucleotide
gtcagggtttagagggccataaggaggccg

SEQ ID NO: 56880 - DNA, 30 bp, Artificial Sequence
  Synthetic oligonucleotide
catggaataagtacggcgtcgtaacggccg

SEQ ID NO: 56881 - DNA, 30 bp, Artificial Sequence
  Synthetic oligonucleotide
gggtcgaattgtcacgtactagttgggccg

SEQ ID NO: 56882 - DNA, 30 bp, Artificial Sequence
  Synthetic oligonucleotide
tgaatgtgtcaatgcgttacagaactgccg

SEQ ID NO: 56883 - DNA, 30 bp, Artificial Sequence
  Synthetic oligonucleotide
catcgaacggggtggccgggaacactgccg

SEQ ID NO: 56884 - DNA, 30 bp, Artificial Sequence
  Synthetic oligonucleotide
atgcaacatcgccgtccttatcacctgccg

SEQ ID NO: 56885 - DNA, 30 bp, Artificial Sequence
  Synthetic oligonucleotide
agtaaaagaatatcgttagctgctttgccg

SEQ ID NO: 56886 - DNA, 30 bp, Artificial Sequence
  Synthetic oligonucleotide
cctcagtgcctgactcgctacataaatccg

SEQ ID NO: 56887 - DNA, 30 bp, Artificial Sequence
  Synthetic oligonucleotide
aatgcgggggcggggcagaagaataatccg

SEQ ID NO: 56888 - DNA, 30 bp, Artificial Sequence
  Synthetic oligonucleotide
aaacggtggactagccgaaatcgtaatccg

SEQ ID NO: 56889 - DNA, 30 bp, Artificial Sequence
  Synthetic oligonucleotide
tagagctatgctaagcggtcgagtgatccg

SEQ ID NO: 56890 - DNA, 30 bp, Artificial Sequence
  Synthetic oligonucleotide
gggaagaggggcagttggatcctaactccg

SEQ ID NO: 56891 - DNA, 30 bp, Artificial Sequence
  Synthetic oligonucleotide
acgaatatacactggatcttattcactccg

SEQ ID NO: 56892 - DNA, 30 bp, Artificial Sequence
  Synthetic oligonucleotide
gcggaacctttggaaataatgcaatctccg

SEQ ID NO: 56893 - DNA, 30 bp, Artificial Sequence
  Synthetic oligonucleotide
ggctgacgtcaaatatttgattactctccg

SEQ ID NO: 56894 - DNA, 30 bp, Artificial Sequence
  Synthetic oligonucleotide
cgaagcttgcgagccagactagttagtccg

SEQ ID NO: 56895 - DNA, 30 bp, Artificial Sequence
  Synthetic oligonucleotide
agcctaggaagttggccagcgggacgtccg

SEQ ID NO: 56896 - DNA, 30 bp, Artificial Sequence
  Synthetic oligonucleotide
tgtaaggtagctgcagggtgtcgcggtccg

SEQ ID NO: 56897 - DNA, 30 bp, Artificial Sequence
  Synthetic oligonucleotide
caggccgggaggatgaagagaagaattccg

SEQ ID NO: 56898 - DNA, 30 bp, Artificial Sequence
  Synthetic oligonucleotide
tgtgccacataacccacgatcggaattccg

SEQ ID NO: 56899 - DNA, 30 bp, Artificial Sequence
  Synthetic oligonucleotide
aacgcccaggcaacgggtgacgacattccg

SEQ ID NO: 56900 - DNA, 30 bp, Artificial Sequence
  Synthetic oligonucleotide
tgcaaacgaacgtttaagtgtacgcttccg

SEQ ID NO: 56901 - DNA, 30 bp, Artificial Sequence
  Synthetic oligonucleotide
cacaggtgtactaaagaagggctgcttccg

SEQ ID NO: 56902 - DNA, 30 bp, Artificial Sequence
  Synthetic oligonucleotide
gaggtgtagagccgagtatcgaacgttccg

SEQ ID NO: 56903 - DNA, 30 bp, Artificial Sequence
  Synthetic oligonucleotide
tcggcacacggggacgtccattggtttccg

SEQ ID NO: 56904 - DNA, 30 bp, Artificial Sequence
  Synthetic oligonucleotide
gtgccaaaggaaccaccaaatgagaaagcg

SEQ ID NO: 56905 - DNA, 30 bp, Artificial Sequence
  Synthetic oligonucleotide
cgataactgggcggacatatacagcaagcg

SEQ ID NO: 56906 - DNA, 29 bp, Artificial Sequence
  Synthetic oligonucleotide
gttcaggcaaataggatcagatagaagcg

SEQ ID NO: 56907 - DNA, 30 bp, Artificial Sequence
  Synthetic oligonucleotide
atgttcatgaagctggagtcgaacgaagcg

SEQ ID NO: 56908 - DNA, 30 bp, Artificial Sequence
  Synthetic oligonucleotide
tacgcgtagtgatcggaagccacggaagcg

SEQ ID NO: 56909 - DNA, 30 bp, Artificial Sequence
  Synthetic oligonucleotide
caggtcataggatcacagctgagcccagcg

SEQ ID NO: 56910 - DNA, 30 bp, Artificial Sequence
  Synthetic oligonucleotide
agataacaatggacggacccagaatcagcg

SEQ ID NO: 56911 - DNA, 30 bp, Artificial Sequence
  Synthetic oligonucleotide
agggaaagagcctagtatcagtactcagcg

SEQ ID NO: 56912 - DNA, 30 bp, Artificial Sequence
  Synthetic oligonucleotide
ataagagtatacccgatgcgtaagagagcg

SEQ ID NO: 56913 - DNA, 30 bp, Artificial Sequence
  Synthetic oligonucleotide
tgtcagaaagtgtataatgtctcgagagcg

SEQ ID NO: 56914 - DNA, 30 bp, Artificial Sequence
  Synthetic oligonucleotide
ctggtagaagtgagatatagggctagagcg

SEQ ID NO: 56915 - DNA, 30 bp, Artificial Sequence
  Synthetic oligonucleotide
aaaacgtgagcgatggggtaaattagagcg

SEQ ID NO: 56916 - DNA, 30 bp, Artificial Sequence
  Synthetic oligonucleotide
gatgatcatcgacaaaaaatattaggagcg

SEQ ID NO: 56917 - DNA, 30 bp, Artificial Sequence
  Synthetic oligonucleotide
gcgtcggagacggctgcatgggggggagcg

SEQ ID NO: 56918 - DNA, 30 bp, Artificial Sequence
  Synthetic oligonucleotide
cgatgaggcttacccaactttcacatagcg

SEQ ID NO: 56919 - DNA, 30 bp, Artificial Sequence
  Synthetic oligonucleotide
agattgagagggcgcgtagaaacgatagcg

SEQ ID NO: 56920 - DNA, 30 bp, Artificial Sequence
  Synthetic oligonucleotide
atcggggagcaggatcgcctaggagtagcg

SEQ ID NO: 56921 - DNA, 30 bp, Artificial Sequence
  Synthetic oligonucleotide
gggtgagtagtttcgaaaggggtattagcg

SEQ ID NO: 56922 - DNA, 30 bp, Artificial Sequence
  Synthetic oligonucleotide
gacggggttatgacgtgacctcggttagcg

SEQ ID NO: 56923 - DNA, 30 bp, Artificial Sequence
  Synthetic oligonucleotide
aaggggaaggactggtcgacaaagaacgcg

SEQ ID NO: 56924 - DNA, 30 bp, Artificial Sequence
  Synthetic oligonucleotide
tgctaaggagttagcattcgcgagcacgcg

SEQ ID NO: 56925 - DNA, 30 bp, Artificial Sequence
  Synthetic oligonucleotide
tgcgacgaccaggtctggtataaccccgcg

SEQ ID NO: 56926 - DNA, 30 bp, Artificial Sequence
  Synthetic oligonucleotide
agtcaggacagactcgagacaccgcccgcg

SEQ ID NO: 56927 - DNA, 30 bp, Artificial Sequence
  Synthetic oligonucleotide
gcgtaaagcttaaactaaaccgtgcccgcg

SEQ ID NO: 56928 - DNA, 30 bp, Artificial Sequence
  Synthetic oligonucleotide
atggaacttgcgagtgggcattgggccgcg

SEQ ID NO: 56929 - DNA, 30 bp, Artificial Sequence
  Synthetic oligonucleotide
aggatgtggggagatttgctcgcatccgcg

SEQ ID NO: 56930 - DNA, 30 bp, Artificial Sequence
  Synthetic oligonucleotide
tggactagtgtataacgagggaagtccgcg

SEQ ID NO: 56931 - DNA, 30 bp, Artificial Sequence
  Synthetic oligonucleotide
cggttgccattaacggagttacagtccgcg

SEQ ID NO: 56932 - DNA, 30 bp, Artificial Sequence
  Synthetic oligonucleotide
atgggcttaaaaaaactatgcgggcgcgcg

SEQ ID NO: 56933 - DNA, 30 bp, Artificial Sequence
  Synthetic oligonucleotide
gcgggttatgaaacgattggaatgggcgcg

SEQ ID NO: 56934 - DNA, 30 bp, Artificial Sequence
  Synthetic oligonucleotide
gccaaagcggatgaaacgcgtgaatgcgcg

SEQ ID NO: 56935 - DNA, 30 bp, Artificial Sequence
  Synthetic oligonucleotide
tcggttaatggtggagacagtcagtgcgcg

SEQ ID NO: 56936 - DNA, 30 bp, Artificial Sequence
  Synthetic oligonucleotide
atgaatgcttaaggtaggagtccgatcgcg

SEQ ID NO: 56937 - DNA, 30 bp, Artificial Sequence
  Synthetic oligonucleotide
tgggccgtgggttattaacaagaactcgcg

SEQ ID NO: 56938 - DNA, 30 bp, Artificial Sequence
  Synthetic oligonucleotide
cataaatgcgcaaaaagaacagtactcgcg

SEQ ID NO: 56939 - DNA, 30 bp, Artificial Sequence
  Synthetic oligonucleotide
ctcaatgacaacaatacatcctccgtcgcg

SEQ ID NO: 56940 - DNA, 30 bp, Artificial Sequence
  Synthetic oligonucleotide
cgagaggaattactctaactcaagaaggcg

SEQ ID NO: 56941 - DNA, 30 bp, Artificial Sequence
  Synthetic oligonucleotide
accgtggaagcatcactacaccgtaaggcg

SEQ ID NO: 56942 - DNA, 30 bp, Artificial Sequence
  Synthetic oligonucleotide
aggtagattgggaacggctaagcccaggcg

SEQ ID NO: 56943 - DNA, 30 bp, Artificial Sequence
  Synthetic oligonucleotide
ggtgaagtagaaccgatgaccctccaggcg

SEQ ID NO: 56944 - DNA, 30 bp, Artificial Sequence
  Synthetic oligonucleotide
agtaagctggcagtagccaaataagaggcg

SEQ ID NO: 56945 - DNA, 30 bp, Artificial Sequence
  Synthetic oligonucleotide
aggggtactctatgagttaagtcagaggcg

SEQ ID NO: 56946 - DNA, 30 bp, Artificial Sequence
  Synthetic oligonucleotide
ggttacaaatgtataccaggaatttaggcg

SEQ ID NO: 56947 - DNA, 30 bp, Artificial Sequence
  Synthetic oligonucleotide
gaacaatatgaaacgacatggtacacggcg

SEQ ID NO: 56948 - DNA, 30 bp, Artificial Sequence
  Synthetic oligonucleotide
tgcagaaacataacagtcacaattacggcg

SEQ ID NO: 56949 - DNA, 30 bp, Artificial Sequence
  Synthetic oligonucleotide
gactgtcagaaggggtaaactacagcggcg

SEQ ID NO: 56950 - DNA, 30 bp, Artificial Sequence
  Synthetic oligonucleotide
gatggagtatcatcgggtttagtgtcggcg

SEQ ID NO: 56951 - DNA, 30 bp, Artificial Sequence
  Synthetic oligonucleotide
tatgagacatatccaccgttaaattcggcg

SEQ ID NO: 56952 - DNA, 30 bp, Artificial Sequence
  Synthetic oligonucleotide
caaagctgaaaccgtcggtccgtatgggcg

SEQ ID NO: 56953 - DNA, 30 bp, Artificial Sequence
  Synthetic oligonucleotide
cgacgttagctacttcaatcagattgggcg

SEQ ID NO: 56954 - DNA, 30 bp, Artificial Sequence
  Synthetic oligonucleotide
tagccacccggagcgacagttcataatgcg

SEQ ID NO: 56955 - DNA, 30 bp, Artificial Sequence
  Synthetic oligonucleotide
cgagcaaggggtaccgttgtacgacatgcg

SEQ ID NO: 56956 - DNA, 30 bp, Artificial Sequence
  Synthetic oligonucleotide
taacgtgtcaaatcagaggcatgggatgcg

SEQ ID NO: 56957 - DNA, 30 bp, Artificial Sequence
  Synthetic oligonucleotide
actaaggtggcaacaatgttccgtgatgcg

SEQ ID NO: 56958 - DNA, 30 bp, Artificial Sequence
  Synthetic oligonucleotide
agcagagataggttaatcgtgttggctgcg

SEQ ID NO: 56959 - DNA, 30 bp, Artificial Sequence
  Synthetic oligonucleotide
agtagaacagctgggtgaagagtatctgcg

SEQ ID NO: 56960 - DNA, 30 bp, Artificial Sequence
  Synthetic oligonucleotide
cgtccactagtgactattgactgctctgcg

SEQ ID NO: 56961 - DNA, 30 bp, Artificial Sequence
  Synthetic oligonucleotide
taggtaaactggtcgtgtgagcggagtgcg

SEQ ID NO: 56962 - DNA, 30 bp, Artificial Sequence
  Synthetic oligonucleotide
caggagttgtcctaggcagctctgagtgcg

SEQ ID NO: 56963 - DNA, 30 bp, Artificial Sequence
  Synthetic oligonucleotide
ggacgccatacaggcaaactgagtcgtgcg

SEQ ID NO: 56964 - DNA, 30 bp, Artificial Sequence
  Synthetic oligonucleotide
tagacaggggctcgatgtgaggccggtgcg

SEQ ID NO: 56965 - DNA, 30 bp, Artificial Sequence
  Synthetic oligonucleotide
caagtagaacgacaacgtctcgctggtgcg

SEQ ID NO: 56966 - DNA, 30 bp, Artificial Sequence
  Synthetic oligonucleotide
aggtgggatgtggagaatatggacgttgcg

SEQ ID NO: 56967 - DNA, 30 bp, Artificial Sequence
  Synthetic oligonucleotide
gcctaaacccataagacatgacccgttgcg

SEQ ID NO: 56968 - DNA, 30 bp, Artificial Sequence
  Synthetic oligonucleotide
agctcctaaaaaaacccgctaacggttgcg

SEQ ID NO: 56969 - DNA, 29 bp, Artificial Sequence
  Synthetic oligonucleotide
gcaaggatacataaagcaataacaaatcg

SEQ ID NO: 56970 - DNA, 30 bp, Artificial Sequence
  Synthetic oligonucleotide
tcagagaacgggagctcgaaagtgaaatcg

SEQ ID NO: 56971 - DNA, 30 bp, Artificial Sequence
  Synthetic oligonucleotide
gataaacacgctacgaaggtctgtaaatcg

SEQ ID NO: 56972 - DNA, 30 bp, Artificial Sequence
  Synthetic oligonucleotide
acggccaatggtttctcttgaccacaatcg

SEQ ID NO: 56973 - DNA, 30 bp, Artificial Sequence
  Synthetic oligonucleotide
acgggaataagttaaccaacattgcaatcg

SEQ ID NO: 56974 - DNA, 30 bp, Artificial Sequence
  Synthetic oligonucleotide
tgggcagtatagaagcaaactttaacatcg

SEQ ID NO: 56975 - DNA, 30 bp, Artificial Sequence
  Synthetic oligonucleotide
gggttatcaattagccatccgcccacatcg

SEQ ID NO: 56976 - DNA, 30 bp, Artificial Sequence
  Synthetic oligonucleotide
caaggcggcattttttctggcttaccatcg

SEQ ID NO: 56977 - DNA, 30 bp, Artificial Sequence
  Synthetic oligonucleotide
cgggagttgtatgatacctgaaaagcatcg

SEQ ID NO: 56978 - DNA, 30 bp, Artificial Sequence
  Synthetic oligonucleotide
taggtcaaactatctcaatccttcgcatcg

SEQ ID NO: 56979 - DNA, 30 bp, Artificial Sequence
  Synthetic oligonucleotide
gtgtcagagaggaggtatggaatatcatcg

SEQ ID NO: 56980 - DNA, 30 bp, Artificial Sequence
  Synthetic oligonucleotide
acaaagcggtaacgctctctaacgtcatcg

SEQ ID NO: 56981 - DNA, 30 bp, Artificial Sequence
  Synthetic oligonucleotide
cgcaaacataaacacgttcagatgtcatcg

SEQ ID NO: 56982 - DNA, 30 bp, Artificial Sequence
  Synthetic oligonucleotide
aacgagaatggattctgtcttagaagatcg

SEQ ID NO: 56983 - DNA, 30 bp, Artificial Sequence
  Synthetic oligonucleotide
tggtcgagggtggagcatcctaatagatcg

SEQ ID NO: 56984 - DNA, 30 bp, Artificial Sequence
  Synthetic oligonucleotide
gagatgtacctcatatactgctagtgatcg

SEQ ID NO: 56985 - DNA, 30 bp, Artificial Sequence
  Synthetic oligonucleotide
agggaaggtaaatggcccgacccgtgatcg

SEQ ID NO: 56986 - DNA, 30 bp, Artificial Sequence
  Synthetic oligonucleotide
acttcctgattctgattcgaagatgtatcg

SEQ ID NO: 56987 - DNA, 30 bp, Artificial Sequence
  Synthetic oligonucleotide
cacgatcgctcgtgcaaaccatagttatcg

SEQ ID NO: 56988 - DNA, 30 bp, Artificial Sequence
  Synthetic oligonucleotide
cagacgtgtcacggaatggtaaaaaactcg

SEQ ID NO: 56989 - DNA, 30 bp, Artificial Sequence
  Synthetic oligonucleotide
gcatattcgggctactaaggctcaaactcg

SEQ ID NO: 56990 - DNA, 30 bp, Artificial Sequence
  Synthetic oligonucleotide
gtacacaggcgccactactgttagaactcg

SEQ ID NO: 56991 - DNA, 30 bp, Artificial Sequence
  Synthetic oligonucleotide
gatagactaagttggaaagtctaacactcg

SEQ ID NO: 56992 - DNA, 30 bp, Artificial Sequence
  Synthetic oligonucleotide
atgtaggtcggcgtttacagcatgcactcg

SEQ ID NO: 56993 - DNA, 30 bp, Artificial Sequence
  Synthetic oligonucleotide
tcacaggtagtacagtgaaacgctcactcg

SEQ ID NO: 56994 - DNA, 30 bp, Artificial Sequence
  Synthetic oligonucleotide
gaacattgcctgacatgggcctagacctcg

SEQ ID NO: 56995 - DNA, 30 bp, Artificial Sequence
  Synthetic oligonucleotide
tggattagaagtactcttatatcgccctcg

SEQ ID NO: 56996 - DNA, 30 bp, Artificial Sequence
  Synthetic oligonucleotide
cctcagagcatcgacagtttccagtcctcg

SEQ ID NO: 56997 - DNA, 30 bp, Artificial Sequence
  Synthetic oligonucleotide
tcaggtgcaagttttagcaggtttagctcg

SEQ ID NO: 56998 - DNA, 30 bp, Artificial Sequence
  Synthetic oligonucleotide
ctccggtcaggaacgtaagaatcacgctcg

SEQ ID NO: 56999 - DNA, 30 bp, Artificial Sequence
  Synthetic oligonucleotide
acgtgtcagggcaattatcgccaccgctcg

SEQ ID NO: 57000 - DNA, 30 bp, Artificial Sequence
  Synthetic oligonucleotide
ggatcgtgaaggcgggatactggaggctcg

SEQ ID NO: 57001 - DNA, 30 bp, Artificial Sequence
  Synthetic oligonucleotide
caactgagccggaatagagcctggtgctcg

SEQ ID NO: 57002 - DNA, 30 bp, Artificial Sequence
  Synthetic oligonucleotide
agaaacaaacgtcttattaccataatctcg

SEQ ID NO: 57003 - DNA, 30 bp, Artificial Sequence
  Synthetic oligonucleotide
taagtccagatgatgacaaccagtatctcg

SEQ ID NO: 57004 - DNA, 30 bp, Artificial Sequence
  Synthetic oligonucleotide
agcggagcgtttgcttgctgagctctctcg

SEQ ID NO: 57005 - DNA, 30 bp, Artificial Sequence
  Synthetic oligonucleotide
gcagagaatgaatgagaaactagagtctcg

SEQ ID NO: 57006 - DNA, 30 bp, Artificial Sequence
  Synthetic oligonucleotide
gccgcatagtaaacgaatccaaaaaagtcg

SEQ ID NO: 57007 - DNA, 30 bp, Artificial Sequence
  Synthetic oligonucleotide
ccatcgtctactacgggtcttgataagtcg

SEQ ID NO: 57008 - DNA, 30 bp, Artificial Sequence
  Synthetic oligonucleotide
cggccgaagcggagaaaggtgggagagtcg

SEQ ID NO: 57009 - DNA, 30 bp, Artificial Sequence
  Synthetic oligonucleotide
gagtcatagaagaaaggtgttctagagtcg

SEQ ID NO: 57010 - DNA, 30 bp, Artificial Sequence
  Synthetic oligonucleotide
tcagggttccgggatccattaataacgtcg

SEQ ID NO: 57011 - DNA, 30 bp, Artificial Sequence
  Synthetic oligonucleotide
gggaacacacaagatccatgtttaacgtcg

SEQ ID NO: 57012 - DNA, 30 bp, Artificial Sequence
  Synthetic oligonucleotide
ggggcgaggaacgtataagatcgcgcgtcg

SEQ ID NO: 57013 - DNA, 30 bp, Artificial Sequence
  Synthetic oligonucleotide
ggcgaacgggggcctccaaaattcaggtcg

SEQ ID NO: 57014 - DNA, 30 bp, Artificial Sequence
  Synthetic oligonucleotide
ggcggaatatctaaaggatattgtcggtcg

SEQ ID NO: 57015 - DNA, 30 bp, Artificial Sequence
  Synthetic oligonucleotide
cgttcaatcagtcatccctcatcatggtcg

SEQ ID NO: 57016 - DNA, 30 bp, Artificial Sequence
  Synthetic oligonucleotide
tgatcgcgaacatcaggttgttcggtgtcg

SEQ ID NO: 57017 - DNA, 30 bp, Artificial Sequence
  Synthetic oligonucleotide
acaacgtcgatcccgcttaagacccattcg

SEQ ID NO: 57018 - DNA, 30 bp, Artificial Sequence
  Synthetic oligonucleotide
ttcactgtggaaacacatcaacaagattcg

SEQ ID NO: 57019 - DNA, 30 bp, Artificial Sequence
  Synthetic oligonucleotide
gcggtaacacgctagttacgtcaagattcg

SEQ ID NO: 57020 - DNA, 30 bp, Artificial Sequence
  Synthetic oligonucleotide
aacgatcagatggggtctcggtaatattcg

SEQ ID NO: 57021 - DNA, 30 bp, Artificial Sequence
  Synthetic oligonucleotide
tatgcgtcacaaagtgccgtcatagcttcg

SEQ ID NO: 57022 - DNA, 30 bp, Artificial Sequence
  Synthetic oligonucleotide
tagtgaggggaagccacattgggaagttcg

SEQ ID NO: 57023 - DNA, 30 bp, Artificial Sequence
  Synthetic oligonucleotide
tgggtcattccaaccacgacgaacagttcg

SEQ ID NO: 57024 - DNA, 30 bp, Artificial Sequence
  Synthetic oligonucleotide
gcgatttaggtgctatatccagttcgttcg

SEQ ID NO: 57025 - DNA, 30 bp, Artificial Sequence
  Synthetic oligonucleotide
taggccagtgcggcgtcaatcacaggttcg

SEQ ID NO: 57026 - DNA, 30 bp, Artificial Sequence
  Synthetic oligonucleotide
tcccaggcagaaaggattatgaacggttcg

SEQ ID NO: 57027 - DNA, 30 bp, Artificial Sequence
  Synthetic oligonucleotide
agtaacacagcgtgacagattaggggttcg

SEQ ID NO: 57028 - DNA, 30 bp, Artificial Sequence
  Synthetic oligonucleotide
cgagagctagttacaaccgatttcatttcg

SEQ ID NO: 57029 - DNA, 30 bp, Artificial Sequence
  Synthetic oligonucleotide
gtgaaccggcccgatctgtatggattttcg

SEQ ID NO: 57030 - DNA, 30 bp, Artificial Sequence
  Synthetic oligonucleotide
acagaacgccctggccgccccgcaaaaagg

SEQ ID NO: 57031 - DNA, 30 bp, Artificial Sequence
  Synthetic oligonucleotide
tcaaaaacacaaataaatgttgcgaaaagg

SEQ ID NO: 57032 - DNA, 30 bp, Artificial Sequence
  Synthetic oligonucleotide
aataaaataaggggatgtgtctctaaaagg

SEQ ID NO: 57033 - DNA, 30 bp, Artificial Sequence
  Synthetic oligonucleotide
gcatcaaaagcctcgtattagggtaaaagg

SEQ ID NO: 57034 - DNA, 30 bp, Artificial Sequence
  Synthetic oligonucleotide
agtaggctagtgcacggcaagcttaaaagg

SEQ ID NO: 57035 - DNA, 30 bp, Artificial Sequence
  Synthetic oligonucleotide
tatagggacgggtaaacgacgacgcaaagg

SEQ ID NO: 57036 - DNA, 31 bp, Artificial Sequence
  Synthetic oligonucleotide
acagatggctgtggtgcgcgttcatcaaagg

SEQ ID NO: 57037 - DNA, 30 bp, Artificial Sequence
  Synthetic oligonucleotide
tacgaaatcgttaggtcggaggtcacaagg

SEQ ID NO: 57038 - DNA, 30 bp, Artificial Sequence
  Synthetic oligonucleotide
cattcatgtctaactaccgagaatacaagg

SEQ ID NO: 57039 - DNA, 30 bp, Artificial Sequence
  Synthetic oligonucleotide
cctgagtatagggctcccatcgctacaagg

SEQ ID NO: 57040 - DNA, 30 bp, Artificial Sequence
  Synthetic oligonucleotide
ggaaggggataatcaggactcggaccaagg

SEQ ID NO: 57041 - DNA, 30 bp, Artificial Sequence
  Synthetic oligonucleotide
acgagctgcatgccgcctgttcgcccaagg

SEQ ID NO: 57042 - DNA, 30 bp, Artificial Sequence
  Synthetic oligonucleotide
ttaagaccatccagggttcctgtagcaagg

SEQ ID NO: 57043 - DNA, 30 bp, Artificial Sequence
  Synthetic oligonucleotide
gtgcgaatctttcagagtacaggcgcaagg

SEQ ID NO: 57044 - DNA, 30 bp, Artificial Sequence
  Synthetic oligonucleotide
aaaggtgccatgataccatcaggtgcaagg

SEQ ID NO: 57045 - DNA, 30 bp, Artificial Sequence
  Synthetic oligonucleotide
tagtaaggtcaatacaaacacctatcaagg

SEQ ID NO: 57046 - DNA, 30 bp, Artificial Sequence
  Synthetic oligonucleotide
gaaacaaaagattataactatgcctcaagg

SEQ ID NO: 57047 - DNA, 30 bp, Artificial Sequence
  Synthetic oligonucleotide
ccaagataatactcggaccaacggtcaagg

SEQ ID NO: 57048 - DNA, 30 bp, Artificial Sequence
  Synthetic oligonucleotide
cattggcaacaaatccgttcatggtcaagg

SEQ ID NO: 57049 - DNA, 30 bp, Artificial Sequence
  Synthetic oligonucleotide
gccgcgacaacgggagttactcagcgaagg

SEQ ID NO: 57050 - DNA, 30 bp, Artificial Sequence
  Synthetic oligonucleotide
ggtgcgaacgtcgctcgataatagggaagg

SEQ ID NO: 57051 - DNA, 30 bp, Artificial Sequence
  Synthetic oligonucleotide
gcggaggttagtgctcacgtatcgggaagg

SEQ ID NO: 57052 - DNA, 30 bp, Artificial Sequence
  Synthetic oligonucleotide
agtccgaacttattgaccggggaatgaagg

SEQ ID NO: 57053 - DNA, 30 bp, Artificial Sequence
  Synthetic oligonucleotide
ggaaatgccgtatagaacacaatatgaagg

SEQ ID NO: 57054 - DNA, 30 bp, Artificial Sequence
  Synthetic oligonucleotide
gtaggatggcccgctccgaaacagtgaagg

SEQ ID NO: 57055 - DNA, 30 bp, Artificial Sequence
  Synthetic oligonucleotide
ccgaagaacatatttctatcgagactaagg

SEQ ID NO: 57056 - DNA, 30 bp, Artificial Sequence
  Synthetic oligonucleotide
cggacgtagatgacaggatgatgactaagg

SEQ ID NO: 57057 - DNA, 30 bp, Artificial Sequence
  Synthetic oligonucleotide
caaggatgtgtacgatgtcgtcgtctaagg

SEQ ID NO: 57058 - DNA, 30 bp, Artificial Sequence
  Synthetic oligonucleotide
ggaggaaggttccaaatcatatatgtaagg

SEQ ID NO: 57059 - DNA, 30 bp, Artificial Sequence
  Synthetic oligonucleotide
agagtggaggggtgcgtttgaccattaagg

SEQ ID NO: 57060 - DNA, 30 bp, Artificial Sequence
  Synthetic oligonucleotide
gtgccgttcgacataagcttaaagaacagg

SEQ ID NO: 57061 - DNA, 30 bp, Artificial Sequence
  Synthetic oligonucleotide
gagcggatgactggtctgtaaaggaacagg

SEQ ID NO: 57062 - DNA, 30 bp, Artificial Sequence
  Synthetic oligonucleotide
ggtccctctggaatataatggcgtaacagg

SEQ ID NO: 57063 - DNA, 30 bp, Artificial Sequence
  Synthetic oligonucleotide
gaatgtgtaatcgggcaattaaaagacagg

SEQ ID NO: 57064 - DNA, 30 bp, Artificial Sequence
  Synthetic oligonucleotide
agcgtagcacgtagccgatacgtggacagg

SEQ ID NO: 57065 - DNA, 30 bp, Artificial Sequence
  Synthetic oligonucleotide
agttaaactggaaatttgtgaacatacagg

SEQ ID NO: 57066 - DNA, 30 bp, Artificial Sequence
  Synthetic oligonucleotide
gccgtggggtgaatgtgagttaggtacagg

SEQ ID NO: 57067 - DNA, 30 bp, Artificial Sequence
  Synthetic oligonucleotide
acttcaggtgagacaattatcgcttacagg

SEQ ID NO: 57068 - DNA, 30 bp, Artificial Sequence
  Synthetic oligonucleotide
aggggctaggcaggacaacttgtaaccagg

SEQ ID NO: 57069 - DNA, 30 bp, Artificial Sequence
  Synthetic oligonucleotide
caaagtggcaagaatgtcatgaataccagg

SEQ ID NO: 57070 - DNA, 30 bp, Artificial Sequence
  Synthetic oligonucleotide
attgggaataaacatggggccgttaccagg

SEQ ID NO: 57071 - DNA, 30 bp, Artificial Sequence
  Synthetic oligonucleotide
cgctagtttcgggttctagttgctcccagg

SEQ ID NO: 57072 - DNA, 30 bp, Artificial Sequence
  Synthetic oligonucleotide
gaaccaatgtaggtatattgcttcgccagg

SEQ ID NO: 57073 - DNA, 30 bp, Artificial Sequence
  Synthetic oligonucleotide
tattaaataagcaacgtatagagctccagg

SEQ ID NO: 57074 - DNA, 30 bp, Artificial Sequence
  Synthetic oligonucleotide
agcacttatcgtggaggggacttgtccagg

SEQ ID NO: 57075 - DNA, 30 bp, Artificial Sequence
  Synthetic oligonucleotide
atacaggatacaaaggaagaaaatagcagg

SEQ ID NO: 57076 - DNA, 30 bp, Artificial Sequence
  Synthetic oligonucleotide
tttacgattcaacgtacaagggatggcagg

SEQ ID NO: 57077 - DNA, 30 bp, Artificial Sequence
  Synthetic oligonucleotide
gttgaaccagatgtgcacagaacatgcagg

SEQ ID NO: 57078 - DNA, 30 bp, Artificial Sequence
  Synthetic oligonucleotide
tggacgcgctgatacgttattgcttgcagg

SEQ ID NO: 57079 - DNA, 30 bp, Artificial Sequence
  Synthetic oligonucleotide
agcgttatgaagtccagcaactgactcagg

SEQ ID NO: 57080 - DNA, 30 bp, Artificial Sequence
  Synthetic oligonucleotide
ctcattcctaggcaattaagagggctcagg

SEQ ID NO: 57081 - DNA, 30 bp, Artificial Sequence
  Synthetic oligonucleotide
cacaggcggtgaagtgctacgactgtcagg

SEQ ID NO: 57082 - DNA, 30 bp, Artificial Sequence
  Synthetic oligonucleotide
ttacgagtagtgcaactagaggacttcagg

SEQ ID NO: 57083 - DNA, 30 bp, Artificial Sequence
  Synthetic oligonucleotide
gggagtagctacgcggatcaagaaaagagg

SEQ ID NO: 57084 - DNA, 30 bp, Artificial Sequence
  Synthetic oligonucleotide
tccagctgagctaagacgagcgagaagagg

SEQ ID NO: 57085 - DNA, 30 bp, Artificial Sequence
  Synthetic oligonucleotide
agcttcgcgtccatggttggtctgaagagg

SEQ ID NO: 57086 - DNA, 30 bp, Artificial Sequence
  Synthetic oligonucleotide
tcgcacgtaggaccattgtagtgtaagagg

SEQ ID NO: 57087 - DNA, 30 bp, Artificial Sequence
  Synthetic oligonucleotide
acaggcacgatgctacgaaggaaacagagg

SEQ ID NO: 57088 - DNA, 30 bp, Artificial Sequence
  Synthetic oligonucleotide
gaatgataagaagttcgcacttagtagagg

SEQ ID NO: 57089 - DNA, 30 bp, Artificial Sequence
  Synthetic oligonucleotide
taacactgccgtctccgaagtgcttagagg

SEQ ID NO: 57090 - DNA, 30 bp, Artificial Sequence
  Synthetic oligonucleotide
tcaatcggccgaacttctgagttttagagg

SEQ ID NO: 57091 - DNA, 30 bp, Artificial Sequence
  Synthetic oligonucleotide
cactaaggtcagatgttagaccatccgagg

SEQ ID NO: 57092 - DNA, 31 bp, Artificial Sequence
  Synthetic oligonucleotide
ccgcgattgttagcgttgcccagatccgagg

SEQ ID NO: 57093 - DNA, 30 bp, Artificial Sequence
  Synthetic oligonucleotide
cgtgactggtgcatcacgtgaagtccgagg

SEQ ID NO: 57094 - DNA, 30 bp, Artificial Sequence
  Synthetic oligonucleotide
tggcccgaacggaggtctagcggctcgagg

SEQ ID NO: 57095 - DNA, 30 bp, Artificial Sequence
  Synthetic oligonucleotide
tgatggtcgcgagtctagccagcttcgagg

SEQ ID NO: 57096 - DNA, 30 bp, Artificial Sequence
  Synthetic oligonucleotide
gccaacaatcatgttcaaacgttgcggagg

SEQ ID NO: 57097 - DNA, 30 bp, Artificial Sequence
  Synthetic oligonucleotide
gtaacaagggaactaattacgccagggagg

SEQ ID NO: 57098 - DNA, 30 bp, Artificial Sequence
  Synthetic oligonucleotide
ggacagggggatggtgaacgaatggggagg

SEQ ID NO: 57099 - DNA, 30 bp, Artificial Sequence
  Synthetic oligonucleotide
gacatggcctaggtctacgaagttgggagg

SEQ ID NO: 57100 - DNA, 30 bp, Artificial Sequence
  Synthetic oligonucleotide
cctgtggatataatacagtgggagtggagg

SEQ ID NO: 57101 - DNA, 30 bp, Artificial Sequence
  Synthetic oligonucleotide
gcgtgtctgggaggatggacttccatgagg

SEQ ID NO: 57102 - DNA, 30 bp, Artificial Sequence
  Synthetic oligonucleotide
agagccaccagaattggtcagcagatgagg

SEQ ID NO: 57103 - DNA, 30 bp, Artificial Sequence
  Synthetic oligonucleotide
ggatccaccagtccaacaagtacgatgagg

SEQ ID NO: 57104 - DNA, 30 bp, Artificial Sequence
  Synthetic oligonucleotide
ccaaagaggaaactctgcgggcatctgagg

SEQ ID NO: 57105 - DNA, 30 bp, Artificial Sequence
  Synthetic oligonucleotide
gcgtcctccgagtattgactaatggtgagg

SEQ ID NO: 57106 - DNA, 30 bp, Artificial Sequence
  Synthetic oligonucleotide
ttggaataccttctcgatcgaccattgagg

SEQ ID NO: 57107 - DNA, 30 bp, Artificial Sequence
  Synthetic oligonucleotide
aggagaaagagtacggtttgagatgatagg

SEQ ID NO: 57108 - DNA, 30 bp, Artificial Sequence
  Synthetic oligonucleotide
gctgatcagcagatttgcagggatgatagg

SEQ ID NO: 57109 - DNA, 30 bp, Artificial Sequence
  Synthetic oligonucleotide
acacgcgcactgccaacaagatgctatagg

SEQ ID NO: 57110 - DNA, 30 bp, Artificial Sequence
  Synthetic oligonucleotide
cgacaccacactggaggctcctatactagg

SEQ ID NO: 57111 - DNA, 30 bp, Artificial Sequence
  Synthetic oligonucleotide
cgagcggcggagaacgtcggtcgtactagg

SEQ ID NO: 57112 - DNA, 30 bp, Artificial Sequence
  Synthetic oligonucleotide
tttaaggcttaggcgtagaccacacctagg

SEQ ID NO: 57113 - DNA, 30 bp, Artificial Sequence
  Synthetic oligonucleotide
ggtcagcaaacaagaacgaacagctctagg

SEQ ID NO: 57114 - DNA, 30 bp, Artificial Sequence
  Synthetic oligonucleotide
acggagaataccggacgtattatttctagg

SEQ ID NO: 57115 - DNA, 30 bp, Artificial Sequence
  Synthetic oligonucleotide
tcgggcccgcgcggatctaatctgagtagg

SEQ ID NO: 57116 - DNA, 30 bp, Artificial Sequence
  Synthetic oligonucleotide
gccatgtagtgagaataggtgttgggtagg

SEQ ID NO: 57117 - DNA, 30 bp, Artificial Sequence
  Synthetic oligonucleotide
caacaagacaaaaaggcagctcactgtagg

SEQ ID NO: 57118 - DNA, 30 bp, Artificial Sequence
  Synthetic oligonucleotide
ctatataaccaaattgagagaatgattagg

SEQ ID NO: 57119 - DNA, 30 bp, Artificial Sequence
  Synthetic oligonucleotide
ctgggagtggcaagcgtacaatatattagg

SEQ ID NO: 57120 - DNA, 30 bp, Artificial Sequence
  Synthetic oligonucleotide
ggaggttcacctacagctcggcaccttagg

SEQ ID NO: 57121 - DNA, 30 bp, Artificial Sequence
  Synthetic oligonucleotide
taggagaggtacgcgcccactgagcaacgg

SEQ ID NO: 57122 - DNA, 30 bp, Artificial Sequence
  Synthetic oligonucleotide
cgcgaagtttgtaaatagtaaggggaacgg

SEQ ID NO: 57123 - DNA, 30 bp, Artificial Sequence
  Synthetic oligonucleotide
tacaaacggcgaacaatttcaaaggcacgg

SEQ ID NO: 57124 - DNA, 30 bp, Artificial Sequence
  Synthetic oligonucleotide
ggaatagcacttgggcccagcttgcgacgg

SEQ ID NO: 57125 - DNA, 30 bp, Artificial Sequence
  Synthetic oligonucleotide
gataaactgagcaatgcgggaagcggacgg

SEQ ID NO: 57126 - DNA, 30 bp, Artificial Sequence
  Synthetic oligonucleotide
ataataatcgctacagaaaacataatacgg

SEQ ID NO: 57127 - DNA, 30 bp, Artificial Sequence
  Synthetic oligonucleotide
agcgttgacgaataggagtatcagatacgg

SEQ ID NO: 57128 - DNA, 30 bp, Artificial Sequence
  Synthetic oligonucleotide
taagaacaactagcgggggtggggatacgg

SEQ ID NO: 57129 - DNA, 31 bp, Artificial Sequence
  Synthetic oligonucleotide
aaacggtaaccggcaagcgccacgcgtacgg

SEQ ID NO: 57130 - DNA, 30 bp, Artificial Sequence
  Synthetic oligonucleotide
atgtggtaaagtgacagtacataggtacgg

SEQ ID NO: 57131 - DNA, 30 bp, Artificial Sequence
  Synthetic oligonucleotide
caagggacacagatttattagcatttacgg

SEQ ID NO: 57132 - DNA, 30 bp, Artificial Sequence
  Synthetic oligonucleotide
gacggcgagatgctttaaggcagagcccgg

SEQ ID NO: 57133 - DNA, 30 bp, Artificial Sequence
  Synthetic oligonucleotide
taacacaagcgacgtggtagtctagcccgg

SEQ ID NO: 57134 - DNA, 30 bp, Artificial Sequence
  Synthetic oligonucleotide
gatgaacagagtataacgattaaatcccgg

SEQ ID NO: 57135 - DNA, 30 bp, Artificial Sequence
  Synthetic oligonucleotide
tgggaaacacgggttagacaacacagccgg

SEQ ID NO: 57136 - DNA, 30 bp, Artificial Sequence
  Synthetic oligonucleotide
cactcgaatcaagatgaaagaccaggccgg

SEQ ID NO: 57137 - DNA, 30 bp, Artificial Sequence
  Synthetic oligonucleotide
aggattgaaatagcaaatacgcggtgccgg

SEQ ID NO: 57138 - DNA, 30 bp, Artificial Sequence
  Synthetic oligonucleotide
cacgtgaaaatacgcgacagtgggtgccgg

SEQ ID NO: 57139 - DNA, 30 bp, Artificial Sequence
  Synthetic oligonucleotide
ctacgtatagtagaggttgcttcattccgg

SEQ ID NO: 57140 - DNA, 30 bp, Artificial Sequence
  Synthetic oligonucleotide
ggcgtgcgaactctgtatccgtccttccgg

SEQ ID NO: 57141 - DNA, 30 bp, Artificial Sequence
  Synthetic oligonucleotide
catccgatctgataagaagaagggttccgg

SEQ ID NO: 57142 - DNA, 30 bp, Artificial Sequence
  Synthetic oligonucleotide
ggcaaagttatgccgtctaacatcaagcgg

SEQ ID NO: 57143 - DNA, 30 bp, Artificial Sequence
  Synthetic oligonucleotide
agtccgtcagggggtcccgtttgagagcgg

SEQ ID NO: 57144 - DNA, 30 bp, Artificial Sequence
  Synthetic oligonucleotide
agagctgtggttaactcgccacatgagcgg

SEQ ID NO: 57145 - DNA, 30 bp, Artificial Sequence
  Synthetic oligonucleotide
ctgatcagagtgcatgccatgactgagcgg

SEQ ID NO: 57146 - DNA, 30 bp, Artificial Sequence
  Synthetic oligonucleotide
caactgttgtgaatcagaataaccacgcgg

SEQ ID NO: 57147 - DNA, 30 bp, Artificial Sequence
  Synthetic oligonucleotide
agcggaattgtccccttacacagtccgcgg

SEQ ID NO: 57148 - DNA, 30 bp, Artificial Sequence
  Synthetic oligonucleotide
cgcaacagtactgacacgaccctgaggcgg

SEQ ID NO: 57149 - DNA, 30 bp, Artificial Sequence
  Synthetic oligonucleotide
tcagtaaacgcgagccatttgtgacggcgg

SEQ ID NO: 57150 - DNA, 30 bp, Artificial Sequence
  Synthetic oligonucleotide
gctagctacgatcgatgacactgtcggcgg

SEQ ID NO: 57151 - DNA, 30 bp, Artificial Sequence
  Synthetic oligonucleotide
ccagaagtcgatcgccagtccgatgggcgg

SEQ ID NO: 57152 - DNA, 30 bp, Artificial Sequence
  Synthetic oligonucleotide
gaccgtagccaagggaacagggactggcgg

SEQ ID NO: 57153 - DNA, 30 bp, Artificial Sequence
  Synthetic oligonucleotide
taggagggtaacgtgtgaccaacgatgcgg

SEQ ID NO: 57154 - DNA, 30 bp, Artificial Sequence
  Synthetic oligonucleotide
acggcgaggagattctacgggtaactgcgg

SEQ ID NO: 57155 - DNA, 30 bp, Artificial Sequence
  Synthetic oligonucleotide
aactaaaataggaggcctgacctagtgcgg

SEQ ID NO: 57156 - DNA, 30 bp, Artificial Sequence
  Synthetic oligonucleotide
taagggcagcgacgacaaaatactgtgcgg

SEQ ID NO: 57157 - DNA, 30 bp, Artificial Sequence
  Synthetic oligonucleotide
acaccaaagagtatgctctctaaccatcgg

SEQ ID NO: 57158 - DNA, 30 bp, Artificial Sequence
  Synthetic oligonucleotide
gggacatctaaagtaaacatcaacactcgg

SEQ ID NO: 57159 - DNA, 30 bp, Artificial Sequence
  Synthetic oligonucleotide
ggtcgaagtaagggcgaaagtggcgctcgg

SEQ ID NO: 57160 - DNA, 30 bp, Artificial Sequence
  Synthetic oligonucleotide
aagtgggcctgtcagtttagatcggctcgg

SEQ ID NO: 57161 - DNA, 30 bp, Artificial Sequence
  Synthetic oligonucleotide
gaccatcctacatacatacaaaaatctcgg

SEQ ID NO: 57162 - DNA, 30 bp, Artificial Sequence
  Synthetic oligonucleotide
caacaggtttgcgcaaatatgagatctcgg

SEQ ID NO: 57163 - DNA, 30 bp, Artificial Sequence
  Synthetic oligonucleotide
agcatcattgacgacttctacgcctctcgg

SEQ ID NO: 57164 - DNA, 30 bp, Artificial Sequence
  Synthetic oligonucleotide
aggaccacgacgtttctggcaaggtctcgg

SEQ ID NO: 57165 - DNA, 30 bp, Artificial Sequence
  Synthetic oligonucleotide
tgatgagatcaacgacagggagcttctcgg

SEQ ID NO: 57166 - DNA, 30 bp, Artificial Sequence
  Synthetic oligonucleotide
tgagacgagtgaacctatgaataaagtcgg

SEQ ID NO: 57167 - DNA, 30 bp, Artificial Sequence
  Synthetic oligonucleotide
tccgtaacggtagattagggaatgtgtcgg

SEQ ID NO: 57168 - DNA, 30 bp, Artificial Sequence
  Synthetic oligonucleotide
acaagatacacagcttggaagttttgtcgg

SEQ ID NO: 57169 - DNA, 30 bp, Artificial Sequence
  Synthetic oligonucleotide
agaccacgtcctcaccagggaaatattcgg

SEQ ID NO: 57170 - DNA, 30 bp, Artificial Sequence
  Synthetic oligonucleotide
cgaaactaccgagtaaggactgacgttcgg

SEQ ID NO: 57171 - DNA, 30 bp, Artificial Sequence
  Synthetic oligonucleotide
ttgaacaagaatgagatagtttcggttcgg

SEQ ID NO: 57172 - DNA, 30 bp, Artificial Sequence
  Synthetic oligonucleotide
gcgacgcaatgagcgcatgcccgaaaaggg

SEQ ID NO: 57173 - DNA, 30 bp, Artificial Sequence
  Synthetic oligonucleotide
ttgagggtcttccggaagtagcgaaaaggg

SEQ ID NO: 57174 - DNA, 30 bp, Artificial Sequence
  Synthetic oligonucleotide
acttcgattacggaatagaaaatgaaaggg

SEQ ID NO: 57175 - DNA, 30 bp, Artificial Sequence
  Synthetic oligonucleotide
ggtgccaaggccagaacacgtcataaaggg

SEQ ID NO: 57176 - DNA, 30 bp, Artificial Sequence
  Synthetic oligonucleotide
gtgctgggtacgtctaggcatatgcaaggg

SEQ ID NO: 57177 - DNA, 30 bp, Artificial Sequence
  Synthetic oligonucleotide
atcagaacgtagacggcagtatgtgaaggg

SEQ ID NO: 57178 - DNA, 30 bp, Artificial Sequence
  Synthetic oligonucleotide
aaacggcgacggacgcctgtggcataaggg

SEQ ID NO: 57179 - DNA, 30 bp, Artificial Sequence
  Synthetic oligonucleotide
ttagtgcgaaggcacaatattcgataaggg

SEQ ID NO: 57180 - DNA, 30 bp, Artificial Sequence
  Synthetic oligonucleotide
acgttacaagcacagtactgcaactaaggg

SEQ ID NO: 57181 - DNA, 30 bp, Artificial Sequence
  Synthetic oligonucleotide
ttataaaacacaaccggtgggacttaaggg

SEQ ID NO: 57182 - DNA, 30 bp, Artificial Sequence
  Synthetic oligonucleotide
agagcgttcatcgtacgactgacttaaggg

SEQ ID NO: 57183 - DNA, 30 bp, Artificial Sequence
  Synthetic oligonucleotide
ggcaaaaagcgtacctatgccggaacaggg

SEQ ID NO: 57184 - DNA, 30 bp, Artificial Sequence
  Synthetic oligonucleotide
ccctaatggacactgttgttgggaacaggg

SEQ ID NO: 57185 - DNA, 30 bp, Artificial Sequence
  Synthetic oligonucleotide
aggaacaaaagaaagcttccgcgcacaggg

SEQ ID NO: 57186 - DNA, 30 bp, Artificial Sequence
  Synthetic oligonucleotide
tcatgcattgggctcccatcttgcacaggg

SEQ ID NO: 57187 - DNA, 30 bp, Artificial Sequence
  Synthetic oligonucleotide
gtgacgggggtcaggttaattgaagcaggg

SEQ ID NO: 57188 - DNA, 30 bp, Artificial Sequence
  Synthetic oligonucleotide
cgtggtcttcgatatacacgatgagcaggg

SEQ ID NO: 57189 - DNA, 30 bp, Artificial Sequence
  Synthetic oligonucleotide
gtcgcaagtcctatatgagggggtgcaggg

SEQ ID NO: 57190 - DNA, 30 bp, Artificial Sequence
  Synthetic oligonucleotide
cgtcggtgggtatgctgagccagatcaggg

SEQ ID NO: 57191 - DNA, 30 bp, Artificial Sequence
  Synthetic oligonucleotide
aggctctgacatacaaaccgcgactcaggg

SEQ ID NO: 57192 - DNA, 30 bp, Artificial Sequence
  Synthetic oligonucleotide
gagacacgtcccacgccgtttgcaagaggg

SEQ ID NO: 57193 - DNA, 31 bp, Artificial Sequence
  Synthetic oligonucleotide
ccggccccgtcaagacggagaagatagaggg

SEQ ID NO: 57194 - DNA, 30 bp, Artificial Sequence
  Synthetic oligonucleotide
tgtacggctgcctaggccacaagtagaggg

SEQ ID NO: 57195 - DNA, 30 bp, Artificial Sequence
  Synthetic oligonucleotide
aacatcaatgttaaaataagtggccgaggg

SEQ ID NO: 57196 - DNA, 30 bp, Artificial Sequence
  Synthetic oligonucleotide
gcaaggtgaatgaccggagggggctgaggg

SEQ ID NO: 57197 - DNA, 30 bp, Artificial Sequence
  Synthetic oligonucleotide
aacgttaagtagtgagagctattgtgaggg

SEQ ID NO: 57198 - DNA, 30 bp, Artificial Sequence
  Synthetic oligonucleotide
tatcagcagtttagaagctgagcttgaggg

SEQ ID NO: 57199 - DNA, 30 bp, Artificial Sequence
  Synthetic oligonucleotide
caggtgttaaacgcatgtttattaataggg

SEQ ID NO: 57200 - DNA, 30 bp, Artificial Sequence
  Synthetic oligonucleotide
gcggtatcccctcgccactctgacataggg

SEQ ID NO: 57201 - DNA, 30 bp, Artificial Sequence
  Synthetic oligonucleotide
gaagaggcttggacggacatatagataggg

SEQ ID NO: 57202 - DNA, 30 bp, Artificial Sequence
  Synthetic oligonucleotide
ccatgtccagtgtactggaggaagctaggg

SEQ ID NO: 57203 - DNA, 30 bp, Artificial Sequence
  Synthetic oligonucleotide
actcaacacgtacctcgcgagttcaacggg

SEQ ID NO: 57204 - DNA, 30 bp, Artificial Sequence
  Synthetic oligonucleotide
atgggggatatctgggcctaggagaacggg

SEQ ID NO: 57205 - DNA, 30 bp, Artificial Sequence
  Synthetic oligonucleotide
ccgggtattagttctgccaacacgaacggg

SEQ ID NO: 57206 - DNA, 30 bp, Artificial Sequence
  Synthetic oligonucleotide
gacaacactacctctgcatattataacggg

SEQ ID NO: 57207 - DNA, 30 bp, Artificial Sequence
  Synthetic oligonucleotide
cacagacgaaatataagcagcttagacggg

SEQ ID NO: 57208 - DNA, 30 bp, Artificial Sequence
  Synthetic oligonucleotide
atgacatcgactggagtaataaaggacggg

SEQ ID NO: 57209 - DNA, 30 bp, Artificial Sequence
  Synthetic oligonucleotide
cagctaactacgggtgggaagacatacggg

SEQ ID NO: 57210 - DNA, 30 bp, Artificial Sequence
  Synthetic oligonucleotide
tatgtcgtgcaatgagcaagggtgtacggg

SEQ ID NO: 57211 - DNA, 30 bp, Artificial Sequence
  Synthetic oligonucleotide
ggaagctcttgtctcaacgaatagaccggg

SEQ ID NO: 57212 - DNA, 30 bp, Artificial Sequence
  Synthetic oligonucleotide
tcgagttctacgaacagcctagtgcccggg

SEQ ID NO: 57213 - DNA, 30 bp, Artificial Sequence
  Synthetic oligonucleotide
ctagcaagaggccatttaaactaagccggg

SEQ ID NO: 57214 - DNA, 30 bp, Artificial Sequence
  Synthetic oligonucleotide
atctcaagagtcacgcaattgatagccggg

SEQ ID NO: 57215 - DNA, 30 bp, Artificial Sequence
  Synthetic oligonucleotide
ataatgcaacagctatcggcggcttccggg

SEQ ID NO: 57216 - DNA, 30 bp, Artificial Sequence
  Synthetic oligonucleotide
agcattcactgcatgactacaaaaagcggg

SEQ ID NO: 57217 - DNA, 30 bp, Artificial Sequence
  Synthetic oligonucleotide
ttaagcgctaaaactggagagtgcagcggg

SEQ ID NO: 57218 - DNA, 30 bp, Artificial Sequence
  Synthetic oligonucleotide
cgaggggcaggtggcggtatcaggcgcggg

SEQ ID NO: 57219 - DNA, 30 bp, Artificial Sequence
  Synthetic oligonucleotide
aggtgggatctcaggcatgtcaatggcggg

SEQ ID NO: 57220 - DNA, 30 bp, Artificial Sequence
  Synthetic oligonucleotide
cacctgcaaagaaaggtatacgtctgcggg

SEQ ID NO: 57221 - DNA, 30 bp, Artificial Sequence
  Synthetic oligonucleotide
tggatgcttgtgggaattgcggatgtcggg

SEQ ID NO: 57222 - DNA, 30 bp, Artificial Sequence
  Synthetic oligonucleotide
caagcactaggtatctagggtgccaagggg

SEQ ID NO: 57223 - DNA, 30 bp, Artificial Sequence
  Synthetic oligonucleotide
cacccaacttgtagggtccaaaataagggg

SEQ ID NO: 57224 - DNA, 30 bp, Artificial Sequence
  Synthetic oligonucleotide
gcatagcgagctgagatccgattatagggg

SEQ ID NO: 57225 - DNA, 30 bp, Artificial Sequence
  Synthetic oligonucleotide
aactcaaacatagtggcgaccgattagggg

SEQ ID NO: 57226 - DNA, 30 bp, Artificial Sequence
  Synthetic oligonucleotide
acggacgaacatagcagtacttcttagggg

SEQ ID NO: 57227 - DNA, 30 bp, Artificial Sequence
  Synthetic oligonucleotide
atcactgtacacaacatgggaattacgggg

SEQ ID NO: 57228 - DNA, 30 bp, Artificial Sequence
  Synthetic oligonucleotide
gccccaatcatacctgagatcgaaccgggg

SEQ ID NO: 57229 - DNA, 30 bp, Artificial Sequence
  Synthetic oligonucleotide
catgaacgtactcgattccgaatcccgggg

SEQ ID NO: 57230 - DNA, 29 bp, Artificial Sequence
  Synthetic oligonucleotide
atagctgacagtactcctacgggccgggg

SEQ ID NO: 57231 - DNA, 30 bp, Artificial Sequence
  Synthetic oligonucleotide
gttcgagggatcgccactacaggagcgggg

SEQ ID NO: 57232 - DNA, 30 bp, Artificial Sequence
  Synthetic oligonucleotide
gaacgcactgcatgtcaggtggccgcgggg

SEQ ID NO: 57233 - DNA, 30 bp, Artificial Sequence
  Synthetic oligonucleotide
caatcatgtcagatgggtatcacttcgggg

SEQ ID NO: 57234 - DNA, 30 bp, Artificial Sequence
  Synthetic oligonucleotide
agttgagaaaaacttaacaacttaaggggg

SEQ ID NO: 57235 - DNA, 30 bp, Artificial Sequence
  Synthetic oligonucleotide
aggtgtatgcgtgtggaacagacgaggggg

SEQ ID NO: 57236 - DNA, 30 bp, Artificial Sequence
  Synthetic oligonucleotide
agacaataagaatcaaaggtattgaggggg

SEQ ID NO: 57237 - DNA, 30 bp, Artificial Sequence
  Synthetic oligonucleotide
cgatggtaccgtcctagataaccacggggg

SEQ ID NO: 57238 - DNA, 30 bp, Artificial Sequence
  Synthetic oligonucleotide
gaactcagaaattaggatgaggatgggggg

SEQ ID NO: 57239 - DNA, 30 bp, Artificial Sequence
  Synthetic oligonucleotide
aacgggccagatcgtccaatttctgggggg

SEQ ID NO: 57240 - DNA, 30 bp, Artificial Sequence
  Synthetic oligonucleotide
tacgagaccatttttacctaggaatggggg

SEQ ID NO: 57241 - DNA, 30 bp, Artificial Sequence
  Synthetic oligonucleotide
gctgccgacgatccagggcaggcatggggg

SEQ ID NO: 57242 - DNA, 30 bp, Artificial Sequence
  Synthetic oligonucleotide
tcaccctggtaaataccacaaagaatgggg

SEQ ID NO: 57243 - DNA, 30 bp, Artificial Sequence
  Synthetic oligonucleotide
gtcataattctgtagatgcgaggtatgggg

SEQ ID NO: 57244 - DNA, 30 bp, Artificial Sequence
  Synthetic oligonucleotide
gttaggtggcgcgatatatctgtattgggg

SEQ ID NO: 57245 - DNA, 30 bp, Artificial Sequence
  Synthetic oligonucleotide
tgcctgcacaactaggcgtataagttgggg

SEQ ID NO: 57246 - DNA, 30 bp, Artificial Sequence
  Synthetic oligonucleotide
ttcgcagaggggagagacttcaatttgggg

SEQ ID NO: 57247 - DNA, 30 bp, Artificial Sequence
  Synthetic oligonucleotide
gacgatatggggaggttgcgatttttgggg

SEQ ID NO: 57248 - DNA, 30 bp, Artificial Sequence
  Synthetic oligonucleotide
tttgcagggcaattaagagtccaaaatggg

SEQ ID NO: 57249 - DNA, 30 bp, Artificial Sequence
  Synthetic oligonucleotide
gcgggcgatccaaattgtcgcacgaatggg

SEQ ID NO: 57250 - DNA, 30 bp, Artificial Sequence
  Synthetic oligonucleotide
aacaactgaaacttatggcctagtaatggg

SEQ ID NO: 57251 - DNA, 30 bp, Artificial Sequence
  Synthetic oligonucleotide
catccaggttaagagaggcgtaaagatggg

SEQ ID NO: 57252 - DNA, 30 bp, Artificial Sequence
  Synthetic oligonucleotide
gggcaataacttctaagttgataggatggg

SEQ ID NO: 57253 - DNA, 30 bp, Artificial Sequence
  Synthetic oligonucleotide
cgtttgaggctagtgctgatcaactatggg

SEQ ID NO: 57254 - DNA, 30 bp, Artificial Sequence
  Synthetic oligonucleotide
aaaggttgaaaagtggacttgctctatggg

SEQ ID NO: 57255 - DNA, 30 bp, Artificial Sequence
  Synthetic oligonucleotide
caccagcatgggctagcccttacgtatggg

SEQ ID NO: 57256 - DNA, 30 bp, Artificial Sequence
  Synthetic oligonucleotide
ggtcagtaccgacacaatgcatcgtatggg

SEQ ID NO: 57257 - DNA, 30 bp, Artificial Sequence
  Synthetic oligonucleotide
cgttagagcaattcattcattggttatggg

SEQ ID NO: 57258 - DNA, 30 bp, Artificial Sequence
  Synthetic oligonucleotide
cgttgcgtaattataatcgtaagaactggg

SEQ ID NO: 57259 - DNA, 30 bp, Artificial Sequence
  Synthetic oligonucleotide
cgaggtcagtgaacagaccggtgaactggg

SEQ ID NO: 57260 - DNA, 30 bp, Artificial Sequence
  Synthetic oligonucleotide
cggctacaagagcgctcagtaagagctggg

SEQ ID NO: 57261 - DNA, 30 bp, Artificial Sequence
  Synthetic oligonucleotide
gtatcagatagtagaaatgagtgggctggg

SEQ ID NO: 57262 - DNA, 30 bp, Artificial Sequence
  Synthetic oligonucleotide
atgcagtagagcagctgagacagatctggg

SEQ ID NO: 57263 - DNA, 30 bp, Artificial Sequence
  Synthetic oligonucleotide
ggacgatgtcctatagaggcaaccagtggg

SEQ ID NO: 57264 - DNA, 30 bp, Artificial Sequence
  Synthetic oligonucleotide
tggtaaattaaggtcacgccatgtagtggg

SEQ ID NO: 57265 - DNA, 30 bp, Artificial Sequence
  Synthetic oligonucleotide
tattagacagtaaaggagagtattcgtggg

SEQ ID NO: 57266 - DNA, 30 bp, Artificial Sequence
  Synthetic oligonucleotide
tgaaatgcattgaagagcacgggtggtggg

SEQ ID NO: 57267 - DNA, 30 bp, Artificial Sequence
  Synthetic oligonucleotide
atgagggcaaaacgatctgagacttgtggg

SEQ ID NO: 57268 - DNA, 30 bp, Artificial Sequence
  Synthetic oligonucleotide
agcgatcaatgcaaggtgagttatattggg

SEQ ID NO: 57269 - DNA, 30 bp, Artificial Sequence
  Synthetic oligonucleotide
gcaatgcgtcgaaggttggctcatcttggg

SEQ ID NO: 57270 - DNA, 30 bp, Artificial Sequence
  Synthetic oligonucleotide
ggctcaggactataaggtcagtatcttggg

SEQ ID NO: 57271 - DNA, 30 bp, Artificial Sequence
  Synthetic oligonucleotide
aggaggagttatacctattgtactcttggg

SEQ ID NO: 57272 - DNA, 30 bp, Artificial Sequence
  Synthetic oligonucleotide
ggatgacatccgaaagttattggacaatgg

SEQ ID NO: 57273 - DNA, 30 bp, Artificial Sequence
  Synthetic oligonucleotide
aagtgttaaagagcagaactgaaccaatgg

SEQ ID NO: 57274 - DNA, 30 bp, Artificial Sequence
  Synthetic oligonucleotide
gcgcgtagtaaagggtcagctccgcaatgg

SEQ ID NO: 57275 - DNA, 30 bp, Artificial Sequence
  Synthetic oligonucleotide
gcaagatctttgtaatgatagaccgaatgg

SEQ ID NO: 57276 - DNA, 30 bp, Artificial Sequence
  Synthetic oligonucleotide
atgaacacatcatggcagcagtgggaatgg

SEQ ID NO: 57277 - DNA, 30 bp, Artificial Sequence
  Synthetic oligonucleotide
cacgttgtatacgcagagggcaggacatgg

SEQ ID NO: 57278 - DNA, 30 bp, Artificial Sequence
  Synthetic oligonucleotide
cgataagtgtgtacattttagaggacatgg

SEQ ID NO: 57279 - DNA, 30 bp, Artificial Sequence
  Synthetic oligonucleotide
gtcacgtaaggtcagtctaaatagccatgg

SEQ ID NO: 57280 - DNA, 30 bp, Artificial Sequence
  Synthetic oligonucleotide
gcaatcagaaaccactctcgccaagcatgg

SEQ ID NO: 57281 - DNA, 30 bp, Artificial Sequence
  Synthetic oligonucleotide
gcgataactgatcatctaaaatagtcatgg

SEQ ID NO: 57282 - DNA, 30 bp, Artificial Sequence
  Synthetic oligonucleotide
ctacggcggtggatggtctaaccgtcatgg

SEQ ID NO: 57283 - DNA, 30 bp, Artificial Sequence
  Synthetic oligonucleotide
acgggccagctttacacgatattacgatgg

SEQ ID NO: 57284 - DNA, 30 bp, Artificial Sequence
  Synthetic oligonucleotide
cacgtcaagagctgggtacagtaccgatgg

SEQ ID NO: 57285 - DNA, 30 bp, Artificial Sequence
  Synthetic oligonucleotide
atcgaagtcatggaaggcaataggtgatgg

SEQ ID NO: 57286 - DNA, 30 bp, Artificial Sequence
  Synthetic oligonucleotide
agacccagtgaagtttaacgagctatatgg

SEQ ID NO: 57287 - DNA, 30 bp, Artificial Sequence
  Synthetic oligonucleotide
tcggaaatgcattgaaaaaaacttatatgg

SEQ ID NO: 57288 - DNA, 30 bp, Artificial Sequence
  Synthetic oligonucleotide
gcaaccgaaagcgaacacaatccggtatgg

SEQ ID NO: 57289 - DNA, 30 bp, Artificial Sequence
  Synthetic oligonucleotide
taggctgtcaagagttgtacgccattatgg

SEQ ID NO: 57290 - DNA, 30 bp, Artificial Sequence
  Synthetic oligonucleotide
taagacactgtggaggtcatccggttatgg

SEQ ID NO: 57291 - DNA, 30 bp, Artificial Sequence
  Synthetic oligonucleotide
gagaccacaggatgctggcccgaaaactgg

SEQ ID NO: 57292 - DNA, 30 bp, Artificial Sequence
  Synthetic oligonucleotide
atcggaggacaccgacgcgtcctaaactgg

SEQ ID NO: 57293 - DNA, 30 bp, Artificial Sequence
  Synthetic oligonucleotide
aagcacactcgggcaaaacggaggcactgg

SEQ ID NO: 57294 - DNA, 30 bp, Artificial Sequence
  Synthetic oligonucleotide
tactccggagacgtgtacgaaaaagactgg

SEQ ID NO: 57295 - DNA, 30 bp, Artificial Sequence
  Synthetic oligonucleotide
aggcatctttaaatcggggttctagactgg

SEQ ID NO: 57296 - DNA, 30 bp, Artificial Sequence
  Synthetic oligonucleotide
taagcagactccaagccatgagcggactgg

SEQ ID NO: 57297 - DNA, 30 bp, Artificial Sequence
  Synthetic oligonucleotide
aaatggcggcgatagttgcagactgactgg

SEQ ID NO: 57298 - DNA, 30 bp, Artificial Sequence
  Synthetic oligonucleotide
gtccgctaatcaaacgatcaataaggctgg

SEQ ID NO: 57299 - DNA, 30 bp, Artificial Sequence
  Synthetic oligonucleotide
tgatagtagttagaagacaaaccgtgctgg

SEQ ID NO: 57300 - DNA, 30 bp, Artificial Sequence
  Synthetic oligonucleotide
ggaacgagccactgaaacactgggtgctgg

SEQ ID NO: 57301 - DNA, 30 bp, Artificial Sequence
  Synthetic oligonucleotide
cacatacgaagatgccccggagtgtgctgg

SEQ ID NO: 57302 - DNA, 30 bp, Artificial Sequence
  Synthetic oligonucleotide
cgatgaagtaagtgctaatgggcgatctgg

SEQ ID NO: 57303 - DNA, 30 bp, Artificial Sequence
  Synthetic oligonucleotide
atcaactcattactaatgaaacaactctgg

SEQ ID NO: 57304 - DNA, 30 bp, Artificial Sequence
  Synthetic oligonucleotide
gtggcaaccgttgggtacctagttcagtgg

SEQ ID NO: 57305 - DNA, 30 bp, Artificial Sequence
  Synthetic oligonucleotide
gaaataacagctagcggtgaacgagagtgg

SEQ ID NO: 57306 - DNA, 30 bp, Artificial Sequence
  Synthetic oligonucleotide
cgatcaattccctacacgtatctttagtgg

SEQ ID NO: 57307 - DNA, 30 bp, Artificial Sequence
  Synthetic oligonucleotide
tggcctcctcgaaggcgaatccacgcgtgg

SEQ ID NO: 57308 - DNA, 30 bp, Artificial Sequence
  Synthetic oligonucleotide
ggacgaactccaagtcttagttcggcgtgg

SEQ ID NO: 57309 - DNA, 30 bp, Artificial Sequence
  Synthetic oligonucleotide
ggtctcatcgatacgacatgagggtcgtgg

SEQ ID NO: 57310 - DNA, 30 bp, Artificial Sequence
  Synthetic oligonucleotide
atgtgaccggtaatcagtaggcacaggtgg

SEQ ID NO: 57311 - DNA, 30 bp, Artificial Sequence
  Synthetic oligonucleotide
aggtaatgacacctaaaccatcgacggtgg

SEQ ID NO: 57312 - DNA, 30 bp, Artificial Sequence
  Synthetic oligonucleotide
gacggtccgagagaatagccaggagggtgg

SEQ ID NO: 57313 - DNA, 30 bp, Artificial Sequence
  Synthetic oligonucleotide
gtgaaacagaacacagtcaggctatggtgg

SEQ ID NO: 57314 - DNA, 30 bp, Artificial Sequence
  Synthetic oligonucleotide
ggttgagattgagtctatatggagtggtgg

SEQ ID NO: 57315 - DNA, 30 bp, Artificial Sequence
  Synthetic oligonucleotide
cgatacaataccatccgtctcgggtggtgg

SEQ ID NO: 57316 - DNA, 30 bp, Artificial Sequence
  Synthetic oligonucleotide
tcgatagcaattgtggtaaaagttatgtgg

SEQ ID NO: 57317 - DNA, 30 bp, Artificial Sequence
  Synthetic oligonucleotide
ccgcgagaggacctgcaaacgaccttgtgg

SEQ ID NO: 57318 - DNA, 30 bp, Artificial Sequence
  Synthetic oligonucleotide
taataggaggcaatagggagatagttgtgg

SEQ ID NO: 57319 - DNA, 30 bp, Artificial Sequence
  Synthetic oligonucleotide
taaggtaagaatcatacttcctgaaattgg

SEQ ID NO: 57320 - DNA, 30 bp, Artificial Sequence
  Synthetic oligonucleotide
tggcggtaagggtccctgaccgagaattgg

SEQ ID NO: 57321 - DNA, 30 bp, Artificial Sequence
  Synthetic oligonucleotide
atagggaatgagcgtactaagtaacattgg

SEQ ID NO: 57322 - DNA, 30 bp, Artificial Sequence
  Synthetic oligonucleotide
cgactggaatatgccaacgggagacattgg

SEQ ID NO: 57323 - DNA, 30 bp, Artificial Sequence
  Synthetic oligonucleotide
acgtaagaaaggcatcaacaaggccattgg

SEQ ID NO: 57324 - DNA, 30 bp, Artificial Sequence
  Synthetic oligonucleotide
acggaacatatgaaccgtgcgttcgattgg

SEQ ID NO: 57325 - DNA, 30 bp, Artificial Sequence
  Synthetic oligonucleotide
gtaacagagtggaggttaaggattgattgg

SEQ ID NO: 57326 - DNA, 30 bp, Artificial Sequence
  Synthetic oligonucleotide
acctgggggagagggctccgaaactattgg

SEQ ID NO: 57327 - DNA, 30 bp, Artificial Sequence
  Synthetic oligonucleotide
cgacctgaagttggggatttttccacttgg

SEQ ID NO: 57328 - DNA, 30 bp, Artificial Sequence
  Synthetic oligonucleotide
actaaggtcctaaccataaacacaccttgg

SEQ ID NO: 57329 - DNA, 30 bp, Artificial Sequence
  Synthetic oligonucleotide
tcaaaggccaagatctatgaaatatgttgg

SEQ ID NO: 57330 - DNA, 30 bp, Artificial Sequence
  Synthetic oligonucleotide
cgatatcatgttcaggtacatcagtgttgg

SEQ ID NO: 57331 - DNA, 30 bp, Artificial Sequence
  Synthetic oligonucleotide
gacggaagcgttggagcacaatgaatttgg

SEQ ID NO: 57332 - DNA, 30 bp, Artificial Sequence
  Synthetic oligonucleotide
ccggcgactgagagatgtaatccgatttgg

SEQ ID NO: 57333 - DNA, 30 bp, Artificial Sequence
  Synthetic oligonucleotide
atgagagcgtgacaattcggtgccctttgg

SEQ ID NO: 57334 - DNA, 30 bp, Artificial Sequence
  Synthetic oligonucleotide
tcacggctacaacggaacgctagaaaaatg

SEQ ID NO: 57335 - DNA, 30 bp, Artificial Sequence
  Synthetic oligonucleotide
tcggttcgtcggacaatgagtcgcaaaatg

SEQ ID NO: 57336 - DNA, 30 bp, Artificial Sequence
  Synthetic oligonucleotide
attagaattcaaggaaagggcaggaaaatg

SEQ ID NO: 57337 - DNA, 30 bp, Artificial Sequence
  Synthetic oligonucleotide
cggatagttactgcggacagcaaccaaatg

SEQ ID NO: 57338 - DNA, 30 bp, Artificial Sequence
  Synthetic oligonucleotide
cgtcccgagtcctacacggttatccaaatg

SEQ ID NO: 57339 - DNA, 30 bp, Artificial Sequence
  Synthetic oligonucleotide
agtttaaagtgcaacaacgttcagcaaatg

SEQ ID NO: 57340 - DNA, 30 bp, Artificial Sequence
  Synthetic oligonucleotide
taggatgacggaccgacaacctacgaaatg

SEQ ID NO: 57341 - DNA, 30 bp, Artificial Sequence
  Synthetic oligonucleotide
gaggagaactctaagttggatcattaaatg

SEQ ID NO: 57342 - DNA, 30 bp, Artificial Sequence
  Synthetic oligonucleotide
tggtactgctatatctgcaacgtcacaatg

SEQ ID NO: 57343 - DNA, 30 bp, Artificial Sequence
  Synthetic oligonucleotide
ataaatcaagcacgagtatcaacgccaatg

SEQ ID NO: 57344 - DNA, 30 bp, Artificial Sequence
  Synthetic oligonucleotide
agaaagacgttggcaggaaaatcgccaatg

SEQ ID NO: 57345 - DNA, 30 bp, Artificial Sequence
  Synthetic oligonucleotide
gttggcttgaacggaccatatcggccaatg

SEQ ID NO: 57346 - DNA, 30 bp, Artificial Sequence
  Synthetic oligonucleotide
cgggacatgttattgtgccgatcggcaatg

SEQ ID NO: 57347 - DNA, 30 bp, Artificial Sequence
  Synthetic oligonucleotide
aacaataggcatgtctcaaccactgcaatg

SEQ ID NO: 57348 - DNA, 30 bp, Artificial Sequence
  Synthetic oligonucleotide
gggagaatttttaaaacaccgaagtcaatg

SEQ ID NO: 57349 - DNA, 30 bp, Artificial Sequence
  Synthetic oligonucleotide
ctagtacatagtgtttcagacaggagaatg

SEQ ID NO: 57350 - DNA, 30 bp, Artificial Sequence
  Synthetic oligonucleotide
gaaaattggaaaccgcacgaattgagaatg

SEQ ID NO: 57351 - DNA, 30 bp, Artificial Sequence
  Synthetic oligonucleotide
gggcgacgcctaagggatccaggtcgaatg

SEQ ID NO: 57352 - DNA, 30 bp, Artificial Sequence
  Synthetic oligonucleotide
tagcacgaaattgccaaatctgaaggaatg

SEQ ID NO: 57353 - DNA, 30 bp, Artificial Sequence
  Synthetic oligonucleotide
ggtatgatctaatgatggaagatcggaatg

SEQ ID NO: 57354 - DNA, 30 bp, Artificial Sequence
  Synthetic oligonucleotide
cgtccacagctagcacacaatcactgaatg

SEQ ID NO: 57355 - DNA, 30 bp, Artificial Sequence
  Synthetic oligonucleotide
aaagggcatcacagggcgtacagctgaatg

SEQ ID NO: 57356 - DNA, 30 bp, Artificial Sequence
  Synthetic oligonucleotide
gggggggaccgagaccaggtccagtgaatg

SEQ ID NO: 57357 - DNA, 30 bp, Artificial Sequence
  Synthetic oligonucleotide
ggtagcatcatcagcgtacatccttgaatg

SEQ ID NO: 57358 - DNA, 30 bp, Artificial Sequence
  Synthetic oligonucleotide
tcagggtacgcaaagcgtaacgcaataatg

SEQ ID NO: 57359 - DNA, 30 bp, Artificial Sequence
  Synthetic oligonucleotide
ccgagggcgactgtcatataaggaataatg

SEQ ID NO: 57360 - DNA, 30 bp, Artificial Sequence
  Synthetic oligonucleotide
gacactaagcttagcgacaatgtgataatg

SEQ ID NO: 57361 - DNA, 30 bp, Artificial Sequence
  Synthetic oligonucleotide
acgatatgtgggtaaagttccagggtaatg

SEQ ID NO: 57362 - DNA, 30 bp, Artificial Sequence
  Synthetic oligonucleotide
ggttgacagctttcggcgagaagattaatg

SEQ ID NO: 57363 - DNA, 30 bp, Artificial Sequence
  Synthetic oligonucleotide
agggcttatggcatcgagagatctttaatg

SEQ ID NO: 57364 - DNA, 30 bp, Artificial Sequence
  Synthetic oligonucleotide
cgcttgaggtccgctgggtcggaaaacatg

SEQ ID NO: 57365 - DNA, 30 bp, Artificial Sequence
  Synthetic oligonucleotide
tgaaacgaccatgggggtactgaacacatg

SEQ ID NO: 57366 - DNA, 30 bp, Artificial Sequence
  Synthetic oligonucleotide
cgaaccgaaacacatctaattgggcacatg

SEQ ID NO: 57367 - DNA, 30 bp, Artificial Sequence
  Synthetic oligonucleotide
acaagagtaccgttggagtatattcacatg

SEQ ID NO: 57368 - DNA, 30 bp, Artificial Sequence
  Synthetic oligonucleotide
gtcgatatcaagcttgatcgagtcgacatg

SEQ ID NO: 57369 - DNA, 30 bp, Artificial Sequence
  Synthetic oligonucleotide
gggaagccttgagcctgtcagccggacatg

SEQ ID NO: 57370 - DNA, 30 bp, Artificial Sequence
  Synthetic oligonucleotide
gcggtaaagtaggggacggggttctacatg

SEQ ID NO: 57371 - DNA, 30 bp, Artificial Sequence
  Synthetic oligonucleotide
cactgcgattggactccagtgcggtacatg

SEQ ID NO: 57372 - DNA, 30 bp, Artificial Sequence
  Synthetic oligonucleotide
gcgatcatcatgcgtacttcaatttacatg

SEQ ID NO: 57373 - DNA, 30 bp, Artificial Sequence
  Synthetic oligonucleotide
cggtgtacgaattcgctttacaggcccatg

SEQ ID NO: 57374 - DNA, 30 bp, Artificial Sequence
  Synthetic oligonucleotide
accgaatgaggttgggactggtgcgccatg

SEQ ID NO: 57375 - DNA, 30 bp, Artificial Sequence
  Synthetic oligonucleotide
ccagggtcaagagaagtatccgggtccatg

SEQ ID NO: 57376 - DNA, 30 bp, Artificial Sequence
  Synthetic oligonucleotide
gtgtggatgtcgagggaaaaggattccatg

SEQ ID NO: 57377 - DNA, 30 bp, Artificial Sequence
  Synthetic oligonucleotide
caatagttcaccggacttaaagggggcatg

SEQ ID NO: 57378 - DNA, 30 bp, Artificial Sequence
  Synthetic oligonucleotide
tgcatgtgaaatggttgctaactcatcatg

SEQ ID NO: 57379 - DNA, 30 bp, Artificial Sequence
  Synthetic oligonucleotide
ttgagtcgtgtggccgtgtatgtcatcatg

SEQ ID NO: 57380 - DNA, 30 bp, Artificial Sequence
  Synthetic oligonucleotide
ctaggacaaggacggtctggcatactcatg

SEQ ID NO: 57381 - DNA, 30 bp, Artificial Sequence
  Synthetic oligonucleotide
taagaatggttcaggtagcctaacttcatg

SEQ ID NO: 57382 - DNA, 30 bp, Artificial Sequence
  Synthetic oligonucleotide
taacgacaagatgaaatgggcccgttcatg

SEQ ID NO: 57383 - DNA, 30 bp, Artificial Sequence
  Synthetic oligonucleotide
ggagcatcgttttaatcactgcgaaagatg

SEQ ID NO: 57384 - DNA, 30 bp, Artificial Sequence
  Synthetic oligonucleotide
taaacaacgttccagttccgttagaagatg

SEQ ID NO: 57385 - DNA, 30 bp, Artificial Sequence
  Synthetic oligonucleotide
cttgggctagatgcgtgccgggtccagatg

SEQ ID NO: 57386 - DNA, 30 bp, Artificial Sequence
  Synthetic oligonucleotide
cgcttcagtgataaaatcgagttcgcgatg

SEQ ID NO: 57387 - DNA, 30 bp, Artificial Sequence
  Synthetic oligonucleotide
gcgagcagggaacgtaaggtttatgcgatg

SEQ ID NO: 57388 - DNA, 30 bp, Artificial Sequence
  Synthetic oligonucleotide
gccagggtgaagacatttagccctgcgatg

SEQ ID NO: 57389 - DNA, 30 bp, Artificial Sequence
  Synthetic oligonucleotide
taccggggacaaacgatggagtactcgatg

SEQ ID NO: 57390 - DNA, 30 bp, Artificial Sequence
  Synthetic oligonucleotide
gcgaaaacacattttccgagggataggatg

SEQ ID NO: 57391 - DNA, 29 bp, Artificial Sequence
  Synthetic oligonucleotide
aagacactatcggctggcacgttaggatg

SEQ ID NO: 57392 - DNA, 30 bp, Artificial Sequence
  Synthetic oligonucleotide
gatagataaaccgtattcaggacccggatg

SEQ ID NO: 57393 - DNA, 30 bp, Artificial Sequence
  Synthetic oligonucleotide
atcaggtgcagggtgaccaagagtcggatg

SEQ ID NO: 57394 - DNA, 30 bp, Artificial Sequence
  Synthetic oligonucleotide
ggcgaaaatagtagacttcatcgatggatg

SEQ ID NO: 57395 - DNA, 30 bp, Artificial Sequence
  Synthetic oligonucleotide
aacgagctagttctgggtaggtcctggatg

SEQ ID NO: 57396 - DNA, 30 bp, Artificial Sequence
  Synthetic oligonucleotide
ggaggtgtgtctgcgtgagctcaaatgatg

SEQ ID NO: 57397 - DNA, 30 bp, Artificial Sequence
  Synthetic oligonucleotide
tcctctggccaagcatgtacctgaatgatg

SEQ ID NO: 57398 - DNA, 30 bp, Artificial Sequence
  Synthetic oligonucleotide
aagtgcaaaaggttttgctggcctatgatg

SEQ ID NO: 57399 - DNA, 30 bp, Artificial Sequence
  Synthetic oligonucleotide
acagggctgcaatcgaacgcgagtatgatg

SEQ ID NO: 57400 - DNA, 30 bp, Artificial Sequence
  Synthetic oligonucleotide
cggccaaggctagtcgtttataaactgatg

SEQ ID NO: 57401 - DNA, 30 bp, Artificial Sequence
  Synthetic oligonucleotide
ccatgtaggtcgcggcgatgcttagtgatg

SEQ ID NO: 57402 - DNA, 30 bp, Artificial Sequence
  Synthetic oligonucleotide
gaaatacctgatcaatgtggaggcgtgatg

SEQ ID NO: 57403 - DNA, 30 bp, Artificial Sequence
  Synthetic oligonucleotide
ataagctggtcgagggcaggaatggtgatg

SEQ ID NO: 57404 - DNA, 30 bp, Artificial Sequence
  Synthetic oligonucleotide
cagcgggtttcggaaggcatctatgtgatg

SEQ ID NO: 57405 - DNA, 30 bp, Artificial Sequence
  Synthetic oligonucleotide
gggtcacgacatgcagattagagcttgatg

SEQ ID NO: 57406 - DNA, 30 bp, Artificial Sequence
  Synthetic oligonucleotide
gtgacttgggggcgtggatatttcttgatg

SEQ ID NO: 57407 - DNA, 30 bp, Artificial Sequence
  Synthetic oligonucleotide
gtacgtggccatgaagtacacatgttgatg

SEQ ID NO: 57408 - DNA, 30 bp, Artificial Sequence
  Synthetic oligonucleotide
tagcgagagtccgcaactaaacgcaatatg

SEQ ID NO: 57409 - DNA, 30 bp, Artificial Sequence
  Synthetic oligonucleotide
cgcaaaattgtgacattctgagagaatatg

SEQ ID NO: 57410 - DNA, 31 bp, Artificial Sequence
  Synthetic oligonucleotide
tacatcctggctttatggaaataggaatatg

SEQ ID NO: 57411 - DNA, 30 bp, Artificial Sequence
  Synthetic oligonucleotide
gccgggagagcgttaataagagaccatatg

SEQ ID NO: 57412 - DNA, 30 bp, Artificial Sequence
  Synthetic oligonucleotide
gtgatgagtggatccagcgcgccagatatg

SEQ ID NO: 57413 - DNA, 30 bp, Artificial Sequence
  Synthetic oligonucleotide
gagcataatgcgttatcagacagggatatg

SEQ ID NO: 57414 - DNA, 30 bp, Artificial Sequence
  Synthetic oligonucleotide
taaccgcccgaactgaaatgaaatgatatg

SEQ ID NO: 57415 - DNA, 30 bp, Artificial Sequence
  Synthetic oligonucleotide
acgtcactaagggcagaataagatgatatg

SEQ ID NO: 57416 - DNA, 30 bp, Artificial Sequence
  Synthetic oligonucleotide
taaaggaagagtttatgcagaccgactatg

SEQ ID NO: 57417 - DNA, 30 bp, Artificial Sequence
  Synthetic oligonucleotide
tggacagccatgtaatgcacaacacctatg

SEQ ID NO: 57418 - DNA, 30 bp, Artificial Sequence
  Synthetic oligonucleotide
agaggaatagagggtgtctgcgagtctatg

SEQ ID NO: 57419 - DNA, 30 bp, Artificial Sequence
  Synthetic oligonucleotide
ggtacgagcggattggttacgaggtctatg

SEQ ID NO: 57420 - DNA, 30 bp, Artificial Sequence
  Synthetic oligonucleotide
ggtgtcaagtgatatgcggggggaagtatg

SEQ ID NO: 57421 - DNA, 30 bp, Artificial Sequence
  Synthetic oligonucleotide
ggtcgaaaaggtgtgcgaaagtctagtatg

SEQ ID NO: 57422 - DNA, 30 bp, Artificial Sequence
  Synthetic oligonucleotide
caggtagatcggccagggttgcgcggtatg

SEQ ID NO: 57423 - DNA, 30 bp, Artificial Sequence
  Synthetic oligonucleotide
gctagttgtggcttcagaaggttcggtatg

SEQ ID NO: 57424 - DNA, 30 bp, Artificial Sequence
  Synthetic oligonucleotide
gcgggaggctcgcgatcagccacatgtatg

SEQ ID NO: 57425 - DNA, 30 bp, Artificial Sequence
  Synthetic oligonucleotide
ccgtgaccgggaataagcgaaaagtgtatg

SEQ ID NO: 57426 - DNA, 30 bp, Artificial Sequence
  Synthetic oligonucleotide
ttgagaagatcgtattgccgaacgattatg

SEQ ID NO: 57427 - DNA, 30 bp, Artificial Sequence
  Synthetic oligonucleotide
cgtaaagtgataatgggtgatttgattatg

SEQ ID NO: 57428 - DNA, 30 bp, Artificial Sequence
  Synthetic oligonucleotide
catgcggatgacttggatgtctctattatg

SEQ ID NO: 57429 - DNA, 30 bp, Artificial Sequence
  Synthetic oligonucleotide
acgggggtgtgtgttcgaaattgtcttatg

SEQ ID NO: 57430 - DNA, 30 bp, Artificial Sequence
  Synthetic oligonucleotide
gcatacttaggactgttggagggggttatg

SEQ ID NO: 57431 - DNA, 30 bp, Artificial Sequence
  Synthetic oligonucleotide
tggtaacactagtattcgtcaaaaaaactg

SEQ ID NO: 57432 - DNA, 30 bp, Artificial Sequence
  Synthetic oligonucleotide
tacgtatccgcgacacgccccctaaaactg

SEQ ID NO: 57433 - DNA, 30 bp, Artificial Sequence
  Synthetic oligonucleotide
acgtaagaagatccgttatggaaaacactg

SEQ ID NO: 57434 - DNA, 30 bp, Artificial Sequence
  Synthetic oligonucleotide
ggtagtggtgtaagccttcacaatacactg

SEQ ID NO: 57435 - DNA, 30 bp, Artificial Sequence
  Synthetic oligonucleotide
tctgactccaagaggtgaaatcagccactg

SEQ ID NO: 57436 - DNA, 30 bp, Artificial Sequence
  Synthetic oligonucleotide
ctaagacgttatggtacctcactttcactg

SEQ ID NO: 57437 - DNA, 30 bp, Artificial Sequence
  Synthetic oligonucleotide
gtcgggtctatggactaaactaacagactg

SEQ ID NO: 57438 - DNA, 30 bp, Artificial Sequence
  Synthetic oligonucleotide
aggggactgattacaacgtttcgatgactg

SEQ ID NO: 57439 - DNA, 30 bp, Artificial Sequence
  Synthetic oligonucleotide
cgggagcgttattcttaaataacaatactg

SEQ ID NO: 57440 - DNA, 30 bp, Artificial Sequence
  Synthetic oligonucleotide
tgctaacaacagaaagtcgcatgtctactg

SEQ ID NO: 57441 - DNA, 30 bp, Artificial Sequence
  Synthetic oligonucleotide
gatcccgtctcaagaaggaggagggtactg

SEQ ID NO: 57442 - DNA, 30 bp, Artificial Sequence
  Synthetic oligonucleotide
tcaaactaggaaaagggtttgggggtactg

SEQ ID NO: 57443 - DNA, 30 bp, Artificial Sequence
  Synthetic oligonucleotide
tacacgagttcaaatagactgccattactg

SEQ ID NO: 57444 - DNA, 30 bp, Artificial Sequence
  Synthetic oligonucleotide
tgcgacgcttaaaacaattaactaaacctg

SEQ ID NO: 57445 - DNA, 30 bp, Artificial Sequence
  Synthetic oligonucleotide
acacaattcgtacaactcgcccttcacctg

SEQ ID NO: 57446 - DNA, 30 bp, Artificial Sequence
  Synthetic oligonucleotide
cagagggaaacgtggtcctagcaaaccctg

SEQ ID NO: 57447 - DNA, 30 bp, Artificial Sequence
  Synthetic oligonucleotide
ggggacgcgatatacagtcacggcaccctg

SEQ ID NO: 57448 - DNA, 30 bp, Artificial Sequence
  Synthetic oligonucleotide
tttcagccgtgaaagtgagatccgaccctg

SEQ ID NO: 57449 - DNA, 30 bp, Artificial Sequence
  Synthetic oligonucleotide
agacgcgaaggctgaagtaaggcacccctg

SEQ ID NO: 57450 - DNA, 30 bp, Artificial Sequence
  Synthetic oligonucleotide
tcgaaagttttcgtacaatacagtcccctg

SEQ ID NO: 57451 - DNA, 30 bp, Artificial Sequence
  Synthetic oligonucleotide
tgcaacgccgatctcagtatctaatccctg

SEQ ID NO: 57452 - DNA, 30 bp, Artificial Sequence
  Synthetic oligonucleotide
agatcgtattgatagaaataccgctccctg

SEQ ID NO: 57453 - DNA, 30 bp, Artificial Sequence
  Synthetic oligonucleotide
cgatttgaaaatttaagcttggtctccctg

SEQ ID NO: 57454 - DNA, 30 bp, Artificial Sequence
  Synthetic oligonucleotide
ctgggaacaacggggtgtgaagtacgcctg

SEQ ID NO: 57455 - DNA, 30 bp, Artificial Sequence
  Synthetic oligonucleotide
ttggcaatggaaagacaggctacaggcctg

SEQ ID NO: 57456 - DNA, 30 bp, Artificial Sequence
  Synthetic oligonucleotide
gggtgaacacctacagtcatgtacggcctg

SEQ ID NO: 57457 - DNA, 30 bp, Artificial Sequence
  Synthetic oligonucleotide
ggaaaaccaatggattccataaccatcctg

SEQ ID NO: 57458 - DNA, 30 bp, Artificial Sequence
  Synthetic oligonucleotide
cggaatgaggggaatacagtaatactcctg

SEQ ID NO: 57459 - DNA, 30 bp, Artificial Sequence
  Synthetic oligonucleotide
agaagaatttacgtggaaggtgtggtcctg

SEQ ID NO: 57460 - DNA, 30 bp, Artificial Sequence
  Synthetic oligonucleotide
gccactcaaaagagaggtacacagcagctg

SEQ ID NO: 57461 - DNA, 30 bp, Artificial Sequence
  Synthetic oligonucleotide
acgcaacgagaactcgtcgatttgcagctg

SEQ ID NO: 57462 - DNA, 30 bp, Artificial Sequence
  Synthetic oligonucleotide
ctaacagccagtgaacgcccaatcgagctg

SEQ ID NO: 57463 - DNA, 30 bp, Artificial Sequence
  Synthetic oligonucleotide
gtcagagggttactctaattttgggagctg

SEQ ID NO: 57464 - DNA, 30 bp, Artificial Sequence
  Synthetic oligonucleotide
cggatgtagggaagagccgaaccatagctg

SEQ ID NO: 57465 - DNA, 30 bp, Artificial Sequence
  Synthetic oligonucleotide
ttatcccgcaccaaaaaccagacagcgctg

SEQ ID NO: 57466 - DNA, 30 bp, Artificial Sequence
  Synthetic oligonucleotide
tctaacgtactggcgtaagattcagcgctg

SEQ ID NO: 57467 - DNA, 30 bp, Artificial Sequence
  Synthetic oligonucleotide
catgtgcgaaggcttacggattgcgcgctg

SEQ ID NO: 57468 - DNA, 30 bp, Artificial Sequence
  Synthetic oligonucleotide
cgtactttgatcggagggaaactgtcgctg

SEQ ID NO: 57469 - DNA, 30 bp, Artificial Sequence
  Synthetic oligonucleotide
gctgatgatggtgtgaggttcgagcggctg

SEQ ID NO: 57470 - DNA, 30 bp, Artificial Sequence
  Synthetic oligonucleotide
cttggaagacccgacatggttcaagggctg

SEQ ID NO: 57471 - DNA, 30 bp, Artificial Sequence
  Synthetic oligonucleotide
taacttggacgcccaagtcaaagagggctg

SEQ ID NO: 57472 - DNA, 30 bp, Artificial Sequence
  Synthetic oligonucleotide
tcggggagggatcacccgagatgtgggctg

SEQ ID NO: 57473 - DNA, 30 bp, Artificial Sequence
  Synthetic oligonucleotide
cgagggcacaggtcgtaagagtactggctg

SEQ ID NO: 57474 - DNA, 30 bp, Artificial Sequence
  Synthetic oligonucleotide
tgcctagcatgcactacaacgtaactgctg

SEQ ID NO: 57475 - DNA, 30 bp, Artificial Sequence
  Synthetic oligonucleotide
caagtaacattactcggtggattagtgctg

SEQ ID NO: 57476 - DNA, 30 bp, Artificial Sequence
  Synthetic oligonucleotide
cctcaaccctcaagggctaaactcttgctg

SEQ ID NO: 57477 - DNA, 30 bp, Artificial Sequence
  Synthetic oligonucleotide
atgcgtggggtggcagctccataccatctg

SEQ ID NO: 57478 - DNA, 30 bp, Artificial Sequence
  Synthetic oligonucleotide
tcaggtggcacccattgaaaccagcatctg

SEQ ID NO: 57479 - DNA, 30 bp, Artificial Sequence
  Synthetic oligonucleotide
cgatggactcgctaagaaggcatagatctg

SEQ ID NO: 57480 - DNA, 30 bp, Artificial Sequence
  Synthetic oligonucleotide
gtggtaagctaaggtgctatccaatatctg

SEQ ID NO: 57481 - DNA, 30 bp, Artificial Sequence
  Synthetic oligonucleotide
ccacggcacaccagatggatggtgactctg

SEQ ID NO: 57482 - DNA, 30 bp, Artificial Sequence
  Synthetic oligonucleotide
catcggtgaaataggatgtatagacctctg

SEQ ID NO: 57483 - DNA, 30 bp, Artificial Sequence
  Synthetic oligonucleotide
tacgatactggcggaattgggaggcctctg

SEQ ID NO: 57484 - DNA, 30 bp, Artificial Sequence
  Synthetic oligonucleotide
tcgggagaagttagtaccctccgtcctctg

SEQ ID NO: 57485 - DNA, 30 bp, Artificial Sequence
  Synthetic oligonucleotide
cggcccaatagtatctactgaagtgctctg

SEQ ID NO: 57486 - DNA, 30 bp, Artificial Sequence
  Synthetic oligonucleotide
tcgaccggacgccggatgcgatatcgtctg

SEQ ID NO: 57487 - DNA, 30 bp, Artificial Sequence
  Synthetic oligonucleotide
agtccgtcctggaactgaagaaacggtctg

SEQ ID NO: 57488 - DNA, 30 bp, Artificial Sequence
  Synthetic oligonucleotide
ataggtcagcaatacggggtatagggtctg

SEQ ID NO: 57489 - DNA, 30 bp, Artificial Sequence
  Synthetic oligonucleotide
tgttgtaacaaggaatttagttcgattctg

SEQ ID NO: 57490 - DNA, 30 bp, Artificial Sequence
  Synthetic oligonucleotide
tgtgcctgcctactaggaaaaatagttctg

SEQ ID NO: 57491 - DNA, 30 bp, Artificial Sequence
  Synthetic oligonucleotide
aggtctaacatcgtaaaaattaaaaaagtg

SEQ ID NO: 57492 - DNA, 30 bp, Artificial Sequence
  Synthetic oligonucleotide
ctccgaagcccccagacccgtcgaaaagtg

SEQ ID NO: 57493 - DNA, 30 bp, Artificial Sequence
  Synthetic oligonucleotide
ccttagaccattagacctcgtaaacaagtg

SEQ ID NO: 57494 - DNA, 30 bp, Artificial Sequence
  Synthetic oligonucleotide
caacgtagcttcgtggggtgggagcaagtg

SEQ ID NO: 57495 - DNA, 30 bp, Artificial Sequence
  Synthetic oligonucleotide
gaggtgcgcacgaagttagagtgcgaagtg

SEQ ID NO: 57496 - DNA, 30 bp, Artificial Sequence
  Synthetic oligonucleotide
cgcgcaatacaaagctgcgaaagggaagtg

SEQ ID NO: 57497 - DNA, 30 bp, Artificial Sequence
  Synthetic oligonucleotide
tcgaaaggtcgggctcgtttgctttaagtg

SEQ ID NO: 57498 - DNA, 30 bp, Artificial Sequence
  Synthetic oligonucleotide
agatagacgcgagaatgagagcagacagtg

SEQ ID NO: 57499 - DNA, 30 bp, Artificial Sequence
  Synthetic oligonucleotide
taggtatttctgatagaaaaatgtacagtg

SEQ ID NO: 57500 - DNA, 30 bp, Artificial Sequence
  Synthetic oligonucleotide
gaaagtcgcatcccctattaacaaccagtg

SEQ ID NO: 57501 - DNA, 30 bp, Artificial Sequence
  Synthetic oligonucleotide
caaccttaccacctccgtcacatgccagtg

SEQ ID NO: 57502 - DNA, 30 bp, Artificial Sequence
  Synthetic oligonucleotide
aatcatgccgttcgtcgcaatcaagcagtg

SEQ ID NO: 57503 - DNA, 30 bp, Artificial Sequence
  Synthetic oligonucleotide
attcaaaatcaaacatcagaagctgcagtg

SEQ ID NO: 57504 - DNA, 30 bp, Artificial Sequence
  Synthetic oligonucleotide
agacctctggcgctgtgaagaatctcagtg

SEQ ID NO: 57505 - DNA, 30 bp, Artificial Sequence
  Synthetic oligonucleotide
agggagatgtgaggagtcatcaggtcagtg

SEQ ID NO: 57506 - DNA, 30 bp, Artificial Sequence
  Synthetic oligonucleotide
agccgaggtaaaccgcacataactagagtg

SEQ ID NO: 57507 - DNA, 30 bp, Artificial Sequence
  Synthetic oligonucleotide
gaccaccggtgtggataataaccaggagtg

SEQ ID NO: 57508 - DNA, 30 bp, Artificial Sequence
  Synthetic oligonucleotide
ccatagaccggacccaccaaggacctagtg

SEQ ID NO: 57509 - DNA, 30 bp, Artificial Sequence
  Synthetic oligonucleotide
gtggagaggcctgatagctcttcggtagtg

SEQ ID NO: 57510 - DNA, 30 bp, Artificial Sequence
  Synthetic oligonucleotide
ggtctcggagtgaatcgagtatgcttagtg

SEQ ID NO: 57511 - DNA, 30 bp, Artificial Sequence
  Synthetic oligonucleotide
tggagcgtgcagatcagttgtggaaacgtg

SEQ ID NO: 57512 - DNA, 30 bp, Artificial Sequence
  Synthetic oligonucleotide
atcctgcacccgccaaagggccaggacgtg

SEQ ID NO: 57513 - DNA, 30 bp, Artificial Sequence
  Synthetic oligonucleotide
ggcctacagaacaaatgtagagcggacgtg

SEQ ID NO: 57514 - DNA, 30 bp, Artificial Sequence
  Synthetic oligonucleotide
cggcaggacaacactggcttgtaatacgtg

SEQ ID NO: 57515 - DNA, 30 bp, Artificial Sequence
  Synthetic oligonucleotide
cgtagagccttcaggtgcccatagtacgtg

SEQ ID NO: 57516 - DNA, 30 bp, Artificial Sequence
  Synthetic oligonucleotide
cgccaaggatgaattgttggagggaccgtg

SEQ ID NO: 57517 - DNA, 30 bp, Artificial Sequence
  Synthetic oligonucleotide
agtaaacggatactagggtagagagccgtg

SEQ ID NO: 57518 - DNA, 30 bp, Artificial Sequence
  Synthetic oligonucleotide
cgaaaaatgctactgccccggctcgccgtg

SEQ ID NO: 57519 - DNA, 30 bp, Artificial Sequence
  Synthetic oligonucleotide
aggctgatcgtcaccatagacagggccgtg

SEQ ID NO: 57520 - DNA, 30 bp, Artificial Sequence
  Synthetic oligonucleotide
tgagttaaattcggtttacaccctgccgtg

SEQ ID NO: 57521 - DNA, 30 bp, Artificial Sequence
  Synthetic oligonucleotide
gatgtcaggacatacaccccgaaatccgtg

SEQ ID NO: 57522 - DNA, 30 bp, Artificial Sequence
  Synthetic oligonucleotide
agtaaaatgggatgtcatcccaagtccgtg

SEQ ID NO: 57523 - DNA, 30 bp, Artificial Sequence
  Synthetic oligonucleotide
aggtgattcattctcaccgcagattccgtg

SEQ ID NO: 57524 - DNA, 30 bp, Artificial Sequence
  Synthetic oligonucleotide
catgagggggttgtcgagagtaagagcgtg

SEQ ID NO: 57525 - DNA, 30 bp, Artificial Sequence
  Synthetic oligonucleotide
aattacaccatgtctcaatgaataggcgtg

SEQ ID NO: 57526 - DNA, 30 bp, Artificial Sequence
  Synthetic oligonucleotide
atggcgaacatcacgtaactaactggcgtg

SEQ ID NO: 57527 - DNA, 30 bp, Artificial Sequence
  Synthetic oligonucleotide
gccgggcaggtcaataattaaatttgcgtg

SEQ ID NO: 57528 - DNA, 30 bp, Artificial Sequence
  Synthetic oligonucleotide
atcgaattatctctgtcggtagacctcgtg

SEQ ID NO: 57529 - DNA, 30 bp, Artificial Sequence
  Synthetic oligonucleotide
aggctctctgggatcgtacgtctagtcgtg

SEQ ID NO: 57530 - DNA, 30 bp, Artificial Sequence
  Synthetic oligonucleotide
gttacagtgacagtgaaggaccaggtcgtg

SEQ ID NO: 57531 - DNA, 30 bp, Artificial Sequence
  Synthetic oligonucleotide
gcactatgagaagcaatgatacatttcgtg

SEQ ID NO: 57532 - DNA, 30 bp, Artificial Sequence
  Synthetic oligonucleotide
gtaacctaaaccggatgagcttcaaaggtg

SEQ ID NO: 57533 - DNA, 30 bp, Artificial Sequence
  Synthetic oligonucleotide
agcgtcccagcgtcctggaatcgaaaggtg

SEQ ID NO: 57534 - DNA, 30 bp, Artificial Sequence
  Synthetic oligonucleotide
cattagcgatcagttttcttacgtaaggtg

SEQ ID NO: 57535 - DNA, 30 bp, Artificial Sequence
  Synthetic oligonucleotide
caggtgtcgaccaggaatcctagtcaggtg

SEQ ID NO: 57536 - DNA, 30 bp, Artificial Sequence
  Synthetic oligonucleotide
ctcgattggaaaaacggtatcgaagaggtg

SEQ ID NO: 57537 - DNA, 30 bp, Artificial Sequence
  Synthetic oligonucleotide
caacgtagccggggcttgaattacgaggtg

SEQ ID NO: 57538 - DNA, 30 bp, Artificial Sequence
  Synthetic oligonucleotide
tagaggattaggacgacatgatgcgaggtg

SEQ ID NO: 57539 - DNA, 30 bp, Artificial Sequence
  Synthetic oligonucleotide
tcatacagtgatcgcgaccgggtctaggtg

SEQ ID NO: 57540 - DNA, 30 bp, Artificial Sequence
  Synthetic oligonucleotide
cgaggttagcgtcatttaccgcggtaggtg

SEQ ID NO: 57541 - DNA, 30 bp, Artificial Sequence
  Synthetic oligonucleotide
cgggttgcgacagacattgagaatacggtg

SEQ ID NO: 57542 - DNA, 30 bp, Artificial Sequence
  Synthetic oligonucleotide
gatgtttcatcatatcacatagaacgggtg

SEQ ID NO: 57543 - DNA, 30 bp, Artificial Sequence
  Synthetic oligonucleotide
tagttccaggaataaaggtgatcacgggtg

SEQ ID NO: 57544 - DNA, 30 bp, Artificial Sequence
  Synthetic oligonucleotide
cacgacatttctccaacttgccgtcgggtg

SEQ ID NO: 57545 - DNA, 30 bp, Artificial Sequence
  Synthetic oligonucleotide
atgttatctccacaatacaagtcaggggtg

SEQ ID NO: 57546 - DNA, 30 bp, Artificial Sequence
  Synthetic oligonucleotide
gccggcggaaagaaaaggggcgtgggggtg

SEQ ID NO: 57547 - DNA, 30 bp, Artificial Sequence
  Synthetic oligonucleotide
gggcacccgcacagacgataggaatgggtg

SEQ ID NO: 57548 - DNA, 30 bp, Artificial Sequence
  Synthetic oligonucleotide
agactgattatacatctgaaatagtgggtg

SEQ ID NO: 57549 - DNA, 30 bp, Artificial Sequence
  Synthetic oligonucleotide
catgcgagctgcattagttaagcgtgggtg

SEQ ID NO: 57550 - DNA, 30 bp, Artificial Sequence
  Synthetic oligonucleotide
gcgggtagcgaatgttgagcggcttgggtg

SEQ ID NO: 57551 - DNA, 30 bp, Artificial Sequence
  Synthetic oligonucleotide
tgggcgcgccgaaaagggaaggaaatggtg

SEQ ID NO: 57552 - DNA, 30 bp, Artificial Sequence
  Synthetic oligonucleotide
ccttgccagctacctaagctcaatatggtg

SEQ ID NO: 57553 - DNA, 30 bp, Artificial Sequence
  Synthetic oligonucleotide
caggcaatgtggtcctccgaccggctggtg

SEQ ID NO: 57554 - DNA, 30 bp, Artificial Sequence
  Synthetic oligonucleotide
cggcgtcatgcgcacagagatggggtggtg

SEQ ID NO: 57555 - DNA, 30 bp, Artificial Sequence
  Synthetic oligonucleotide
tacgattgaaagggcgcgctgggtgtggtg

SEQ ID NO: 57556 - DNA, 31 bp, Artificial Sequence
  Synthetic oligonucleotide
cctagactaggataaaaggggacgattggtg

SEQ ID NO: 57557 - DNA, 30 bp, Artificial Sequence
  Synthetic oligonucleotide
agtgccaaaagcggttaccggcgattggtg

SEQ ID NO: 57558 - DNA, 30 bp, Artificial Sequence
  Synthetic oligonucleotide
cagatcgagagcagcgcgacgttattggtg

SEQ ID NO: 57559 - DNA, 30 bp, Artificial Sequence
  Synthetic oligonucleotide
ctacggtctaatggctggcgaaacttggtg

SEQ ID NO: 57560 - DNA, 30 bp, Artificial Sequence
  Synthetic oligonucleotide
gctagaagcatagccaaagtaccaaatgtg

SEQ ID NO: 57561 - DNA, 30 bp, Artificial Sequence
  Synthetic oligonucleotide
tacagtcgaatacagtaagggcttaatgtg

SEQ ID NO: 57562 - DNA, 30 bp, Artificial Sequence
  Synthetic oligonucleotide
tgtggcggtcagatcgaattgtgggatgtg

SEQ ID NO: 57563 - DNA, 30 bp, Artificial Sequence
  Synthetic oligonucleotide
ccggatccagagaagtacttatcatatgtg

SEQ ID NO: 57564 - DNA, 30 bp, Artificial Sequence
  Synthetic oligonucleotide
tgtcataaagagtggaagcgtacctatgtg

SEQ ID NO: 57565 - DNA, 30 bp, Artificial Sequence
  Synthetic oligonucleotide
tgtgcggaaacagcctgaatataaactgtg

SEQ ID NO: 57566 - DNA, 30 bp, Artificial Sequence
  Synthetic oligonucleotide
tcattccatagaataaatgaagacactgtg

SEQ ID NO: 57567 - DNA, 30 bp, Artificial Sequence
  Synthetic oligonucleotide
gcaatcgccaacaccaatcgaagcactgtg

SEQ ID NO: 57568 - DNA, 30 bp, Artificial Sequence
  Synthetic oligonucleotide
cacgtctcccgttctaataagccagctgtg

SEQ ID NO: 57569 - DNA, 30 bp, Artificial Sequence
  Synthetic oligonucleotide
aatgggatgggtatgcccacagacagtgtg

SEQ ID NO: 57570 - DNA, 30 bp, Artificial Sequence
  Synthetic oligonucleotide
agacttagttatctcagacatcagagtgtg

SEQ ID NO: 57571 - DNA, 30 bp, Artificial Sequence
  Synthetic oligonucleotide
tgaagggtcatacacttcccacgccgtgtg

SEQ ID NO: 57572 - DNA, 30 bp, Artificial Sequence
  Synthetic oligonucleotide
gttgtatcattaccagataggctccgtgtg

SEQ ID NO: 57573 - DNA, 31 bp, Artificial Sequence
  Synthetic oligonucleotide
taatcgatgtgaaaaactagtaaagggtgtg

SEQ ID NO: 57574 - DNA, 30 bp, Artificial Sequence
  Synthetic oligonucleotide
caatatagcagtcccaaaccaacgggtgtg

SEQ ID NO: 57575 - DNA, 30 bp, Artificial Sequence
  Synthetic oligonucleotide
cctcagatggtcaaatctgtctacattgtg

SEQ ID NO: 57576 - DNA, 30 bp, Artificial Sequence
  Synthetic oligonucleotide
acgtgggacatggccgaatcttggattgtg

SEQ ID NO: 57577 - DNA, 30 bp, Artificial Sequence
  Synthetic oligonucleotide
acgggacataaagcagacctttgacttgtg

SEQ ID NO: 57578 - DNA, 30 bp, Artificial Sequence
  Synthetic oligonucleotide
gatcagagcagtacaagtggcatggttgtg

SEQ ID NO: 57579 - DNA, 30 bp, Artificial Sequence
  Synthetic oligonucleotide
tgagtccgaatagcgcacttcgatgttgtg

SEQ ID NO: 57580 - DNA, 30 bp, Artificial Sequence
  Synthetic oligonucleotide
cgtactttggctcgatccacagtaaaattg

SEQ ID NO: 57581 - DNA, 30 bp, Artificial Sequence
  Synthetic oligonucleotide
ttggtaatagtagatacaggaggacaattg

SEQ ID NO: 57582 - DNA, 30 bp, Artificial Sequence
  Synthetic oligonucleotide
cccattaattgtccaccgagagctgaattg

SEQ ID NO: 57583 - DNA, 30 bp, Artificial Sequence
  Synthetic oligonucleotide
gggatgtggagaacgacggatagtgaattg

SEQ ID NO: 57584 - DNA, 30 bp, Artificial Sequence
  Synthetic oligonucleotide
actaagaagcggtcaagtattcaataattg

SEQ ID NO: 57585 - DNA, 30 bp, Artificial Sequence
  Synthetic oligonucleotide
aactggcttaggcaaggcattggataattg

SEQ ID NO: 57586 - DNA, 30 bp, Artificial Sequence
  Synthetic oligonucleotide
gaactcaggcacgcaacgagctgtacattg

SEQ ID NO: 57587 - DNA, 30 bp, Artificial Sequence
  Synthetic oligonucleotide
acgtatgcgatttcctcctctcaagcattg

SEQ ID NO: 57588 - DNA, 30 bp, Artificial Sequence
  Synthetic oligonucleotide
attagggtggaccaagaaactctggcattg

SEQ ID NO: 57589 - DNA, 30 bp, Artificial Sequence
  Synthetic oligonucleotide
tcgacgggtcagtgttcgcgctaatcattg

SEQ ID NO: 57590 - DNA, 30 bp, Artificial Sequence
  Synthetic oligonucleotide
taagaccggttaatggttgcgggaagattg

SEQ ID NO: 57591 - DNA, 30 bp, Artificial Sequence
  Synthetic oligonucleotide
ctaataggaatagtgtggagattacgattg

SEQ ID NO: 57592 - DNA, 30 bp, Artificial Sequence
  Synthetic oligonucleotide
tccgcggtagtccaggctctaagtcgattg

SEQ ID NO: 57593 - DNA, 30 bp, Artificial Sequence
  Synthetic oligonucleotide
atacggggtaaacgtatcagccaaatattg

SEQ ID NO: 57594 - DNA, 30 bp, Artificial Sequence
  Synthetic oligonucleotide
tgagaggcttaagcaggctgtgcgatattg

SEQ ID NO: 57595 - DNA, 30 bp, Artificial Sequence
  Synthetic oligonucleotide
tagatgaactggcaggtgatgtatatattg

SEQ ID NO: 57596 - DNA, 30 bp, Artificial Sequence
  Synthetic oligonucleotide
cgggtgaacatcgcttcatgaaaggtattg

SEQ ID NO: 57597 - DNA, 30 bp, Artificial Sequence
  Synthetic oligonucleotide
atcatggcaagtacgcttggagagttattg

SEQ ID NO: 57598 - DNA, 30 bp, Artificial Sequence
  Synthetic oligonucleotide
cggggggcagaaagcattcctggtttattg

SEQ ID NO: 57599 - DNA, 30 bp, Artificial Sequence
  Synthetic oligonucleotide
acgttaggagcgaccagtccagttcacttg

SEQ ID NO: 57600 - DNA, 30 bp, Artificial Sequence
  Synthetic oligonucleotide
tgagaatcgttcgagatcaaccggtacttg

SEQ ID NO: 57601 - DNA, 30 bp, Artificial Sequence
  Synthetic oligonucleotide
gagccggagcatacactaaaagtacccttg

SEQ ID NO: 57602 - DNA, 30 bp, Artificial Sequence
  Synthetic oligonucleotide
accaacgaatgtaggtcggtgctatccttg

SEQ ID NO: 57603 - DNA, 30 bp, Artificial Sequence
  Synthetic oligonucleotide
tgcgcataatgaagtaaacttttgagcttg

SEQ ID NO: 57604 - DNA, 30 bp, Artificial Sequence
  Synthetic oligonucleotide
tcattaaaagtggtcgatatgtctggcttg

SEQ ID NO: 57605 - DNA, 30 bp, Artificial Sequence
  Synthetic oligonucleotide
agtggcaatatgtgtgagcatcaaatcttg

SEQ ID NO: 57606 - DNA, 30 bp, Artificial Sequence
  Synthetic oligonucleotide
tgagaccctttgaggatattgggaatcttg

SEQ ID NO: 57607 - DNA, 30 bp, Artificial Sequence
  Synthetic oligonucleotide
tcgaggtcgttggtgggaatgcccatcttg

SEQ ID NO: 57608 - DNA, 30 bp, Artificial Sequence
  Synthetic oligonucleotide
cgttttcatcgttattaaggcaatgtcttg

SEQ ID NO: 57609 - DNA, 30 bp, Artificial Sequence
  Synthetic oligonucleotide
agtagcgaagaagacgcggaatagaagttg

SEQ ID NO: 57610 - DNA, 30 bp, Artificial Sequence
  Synthetic oligonucleotide
actcgtgcactcgatatccctacgaagttg

SEQ ID NO: 57611 - DNA, 30 bp, Artificial Sequence
  Synthetic oligonucleotide
actgattgtgtgagagcggaatggaagttg

SEQ ID NO: 57612 - DNA, 30 bp, Artificial Sequence
  Synthetic oligonucleotide
gcgcgttgacggatctagcatctgcagttg

SEQ ID NO: 57613 - DNA, 30 bp, Artificial Sequence
  Synthetic oligonucleotide
ggacacaaacgacgtagagagcgtgagttg

SEQ ID NO: 57614 - DNA, 30 bp, Artificial Sequence
  Synthetic oligonucleotide
atgcagtctgtgatagcaggctgttagttg

SEQ ID NO: 57615 - DNA, 30 bp, Artificial Sequence
  Synthetic oligonucleotide
cacgaggaaagaacatatattctcccgttg

SEQ ID NO: 57616 - DNA, 30 bp, Artificial Sequence
  Synthetic oligonucleotide
acttcctaaaagatatgaagccatccgttg

SEQ ID NO: 57617 - DNA, 30 bp, Artificial Sequence
  Synthetic oligonucleotide
agagaggctctaggcgtgctagggaggttg

SEQ ID NO: 57618 - DNA, 30 bp, Artificial Sequence
  Synthetic oligonucleotide
gcgagcgaatcacacaccgttagggggttg

SEQ ID NO: 57619 - DNA, 30 bp, Artificial Sequence
  Synthetic oligonucleotide
gacggtcctagcaaagggcccaatgggttg

SEQ ID NO: 57620 - DNA, 30 bp, Artificial Sequence
  Synthetic oligonucleotide
catacgcactttctgagagacactgggttg

SEQ ID NO: 57621 - DNA, 30 bp, Artificial Sequence
  Synthetic oligonucleotide
ttaggtgagtcaggtagacatgaatggttg

SEQ ID NO: 57622 - DNA, 30 bp, Artificial Sequence
  Synthetic oligonucleotide
ggggtaaacttcgcctgacatggctggttg

SEQ ID NO: 57623 - DNA, 30 bp, Artificial Sequence
  Synthetic oligonucleotide
ctgtaaatcgggaaccagataacgtggttg

SEQ ID NO: 57624 - DNA, 30 bp, Artificial Sequence
  Synthetic oligonucleotide
tcggattcgggagtgctctttctactgttg

SEQ ID NO: 57625 - DNA, 30 bp, Artificial Sequence
  Synthetic oligonucleotide
cgagatgtcataccacatcggctgctgttg

SEQ ID NO: 57626 - DNA, 30 bp, Artificial Sequence
  Synthetic oligonucleotide
gagaagtagaaggcgataaattaattgttg

SEQ ID NO: 57627 - DNA, 30 bp, Artificial Sequence
  Synthetic oligonucleotide
cgcgggggaccctaatgaatagcgttgttg

SEQ ID NO: 57628 - DNA, 30 bp, Artificial Sequence
  Synthetic oligonucleotide
cgagccgaatgtgcaatggagtcgttgttg

SEQ ID NO: 57629 - DNA, 30 bp, Artificial Sequence
  Synthetic oligonucleotide
ggtgactcaacgtcaaaaggtgtaaatttg

SEQ ID NO: 57630 - DNA, 30 bp, Artificial Sequence
  Synthetic oligonucleotide
ggatggccggttgactgattctaagatttg

SEQ ID NO: 57631 - DNA, 30 bp, Artificial Sequence
  Synthetic oligonucleotide
gtggtagaggtcaatcttatgttctatttg

SEQ ID NO: 57632 - DNA, 30 bp, Artificial Sequence
  Synthetic oligonucleotide
cgataaaatattttacatttggcgtatttg

SEQ ID NO: 57633 - DNA, 30 bp, Artificial Sequence
  Synthetic oligonucleotide
cgcggattgcaaccagaatgccatcctttg

SEQ ID NO: 57634 - DNA, 30 bp, Artificial Sequence
  Synthetic oligonucleotide
tcgatggtagttgatttgttcgtgagtttg

SEQ ID NO: 57635 - DNA, 30 bp, Artificial Sequence
  Synthetic oligonucleotide
cgtggcaaactgtagaaaacttaacgtttg

SEQ ID NO: 57636 - DNA, 31 bp, Artificial Sequence
  Synthetic oligonucleotide
aggtgggcccgacgaagcagggtaacttttg

SEQ ID NO: 57637 - DNA, 30 bp, Artificial Sequence
  Synthetic oligonucleotide
ccagcaaagggaacaccctcaattgttttg

SEQ ID NO: 57638 - DNA, 30 bp, Artificial Sequence
  Synthetic oligonucleotide
cgatactggtcggactatgtcctcgaaaat

SEQ ID NO: 57639 - DNA, 30 bp, Artificial Sequence
  Synthetic oligonucleotide
atacgcacttccaagtatgtgcgaacaaat

SEQ ID NO: 57640 - DNA, 30 bp, Artificial Sequence
  Synthetic oligonucleotide
acaagtacggagatcccgaaccacacaaat

SEQ ID NO: 57641 - DNA, 30 bp, Artificial Sequence
  Synthetic oligonucleotide
ataaatcacccatggagaatgagagcaaat

SEQ ID NO: 57642 - DNA, 30 bp, Artificial Sequence
  Synthetic oligonucleotide
aagttaagatggttgaaagctggatcaaat

SEQ ID NO: 57643 - DNA, 30 bp, Artificial Sequence
  Synthetic oligonucleotide
gggttgagacgagctacgagatccagaaat

SEQ ID NO: 57644 - DNA, 30 bp, Artificial Sequence
  Synthetic oligonucleotide
atggttgaaactagattcatctcgagaaat

SEQ ID NO: 57645 - DNA, 30 bp, Artificial Sequence
  Synthetic oligonucleotide
ctcgaggtccgagggaaaatttaacgaaat

SEQ ID NO: 57646 - DNA, 30 bp, Artificial Sequence
  Synthetic oligonucleotide
tgtggtaaccaaatatgcattcgccgaaat

SEQ ID NO: 57647 - DNA, 30 bp, Artificial Sequence
  Synthetic oligonucleotide
cctcccgaaacggggtgagattggcgaaat

SEQ ID NO: 57648 - DNA, 30 bp, Artificial Sequence
  Synthetic oligonucleotide
ggacgactaatgttgtcaagcggaggaaat

SEQ ID NO: 57649 - DNA, 30 bp, Artificial Sequence
  Synthetic oligonucleotide
ctcgtggaacatcaacggaggatcataaat

SEQ ID NO: 57650 - DNA, 30 bp, Artificial Sequence
  Synthetic oligonucleotide
aacggtgaaagatgtacttgatgccacaat

SEQ ID NO: 57651 - DNA, 30 bp, Artificial Sequence
  Synthetic oligonucleotide
agcgggatccatcccgtcaagtatcacaat

SEQ ID NO: 57652 - DNA, 30 bp, Artificial Sequence
  Synthetic oligonucleotide
gatatcgcgcgtaacggccggccatacaat

SEQ ID NO: 57653 - DNA, 30 bp, Artificial Sequence
  Synthetic oligonucleotide
ggaaagcgagcaggcctgaaagtgaccaat

SEQ ID NO: 57654 - DNA, 30 bp, Artificial Sequence
  Synthetic oligonucleotide
cggaaggatagtcgttgggaactagccaat

SEQ ID NO: 57655 - DNA, 30 bp, Artificial Sequence
  Synthetic oligonucleotide
agtcatcgtaacagagtcgtgtgtggcaat

SEQ ID NO: 57656 - DNA, 31 bp, Artificial Sequence
  Synthetic oligonucleotide
cgtaacaagagcgagtcccagcgacctcaat

SEQ ID NO: 57657 - DNA, 30 bp, Artificial Sequence
  Synthetic oligonucleotide
cggtgctgttaagagtgggggactgtcaat

SEQ ID NO: 57658 - DNA, 30 bp, Artificial Sequence
  Synthetic oligonucleotide
cggggagatcgaactcgtcacaaattcaat

SEQ ID NO: 57659 - DNA, 30 bp, Artificial Sequence
  Synthetic oligonucleotide
ggcggaaggaagtcataccccatcttcaat

SEQ ID NO: 57660 - DNA, 30 bp, Artificial Sequence
  Synthetic oligonucleotide
cgtttagaagtgtcgcaaagtcggaagaat

SEQ ID NO: 57661 - DNA, 30 bp, Artificial Sequence
  Synthetic oligonucleotide
cgaccttgagtggtaacgttgcgtaagaat

SEQ ID NO: 57662 - DNA, 30 bp, Artificial Sequence
  Synthetic oligonucleotide
cagccggtgttggggagtagaacacagaat

SEQ ID NO: 57663 - DNA, 30 bp, Artificial Sequence
  Synthetic oligonucleotide
tactaggcattcgataaactcccacagaat

SEQ ID NO: 57664 - DNA, 30 bp, Artificial Sequence
  Synthetic oligonucleotide
tgcacaaatgcctaatccgcgtaccagaat

SEQ ID NO: 57665 - DNA, 30 bp, Artificial Sequence
  Synthetic oligonucleotide
ggaacttaacgcgcgaatattaggcagaat

SEQ ID NO: 57666 - DNA, 30 bp, Artificial Sequence
  Synthetic oligonucleotide
ggtctttcgtgaaggggatgacctcagaat

SEQ ID NO: 57667 - DNA, 31 bp, Artificial Sequence
  Synthetic oligonucleotide
tcggaggagtctcgaccaacatgtcccgaat

SEQ ID NO: 57668 - DNA, 30 bp, Artificial Sequence
  Synthetic oligonucleotide
acgattagatctcagcgagttccagcgaat

SEQ ID NO: 57669 - DNA, 31 bp, Artificial Sequence
  Synthetic oligonucleotide
caacaccggatgagcatgacaccgttcgaat

SEQ ID NO: 57670 - DNA, 30 bp, Artificial Sequence
  Synthetic oligonucleotide
gaacatagtgtttacaaggagagccggaat

SEQ ID NO: 57671 - DNA, 30 bp, Artificial Sequence
  Synthetic oligonucleotide
tcgttcgtgcgaattaaggagtaagggaat

SEQ ID NO: 57672 - DNA, 30 bp, Artificial Sequence
  Synthetic oligonucleotide
gcaagactagtaatagtataaatggggaat

SEQ ID NO: 57673 - DNA, 30 bp, Artificial Sequence
  Synthetic oligonucleotide
gaagactgcgtcataaacaaccctgggaat

SEQ ID NO: 57674 - DNA, 30 bp, Artificial Sequence
  Synthetic oligonucleotide
gtgccggtaatgagagcgatgtcagtgaat

SEQ ID NO: 57675 - DNA, 30 bp, Artificial Sequence
  Synthetic oligonucleotide
catgcgactacaagcagatctagggtgaat

SEQ ID NO: 57676 - DNA, 30 bp, Artificial Sequence
  Synthetic oligonucleotide
ccgatcagctcgcgagtgttacagttgaat

SEQ ID NO: 57677 - DNA, 30 bp, Artificial Sequence
  Synthetic oligonucleotide
agtcagaaaggattcatgcccgaacataat

SEQ ID NO: 57678 - DNA, 30 bp, Artificial Sequence
  Synthetic oligonucleotide
ggatggggccttagcacaatccgacataat

SEQ ID NO: 57679 - DNA, 29 bp, Artificial Sequence
  Synthetic oligonucleotide
aatgccgtcgtagggagaactagcataat

SEQ ID NO: 57680 - DNA, 30 bp, Artificial Sequence
  Synthetic oligonucleotide
tcgatcgacatcctcaggggggcaactaat

SEQ ID NO: 57681 - DNA, 30 bp, Artificial Sequence
  Synthetic oligonucleotide
ctagatttaccgatcgagaaaaaccctaat

SEQ ID NO: 57682 - DNA, 30 bp, Artificial Sequence
  Synthetic oligonucleotide
aggagacatcaggggaggggcactcctaat

SEQ ID NO: 57683 - DNA, 30 bp, Artificial Sequence
  Synthetic oligonucleotide
gggcaaaaggcttacaacgtctttgctaat

SEQ ID NO: 57684 - DNA, 30 bp, Artificial Sequence
  Synthetic oligonucleotide
ccgagtcaacgaagccgatacaacagtaat

SEQ ID NO: 57685 - DNA, 30 bp, Artificial Sequence
  Synthetic oligonucleotide
aaggtgcaggtctacgaggtatgtggtaat

SEQ ID NO: 57686 - DNA, 30 bp, Artificial Sequence
  Synthetic oligonucleotide
gaagacgtgtaagcggggtaggagtgtaat

SEQ ID NO: 57687 - DNA, 30 bp, Artificial Sequence
  Synthetic oligonucleotide
tctagagtgcgacttaagcgcaaagttaat

SEQ ID NO: 57688 - DNA, 30 bp, Artificial Sequence
  Synthetic oligonucleotide
tcgaaaagggatcaaggtaacctcgttaat

SEQ ID NO: 57689 - DNA, 30 bp, Artificial Sequence
  Synthetic oligonucleotide
cacaggggaaaggctgtcctaggtaaacat

SEQ ID NO: 57690 - DNA, 30 bp, Artificial Sequence
  Synthetic oligonucleotide
gctagtctatgtatgccacttaaaacacat

SEQ ID NO: 57691 - DNA, 30 bp, Artificial Sequence
  Synthetic oligonucleotide
aagtcgagcgaagaaatggcccagacacat

SEQ ID NO: 57692 - DNA, 40 bp, Artificial Sequence
  Synthetic oligonucleotide
ggttagtgagctattgactgtcgatcatcttagagcacat

SEQ ID NO: 57693 - DNA, 30 bp, Artificial Sequence
  Synthetic oligonucleotide
ggggggacgaagttaatactctgggcacat

SEQ ID NO: 57694 - DNA, 30 bp, Artificial Sequence
  Synthetic oligonucleotide
cgcaaggcgccgatttgttcaaaaagacat

SEQ ID NO: 57695 - DNA, 30 bp, Artificial Sequence
  Synthetic oligonucleotide
caagtgagcattccccaagctaatagacat

SEQ ID NO: 57696 - DNA, 30 bp, Artificial Sequence
  Synthetic oligonucleotide
accaggactacaagaagttgtgtgcgacat

SEQ ID NO: 57697 - DNA, 30 bp, Artificial Sequence
  Synthetic oligonucleotide
tcaatagcgagtgttataccgggaggacat

SEQ ID NO: 57698 - DNA, 30 bp, Artificial Sequence
  Synthetic oligonucleotide
cgtattgagagccgtagaatttatggacat

SEQ ID NO: 57699 - DNA, 30 bp, Artificial Sequence
  Synthetic oligonucleotide
gtgctaagggctcaacactttctgtgacat

SEQ ID NO: 57700 - DNA, 30 bp, Artificial Sequence
  Synthetic oligonucleotide
gacaagcgatgacagaggtgattaatacat

SEQ ID NO: 57701 - DNA, 30 bp, Artificial Sequence
  Synthetic oligonucleotide
taccgatatggggccgtactaaagaaccat

SEQ ID NO: 57702 - DNA, 30 bp, Artificial Sequence
  Synthetic oligonucleotide
tacctaacacgtcggatcacttgtgaccat

SEQ ID NO: 57703 - DNA, 30 bp, Artificial Sequence
  Synthetic oligonucleotide
tatcaccaacagtaaggaaaccaataccat

SEQ ID NO: 57704 - DNA, 30 bp, Artificial Sequence
  Synthetic oligonucleotide
caaaacaatccggataaggggggataccat

SEQ ID NO: 57705 - DNA, 30 bp, Artificial Sequence
  Synthetic oligonucleotide
acgaaaacattctaacgttgtgattaccat

SEQ ID NO: 57706 - DNA, 30 bp, Artificial Sequence
  Synthetic oligonucleotide
ccgaggaatacaggagggtcaggttaccat

SEQ ID NO: 57707 - DNA, 30 bp, Artificial Sequence
  Synthetic oligonucleotide
gacgagaattgaagtagggaatccgcccat

SEQ ID NO: 57708 - DNA, 30 bp, Artificial Sequence
  Synthetic oligonucleotide
gaggaatgatatgccttcgtagagtcccat

SEQ ID NO: 57709 - DNA, 30 bp, Artificial Sequence
  Synthetic oligonucleotide
caataaaggtaatgcgccgccacgtcccat

SEQ ID NO: 57710 - DNA, 30 bp, Artificial Sequence
  Synthetic oligonucleotide
ccgcacggggtagtttaccagggaagccat

SEQ ID NO: 57711 - DNA, 30 bp, Artificial Sequence
  Synthetic oligonucleotide
tgatcgggcattagggcgaccgtaagccat

SEQ ID NO: 57712 - DNA, 30 bp, Artificial Sequence
  Synthetic oligonucleotide
cgttagggagtgcgtcactgtgcctgccat

SEQ ID NO: 57713 - DNA, 30 bp, Artificial Sequence
  Synthetic oligonucleotide
acgaatagacatattcatgcagctctccat

SEQ ID NO: 57714 - DNA, 30 bp, Artificial Sequence
  Synthetic oligonucleotide
ctggtaccgcgtgatagaaacctcaagcat

SEQ ID NO: 57715 - DNA, 30 bp, Artificial Sequence
  Synthetic oligonucleotide
acggagactgtcaggtggcctgagaagcat

SEQ ID NO: 57716 - DNA, 30 bp, Artificial Sequence
  Synthetic oligonucleotide
cacaagctatatacgacagggggtcagcat

SEQ ID NO: 57717 - DNA, 30 bp, Artificial Sequence
  Synthetic oligonucleotide
ttaaagcgacaagggaatgggtgggagcat

SEQ ID NO: 57718 - DNA, 30 bp, Artificial Sequence
  Synthetic oligonucleotide
cgctacatgaagtcaaaaaaaagtccgcat

SEQ ID NO: 57719 - DNA, 30 bp, Artificial Sequence
  Synthetic oligonucleotide
ccgattctgccgggtaaatccctcgcgcat

SEQ ID NO: 57720 - DNA, 30 bp, Artificial Sequence
  Synthetic oligonucleotide
cagccagatagaacgcagagaattgggcat

SEQ ID NO: 57721 - DNA, 30 bp, Artificial Sequence
  Synthetic oligonucleotide
ggggaatcagaaaataagtctagtttgcat

SEQ ID NO: 57722 - DNA, 30 bp, Artificial Sequence
  Synthetic oligonucleotide
cactgcctcgctggcaagggaagacatcat

SEQ ID NO: 57723 - DNA, 30 bp, Artificial Sequence
  Synthetic oligonucleotide
taacgggtggggaacgtaaggaaacctcat

SEQ ID NO: 57724 - DNA, 30 bp, Artificial Sequence
  Synthetic oligonucleotide
acaggagacggatggatccaaagcgctcat

SEQ ID NO: 57725 - DNA, 30 bp, Artificial Sequence
  Synthetic oligonucleotide
aaacgattaagaagcgaagtgtgggctcat

SEQ ID NO: 57726 - DNA, 30 bp, Artificial Sequence
  Synthetic oligonucleotide
tgcagactggctgaagtgatcatggctcat

SEQ ID NO: 57727 - DNA, 30 bp, Artificial Sequence
  Synthetic oligonucleotide
caaggaaaaccttacctaagatccggtcat

SEQ ID NO: 57728 - DNA, 30 bp, Artificial Sequence
  Synthetic oligonucleotide
accatcgatacttacatcagacctggtcat

SEQ ID NO: 57729 - DNA, 30 bp, Artificial Sequence
  Synthetic oligonucleotide
acagaaactctaacgcatgaaaggattcat

SEQ ID NO: 57730 - DNA, 30 bp, Artificial Sequence
  Synthetic oligonucleotide
cgaaggcaggagtttccgatctaacttcat

SEQ ID NO: 57731 - DNA, 30 bp, Artificial Sequence
  Synthetic oligonucleotide
acacatactggagcccaaggagtagttcat

SEQ ID NO: 57732 - DNA, 30 bp, Artificial Sequence
  Synthetic oligonucleotide
caatgggtgggatgaggaactgcccaagat

SEQ ID NO: 57733 - DNA, 30 bp, Artificial Sequence
  Synthetic oligonucleotide
tgataaccggttcagtacaagcgccaagat

SEQ ID NO: 57734 - DNA, 30 bp, Artificial Sequence
  Synthetic oligonucleotide
aggactataggggcatgccctttccaagat

SEQ ID NO: 57735 - DNA, 30 bp, Artificial Sequence
  Synthetic oligonucleotide
attagggtgtgggatatcccagagcaagat

SEQ ID NO: 57736 - DNA, 30 bp, Artificial Sequence
  Synthetic oligonucleotide
gattaggcgtggataactaaaagaacagat

SEQ ID NO: 57737 - DNA, 30 bp, Artificial Sequence
  Synthetic oligonucleotide
ccggagcggagaaagtaaattcgtacagat

SEQ ID NO: 57738 - DNA, 30 bp, Artificial Sequence
  Synthetic oligonucleotide
agtcgaaacacgcgctttaatcaaccagat

SEQ ID NO: 57739 - DNA, 30 bp, Artificial Sequence
  Synthetic oligonucleotide
gtacagctgacggtagctccctagccagat

SEQ ID NO: 57740 - DNA, 30 bp, Artificial Sequence
  Synthetic oligonucleotide
agacaagattcctcttctgtgtagccagat

SEQ ID NO: 57741 - DNA, 30 bp, Artificial Sequence
  Synthetic oligonucleotide
tttcgtcgggtcggctaagttattccagat

SEQ ID NO: 57742 - DNA, 30 bp, Artificial Sequence
  Synthetic oligonucleotide
ggagcaagcgaatgatgttatcgggcagat

SEQ ID NO: 57743 - DNA, 30 bp, Artificial Sequence
  Synthetic oligonucleotide
agggaagctaagatagccgattgggcagat

SEQ ID NO: 57744 - DNA, 30 bp, Artificial Sequence
  Synthetic oligonucleotide
gatgtttatcaggtacatccgaggtcagat

SEQ ID NO: 57745 - DNA, 30 bp, Artificial Sequence
  Synthetic oligonucleotide
aagtagagaggttaccggagggagagagat

SEQ ID NO: 57746 - DNA, 30 bp, Artificial Sequence
  Synthetic oligonucleotide
agcgggattcgtaagaggttgctactagat

SEQ ID NO: 57747 - DNA, 30 bp, Artificial Sequence
  Synthetic oligonucleotide
gtgaaaaagggaacgtataacgccgtagat

SEQ ID NO: 57748 - DNA, 30 bp, Artificial Sequence
  Synthetic oligonucleotide
ggaagggggcttggtgctcagcgggtagat

SEQ ID NO: 57749 - DNA, 30 bp, Artificial Sequence
  Synthetic oligonucleotide
cgagtgtctgtttaaatcgggacaaacgat

SEQ ID NO: 57750 - DNA, 30 bp, Artificial Sequence
  Synthetic oligonucleotide
agtctacaggaattggcgagcgtgaacgat

SEQ ID NO: 57751 - DNA, 30 bp, Artificial Sequence
  Synthetic oligonucleotide
accaggccggcgcttgataagagggacgat

SEQ ID NO: 57752 - DNA, 30 bp, Artificial Sequence
  Synthetic oligonucleotide
cagcacgaaggtgccccagacgcgaccgat

SEQ ID NO: 57753 - DNA, 31 bp, Artificial Sequence
  Synthetic oligonucleotide
tggccacatgtaagtgaatattccttccgat

SEQ ID NO: 57754 - DNA, 30 bp, Artificial Sequence
  Synthetic oligonucleotide
aaaaaagcgaactagtgtaagcccagcgat

SEQ ID NO: 57755 - DNA, 30 bp, Artificial Sequence
  Synthetic oligonucleotide
cggtcagaatggataatcgtaattagcgat

SEQ ID NO: 57756 - DNA, 30 bp, Artificial Sequence
  Synthetic oligonucleotide
gtcacgcgggtgcggcgaaacatacgcgat

SEQ ID NO: 57757 - DNA, 30 bp, Artificial Sequence
  Synthetic oligonucleotide
gcagtcctaggagaacaacttcgccgcgat

SEQ ID NO: 57758 - DNA, 30 bp, Artificial Sequence
  Synthetic oligonucleotide
ccgacttctaacgaactccaaagtcgcgat

SEQ ID NO: 57759 - DNA, 30 bp, Artificial Sequence
  Synthetic oligonucleotide
gggatagctacactttgtacaatatgcgat

SEQ ID NO: 57760 - DNA, 30 bp, Artificial Sequence
  Synthetic oligonucleotide
acgttgactgctctcgtaaagcaccaggat

SEQ ID NO: 57761 - DNA, 30 bp, Artificial Sequence
  Synthetic oligonucleotide
tgtgaaaatgataaggaagtttgccaggat

SEQ ID NO: 57762 - DNA, 30 bp, Artificial Sequence
  Synthetic oligonucleotide
acgttatgtccagacaattgatacgaggat

SEQ ID NO: 57763 - DNA, 30 bp, Artificial Sequence
  Synthetic oligonucleotide
cgcctcagagtgggagcggtaacttaggat

SEQ ID NO: 57764 - DNA, 30 bp, Artificial Sequence
  Synthetic oligonucleotide
ggaaaaacaccacaattaatggtctcggat

SEQ ID NO: 57765 - DNA, 30 bp, Artificial Sequence
  Synthetic oligonucleotide
acgaatgcagcgggatatgacaggtcggat

SEQ ID NO: 57766 - DNA, 30 bp, Artificial Sequence
  Synthetic oligonucleotide
aacatacgcagggagcttagcactagggat

SEQ ID NO: 57767 - DNA, 30 bp, Artificial Sequence
  Synthetic oligonucleotide
cgtattagactagcttatgccgctagggat

SEQ ID NO: 57768 - DNA, 30 bp, Artificial Sequence
  Synthetic oligonucleotide
catcgctctacaaattgagcggctagggat

SEQ ID NO: 57769 - DNA, 30 bp, Artificial Sequence
  Synthetic oligonucleotide
attggcgagtaccaaggaggtaggcgggat

SEQ ID NO: 57770 - DNA, 30 bp, Artificial Sequence
  Synthetic oligonucleotide
aggaggagagaagcaatgcaggctcgggat

SEQ ID NO: 57771 - DNA, 30 bp, Artificial Sequence
  Synthetic oligonucleotide
acgcggagaaaatgggttggtgaaggggat

SEQ ID NO: 57772 - DNA, 30 bp, Artificial Sequence
  Synthetic oligonucleotide
ccgcttaaccgtatgatcgagtgtggggat

SEQ ID NO: 57773 - DNA, 30 bp, Artificial Sequence
  Synthetic oligonucleotide
tcacgggaaaacgtaggtgagaaaatggat

SEQ ID NO: 57774 - DNA, 30 bp, Artificial Sequence
  Synthetic oligonucleotide
cgggtagaggaaaggaattgcgtcttggat

SEQ ID NO: 57775 - DNA, 30 bp, Artificial Sequence
  Synthetic oligonucleotide
atggtggtggcaaatccacacgtccatgat

SEQ ID NO: 57776 - DNA, 30 bp, Artificial Sequence
  Synthetic oligonucleotide
caccgatagagagatcgagctgtcgatgat

SEQ ID NO: 57777 - DNA, 30 bp, Artificial Sequence
  Synthetic oligonucleotide
acgcgttgataaggtccacagtgcgctgat

SEQ ID NO: 57778 - DNA, 30 bp, Artificial Sequence
  Synthetic oligonucleotide
gtcagtgcgaataagtgtgaatttcgtgat

SEQ ID NO: 57779 - DNA, 30 bp, Artificial Sequence
  Synthetic oligonucleotide
agagaagcggagcacgtttatatgggtgat

SEQ ID NO: 57780 - DNA, 30 bp, Artificial Sequence
  Synthetic oligonucleotide
ggaacgaagttcgtcaaaaacagttgtgat

SEQ ID NO: 57781 - DNA, 30 bp, Artificial Sequence
  Synthetic oligonucleotide
gggaggggatcagagggcaaccagcaatat

SEQ ID NO: 57782 - DNA, 30 bp, Artificial Sequence
  Synthetic oligonucleotide
gaagttagggattgcgggttgagcgaatat

SEQ ID NO: 57783 - DNA, 30 bp, Artificial Sequence
  Synthetic oligonucleotide
aacagagaggtcgacaagaatcatgaatat

SEQ ID NO: 57784 - DNA, 31 bp, Artificial Sequence
  Synthetic oligonucleotide
cgtggtgacactcgacccggacgatgaatat

SEQ ID NO: 57785 - DNA, 30 bp, Artificial Sequence
  Synthetic oligonucleotide
agcagggtggtcgtggatgtactatcatat

SEQ ID NO: 57786 - DNA, 30 bp, Artificial Sequence
  Synthetic oligonucleotide
cctggttaaagtcgtaggttgaaaagatat

SEQ ID NO: 57787 - DNA, 29 bp, Artificial Sequence
  Synthetic oligonucleotide
cgtggaaagaaggcgacaactcacgatat

SEQ ID NO: 57788 - DNA, 30 bp, Artificial Sequence
  Synthetic oligonucleotide
atcgacataggaaaagaggtgataatatat

SEQ ID NO: 57789 - DNA, 30 bp, Artificial Sequence
  Synthetic oligonucleotide
tgatactaggctagtaaacatcagttatat

SEQ ID NO: 57790 - DNA, 30 bp, Artificial Sequence
  Synthetic oligonucleotide
gaacatcggaacctaggataatacaactat

SEQ ID NO: 57791 - DNA, 30 bp, Artificial Sequence
  Synthetic oligonucleotide
atcgatgtcggcctgaacaagtggaactat

SEQ ID NO: 57792 - DNA, 30 bp, Artificial Sequence
  Synthetic oligonucleotide
ggaacaggagacttgtccgaacataactat

SEQ ID NO: 57793 - DNA, 30 bp, Artificial Sequence
  Synthetic oligonucleotide
acacatatcgttaaaaagagtttagactat

SEQ ID NO: 57794 - DNA, 30 bp, Artificial Sequence
  Synthetic oligonucleotide
cgtaagtaggatcgagaagggtgaacctat

SEQ ID NO: 57795 - DNA, 30 bp, Artificial Sequence
  Synthetic oligonucleotide
tctgagcggggtagggggtatgtagcctat

SEQ ID NO: 57796 - DNA, 30 bp, Artificial Sequence
  Synthetic oligonucleotide
cagagggtactaggcgatcatacatcctat

SEQ ID NO: 57797 - DNA, 30 bp, Artificial Sequence
  Synthetic oligonucleotide
ttgttgtgttctctttttgtgttgtcctat

SEQ ID NO: 57798 - DNA, 30 bp, Artificial Sequence
  Synthetic oligonucleotide
agcgggttaagtagatataaacaaggctat

SEQ ID NO: 57799 - DNA, 30 bp, Artificial Sequence
  Synthetic oligonucleotide
agggcagataagaacactggacattgctat

SEQ ID NO: 57800 - DNA, 27 bp, Artificial Sequence
  Synthetic oligonucleotide
tactttgagatactacatttcgtctat

SEQ ID NO: 57801 - DNA, 30 bp, Artificial Sequence
  Synthetic oligonucleotide
acgagaaattggaagtcggtacgacagtat

SEQ ID NO: 57802 - DNA, 30 bp, Artificial Sequence
  Synthetic oligonucleotide
acgacagggttgacctgcaactgatagtat

SEQ ID NO: 57803 - DNA, 29 bp, Artificial Sequence
  Synthetic oligonucleotide
cgtccccatagttgcgtgacaggtagtat

SEQ ID NO: 57804 - DNA, 30 bp, Artificial Sequence
  Synthetic oligonucleotide
aaggacaacgcgaagtggggtgtgtcgtat

SEQ ID NO: 57805 - DNA, 30 bp, Artificial Sequence
  Synthetic oligonucleotide
ggcatgaaacagagggggatggtttcgtat

SEQ ID NO: 57806 - DNA, 30 bp, Artificial Sequence
  Synthetic oligonucleotide
cctggtatctacacgaacaatggaaggtat

SEQ ID NO: 57807 - DNA, 30 bp, Artificial Sequence
  Synthetic oligonucleotide
gcgggcgtagatatcgatactcgggggtat

SEQ ID NO: 57808 - DNA, 30 bp, Artificial Sequence
  Synthetic oligonucleotide
aggccccgacaacgtgacagtaaatggtat

SEQ ID NO: 57809 - DNA, 30 bp, Artificial Sequence
  Synthetic oligonucleotide
cgctcgaggggcgcatcgtctttgtggtat

SEQ ID NO: 57810 - DNA, 30 bp, Artificial Sequence
  Synthetic oligonucleotide
taacacagtaccaggaccaacagaatgtat

SEQ ID NO: 57811 - DNA, 30 bp, Artificial Sequence
  Synthetic oligonucleotide
gtcactgaaccagatgttacgggcatgtat

SEQ ID NO: 57812 - DNA, 30 bp, Artificial Sequence
  Synthetic oligonucleotide
ggaatcgaatggaaaactggctgtgtgtat

SEQ ID NO: 57813 - DNA, 30 bp, Artificial Sequence
  Synthetic oligonucleotide
aggaccttgtacacatgacttctaaattat

SEQ ID NO: 57814 - DNA, 30 bp, Artificial Sequence
  Synthetic oligonucleotide
aggtggcaaaaccacatcagcgggaattat

SEQ ID NO: 57815 - DNA, 30 bp, Artificial Sequence
  Synthetic oligonucleotide
aaaagcaagggcaaggaaaacagcgattat

SEQ ID NO: 57816 - DNA, 30 bp, Artificial Sequence
  Synthetic oligonucleotide
cggtcgggtcgagtgtgactgcacatttat

SEQ ID NO: 57817 - DNA, 30 bp, Artificial Sequence
  Synthetic oligonucleotide
ggttgacaaagctgagggcacgagatttat

SEQ ID NO: 57818 - DNA, 30 bp, Artificial Sequence
  Synthetic oligonucleotide
caggcatacgggaagccagaaaggatttat

SEQ ID NO: 57819 - DNA, 30 bp, Artificial Sequence
  Synthetic oligonucleotide
aaagggacagcaagagaatgaaccctttat

SEQ ID NO: 57820 - DNA, 30 bp, Artificial Sequence
  Synthetic oligonucleotide
cggtccagagggtacgttggataagtttat

SEQ ID NO: 57821 - DNA, 30 bp, Artificial Sequence
  Synthetic oligonucleotide
atggccactgactgggcacgagggttttat

SEQ ID NO: 57822 - DNA, 30 bp, Artificial Sequence
  Synthetic oligonucleotide
ggtcgccaaggggtatcagttaagaaaact

SEQ ID NO: 57823 - DNA, 30 bp, Artificial Sequence
  Synthetic oligonucleotide
taccgtccaaaagcgtgtgtcgacagaact

SEQ ID NO: 57824 - DNA, 30 bp, Artificial Sequence
  Synthetic oligonucleotide
cgaaggcaggtggcagcgatagggagaact

SEQ ID NO: 57825 - DNA, 30 bp, Artificial Sequence
  Synthetic oligonucleotide
tagcgattagaatggcatcggaaacgaact

SEQ ID NO: 57826 - DNA, 30 bp, Artificial Sequence
  Synthetic oligonucleotide
ggaagatgtgaaaacattatacaccgaact

SEQ ID NO: 57827 - DNA, 30 bp, Artificial Sequence
  Synthetic oligonucleotide
gtagaggacatgtcacgacaaatctgaact

SEQ ID NO: 57828 - DNA, 30 bp, Artificial Sequence
  Synthetic oligonucleotide
gaaccgtgggaagggtgcgtcgtgtgaact

SEQ ID NO: 57829 - DNA, 30 bp, Artificial Sequence
  Synthetic oligonucleotide
cggtagtgagcgcgtactaatgtcataact

SEQ ID NO: 57830 - DNA, 30 bp, Artificial Sequence
  Synthetic oligonucleotide
aacaccaggtgatatgagatcgaattaact

SEQ ID NO: 57831 - DNA, 30 bp, Artificial Sequence
  Synthetic oligonucleotide
gggttgaaaccccgcggacagatgaacact

SEQ ID NO: 57832 - DNA, 31 bp, Artificial Sequence
  Synthetic oligonucleotide
ccgttcatgactttcagcgtgaccacacact

SEQ ID NO: 57833 - DNA, 30 bp, Artificial Sequence
  Synthetic oligonucleotide
cacaggagcatagatgagggatcacacact

SEQ ID NO: 57834 - DNA, 30 bp, Artificial Sequence
  Synthetic oligonucleotide
ctggtaaaatattaagtgtaggtgcacact

SEQ ID NO: 57835 - DNA, 30 bp, Artificial Sequence
  Synthetic oligonucleotide
acggcagttatctgacgggaccaggacact

SEQ ID NO: 57836 - DNA, 30 bp, Artificial Sequence
  Synthetic oligonucleotide
ttggtcacgagtggaatagtataatacact

SEQ ID NO: 57837 - DNA, 30 bp, Artificial Sequence
  Synthetic oligonucleotide
cgtactagagacgaaacagagcgttacact

SEQ ID NO: 57838 - DNA, 30 bp, Artificial Sequence
  Synthetic oligonucleotide
tgacaaatctagcatcgaataatatccact

SEQ ID NO: 57839 - DNA, 30 bp, Artificial Sequence
  Synthetic oligonucleotide
agagtaccactgagaccggaacacagcact

SEQ ID NO: 57840 - DNA, 30 bp, Artificial Sequence
  Synthetic oligonucleotide
atgtagctatagccaaaagaaattcgcact

SEQ ID NO: 57841 - DNA, 30 bp, Artificial Sequence
  Synthetic oligonucleotide
acgactgtgtagagggccgccacgaagact

SEQ ID NO: 57842 - DNA, 30 bp, Artificial Sequence
  Synthetic oligonucleotide
tagggaagtagatggtgcgttctctagact

SEQ ID NO: 57843 - DNA, 30 bp, Artificial Sequence
  Synthetic oligonucleotide
caggaggagaaggatgtcataaggtcgact

SEQ ID NO: 57844 - DNA, 30 bp, Artificial Sequence
  Synthetic oligonucleotide
tcaaggaagagggactgacgctattcgact

SEQ ID NO: 57845 - DNA, 30 bp, Artificial Sequence
  Synthetic oligonucleotide
cgcgtatcgatacaccctgatcagcggact

SEQ ID NO: 57846 - DNA, 30 bp, Artificial Sequence
  Synthetic oligonucleotide
ccaatttatctggaaaatgagagtcggact

SEQ ID NO: 57847 - DNA, 30 bp, Artificial Sequence
  Synthetic oligonucleotide
gcgaacggcgtgttgatttgctgagggact

SEQ ID NO: 57848 - DNA, 30 bp, Artificial Sequence
  Synthetic oligonucleotide
aaaaggggggcgtaaaaaccatgtgggact

SEQ ID NO: 57849 - DNA, 30 bp, Artificial Sequence
  Synthetic oligonucleotide
ctgggctgggcaaaccagtaatggatgact

SEQ ID NO: 57850 - DNA, 30 bp, Artificial Sequence
  Synthetic oligonucleotide
gcctggacagctaatagaactagtgtgact

SEQ ID NO: 57851 - DNA, 30 bp, Artificial Sequence
  Synthetic oligonucleotide
agacaatcgggggatagatatcatcatact

SEQ ID NO: 57852 - DNA, 30 bp, Artificial Sequence
  Synthetic oligonucleotide
tcatatcaagcacagcataaaaatactact

SEQ ID NO: 57853 - DNA, 30 bp, Artificial Sequence
  Synthetic oligonucleotide
ggtagccgagtccgtctcgcggtgcgtact

SEQ ID NO: 57854 - DNA, 30 bp, Artificial Sequence
  Synthetic oligonucleotide
tacatacccaggagtgcctcgggctgtact

SEQ ID NO: 57855 - DNA, 30 bp, Artificial Sequence
  Synthetic oligonucleotide
tctagggaccgtagggatatgagtattact

SEQ ID NO: 57856 - DNA, 30 bp, Artificial Sequence
  Synthetic oligonucleotide
cggaaggggccgtaaaggatgatggttact

SEQ ID NO: 57857 - DNA, 30 bp, Artificial Sequence
  Synthetic oligonucleotide
acggcattgtataaatatttcgaaaaacct

SEQ ID NO: 57858 - DNA, 30 bp, Artificial Sequence
  Synthetic oligonucleotide
cgaatgcatgtattggacatgtgcccacct

SEQ ID NO: 57859 - DNA, 30 bp, Artificial Sequence
  Synthetic oligonucleotide
agcgtggataacgtcgtacataagtcacct

SEQ ID NO: 57860 - DNA, 30 bp, Artificial Sequence
  Synthetic oligonucleotide
acgtctacggaagattggcataattcacct

SEQ ID NO: 57861 - DNA, 30 bp, Artificial Sequence
  Synthetic oligonucleotide
tgaataaggttgcgactccagagcagacct

SEQ ID NO: 57862 - DNA, 30 bp, Artificial Sequence
  Synthetic oligonucleotide
cagagaacgacgatggtttctggacgacct

SEQ ID NO: 57863 - DNA, 30 bp, Artificial Sequence
  Synthetic oligonucleotide
ggcacacaaggccaatcaggcccgcaccct

SEQ ID NO: 57864 - DNA, 30 bp, Artificial Sequence
  Synthetic oligonucleotide
gcgggagtaaaagagaattggataacccct

SEQ ID NO: 57865 - DNA, 30 bp, Artificial Sequence
  Synthetic oligonucleotide
ggtcatgtcgaatacgtaacggtcacccct

SEQ ID NO: 57866 - DNA, 30 bp, Artificial Sequence
  Synthetic oligonucleotide
agcgcaagcgttactagtgatgagccccct

SEQ ID NO: 57867 - DNA, 30 bp, Artificial Sequence
  Synthetic oligonucleotide
ccgaggcgtacctgttaccaatattgccct

SEQ ID NO: 57868 - DNA, 30 bp, Artificial Sequence
  Synthetic oligonucleotide
ggacaaacttagtccatagcagcaatccct

SEQ ID NO: 57869 - DNA, 30 bp, Artificial Sequence
  Synthetic oligonucleotide
tcgtgaaagaaactagttagcttaatccct

SEQ ID NO: 57870 - DNA, 30 bp, Artificial Sequence
  Synthetic oligonucleotide
gcggccccgaacgttacagcacagctccct

SEQ ID NO: 57871 - DNA, 30 bp, Artificial Sequence
  Synthetic oligonucleotide
agttaaagctagctagacacaaataagcct

SEQ ID NO: 57872 - DNA, 30 bp, Artificial Sequence
  Synthetic oligonucleotide
tcccgccagtcgggcgagtagccacagcct

SEQ ID NO: 57873 - DNA, 30 bp, Artificial Sequence
  Synthetic oligonucleotide
cggtcgagggtgactgcgggttcaacgcct

SEQ ID NO: 57874 - DNA, 30 bp, Artificial Sequence
  Synthetic oligonucleotide
ggagacggtaagatgccttcaacgcggcct

SEQ ID NO: 57875 - DNA, 30 bp, Artificial Sequence
  Synthetic oligonucleotide
atcgcagacgaaaactatgggcgcatgcct

SEQ ID NO: 57876 - DNA, 30 bp, Artificial Sequence
  Synthetic oligonucleotide
gcctacaacacgagcgagtaacgtgatcct

SEQ ID NO: 57877 - DNA, 30 bp, Artificial Sequence
  Synthetic oligonucleotide
gggagagctatggtgacagctagacctcct

SEQ ID NO: 57878 - DNA, 30 bp, Artificial Sequence
  Synthetic oligonucleotide
acgctaacctgggtaaaccgactatctcct

SEQ ID NO: 57879 - DNA, 30 bp, Artificial Sequence
  Synthetic oligonucleotide
catcacaaaaggttgacctgcagttgtcct

SEQ ID NO: 57880 - DNA, 30 bp, Artificial Sequence
  Synthetic oligonucleotide
tgtaggataaccacaatgcgacaaattcct

SEQ ID NO: 57881 - DNA, 30 bp, Artificial Sequence
  Synthetic oligonucleotide
tggttgccaacggagatatcgagaaaagct

SEQ ID NO: 57882 - DNA, 30 bp, Artificial Sequence
  Synthetic oligonucleotide
catggggaagcctgacggtgttataaagct

SEQ ID NO: 57883 - DNA, 30 bp, Artificial Sequence
  Synthetic oligonucleotide
aggctatatcgcgtgagataggcatcagct

SEQ ID NO: 57884 - DNA, 30 bp, Artificial Sequence
  Synthetic oligonucleotide
gaacatcgaatttactctggcataggagct

SEQ ID NO: 57885 - DNA, 30 bp, Artificial Sequence
  Synthetic oligonucleotide
gttgctgggacggtataaacagaatgagct

SEQ ID NO: 57886 - DNA, 30 bp, Artificial Sequence
  Synthetic oligonucleotide
tgattcgtaggattagtctagtgtgtagct

SEQ ID NO: 57887 - DNA, 30 bp, Artificial Sequence
  Synthetic oligonucleotide
aaacaggatgagggtccgatcttattagct

SEQ ID NO: 57888 - DNA, 30 bp, Artificial Sequence
  Synthetic oligonucleotide
tcataaggttaggggcacgtgtgacacgct

SEQ ID NO: 57889 - DNA, 30 bp, Artificial Sequence
  Synthetic oligonucleotide
gacgtgttcaggactaagacagcccacgct

SEQ ID NO: 57890 - DNA, 30 bp, Artificial Sequence
  Synthetic oligonucleotide
accgagtagctggaacaaggtgcccacgct

SEQ ID NO: 57891 - DNA, 29 bp, Artificial Sequence
  Synthetic oligonucleotide
ccgggtaactagagcgatcagaacccgct

SEQ ID NO: 57892 - DNA, 30 bp, Artificial Sequence
  Synthetic oligonucleotide
acggatcgtacgagacgccattgacccgct

SEQ ID NO: 57893 - DNA, 30 bp, Artificial Sequence
  Synthetic oligonucleotide
gaaaccagatagaacgtccggatctccgct

SEQ ID NO: 57894 - DNA, 30 bp, Artificial Sequence
  Synthetic oligonucleotide
aagctcggggataacatgcatgagtccgct

SEQ ID NO: 57895 - DNA, 30 bp, Artificial Sequence
  Synthetic oligonucleotide
ctgaaagtaagttacaagcaaaaactcgct

SEQ ID NO: 57896 - DNA, 30 bp, Artificial Sequence
  Synthetic oligonucleotide
ccgacgaaaatccaccatgctgatcaggct

SEQ ID NO: 57897 - DNA, 30 bp, Artificial Sequence
  Synthetic oligonucleotide
gccaagtaacggtagagtgtaggtccggct

SEQ ID NO: 57898 - DNA, 30 bp, Artificial Sequence
  Synthetic oligonucleotide
actgtggaacagacggaagaccacagggct

SEQ ID NO: 57899 - DNA, 30 bp, Artificial Sequence
  Synthetic oligonucleotide
agcaattatcaagaatgaactagctgggct

SEQ ID NO: 57900 - DNA, 30 bp, Artificial Sequence
  Synthetic oligonucleotide
agagactcgaactagcgaggcagaatggct

SEQ ID NO: 57901 - DNA, 30 bp, Artificial Sequence
  Synthetic oligonucleotide
tggggaaaacagaaccgtgtatcagtggct

SEQ ID NO: 57902 - DNA, 30 bp, Artificial Sequence
  Synthetic oligonucleotide
agtaacagttagggacctcgcaatttggct

SEQ ID NO: 57903 - DNA, 30 bp, Artificial Sequence
  Synthetic oligonucleotide
gtggaaacagctacctttagcaagcctgct

SEQ ID NO: 57904 - DNA, 30 bp, Artificial Sequence
  Synthetic oligonucleotide
tacggatggcccactgagcatggagctgct

SEQ ID NO: 57905 - DNA, 30 bp, Artificial Sequence
  Synthetic oligonucleotide
tcctcaggagttggaatcggatcgtgtgct

SEQ ID NO: 57906 - DNA, 30 bp, Artificial Sequence
  Synthetic oligonucleotide
gaacagcggcgggggggccgatcttgtgct

SEQ ID NO: 57907 - DNA, 30 bp, Artificial Sequence
  Synthetic oligonucleotide
accagggctaaacaggattggtaaaaatct

SEQ ID NO: 57908 - DNA, 30 bp, Artificial Sequence
  Synthetic oligonucleotide
taaatccggttacgaataagagtgcaatct

SEQ ID NO: 57909 - DNA, 30 bp, Artificial Sequence
  Synthetic oligonucleotide
ggtcgaggccaagggcaatgaccagaatct

SEQ ID NO: 57910 - DNA, 30 bp, Artificial Sequence
  Synthetic oligonucleotide
gtgggatgcacaaaagagcaatacgaatct

SEQ ID NO: 57911 - DNA, 30 bp, Artificial Sequence
  Synthetic oligonucleotide
atcgaacggcccaccacagggtccgaatct

SEQ ID NO: 57912 - DNA, 30 bp, Artificial Sequence
  Synthetic oligonucleotide
cgatcgttgccttcggagtgcgctgaatct

SEQ ID NO: 57913 - DNA, 30 bp, Artificial Sequence
  Synthetic oligonucleotide
gtactgggaataccactaggtgcgccatct

SEQ ID NO: 57914 - DNA, 30 bp, Artificial Sequence
  Synthetic oligonucleotide
ccaaggtgaaccattacccgtcaatcatct

SEQ ID NO: 57915 - DNA, 30 bp, Artificial Sequence
  Synthetic oligonucleotide
tcagtcgcgcgaggctattcgtcgtcatct

SEQ ID NO: 57916 - DNA, 30 bp, Artificial Sequence
  Synthetic oligonucleotide
cgtaatattgcgacaaagggagcacgatct

SEQ ID NO: 57917 - DNA, 30 bp, Artificial Sequence
  Synthetic oligonucleotide
cgggtgcagcacattatcgggtgacactct

SEQ ID NO: 57918 - DNA, 30 bp, Artificial Sequence
  Synthetic oligonucleotide
ggagcgcacggtaatgcacagttcagctct

SEQ ID NO: 57919 - DNA, 30 bp, Artificial Sequence
  Synthetic oligonucleotide
ctagcccaccgatcaacaatattgtgctct

SEQ ID NO: 57920 - DNA, 30 bp, Artificial Sequence
  Synthetic oligonucleotide
ctggtgcggaatagcaaaacggagatctct

SEQ ID NO: 57921 - DNA, 30 bp, Artificial Sequence
  Synthetic oligonucleotide
gcgagtgcacgggcaggtgtgtaattctct

SEQ ID NO: 57922 - DNA, 30 bp, Artificial Sequence
  Synthetic oligonucleotide
tcacaggtgggtggaagacggaatttctct

SEQ ID NO: 57923 - DNA, 30 bp, Artificial Sequence
  Synthetic oligonucleotide
gtgctagatctacggcgaactccaaagtct

SEQ ID NO: 57924 - DNA, 30 bp, Artificial Sequence
  Synthetic oligonucleotide
ttcgggagcgagcgggtttacatgaagtct

SEQ ID NO: 57925 - DNA, 30 bp, Artificial Sequence
  Synthetic oligonucleotide
gcgcaagcttagtaggtggcggtcacgtct

SEQ ID NO: 57926 - DNA, 30 bp, Artificial Sequence
  Synthetic oligonucleotide
ggggttcctggtcgtaagagggcgacgtct

SEQ ID NO: 57927 - DNA, 30 bp, Artificial Sequence
  Synthetic oligonucleotide
tgcactaagggtgactcgagtttagggtct

SEQ ID NO: 57928 - DNA, 30 bp, Artificial Sequence
  Synthetic oligonucleotide
gcacggaattctaaagtcggcgacgggtct

SEQ ID NO: 57929 - DNA, 30 bp, Artificial Sequence
  Synthetic oligonucleotide
tgcaacaaaggacgaacctcgaactggtct

SEQ ID NO: 57930 - DNA, 30 bp, Artificial Sequence
  Synthetic oligonucleotide
acgaccacgatatcgaaccccatttggtct

SEQ ID NO: 57931 - DNA, 29 bp, Artificial Sequence
  Synthetic oligonucleotide
aggcgccggaataagcttaaatagtgtct

SEQ ID NO: 57932 - DNA, 30 bp, Artificial Sequence
  Synthetic oligonucleotide
ccagtgacaatagctacaagagtggtgtct

SEQ ID NO: 57933 - DNA, 30 bp, Artificial Sequence
  Synthetic oligonucleotide
atgtgaggtggcgtgcttcgagacaattct

SEQ ID NO: 57934 - DNA, 30 bp, Artificial Sequence
  Synthetic oligonucleotide
gcacaacagcagaggccgtagtccaattct

SEQ ID NO: 57935 - DNA, 30 bp, Artificial Sequence
  Synthetic oligonucleotide
tctcgtggaatcagcgaggccacaacttct

SEQ ID NO: 57936 - DNA, 30 bp, Artificial Sequence
  Synthetic oligonucleotide
tcggaatgattgagtagagaagtgtgttct

SEQ ID NO: 57937 - DNA, 30 bp, Artificial Sequence
  Synthetic oligonucleotide
tatgttagctggaagggtatcgatcaaagt

SEQ ID NO: 57938 - DNA, 30 bp, Artificial Sequence
  Synthetic oligonucleotide
ggcacaggtagagtcaaagaatccgaaagt

SEQ ID NO: 57939 - DNA, 30 bp, Artificial Sequence
  Synthetic oligonucleotide
tcagaccaggattcagggtgactctaaagt

SEQ ID NO: 57940 - DNA, 30 bp, Artificial Sequence
  Synthetic oligonucleotide
gaacacgaggcacatcactacaggacaagt

SEQ ID NO: 57941 - DNA, 30 bp, Artificial Sequence
  Synthetic oligonucleotide
cagatcacgtcctctagacctggcccaagt

SEQ ID NO: 57942 - DNA, 30 bp, Artificial Sequence
  Synthetic oligonucleotide
cggacaaaacgtttgtctcactatccaagt

SEQ ID NO: 57943 - DNA, 30 bp, Artificial Sequence
  Synthetic oligonucleotide
tctgcctaatatatccacagagtgtcaagt

SEQ ID NO: 57944 - DNA, 30 bp, Artificial Sequence
  Synthetic oligonucleotide
agagtggaacaacgagagaccgagcgaagt

SEQ ID NO: 57945 - DNA, 30 bp, Artificial Sequence
  Synthetic oligonucleotide
acaacgtttaagaaggccgtattgggaagt

SEQ ID NO: 57946 - DNA, 30 bp, Artificial Sequence
  Synthetic oligonucleotide
tgagaacggacttatcaaagggattgaagt

SEQ ID NO: 57947 - DNA, 30 bp, Artificial Sequence
  Synthetic oligonucleotide
ggcattcatcagatttaaagagtaataagt

SEQ ID NO: 57948 - DNA, 30 bp, Artificial Sequence
  Synthetic oligonucleotide
cactcaaatacttgatcaaatgatataagt

SEQ ID NO: 57949 - DNA, 30 bp, Artificial Sequence
  Synthetic oligonucleotide
ttggtaggagggacggcagtcgccctaagt

SEQ ID NO: 57950 - DNA, 30 bp, Artificial Sequence
  Synthetic oligonucleotide
agtacgatttaaaagataacatggctaagt

SEQ ID NO: 57951 - DNA, 30 bp, Artificial Sequence
  Synthetic oligonucleotide
catcggccgtgacaaagcatcgtaaacagt

SEQ ID NO: 57952 - DNA, 30 bp, Artificial Sequence
  Synthetic oligonucleotide
tcgaggtgggttcggccgaaatccaacagt

SEQ ID NO: 57953 - DNA, 30 bp, Artificial Sequence
  Synthetic oligonucleotide
acaccaacgtgagggccgcaatgcaacagt

SEQ ID NO: 57954 - DNA, 30 bp, Artificial Sequence
  Synthetic oligonucleotide
gacaacagattcacagtgtgagctaacagt

SEQ ID NO: 57955 - DNA, 30 bp, Artificial Sequence
  Synthetic oligonucleotide
atagacaactacggctagcataaatacagt

SEQ ID NO: 57956 - DNA, 30 bp, Artificial Sequence
  Synthetic oligonucleotide
gcaggcaacgcgaagtgtagggagtacagt

SEQ ID NO: 57957 - DNA, 30 bp, Artificial Sequence
  Synthetic oligonucleotide
aggagtcattctagcggcataagaaccagt

SEQ ID NO: 57958 - DNA, 30 bp, Artificial Sequence
  Synthetic oligonucleotide
acgtaaaggcttaggagcgacgtgaccagt

SEQ ID NO: 57959 - DNA, 30 bp, Artificial Sequence
  Synthetic oligonucleotide
gcatgatgggcaatagggcttcaaagcagt

SEQ ID NO: 57960 - DNA, 30 bp, Artificial Sequence
  Synthetic oligonucleotide
aacgacggagactcaatcagtctgagcagt

SEQ ID NO: 57961 - DNA, 30 bp, Artificial Sequence
  Synthetic oligonucleotide
cggccactcaatagtggaggtgcgggcagt

SEQ ID NO: 57962 - DNA, 30 bp, Artificial Sequence
  Synthetic oligonucleotide
gcgggcagtgagaatcaaccgtaatgcagt

SEQ ID NO: 57963 - DNA, 30 bp, Artificial Sequence
  Synthetic oligonucleotide
atggaaggcggtcgcccgctttagtgcagt

SEQ ID NO: 57964 - DNA, 30 bp, Artificial Sequence
  Synthetic oligonucleotide
taagaaccagagagtcaccctgatctcagt

SEQ ID NO: 57965 - DNA, 30 bp, Artificial Sequence
  Synthetic oligonucleotide
gcgaggaatcccagctatatgtctctcagt

SEQ ID NO: 57966 - DNA, 30 bp, Artificial Sequence
  Synthetic oligonucleotide
tagcgcgtaagcccaggcgaaagattcagt

SEQ ID NO: 57967 - DNA, 30 bp, Artificial Sequence
  Synthetic oligonucleotide
gggctaacagtgtgacatgccatcttcagt

SEQ ID NO: 57968 - DNA, 30 bp, Artificial Sequence
  Synthetic oligonucleotide
agatttcatcacgatgatagaaataagagt

SEQ ID NO: 57969 - DNA, 30 bp, Artificial Sequence
  Synthetic oligonucleotide
gaaatgtgtgtaggcaagagtgataagagt

SEQ ID NO: 57970 - DNA, 30 bp, Artificial Sequence
  Synthetic oligonucleotide
gtgaaacgactatcagacgacattaagagt

SEQ ID NO: 57971 - DNA, 30 bp, Artificial Sequence
  Synthetic oligonucleotide
gtataatttttgaaactgacataccagagt

SEQ ID NO: 57972 - DNA, 30 bp, Artificial Sequence
  Synthetic oligonucleotide
gaccgaagattattcgagtggagccagagt

SEQ ID NO: 57973 - DNA, 30 bp, Artificial Sequence
  Synthetic oligonucleotide
aggagttgcagtggagaccaatctcagagt

SEQ ID NO: 57974 - DNA, 30 bp, Artificial Sequence
  Synthetic oligonucleotide
cggtaccggtataaatatgtaccggagagt

SEQ ID NO: 57975 - DNA, 30 bp, Artificial Sequence
  Synthetic oligonucleotide
tcagtcgcggacgttcttaaagaatagagt

SEQ ID NO: 57976 - DNA, 30 bp, Artificial Sequence
  Synthetic oligonucleotide
ttagacctcgatgattatcatccctagagt

SEQ ID NO: 57977 - DNA, 30 bp, Artificial Sequence
  Synthetic oligonucleotide
accgggttacggcgtacggaaaattagagt

SEQ ID NO: 57978 - DNA, 30 bp, Artificial Sequence
  Synthetic oligonucleotide
tagtgcacgacgaagatcagtgttccgagt

SEQ ID NO: 57979 - DNA, 30 bp, Artificial Sequence
  Synthetic oligonucleotide
gcgccgtcaggtgcggaaagcgtagcgagt

SEQ ID NO: 57980 - DNA, 30 bp, Artificial Sequence
  Synthetic oligonucleotide
ctaacaaagagtaccaactcctgcgcgagt

SEQ ID NO: 57981 - DNA, 30 bp, Artificial Sequence
  Synthetic oligonucleotide
ataaatgcacaacactgactccgtaggagt

SEQ ID NO: 57982 - DNA, 30 bp, Artificial Sequence
  Synthetic oligonucleotide
gtttgccggacagagcaagagatacggagt

SEQ ID NO: 57983 - DNA, 30 bp, Artificial Sequence
  Synthetic oligonucleotide
tcaggtttgaacgtagagtaattgcggagt

SEQ ID NO: 57984 - DNA, 30 bp, Artificial Sequence
  Synthetic oligonucleotide
cctactaaacccgaagggccaactgggagt

SEQ ID NO: 57985 - DNA, 30 bp, Artificial Sequence
  Synthetic oligonucleotide
ggtggatcggcctatgatagtgaatggagt

SEQ ID NO: 57986 - DNA, 30 bp, Artificial Sequence
  Synthetic oligonucleotide
ggcccgcaagggtgacatagtcaaatgagt

SEQ ID NO: 57987 - DNA, 30 bp, Artificial Sequence
  Synthetic oligonucleotide
ctgagaagcagccgcattgaagcaatgagt

SEQ ID NO: 57988 - DNA, 30 bp, Artificial Sequence
  Synthetic oligonucleotide
gagattggagggggaagtaggacagtgagt

SEQ ID NO: 57989 - DNA, 30 bp, Artificial Sequence
  Synthetic oligonucleotide
aagtctagtagctgcgtgacaggagtgagt

SEQ ID NO: 57990 - DNA, 30 bp, Artificial Sequence
  Synthetic oligonucleotide
accgaaagattaagaactgggtgcgtgagt

SEQ ID NO: 57991 - DNA, 30 bp, Artificial Sequence
  Synthetic oligonucleotide
gaggagacaccctgtactatgtagttgagt

SEQ ID NO: 57992 - DNA, 30 bp, Artificial Sequence
  Synthetic oligonucleotide
cgataactcacttgttcgagggagaatagt

SEQ ID NO: 57993 - DNA, 30 bp, Artificial Sequence
  Synthetic oligonucleotide
tcgacccttttagcagcatacggagatagt

SEQ ID NO: 57994 - DNA, 30 bp, Artificial Sequence
  Synthetic oligonucleotide
acatgagaaactacagcccacgtatatagt

SEQ ID NO: 57995 - DNA, 30 bp, Artificial Sequence
  Synthetic oligonucleotide
tcgatcggaaagggcacaaaaaaccctagt

SEQ ID NO: 57996 - DNA, 30 bp, Artificial Sequence
  Synthetic oligonucleotide
tagtgggcgtcactcgataccagtcgtagt

SEQ ID NO: 57997 - DNA, 30 bp, Artificial Sequence
  Synthetic oligonucleotide
cgatagtcgagtccccagttccggattagt

SEQ ID NO: 57998 - DNA, 30 bp, Artificial Sequence
  Synthetic oligonucleotide
gctgagccgaatacgggataactggttagt

SEQ ID NO: 57999 - DNA, 30 bp, Artificial Sequence
  Synthetic oligonucleotide
ggaggctgctgagattaagttagttttagt

SEQ ID NO: 58000 - DNA, 30 bp, Artificial Sequence
  Synthetic oligonucleotide
atcaagggatgattatcgatacggaaacgt

SEQ ID NO: 58001 - DNA, 30 bp, Artificial Sequence
  Synthetic oligonucleotide
cggttgcggctgtttaaacggaaccaacgt

SEQ ID NO: 58002 - DNA, 30 bp, Artificial Sequence
  Synthetic oligonucleotide
ggagacaattcagcctcttatcctcaacgt

SEQ ID NO: 58003 - DNA, 30 bp, Artificial Sequence
  Synthetic oligonucleotide
agtggccgaatcggcttgtaaggagaacgt

SEQ ID NO: 58004 - DNA, 30 bp, Artificial Sequence
  Synthetic oligonucleotide
gaccacggtagtcacacaagcggagaacgt

SEQ ID NO: 58005 - DNA, 30 bp, Artificial Sequence
  Synthetic oligonucleotide
aggaagacatgagcccgatatatagaacgt

SEQ ID NO: 58006 - DNA, 30 bp, Artificial Sequence
  Synthetic oligonucleotide
cgcaatatgggggtgtgtcgtatcgaacgt

SEQ ID NO: 58007 - DNA, 30 bp, Artificial Sequence
  Synthetic oligonucleotide
aaatacaggtgggatacacacaaagcacgt

SEQ ID NO: 58008 - DNA, 30 bp, Artificial Sequence
  Synthetic oligonucleotide
actgaacagggatttaaaattgtagcacgt

SEQ ID NO: 58009 - DNA, 30 bp, Artificial Sequence
  Synthetic oligonucleotide
agctgagggaataaagtcaacgcggcacgt

SEQ ID NO: 58010 - DNA, 30 bp, Artificial Sequence
  Synthetic oligonucleotide
ccacggagtacgatatggtatgtgagacgt

SEQ ID NO: 58011 - DNA, 30 bp, Artificial Sequence
  Synthetic oligonucleotide
caagaagcgaaccctatgggcgcccgacgt

SEQ ID NO: 58012 - DNA, 30 bp, Artificial Sequence
  Synthetic oligonucleotide
gaaggatcacagaatactactcgtcgacgt

SEQ ID NO: 58013 - DNA, 30 bp, Artificial Sequence
  Synthetic oligonucleotide
accgagcgaaaataacatctgcttcgacgt

SEQ ID NO: 58014 - DNA, 30 bp, Artificial Sequence
  Synthetic oligonucleotide
gcgagatataatcgatattaggtgggacgt

SEQ ID NO: 58015 - DNA, 30 bp, Artificial Sequence
  Synthetic oligonucleotide
cgatgaccctgcttttagaaaaggtgacgt

SEQ ID NO: 58016 - DNA, 30 bp, Artificial Sequence
  Synthetic oligonucleotide
cagatctgcgagttcagcatgcaaaaccgt

SEQ ID NO: 58017 - DNA, 30 bp, Artificial Sequence
  Synthetic oligonucleotide
actaggagcatggattgggtgacacaccgt

SEQ ID NO: 58018 - DNA, 30 bp, Artificial Sequence
  Synthetic oligonucleotide
caagacagtagtggtagagatgcacaccgt

SEQ ID NO: 58019 - DNA, 30 bp, Artificial Sequence
  Synthetic oligonucleotide
aagtctccgaaattaacctgatagcaccgt

SEQ ID NO: 58020 - DNA, 30 bp, Artificial Sequence
  Synthetic oligonucleotide
aaggaccacaactcactgttcgcgtaccgt

SEQ ID NO: 58021 - DNA, 30 bp, Artificial Sequence
  Synthetic oligonucleotide
tagaagtgcccagacactagcagcgcccgt

SEQ ID NO: 58022 - DNA, 30 bp, Artificial Sequence
  Synthetic oligonucleotide
gacaaatccagcgagaagcaagaaagccgt

SEQ ID NO: 58023 - DNA, 30 bp, Artificial Sequence
  Synthetic oligonucleotide
tccttagatgggtaactaatggcacgccgt

SEQ ID NO: 58024 - DNA, 30 bp, Artificial Sequence
  Synthetic oligonucleotide
agatatcggtggattagaaagatactccgt

SEQ ID NO: 58025 - DNA, 30 bp, Artificial Sequence
  Synthetic oligonucleotide
acgctaacattggtgcgtgaaagcaagcgt

SEQ ID NO: 58026 - DNA, 30 bp, Artificial Sequence
  Synthetic oligonucleotide
ttataacacggatcatcaggagggaagcgt

SEQ ID NO: 58027 - DNA, 30 bp, Artificial Sequence
  Synthetic oligonucleotide
tcagggaacgtcgagatcgaagataagcgt

SEQ ID NO: 58028 - DNA, 30 bp, Artificial Sequence
  Synthetic oligonucleotide
aaaacgatggtgggaaagttttctaagcgt

SEQ ID NO: 58029 - DNA, 30 bp, Artificial Sequence
  Synthetic oligonucleotide
cgtagaaggactgtgctttagcgtaagcgt

SEQ ID NO: 58030 - DNA, 30 bp, Artificial Sequence
  Synthetic oligonucleotide
tttacagacacacacgaacgaggagagcgt

SEQ ID NO: 58031 - DNA, 30 bp, Artificial Sequence
  Synthetic oligonucleotide
gatgcctcaaaaaccagatcaggcacgcgt

SEQ ID NO: 58032 - DNA, 30 bp, Artificial Sequence
  Synthetic oligonucleotide
cacggcggtcgggagaatagaaacgcgcgt

SEQ ID NO: 58033 - DNA, 30 bp, Artificial Sequence
  Synthetic oligonucleotide
cgtagtctggtgggtgcaaccaagtcgcgt

SEQ ID NO: 58034 - DNA, 30 bp, Artificial Sequence
  Synthetic oligonucleotide
gaccggacaggaccattgcccgtgaggcgt

SEQ ID NO: 58035 - DNA, 30 bp, Artificial Sequence
  Synthetic oligonucleotide
agaagccccaacttcgtaaactagtggcgt

SEQ ID NO: 58036 - DNA, 30 bp, Artificial Sequence
  Synthetic oligonucleotide
ccccaaagggacgacataagaaaaatgcgt

SEQ ID NO: 58037 - DNA, 30 bp, Artificial Sequence
  Synthetic oligonucleotide
aaaagacctcagtcgaagaggggaatgcgt

SEQ ID NO: 58038 - DNA, 30 bp, Artificial Sequence
  Synthetic oligonucleotide
cctcgatcggccaagcagatactcgtgcgt

SEQ ID NO: 58039 - DNA, 30 bp, Artificial Sequence
  Synthetic oligonucleotide
gaggataaggatacataatctatcttgcgt

SEQ ID NO: 58040 - DNA, 30 bp, Artificial Sequence
  Synthetic oligonucleotide
cgattggttgagggattcggatagttgcgt

SEQ ID NO: 58041 - DNA, 30 bp, Artificial Sequence
  Synthetic oligonucleotide
aaggcacggaaagggacaattcgaaatcgt

SEQ ID NO: 58042 - DNA, 30 bp, Artificial Sequence
  Synthetic oligonucleotide
tccctaaacaaatgacactcgataaatcgt

SEQ ID NO: 58043 - DNA, 30 bp, Artificial Sequence
  Synthetic oligonucleotide
tcggtgggggctacatgggaaagtcatcgt

SEQ ID NO: 58044 - DNA, 30 bp, Artificial Sequence
  Synthetic oligonucleotide
gatcatacgagggctcacggtaaggatcgt

SEQ ID NO: 58045 - DNA, 30 bp, Artificial Sequence
  Synthetic oligonucleotide
tggtgaatgtaaggatccggacaggatcgt

SEQ ID NO: 58046 - DNA, 30 bp, Artificial Sequence
  Synthetic oligonucleotide
aggatagatatatataaattcgatactcgt

SEQ ID NO: 58047 - DNA, 30 bp, Artificial Sequence
  Synthetic oligonucleotide
atacacaaaaggtacactacaaggcctcgt

SEQ ID NO: 58048 - DNA, 30 bp, Artificial Sequence
  Synthetic oligonucleotide
cagaagggaatttgtaagtagctgcctcgt

SEQ ID NO: 58049 - DNA, 30 bp, Artificial Sequence
  Synthetic oligonucleotide
gacggaaacgccgtgggacagcagagtcgt

SEQ ID NO: 58050 - DNA, 30 bp, Artificial Sequence
  Synthetic oligonucleotide
ggaagaaatcgaggcaatgctatgagtcgt

SEQ ID NO: 58051 - DNA, 30 bp, Artificial Sequence
  Synthetic oligonucleotide
taatgctcggggagacaaagtcgacgtcgt

SEQ ID NO: 58052 - DNA, 30 bp, Artificial Sequence
  Synthetic oligonucleotide
tggcagtatggatcatgtcgcaaccttcgt

SEQ ID NO: 58053 - DNA, 30 bp, Artificial Sequence
  Synthetic oligonucleotide
ttggatagcgttaacgcccatggagaaggt

SEQ ID NO: 58054 - DNA, 30 bp, Artificial Sequence
  Synthetic oligonucleotide
agctagtggacagggaatttaaaggaaggt

SEQ ID NO: 58055 - DNA, 30 bp, Artificial Sequence
  Synthetic oligonucleotide
cgccaggtatgccacggccgatactaaggt

SEQ ID NO: 58056 - DNA, 30 bp, Artificial Sequence
  Synthetic oligonucleotide
gatcgagcgtgatccctcagaaattaaggt

SEQ ID NO: 58057 - DNA, 30 bp, Artificial Sequence
  Synthetic oligonucleotide
gcatctcgagtaaaacactagagctcaggt

SEQ ID NO: 58058 - DNA, 30 bp, Artificial Sequence
  Synthetic oligonucleotide
cgaggatcaaccggtgcaaagcgctgaggt

SEQ ID NO: 58059 - DNA, 30 bp, Artificial Sequence
  Synthetic oligonucleotide
tgttagggtgtgcgcgatgatggactaggt

SEQ ID NO: 58060 - DNA, 30 bp, Artificial Sequence
  Synthetic oligonucleotide
cggtagtaaacgtcccaccagcataacggt

SEQ ID NO: 58061 - DNA, 30 bp, Artificial Sequence
  Synthetic oligonucleotide
aggggagacggcctctgagtccaaagcggt

SEQ ID NO: 58062 - DNA, 30 bp, Artificial Sequence
  Synthetic oligonucleotide
gtcgcagcctaaaatataaggagcagcggt

SEQ ID NO: 58063 - DNA, 30 bp, Artificial Sequence
  Synthetic oligonucleotide
ggtcaagtgggcgtcgtatagaggagcggt

SEQ ID NO: 58064 - DNA, 30 bp, Artificial Sequence
  Synthetic oligonucleotide
taatggaaaagtgtagcctcccagcgcggt

SEQ ID NO: 58065 - DNA, 30 bp, Artificial Sequence
  Synthetic oligonucleotide
aacagtacagcaaattataaatagcgcggt

SEQ ID NO: 58066 - DNA, 30 bp, Artificial Sequence
  Synthetic oligonucleotide
ggctggccgatatcagaaaactcgtgcggt

SEQ ID NO: 58067 - DNA, 30 bp, Artificial Sequence
  Synthetic oligonucleotide
ggggtaaggggcgagattagcaaggtcggt

SEQ ID NO: 58068 - DNA, 30 bp, Artificial Sequence
  Synthetic oligonucleotide
tggagggcgtaagtgagatacactttcggt

SEQ ID NO: 58069 - DNA, 30 bp, Artificial Sequence
  Synthetic oligonucleotide
tggcgtaggcacatactagactacaagggt

SEQ ID NO: 58070 - DNA, 30 bp, Artificial Sequence
  Synthetic oligonucleotide
cactcacaacagtgtggagtcatcaagggt

SEQ ID NO: 58071 - DNA, 30 bp, Artificial Sequence
  Synthetic oligonucleotide
tggggtcggtctacgccgactgaacagggt

SEQ ID NO: 58072 - DNA, 30 bp, Artificial Sequence
  Synthetic oligonucleotide
cagcgggtacaaaagacgactttgcagggt

SEQ ID NO: 58073 - DNA, 30 bp, Artificial Sequence
  Synthetic oligonucleotide
cggggctagtcacactgttggaaagagggt

SEQ ID NO: 58074 - DNA, 30 bp, Artificial Sequence
  Synthetic oligonucleotide
tccaagggatagtcgtggcaagttgagggt

SEQ ID NO: 58075 - DNA, 30 bp, Artificial Sequence
  Synthetic oligonucleotide
atctgaaggagtggttacatcaaatagggt

SEQ ID NO: 58076 - DNA, 30 bp, Artificial Sequence
  Synthetic oligonucleotide
agagggctgataacccagcagacaacgggt

SEQ ID NO: 58077 - DNA, 30 bp, Artificial Sequence
  Synthetic oligonucleotide
ccatcagagccctgagcaaggcagacgggt

SEQ ID NO: 58078 - DNA, 30 bp, Artificial Sequence
  Synthetic oligonucleotide
aacatgcagtacaggagggcgggaccgggt

SEQ ID NO: 58079 - DNA, 30 bp, Artificial Sequence
  Synthetic oligonucleotide
gcactagcgggatcccgtaaaaataggggt

SEQ ID NO: 58080 - DNA, 30 bp, Artificial Sequence
  Synthetic oligonucleotide
ctgggtcataagagagagtcgaccgggggt

SEQ ID NO: 58081 - DNA, 30 bp, Artificial Sequence
  Synthetic oligonucleotide
gaccgggaaagatcttataacgacatgggt

SEQ ID NO: 58082 - DNA, 30 bp, Artificial Sequence
  Synthetic oligonucleotide
atccaggattcgggtttacgacgagtgggt

SEQ ID NO: 58083 - DNA, 30 bp, Artificial Sequence
  Synthetic oligonucleotide
cagaaggttgagtcaagatcatatttgggt

SEQ ID NO: 58084 - DNA, 31 bp, Artificial Sequence
  Synthetic oligonucleotide
ttaggtgtctaaaagtgctagcacagatggt

SEQ ID NO: 58085 - DNA, 30 bp, Artificial Sequence
  Synthetic oligonucleotide
agtgtgggcgaacacgaattttccgatggt

SEQ ID NO: 58086 - DNA, 30 bp, Artificial Sequence
  Synthetic oligonucleotide
agagacagggcgcgatcacaaggttatggt

SEQ ID NO: 58087 - DNA, 30 bp, Artificial Sequence
  Synthetic oligonucleotide
tgatagcaacgaacctaaaccgcgcctggt

SEQ ID NO: 58088 - DNA, 30 bp, Artificial Sequence
  Synthetic oligonucleotide
acgaaatgtgtcacaggggttaatgctggt

SEQ ID NO: 58089 - DNA, 30 bp, Artificial Sequence
  Synthetic oligonucleotide
ggaaagtataaaaaaaaaatgggctctggt

SEQ ID NO: 58090 - DNA, 30 bp, Artificial Sequence
  Synthetic oligonucleotide
tctgggaactgggtgttaccgtgaggtggt

SEQ ID NO: 58091 - DNA, 30 bp, Artificial Sequence
  Synthetic oligonucleotide
cgcaaatgtcaagtgggcaatattggtggt

SEQ ID NO: 58092 - DNA, 30 bp, Artificial Sequence
  Synthetic oligonucleotide
caagataaaaattcaaaatgccagattggt

SEQ ID NO: 58093 - DNA, 30 bp, Artificial Sequence
  Synthetic oligonucleotide
cggagtgagttggatggatgaaacaaatgt

SEQ ID NO: 58094 - DNA, 30 bp, Artificial Sequence
  Synthetic oligonucleotide
ctggtcatcatagtcagaagggaggaatgt

SEQ ID NO: 58095 - DNA, 30 bp, Artificial Sequence
  Synthetic oligonucleotide
caaaggacgatattagatattcatgaatgt

SEQ ID NO: 58096 - DNA, 30 bp, Artificial Sequence
  Synthetic oligonucleotide
ggtggaatggacatgattttggatgaatgt

SEQ ID NO: 58097 - DNA, 30 bp, Artificial Sequence
  Synthetic oligonucleotide
tcataaggaatggtagtaaatacataatgt

SEQ ID NO: 58098 - DNA, 30 bp, Artificial Sequence
  Synthetic oligonucleotide
tagatgaacaaacgaggagaaatgccatgt

SEQ ID NO: 58099 - DNA, 30 bp, Artificial Sequence
  Synthetic oligonucleotide
ggctcacacaagcgaaagacatgatcatgt

SEQ ID NO: 58100 - DNA, 30 bp, Artificial Sequence
  Synthetic oligonucleotide
acgtaagtactactccgacttacttcatgt

SEQ ID NO: 58101 - DNA, 30 bp, Artificial Sequence
  Synthetic oligonucleotide
tgaagtcctagtcacatttgggcacgatgt

SEQ ID NO: 58102 - DNA, 30 bp, Artificial Sequence
  Synthetic oligonucleotide
catcaacgtctgtaggacgaagagcgatgt

SEQ ID NO: 58103 - DNA, 30 bp, Artificial Sequence
  Synthetic oligonucleotide
tctagcagtggaatagaaagtgagggatgt

SEQ ID NO: 58104 - DNA, 30 bp, Artificial Sequence
  Synthetic oligonucleotide
gggggtgttaagtgcgaaaatgtttgatgt

SEQ ID NO: 58105 - DNA, 30 bp, Artificial Sequence
  Synthetic oligonucleotide
cactcagatgatcgtggattggtcctatgt

SEQ ID NO: 58106 - DNA, 30 bp, Artificial Sequence
  Synthetic oligonucleotide
atcatttaggagtaagagaaaacgctatgt

SEQ ID NO: 58107 - DNA, 30 bp, Artificial Sequence
  Synthetic oligonucleotide
gggacatgcccatgtgttgtagatctatgt

SEQ ID NO: 58108 - DNA, 30 bp, Artificial Sequence
  Synthetic oligonucleotide
tgaggaggacgtgactattaaggagtatgt

SEQ ID NO: 58109 - DNA, 30 bp, Artificial Sequence
  Synthetic oligonucleotide
gtccagacaagacctaaaccaaacgtatgt

SEQ ID NO: 58110 - DNA, 30 bp, Artificial Sequence
  Synthetic oligonucleotide
gagtaatggggtgaggcatagagtgtatgt

SEQ ID NO: 58111 - DNA, 30 bp, Artificial Sequence
  Synthetic oligonucleotide
cgtctgtggttgataagatcgatattatgt

SEQ ID NO: 58112 - DNA, 30 bp, Artificial Sequence
  Synthetic oligonucleotide
gagctggctgatcgaacgaaagtggactgt

SEQ ID NO: 58113 - DNA, 30 bp, Artificial Sequence
  Synthetic oligonucleotide
ttatgaatcgggcgagtcatggatgactgt

SEQ ID NO: 58114 - DNA, 30 bp, Artificial Sequence
  Synthetic oligonucleotide
aaggagaacggaattcttcacccaacctgt

SEQ ID NO: 58115 - DNA, 30 bp, Artificial Sequence
  Synthetic oligonucleotide
taagacgggggggccgtgtcgtgtacctgt

SEQ ID NO: 58116 - DNA, 30 bp, Artificial Sequence
  Synthetic oligonucleotide
caagaggggtcacggcaaggatgcccctgt

SEQ ID NO: 58117 - DNA, 30 bp, Artificial Sequence
  Synthetic oligonucleotide
taagcaaatgggcaacaatgaagttcctgt

SEQ ID NO: 58118 - DNA, 30 bp, Artificial Sequence
  Synthetic oligonucleotide
cgtggaagggccacaaccaatagaagctgt

SEQ ID NO: 58119 - DNA, 30 bp, Artificial Sequence
  Synthetic oligonucleotide
gtaggttggagatacgggaatgtgagctgt

SEQ ID NO: 58120 - DNA, 30 bp, Artificial Sequence
  Synthetic oligonucleotide
tacgaggtgggggacgccctgcatcgctgt

SEQ ID NO: 58121 - DNA, 30 bp, Artificial Sequence
  Synthetic oligonucleotide
tcgtctgcagaataatgaatggcgggctgt

SEQ ID NO: 58122 - DNA, 30 bp, Artificial Sequence
  Synthetic oligonucleotide
cagcggtgggggagagaggaaatatgctgt

SEQ ID NO: 58123 - DNA, 30 bp, Artificial Sequence
  Synthetic oligonucleotide
ctaggagaaaggtagtctcagatcatctgt

SEQ ID NO: 58124 - DNA, 30 bp, Artificial Sequence
  Synthetic oligonucleotide
ggctaagtggggcaaaactaccgaacgtgt

SEQ ID NO: 58125 - DNA, 30 bp, Artificial Sequence
  Synthetic oligonucleotide
cggagctgaaaggtaaacgtgggaccgtgt

SEQ ID NO: 58126 - DNA, 30 bp, Artificial Sequence
  Synthetic oligonucleotide
aagagactacttgcgtatgaaagcgcgtgt

SEQ ID NO: 58127 - DNA, 30 bp, Artificial Sequence
  Synthetic oligonucleotide
tgaatttgggaataaaagtcggcaaggtgt

SEQ ID NO: 58128 - DNA, 30 bp, Artificial Sequence
  Synthetic oligonucleotide
aggcctctaaatggaacttgaaacatgtgt

SEQ ID NO: 58129 - DNA, 30 bp, Artificial Sequence
  Synthetic oligonucleotide
cagacggagggaggtcaagggagactgtgt

SEQ ID NO: 58130 - DNA, 30 bp, Artificial Sequence
  Synthetic oligonucleotide
acgatctcatagaagaattgcgaattgtgt

SEQ ID NO: 58131 - DNA, 30 bp, Artificial Sequence
  Synthetic oligonucleotide
ggtgcaatgaccggtcaagttacagattgt

SEQ ID NO: 58132 - DNA, 31 bp, Artificial Sequence
  Synthetic oligonucleotide
aaaatagcaggacatgatcggtttggattgt

SEQ ID NO: 58133 - DNA, 30 bp, Artificial Sequence
  Synthetic oligonucleotide
tcacgactgcgtggattagaacgttattgt

SEQ ID NO: 58134 - DNA, 30 bp, Artificial Sequence
  Synthetic oligonucleotide
tacgtggacgaagtgaaggttgccacttgt

SEQ ID NO: 58135 - DNA, 30 bp, Artificial Sequence
  Synthetic oligonucleotide
ggaagcatcaggtacagcgtgggtagttgt

SEQ ID NO: 58136 - DNA, 30 bp, Artificial Sequence
  Synthetic oligonucleotide
cgagcttcagacgtgggattggaaaaaatt

SEQ ID NO: 58137 - DNA, 40 bp, Artificial Sequence
  Synthetic oligonucleotide
atattaaatagtatgcaagaatgcatatgatactgaaatt

SEQ ID NO: 58138 - DNA, 30 bp, Artificial Sequence
  Synthetic oligonucleotide
agaacagactagggacgggagggataaatt

SEQ ID NO: 58139 - DNA, 30 bp, Artificial Sequence
  Synthetic oligonucleotide
gaggtcaacatcggatgaaactgttaaatt

SEQ ID NO: 58140 - DNA, 30 bp, Artificial Sequence
  Synthetic oligonucleotide
taggtaaaccgtggaaacagtcaagcaatt

SEQ ID NO: 58141 - DNA, 30 bp, Artificial Sequence
  Synthetic oligonucleotide
ccgaggacacaaagcgatgttagcggaatt

SEQ ID NO: 58142 - DNA, 30 bp, Artificial Sequence
  Synthetic oligonucleotide
gatcacgtggactgaagtggacagggaatt

SEQ ID NO: 58143 - DNA, 30 bp, Artificial Sequence
  Synthetic oligonucleotide
tcgattagactgctctagtcaaccataatt

SEQ ID NO: 58144 - DNA, 30 bp, Artificial Sequence
  Synthetic oligonucleotide
agagtggaaaaaattacgcatgtgctaatt

SEQ ID NO: 58145 - DNA, 30 bp, Artificial Sequence
  Synthetic oligonucleotide
gactggagtgggagtatgcgtgaagtaatt

SEQ ID NO: 58146 - DNA, 30 bp, Artificial Sequence
  Synthetic oligonucleotide
gggaacatgccctaagcgatcccattaatt

SEQ ID NO: 58147 - DNA, 30 bp, Artificial Sequence
  Synthetic oligonucleotide
ctcgcgaggcccgcccaatgagagcacatt

SEQ ID NO: 58148 - DNA, 30 bp, Artificial Sequence
  Synthetic oligonucleotide
gtcggtgcaatataatcgtgaggagacatt

SEQ ID NO: 58149 - DNA, 30 bp, Artificial Sequence
  Synthetic oligonucleotide
cgtacagcagatatttaatcgacaaccatt

SEQ ID NO: 58150 - DNA, 30 bp, Artificial Sequence
  Synthetic oligonucleotide
gagaaataggaccataagggtggaagcatt

SEQ ID NO: 58151 - DNA, 30 bp, Artificial Sequence
  Synthetic oligonucleotide
gggcaatacgacagtcatcgaaggcgcatt

SEQ ID NO: 58152 - DNA, 30 bp, Artificial Sequence
  Synthetic oligonucleotide
agagtacggtgacgaagttatataggcatt

SEQ ID NO: 58153 - DNA, 30 bp, Artificial Sequence
  Synthetic oligonucleotide
tagagctgtctacgggtggatgaggtcatt

SEQ ID NO: 58154 - DNA, 30 bp, Artificial Sequence
  Synthetic oligonucleotide
gggatcagtgcacgtcagcgacgggtcatt

SEQ ID NO: 58155 - DNA, 30 bp, Artificial Sequence
  Synthetic oligonucleotide
ttgacgggaatcagaatagcaacgttcatt

SEQ ID NO: 58156 - DNA, 30 bp, Artificial Sequence
  Synthetic oligonucleotide
ttcgatggactgggatatattgtgaagatt

SEQ ID NO: 58157 - DNA, 30 bp, Artificial Sequence
  Synthetic oligonucleotide
tgcgggctcaaaaggggtcaaagtaagatt

SEQ ID NO: 58158 - DNA, 29 bp, Artificial Sequence
  Synthetic oligonucleotide
gcaccagtaacagaaggactcttaagatt

SEQ ID NO: 58159 - DNA, 30 bp, Artificial Sequence
  Synthetic oligonucleotide
gttgctgctagcacgtgagggccgtagatt

SEQ ID NO: 58160 - DNA, 30 bp, Artificial Sequence
  Synthetic oligonucleotide
tctggtcggggaaggaagcgcgtcacgatt

SEQ ID NO: 58161 - DNA, 30 bp, Artificial Sequence
  Synthetic oligonucleotide
tggcacgactcctcagaggggattgcgatt

SEQ ID NO: 58162 - DNA, 30 bp, Artificial Sequence
  Synthetic oligonucleotide
agcatcaatgaaaaaggtgaatgctcgatt

SEQ ID NO: 58163 - DNA, 30 bp, Artificial Sequence
  Synthetic oligonucleotide
ggactctttagctgcaagtagtcgtcgatt

SEQ ID NO: 58164 - DNA, 30 bp, Artificial Sequence
  Synthetic oligonucleotide
gaacgatagaatcgcctattagcaaggatt

SEQ ID NO: 58165 - DNA, 30 bp, Artificial Sequence
  Synthetic oligonucleotide
gcaggactaggaataattcactgaaggatt

SEQ ID NO: 58166 - DNA, 30 bp, Artificial Sequence
  Synthetic oligonucleotide
acccgggcccaatcttaaggaacgaatatt

SEQ ID NO: 58167 - DNA, 30 bp, Artificial Sequence
  Synthetic oligonucleotide
gcgaagagccaagggggctgtcaccatatt

SEQ ID NO: 58168 - DNA, 30 bp, Artificial Sequence
  Synthetic oligonucleotide
cgcctgggaccgggtaaagggttcgatatt

SEQ ID NO: 58169 - DNA, 30 bp, Artificial Sequence
  Synthetic oligonucleotide
gcctaatcccgacgagagaaactaactatt

SEQ ID NO: 58170 - DNA, 30 bp, Artificial Sequence
  Synthetic oligonucleotide
cgatggcgtgatagccataaacaacctatt

SEQ ID NO: 58171 - DNA, 30 bp, Artificial Sequence
  Synthetic oligonucleotide
cgaaccggtcatgtgtgaactcccgctatt

SEQ ID NO: 58172 - DNA, 30 bp, Artificial Sequence
  Synthetic oligonucleotide
cgagaagggcctcgtccaaagaactgtatt

SEQ ID NO: 58173 - DNA, 30 bp, Artificial Sequence
  Synthetic oligonucleotide
cattaccggaagctggatacgaagtgtatt

SEQ ID NO: 58174 - DNA, 30 bp, Artificial Sequence
  Synthetic oligonucleotide
gagatgcttcaccgaattaacagttgtatt

SEQ ID NO: 58175 - DNA, 30 bp, Artificial Sequence
  Synthetic oligonucleotide
gacaaagaggggaagaagaaacagattatt

SEQ ID NO: 58176 - DNA, 30 bp, Artificial Sequence
  Synthetic oligonucleotide
tggggccggcagaaaatgacgtgctttatt

SEQ ID NO: 58177 - DNA, 30 bp, Artificial Sequence
  Synthetic oligonucleotide
ggcgaaagttaaaggagaggaagaaaactt

SEQ ID NO: 58178 - DNA, 30 bp, Artificial Sequence
  Synthetic oligonucleotide
tgacgggggagaggtagcgtcgtataactt

SEQ ID NO: 58179 - DNA, 30 bp, Artificial Sequence
  Synthetic oligonucleotide
ccgcgcgctgaatgtacgagcaggacactt

SEQ ID NO: 58180 - DNA, 30 bp, Artificial Sequence
  Synthetic oligonucleotide
cctggagggaacagacatcgtggggcactt

SEQ ID NO: 58181 - DNA, 30 bp, Artificial Sequence
  Synthetic oligonucleotide
aagcgatcatcatgaaagagaagtagactt

SEQ ID NO: 58182 - DNA, 30 bp, Artificial Sequence
  Synthetic oligonucleotide
agagaacgtcgatggtggcctgagggactt

SEQ ID NO: 58183 - DNA, 30 bp, Artificial Sequence
  Synthetic oligonucleotide
gagaaaggtcggccttaagaacactgactt

SEQ ID NO: 58184 - DNA, 30 bp, Artificial Sequence
  Synthetic oligonucleotide
cactcgaaacgagagccccggacaaacctt

SEQ ID NO: 58185 - DNA, 30 bp, Artificial Sequence
  Synthetic oligonucleotide
ggctcaaaagcgagaccagtctgcgacctt

SEQ ID NO: 58186 - DNA, 30 bp, Artificial Sequence
  Synthetic oligonucleotide
cagggagcactgatacgcgggatcgacctt

SEQ ID NO: 58187 - DNA, 30 bp, Artificial Sequence
  Synthetic oligonucleotide
agtgcgaaggtatattagtgcgaaaagctt

SEQ ID NO: 58188 - DNA, 30 bp, Artificial Sequence
  Synthetic oligonucleotide
gtgcggtatcgtactcactaacatcagctt

SEQ ID NO: 58189 - DNA, 30 bp, Artificial Sequence
  Synthetic oligonucleotide
tcatgtcaatattagccggagtagccgctt

SEQ ID NO: 58190 - DNA, 31 bp, Artificial Sequence
  Synthetic oligonucleotide
cagtcatgggctcgtgagctagggatcgctt

SEQ ID NO: 58191 - DNA, 30 bp, Artificial Sequence
  Synthetic oligonucleotide
ttatggaatggacaccagagaaaagtgctt

SEQ ID NO: 58192 - DNA, 30 bp, Artificial Sequence
  Synthetic oligonucleotide
atgggacgagccggtgaaatggaaaatctt

SEQ ID NO: 58193 - DNA, 30 bp, Artificial Sequence
  Synthetic oligonucleotide
caggctaggaaggtacactacgagaatctt

SEQ ID NO: 58194 - DNA, 30 bp, Artificial Sequence
  Synthetic oligonucleotide
ccgtacaaaacccggggagaaaggcatctt

SEQ ID NO: 58195 - DNA, 30 bp, Artificial Sequence
  Synthetic oligonucleotide
gaatgaaagggactcggcctagcggatctt

SEQ ID NO: 58196 - DNA, 30 bp, Artificial Sequence
  Synthetic oligonucleotide
agagggacaaaacggggctcgtcatatctt

SEQ ID NO: 58197 - DNA, 30 bp, Artificial Sequence
  Synthetic oligonucleotide
ggggagaggcactcgtgagcacagactctt

SEQ ID NO: 58198 - DNA, 30 bp, Artificial Sequence
  Synthetic oligonucleotide
agtcggtcgattacggaaggatatgctctt

SEQ ID NO: 58199 - DNA, 30 bp, Artificial Sequence
  Synthetic oligonucleotide
gtgaaaaggattaacatggaggcgagtctt

SEQ ID NO: 58200 - DNA, 30 bp, Artificial Sequence
  Synthetic oligonucleotide
gcgaattctaaaagaaacttaacttgtctt

SEQ ID NO: 58201 - DNA, 30 bp, Artificial Sequence
  Synthetic oligonucleotide
acgtgtaccaagtgaaacgcacgcattctt

SEQ ID NO: 58202 - DNA, 30 bp, Artificial Sequence
  Synthetic oligonucleotide
tggtaatacgtaaacctgcgatcaaaagtt

SEQ ID NO: 58203 - DNA, 30 bp, Artificial Sequence
  Synthetic oligonucleotide
tggggaccagctgacagcgcaatgaaagtt

SEQ ID NO: 58204 - DNA, 30 bp, Artificial Sequence
  Synthetic oligonucleotide
acgggagctggaagttgagcaaaacaagtt

SEQ ID NO: 58205 - DNA, 30 bp, Artificial Sequence
  Synthetic oligonucleotide
tggtctacggcgttaggaaagctcgaagtt

SEQ ID NO: 58206 - DNA, 30 bp, Artificial Sequence
  Synthetic oligonucleotide
atagcggcgacaaaatcgcatcacacagtt

SEQ ID NO: 58207 - DNA, 30 bp, Artificial Sequence
  Synthetic oligonucleotide
aacgcccgatctaatgtacgtcatccagtt

SEQ ID NO: 58208 - DNA, 30 bp, Artificial Sequence
  Synthetic oligonucleotide
agtacatacaggtgtggtcgagaagcagtt

SEQ ID NO: 58209 - DNA, 30 bp, Artificial Sequence
  Synthetic oligonucleotide
gtagacaccacttcgcctgaacgatcagtt

SEQ ID NO: 58210 - DNA, 30 bp, Artificial Sequence
  Synthetic oligonucleotide
gccatcccacggacaggtgacatttcagtt

SEQ ID NO: 58211 - DNA, 30 bp, Artificial Sequence
  Synthetic oligonucleotide
aataaacggtgacgtatttgcgaacgagtt

SEQ ID NO: 58212 - DNA, 30 bp, Artificial Sequence
  Synthetic oligonucleotide
cttgcactgatagtacatctatggcgagtt

SEQ ID NO: 58213 - DNA, 30 bp, Artificial Sequence
  Synthetic oligonucleotide
acgtgtaacgaaagtcttataatttgagtt

SEQ ID NO: 58214 - DNA, 30 bp, Artificial Sequence
  Synthetic oligonucleotide
gctgatgaacaagggcgagctgacatagtt

SEQ ID NO: 58215 - DNA, 30 bp, Artificial Sequence
  Synthetic oligonucleotide
aggttacaggaaaataaacgagccttagtt

SEQ ID NO: 58216 - DNA, 30 bp, Artificial Sequence
  Synthetic oligonucleotide
taacagtccgaaatagtccccgaaaacgtt

SEQ ID NO: 58217 - DNA, 30 bp, Artificial Sequence
  Synthetic oligonucleotide
tagtagcgccctaagaagcccaaggccgtt

SEQ ID NO: 58218 - DNA, 30 bp, Artificial Sequence
  Synthetic oligonucleotide
accagaggtaactatgcatattaccgcgtt

SEQ ID NO: 58219 - DNA, 30 bp, Artificial Sequence
  Synthetic oligonucleotide
tgcttcctaacctggatccagaagcgcgtt

SEQ ID NO: 58220 - DNA, 30 bp, Artificial Sequence
  Synthetic oligonucleotide
acggatatgacaaaacgcaagttatgcgtt

SEQ ID NO: 58221 - DNA, 30 bp, Artificial Sequence
  Synthetic oligonucleotide
aaagagtgcgaattaagtcgggcttgcgtt

SEQ ID NO: 58222 - DNA, 30 bp, Artificial Sequence
  Synthetic oligonucleotide
acagtacatcttttccccatcgtgatcgtt

SEQ ID NO: 58223 - DNA, 30 bp, Artificial Sequence
  Synthetic oligonucleotide
cgagcagggcaagacgctacacagctcgtt

SEQ ID NO: 58224 - DNA, 30 bp, Artificial Sequence
  Synthetic oligonucleotide
gcgaagttggtgagtctcgtcctggtcgtt

SEQ ID NO: 58225 - DNA, 30 bp, Artificial Sequence
  Synthetic oligonucleotide
agtcacactagcaataaggaatataaggtt

SEQ ID NO: 58226 - DNA, 30 bp, Artificial Sequence
  Synthetic oligonucleotide
tgcttaagaaaagcaagcgaaggtccggtt

SEQ ID NO: 58227 - DNA, 30 bp, Artificial Sequence
  Synthetic oligonucleotide
gcgcattgataatctgggagaacgtcggtt

SEQ ID NO: 58228 - DNA, 30 bp, Artificial Sequence
  Synthetic oligonucleotide
agactatataaaataatccgtaccagggtt

SEQ ID NO: 58229 - DNA, 30 bp, Artificial Sequence
  Synthetic oligonucleotide
tcgtcgaaaagtaggggtcagagatgggtt

SEQ ID NO: 58230 - DNA, 30 bp, Artificial Sequence
  Synthetic oligonucleotide
cagagtaaggtggacgaagtgaccatggtt

SEQ ID NO: 58231 - DNA, 30 bp, Artificial Sequence
  Synthetic oligonucleotide
ggcagataaactaacggcatactactggtt

SEQ ID NO: 58232 - DNA, 30 bp, Artificial Sequence
  Synthetic oligonucleotide
atcgagataatttggcagataacgctggtt

SEQ ID NO: 58233 - DNA, 30 bp, Artificial Sequence
  Synthetic oligonucleotide
accgcagggtaggggataagcacggtggtt

SEQ ID NO: 58234 - DNA, 30 bp, Artificial Sequence
  Synthetic oligonucleotide
caaggctgaagatgaatacagaagttggtt

SEQ ID NO: 58235 - DNA, 30 bp, Artificial Sequence
  Synthetic oligonucleotide
cgagggcaaaagaaatgcgattcgactgtt

SEQ ID NO: 58236 - DNA, 30 bp, Artificial Sequence
  Synthetic oligonucleotide
ccgtcaaaacccaaatggatatcctctgtt

SEQ ID NO: 58237 - DNA, 30 bp, Artificial Sequence
  Synthetic oligonucleotide
tatggaggacggcttatgcaaggtggtgtt

SEQ ID NO: 58238 - DNA, 30 bp, Artificial Sequence
  Synthetic oligonucleotide
taacgaagactggaaaatagttgttgtgtt

SEQ ID NO: 58239 - DNA, 30 bp, Artificial Sequence
  Synthetic oligonucleotide
tgacgataggcgggaaggtgaggccaattt

SEQ ID NO: 58240 - DNA, 30 bp, Artificial Sequence
  Synthetic oligonucleotide
ggaggagggccctgatataagcaggaattt

SEQ ID NO: 58241 - DNA, 30 bp, Artificial Sequence
  Synthetic oligonucleotide
ttggatctcggaaatacaccagctgaattt

SEQ ID NO: 58242 - DNA, 30 bp, Artificial Sequence
  Synthetic oligonucleotide
gacgatgaatataagcaaggcctaacattt

SEQ ID NO: 58243 - DNA, 30 bp, Artificial Sequence
  Synthetic oligonucleotide
aagagtgagagacgttagtgggcgacattt

SEQ ID NO: 58244 - DNA, 30 bp, Artificial Sequence
  Synthetic oligonucleotide
cgaatttgttacgccagaggtcggccattt

SEQ ID NO: 58245 - DNA, 30 bp, Artificial Sequence
  Synthetic oligonucleotide
acaatcattcagaggggaataggtccattt

SEQ ID NO: 58246 - DNA, 30 bp, Artificial Sequence
  Synthetic oligonucleotide
cgagtgccggaagggtcttcgccaagattt

SEQ ID NO: 58247 - DNA, 30 bp, Artificial Sequence
  Synthetic oligonucleotide
ttaggtaagtcggattgtgaccgccgattt

SEQ ID NO: 58248 - DNA, 30 bp, Artificial Sequence
  Synthetic oligonucleotide
acagacatatgaagtagggacgaaatattt

SEQ ID NO: 58249 - DNA, 30 bp, Artificial Sequence
  Synthetic oligonucleotide
taacacggctaaaagtggcgagacatattt

SEQ ID NO: 58250 - DNA, 30 bp, Artificial Sequence
  Synthetic oligonucleotide
gtgagataagaatacgatcattcactattt

SEQ ID NO: 58251 - DNA, 30 bp, Artificial Sequence
  Synthetic oligonucleotide
ctacgaaagcgaaacgcgtatccagtattt

SEQ ID NO: 58252 - DNA, 30 bp, Artificial Sequence
  Synthetic oligonucleotide
gggggacacccaactagcggaggaagcttt

SEQ ID NO: 58253 - DNA, 30 bp, Artificial Sequence
  Synthetic oligonucleotide
cggagtgggaagggtcggtatccacgcttt

SEQ ID NO: 58254 - DNA, 30 bp, Artificial Sequence
  Synthetic oligonucleotide
gaggggatctaggtgaatagtagcttcttt

SEQ ID NO: 58255 - DNA, 31 bp, Artificial Sequence
  Synthetic oligonucleotide
tacgggaagcggatgggccaacactcagttt

SEQ ID NO: 58256 - DNA, 30 bp, Artificial Sequence
  Synthetic oligonucleotide
atggcgttagatgaaattgaatatacgttt

SEQ ID NO: 58257 - DNA, 30 bp, Artificial Sequence
  Synthetic oligonucleotide
tgagacaaatacaacctgtagcgtacgttt

SEQ ID NO: 58258 - DNA, 30 bp, Artificial Sequence
  Synthetic oligonucleotide
ggacggagatctcaagtacaggttgcgttt

SEQ ID NO: 58259 - DNA, 30 bp, Artificial Sequence
  Synthetic oligonucleotide
catacattggcggcaggaagtgcgaggttt

SEQ ID NO: 58260 - DNA, 30 bp, Artificial Sequence
  Synthetic oligonucleotide
ggaacggcgaaggcccgaaagtataggttt

SEQ ID NO: 58261 - DNA, 30 bp, Artificial Sequence
  Synthetic oligonucleotide
cgaaatacgtcatgtggagtgggaatgttt

SEQ ID NO: 58262 - DNA, 30 bp, Artificial Sequence
  Synthetic oligonucleotide
gtgtgctgagacattgggcttctactgttt

SEQ ID NO: 58263 - DNA, 30 bp, Artificial Sequence
  Synthetic oligonucleotide
aggctggcgtcacagttcatggcgaatttt

SEQ ID NO: 58264 - DNA, 30 bp, Artificial Sequence
  Synthetic oligonucleotide
aacgagaaatagataatccgactccatttt

SEQ ID NO: 58265 - DNA, 30 bp, Artificial Sequence
  Synthetic oligonucleotide
tagtaatgtgttagcaagcgaacctgtttt

SEQ ID NO: 58266 - DNA, 30 bp, Artificial Sequence
  Synthetic oligonucleotide
tcagagcagggacccattagtaaagttttt

SEQ ID NO: 58267 - DNA, 30 bp, Artificial Sequence
  Synthetic oligonucleotide
caccggtaaaaatgaagttaggccaaaaaa

SEQ ID NO: 58268 - DNA, 30 bp, Artificial Sequence
  Synthetic oligonucleotide
ggcgcatattaacgcgagcagactcaaaaa

SEQ ID NO: 58269 - DNA, 30 bp, Artificial Sequence
  Synthetic oligonucleotide
gaggagcaagtacatgtgctctgttaaaaa

SEQ ID NO: 58270 - DNA, 30 bp, Artificial Sequence
  Synthetic oligonucleotide
taacgaggcgatcaaaaacgcataccaaaa

SEQ ID NO: 58271 - DNA, 30 bp, Artificial Sequence
  Synthetic oligonucleotide
ccactggcgagccgaatctctgtaccaaaa

SEQ ID NO: 58272 - DNA, 30 bp, Artificial Sequence
  Synthetic oligonucleotide
ggcctaccataaagttataccgtgccaaaa

SEQ ID NO: 58273 - DNA, 30 bp, Artificial Sequence
  Synthetic oligonucleotide
actagggcaatgccgttggctcatccaaaa

SEQ ID NO: 58274 - DNA, 30 bp, Artificial Sequence
  Synthetic oligonucleotide
ggcacccggaaaattagcgtgaacgcaaaa

SEQ ID NO: 58275 - DNA, 30 bp, Artificial Sequence
  Synthetic oligonucleotide
cagtcatgatttgagtaaatccccgcaaaa

SEQ ID NO: 58276 - DNA, 30 bp, Artificial Sequence
  Synthetic oligonucleotide
cgcttcgtgcaaagtgcagttgcctcaaaa

SEQ ID NO: 58277 - DNA, 30 bp, Artificial Sequence
  Synthetic oligonucleotide
aacggagacagaaagcagttgatgagaaaa

SEQ ID NO: 58278 - DNA, 30 bp, Artificial Sequence
  Synthetic oligonucleotide
cacataggactcttttaagactgaggaaaa

SEQ ID NO: 58279 - DNA, 30 bp, Artificial Sequence
  Synthetic oligonucleotide
aaacgaatgagaatgtctttagccggaaaa

SEQ ID NO: 58280 - DNA, 30 bp, Artificial Sequence
  Synthetic oligonucleotide
taccgcggagcaaggacatgagagggaaaa

SEQ ID NO: 58281 - DNA, 30 bp, Artificial Sequence
  Synthetic oligonucleotide
gtagtggttgttcgtaggagtgcgggaaaa

SEQ ID NO: 58282 - DNA, 30 bp, Artificial Sequence
  Synthetic oligonucleotide
agacttcacggagagacactatcctgaaaa

SEQ ID NO: 58283 - DNA, 30 bp, Artificial Sequence
  Synthetic oligonucleotide
tcgccaaccgcgccctaggatcagtgaaaa

SEQ ID NO: 58284 - DNA, 30 bp, Artificial Sequence
  Synthetic oligonucleotide
tacttcaggcagaacgtgggtcggtgaaaa

SEQ ID NO: 58285 - DNA, 30 bp, Artificial Sequence
  Synthetic oligonucleotide
tcttgtagcggcagtgcgtgacacataaaa

SEQ ID NO: 58286 - DNA, 30 bp, Artificial Sequence
  Synthetic oligonucleotide
aagaccgtgaagattgagataattataaaa

SEQ ID NO: 58287 - DNA, 30 bp, Artificial Sequence
  Synthetic oligonucleotide
caaagttgtcgactaactacgagcctaaaa

SEQ ID NO: 58288 - DNA, 30 bp, Artificial Sequence
  Synthetic oligonucleotide
tgataggggacatgggactccgcgctaaaa

SEQ ID NO: 58289 - DNA, 30 bp, Artificial Sequence
  Synthetic oligonucleotide
gggggcggacccgaactaatagtaaacaaa

SEQ ID NO: 58290 - DNA, 30 bp, Artificial Sequence
  Synthetic oligonucleotide
acgtgtaacagtgagctacaggagaacaaa

SEQ ID NO: 58291 - DNA, 30 bp, Artificial Sequence
  Synthetic oligonucleotide
cgcgccctattgcccagagaccttcacaaa

SEQ ID NO: 58292 - DNA, 30 bp, Artificial Sequence
  Synthetic oligonucleotide
atcaggatactcttgactaaaaaagacaaa

SEQ ID NO: 58293 - DNA, 30 bp, Artificial Sequence
  Synthetic oligonucleotide
accgcgagagcagggcttgtctgagacaaa

SEQ ID NO: 58294 - DNA, 30 bp, Artificial Sequence
  Synthetic oligonucleotide
caagtgctgcaccagaacgcgtaatacaaa

SEQ ID NO: 58295 - DNA, 30 bp, Artificial Sequence
  Synthetic oligonucleotide
acggacccatatgtacatacgggctacaaa

SEQ ID NO: 58296 - DNA, 30 bp, Artificial Sequence
  Synthetic oligonucleotide
gacaaggacgatggatttaaagagtacaaa

SEQ ID NO: 58297 - DNA, 31 bp, Artificial Sequence
  Synthetic oligonucleotide
gtacggggtgtactgtatgaatgacaccaaa

SEQ ID NO: 58298 - DNA, 30 bp, Artificial Sequence
  Synthetic oligonucleotide
tagattcaacttcggcgtgtgagcaccaaa

SEQ ID NO: 58299 - DNA, 30 bp, Artificial Sequence
  Synthetic oligonucleotide
gtgacagacataccggggaactcgaccaaa

SEQ ID NO: 58300 - DNA, 30 bp, Artificial Sequence
  Synthetic oligonucleotide
gacgagacagggctgcttattctatccaaa

SEQ ID NO: 58301 - DNA, 30 bp, Artificial Sequence
  Synthetic oligonucleotide
tgcatcgaaataccagttgtccggtccaaa

SEQ ID NO: 58302 - DNA, 30 bp, Artificial Sequence
  Synthetic oligonucleotide
acggtgctaccaaaatgttcagtcagcaaa

SEQ ID NO: 58303 - DNA, 30 bp, Artificial Sequence
  Synthetic oligonucleotide
cttaacagtcaaagtcaaaatccgagcaaa

SEQ ID NO: 58304 - DNA, 30 bp, Artificial Sequence
  Synthetic oligonucleotide
tcctgaagttgaaagtaagtgggtagcaaa

SEQ ID NO: 58305 - DNA, 30 bp, Artificial Sequence
  Synthetic oligonucleotide
agtaaagagcccaaaacgtttctgcgcaaa

SEQ ID NO: 58306 - DNA, 30 bp, Artificial Sequence
  Synthetic oligonucleotide
cgggacacctacataacgataattggcaaa

SEQ ID NO: 58307 - DNA, 30 bp, Artificial Sequence
  Synthetic oligonucleotide
gtgaggtaaaaatcggtgcattccatcaaa

SEQ ID NO: 58308 - DNA, 30 bp, Artificial Sequence
  Synthetic oligonucleotide
ccgattatgggtaccagatcaccgatcaaa

SEQ ID NO: 58309 - DNA, 30 bp, Artificial Sequence
  Synthetic oligonucleotide
ccggtctcaaattaatgacaacggatcaaa

SEQ ID NO: 58310 - DNA, 30 bp, Artificial Sequence
  Synthetic oligonucleotide
agtatagcgcaaggaagttacctagtcaaa

SEQ ID NO: 58311 - DNA, 30 bp, Artificial Sequence
  Synthetic oligonucleotide
tagttgcccatatagtgcaccgtagtcaaa

SEQ ID NO: 58312 - DNA, 30 bp, Artificial Sequence
  Synthetic oligonucleotide
actaccataatgtgaaataataacgtcaaa

SEQ ID NO: 58313 - DNA, 30 bp, Artificial Sequence
  Synthetic oligonucleotide
accgatttgcaaagagctacggcggtcaaa

SEQ ID NO: 58314 - DNA, 30 bp, Artificial Sequence
  Synthetic oligonucleotide
ctcgggacgagaggatattccggacagaaa

SEQ ID NO: 58315 - DNA, 30 bp, Artificial Sequence
  Synthetic oligonucleotide
tgcacgggcatgggctcctaaatacagaaa

SEQ ID NO: 58316 - DNA, 30 bp, Artificial Sequence
  Synthetic oligonucleotide
aaagaactgtcagataactcaagtcagaaa

SEQ ID NO: 58317 - DNA, 30 bp, Artificial Sequence
  Synthetic oligonucleotide
ttaggaaaaacgaggctactgcccgagaaa

SEQ ID NO: 58318 - DNA, 30 bp, Artificial Sequence
  Synthetic oligonucleotide
ctaaccaataggaatttgagacgtgagaaa

SEQ ID NO: 58319 - DNA, 30 bp, Artificial Sequence
  Synthetic oligonucleotide
acgataatatggtctcaatccgttgagaaa

SEQ ID NO: 58320 - DNA, 30 bp, Artificial Sequence
  Synthetic oligonucleotide
gcgatggggtgccgcccagatctatagaaa

SEQ ID NO: 58321 - DNA, 30 bp, Artificial Sequence
  Synthetic oligonucleotide
ttaaacgggaaaggtcgcccagcaacgaaa

SEQ ID NO: 58322 - DNA, 30 bp, Artificial Sequence
  Synthetic oligonucleotide
cgctgtgaggggttagttgatagaacgaaa

SEQ ID NO: 58323 - DNA, 30 bp, Artificial Sequence
  Synthetic oligonucleotide
gtgatagatgacgaactaagagcgacgaaa

SEQ ID NO: 58324 - DNA, 30 bp, Artificial Sequence
  Synthetic oligonucleotide
gacacatgttggatcaggtacgggacgaaa

SEQ ID NO: 58325 - DNA, 31 bp, Artificial Sequence
  Synthetic oligonucleotide
ccagtcgtgggttgagtctcacaagccgaaa

SEQ ID NO: 58326 - DNA, 30 bp, Artificial Sequence
  Synthetic oligonucleotide
agtagtggtaataaaagttagcttccgaaa

SEQ ID NO: 58327 - DNA, 30 bp, Artificial Sequence
  Synthetic oligonucleotide
gttcatgacaaggggttgaacatagcgaaa

SEQ ID NO: 58328 - DNA, 30 bp, Artificial Sequence
  Synthetic oligonucleotide
caggaaatcacaaggacctctatcgcgaaa

SEQ ID NO: 58329 - DNA, 30 bp, Artificial Sequence
  Synthetic oligonucleotide
acgtaaagcctcgtttgaccagcctcgaaa

SEQ ID NO: 58330 - DNA, 30 bp, Artificial Sequence
  Synthetic oligonucleotide
ggaagattcgaacatggtacaccttcgaaa

SEQ ID NO: 58331 - DNA, 30 bp, Artificial Sequence
  Synthetic oligonucleotide
gaactcaaggactaaatctgagaaaggaaa

SEQ ID NO: 58332 - DNA, 30 bp, Artificial Sequence
  Synthetic oligonucleotide
tccgtgtgcttgtgccttgaagggaggaaa

SEQ ID NO: 58333 - DNA, 30 bp, Artificial Sequence
  Synthetic oligonucleotide
atacgtacgtagttaagtatcctacggaaa

SEQ ID NO: 58334 - DNA, 30 bp, Artificial Sequence
  Synthetic oligonucleotide
tatcgtcagggtctaagggaatctcggaaa

SEQ ID NO: 58335 - DNA, 30 bp, Artificial Sequence
  Synthetic oligonucleotide
agggtggtatagttgagatccatagggaaa

SEQ ID NO: 58336 - DNA, 30 bp, Artificial Sequence
  Synthetic oligonucleotide
gcgtggcggtggaatttggctaactggaaa

SEQ ID NO: 58337 - DNA, 30 bp, Artificial Sequence
  Synthetic oligonucleotide
acaatacatggacataaattgagttggaaa

SEQ ID NO: 58338 - DNA, 30 bp, Artificial Sequence
  Synthetic oligonucleotide
cgctaatcggggatttaatgaaacctgaaa

SEQ ID NO: 58339 - DNA, 30 bp, Artificial Sequence
  Synthetic oligonucleotide
tggcccgataaccaacgagttttgttgaaa

SEQ ID NO: 58340 - DNA, 30 bp, Artificial Sequence
  Synthetic oligonucleotide
agcaagacagcaccgggcactaaaaataaa

SEQ ID NO: 58341 - DNA, 30 bp, Artificial Sequence
  Synthetic oligonucleotide
cacaatgaatcataccaatctcggaataaa

SEQ ID NO: 58342 - DNA, 30 bp, Artificial Sequence
  Synthetic oligonucleotide
ctcgagacgtaggtcggagcaagtaataaa

SEQ ID NO: 58343 - DNA, 30 bp, Artificial Sequence
  Synthetic oligonucleotide
tagcaagatacgctcaagtggaatcataaa

SEQ ID NO: 58344 - DNA, 30 bp, Artificial Sequence
  Synthetic oligonucleotide
acgcgaaaatcctttaatttaagtcataaa

SEQ ID NO: 58345 - DNA, 30 bp, Artificial Sequence
  Synthetic oligonucleotide
agagcaagagaaccacatcgtcgagataaa

SEQ ID NO: 58346 - DNA, 30 bp, Artificial Sequence
  Synthetic oligonucleotide
ggtgcgaccaagttaattctaggcgataaa

SEQ ID NO: 58347 - DNA, 30 bp, Artificial Sequence
  Synthetic oligonucleotide
gcgtcgcgcgcactcaatgactgggataaa

SEQ ID NO: 58348 - DNA, 30 bp, Artificial Sequence
  Synthetic oligonucleotide
ccgccggagccgaggactcataactataaa

SEQ ID NO: 58349 - DNA, 30 bp, Artificial Sequence
  Synthetic oligonucleotide
ggtacacgaagtgcaatgacgccttataaa

SEQ ID NO: 58350 - DNA, 30 bp, Artificial Sequence
  Synthetic oligonucleotide
tacctgacaatatacaaggatagaactaaa

SEQ ID NO: 58351 - DNA, 30 bp, Artificial Sequence
  Synthetic oligonucleotide
agcacccaaaggatgtattgggcgactaaa

SEQ ID NO: 58352 - DNA, 30 bp, Artificial Sequence
  Synthetic oligonucleotide
tggggggatttacataagacctaccctaaa

SEQ ID NO: 58353 - DNA, 30 bp, Artificial Sequence
  Synthetic oligonucleotide
gagagcgatctctcggttggaaaggctaaa

SEQ ID NO: 58354 - DNA, 30 bp, Artificial Sequence
  Synthetic oligonucleotide
atgtagaaactacaaagtcctatggctaaa

SEQ ID NO: 58355 - DNA, 30 bp, Artificial Sequence
  Synthetic oligonucleotide
aaggggcgtaacgtcagaactagatctaaa

SEQ ID NO: 58356 - DNA, 30 bp, Artificial Sequence
  Synthetic oligonucleotide
cggggtaataccaacacccaatcgtctaaa

SEQ ID NO: 58357 - DNA, 30 bp, Artificial Sequence
  Synthetic oligonucleotide
tgtcaataacatgtgagaaattggtctaaa

SEQ ID NO: 58358 - DNA, 30 bp, Artificial Sequence
  Synthetic oligonucleotide
tagtagaagaacaaaatgaatataagtaaa

SEQ ID NO: 58359 - DNA, 30 bp, Artificial Sequence
  Synthetic oligonucleotide
atgcggccaacacgctattgagcacgtaaa

SEQ ID NO: 58360 - DNA, 30 bp, Artificial Sequence
  Synthetic oligonucleotide
gcgtcctcgatgttgacactaggaattaaa

SEQ ID NO: 58361 - DNA, 30 bp, Artificial Sequence
  Synthetic oligonucleotide
agaatagtgtagcagaatgaaatgattaaa

SEQ ID NO: 58362 - DNA, 30 bp, Artificial Sequence
  Synthetic oligonucleotide
gcccaatgatgcaaggtggtgagacttaaa

SEQ ID NO: 58363 - DNA, 30 bp, Artificial Sequence
  Synthetic oligonucleotide
ctcgaaaccctacctaaggcccaccttaaa

SEQ ID NO: 58364 - DNA, 30 bp, Artificial Sequence
  Synthetic oligonucleotide
gatagacaactcaaagatgggacccttaaa

SEQ ID NO: 58365 - DNA, 30 bp, Artificial Sequence
  Synthetic oligonucleotide
atgaattaagccatgtgacaggcagttaaa

SEQ ID NO: 58366 - DNA, 30 bp, Artificial Sequence
  Synthetic oligonucleotide
ctaaaattcacgtacgactacctagttaaa

SEQ ID NO: 58367 - DNA, 30 bp, Artificial Sequence
  Synthetic oligonucleotide
cactgagtggacctctgtccgtatgttaaa

SEQ ID NO: 58368 - DNA, 30 bp, Artificial Sequence
  Synthetic oligonucleotide
tcaagatactagacaaaattcagccaacaa

SEQ ID NO: 58369 - DNA, 30 bp, Artificial Sequence
  Synthetic oligonucleotide
taccccaccggtctatgagaggcgcaacaa

SEQ ID NO: 58370 - DNA, 30 bp, Artificial Sequence
  Synthetic oligonucleotide
atgtcaggagcaccaagacggaaagaacaa

SEQ ID NO: 58371 - DNA, 30 bp, Artificial Sequence
  Synthetic oligonucleotide
aacggcatgtcaggtcgagtagaggaacaa

SEQ ID NO: 58372 - DNA, 30 bp, Artificial Sequence
  Synthetic oligonucleotide
caatacgaaggtagattccttggttaacaa

SEQ ID NO: 58373 - DNA, 30 bp, Artificial Sequence
  Synthetic oligonucleotide
aagatgcaacttgggtagcagcaaacacaa

SEQ ID NO: 58374 - DNA, 30 bp, Artificial Sequence
  Synthetic oligonucleotide
tcgagtgcaacgttaagggcaggggcacaa

SEQ ID NO: 58375 - DNA, 30 bp, Artificial Sequence
  Synthetic oligonucleotide
ggtactgagtgtgaacattgactggcacaa

SEQ ID NO: 58376 - DNA, 30 bp, Artificial Sequence
  Synthetic oligonucleotide
atgtcaaccgagtatgcgagatcttcacaa

SEQ ID NO: 58377 - DNA, 30 bp, Artificial Sequence
  Synthetic oligonucleotide
atacgctagagcaagatttgatacagacaa

SEQ ID NO: 58378 - DNA, 30 bp, Artificial Sequence
  Synthetic oligonucleotide
tagtggactaggtactatctctagagacaa

SEQ ID NO: 58379 - DNA, 30 bp, Artificial Sequence
  Synthetic oligonucleotide
ttaaaaagggaaatagcgcgtccacgacaa

SEQ ID NO: 58380 - DNA, 30 bp, Artificial Sequence
  Synthetic oligonucleotide
actactctgtaatgtggttgggggggacaa

SEQ ID NO: 58381 - DNA, 30 bp, Artificial Sequence
  Synthetic oligonucleotide
gtagaaggaagcgcaaaaatgacaatacaa

SEQ ID NO: 58382 - DNA, 30 bp, Artificial Sequence
  Synthetic oligonucleotide
cataaacgacggcagaactcacacatacaa

SEQ ID NO: 58383 - DNA, 30 bp, Artificial Sequence
  Synthetic oligonucleotide
taaactagcataaggtagatccagatacaa

SEQ ID NO: 58384 - DNA, 30 bp, Artificial Sequence
  Synthetic oligonucleotide
cgctaggataactcacttcaggtactacaa

SEQ ID NO: 58385 - DNA, 30 bp, Artificial Sequence
  Synthetic oligonucleotide
gtactgcgagagccgtatgtccaggtacaa

SEQ ID NO: 58386 - DNA, 30 bp, Artificial Sequence
  Synthetic oligonucleotide
tagcgatagtataggggtcgacgtgtacaa

SEQ ID NO: 58387 - DNA, 30 bp, Artificial Sequence
  Synthetic oligonucleotide
ggaggaggaatgaaattttgaccattacaa

SEQ ID NO: 58388 - DNA, 30 bp, Artificial Sequence
  Synthetic oligonucleotide
acccgggtagattcccggagggcgaaccaa

SEQ ID NO: 58389 - DNA, 30 bp, Artificial Sequence
  Synthetic oligonucleotide
aagccccagccaagatgcatggataaccaa

SEQ ID NO: 58390 - DNA, 30 bp, Artificial Sequence
  Synthetic oligonucleotide
gagtcacattgaaagaagcagagagaccaa

SEQ ID NO: 58391 - DNA, 30 bp, Artificial Sequence
  Synthetic oligonucleotide
agattcggtctggcagaagaggacgaccaa

SEQ ID NO: 58392 - DNA, 30 bp, Artificial Sequence
  Synthetic oligonucleotide
cttcgagagagcagcgagtcatgcgaccaa

SEQ ID NO: 58393 - DNA, 30 bp, Artificial Sequence
  Synthetic oligonucleotide
aacgttacgtcttataggattcggtaccaa

SEQ ID NO: 58394 - DNA, 30 bp, Artificial Sequence
  Synthetic oligonucleotide
gaaaaggattacaaccgcatactaagccaa

SEQ ID NO: 58395 - DNA, 30 bp, Artificial Sequence
  Synthetic oligonucleotide
agaggggttgggttccgattacctagccaa

SEQ ID NO: 58396 - DNA, 30 bp, Artificial Sequence
  Synthetic oligonucleotide
ggtgaatgacggatgtaatatacacgccaa

SEQ ID NO: 58397 - DNA, 30 bp, Artificial Sequence
  Synthetic oligonucleotide
gagggggaggaatttagatgcaatcgccaa

SEQ ID NO: 58398 - DNA, 31 bp, Artificial Sequence
  Synthetic oligonucleotide
ccatctaggcctcgagtagccaacctgccaa

SEQ ID NO: 58399 - DNA, 30 bp, Artificial Sequence
  Synthetic oligonucleotide
gcgaaaagcgccttcggaacatagatccaa

SEQ ID NO: 58400 - DNA, 30 bp, Artificial Sequence
  Synthetic oligonucleotide
gaggtaaccgagctgcgggcctgactccaa

SEQ ID NO: 58401 - DNA, 30 bp, Artificial Sequence
  Synthetic oligonucleotide
ccagacgtgcacaaagtggtatgcctccaa

SEQ ID NO: 58402 - DNA, 30 bp, Artificial Sequence
  Synthetic oligonucleotide
gacagaaccacccagttgggtaagctccaa

SEQ ID NO: 58403 - DNA, 30 bp, Artificial Sequence
  Synthetic oligonucleotide
cgtgagcctttgtgaaactaccagctccaa

SEQ ID NO: 58404 - DNA, 30 bp, Artificial Sequence
  Synthetic oligonucleotide
ccgcgctgagacaagcagacccacgtccaa

SEQ ID NO: 58405 - DNA, 30 bp, Artificial Sequence
  Synthetic oligonucleotide
gatgcaactcacggcacgaggattaagcaa

SEQ ID NO: 58406 - DNA, 30 bp, Artificial Sequence
  Synthetic oligonucleotide
acaacgccctattgtagtgctcaccagcaa

SEQ ID NO: 58407 - DNA, 30 bp, Artificial Sequence
  Synthetic oligonucleotide
taaccgtccgagtggcaagacgtccagcaa

SEQ ID NO: 58408 - DNA, 31 bp, Artificial Sequence
  Synthetic oligonucleotide
cacgggaaaacaccagcccattagtgagcaa

SEQ ID NO: 58409 - DNA, 30 bp, Artificial Sequence
  Synthetic oligonucleotide
ctaggagattcaacaggttagagctagcaa

SEQ ID NO: 58410 - DNA, 30 bp, Artificial Sequence
  Synthetic oligonucleotide
atggcacacacccggccaaaaatctagcaa

SEQ ID NO: 58411 - DNA, 30 bp, Artificial Sequence
  Synthetic oligonucleotide
cgcgtatactgggcggcactaacgtagcaa

SEQ ID NO: 58412 - DNA, 30 bp, Artificial Sequence
  Synthetic oligonucleotide
atcattggctaaggcgcaaacacgtagcaa

SEQ ID NO: 58413 - DNA, 30 bp, Artificial Sequence
  Synthetic oligonucleotide
taacgacttctgcggtggaaagttacgcaa

SEQ ID NO: 58414 - DNA, 30 bp, Artificial Sequence
  Synthetic oligonucleotide
tccggcctgaagcatgagtcgtcagcgcaa

SEQ ID NO: 58415 - DNA, 30 bp, Artificial Sequence
  Synthetic oligonucleotide
ccgttcccaaatatcaaaccgtggaggcaa

SEQ ID NO: 58416 - DNA, 30 bp, Artificial Sequence
  Synthetic oligonucleotide
gactacgcaacagacaaaacggcacggcaa

SEQ ID NO: 58417 - DNA, 30 bp, Artificial Sequence
  Synthetic oligonucleotide
cgtatgctcgagggtatcataatcgggcaa

SEQ ID NO: 58418 - DNA, 30 bp, Artificial Sequence
  Synthetic oligonucleotide
acacgacgagatgttttagcgcctgggcaa

SEQ ID NO: 58419 - DNA, 30 bp, Artificial Sequence
  Synthetic oligonucleotide
cattggcacaggacccataatggtgggcaa

SEQ ID NO: 58420 - DNA, 30 bp, Artificial Sequence
  Synthetic oligonucleotide
gaaagggtgtatcgcagcggagaatggcaa

SEQ ID NO: 58421 - DNA, 30 bp, Artificial Sequence
  Synthetic oligonucleotide
atcaagcatgaaacaacctcgagactgcaa

SEQ ID NO: 58422 - DNA, 31 bp, Artificial Sequence
  Synthetic oligonucleotide
ctcggtgtgggatagaaagactgtgctgcaa

SEQ ID NO: 58423 - DNA, 30 bp, Artificial Sequence
  Synthetic oligonucleotide
caagagaagtccaagctgttatgcgtgcaa

SEQ ID NO: 58424 - DNA, 30 bp, Artificial Sequence
  Synthetic oligonucleotide
ggggcggcgcccagcagaaagcgtgtgcaa

SEQ ID NO: 58425 - DNA, 30 bp, Artificial Sequence
  Synthetic oligonucleotide
tgccttggcagggtaggtaatacattgcaa

SEQ ID NO: 58426 - DNA, 30 bp, Artificial Sequence
  Synthetic oligonucleotide
gatgacagaaaaacaggagaaaccttgcaa

SEQ ID NO: 58427 - DNA, 30 bp, Artificial Sequence
  Synthetic oligonucleotide
tcgtagtgaatcctagggggggtggatcaa

SEQ ID NO: 58428 - DNA, 30 bp, Artificial Sequence
  Synthetic oligonucleotide
gcctcaaagggtgatatccggtcatatcaa

SEQ ID NO: 58429 - DNA, 30 bp, Artificial Sequence
  Synthetic oligonucleotide
aggagatcgcacgtattgggcgggtatcaa

SEQ ID NO: 58430 - DNA, 30 bp, Artificial Sequence
  Synthetic oligonucleotide
tgctacggctgggagggtattaacactcaa

SEQ ID NO: 58431 - DNA, 30 bp, Artificial Sequence
  Synthetic oligonucleotide
cgacattcgcataccgagtcagacactcaa

SEQ ID NO: 58432 - DNA, 29 bp, Artificial Sequence
  Synthetic oligonucleotide
ctagacggtaccaggcggtcacgactcaa

SEQ ID NO: 58433 - DNA, 30 bp, Artificial Sequence
  Synthetic oligonucleotide
gcgccaacacgaatccagtatgtacctcaa

SEQ ID NO: 58434 - DNA, 30 bp, Artificial Sequence
  Synthetic oligonucleotide
gtggagagagaaccgaaaaggaagcctcaa

SEQ ID NO: 58435 - DNA, 30 bp, Artificial Sequence
  Synthetic oligonucleotide
gcagagggagtaaatttcaagtagcctcaa

SEQ ID NO: 58436 - DNA, 30 bp, Artificial Sequence
  Synthetic oligonucleotide
cggcaacttcactgaacattttatcctcaa

SEQ ID NO: 58437 - DNA, 30 bp, Artificial Sequence
  Synthetic oligonucleotide
tagggtcgtaaatttaacagcactcctcaa

SEQ ID NO: 58438 - DNA, 30 bp, Artificial Sequence
  Synthetic oligonucleotide
ccagcgacaaagtcaacgtatgcctctcaa

SEQ ID NO: 58439 - DNA, 30 bp, Artificial Sequence
  Synthetic oligonucleotide
gataccaagcgtctccgccagaggtctcaa

SEQ ID NO: 58440 - DNA, 30 bp, Artificial Sequence
  Synthetic oligonucleotide
atagggtgaggattaataacttacagtcaa

SEQ ID NO: 58441 - DNA, 30 bp, Artificial Sequence
  Synthetic oligonucleotide
acctgggttctcagaactaagaacggtcaa

SEQ ID NO: 58442 - DNA, 30 bp, Artificial Sequence
  Synthetic oligonucleotide
aagcgggcatctaacgtctaggatggtcaa

SEQ ID NO: 58443 - DNA, 30 bp, Artificial Sequence
  Synthetic oligonucleotide
cgaccgataagataggggtctgactgtcaa

SEQ ID NO: 58444 - DNA, 30 bp, Artificial Sequence
  Synthetic oligonucleotide
ctaatgaggaaaggacacttaaggcttcaa

SEQ ID NO: 58445 - DNA, 30 bp, Artificial Sequence
  Synthetic oligonucleotide
aagcaatggggtgcgacaccgagagttcaa

SEQ ID NO: 58446 - DNA, 30 bp, Artificial Sequence
  Synthetic oligonucleotide
aaggattaagtttaaggataaatcgttcaa

SEQ ID NO: 58447 - DNA, 30 bp, Artificial Sequence
  Synthetic oligonucleotide
gtgagtcacactagaggggccgaaaaagaa

SEQ ID NO: 58448 - DNA, 30 bp, Artificial Sequence
  Synthetic oligonucleotide
attcgctagttgtcaatggaccgaaaagaa

SEQ ID NO: 58449 - DNA, 30 bp, Artificial Sequence
  Synthetic oligonucleotide
taataaaaacatagtattagggggaaagaa

SEQ ID NO: 58450 - DNA, 30 bp, Artificial Sequence
  Synthetic oligonucleotide
gaggtggatcatagggaaacctataaagaa

SEQ ID NO: 58451 - DNA, 30 bp, Artificial Sequence
  Synthetic oligonucleotide
agctgctcactctgattattcgaacaagaa

SEQ ID NO: 58452 - DNA, 30 bp, Artificial Sequence
  Synthetic oligonucleotide
tctgcgtacaagaagttaatggagcaagaa

SEQ ID NO: 58453 - DNA, 30 bp, Artificial Sequence
  Synthetic oligonucleotide
gggtctatctaagcggatagatgtcaagaa

SEQ ID NO: 58454 - DNA, 30 bp, Artificial Sequence
  Synthetic oligonucleotide
gtgtgagccggattagataaataagaagaa

SEQ ID NO: 58455 - DNA, 30 bp, Artificial Sequence
  Synthetic oligonucleotide
ccaccggtgtaataaatcagtaccgaagaa

SEQ ID NO: 58456 - DNA, 30 bp, Artificial Sequence
  Synthetic oligonucleotide
taagtaggagaatgtgcgtcaacggaagaa

SEQ ID NO: 58457 - DNA, 30 bp, Artificial Sequence
  Synthetic oligonucleotide
gtgcggtaatcctggtaccccgcgtaagaa

SEQ ID NO: 58458 - DNA, 30 bp, Artificial Sequence
  Synthetic oligonucleotide
actgcacaccgtcaggtccggttaacagaa

SEQ ID NO: 58459 - DNA, 30 bp, Artificial Sequence
  Synthetic oligonucleotide
gtcctactcaagcggcagaaacctacagaa

SEQ ID NO: 58460 - DNA, 30 bp, Artificial Sequence
  Synthetic oligonucleotide
gagcagaagtgagtcatggaatcaccagaa

SEQ ID NO: 58461 - DNA, 30 bp, Artificial Sequence
  Synthetic oligonucleotide
ggtgagtatgcttccatccactagccagaa

SEQ ID NO: 58462 - DNA, 30 bp, Artificial Sequence
  Synthetic oligonucleotide
ggcgcattacaaacaagtcgaggagcagaa

SEQ ID NO: 58463 - DNA, 30 bp, Artificial Sequence
  Synthetic oligonucleotide
gactgtgatccagaggggtaattctcagaa

SEQ ID NO: 58464 - DNA, 30 bp, Artificial Sequence
  Synthetic oligonucleotide
cagacccttgcagctggtgcgaagcgagaa

SEQ ID NO: 58465 - DNA, 30 bp, Artificial Sequence
  Synthetic oligonucleotide
catgcctggggcatggtgaggggaggagaa

SEQ ID NO: 58466 - DNA, 30 bp, Artificial Sequence
  Synthetic oligonucleotide
ggataacaacctcaacttaaatccggagaa

SEQ ID NO: 58467 - DNA, 30 bp, Artificial Sequence
  Synthetic oligonucleotide
tagaaagaaaacaccgtgagtactggagaa

SEQ ID NO: 58468 - DNA, 30 bp, Artificial Sequence
  Synthetic oligonucleotide
attagtggagtgggaaaaaatgcatgagaa

SEQ ID NO: 58469 - DNA, 30 bp, Artificial Sequence
  Synthetic oligonucleotide
gcacgcgtgtgtttctagctaccttgagaa

SEQ ID NO: 58470 - DNA, 30 bp, Artificial Sequence
  Synthetic oligonucleotide
ggggtaggatgatactcgggcgcaatagaa

SEQ ID NO: 58471 - DNA, 30 bp, Artificial Sequence
  Synthetic oligonucleotide
atacaggtaggcaacgtaagacatgtagaa

SEQ ID NO: 58472 - DNA, 30 bp, Artificial Sequence
  Synthetic oligonucleotide
cgcgtaaagagacggttgtcgcgtgacgaa

SEQ ID NO: 58473 - DNA, 30 bp, Artificial Sequence
  Synthetic oligonucleotide
cgtaacgaaccagtggatgctatgtacgaa

SEQ ID NO: 58474 - DNA, 30 bp, Artificial Sequence
  Synthetic oligonucleotide
cgctagattacttggagctaggattacgaa

SEQ ID NO: 58475 - DNA, 30 bp, Artificial Sequence
  Synthetic oligonucleotide
caaaaatggaatataaatacaggtgccgaa

SEQ ID NO: 58476 - DNA, 30 bp, Artificial Sequence
  Synthetic oligonucleotide
ggaggatcgctatactattacaaatccgaa

SEQ ID NO: 58477 - DNA, 30 bp, Artificial Sequence
  Synthetic oligonucleotide
tggacgggtacaggaagattggattccgaa

SEQ ID NO: 58478 - DNA, 30 bp, Artificial Sequence
  Synthetic oligonucleotide
aggaccggagatttcactggatcaagcgaa

SEQ ID NO: 58479 - DNA, 30 bp, Artificial Sequence
  Synthetic oligonucleotide
aggcattaggaggagtgcgggcacagcgaa

SEQ ID NO: 58480 - DNA, 30 bp, Artificial Sequence
  Synthetic oligonucleotide
gtcggggggtggcgtgcccgcagaggcgaa

SEQ ID NO: 58481 - DNA, 30 bp, Artificial Sequence
  Synthetic oligonucleotide
taaacgatagtcgcgaaatgaatgggcgaa

SEQ ID NO: 58482 - DNA, 30 bp, Artificial Sequence
  Synthetic oligonucleotide
aagtgtctgcgactttaagaatatggcgaa

SEQ ID NO: 58483 - DNA, 30 bp, Artificial Sequence
  Synthetic oligonucleotide
caggtaccaacgggcgttgggtcatgcgaa

SEQ ID NO: 58484 - DNA, 30 bp, Artificial Sequence
  Synthetic oligonucleotide
tgaggtcagagttaattctcttcgtgcgaa

SEQ ID NO: 58485 - DNA, 30 bp, Artificial Sequence
  Synthetic oligonucleotide
gtaccgctaacggccgagctatccatcgaa

SEQ ID NO: 58486 - DNA, 30 bp, Artificial Sequence
  Synthetic oligonucleotide
tgcgctggccagagatatccgtagatcgaa

SEQ ID NO: 58487 - DNA, 30 bp, Artificial Sequence
  Synthetic oligonucleotide
ctcgtagggcagttgtatttaaaactcgaa

SEQ ID NO: 58488 - DNA, 30 bp, Artificial Sequence
  Synthetic oligonucleotide
acaagggaagaatttaatcgtaatcaggaa

SEQ ID NO: 58489 - DNA, 30 bp, Artificial Sequence
  Synthetic oligonucleotide
gaacctaactagccctccaatcgcgaggaa

SEQ ID NO: 58490 - DNA, 30 bp, Artificial Sequence
  Synthetic oligonucleotide
tcgtggacatctgccagtagcgctgaggaa

SEQ ID NO: 58491 - DNA, 30 bp, Artificial Sequence
  Synthetic oligonucleotide
gccagagagtgcaccatgaaagcgtaggaa

SEQ ID NO: 58492 - DNA, 30 bp, Artificial Sequence
  Synthetic oligonucleotide
tgagggtggtccaaacgcatctaaacggaa

SEQ ID NO: 58493 - DNA, 30 bp, Artificial Sequence
  Synthetic oligonucleotide
ctatatctagcggcgggtgacacaacggaa

SEQ ID NO: 58494 - DNA, 30 bp, Artificial Sequence
  Synthetic oligonucleotide
agctcggacagtaagacccgcgccacggaa

SEQ ID NO: 58495 - DNA, 30 bp, Artificial Sequence
  Synthetic oligonucleotide
gcaaaccacgacgtggaagaggctacggaa

SEQ ID NO: 58496 - DNA, 30 bp, Artificial Sequence
  Synthetic oligonucleotide
acggaaaccaggagatctaagggtacggaa

SEQ ID NO: 58497 - DNA, 30 bp, Artificial Sequence
  Synthetic oligonucleotide
caagtacatttacaactacttgcgccggaa

SEQ ID NO: 58498 - DNA, 30 bp, Artificial Sequence
  Synthetic oligonucleotide
agatgctaggaccccaggtattaagcggaa

SEQ ID NO: 58499 - DNA, 30 bp, Artificial Sequence
  Synthetic oligonucleotide
gtggcggatcctaatccacaacactcggaa

SEQ ID NO: 58500 - DNA, 30 bp, Artificial Sequence
  Synthetic oligonucleotide
gagggggaaagcgtcggtgttgactcggaa

SEQ ID NO: 58501 - DNA, 30 bp, Artificial Sequence
  Synthetic oligonucleotide
agcccaacgtacaagggaagcctctcggaa

SEQ ID NO: 58502 - DNA, 30 bp, Artificial Sequence
  Synthetic oligonucleotide
ccaaacgtataggttggttcataaagggaa

SEQ ID NO: 58503 - DNA, 30 bp, Artificial Sequence
  Synthetic oligonucleotide
gtatcccagatacgccttccgacaagggaa

SEQ ID NO: 58504 - DNA, 30 bp, Artificial Sequence
  Synthetic oligonucleotide
atatggaggggaaagaggcatgagagggaa

SEQ ID NO: 58505 - DNA, 30 bp, Artificial Sequence
  Synthetic oligonucleotide
ggccgatacgtctgtgaggaggttagggaa

SEQ ID NO: 58506 - DNA, 30 bp, Artificial Sequence
  Synthetic oligonucleotide
acgtacttcaaccgcgtaggtattcgggaa

SEQ ID NO: 58507 - DNA, 30 bp, Artificial Sequence
  Synthetic oligonucleotide
tttagcaaggtacaccacggcaacggggaa

SEQ ID NO: 58508 - DNA, 30 bp, Artificial Sequence
  Synthetic oligonucleotide
tgggcccagccgcaatcacgttgtggggaa

SEQ ID NO: 58509 - DNA, 30 bp, Artificial Sequence
  Synthetic oligonucleotide
agccgggcctacattcaagtctcatgggaa

SEQ ID NO: 58510 - DNA, 30 bp, Artificial Sequence
  Synthetic oligonucleotide
tgggaagaacacaaggtacacctttgggaa

SEQ ID NO: 58511 - DNA, 30 bp, Artificial Sequence
  Synthetic oligonucleotide
atccatcgagttacgcgctcggagatggaa

SEQ ID NO: 58512 - DNA, 30 bp, Artificial Sequence
  Synthetic oligonucleotide
actcgtgccatctaaactcgtcggctggaa

SEQ ID NO: 58513 - DNA, 30 bp, Artificial Sequence
  Synthetic oligonucleotide
ggtacactattgatgttactaggagtggaa

SEQ ID NO: 58514 - DNA, 30 bp, Artificial Sequence
  Synthetic oligonucleotide
tgcgggctaatgaagcatatgaacttggaa

SEQ ID NO: 58515 - DNA, 30 bp, Artificial Sequence
  Synthetic oligonucleotide
cgtatctacccggaacgacatgtcttggaa

SEQ ID NO: 58516 - DNA, 30 bp, Artificial Sequence
  Synthetic oligonucleotide
cgaaaggcctttaggtaggcctcaaatgaa

SEQ ID NO: 58517 - DNA, 30 bp, Artificial Sequence
  Synthetic oligonucleotide
tcgaggtcccaaagaaaaagaattaatgaa

SEQ ID NO: 58518 - DNA, 30 bp, Artificial Sequence
  Synthetic oligonucleotide
gccatcggtcttgaaccgaaatagcatgaa

SEQ ID NO: 58519 - DNA, 30 bp, Artificial Sequence
  Synthetic oligonucleotide
gagggcaattatgatgtgcgggttcatgaa

SEQ ID NO: 58520 - DNA, 30 bp, Artificial Sequence
  Synthetic oligonucleotide
gtcaataatgacgtcactccaagatatgaa

SEQ ID NO: 58521 - DNA, 30 bp, Artificial Sequence
  Synthetic oligonucleotide
cccttgtgagcccaagcgtgactatatgaa

SEQ ID NO: 58522 - DNA, 30 bp, Artificial Sequence
  Synthetic oligonucleotide
cacgggaaggcgcgtcattgcaagtatgaa

SEQ ID NO: 58523 - DNA, 30 bp, Artificial Sequence
  Synthetic oligonucleotide
tcagaactgaatgatgcctgaggaactgaa

SEQ ID NO: 58524 - DNA, 30 bp, Artificial Sequence
  Synthetic oligonucleotide
acggagaccctgaagttcacaagtcctgaa

SEQ ID NO: 58525 - DNA, 30 bp, Artificial Sequence
  Synthetic oligonucleotide
cagtagattcttgaatagtagctgtctgaa

SEQ ID NO: 58526 - DNA, 30 bp, Artificial Sequence
  Synthetic oligonucleotide
gccaatagacacacccaggtcaccagtgaa

SEQ ID NO: 58527 - DNA, 30 bp, Artificial Sequence
  Synthetic oligonucleotide
gagagaaagttaaaagtagcgagcagtgaa

SEQ ID NO: 58528 - DNA, 30 bp, Artificial Sequence
  Synthetic oligonucleotide
tcacgtgaaggaacaatcctgccgcgtgaa

SEQ ID NO: 58529 - DNA, 30 bp, Artificial Sequence
  Synthetic oligonucleotide
cgtcgatatctgcgaaaccgcttatgtgaa

SEQ ID NO: 58530 - DNA, 30 bp, Artificial Sequence
  Synthetic oligonucleotide
aggtggacgcaataaaacgtaataattgaa

SEQ ID NO: 58531 - DNA, 30 bp, Artificial Sequence
  Synthetic oligonucleotide
atgtacccatatactgaaacaagcattgaa

SEQ ID NO: 58532 - DNA, 30 bp, Artificial Sequence
  Synthetic oligonucleotide
atagtaggattcagaaggctggcagttgaa

SEQ ID NO: 58533 - DNA, 30 bp, Artificial Sequence
  Synthetic oligonucleotide
gtgtaaactaaaaggtatacggaaaaataa

SEQ ID NO: 58534 - DNA, 30 bp, Artificial Sequence
  Synthetic oligonucleotide
cgtctataaatctagcagtcacacaaataa

SEQ ID NO: 58535 - DNA, 30 bp, Artificial Sequence
  Synthetic oligonucleotide
gtgcaatgcattggaattgcgccccaataa

SEQ ID NO: 58536 - DNA, 30 bp, Artificial Sequence
  Synthetic oligonucleotide
gggatctccgaccctagatcggcccaataa

SEQ ID NO: 58537 - DNA, 30 bp, Artificial Sequence
  Synthetic oligonucleotide
tcagatcgaagtgaaggtctctacgaataa

SEQ ID NO: 58538 - DNA, 30 bp, Artificial Sequence
  Synthetic oligonucleotide
gtcagcacggacgggtacatggtggaataa

SEQ ID NO: 58539 - DNA, 30 bp, Artificial Sequence
  Synthetic oligonucleotide
tgacataatggtgaatcgcccacataataa

SEQ ID NO: 58540 - DNA, 30 bp, Artificial Sequence
  Synthetic oligonucleotide
aggggtcaagtgcataataactgtgcataa

SEQ ID NO: 58541 - DNA, 30 bp, Artificial Sequence
  Synthetic oligonucleotide
gtgcacctacgagagccgagctactcataa

SEQ ID NO: 58542 - DNA, 30 bp, Artificial Sequence
  Synthetic oligonucleotide
gaaacgcgcgaaccataccttggctcataa

SEQ ID NO: 58543 - DNA, 30 bp, Artificial Sequence
  Synthetic oligonucleotide
agaagtaggcgaatgtaatctgagtcataa

SEQ ID NO: 58544 - DNA, 30 bp, Artificial Sequence
  Synthetic oligonucleotide
aaatcacagacaagtgtcgaagtgtcataa

SEQ ID NO: 58545 - DNA, 30 bp, Artificial Sequence
  Synthetic oligonucleotide
aaatagggacaaatgcatcacgttagataa

SEQ ID NO: 58546 - DNA, 30 bp, Artificial Sequence
  Synthetic oligonucleotide
acatgattacttcagtacaccatccgataa

SEQ ID NO: 58547 - DNA, 30 bp, Artificial Sequence
  Synthetic oligonucleotide
gcggtcacagccagtagggccatccgataa

SEQ ID NO: 58548 - DNA, 30 bp, Artificial Sequence
  Synthetic oligonucleotide
aattgggagtaagacctaggcaaaggataa

SEQ ID NO: 58549 - DNA, 30 bp, Artificial Sequence
  Synthetic oligonucleotide
gcatgacttcaaacaaccaactgaggataa

SEQ ID NO: 58550 - DNA, 30 bp, Artificial Sequence
  Synthetic oligonucleotide
aaaagggggtctctgtagaggtaatgataa

SEQ ID NO: 58551 - DNA, 30 bp, Artificial Sequence
  Synthetic oligonucleotide
taaaagaacgcgatatgcaccggaatataa

SEQ ID NO: 58552 - DNA, 30 bp, Artificial Sequence
  Synthetic oligonucleotide
cgacctccttcgaaatgctacgtcatataa

SEQ ID NO: 58553 - DNA, 30 bp, Artificial Sequence
  Synthetic oligonucleotide
agggaaacgggttgtcggatcgcattataa

SEQ ID NO: 58554 - DNA, 30 bp, Artificial Sequence
  Synthetic oligonucleotide
agtgctaccggcggaacccctgcaaactaa

SEQ ID NO: 58555 - DNA, 30 bp, Artificial Sequence
  Synthetic oligonucleotide
cgatcatccaggcttatgtatagaaactaa

SEQ ID NO: 58556 - DNA, 30 bp, Artificial Sequence
  Synthetic oligonucleotide
atgcgtcatagaatcgcccaaaagaactaa

SEQ ID NO: 58557 - DNA, 30 bp, Artificial Sequence
  Synthetic oligonucleotide
cggaaatactaaatagtcatccaagactaa

SEQ ID NO: 58558 - DNA, 30 bp, Artificial Sequence
  Synthetic oligonucleotide
aagccaaattaccggtcgtgggccgactaa

SEQ ID NO: 58559 - DNA, 30 bp, Artificial Sequence
  Synthetic oligonucleotide
gatcaaacatggggttgccgagtcgactaa

SEQ ID NO: 58560 - DNA, 30 bp, Artificial Sequence
  Synthetic oligonucleotide
ggacataaggtgcggcagagttaaacctaa

SEQ ID NO: 58561 - DNA, 30 bp, Artificial Sequence
  Synthetic oligonucleotide
acttgacagcggagacaagatcatacctaa

SEQ ID NO: 58562 - DNA, 30 bp, Artificial Sequence
  Synthetic oligonucleotide
ccttaggaaaagtggaattatgaaccctaa

SEQ ID NO: 58563 - DNA, 30 bp, Artificial Sequence
  Synthetic oligonucleotide
taccaaacatcgacgacacgtggaccctaa

SEQ ID NO: 58564 - DNA, 30 bp, Artificial Sequence
  Synthetic oligonucleotide
tcgaattagaaagaagtgaataaggcctaa

SEQ ID NO: 58565 - DNA, 30 bp, Artificial Sequence
  Synthetic oligonucleotide
tcgagtatcgtggagttgcaaatgtcctaa

SEQ ID NO: 58566 - DNA, 30 bp, Artificial Sequence
  Synthetic oligonucleotide
agggcattacgagtgttttctagttcctaa

SEQ ID NO: 58567 - DNA, 30 bp, Artificial Sequence
  Synthetic oligonucleotide
accattgctagtacaggatccaacagctaa

SEQ ID NO: 58568 - DNA, 30 bp, Artificial Sequence
  Synthetic oligonucleotide
atacgagcgcatataacgcgagggagctaa

SEQ ID NO: 58569 - DNA, 30 bp, Artificial Sequence
  Synthetic oligonucleotide
tcatggattcacacctagaagtatagctaa

SEQ ID NO: 58570 - DNA, 30 bp, Artificial Sequence
  Synthetic oligonucleotide
gacgtggaaggcgtccagcgatgagtctaa

SEQ ID NO: 58571 - DNA, 30 bp, Artificial Sequence
  Synthetic oligonucleotide
attgcttaacaaaaagtattgcgcaagtaa

SEQ ID NO: 58572 - DNA, 30 bp, Artificial Sequence
  Synthetic oligonucleotide
tcgcacgatgtctccgggaagaaacagtaa

SEQ ID NO: 58573 - DNA, 30 bp, Artificial Sequence
  Synthetic oligonucleotide
taacagcgtgcaaatggcaggcattcgtaa

SEQ ID NO: 58574 - DNA, 30 bp, Artificial Sequence
  Synthetic oligonucleotide
tagttcaagggcaaatgtcgggatcggtaa

SEQ ID NO: 58575 - DNA, 30 bp, Artificial Sequence
  Synthetic oligonucleotide
cataaagagtcgtaataaagcgccgggtaa

SEQ ID NO: 58576 - DNA, 30 bp, Artificial Sequence
  Synthetic oligonucleotide
atccccagtgacaaagcggtttaggggtaa

SEQ ID NO: 58577 - DNA, 30 bp, Artificial Sequence
  Synthetic oligonucleotide
cgtcatcaactggggttaatgagcgtgtaa

SEQ ID NO: 58578 - DNA, 30 bp, Artificial Sequence
  Synthetic oligonucleotide
agaggtaacgccatactgaaccaacattaa

SEQ ID NO: 58579 - DNA, 30 bp, Artificial Sequence
  Synthetic oligonucleotide
tcgaaatgaatctccgtcgcctaacattaa

SEQ ID NO: 58580 - DNA, 30 bp, Artificial Sequence
  Synthetic oligonucleotide
aggaccgtggaaaccgagatcgattattaa

SEQ ID NO: 58581 - DNA, 30 bp, Artificial Sequence
  Synthetic oligonucleotide
tagggagggccgaagaccaggataacttaa

SEQ ID NO: 58582 - DNA, 30 bp, Artificial Sequence
  Synthetic oligonucleotide
agggcattcgtcaccagcggtctcccttaa

SEQ ID NO: 58583 - DNA, 30 bp, Artificial Sequence
  Synthetic oligonucleotide
agaggggcacccgtagaatgactaagttaa

SEQ ID NO: 58584 - DNA, 30 bp, Artificial Sequence
  Synthetic oligonucleotide
agtcaaaacaccacagaggtacacagttaa

SEQ ID NO: 58585 - DNA, 30 bp, Artificial Sequence
  Synthetic oligonucleotide
gaggtcttcgagaacgaacaagacagttaa

SEQ ID NO: 58586 - DNA, 30 bp, Artificial Sequence
  Synthetic oligonucleotide
agggacatcatgtgctgaagggcccgttaa

SEQ ID NO: 58587 - DNA, 30 bp, Artificial Sequence
  Synthetic oligonucleotide
cttgatcagtggagaaaagggctccgttaa

SEQ ID NO: 58588 - DNA, 30 bp, Artificial Sequence
  Synthetic oligonucleotide
tcggcggatgcgtgcaattctcctggttaa

SEQ ID NO: 58589 - DNA, 30 bp, Artificial Sequence
  Synthetic oligonucleotide
caaagtcaagcacgctaaacctcatgttaa

SEQ ID NO: 58590 - DNA, 30 bp, Artificial Sequence
  Synthetic oligonucleotide
ccggctggccagttgacaaggaagtgttaa

SEQ ID NO: 58591 - DNA, 30 bp, Artificial Sequence
  Synthetic oligonucleotide
cgcttacggtgcaaaggtatggatatttaa

SEQ ID NO: 58592 - DNA, 30 bp, Artificial Sequence
  Synthetic oligonucleotide
gcacgaaccttcggcgataactacctttaa

SEQ ID NO: 58593 - DNA, 30 bp, Artificial Sequence
  Synthetic oligonucleotide
cgaaactaatcgtagatggaccgattttaa

SEQ ID NO: 58594 - DNA, 30 bp, Artificial Sequence
  Synthetic oligonucleotide
attgacggaacgataggccaaaacttttaa

SEQ ID NO: 58595 - DNA, 30 bp, Artificial Sequence
  Synthetic oligonucleotide
ctgtgctaatgcacgaggtctccacaaaca

SEQ ID NO: 58596 - DNA, 30 bp, Artificial Sequence
  Synthetic oligonucleotide
cagacaatggcgtgctgggttagtcaaaca

SEQ ID NO: 58597 - DNA, 30 bp, Artificial Sequence
  Synthetic oligonucleotide
tggcttacctagggggatatacgagaaaca

SEQ ID NO: 58598 - DNA, 31 bp, Artificial Sequence
  Synthetic oligonucleotide
atttagtagggcatataataaaaccgaaaca

SEQ ID NO: 58599 - DNA, 30 bp, Artificial Sequence
  Synthetic oligonucleotide
tgaaaggccaaggcttcttaaactgaaaca

SEQ ID NO: 58600 - DNA, 31 bp, Artificial Sequence
  Synthetic oligonucleotide
aggctgcctagattggacggtaggataaaca

SEQ ID NO: 58601 - DNA, 30 bp, Artificial Sequence
  Synthetic oligonucleotide
ctacgatatagcaggagagcccagtaaaca

SEQ ID NO: 58602 - DNA, 30 bp, Artificial Sequence
  Synthetic oligonucleotide
ggagggagccataagtaataagagtaaaca

SEQ ID NO: 58603 - DNA, 30 bp, Artificial Sequence
  Synthetic oligonucleotide
cagcactcaaaggaaaggaagacgtaaaca

SEQ ID NO: 58604 - DNA, 30 bp, Artificial Sequence
  Synthetic oligonucleotide
ttatactcagaagaactaacaccgtaaaca

SEQ ID NO: 58605 - DNA, 30 bp, Artificial Sequence
  Synthetic oligonucleotide
gaggcaatcttgcgtaaggagtggtaaaca

SEQ ID NO: 58606 - DNA, 30 bp, Artificial Sequence
  Synthetic oligonucleotide
ttaaggaagggagccttgcgtcacacaaca

SEQ ID NO: 58607 - DNA, 30 bp, Artificial Sequence
  Synthetic oligonucleotide
gctacgccgactgcattgagggacacaaca

SEQ ID NO: 58608 - DNA, 30 bp, Artificial Sequence
  Synthetic oligonucleotide
tggagactatcgagtttatgcttgacaaca

SEQ ID NO: 58609 - DNA, 30 bp, Artificial Sequence
  Synthetic oligonucleotide
tggccaagcacaactgcgtgtttgacaaca

SEQ ID NO: 58610 - DNA, 30 bp, Artificial Sequence
  Synthetic oligonucleotide
catcgagtgattcctagaaccggtacaaca

SEQ ID NO: 58611 - DNA, 30 bp, Artificial Sequence
  Synthetic oligonucleotide
ggcacaattttagctcagcagctggcaaca

SEQ ID NO: 58612 - DNA, 30 bp, Artificial Sequence
  Synthetic oligonucleotide
cgaaaggtagtcagtgctcaagctgcaaca

SEQ ID NO: 58613 - DNA, 30 bp, Artificial Sequence
  Synthetic oligonucleotide
gccgggacacatctcgcacagacctcaaca

SEQ ID NO: 58614 - DNA, 30 bp, Artificial Sequence
  Synthetic oligonucleotide
gggaaatgacaagggaagccgaggtcaaca

SEQ ID NO: 58615 - DNA, 30 bp, Artificial Sequence
  Synthetic oligonucleotide
acgcggacaaacgcgccaaaatgttcaaca

SEQ ID NO: 58616 - DNA, 30 bp, Artificial Sequence
  Synthetic oligonucleotide
caggaaaccagtgttatgtctgagcgaaca

SEQ ID NO: 58617 - DNA, 30 bp, Artificial Sequence
  Synthetic oligonucleotide
aaagtatctcaggggggcagtaacggaaca

SEQ ID NO: 58618 - DNA, 30 bp, Artificial Sequence
  Synthetic oligonucleotide
aagacgcgcgataaaatcgatagttgaaca

SEQ ID NO: 58619 - DNA, 30 bp, Artificial Sequence
  Synthetic oligonucleotide
tcagcacttcgtacctaacgcccaataaca

SEQ ID NO: 58620 - DNA, 30 bp, Artificial Sequence
  Synthetic oligonucleotide
cgtgcaggaacaggttgaattcgaataaca

SEQ ID NO: 58621 - DNA, 30 bp, Artificial Sequence
  Synthetic oligonucleotide
aagcgggcacattaatgcatcgcgataaca

SEQ ID NO: 58622 - DNA, 30 bp, Artificial Sequence
  Synthetic oligonucleotide
gagcactggcggtgacgagtgcatataaca

SEQ ID NO: 58623 - DNA, 30 bp, Artificial Sequence
  Synthetic oligonucleotide
cattcactgatggaaccgactgatctaaca

SEQ ID NO: 58624 - DNA, 30 bp, Artificial Sequence
  Synthetic oligonucleotide
gtgggggcactgaatgcgaggtgagtaaca

SEQ ID NO: 58625 - DNA, 30 bp, Artificial Sequence
  Synthetic oligonucleotide
accggagaagtcaccccggatctagtaaca

SEQ ID NO: 58626 - DNA, 30 bp, Artificial Sequence
  Synthetic oligonucleotide
cgggcgtattatgcgtaccaggtggtaaca

SEQ ID NO: 58627 - DNA, 30 bp, Artificial Sequence
  Synthetic oligonucleotide
tgaaccatcacggaagccagagctgtaaca

SEQ ID NO: 58628 - DNA, 30 bp, Artificial Sequence
  Synthetic oligonucleotide
cagtaggaaaaaatgcatgtcgtgcacaca

SEQ ID NO: 58629 - DNA, 30 bp, Artificial Sequence
  Synthetic oligonucleotide
cggggatcaaaacaggaccatagtcacaca

SEQ ID NO: 58630 - DNA, 30 bp, Artificial Sequence
  Synthetic oligonucleotide
ggctttgtttcagggcaataaggagacaca

SEQ ID NO: 58631 - DNA, 30 bp, Artificial Sequence
  Synthetic oligonucleotide
agaacagccaggcccggtagagaggacaca

SEQ ID NO: 58632 - DNA, 30 bp, Artificial Sequence
  Synthetic oligonucleotide
taagtcaagtgaatgcggatccggtacaca

SEQ ID NO: 58633 - DNA, 30 bp, Artificial Sequence
  Synthetic oligonucleotide
aaggtatgggagacaaaaggccaaaccaca

SEQ ID NO: 58634 - DNA, 30 bp, Artificial Sequence
  Synthetic oligonucleotide
tgtgaacggaagctataactgggaaccaca

SEQ ID NO: 58635 - DNA, 30 bp, Artificial Sequence
  Synthetic oligonucleotide
catgcggaattgagccccgtccggaccaca

SEQ ID NO: 58636 - DNA, 30 bp, Artificial Sequence
  Synthetic oligonucleotide
ttggccacacacttaaccaccgataccaca

SEQ ID NO: 58637 - DNA, 30 bp, Artificial Sequence
  Synthetic oligonucleotide
tgttgctaaatacaataagccatccccaca

SEQ ID NO: 58638 - DNA, 30 bp, Artificial Sequence
  Synthetic oligonucleotide
tcaatcgttgcccgtgggtagcatgccaca

SEQ ID NO: 58639 - DNA, 30 bp, Artificial Sequence
  Synthetic oligonucleotide
tgacctaagatccatagattcactagcaca

SEQ ID NO: 58640 - DNA, 30 bp, Artificial Sequence
  Synthetic oligonucleotide
tgagcagccactcattagtcagctagcaca

SEQ ID NO: 58641 - DNA, 30 bp, Artificial Sequence
  Synthetic oligonucleotide
ttaatgggatcaatttccagatgtagcaca

SEQ ID NO: 58642 - DNA, 29 bp, Artificial Sequence
  Synthetic oligonucleotide
gggaataaaccggactcaattatcgcaca

SEQ ID NO: 58643 - DNA, 30 bp, Artificial Sequence
  Synthetic oligonucleotide
attggccaggtgacgtgaccctacggcaca

SEQ ID NO: 58644 - DNA, 30 bp, Artificial Sequence
  Synthetic oligonucleotide
agtggttcaatagccactccggcatgcaca

SEQ ID NO: 58645 - DNA, 30 bp, Artificial Sequence
  Synthetic oligonucleotide
acccggaacccgtggagaagggacatcaca

SEQ ID NO: 58646 - DNA, 30 bp, Artificial Sequence
  Synthetic oligonucleotide
acaatggtatgcaaatcgtacactgtcaca

SEQ ID NO: 58647 - DNA, 30 bp, Artificial Sequence
  Synthetic oligonucleotide
gttggcaatcttccagaggtagacaagaca

SEQ ID NO: 58648 - DNA, 30 bp, Artificial Sequence
  Synthetic oligonucleotide
atcgcaaggtaaccagagcaaaggaagaca

SEQ ID NO: 58649 - DNA, 30 bp, Artificial Sequence
  Synthetic oligonucleotide
cgggggttaaggtttaagaagtgtaagaca

SEQ ID NO: 58650 - DNA, 30 bp, Artificial Sequence
  Synthetic oligonucleotide
ccaagggacggtagctcgacctagcagaca

SEQ ID NO: 58651 - DNA, 30 bp, Artificial Sequence
  Synthetic oligonucleotide
gcagaagttcggtagacaccttcagagaca

SEQ ID NO: 58652 - DNA, 30 bp, Artificial Sequence
  Synthetic oligonucleotide
aattgcgcgccgtaatacagaaacgagaca

SEQ ID NO: 58653 - DNA, 30 bp, Artificial Sequence
  Synthetic oligonucleotide
ctctccaggacatccagatcgaccgagaca

SEQ ID NO: 58654 - DNA, 30 bp, Artificial Sequence
  Synthetic oligonucleotide
cgttcgtcgtgcgaaacccggatttagaca

SEQ ID NO: 58655 - DNA, 30 bp, Artificial Sequence
  Synthetic oligonucleotide
atgtcaccggagatggcttgcgatacgaca

SEQ ID NO: 58656 - DNA, 30 bp, Artificial Sequence
  Synthetic oligonucleotide
catgcaagggaggaccgagttaggccgaca

SEQ ID NO: 58657 - DNA, 30 bp, Artificial Sequence
  Synthetic oligonucleotide
aggtagcggtcaatgcggataagtgcgaca

SEQ ID NO: 58658 - DNA, 30 bp, Artificial Sequence
  Synthetic oligonucleotide
tcgcggttatgaagagcccgtattgcgaca

SEQ ID NO: 58659 - DNA, 30 bp, Artificial Sequence
  Synthetic oligonucleotide
gaattacgacaaaaatacatgagatcgaca

SEQ ID NO: 58660 - DNA, 30 bp, Artificial Sequence
  Synthetic oligonucleotide
atagatcaatatttaatacgcctgtcgaca

SEQ ID NO: 58661 - DNA, 30 bp, Artificial Sequence
  Synthetic oligonucleotide
ccatgcacgaaggatattattgtaaggaca

SEQ ID NO: 58662 - DNA, 30 bp, Artificial Sequence
  Synthetic oligonucleotide
acgttcacacagaaaggcgccggcaggaca

SEQ ID NO: 58663 - DNA, 30 bp, Artificial Sequence
  Synthetic oligonucleotide
ataggaggcactataaccccatcgaggaca

SEQ ID NO: 58664 - DNA, 30 bp, Artificial Sequence
  Synthetic oligonucleotide
gggctggcctaggttcaaacacaagggaca

SEQ ID NO: 58665 - DNA, 30 bp, Artificial Sequence
  Synthetic oligonucleotide
agggtaattcgttcaacgtttcaagggaca

SEQ ID NO: 58666 - DNA, 30 bp, Artificial Sequence
  Synthetic oligonucleotide
gtcgactttacgtgtacatcagtagggaca

SEQ ID NO: 58667 - DNA, 30 bp, Artificial Sequence
  Synthetic oligonucleotide
attgaacgataccgtgaaggcttcgggaca

SEQ ID NO: 58668 - DNA, 30 bp, Artificial Sequence
  Synthetic oligonucleotide
tggatgggcaattacggggaaagggggaca

SEQ ID NO: 58669 - DNA, 30 bp, Artificial Sequence
  Synthetic oligonucleotide
acgtatatcgcatgttagtaaagcatgaca

SEQ ID NO: 58670 - DNA, 30 bp, Artificial Sequence
  Synthetic oligonucleotide
ccatcagtggtgtgaaaagtagtactgaca

SEQ ID NO: 58671 - DNA, 31 bp, Artificial Sequence
  Synthetic oligonucleotide
tggatctgtagtcgaggtacacggcctgaca

SEQ ID NO: 58672 - DNA, 30 bp, Artificial Sequence
  Synthetic oligonucleotide
ggaccaagtaaggttaagtaccgcttgaca

SEQ ID NO: 58673 - DNA, 30 bp, Artificial Sequence
  Synthetic oligonucleotide
ccataaataattagcagttccatcttgaca

SEQ ID NO: 58674 - DNA, 30 bp, Artificial Sequence
  Synthetic oligonucleotide
cggtcgtctaaagtcaccgacatcaataca

SEQ ID NO: 58675 - DNA, 30 bp, Artificial Sequence
  Synthetic oligonucleotide
cgggttggtctatagcgaagggccactaca

SEQ ID NO: 58676 - DNA, 31 bp, Artificial Sequence
  Synthetic oligonucleotide
gaagaaggaaaccgcgcttccgatgagtaca

SEQ ID NO: 58677 - DNA, 30 bp, Artificial Sequence
  Synthetic oligonucleotide
acgatccgcttggcacgagatgtacgtaca

SEQ ID NO: 58678 - DNA, 30 bp, Artificial Sequence
  Synthetic oligonucleotide
ctacaataagtttaaaatggacagggtaca

SEQ ID NO: 58679 - DNA, 30 bp, Artificial Sequence
  Synthetic oligonucleotide
ggcagggcaaccttagacaacttgggtaca

SEQ ID NO: 58680 - DNA, 30 bp, Artificial Sequence
  Synthetic oligonucleotide
tgtcccgctagtaacccaaaacactgtaca

SEQ ID NO: 58681 - DNA, 30 bp, Artificial Sequence
  Synthetic oligonucleotide
tctatactagcgtaaacgggtgactgtaca

SEQ ID NO: 58682 - DNA, 30 bp, Artificial Sequence
  Synthetic oligonucleotide
cacagtgcgatctagtgaaaatgttgtaca

SEQ ID NO: 58683 - DNA, 30 bp, Artificial Sequence
  Synthetic oligonucleotide
cctgctaagtgtccaggtcatgtatttaca

SEQ ID NO: 58684 - DNA, 30 bp, Artificial Sequence
  Synthetic oligonucleotide
cctgaaaggaccggaccattgggcaaacca

SEQ ID NO: 58685 - DNA, 31 bp, Artificial Sequence
  Synthetic oligonucleotide
aggaatatagcattcttaggaacataaacca

SEQ ID NO: 58686 - DNA, 30 bp, Artificial Sequence
  Synthetic oligonucleotide
ttgatagagaataaacccggatgccaacca

SEQ ID NO: 58687 - DNA, 30 bp, Artificial Sequence
  Synthetic oligonucleotide
catctcagacattccactacatgggaacca

SEQ ID NO: 58688 - DNA, 30 bp, Artificial Sequence
  Synthetic oligonucleotide
ggaatatctgataagggacgataataacca

SEQ ID NO: 58689 - DNA, 30 bp, Artificial Sequence
  Synthetic oligonucleotide
gtggtcgtcacaggtagaaactcgtaacca

SEQ ID NO: 58690 - DNA, 30 bp, Artificial Sequence
  Synthetic oligonucleotide
gtcgaggggaagatgcgtggtgaggcacca

SEQ ID NO: 58691 - DNA, 30 bp, Artificial Sequence
  Synthetic oligonucleotide
gggcaccccccttgaaaactggtgagacca

SEQ ID NO: 58692 - DNA, 30 bp, Artificial Sequence
  Synthetic oligonucleotide
gataaagcttgcgaagcaaagagtagacca

SEQ ID NO: 58693 - DNA, 30 bp, Artificial Sequence
  Synthetic oligonucleotide
cgactgcaaaattaaagaatgggacgacca

SEQ ID NO: 58694 - DNA, 30 bp, Artificial Sequence
  Synthetic oligonucleotide
taggactctaggactaaaccaccccgacca

SEQ ID NO: 58695 - DNA, 30 bp, Artificial Sequence
  Synthetic oligonucleotide
gggagagccgacattaatgattggcgacca

SEQ ID NO: 58696 - DNA, 30 bp, Artificial Sequence
  Synthetic oligonucleotide
aggtgagaagcggcggccctgagtcgacca

SEQ ID NO: 58697 - DNA, 30 bp, Artificial Sequence
  Synthetic oligonucleotide
aagtgatgcaatcgagccacgcgaatacca

SEQ ID NO: 58698 - DNA, 30 bp, Artificial Sequence
  Synthetic oligonucleotide
tctggtcggggagacatacgtggaatacca

SEQ ID NO: 58699 - DNA, 30 bp, Artificial Sequence
  Synthetic oligonucleotide
aacaccaagtcgtgacacccaggtatacca

SEQ ID NO: 58700 - DNA, 30 bp, Artificial Sequence
  Synthetic oligonucleotide
atggtaagcgctccccaatctgataaccca

SEQ ID NO: 58701 - DNA, 30 bp, Artificial Sequence
  Synthetic oligonucleotide
gtgaggtgaagccgatcaggtgaagaccca

SEQ ID NO: 58702 - DNA, 30 bp, Artificial Sequence
  Synthetic oligonucleotide
gggccagtggacccgactgttctagaccca

SEQ ID NO: 58703 - DNA, 30 bp, Artificial Sequence
  Synthetic oligonucleotide
agcgtatcaaggcttgacattaatgaccca

SEQ ID NO: 58704 - DNA, 30 bp, Artificial Sequence
  Synthetic oligonucleotide
gagacagtgtggagtctaagacagtaccca

SEQ ID NO: 58705 - DNA, 30 bp, Artificial Sequence
  Synthetic oligonucleotide
cgtaaatgtgaggtctataacagttcccca

SEQ ID NO: 58706 - DNA, 30 bp, Artificial Sequence
  Synthetic oligonucleotide
caggagcgtgagagcgggattgcgagccca

SEQ ID NO: 58707 - DNA, 30 bp, Artificial Sequence
  Synthetic oligonucleotide
gaggcggtcagagatcagactcgctgccca

SEQ ID NO: 58708 - DNA, 30 bp, Artificial Sequence
  Synthetic oligonucleotide
gaagagcaattgtctaggcgtacaatccca

SEQ ID NO: 58709 - DNA, 30 bp, Artificial Sequence
  Synthetic oligonucleotide
acgtctgcgctatccagagagccactccca

SEQ ID NO: 58710 - DNA, 30 bp, Artificial Sequence
  Synthetic oligonucleotide
acgggagggccggacgtatcttccttccca

SEQ ID NO: 58711 - DNA, 30 bp, Artificial Sequence
  Synthetic oligonucleotide
cgtcgataaccaatgtgtgtccatttccca

SEQ ID NO: 58712 - DNA, 30 bp, Artificial Sequence
  Synthetic oligonucleotide
ggcataactctgatcagatactataagcca

SEQ ID NO: 58713 - DNA, 30 bp, Artificial Sequence
  Synthetic oligonucleotide
gctgaagaggatcatgtatgcaccgagcca

SEQ ID NO: 58714 - DNA, 30 bp, Artificial Sequence
  Synthetic oligonucleotide
actgaccatttaaaacccgtcaaggagcca

SEQ ID NO: 58715 - DNA, 30 bp, Artificial Sequence
  Synthetic oligonucleotide
agttacagagtcacgagcggcccatagcca

SEQ ID NO: 58716 - DNA, 30 bp, Artificial Sequence
  Synthetic oligonucleotide
ctagctaacacagatgtgtatgcatagcca

SEQ ID NO: 58717 - DNA, 30 bp, Artificial Sequence
  Synthetic oligonucleotide
attgaatgaacaggtgaaaggtcaacgcca

SEQ ID NO: 58718 - DNA, 30 bp, Artificial Sequence
  Synthetic oligonucleotide
tgtaagtgccgagataattgcgaaccgcca

SEQ ID NO: 58719 - DNA, 30 bp, Artificial Sequence
  Synthetic oligonucleotide
gttacgagggttctgcaagggataccgcca

SEQ ID NO: 58720 - DNA, 30 bp, Artificial Sequence
  Synthetic oligonucleotide
cgtatgtaggcatacaccgtcgatccgcca

SEQ ID NO: 58721 - DNA, 30 bp, Artificial Sequence
  Synthetic oligonucleotide
agaggcgaggaatttaacgcgcgcgcgcca

SEQ ID NO: 58722 - DNA, 30 bp, Artificial Sequence
  Synthetic oligonucleotide
ccagccaaaatctgcttcagcaactcgcca

SEQ ID NO: 58723 - DNA, 30 bp, Artificial Sequence
  Synthetic oligonucleotide
ccggaacttataagcgtggtgcgcgggcca

SEQ ID NO: 58724 - DNA, 30 bp, Artificial Sequence
  Synthetic oligonucleotide
tgtgaagtgacggtggataaaaaggggcca

SEQ ID NO: 58725 - DNA, 30 bp, Artificial Sequence
  Synthetic oligonucleotide
gaataaccggtcaaaaacaaaagggggcca

SEQ ID NO: 58726 - DNA, 30 bp, Artificial Sequence
  Synthetic oligonucleotide
acaatctggagggcagacggtctgatgcca

SEQ ID NO: 58727 - DNA, 30 bp, Artificial Sequence
  Synthetic oligonucleotide
caatttcagggtcaaagtggtagtctgcca

SEQ ID NO: 58728 - DNA, 30 bp, Artificial Sequence
  Synthetic oligonucleotide
gtcagggcgataaccgtgagatacgatcca

SEQ ID NO: 58729 - DNA, 30 bp, Artificial Sequence
  Synthetic oligonucleotide
caatccatggtgcgtacaagaccgactcca

SEQ ID NO: 58730 - DNA, 30 bp, Artificial Sequence
  Synthetic oligonucleotide
ctgacaaccagcacgttactcgtccctcca

SEQ ID NO: 58731 - DNA, 30 bp, Artificial Sequence
  Synthetic oligonucleotide
gtgagaaagtgtcagaagtgtgaagctcca

SEQ ID NO: 58732 - DNA, 30 bp, Artificial Sequence
  Synthetic oligonucleotide
ttgacaagtgaaaagattaaggcagctcca

SEQ ID NO: 58733 - DNA, 30 bp, Artificial Sequence
  Synthetic oligonucleotide
aaggcacaagtactggatccgggaggtcca

SEQ ID NO: 58734 - DNA, 30 bp, Artificial Sequence
  Synthetic oligonucleotide
cattacaatggaaatcacttaataggtcca

SEQ ID NO: 58735 - DNA, 30 bp, Artificial Sequence
  Synthetic oligonucleotide
gcaaagtggaacgagtattcgactggtcca

SEQ ID NO: 58736 - DNA, 30 bp, Artificial Sequence
  Synthetic oligonucleotide
gaatcatgaggcgaaggtggtgaatgtcca

SEQ ID NO: 58737 - DNA, 30 bp, Artificial Sequence
  Synthetic oligonucleotide
aacggaagaagcggatggcatgtaaaagca

SEQ ID NO: 58738 - DNA, 30 bp, Artificial Sequence
  Synthetic oligonucleotide
tacggggggcagataagcccagggcaagca

SEQ ID NO: 58739 - DNA, 30 bp, Artificial Sequence
  Synthetic oligonucleotide
cttaaaactgtcggcagataacatcaagca

SEQ ID NO: 58740 - DNA, 30 bp, Artificial Sequence
  Synthetic oligonucleotide
aggagccaggtgtatagtgggggagaagca

SEQ ID NO: 58741 - DNA, 30 bp, Artificial Sequence
  Synthetic oligonucleotide
catgggggatgagtgacccccgaataagca

SEQ ID NO: 58742 - DNA, 30 bp, Artificial Sequence
  Synthetic oligonucleotide
atgaggcgcgtcacttgccattaataagca

SEQ ID NO: 58743 - DNA, 30 bp, Artificial Sequence
  Synthetic oligonucleotide
aaggtttcaaaagcaggttgaacataagca

SEQ ID NO: 58744 - DNA, 30 bp, Artificial Sequence
  Synthetic oligonucleotide
gcgctcaaaccatcgtgaccgcgataagca

SEQ ID NO: 58745 - DNA, 30 bp, Artificial Sequence
  Synthetic oligonucleotide
tggcgtgttagtacaaacccggtttaagca

SEQ ID NO: 58746 - DNA, 30 bp, Artificial Sequence
  Synthetic oligonucleotide
cgccacgcctcttggccgactgtttaagca

SEQ ID NO: 58747 - DNA, 30 bp, Artificial Sequence
  Synthetic oligonucleotide
ctaacagtacacccggatagtttaacagca

SEQ ID NO: 58748 - DNA, 30 bp, Artificial Sequence
  Synthetic oligonucleotide
cgtgttggcatatacaaaagccgcacagca

SEQ ID NO: 58749 - DNA, 30 bp, Artificial Sequence
  Synthetic oligonucleotide
gcactaactcggaagacgacattaccagca

SEQ ID NO: 58750 - DNA, 30 bp, Artificial Sequence
  Synthetic oligonucleotide
ccgtaatgccgcgttctcgaagtgccagca

SEQ ID NO: 58751 - DNA, 30 bp, Artificial Sequence
  Synthetic oligonucleotide
ctcggccgactcgtgtgccttcagtcagca

SEQ ID NO: 58752 - DNA, 30 bp, Artificial Sequence
  Synthetic oligonucleotide
taacgctccgttaagggtggtgcaagagca

SEQ ID NO: 58753 - DNA, 30 bp, Artificial Sequence
  Synthetic oligonucleotide
aggtggaggtattaggggaaattaggagca

SEQ ID NO: 58754 - DNA, 30 bp, Artificial Sequence
  Synthetic oligonucleotide
atcgaaacacgttcgatcacaattggagca

SEQ ID NO: 58755 - DNA, 30 bp, Artificial Sequence
  Synthetic oligonucleotide
ggcagggccctgagcgaaatcggcatagca

SEQ ID NO: 58756 - DNA, 30 bp, Artificial Sequence
  Synthetic oligonucleotide
tcacagcctgggcataagcaatagatagca

SEQ ID NO: 58757 - DNA, 30 bp, Artificial Sequence
  Synthetic oligonucleotide
gaaagatgacggatataatcacgcctagca

SEQ ID NO: 58758 - DNA, 30 bp, Artificial Sequence
  Synthetic oligonucleotide
taacggcgcggtgaggttattagtctagca

SEQ ID NO: 58759 - DNA, 30 bp, Artificial Sequence
  Synthetic oligonucleotide
tgcagacacatccttccagccgtagtagca

SEQ ID NO: 58760 - DNA, 30 bp, Artificial Sequence
  Synthetic oligonucleotide
cgtccaagcagtaccaaactggctttagca

SEQ ID NO: 58761 - DNA, 30 bp, Artificial Sequence
  Synthetic oligonucleotide
gtgccgtgagccgtagagtgtagtttagca

SEQ ID NO: 58762 - DNA, 30 bp, Artificial Sequence
  Synthetic oligonucleotide
gcgccataacaggttgcataagcaaacgca

SEQ ID NO: 58763 - DNA, 30 bp, Artificial Sequence
  Synthetic oligonucleotide
gtcacgcgagatgtaatggggctaaacgca

SEQ ID NO: 58764 - DNA, 30 bp, Artificial Sequence
  Synthetic oligonucleotide
cataatcataaatatatgatgaacaacgca

SEQ ID NO: 58765 - DNA, 30 bp, Artificial Sequence
  Synthetic oligonucleotide
agagtttatgaaaaggaacatcgcaacgca

SEQ ID NO: 58766 - DNA, 29 bp, Artificial Sequence
  Synthetic oligonucleotide
ccgggggtggagagtatagatgtaacgca

SEQ ID NO: 58767 - DNA, 30 bp, Artificial Sequence
  Synthetic oligonucleotide
tgtgagaagtcagaggggacctgtcacgca

SEQ ID NO: 58768 - DNA, 30 bp, Artificial Sequence
  Synthetic oligonucleotide
cagacgtaacaccagtcggaaccttacgca

SEQ ID NO: 58769 - DNA, 30 bp, Artificial Sequence
  Synthetic oligonucleotide
acataggatatcaaagtcagaaagaccgca

SEQ ID NO: 58770 - DNA, 30 bp, Artificial Sequence
  Synthetic oligonucleotide
gacattatagcgaagagtcaatacagcgca

SEQ ID NO: 58771 - DNA, 30 bp, Artificial Sequence
  Synthetic oligonucleotide
acctgagcctacactatgtgcgctcgcgca

SEQ ID NO: 58772 - DNA, 30 bp, Artificial Sequence
  Synthetic oligonucleotide
cctaaacagatcgtacctcatcgaggcgca

SEQ ID NO: 58773 - DNA, 30 bp, Artificial Sequence
  Synthetic oligonucleotide
cacgggatccgctattgcgtcgggggcgca

SEQ ID NO: 58774 - DNA, 30 bp, Artificial Sequence
  Synthetic oligonucleotide
ggtctcgtcggatcgtaaaacttttgcgca

SEQ ID NO: 58775 - DNA, 30 bp, Artificial Sequence
  Synthetic oligonucleotide
tcaagaaagtaaacatcttgatagctcgca

SEQ ID NO: 58776 - DNA, 30 bp, Artificial Sequence
  Synthetic oligonucleotide
gggtaccatgcgtcaggcctacatctcgca

SEQ ID NO: 58777 - DNA, 30 bp, Artificial Sequence
  Synthetic oligonucleotide
gaagcctggggggttcacaaacaagtcgca

SEQ ID NO: 58778 - DNA, 31 bp, Artificial Sequence
  Synthetic oligonucleotide
gcggggccgagccaggtgcaccggagtcgca

SEQ ID NO: 58779 - DNA, 30 bp, Artificial Sequence
  Synthetic oligonucleotide
atactgagttcggaaggacacgacttcgca

SEQ ID NO: 58780 - DNA, 30 bp, Artificial Sequence
  Synthetic oligonucleotide
tcgtgtctcatgtcgtaagataatttcgca

SEQ ID NO: 58781 - DNA, 30 bp, Artificial Sequence
  Synthetic oligonucleotide
ggagattcgagctagtactacaaaaaggca

SEQ ID NO: 58782 - DNA, 30 bp, Artificial Sequence
  Synthetic oligonucleotide
ccatatgacgaagagggatttaaaaaggca

SEQ ID NO: 58783 - DNA, 30 bp, Artificial Sequence
  Synthetic oligonucleotide
acgaggtatgaagctgtgcccgcaaaggca

SEQ ID NO: 58784 - DNA, 30 bp, Artificial Sequence
  Synthetic oligonucleotide
tgtatgtcatacaacattaactcaaaggca

SEQ ID NO: 58785 - DNA, 30 bp, Artificial Sequence
  Synthetic oligonucleotide
aagctaacataagagtggtcgtctcaggca

SEQ ID NO: 58786 - DNA, 30 bp, Artificial Sequence
  Synthetic oligonucleotide
tagattacatacgtcccaagtgccgaggca

SEQ ID NO: 58787 - DNA, 30 bp, Artificial Sequence
  Synthetic oligonucleotide
tgctgataggggcggatgagtaggacggca

SEQ ID NO: 58788 - DNA, 30 bp, Artificial Sequence
  Synthetic oligonucleotide
tcaatcctcaaagaataattagaagcggca

SEQ ID NO: 58789 - DNA, 30 bp, Artificial Sequence
  Synthetic oligonucleotide
gtaagaggaaccaatccgcataggtcggca

SEQ ID NO: 58790 - DNA, 30 bp, Artificial Sequence
  Synthetic oligonucleotide
gtgtcgaagggaagagatggtgtaagggca

SEQ ID NO: 58791 - DNA, 30 bp, Artificial Sequence
  Synthetic oligonucleotide
ttacgtaacatagtgcgccaaacacgggca

SEQ ID NO: 58792 - DNA, 30 bp, Artificial Sequence
  Synthetic oligonucleotide
accttggggggccatgatgtgggtggggca

SEQ ID NO: 58793 - DNA, 30 bp, Artificial Sequence
  Synthetic oligonucleotide
tgcggcgactagaggtccgaatgatgggca

SEQ ID NO: 58794 - DNA, 30 bp, Artificial Sequence
  Synthetic oligonucleotide
cctaaatttgggaccaacggggtaatggca

SEQ ID NO: 58795 - DNA, 30 bp, Artificial Sequence
  Synthetic oligonucleotide
catatgacttcaagaatcgagtaagtggca

SEQ ID NO: 58796 - DNA, 30 bp, Artificial Sequence
  Synthetic oligonucleotide
tacaatgcaataaattgtaggggcgtggca

SEQ ID NO: 58797 - DNA, 30 bp, Artificial Sequence
  Synthetic oligonucleotide
acagggcacgtttcagaccattccttggca

SEQ ID NO: 58798 - DNA, 30 bp, Artificial Sequence
  Synthetic oligonucleotide
gcgttccacgaggggcaaggctggttggca

SEQ ID NO: 58799 - DNA, 30 bp, Artificial Sequence
  Synthetic oligonucleotide
caaggaaaactcggaactagctttgatgca

SEQ ID NO: 58800 - DNA, 30 bp, Artificial Sequence
  Synthetic oligonucleotide
tcgaggcaatctagactgacacaccctgca

SEQ ID NO: 58801 - DNA, 30 bp, Artificial Sequence
  Synthetic oligonucleotide
agcctagagggcacgtactccacagctgca

SEQ ID NO: 58802 - DNA, 30 bp, Artificial Sequence
  Synthetic oligonucleotide
accaagaattcaggaaaataacgcgctgca

SEQ ID NO: 58803 - DNA, 30 bp, Artificial Sequence
  Synthetic oligonucleotide
tcgacactatacctgccccgatgtgctgca

SEQ ID NO: 58804 - DNA, 30 bp, Artificial Sequence
  Synthetic oligonucleotide
agaaccgtcagtccaattacgaggagtgca

SEQ ID NO: 58805 - DNA, 30 bp, Artificial Sequence
  Synthetic oligonucleotide
acgtcaccggggtataaaagtgttagtgca

SEQ ID NO: 58806 - DNA, 30 bp, Artificial Sequence
  Synthetic oligonucleotide
gggcagaggtcgctttcctgcaaaggtgca

SEQ ID NO: 58807 - DNA, 30 bp, Artificial Sequence
  Synthetic oligonucleotide
gggggccgtaatatcgtaagggaccttgca

SEQ ID NO: 58808 - DNA, 30 bp, Artificial Sequence
  Synthetic oligonucleotide
accccgccggaatcacgatatcgcgttgca

SEQ ID NO: 58809 - DNA, 30 bp, Artificial Sequence
  Synthetic oligonucleotide
gtgtccaagttagctgtcagagagtttgca

SEQ ID NO: 58810 - DNA, 30 bp, Artificial Sequence
  Synthetic oligonucleotide
ggagtagagagacaggtggaaaataaatca

SEQ ID NO: 58811 - DNA, 30 bp, Artificial Sequence
  Synthetic oligonucleotide
aggtccagtctataaggagctatccaatca

SEQ ID NO: 58812 - DNA, 30 bp, Artificial Sequence
  Synthetic oligonucleotide
aggaacgagttcacggccgaaagggaatca

SEQ ID NO: 58813 - DNA, 30 bp, Artificial Sequence
  Synthetic oligonucleotide
gccaagtggtcaaaaggaaagacgacatca

SEQ ID NO: 58814 - DNA, 30 bp, Artificial Sequence
  Synthetic oligonucleotide
gcctggaccggatataattaacaaagatca

SEQ ID NO: 58815 - DNA, 30 bp, Artificial Sequence
  Synthetic oligonucleotide
aaaagcgcgatcagtccacgaaggcgatca

SEQ ID NO: 58816 - DNA, 30 bp, Artificial Sequence
  Synthetic oligonucleotide
atggcgcatacagtttcgcaagtaggatca

SEQ ID NO: 58817 - DNA, 30 bp, Artificial Sequence
  Synthetic oligonucleotide
aaggccctgcaaccactcaccttctgatca

SEQ ID NO: 58818 - DNA, 30 bp, Artificial Sequence
  Synthetic oligonucleotide
cggtaaactgtaatataccgaggtatatca

SEQ ID NO: 58819 - DNA, 30 bp, Artificial Sequence
  Synthetic oligonucleotide
cacggcctctaaacaactgcaggcctatca

SEQ ID NO: 58820 - DNA, 30 bp, Artificial Sequence
  Synthetic oligonucleotide
catgtgcggaagcagtgaagtgagctatca

SEQ ID NO: 58821 - DNA, 30 bp, Artificial Sequence
  Synthetic oligonucleotide
cttcagatagatggaaagaaatgagtatca

SEQ ID NO: 58822 - DNA, 30 bp, Artificial Sequence
  Synthetic oligonucleotide
cggagtatcggcgaaccgtacatagtatca

SEQ ID NO: 58823 - DNA, 30 bp, Artificial Sequence
  Synthetic oligonucleotide
tcaggtaaatacactcatcgattcaactca

SEQ ID NO: 58824 - DNA, 30 bp, Artificial Sequence
  Synthetic oligonucleotide
gtgtgagccgcgagggatcgagatgactca

SEQ ID NO: 58825 - DNA, 30 bp, Artificial Sequence
  Synthetic oligonucleotide
aacaccgggcaagaagtggctggctactca

SEQ ID NO: 58826 - DNA, 30 bp, Artificial Sequence
  Synthetic oligonucleotide
cctgattaaacaaagatgctaataccctca

SEQ ID NO: 58827 - DNA, 30 bp, Artificial Sequence
  Synthetic oligonucleotide
gggctaaccgtaactcgacacgtcccctca

SEQ ID NO: 58828 - DNA, 30 bp, Artificial Sequence
  Synthetic oligonucleotide
agaagtgctacggggggtgggtacgcctca

SEQ ID NO: 58829 - DNA, 30 bp, Artificial Sequence
  Synthetic oligonucleotide
gaacgactcacaagactgcactgatcctca

SEQ ID NO: 58830 - DNA, 30 bp, Artificial Sequence
  Synthetic oligonucleotide
cggaaattgcgatagcttcaatcgtcctca

SEQ ID NO: 58831 - DNA, 30 bp, Artificial Sequence
  Synthetic oligonucleotide
ggctaaatctaataactgagaaaaagctca

SEQ ID NO: 58832 - DNA, 30 bp, Artificial Sequence
  Synthetic oligonucleotide
ttcgtaaatacactggtaaagctaagctca

SEQ ID NO: 58833 - DNA, 30 bp, Artificial Sequence
  Synthetic oligonucleotide
cgaccacagtgccaccaacgatagagctca

SEQ ID NO: 58834 - DNA, 30 bp, Artificial Sequence
  Synthetic oligonucleotide
ttagacgaataagatagaaacaaccgctca

SEQ ID NO: 58835 - DNA, 30 bp, Artificial Sequence
  Synthetic oligonucleotide
tcgtaacatgcgtgggtggtagcgcgctca

SEQ ID NO: 58836 - DNA, 30 bp, Artificial Sequence
  Synthetic oligonucleotide
gccagtaacagcaacgtgcggggcatctca

SEQ ID NO: 58837 - DNA, 30 bp, Artificial Sequence
  Synthetic oligonucleotide
ggtgaaaactaaaaagtgcgtggcatctca

SEQ ID NO: 58838 - DNA, 30 bp, Artificial Sequence
  Synthetic oligonucleotide
cgaagattaaaggtgactcatgggatctca

SEQ ID NO: 58839 - DNA, 30 bp, Artificial Sequence
  Synthetic oligonucleotide
agctaacagtgaccgtccgacacgttctca

SEQ ID NO: 58840 - DNA, 30 bp, Artificial Sequence
  Synthetic oligonucleotide
aaccacgtgcgtctagttgaaaccaagtca

SEQ ID NO: 58841 - DNA, 30 bp, Artificial Sequence
  Synthetic oligonucleotide
gaagcggaagggccggtgtcagccaagtca

SEQ ID NO: 58842 - DNA, 30 bp, Artificial Sequence
  Synthetic oligonucleotide
gatcgccccaggggtgtaaatcgcaagtca

SEQ ID NO: 58843 - DNA, 30 bp, Artificial Sequence
  Synthetic oligonucleotide
cgcggtgactgtggttgacctggcaagtca

SEQ ID NO: 58844 - DNA, 30 bp, Artificial Sequence
  Synthetic oligonucleotide
tacgtctccgcaacccggaatcaacagtca

SEQ ID NO: 58845 - DNA, 30 bp, Artificial Sequence
  Synthetic oligonucleotide
gcgatgaaaaacaccattgtagaacagtca

SEQ ID NO: 58846 - DNA, 30 bp, Artificial Sequence
  Synthetic oligonucleotide
agcgccataagcggccgtaattgggagtca

SEQ ID NO: 58847 - DNA, 30 bp, Artificial Sequence
  Synthetic oligonucleotide
gctacaaatgaggagggctactgatagtca

SEQ ID NO: 58848 - DNA, 30 bp, Artificial Sequence
  Synthetic oligonucleotide
agaggggcgtcaacaaatagcgggtagtca

SEQ ID NO: 58849 - DNA, 30 bp, Artificial Sequence
  Synthetic oligonucleotide
tgacagcttatcataaggcatgacacgtca

SEQ ID NO: 58850 - DNA, 30 bp, Artificial Sequence
  Synthetic oligonucleotide
ggtagacagagataggtcacccctacgtca

SEQ ID NO: 58851 - DNA, 30 bp, Artificial Sequence
  Synthetic oligonucleotide
agcttccagagggatcaaaatcaagcgtca

SEQ ID NO: 58852 - DNA, 30 bp, Artificial Sequence
  Synthetic oligonucleotide
cgtacaagggcttaagttatggagaggtca

SEQ ID NO: 58853 - DNA, 30 bp, Artificial Sequence
  Synthetic oligonucleotide
gcggccacacatctaatggcagcgaggtca

SEQ ID NO: 58854 - DNA, 30 bp, Artificial Sequence
  Synthetic oligonucleotide
caggggaccgtgtacgagtcaaggcggtca

SEQ ID NO: 58855 - DNA, 30 bp, Artificial Sequence
  Synthetic oligonucleotide
aggaagcagcaagcatgaggcgtggggtca

SEQ ID NO: 58856 - DNA, 30 bp, Artificial Sequence
  Synthetic oligonucleotide
cgcttgattgataccgagataacatggtca

SEQ ID NO: 58857 - DNA, 30 bp, Artificial Sequence
  Synthetic oligonucleotide
aagatcacatctcagcttcgaaccatgtca

SEQ ID NO: 58858 - DNA, 30 bp, Artificial Sequence
  Synthetic oligonucleotide
gcggttcaacgcggttggcagatcatgtca

SEQ ID NO: 58859 - DNA, 30 bp, Artificial Sequence
  Synthetic oligonucleotide
atatggtacggttggaccctatgagtgtca

SEQ ID NO: 58860 - DNA, 30 bp, Artificial Sequence
  Synthetic oligonucleotide
cgaaaatagttgtacttcttactggtgtca

SEQ ID NO: 58861 - DNA, 30 bp, Artificial Sequence
  Synthetic oligonucleotide
cgacgatcggtagactgcttcgggcattca

SEQ ID NO: 58862 - DNA, 30 bp, Artificial Sequence
  Synthetic oligonucleotide
taacatgcctaataatgggtcgaagattca

SEQ ID NO: 58863 - DNA, 30 bp, Artificial Sequence
  Synthetic oligonucleotide
cggaaggggaccccctatctaaaggattca

SEQ ID NO: 58864 - DNA, 30 bp, Artificial Sequence
  Synthetic oligonucleotide
acggacattcgaggtcatagagcatattca

SEQ ID NO: 58865 - DNA, 30 bp, Artificial Sequence
  Synthetic oligonucleotide
tagcgggtaacgaagtaggtcggctattca

SEQ ID NO: 58866 - DNA, 30 bp, Artificial Sequence
  Synthetic oligonucleotide
agccgacgataattgtaccgaacgtcttca

SEQ ID NO: 58867 - DNA, 30 bp, Artificial Sequence
  Synthetic oligonucleotide
cgtcgctactgatgaagaaagacggtttca

SEQ ID NO: 58868 - DNA, 30 bp, Artificial Sequence
  Synthetic oligonucleotide
acgtcgggatagcgccagttcggtgtttca

SEQ ID NO: 58869 - DNA, 30 bp, Artificial Sequence
  Synthetic oligonucleotide
acactgagctcatagagcagtataaaaaga

SEQ ID NO: 58870 - DNA, 30 bp, Artificial Sequence
  Synthetic oligonucleotide
ctaggatcgtataagtaggataccaaaaga

SEQ ID NO: 58871 - DNA, 30 bp, Artificial Sequence
  Synthetic oligonucleotide
aagatagacacactggaatgtgcgaaaaga

SEQ ID NO: 58872 - DNA, 30 bp, Artificial Sequence
  Synthetic oligonucleotide
agtgaaaccaatttccacccattacaaaga

SEQ ID NO: 58873 - DNA, 30 bp, Artificial Sequence
  Synthetic oligonucleotide
gagtattacccgtataagaatgccgaaaga

SEQ ID NO: 58874 - DNA, 30 bp, Artificial Sequence
  Synthetic oligonucleotide
actgtcggattcgtgaaggggaaataaaga

SEQ ID NO: 58875 - DNA, 30 bp, Artificial Sequence
  Synthetic oligonucleotide
tgacttccagaacatatgcgacagtaaaga

SEQ ID NO: 58876 - DNA, 30 bp, Artificial Sequence
  Synthetic oligonucleotide
ccagtaaggatgtagctcaaacaaccaaga

SEQ ID NO: 58877 - DNA, 30 bp, Artificial Sequence
  Synthetic oligonucleotide
tagggagttcgccaccatgcaaggccaaga

SEQ ID NO: 58878 - DNA, 30 bp, Artificial Sequence
  Synthetic oligonucleotide
tgtaaaactacaccctcccggatcgcaaga

SEQ ID NO: 58879 - DNA, 30 bp, Artificial Sequence
  Synthetic oligonucleotide
cgtacgaaatcctgatgagggcaatcaaga

SEQ ID NO: 58880 - DNA, 30 bp, Artificial Sequence
  Synthetic oligonucleotide
gtgagacagtcacgcatagcggcaagaaga

SEQ ID NO: 58881 - DNA, 30 bp, Artificial Sequence
  Synthetic oligonucleotide
agtgaatttagaaacacaattggacgaaga

SEQ ID NO: 58882 - DNA, 30 bp, Artificial Sequence
  Synthetic oligonucleotide
tgtgtagtctaaacgttgccgagtcgaaga

SEQ ID NO: 58883 - DNA, 30 bp, Artificial Sequence
  Synthetic oligonucleotide
agtaggcactcctgtacaccctagggaaga

SEQ ID NO: 58884 - DNA, 30 bp, Artificial Sequence
  Synthetic oligonucleotide
cggtctcacgatatacctaagaatggaaga

SEQ ID NO: 58885 - DNA, 30 bp, Artificial Sequence
  Synthetic oligonucleotide
taacttgattgaaacaatatgcctggaaga

SEQ ID NO: 58886 - DNA, 30 bp, Artificial Sequence
  Synthetic oligonucleotide
agtcagtgaggggcagctgggatttgaaga

SEQ ID NO: 58887 - DNA, 30 bp, Artificial Sequence
  Synthetic oligonucleotide
cgacttggcataagattaattcgcataaga

SEQ ID NO: 58888 - DNA, 30 bp, Artificial Sequence
  Synthetic oligonucleotide
cacctaagggtgtacacaaaggggataaga

SEQ ID NO: 58889 - DNA, 30 bp, Artificial Sequence
  Synthetic oligonucleotide
ggtcacaggggccgtccgctcagagtaaga

SEQ ID NO: 58890 - DNA, 30 bp, Artificial Sequence
  Synthetic oligonucleotide
tatagcgtagccctgaccttgagcaacaga

SEQ ID NO: 58891 - DNA, 30 bp, Artificial Sequence
  Synthetic oligonucleotide
actacgagccgaattccctaccggaacaga

SEQ ID NO: 58892 - DNA, 30 bp, Artificial Sequence
  Synthetic oligonucleotide
gtaatgaggttgcggtccgggcggaacaga

SEQ ID NO: 58893 - DNA, 30 bp, Artificial Sequence
  Synthetic oligonucleotide
agctgctcatggcgggattcgattaacaga

SEQ ID NO: 58894 - DNA, 30 bp, Artificial Sequence
  Synthetic oligonucleotide
ggtaacgctacggtagccatttcgcacaga

SEQ ID NO: 58895 - DNA, 30 bp, Artificial Sequence
  Synthetic oligonucleotide
agtggttagccgttcaggaaagatcacaga

SEQ ID NO: 58896 - DNA, 30 bp, Artificial Sequence
  Synthetic oligonucleotide
agtaagccgttttggggcatagtagacaga

SEQ ID NO: 58897 - DNA, 30 bp, Artificial Sequence
  Synthetic oligonucleotide
atggtcactggacaaactatgaaggacaga

SEQ ID NO: 58898 - DNA, 30 bp, Artificial Sequence
  Synthetic oligonucleotide
gggactaactaagcatacgggactgacaga

SEQ ID NO: 58899 - DNA, 30 bp, Artificial Sequence
  Synthetic oligonucleotide
ttaaatcggcttgtcgtgaattagtacaga

SEQ ID NO: 58900 - DNA, 30 bp, Artificial Sequence
  Synthetic oligonucleotide
tagccttcgggtaagcggacaccgaccaga

SEQ ID NO: 58901 - DNA, 30 bp, Artificial Sequence
  Synthetic oligonucleotide
caaaagcacgcactgttacactataccaga

SEQ ID NO: 58902 - DNA, 30 bp, Artificial Sequence
  Synthetic oligonucleotide
tcgcccgaaacgatttttatgcgtaccaga

SEQ ID NO: 58903 - DNA, 30 bp, Artificial Sequence
  Synthetic oligonucleotide
gaaaatcgtaagcatgttctcagacccaga

SEQ ID NO: 58904 - DNA, 30 bp, Artificial Sequence
  Synthetic oligonucleotide
ttctgcgaggagagtccccgggcgcccaga

SEQ ID NO: 58905 - DNA, 30 bp, Artificial Sequence
  Synthetic oligonucleotide
cgctgtagcgacataataatcgccgccaga

SEQ ID NO: 58906 - DNA, 30 bp, Artificial Sequence
  Synthetic oligonucleotide
ggggatactgatccaggatatcagtccaga

SEQ ID NO: 58907 - DNA, 30 bp, Artificial Sequence
  Synthetic oligonucleotide
gtccaccagcgcagcttaaaaacgtccaga

SEQ ID NO: 58908 - DNA, 30 bp, Artificial Sequence
  Synthetic oligonucleotide
aatgtgaggtgtgacaaattaagttccaga

SEQ ID NO: 58909 - DNA, 30 bp, Artificial Sequence
  Synthetic oligonucleotide
gcgcgtagcgatgtagatacaaggcgcaga

SEQ ID NO: 58910 - DNA, 30 bp, Artificial Sequence
  Synthetic oligonucleotide
cacaccgcactaattgaacaacggcgcaga

SEQ ID NO: 58911 - DNA, 30 bp, Artificial Sequence
  Synthetic oligonucleotide
tgccccgggtagacacaacgctggcgcaga

SEQ ID NO: 58912 - DNA, 30 bp, Artificial Sequence
  Synthetic oligonucleotide
agagtacgcagagttgaaaaaagaggcaga

SEQ ID NO: 58913 - DNA, 30 bp, Artificial Sequence
  Synthetic oligonucleotide
tcgacagcggctaaaggcataggcggcaga

SEQ ID NO: 58914 - DNA, 30 bp, Artificial Sequence
  Synthetic oligonucleotide
atctagcaagtgagccaggtggagggcaga

SEQ ID NO: 58915 - DNA, 31 bp, Artificial Sequence
  Synthetic oligonucleotide
tgatgatagaatggttcgaagctgtggcaga

SEQ ID NO: 58916 - DNA, 30 bp, Artificial Sequence
  Synthetic oligonucleotide
aaggcaaatcttgagctttgcattggcaga

SEQ ID NO: 58917 - DNA, 30 bp, Artificial Sequence
  Synthetic oligonucleotide
cgcgagtatgcttagatagacacatgcaga

SEQ ID NO: 58918 - DNA, 30 bp, Artificial Sequence
  Synthetic oligonucleotide
accaaggactaaatacaaatcggatgcaga

SEQ ID NO: 58919 - DNA, 30 bp, Artificial Sequence
  Synthetic oligonucleotide
tcgatgtattggactcgccaccactgcaga

SEQ ID NO: 58920 - DNA, 30 bp, Artificial Sequence
  Synthetic oligonucleotide
gccagacgtgtgaatccgcgagggatcaga

SEQ ID NO: 58921 - DNA, 30 bp, Artificial Sequence
  Synthetic oligonucleotide
gtgatagattcaaggaagcgccgtatcaga

SEQ ID NO: 58922 - DNA, 30 bp, Artificial Sequence
  Synthetic oligonucleotide
gcgtatagacaaggaagttcgtcactcaga

SEQ ID NO: 58923 - DNA, 30 bp, Artificial Sequence
  Synthetic oligonucleotide
acctaaggagctgtgatggcgtatctcaga

SEQ ID NO: 58924 - DNA, 30 bp, Artificial Sequence
  Synthetic oligonucleotide
cggaggaatgtgtaatctgcgccagtcaga

SEQ ID NO: 58925 - DNA, 31 bp, Artificial Sequence
  Synthetic oligonucleotide
aaacagtcgatagattatgtgaatagtcaga

SEQ ID NO: 58926 - DNA, 30 bp, Artificial Sequence
  Synthetic oligonucleotide
cggggaagaatcaaagatcttcaaaagaga

SEQ ID NO: 58927 - DNA, 30 bp, Artificial Sequence
  Synthetic oligonucleotide
taataggcaacagtcggaaccgaaaagaga

SEQ ID NO: 58928 - DNA, 30 bp, Artificial Sequence
  Synthetic oligonucleotide
cactctaccgccaagcgagtacatcagaga

SEQ ID NO: 58929 - DNA, 30 bp, Artificial Sequence
  Synthetic oligonucleotide
gagcaagttgttactacattaattcagaga

SEQ ID NO: 58930 - DNA, 30 bp, Artificial Sequence
  Synthetic oligonucleotide
tcgactcccgacctgccggacctagagaga

SEQ ID NO: 58931 - DNA, 30 bp, Artificial Sequence
  Synthetic oligonucleotide
agcgtcgtgttggtaaatggtttagagaga

SEQ ID NO: 58932 - DNA, 30 bp, Artificial Sequence
  Synthetic oligonucleotide
tctaggagccgcaataaactggacgagaga

SEQ ID NO: 58933 - DNA, 30 bp, Artificial Sequence
  Synthetic oligonucleotide
ggttggtggcgtgtggcggcgacatagaga

SEQ ID NO: 58934 - DNA, 30 bp, Artificial Sequence
  Synthetic oligonucleotide
ccgcccggacaaggattacccgggtagaga

SEQ ID NO: 58935 - DNA, 30 bp, Artificial Sequence
  Synthetic oligonucleotide
gacatttgatggatgggcacgcagacgaga

SEQ ID NO: 58936 - DNA, 30 bp, Artificial Sequence
  Synthetic oligonucleotide
gacggcagataatttcacggtggtccgaga

SEQ ID NO: 58937 - DNA, 30 bp, Artificial Sequence
  Synthetic oligonucleotide
gcgtgctcagtatatattgttccatcgaga

SEQ ID NO: 58938 - DNA, 30 bp, Artificial Sequence
  Synthetic oligonucleotide
aggtggatcatcagaccaagaacgtcgaga

SEQ ID NO: 58939 - DNA, 30 bp, Artificial Sequence
  Synthetic oligonucleotide
ggaagaaggcagtcggcaatgaggtcgaga

SEQ ID NO: 58940 - DNA, 30 bp, Artificial Sequence
  Synthetic oligonucleotide
tcgaccaggtcaacagttaatggacggaga

SEQ ID NO: 58941 - DNA, 30 bp, Artificial Sequence
  Synthetic oligonucleotide
tacaggagagccggataagattgacggaga

SEQ ID NO: 58942 - DNA, 30 bp, Artificial Sequence
  Synthetic oligonucleotide
ggtggatggagccttcgtaacaatcggaga

SEQ ID NO: 58943 - DNA, 30 bp, Artificial Sequence
  Synthetic oligonucleotide
cgtgacgactgatggcacttgggtcggaga

SEQ ID NO: 58944 - DNA, 30 bp, Artificial Sequence
  Synthetic oligonucleotide
cttgagtcagatgatgaaactagtgggaga

SEQ ID NO: 58945 - DNA, 30 bp, Artificial Sequence
  Synthetic oligonucleotide
gcggacctagtccttacatctggaatgaga

SEQ ID NO: 58946 - DNA, 30 bp, Artificial Sequence
  Synthetic oligonucleotide
gataggcaggaaattgaagcattaatgaga

SEQ ID NO: 58947 - DNA, 30 bp, Artificial Sequence
  Synthetic oligonucleotide
ggcgcggggagcgggagaccatacatgaga

SEQ ID NO: 58948 - DNA, 30 bp, Artificial Sequence
  Synthetic oligonucleotide
cgatcgatcggtcctgtatatcgcatgaga

SEQ ID NO: 58949 - DNA, 30 bp, Artificial Sequence
  Synthetic oligonucleotide
tagggcgacggtcgcacgtttgagatgaga

SEQ ID NO: 58950 - DNA, 30 bp, Artificial Sequence
  Synthetic oligonucleotide
agttcaacaggtgtcaaacttcgtatgaga

SEQ ID NO: 58951 - DNA, 30 bp, Artificial Sequence
  Synthetic oligonucleotide
tcctaaagaggtggggctggctacctgaga

SEQ ID NO: 58952 - DNA, 30 bp, Artificial Sequence
  Synthetic oligonucleotide
tgcgttaaatgggggaacgaattgctgaga

SEQ ID NO: 58953 - DNA, 30 bp, Artificial Sequence
  Synthetic oligonucleotide
taagaagcccccaaaaatcgcgcattgaga

SEQ ID NO: 58954 - DNA, 30 bp, Artificial Sequence
  Synthetic oligonucleotide
tgggacagaggtcccttgtcgaatttgaga

SEQ ID NO: 58955 - DNA, 30 bp, Artificial Sequence
  Synthetic oligonucleotide
tgacaggccaactatcggtgctcaaataga

SEQ ID NO: 58956 - DNA, 30 bp, Artificial Sequence
  Synthetic oligonucleotide
tagatcgagcgtgaatacgctgagaataga

SEQ ID NO: 58957 - DNA, 30 bp, Artificial Sequence
  Synthetic oligonucleotide
attgaaagtaagattgggcgatacgataga

SEQ ID NO: 58958 - DNA, 30 bp, Artificial Sequence
  Synthetic oligonucleotide
ggaaaaatagtaatcaagatcatcgataga

SEQ ID NO: 58959 - DNA, 30 bp, Artificial Sequence
  Synthetic oligonucleotide
ataaccacgaccaatgaagtggactataga

SEQ ID NO: 58960 - DNA, 30 bp, Artificial Sequence
  Synthetic oligonucleotide
agagagtgcggcgggtgccataggtataga

SEQ ID NO: 58961 - DNA, 30 bp, Artificial Sequence
  Synthetic oligonucleotide
aagggaaaagtctgaatataggtcactaga

SEQ ID NO: 58962 - DNA, 30 bp, Artificial Sequence
  Synthetic oligonucleotide
aacgtacaggtatccctccgaggccctaga

SEQ ID NO: 58963 - DNA, 30 bp, Artificial Sequence
  Synthetic oligonucleotide
agttgcgccaatgagagccctgtccctaga

SEQ ID NO: 58964 - DNA, 30 bp, Artificial Sequence
  Synthetic oligonucleotide
tcgaagacccaatcttggaggtgggctaga

SEQ ID NO: 58965 - DNA, 30 bp, Artificial Sequence
  Synthetic oligonucleotide
agcgtcatgagtgccagtgcatggcgtaga

SEQ ID NO: 58966 - DNA, 30 bp, Artificial Sequence
  Synthetic oligonucleotide
acagaaacgggcctccgttccttgcgtaga

SEQ ID NO: 58967 - DNA, 30 bp, Artificial Sequence
  Synthetic oligonucleotide
tcgaggcaatgctgtcggatttcacttaga

SEQ ID NO: 58968 - DNA, 30 bp, Artificial Sequence
  Synthetic oligonucleotide
gggaccgtcaagatgacaatcgtacttaga

SEQ ID NO: 58969 - DNA, 30 bp, Artificial Sequence
  Synthetic oligonucleotide
cgcgaaaattggcgtagtcgtacccttaga

SEQ ID NO: 58970 - DNA, 30 bp, Artificial Sequence
  Synthetic oligonucleotide
gtgaatcagagtcggcggcgattccttaga

SEQ ID NO: 58971 - DNA, 30 bp, Artificial Sequence
  Synthetic oligonucleotide
cgaggaccatgcttagactttacgcttaga

SEQ ID NO: 58972 - DNA, 30 bp, Artificial Sequence
  Synthetic oligonucleotide
gcaagccaacaagtcaccattatggttaga

SEQ ID NO: 58973 - DNA, 30 bp, Artificial Sequence
  Synthetic oligonucleotide
ccttcaaacacaacggaagaccaatttaga

SEQ ID NO: 58974 - DNA, 30 bp, Artificial Sequence
  Synthetic oligonucleotide
gcacaaaaaactaatagtaagtcgtttaga

SEQ ID NO: 58975 - DNA, 30 bp, Artificial Sequence
  Synthetic oligonucleotide
aggacctatattaatgaggggaataaacga

SEQ ID NO: 58976 - DNA, 30 bp, Artificial Sequence
  Synthetic oligonucleotide
agcaaggaagacagataggtccgttaacga

SEQ ID NO: 58977 - DNA, 30 bp, Artificial Sequence
  Synthetic oligonucleotide
cgcatgggtacgatgacggcgaaggcacga

SEQ ID NO: 58978 - DNA, 30 bp, Artificial Sequence
  Synthetic oligonucleotide
aggtactcggatacggtaacattggcacga

SEQ ID NO: 58979 - DNA, 30 bp, Artificial Sequence
  Synthetic oligonucleotide
ggaccaccagtggtgtgtgatgcttcacga

SEQ ID NO: 58980 - DNA, 30 bp, Artificial Sequence
  Synthetic oligonucleotide
cagactacccatgttggaaagctgagacga

SEQ ID NO: 58981 - DNA, 30 bp, Artificial Sequence
  Synthetic oligonucleotide
cgcttatgccgattattggatgtccgacga

SEQ ID NO: 58982 - DNA, 30 bp, Artificial Sequence
  Synthetic oligonucleotide
atgccacaacaaatgggggaacaaggacga

SEQ ID NO: 58983 - DNA, 30 bp, Artificial Sequence
  Synthetic oligonucleotide
aacgccagagcggcaagtcgctgttgacga

SEQ ID NO: 58984 - DNA, 30 bp, Artificial Sequence
  Synthetic oligonucleotide
gtccttgaaaccgcgaattcagccatacga

SEQ ID NO: 58985 - DNA, 30 bp, Artificial Sequence
  Synthetic oligonucleotide
ggcaccaggtaaccccagacgtggatacga

SEQ ID NO: 58986 - DNA, 30 bp, Artificial Sequence
  Synthetic oligonucleotide
agggatgctggagctaatggagatatacga

SEQ ID NO: 58987 - DNA, 30 bp, Artificial Sequence
  Synthetic oligonucleotide
caaagactatgaatggctcgctctatacga

SEQ ID NO: 58988 - DNA, 30 bp, Artificial Sequence
  Synthetic oligonucleotide
gtagtaaaaggtggagctgaagctgtacga

SEQ ID NO: 58989 - DNA, 30 bp, Artificial Sequence
  Synthetic oligonucleotide
gccagaactggggaggtcatcatattacga

SEQ ID NO: 58990 - DNA, 30 bp, Artificial Sequence
  Synthetic oligonucleotide
gacagggcgctggggagtatgcgtcaccga

SEQ ID NO: 58991 - DNA, 30 bp, Artificial Sequence
  Synthetic oligonucleotide
gtggtaacattgctagtgcaaggcgaccga

SEQ ID NO: 58992 - DNA, 30 bp, Artificial Sequence
  Synthetic oligonucleotide
tggacttgtaaaggtatttgaggggaccga

SEQ ID NO: 58993 - DNA, 30 bp, Artificial Sequence
  Synthetic oligonucleotide
gaaacggactggtgctagaaaatggaccga

SEQ ID NO: 58994 - DNA, 30 bp, Artificial Sequence
  Synthetic oligonucleotide
aacggtgataaggggtcaaaagactaccga

SEQ ID NO: 58995 - DNA, 30 bp, Artificial Sequence
  Synthetic oligonucleotide
tcatgaatgaggtcattcagctcctaccga

SEQ ID NO: 58996 - DNA, 30 bp, Artificial Sequence
  Synthetic oligonucleotide
cgctagaccagagcgcgtctgccaacccga

SEQ ID NO: 58997 - DNA, 30 bp, Artificial Sequence
  Synthetic oligonucleotide
acgtgaatgtatgcgaccgtcagagcccga

SEQ ID NO: 58998 - DNA, 30 bp, Artificial Sequence
  Synthetic oligonucleotide
taagcccacgtgtagccattcttagcccga

SEQ ID NO: 58999 - DNA, 30 bp, Artificial Sequence
  Synthetic oligonucleotide
acggtcacgccaaccagagccgattcccga

SEQ ID NO: 59000 - DNA, 30 bp, Artificial Sequence
  Synthetic oligonucleotide
ggggtggcaaagcgatagaatcagggccga

SEQ ID NO: 59001 - DNA, 30 bp, Artificial Sequence
  Synthetic oligonucleotide
agtaaatcataagtcaagtgagctggccga

SEQ ID NO: 59002 - DNA, 30 bp, Artificial Sequence
  Synthetic oligonucleotide
aggtaatgctaattgggaggctaaatccga

SEQ ID NO: 59003 - DNA, 30 bp, Artificial Sequence
  Synthetic oligonucleotide
ggactcttgcagatgagtgagggcatccga

SEQ ID NO: 59004 - DNA, 31 bp, Artificial Sequence
  Synthetic oligonucleotide
gatcctgggtattgcctggaagctggtccga

SEQ ID NO: 59005 - DNA, 30 bp, Artificial Sequence
  Synthetic oligonucleotide
cgagaaaacaagttgccagcggaattccga

SEQ ID NO: 59006 - DNA, 30 bp, Artificial Sequence
  Synthetic oligonucleotide
cggggaagatggtgaaacgggcaaaagcga

SEQ ID NO: 59007 - DNA, 30 bp, Artificial Sequence
  Synthetic oligonucleotide
taatagcaatacaagaaaaggaggaagcga

SEQ ID NO: 59008 - DNA, 30 bp, Artificial Sequence
  Synthetic oligonucleotide
accggaagatagtttcagatggctaagcga

SEQ ID NO: 59009 - DNA, 30 bp, Artificial Sequence
  Synthetic oligonucleotide
gccaatgtctggctattgtggcaacagcga

SEQ ID NO: 59010 - DNA, 30 bp, Artificial Sequence
  Synthetic oligonucleotide
cgattaggattatgtttacggaaagagcga

SEQ ID NO: 59011 - DNA, 30 bp, Artificial Sequence
  Synthetic oligonucleotide
agtaacgccggacattgtgatcaggagcga

SEQ ID NO: 59012 - DNA, 30 bp, Artificial Sequence
  Synthetic oligonucleotide
acccatgagcggcgaggcccgagggagcga

SEQ ID NO: 59013 - DNA, 30 bp, Artificial Sequence
  Synthetic oligonucleotide
ccattggtgtagtggcgtcaatgggagcga

SEQ ID NO: 59014 - DNA, 30 bp, Artificial Sequence
  Synthetic oligonucleotide
gctgcattacatacgggaccacaatagcga

SEQ ID NO: 59015 - DNA, 30 bp, Artificial Sequence
  Synthetic oligonucleotide
aaagccagacaagtaagtgtcgtatagcga

SEQ ID NO: 59016 - DNA, 30 bp, Artificial Sequence
  Synthetic oligonucleotide
tgcagataatcaattggcaactcaccgcga

SEQ ID NO: 59017 - DNA, 30 bp, Artificial Sequence
  Synthetic oligonucleotide
tgaccgcgtcgtgaaactaggacgccgcga

SEQ ID NO: 59018 - DNA, 30 bp, Artificial Sequence
  Synthetic oligonucleotide
aattaacggaaccggatcagagtcgcgcga

SEQ ID NO: 59019 - DNA, 30 bp, Artificial Sequence
  Synthetic oligonucleotide
gaaggagtctgcaattacgggggtcggcga

SEQ ID NO: 59020 - DNA, 30 bp, Artificial Sequence
  Synthetic oligonucleotide
gccgaatagaggccacgaagtggtcggcga

SEQ ID NO: 59021 - DNA, 30 bp, Artificial Sequence
  Synthetic oligonucleotide
attcgactggttagaggcggcggagggcga

SEQ ID NO: 59022 - DNA, 30 bp, Artificial Sequence
  Synthetic oligonucleotide
gtcggagtcaggaaaatcgaagtctggcga

SEQ ID NO: 59023 - DNA, 30 bp, Artificial Sequence
  Synthetic oligonucleotide
ggtccgtaggaagtacgctcgcacctgcga

SEQ ID NO: 59024 - DNA, 30 bp, Artificial Sequence
  Synthetic oligonucleotide
gtggatctaactcgttaccacagcgtgcga

SEQ ID NO: 59025 - DNA, 30 bp, Artificial Sequence
  Synthetic oligonucleotide
tagaatggcaacactattcctggtgtgcga

SEQ ID NO: 59026 - DNA, 30 bp, Artificial Sequence
  Synthetic oligonucleotide
cctacatacgtgctcagtagcgtattgcga

SEQ ID NO: 59027 - DNA, 30 bp, Artificial Sequence
  Synthetic oligonucleotide
acatacagtgacaactgaccaaagttgcga

SEQ ID NO: 59028 - DNA, 30 bp, Artificial Sequence
  Synthetic oligonucleotide
cgtttcagaggtttgcggagtgagttgcga

SEQ ID NO: 59029 - DNA, 30 bp, Artificial Sequence
  Synthetic oligonucleotide
gggaaccacgaggggttgtgaaataatcga

SEQ ID NO: 59030 - DNA, 30 bp, Artificial Sequence
  Synthetic oligonucleotide
taagctcacgccggagttaccgccgatcga

SEQ ID NO: 59031 - DNA, 30 bp, Artificial Sequence
  Synthetic oligonucleotide
cgttaggtctctgtggttcaagaggatcga

SEQ ID NO: 59032 - DNA, 30 bp, Artificial Sequence
  Synthetic oligonucleotide
taatggacaagggatggatcccctgatcga

SEQ ID NO: 59033 - DNA, 30 bp, Artificial Sequence
  Synthetic oligonucleotide
ggtgagagcacgtgtgactgccagtatcga

SEQ ID NO: 59034 - DNA, 30 bp, Artificial Sequence
  Synthetic oligonucleotide
atgggtcgatgtcggaaacaattgtatcga

SEQ ID NO: 59035 - DNA, 30 bp, Artificial Sequence
  Synthetic oligonucleotide
accataagctcgatgactacgacttatcga

SEQ ID NO: 59036 - DNA, 30 bp, Artificial Sequence
  Synthetic oligonucleotide
gatcgcatacaactggtgagagagactcga

SEQ ID NO: 59037 - DNA, 30 bp, Artificial Sequence
  Synthetic oligonucleotide
ataaaccaggacccagaccccatgcctcga

SEQ ID NO: 59038 - DNA, 30 bp, Artificial Sequence
  Synthetic oligonucleotide
aaaaaccgtcagtaaattataaacgctcga

SEQ ID NO: 59039 - DNA, 30 bp, Artificial Sequence
  Synthetic oligonucleotide
gtcgaagtgcaacagttacattcggctcga

SEQ ID NO: 59040 - DNA, 30 bp, Artificial Sequence
  Synthetic oligonucleotide
ctctaccagtcaaggaccgataattctcga

SEQ ID NO: 59041 - DNA, 30 bp, Artificial Sequence
  Synthetic oligonucleotide
caggaccctacaacactttaatcgagtcga

SEQ ID NO: 59042 - DNA, 30 bp, Artificial Sequence
  Synthetic oligonucleotide
acaaacaagagacgaagcaactgccgtcga

SEQ ID NO: 59043 - DNA, 30 bp, Artificial Sequence
  Synthetic oligonucleotide
caattgggaagtcaattatgggcaggtcga

SEQ ID NO: 59044 - DNA, 30 bp, Artificial Sequence
  Synthetic oligonucleotide
ataacaactggacacccatcgataggtcga

SEQ ID NO: 59045 - DNA, 30 bp, Artificial Sequence
  Synthetic oligonucleotide
cgcattgggagagagtatggctagtgtcga

SEQ ID NO: 59046 - DNA, 30 bp, Artificial Sequence
  Synthetic oligonucleotide
gcaagagaacaagccctggatggcattcga

SEQ ID NO: 59047 - DNA, 30 bp, Artificial Sequence
  Synthetic oligonucleotide
gaccgacagataggaccacgttcgattcga

SEQ ID NO: 59048 - DNA, 30 bp, Artificial Sequence
  Synthetic oligonucleotide
gggtaacagagggtagaaattgttattcga

SEQ ID NO: 59049 - DNA, 30 bp, Artificial Sequence
  Synthetic oligonucleotide
cgataattacgggatcccacacgtgttcga

SEQ ID NO: 59050 - DNA, 30 bp, Artificial Sequence
  Synthetic oligonucleotide
atacaaggagtgcacatgaggctaaaagga

SEQ ID NO: 59051 - DNA, 30 bp, Artificial Sequence
  Synthetic oligonucleotide
gacccataaccagccgatttcacacaagga

SEQ ID NO: 59052 - DNA, 30 bp, Artificial Sequence
  Synthetic oligonucleotide
aggagtatcgtaaactaatctccgcaagga

SEQ ID NO: 59053 - DNA, 30 bp, Artificial Sequence
  Synthetic oligonucleotide
atgttcgaaagttaagagggatgagaagga

SEQ ID NO: 59054 - DNA, 30 bp, Artificial Sequence
  Synthetic oligonucleotide
atgttcggaaaacccaccaatatcgaagga

SEQ ID NO: 59055 - DNA, 30 bp, Artificial Sequence
  Synthetic oligonucleotide
gggggtaatacagattaaaaagtggaagga

SEQ ID NO: 59056 - DNA, 30 bp, Artificial Sequence
  Synthetic oligonucleotide
acggtcaggcgatatggagtgccttaagga

SEQ ID NO: 59057 - DNA, 30 bp, Artificial Sequence
  Synthetic oligonucleotide
cgtgtgagcggttataaacgacgttaagga

SEQ ID NO: 59058 - DNA, 30 bp, Artificial Sequence
  Synthetic oligonucleotide
aacgtaacagtatgtaagccggaaacagga

SEQ ID NO: 59059 - DNA, 30 bp, Artificial Sequence
  Synthetic oligonucleotide
gggcgaaagggtcatgttagcgacacagga

SEQ ID NO: 59060 - DNA, 30 bp, Artificial Sequence
  Synthetic oligonucleotide
gcatgctagcacggagggatacctacagga

SEQ ID NO: 59061 - DNA, 30 bp, Artificial Sequence
  Synthetic oligonucleotide
tcaaaagatggagaaatcttaaaaccagga

SEQ ID NO: 59062 - DNA, 30 bp, Artificial Sequence
  Synthetic oligonucleotide
cggaccacgaggcccaagcaggcaccagga

SEQ ID NO: 59063 - DNA, 30 bp, Artificial Sequence
  Synthetic oligonucleotide
agagcacctagagagcgtttgagaccagga

SEQ ID NO: 59064 - DNA, 30 bp, Artificial Sequence
  Synthetic oligonucleotide
tgacgaaaggagaatgtgctagaagcagga

SEQ ID NO: 59065 - DNA, 29 bp, Artificial Sequence
  Synthetic oligonucleotide
acgcgataatccgaagtgtcgatgcagga

SEQ ID NO: 59066 - DNA, 30 bp, Artificial Sequence
  Synthetic oligonucleotide
aacaggtacgggagacacttaggctcagga

SEQ ID NO: 59067 - DNA, 30 bp, Artificial Sequence
  Synthetic oligonucleotide
gctggagcttacggtgagattgaaagagga

SEQ ID NO: 59068 - DNA, 30 bp, Artificial Sequence
  Synthetic oligonucleotide
ctcctggatacatacagaaagtccagagga

SEQ ID NO: 59069 - DNA, 30 bp, Artificial Sequence
  Synthetic oligonucleotide
ttgggacagcggatgcccagcttgagagga

SEQ ID NO: 59070 - DNA, 30 bp, Artificial Sequence
  Synthetic oligonucleotide
actcgtggtgcgatatttaataatagagga

SEQ ID NO: 59071 - DNA, 30 bp, Artificial Sequence
  Synthetic oligonucleotide
ggggggccatacgggaagggcgtgcgagga

SEQ ID NO: 59072 - DNA, 30 bp, Artificial Sequence
  Synthetic oligonucleotide
ttcggggaatacataggaataaatcgagga

SEQ ID NO: 59073 - DNA, 30 bp, Artificial Sequence
  Synthetic oligonucleotide
ctggtaacttttctcatcaacaatcgagga

SEQ ID NO: 59074 - DNA, 30 bp, Artificial Sequence
  Synthetic oligonucleotide
tcgccttatgcatcgaaaacacctcgagga

SEQ ID NO: 59075 - DNA, 30 bp, Artificial Sequence
  Synthetic oligonucleotide
gaccgggacgaacaattgggatcgggagga

SEQ ID NO: 59076 - DNA, 30 bp, Artificial Sequence
  Synthetic oligonucleotide
aatggtgagagcccatgcggaattggagga

SEQ ID NO: 59077 - DNA, 30 bp, Artificial Sequence
  Synthetic oligonucleotide
acgactctcaagtgaaaagataaatgagga

SEQ ID NO: 59078 - DNA, 30 bp, Artificial Sequence
  Synthetic oligonucleotide
tctccactgcaaaagtccatggacatagga

SEQ ID NO: 59079 - DNA, 30 bp, Artificial Sequence
  Synthetic oligonucleotide
aggctcacatctgcccagtgcactaacgga

SEQ ID NO: 59080 - DNA, 30 bp, Artificial Sequence
  Synthetic oligonucleotide
ctaggtaggggtctgcggaacaaatacgga

SEQ ID NO: 59081 - DNA, 30 bp, Artificial Sequence
  Synthetic oligonucleotide
gactagggagaagcttggacttcctacgga

SEQ ID NO: 59082 - DNA, 30 bp, Artificial Sequence
  Synthetic oligonucleotide
cacacaaccctccgcggtagcagctacgga

SEQ ID NO: 59083 - DNA, 30 bp, Artificial Sequence
  Synthetic oligonucleotide
actatcacatagcacccaatcaggtacgga

SEQ ID NO: 59084 - DNA, 30 bp, Artificial Sequence
  Synthetic oligonucleotide
ccaccatacacaggaaacggacattacgga

SEQ ID NO: 59085 - DNA, 30 bp, Artificial Sequence
  Synthetic oligonucleotide
cgaaatgtggtcggttgcccatgacccgga

SEQ ID NO: 59086 - DNA, 30 bp, Artificial Sequence
  Synthetic oligonucleotide
ggcccaaggaaccaaagctctagtgccgga

SEQ ID NO: 59087 - DNA, 30 bp, Artificial Sequence
  Synthetic oligonucleotide
acaaggacatccttacgatagatccgcgga

SEQ ID NO: 59088 - DNA, 30 bp, Artificial Sequence
  Synthetic oligonucleotide
cctgatcttagtgaggccagccggcgcgga

SEQ ID NO: 59089 - DNA, 30 bp, Artificial Sequence
  Synthetic oligonucleotide
gcaagaagatacaaataaagtattcgcgga

SEQ ID NO: 59090 - DNA, 30 bp, Artificial Sequence
  Synthetic oligonucleotide
agttcacgaaccactggcaacgttcgcgga

SEQ ID NO: 59091 - DNA, 30 bp, Artificial Sequence
  Synthetic oligonucleotide
ttgggggcaaaaagtagcttggaatgcgga

SEQ ID NO: 59092 - DNA, 30 bp, Artificial Sequence
  Synthetic oligonucleotide
ggaggttggaactcgcaagaggagtgcgga

SEQ ID NO: 59093 - DNA, 30 bp, Artificial Sequence
  Synthetic oligonucleotide
ctgagagtcattactgctggaaaaatcgga

SEQ ID NO: 59094 - DNA, 30 bp, Artificial Sequence
  Synthetic oligonucleotide
gcatggcagacatagaggcgaaccctcgga

SEQ ID NO: 59095 - DNA, 30 bp, Artificial Sequence
  Synthetic oligonucleotide
gacggcgagtgtccgcacattactctcgga

SEQ ID NO: 59096 - DNA, 30 bp, Artificial Sequence
  Synthetic oligonucleotide
ttgtaaaaggggaatagttattccaaggga

SEQ ID NO: 59097 - DNA, 30 bp, Artificial Sequence
  Synthetic oligonucleotide
atgtccgagaggactactgtctagaaggga

SEQ ID NO: 59098 - DNA, 30 bp, Artificial Sequence
  Synthetic oligonucleotide
agccggagtacctgagagtcgacccaggga

SEQ ID NO: 59099 - DNA, 30 bp, Artificial Sequence
  Synthetic oligonucleotide
gcggatagtaaagcagcagacaagtaggga

SEQ ID NO: 59100 - DNA, 30 bp, Artificial Sequence
  Synthetic oligonucleotide
aacttagacagaaacgactctgcgccggga

SEQ ID NO: 59101 - DNA, 30 bp, Artificial Sequence
  Synthetic oligonucleotide
gggctttttgaaaggagagagtgagcggga

SEQ ID NO: 59102 - DNA, 30 bp, Artificial Sequence
  Synthetic oligonucleotide
taaagggtaagcccagcgtggaccgcggga

SEQ ID NO: 59103 - DNA, 30 bp, Artificial Sequence
  Synthetic oligonucleotide
ctcaacggtgagggtgtgacatctgcggga

SEQ ID NO: 59104 - DNA, 30 bp, Artificial Sequence
  Synthetic oligonucleotide
ggtctgaagccagaaatgaaataatcggga

SEQ ID NO: 59105 - DNA, 30 bp, Artificial Sequence
  Synthetic oligonucleotide
attacaaccaggggatggagggtaagggga

SEQ ID NO: 59106 - DNA, 30 bp, Artificial Sequence
  Synthetic oligonucleotide
aaagggcctaacattcggaccaagagggga

SEQ ID NO: 59107 - DNA, 30 bp, Artificial Sequence
  Synthetic oligonucleotide
ggttcgtataagggatacacattgagggga

SEQ ID NO: 59108 - DNA, 30 bp, Artificial Sequence
  Synthetic oligonucleotide
taagaggttccataatgcgctagccgggga

SEQ ID NO: 59109 - DNA, 30 bp, Artificial Sequence
  Synthetic oligonucleotide
agaaccacattgcaaagagaccatcgggga

SEQ ID NO: 59110 - DNA, 30 bp, Artificial Sequence
  Synthetic oligonucleotide
aggtcggcttcctttaataccaaaggggga

SEQ ID NO: 59111 - DNA, 30 bp, Artificial Sequence
  Synthetic oligonucleotide
cgagacacaaaaggcgaacctccaggggga

SEQ ID NO: 59112 - DNA, 31 bp, Artificial Sequence
  Synthetic oligonucleotide
ggatcgtatcacaagtcttagggcttgggga

SEQ ID NO: 59113 - DNA, 30 bp, Artificial Sequence
  Synthetic oligonucleotide
caggggttgtatattaatggcgacatggga

SEQ ID NO: 59114 - DNA, 30 bp, Artificial Sequence
  Synthetic oligonucleotide
catcgtggccagggttccgcaatgctggga

SEQ ID NO: 59115 - DNA, 30 bp, Artificial Sequence
  Synthetic oligonucleotide
ccggactcgaactatatgaaccccgtggga

SEQ ID NO: 59116 - DNA, 30 bp, Artificial Sequence
  Synthetic oligonucleotide
aagcgtgaatggagcaaaaagcttgtggga

SEQ ID NO: 59117 - DNA, 30 bp, Artificial Sequence
  Synthetic oligonucleotide
atagtatgtgcagcagaagagccaaatgga

SEQ ID NO: 59118 - DNA, 30 bp, Artificial Sequence
  Synthetic oligonucleotide
aaggaggtagaagcttgataacccaatgga

SEQ ID NO: 59119 - DNA, 30 bp, Artificial Sequence
  Synthetic oligonucleotide
tggggcattgtgtcagtccccaaacatgga

SEQ ID NO: 59120 - DNA, 30 bp, Artificial Sequence
  Synthetic oligonucleotide
ttagggagaggcactcattgatcacatgga

SEQ ID NO: 59121 - DNA, 30 bp, Artificial Sequence
  Synthetic oligonucleotide
gcaggtgatggttctcgaactaccgatgga

SEQ ID NO: 59122 - DNA, 30 bp, Artificial Sequence
  Synthetic oligonucleotide
atactgctctgagaaaaaatatgttatgga

SEQ ID NO: 59123 - DNA, 30 bp, Artificial Sequence
  Synthetic oligonucleotide
tcacaaaaacgggacgttgacaacactgga

SEQ ID NO: 59124 - DNA, 30 bp, Artificial Sequence
  Synthetic oligonucleotide
tagtgttagaacgagctgtagagcactgga

SEQ ID NO: 59125 - DNA, 30 bp, Artificial Sequence
  Synthetic oligonucleotide
actatccaggagcgtggaggtaagactgga

SEQ ID NO: 59126 - DNA, 30 bp, Artificial Sequence
  Synthetic oligonucleotide
agttagaataacgatcagagaagtactgga

SEQ ID NO: 59127 - DNA, 30 bp, Artificial Sequence
  Synthetic oligonucleotide
cattgcccaggcaaccaatcattagctgga

SEQ ID NO: 59128 - DNA, 30 bp, Artificial Sequence
  Synthetic oligonucleotide
cctaacgcgggccgcgaatgaactgctgga

SEQ ID NO: 59129 - DNA, 30 bp, Artificial Sequence
  Synthetic oligonucleotide
gtcgtagaggtgagtaatgagagtgctgga

SEQ ID NO: 59130 - DNA, 30 bp, Artificial Sequence
  Synthetic oligonucleotide
ggaagacgggatataaattcccatagtgga

SEQ ID NO: 59131 - DNA, 30 bp, Artificial Sequence
  Synthetic oligonucleotide
ggtaaaatgcactgaagagatagtagtgga

SEQ ID NO: 59132 - DNA, 30 bp, Artificial Sequence
  Synthetic oligonucleotide
cggcgacattgtagacgataccgtagtgga

SEQ ID NO: 59133 - DNA, 30 bp, Artificial Sequence
  Synthetic oligonucleotide
gcgtaggcggaatgtattgcccaatgtgga

SEQ ID NO: 59134 - DNA, 30 bp, Artificial Sequence
  Synthetic oligonucleotide
caaggcatcgcaacaagttcggggtgtgga

SEQ ID NO: 59135 - DNA, 30 bp, Artificial Sequence
  Synthetic oligonucleotide
cgaaggccgaagtctcgaatcaatattgga

SEQ ID NO: 59136 - DNA, 30 bp, Artificial Sequence
  Synthetic oligonucleotide
ctccacgagagctagctgaacggacttgga

SEQ ID NO: 59137 - DNA, 30 bp, Artificial Sequence
  Synthetic oligonucleotide
tgacaaacacaaaaacgggaccgtaaatga

SEQ ID NO: 59138 - DNA, 30 bp, Artificial Sequence
  Synthetic oligonucleotide
catagctcgggggggggcagtagagaatga

SEQ ID NO: 59139 - DNA, 30 bp, Artificial Sequence
  Synthetic oligonucleotide
cgaatagctgcgtccgggaacatcgaatga

SEQ ID NO: 59140 - DNA, 30 bp, Artificial Sequence
  Synthetic oligonucleotide
agagtcaaatacgcaatacaaggggaatga

SEQ ID NO: 59141 - DNA, 30 bp, Artificial Sequence
  Synthetic oligonucleotide
tcgcctgcggggaagatcgtcaggtaatga

SEQ ID NO: 59142 - DNA, 30 bp, Artificial Sequence
  Synthetic oligonucleotide
acagtcggtaaatcctcgtaacacccatga

SEQ ID NO: 59143 - DNA, 30 bp, Artificial Sequence
  Synthetic oligonucleotide
tacacttccattggaggaggaactccatga

SEQ ID NO: 59144 - DNA, 30 bp, Artificial Sequence
  Synthetic oligonucleotide
cgagcgatgcgaatccccgaccaagcatga

SEQ ID NO: 59145 - DNA, 30 bp, Artificial Sequence
  Synthetic oligonucleotide
tcgacgggtgtcgatataagaccctcatga

SEQ ID NO: 59146 - DNA, 30 bp, Artificial Sequence
  Synthetic oligonucleotide
gctgtcacgccaagtggcaacagaagatga

SEQ ID NO: 59147 - DNA, 30 bp, Artificial Sequence
  Synthetic oligonucleotide
tcatatccagctgaaatcgtccctagatga

SEQ ID NO: 59148 - DNA, 30 bp, Artificial Sequence
  Synthetic oligonucleotide
gcgagagacgagtctagcgtgacccgatga

SEQ ID NO: 59149 - DNA, 30 bp, Artificial Sequence
  Synthetic oligonucleotide
cgccaatagaatacaagcaccaggcgatga

SEQ ID NO: 59150 - DNA, 30 bp, Artificial Sequence
  Synthetic oligonucleotide
ggctcacaacggagttattgcggaggatga

SEQ ID NO: 59151 - DNA, 30 bp, Artificial Sequence
  Synthetic oligonucleotide
aaaccgtaggcccccaggatgggaggatga

SEQ ID NO: 59152 - DNA, 30 bp, Artificial Sequence
  Synthetic oligonucleotide
aaacgggtacgcgatggtcaggtgggatga

SEQ ID NO: 59153 - DNA, 30 bp, Artificial Sequence
  Synthetic oligonucleotide
tcacaaagtctgtcgagagcattgggatga

SEQ ID NO: 59154 - DNA, 30 bp, Artificial Sequence
  Synthetic oligonucleotide
agagactgcggcgtggtctagggagtatga

SEQ ID NO: 59155 - DNA, 30 bp, Artificial Sequence
  Synthetic oligonucleotide
aaaagcagtgtgcatgcgaacatcaactga

SEQ ID NO: 59156 - DNA, 30 bp, Artificial Sequence
  Synthetic oligonucleotide
tctaaaagctgggggtgaagggttaactga

SEQ ID NO: 59157 - DNA, 30 bp, Artificial Sequence
  Synthetic oligonucleotide
acgtgacagacacgactgcgcacccactga

SEQ ID NO: 59158 - DNA, 30 bp, Artificial Sequence
  Synthetic oligonucleotide
ctcatttagggaggacttaagagagactga

SEQ ID NO: 59159 - DNA, 30 bp, Artificial Sequence
  Synthetic oligonucleotide
cgagagtagtgagcatctgtgttcgactga

SEQ ID NO: 59160 - DNA, 30 bp, Artificial Sequence
  Synthetic oligonucleotide
tagcgccctacctgaggcccaagtgactga

SEQ ID NO: 59161 - DNA, 30 bp, Artificial Sequence
  Synthetic oligonucleotide
aggaaatgttacctgaattcacagacctga

SEQ ID NO: 59162 - DNA, 30 bp, Artificial Sequence
  Synthetic oligonucleotide
ggaacccttggacgacgtggaattacctga

SEQ ID NO: 59163 - DNA, 30 bp, Artificial Sequence
  Synthetic oligonucleotide
ccgattctgagtaggcgataaagccgctga

SEQ ID NO: 59164 - DNA, 30 bp, Artificial Sequence
  Synthetic oligonucleotide
aggagtatgcaaaatacttatgagcgctga

SEQ ID NO: 59165 - DNA, 30 bp, Artificial Sequence
  Synthetic oligonucleotide
cgtctcaatactcgctgaacaagtcgctga

SEQ ID NO: 59166 - DNA, 30 bp, Artificial Sequence
  Synthetic oligonucleotide
accaaagccaggcaaggtcagatgatctga

SEQ ID NO: 59167 - DNA, 30 bp, Artificial Sequence
  Synthetic oligonucleotide
gggctcaaccacttaggaagcttcgtctga

SEQ ID NO: 59168 - DNA, 30 bp, Artificial Sequence
  Synthetic oligonucleotide
cgcagagttaccgcactggatatattctga

SEQ ID NO: 59169 - DNA, 30 bp, Artificial Sequence
  Synthetic oligonucleotide
cgggcctcgaggttctaaggtataaagtga

SEQ ID NO: 59170 - DNA, 30 bp, Artificial Sequence
  Synthetic oligonucleotide
taggtaagtagctatataattactgagtga

SEQ ID NO: 59171 - DNA, 30 bp, Artificial Sequence
  Synthetic oligonucleotide
ccgccaccaggatcagccgtaagtgagtga

SEQ ID NO: 59172 - DNA, 30 bp, Artificial Sequence
  Synthetic oligonucleotide
ccaggggtgggagcggtacacccaacgtga

SEQ ID NO: 59173 - DNA, 30 bp, Artificial Sequence
  Synthetic oligonucleotide
gtacaagagaagttaagggtggtaacgtga

SEQ ID NO: 59174 - DNA, 30 bp, Artificial Sequence
  Synthetic oligonucleotide
aaacttgccagaatgcgcgaacggacgtga

SEQ ID NO: 59175 - DNA, 30 bp, Artificial Sequence
  Synthetic oligonucleotide
cttcggcgaaatgactgcgtgggtccgtga

SEQ ID NO: 59176 - DNA, 30 bp, Artificial Sequence
  Synthetic oligonucleotide
tcggaacgactgcaaggcaattgtccgtga

SEQ ID NO: 59177 - DNA, 30 bp, Artificial Sequence
  Synthetic oligonucleotide
gggcacgaatgaggacatgagatcgcgtga

SEQ ID NO: 59178 - DNA, 30 bp, Artificial Sequence
  Synthetic oligonucleotide
tcgttgtccgcgaaaagatggtaatcgtga

SEQ ID NO: 59179 - DNA, 30 bp, Artificial Sequence
  Synthetic oligonucleotide
tccgtccaggaacatcaaacttgatcgtga

SEQ ID NO: 59180 - DNA, 30 bp, Artificial Sequence
  Synthetic oligonucleotide
tgggcgtgataagggggagactcaaggtga

SEQ ID NO: 59181 - DNA, 30 bp, Artificial Sequence
  Synthetic oligonucleotide
ctcaaatccgcagtacgcgactcagggtga

SEQ ID NO: 59182 - DNA, 30 bp, Artificial Sequence
  Synthetic oligonucleotide
agcgagtaaggtaatacgtcggtactgtga

SEQ ID NO: 59183 - DNA, 30 bp, Artificial Sequence
  Synthetic oligonucleotide
gtaggggaattacaaagggagaatgtgtga

SEQ ID NO: 59184 - DNA, 30 bp, Artificial Sequence
  Synthetic oligonucleotide
tctcggtcaagataggtgcgacagttgtga

SEQ ID NO: 59185 - DNA, 30 bp, Artificial Sequence
  Synthetic oligonucleotide
cttaacgtcgcgagataaacacataattga

SEQ ID NO: 59186 - DNA, 30 bp, Artificial Sequence
  Synthetic oligonucleotide
ttaatgggactaacacataaagaatattga

SEQ ID NO: 59187 - DNA, 30 bp, Artificial Sequence
  Synthetic oligonucleotide
cgtattccaagagctggcattataccttga

SEQ ID NO: 59188 - DNA, 30 bp, Artificial Sequence
  Synthetic oligonucleotide
gcgatgcctatagtgcgcaaccacgcttga

SEQ ID NO: 59189 - DNA, 30 bp, Artificial Sequence
  Synthetic oligonucleotide
cagttgagcgcatagtgaaccaagtcttga

SEQ ID NO: 59190 - DNA, 29 bp, Artificial Sequence
  Synthetic oligonucleotide
atgagcacggatactatcctgcttcttga

SEQ ID NO: 59191 - DNA, 30 bp, Artificial Sequence
  Synthetic oligonucleotide
accacgatctcatccctcaggagcagttga

SEQ ID NO: 59192 - DNA, 30 bp, Artificial Sequence
  Synthetic oligonucleotide
accaaggctaccagataatgaactagttga

SEQ ID NO: 59193 - DNA, 30 bp, Artificial Sequence
  Synthetic oligonucleotide
accgacggccaagggcgcggaagacgttga

SEQ ID NO: 59194 - DNA, 30 bp, Artificial Sequence
  Synthetic oligonucleotide
acaggtcgttgcggggacgacgttcgttga

SEQ ID NO: 59195 - DNA, 30 bp, Artificial Sequence
  Synthetic oligonucleotide
gcaatcactgagtgcaatggtgaaggttga

SEQ ID NO: 59196 - DNA, 30 bp, Artificial Sequence
  Synthetic oligonucleotide
accgtcgtatataagcgatgtgacgtttga

SEQ ID NO: 59197 - DNA, 30 bp, Artificial Sequence
  Synthetic oligonucleotide
agagtatagcagaatcgcctctcaaaaata

SEQ ID NO: 59198 - DNA, 30 bp, Artificial Sequence
  Synthetic oligonucleotide
cgagaggttcccgcgtcagccaaagaaata

SEQ ID NO: 59199 - DNA, 30 bp, Artificial Sequence
  Synthetic oligonucleotide
cgtaacaaatcgtgctgtacgtaagaaata

SEQ ID NO: 59200 - DNA, 30 bp, Artificial Sequence
  Synthetic oligonucleotide
tgggtcgcgagaatggaataaagagaaata

SEQ ID NO: 59201 - DNA, 30 bp, Artificial Sequence
  Synthetic oligonucleotide
agcggtgagaggggagccatgtgagaaata

SEQ ID NO: 59202 - DNA, 30 bp, Artificial Sequence
  Synthetic oligonucleotide
aacggtacgagtttgcgtgactgggaaata

SEQ ID NO: 59203 - DNA, 31 bp, Artificial Sequence
  Synthetic oligonucleotide
cagggaagaaacccgtcactcgacctaaata

SEQ ID NO: 59204 - DNA, 30 bp, Artificial Sequence
  Synthetic oligonucleotide
tacccgcacagacgtgtagctgcctaaata

SEQ ID NO: 59205 - DNA, 30 bp, Artificial Sequence
  Synthetic oligonucleotide
aagtacgaaaacatgccggacagaacaata

SEQ ID NO: 59206 - DNA, 30 bp, Artificial Sequence
  Synthetic oligonucleotide
agataacgtccttctgcgctagtaacaata

SEQ ID NO: 59207 - DNA, 30 bp, Artificial Sequence
  Synthetic oligonucleotide
accaaagttaataaggatatgaacacaata

SEQ ID NO: 59208 - DNA, 30 bp, Artificial Sequence
  Synthetic oligonucleotide
cgaagccgttcacgaacgtaccagacaata

SEQ ID NO: 59209 - DNA, 30 bp, Artificial Sequence
  Synthetic oligonucleotide
aacggctaactaaggtagcatctaccaata

SEQ ID NO: 59210 - DNA, 31 bp, Artificial Sequence
  Synthetic oligonucleotide
ctcgatggggtgaggcatccgtagtgcaata

SEQ ID NO: 59211 - DNA, 30 bp, Artificial Sequence
  Synthetic oligonucleotide
acgcattgcttgtaggcggtaaaaagaata

SEQ ID NO: 59212 - DNA, 30 bp, Artificial Sequence
  Synthetic oligonucleotide
cggcgagtagatgcaattcttggaagaata

SEQ ID NO: 59213 - DNA, 30 bp, Artificial Sequence
  Synthetic oligonucleotide
gggagaatggattctaatcttctgagaata

SEQ ID NO: 59214 - DNA, 30 bp, Artificial Sequence
  Synthetic oligonucleotide
acctaaatcggaacagtgatggcacgaata

SEQ ID NO: 59215 - DNA, 30 bp, Artificial Sequence
  Synthetic oligonucleotide
ttcgacgaaatgcctaattggaaaggaata

SEQ ID NO: 59216 - DNA, 30 bp, Artificial Sequence
  Synthetic oligonucleotide
agggctgacgcacttcggacaggaggaata

SEQ ID NO: 59217 - DNA, 30 bp, Artificial Sequence
  Synthetic oligonucleotide
acggggtgttatctgtttgggcaatgaata

SEQ ID NO: 59218 - DNA, 30 bp, Artificial Sequence
  Synthetic oligonucleotide
aggcgtgcgacgctccaatcgccctgaata

SEQ ID NO: 59219 - DNA, 31 bp, Artificial Sequence
  Synthetic oligonucleotide
tcggtcacgatgtgagcgtatacagctaata

SEQ ID NO: 59220 - DNA, 30 bp, Artificial Sequence
  Synthetic oligonucleotide
tcaatatattaaggcagacccagaaacata

SEQ ID NO: 59221 - DNA, 30 bp, Artificial Sequence
  Synthetic oligonucleotide
ccacgtcgatgggtgagccactggaacata

SEQ ID NO: 59222 - DNA, 30 bp, Artificial Sequence
  Synthetic oligonucleotide
ggataatgcgattgcctgggagataacata

SEQ ID NO: 59223 - DNA, 30 bp, Artificial Sequence
  Synthetic oligonucleotide
caggcactaaactcgacagttttacacata

SEQ ID NO: 59224 - DNA, 30 bp, Artificial Sequence
  Synthetic oligonucleotide
cgaaggacataaatgcactaggaccacata

SEQ ID NO: 59225 - DNA, 30 bp, Artificial Sequence
  Synthetic oligonucleotide
gggccgcgatagaatcgtgtaaaccccata

SEQ ID NO: 59226 - DNA, 30 bp, Artificial Sequence
  Synthetic oligonucleotide
tctcaatcgggcggtgggtccctagccata

SEQ ID NO: 59227 - DNA, 30 bp, Artificial Sequence
  Synthetic oligonucleotide
agcggggagcagttagttatactaagcata

SEQ ID NO: 59228 - DNA, 30 bp, Artificial Sequence
  Synthetic oligonucleotide
gtaactgaagagtgttcgcacaaccgcata

SEQ ID NO: 59229 - DNA, 30 bp, Artificial Sequence
  Synthetic oligonucleotide
cattagtagcagagttaacatcgcatcata

SEQ ID NO: 59230 - DNA, 30 bp, Artificial Sequence
  Synthetic oligonucleotide
ccaacttgaccaacgcaagagtggctcata

SEQ ID NO: 59231 - DNA, 30 bp, Artificial Sequence
  Synthetic oligonucleotide
acccgaagcggatcagaagtttggctcata

SEQ ID NO: 59232 - DNA, 30 bp, Artificial Sequence
  Synthetic oligonucleotide
cgatccaattagtcggggcgacatctcata

SEQ ID NO: 59233 - DNA, 30 bp, Artificial Sequence
  Synthetic oligonucleotide
accagtccttactcaaccatccacgtcata

SEQ ID NO: 59234 - DNA, 30 bp, Artificial Sequence
  Synthetic oligonucleotide
aggtgacactgagacccccgctgcgtcata

SEQ ID NO: 59235 - DNA, 30 bp, Artificial Sequence
  Synthetic oligonucleotide
cgataaagtttcccacctccaagtgtcata

SEQ ID NO: 59236 - DNA, 30 bp, Artificial Sequence
  Synthetic oligonucleotide
tgacggtcccatgaacaggataccaagata

SEQ ID NO: 59237 - DNA, 30 bp, Artificial Sequence
  Synthetic oligonucleotide
aggtaggagagcgtgtgttactagaagata

SEQ ID NO: 59238 - DNA, 30 bp, Artificial Sequence
  Synthetic oligonucleotide
aaagaatcgtggcacgtctgagataagata

SEQ ID NO: 59239 - DNA, 30 bp, Artificial Sequence
  Synthetic oligonucleotide
tgggccagaaagggggatttaaaacagata

SEQ ID NO: 59240 - DNA, 30 bp, Artificial Sequence
  Synthetic oligonucleotide
aactacggagtgctggataggctacagata

SEQ ID NO: 59241 - DNA, 30 bp, Artificial Sequence
  Synthetic oligonucleotide
tcaaacggcacccgcgagtgataatagata

SEQ ID NO: 59242 - DNA, 30 bp, Artificial Sequence
  Synthetic oligonucleotide
ccagttcgaggacgatcgttggattagata

SEQ ID NO: 59243 - DNA, 30 bp, Artificial Sequence
  Synthetic oligonucleotide
gtgtataaataaaggcaaaggcaaccgata

SEQ ID NO: 59244 - DNA, 30 bp, Artificial Sequence
  Synthetic oligonucleotide
acgatacgattaggataagattatgcgata

SEQ ID NO: 59245 - DNA, 30 bp, Artificial Sequence
  Synthetic oligonucleotide
gcatgctaggtgcgcaaatagccgaggata

SEQ ID NO: 59246 - DNA, 30 bp, Artificial Sequence
  Synthetic oligonucleotide
cgtaaagagaactcacaacctacgcggata

SEQ ID NO: 59247 - DNA, 30 bp, Artificial Sequence
  Synthetic oligonucleotide
agaccaatctaggactgacacatctggata

SEQ ID NO: 59248 - DNA, 30 bp, Artificial Sequence
  Synthetic oligonucleotide
tgtaccgttgcgagcttgtgacaaatgata

SEQ ID NO: 59249 - DNA, 30 bp, Artificial Sequence
  Synthetic oligonucleotide
aactggcaactcatgcaatatgaaatgata

SEQ ID NO: 59250 - DNA, 30 bp, Artificial Sequence
  Synthetic oligonucleotide
atgaatccgaaaaatttggtttacatgata

SEQ ID NO: 59251 - DNA, 30 bp, Artificial Sequence
  Synthetic oligonucleotide
cggaaacaggtcctacttgtagcgctgata

SEQ ID NO: 59252 - DNA, 30 bp, Artificial Sequence
  Synthetic oligonucleotide
agggcaccgtgaaacaagtggtccgtgata

SEQ ID NO: 59253 - DNA, 30 bp, Artificial Sequence
  Synthetic oligonucleotide
aggcatgaagtacgtgaagtatgcgtgata

SEQ ID NO: 59254 - DNA, 30 bp, Artificial Sequence
  Synthetic oligonucleotide
gcaaaacgatacgatatttacctggtgata

SEQ ID NO: 59255 - DNA, 30 bp, Artificial Sequence
  Synthetic oligonucleotide
gcgaaacattacaaggtaggacataatata

SEQ ID NO: 59256 - DNA, 30 bp, Artificial Sequence
  Synthetic oligonucleotide
aatggtaacagagaaagagaaaaccctata

SEQ ID NO: 59257 - DNA, 30 bp, Artificial Sequence
  Synthetic oligonucleotide
ggagcacaaccagttggactcgggagtata

SEQ ID NO: 59258 - DNA, 30 bp, Artificial Sequence
  Synthetic oligonucleotide
cgtagaacccgtaacagatcacaacgtata

SEQ ID NO: 59259 - DNA, 30 bp, Artificial Sequence
  Synthetic oligonucleotide
agtcgaacggaatacatattcaagcgtata

SEQ ID NO: 59260 - DNA, 30 bp, Artificial Sequence
  Synthetic oligonucleotide
gatgagtcaacagtagtaagtaatcgtata

SEQ ID NO: 59261 - DNA, 30 bp, Artificial Sequence
  Synthetic oligonucleotide
gggtgctccaccgaccaaaccggatgtata

SEQ ID NO: 59262 - DNA, 30 bp, Artificial Sequence
  Synthetic oligonucleotide
ggggctataagcagggggtaaaactgtata

SEQ ID NO: 59263 - DNA, 30 bp, Artificial Sequence
  Synthetic oligonucleotide
aagcaatacgggtgaaccggactaaaacta

SEQ ID NO: 59264 - DNA, 30 bp, Artificial Sequence
  Synthetic oligonucleotide
agcactggaggttcgaagtacaagaaacta

SEQ ID NO: 59265 - DNA, 30 bp, Artificial Sequence
  Synthetic oligonucleotide
gcagtgctgcacgagaggattgcgaaacta

SEQ ID NO: 59266 - DNA, 30 bp, Artificial Sequence
  Synthetic oligonucleotide
tggccgactagctcgaatgtgaagcaacta

SEQ ID NO: 59267 - DNA, 30 bp, Artificial Sequence
  Synthetic oligonucleotide
tcgaacactagcaggatcatagtagaacta

SEQ ID NO: 59268 - DNA, 30 bp, Artificial Sequence
  Synthetic oligonucleotide
ccgactacgtgagctatacctttcgaacta

SEQ ID NO: 59269 - DNA, 30 bp, Artificial Sequence
  Synthetic oligonucleotide
tgcccgaagatctccaacctagggtaacta

SEQ ID NO: 59270 - DNA, 30 bp, Artificial Sequence
  Synthetic oligonucleotide
tccagcactgatctattcgtcaaaacacta

SEQ ID NO: 59271 - DNA, 30 bp, Artificial Sequence
  Synthetic oligonucleotide
agagcatagataatcgagtacaagacacta

SEQ ID NO: 59272 - DNA, 30 bp, Artificial Sequence
  Synthetic oligonucleotide
gcgcgaactacgcgaggcggtgttacacta

SEQ ID NO: 59273 - DNA, 30 bp, Artificial Sequence
  Synthetic oligonucleotide
ggcggtcaccggaccactcaatggagacta

SEQ ID NO: 59274 - DNA, 30 bp, Artificial Sequence
  Synthetic oligonucleotide
gcgatgaacaggtagtatcgccgtggacta

SEQ ID NO: 59275 - DNA, 30 bp, Artificial Sequence
  Synthetic oligonucleotide
cacatcacaccaaatttcgggaactgacta

SEQ ID NO: 59276 - DNA, 30 bp, Artificial Sequence
  Synthetic oligonucleotide
aacgtctcacacttagtaatcttgctacta

SEQ ID NO: 59277 - DNA, 30 bp, Artificial Sequence
  Synthetic oligonucleotide
cagcggaggcaaggggatcgagagttacta

SEQ ID NO: 59278 - DNA, 30 bp, Artificial Sequence
  Synthetic oligonucleotide
gttaggagaggaggacggccgattttacta

SEQ ID NO: 59279 - DNA, 30 bp, Artificial Sequence
  Synthetic oligonucleotide
ccttgccgcgagaacgataactacaaccta

SEQ ID NO: 59280 - DNA, 30 bp, Artificial Sequence
  Synthetic oligonucleotide
gctagaacttgtcaaactgtgcataaccta

SEQ ID NO: 59281 - DNA, 30 bp, Artificial Sequence
  Synthetic oligonucleotide
cacgaccgcaatcgggtaggagaggaccta

SEQ ID NO: 59282 - DNA, 30 bp, Artificial Sequence
  Synthetic oligonucleotide
agctacggcgaggtaggtacaaagacccta

SEQ ID NO: 59283 - DNA, 30 bp, Artificial Sequence
  Synthetic oligonucleotide
ccgtaggtgaggaaagaacgactcgcccta

SEQ ID NO: 59284 - DNA, 30 bp, Artificial Sequence
  Synthetic oligonucleotide
agaacacgagcgttcgaaaatataagccta

SEQ ID NO: 59285 - DNA, 30 bp, Artificial Sequence
  Synthetic oligonucleotide
tgtcaaaggaatcctgctcagcatggccta

SEQ ID NO: 59286 - DNA, 30 bp, Artificial Sequence
  Synthetic oligonucleotide
ttaggcagtcaaaactaatcagacatccta

SEQ ID NO: 59287 - DNA, 30 bp, Artificial Sequence
  Synthetic oligonucleotide
tacagcgtacggaccctatacatgaagcta

SEQ ID NO: 59288 - DNA, 30 bp, Artificial Sequence
  Synthetic oligonucleotide
tgtagatcctcgtagtcccggaaccagcta

SEQ ID NO: 59289 - DNA, 30 bp, Artificial Sequence
  Synthetic oligonucleotide
tgaaaaattacggagggataggctcagcta

SEQ ID NO: 59290 - DNA, 30 bp, Artificial Sequence
  Synthetic oligonucleotide
cgtccatgcgctgcgaggaccgactagcta

SEQ ID NO: 59291 - DNA, 30 bp, Artificial Sequence
  Synthetic oligonucleotide
gggctcgcaggggacaatgccatctagcta

SEQ ID NO: 59292 - DNA, 30 bp, Artificial Sequence
  Synthetic oligonucleotide
ctcgatttctcgctcgaagagcagccgcta

SEQ ID NO: 59293 - DNA, 30 bp, Artificial Sequence
  Synthetic oligonucleotide
aaatggcacgcgttcaatgaagggccgcta

SEQ ID NO: 59294 - DNA, 30 bp, Artificial Sequence
  Synthetic oligonucleotide
ccagcgtaaggatcggaaaggtgggcgcta

SEQ ID NO: 59295 - DNA, 30 bp, Artificial Sequence
  Synthetic oligonucleotide
agtcgtgctaaaatcggggttgggtcgcta

SEQ ID NO: 59296 - DNA, 30 bp, Artificial Sequence
  Synthetic oligonucleotide
ctgtcaatggcaaggtgagttgtttcgcta

SEQ ID NO: 59297 - DNA, 30 bp, Artificial Sequence
  Synthetic oligonucleotide
gtccaggaaacaatgtgttcaagaaggcta

SEQ ID NO: 59298 - DNA, 30 bp, Artificial Sequence
  Synthetic oligonucleotide
atgtagaaacggggttgccagaggaggcta

SEQ ID NO: 59299 - DNA, 30 bp, Artificial Sequence
  Synthetic oligonucleotide
atgaaaacctgcaataaccatacggggcta

SEQ ID NO: 59300 - DNA, 30 bp, Artificial Sequence
  Synthetic oligonucleotide
tcgattgaggtggagcagttaaattggcta

SEQ ID NO: 59301 - DNA, 30 bp, Artificial Sequence
  Synthetic oligonucleotide
gtgcgcggatacgatatctagagcctgcta

SEQ ID NO: 59302 - DNA, 29 bp, Artificial Sequence
  Synthetic oligonucleotide
tcacatagggggtaattagggtggtgcta

SEQ ID NO: 59303 - DNA, 30 bp, Artificial Sequence
  Synthetic oligonucleotide
ccacgaggtaaccgtaaacagcaagatcta

SEQ ID NO: 59304 - DNA, 30 bp, Artificial Sequence
  Synthetic oligonucleotide
acgcgtctcgaggtggggaccaaggatcta

SEQ ID NO: 59305 - DNA, 30 bp, Artificial Sequence
  Synthetic oligonucleotide
gggcgtgttgacacaactccggcatatcta

SEQ ID NO: 59306 - DNA, 30 bp, Artificial Sequence
  Synthetic oligonucleotide
acagaacgaaaaccgggcacactagctcta

SEQ ID NO: 59307 - DNA, 30 bp, Artificial Sequence
  Synthetic oligonucleotide
aacggaggaataattcttacaacacgtcta

SEQ ID NO: 59308 - DNA, 30 bp, Artificial Sequence
  Synthetic oligonucleotide
taaacgttaacattcaacaatacaggtcta

SEQ ID NO: 59309 - DNA, 30 bp, Artificial Sequence
  Synthetic oligonucleotide
acctcaaacaaattaggaagcttcattcta

SEQ ID NO: 59310 - DNA, 30 bp, Artificial Sequence
  Synthetic oligonucleotide
acaagccatgtatattcgagcgatcttcta

SEQ ID NO: 59311 - DNA, 30 bp, Artificial Sequence
  Synthetic oligonucleotide
aaggtttcaaaatattagctgtgaaaagta

SEQ ID NO: 59312 - DNA, 30 bp, Artificial Sequence
  Synthetic oligonucleotide
ggtcgttagagtttgaggattaagaaagta

SEQ ID NO: 59313 - DNA, 30 bp, Artificial Sequence
  Synthetic oligonucleotide
cgaataaaggaatactgcctgatgaaagta

SEQ ID NO: 59314 - DNA, 30 bp, Artificial Sequence
  Synthetic oligonucleotide
accatgaccagggatcgaggaggtaaagta

SEQ ID NO: 59315 - DNA, 30 bp, Artificial Sequence
  Synthetic oligonucleotide
gcgtgcaaggccgacctatgagttaaagta

SEQ ID NO: 59316 - DNA, 31 bp, Artificial Sequence
  Synthetic oligonucleotide
cgcgctttgcgagcaatctagaacccaagta

SEQ ID NO: 59317 - DNA, 30 bp, Artificial Sequence
  Synthetic oligonucleotide
ctgcagttgcgtcgatccgggggagaagta

SEQ ID NO: 59318 - DNA, 31 bp, Artificial Sequence
  Synthetic oligonucleotide
actatgaggctagacactcgatgaataagta

SEQ ID NO: 59319 - DNA, 30 bp, Artificial Sequence
  Synthetic oligonucleotide
agacgcgttgggtggaaactggcctaagta

SEQ ID NO: 59320 - DNA, 30 bp, Artificial Sequence
  Synthetic oligonucleotide
ccttccttcccccgtgagaataagtaagta

SEQ ID NO: 59321 - DNA, 30 bp, Artificial Sequence
  Synthetic oligonucleotide
tgaaccaccatcctaagcctaacaccagta

SEQ ID NO: 59322 - DNA, 30 bp, Artificial Sequence
  Synthetic oligonucleotide
acaagattaggaagttagaaggtagcagta

SEQ ID NO: 59323 - DNA, 30 bp, Artificial Sequence
  Synthetic oligonucleotide
agcacaagcccccacaccgaactcgcagta

SEQ ID NO: 59324 - DNA, 30 bp, Artificial Sequence
  Synthetic oligonucleotide
tcatgaggtactcccgatctctgctcagta

SEQ ID NO: 59325 - DNA, 30 bp, Artificial Sequence
  Synthetic oligonucleotide
agatcatcacaacccaaaaaagagtcagta

SEQ ID NO: 59326 - DNA, 30 bp, Artificial Sequence
  Synthetic oligonucleotide
tgtcgtgggaccaaacgcggatggtcagta

SEQ ID NO: 59327 - DNA, 30 bp, Artificial Sequence
  Synthetic oligonucleotide
cggcagatacgaacaatctattaccgagta

SEQ ID NO: 59328 - DNA, 30 bp, Artificial Sequence
  Synthetic oligonucleotide
gtcggaggctgcgttgaaagagtccgagta

SEQ ID NO: 59329 - DNA, 30 bp, Artificial Sequence
  Synthetic oligonucleotide
gcgagcgagtagcctatgcgtaggcgagta

SEQ ID NO: 59330 - DNA, 30 bp, Artificial Sequence
  Synthetic oligonucleotide
gaatctaacaatggaaactgcaaaggagta

SEQ ID NO: 59331 - DNA, 30 bp, Artificial Sequence
  Synthetic oligonucleotide
taccaagtatgcgaatgcgcacccggagta

SEQ ID NO: 59332 - DNA, 30 bp, Artificial Sequence
  Synthetic oligonucleotide
acaggatgctatgtagggactatgtgagta

SEQ ID NO: 59333 - DNA, 30 bp, Artificial Sequence
  Synthetic oligonucleotide
tagggtaattacacgccacatcaagtagta

SEQ ID NO: 59334 - DNA, 30 bp, Artificial Sequence
  Synthetic oligonucleotide
tactcggaaaagcacagcgtcaacaacgta

SEQ ID NO: 59335 - DNA, 30 bp, Artificial Sequence
  Synthetic oligonucleotide
acatagaatacaacgataacctgacacgta

SEQ ID NO: 59336 - DNA, 30 bp, Artificial Sequence
  Synthetic oligonucleotide
cggtttcaaggacacactcgggtcgacgta

SEQ ID NO: 59337 - DNA, 30 bp, Artificial Sequence
  Synthetic oligonucleotide
gcaatggaaggtgatatggatggggacgta

SEQ ID NO: 59338 - DNA, 30 bp, Artificial Sequence
  Synthetic oligonucleotide
gataatcagaactgcccagaagagtacgta

SEQ ID NO: 59339 - DNA, 30 bp, Artificial Sequence
  Synthetic oligonucleotide
tctcattgcaaataatccccacaaaccgta

SEQ ID NO: 59340 - DNA, 30 bp, Artificial Sequence
  Synthetic oligonucleotide
gcacatgtgcttggcagagtttgaaccgta

SEQ ID NO: 59341 - DNA, 30 bp, Artificial Sequence
  Synthetic oligonucleotide
acttcgcaggcggccaagtggattaccgta

SEQ ID NO: 59342 - DNA, 30 bp, Artificial Sequence
  Synthetic oligonucleotide
tgttatcgggatagggaaggtgaaagcgta

SEQ ID NO: 59343 - DNA, 30 bp, Artificial Sequence
  Synthetic oligonucleotide
acagcggtcgaggaccatcacccccgcgta

SEQ ID NO: 59344 - DNA, 30 bp, Artificial Sequence
  Synthetic oligonucleotide
ctagggtggttagctcaagatcaatgcgta

SEQ ID NO: 59345 - DNA, 30 bp, Artificial Sequence
  Synthetic oligonucleotide
acctaagagatagtaactaaatgctgcgta

SEQ ID NO: 59346 - DNA, 30 bp, Artificial Sequence
  Synthetic oligonucleotide
agactcaaaaaactatgatcggtctgcgta

SEQ ID NO: 59347 - DNA, 30 bp, Artificial Sequence
  Synthetic oligonucleotide
aggtggcaaacggtgaggaggtcttgcgta

SEQ ID NO: 59348 - DNA, 30 bp, Artificial Sequence
  Synthetic oligonucleotide
catataaaaggtcaaacagggcaggtcgta

SEQ ID NO: 59349 - DNA, 30 bp, Artificial Sequence
  Synthetic oligonucleotide
agacgatgtccgtgtggggactcgaaggta

SEQ ID NO: 59350 - DNA, 30 bp, Artificial Sequence
  Synthetic oligonucleotide
tgcaggctgagacacgatctacggaaggta

SEQ ID NO: 59351 - DNA, 30 bp, Artificial Sequence
  Synthetic oligonucleotide
attaggtgcagaccgcaggggtctaaggta

SEQ ID NO: 59352 - DNA, 30 bp, Artificial Sequence
  Synthetic oligonucleotide
tggggtggcggtaaagcttacaaagaggta

SEQ ID NO: 59353 - DNA, 30 bp, Artificial Sequence
  Synthetic oligonucleotide
ccaggaggaaagtcgccccgacttgaggta

SEQ ID NO: 59354 - DNA, 30 bp, Artificial Sequence
  Synthetic oligonucleotide
gaaacagtggataggtaacccaattcggta

SEQ ID NO: 59355 - DNA, 30 bp, Artificial Sequence
  Synthetic oligonucleotide
accatcatactggtaagtgctcgaagggta

SEQ ID NO: 59356 - DNA, 30 bp, Artificial Sequence
  Synthetic oligonucleotide
cagttccgtggaagacagaagataagggta

SEQ ID NO: 59357 - DNA, 30 bp, Artificial Sequence
  Synthetic oligonucleotide
catcacgtcgtgattgcactaaggcgggta

SEQ ID NO: 59358 - DNA, 30 bp, Artificial Sequence
  Synthetic oligonucleotide
tcacagaggtatgtttgcacgaaaatggta

SEQ ID NO: 59359 - DNA, 30 bp, Artificial Sequence
  Synthetic oligonucleotide
gccaacaaagaactcgtagggaaaatggta

SEQ ID NO: 59360 - DNA, 30 bp, Artificial Sequence
  Synthetic oligonucleotide
cggatcaaacatgttgcatacatcatggta

SEQ ID NO: 59361 - DNA, 30 bp, Artificial Sequence
  Synthetic oligonucleotide
ccatccagtccgatataagaggggatggta

SEQ ID NO: 59362 - DNA, 30 bp, Artificial Sequence
  Synthetic oligonucleotide
ccgaagtactaggtacatgtgacactggta

SEQ ID NO: 59363 - DNA, 30 bp, Artificial Sequence
  Synthetic oligonucleotide
cgatttccatataagcgaaaccgtaatgta

SEQ ID NO: 59364 - DNA, 30 bp, Artificial Sequence
  Synthetic oligonucleotide
ccataagatacaaattaatcgactcatgta

SEQ ID NO: 59365 - DNA, 29 bp, Artificial Sequence
  Synthetic oligonucleotide
cggttagggtctggttgcacatatctgta

SEQ ID NO: 59366 - DNA, 30 bp, Artificial Sequence
  Synthetic oligonucleotide
cggatagttacagcgcgaatgaaaagtgta

SEQ ID NO: 59367 - DNA, 30 bp, Artificial Sequence
  Synthetic oligonucleotide
tgaactaccgtggaacaacaactacgtgta

SEQ ID NO: 59368 - DNA, 30 bp, Artificial Sequence
  Synthetic oligonucleotide
ccggaacgcgggaataggggtgagcgtgta

SEQ ID NO: 59369 - DNA, 30 bp, Artificial Sequence
  Synthetic oligonucleotide
tggcggtgtgtattgaactagaagtgtgta

SEQ ID NO: 59370 - DNA, 30 bp, Artificial Sequence
  Synthetic oligonucleotide
acgactcgaatctgtcttacctggtgtgta

SEQ ID NO: 59371 - DNA, 30 bp, Artificial Sequence
  Synthetic oligonucleotide
cacgatactggcaaaactgagggacttgta

SEQ ID NO: 59372 - DNA, 30 bp, Artificial Sequence
  Synthetic oligonucleotide
ccaaaaacactaggataatagttacttgta

SEQ ID NO: 59373 - DNA, 30 bp, Artificial Sequence
  Synthetic oligonucleotide
cgagagaatgttaaaattgtacataaatta

SEQ ID NO: 59374 - DNA, 30 bp, Artificial Sequence
  Synthetic oligonucleotide
tgagccatcagagactagaaatgtaaatta

SEQ ID NO: 59375 - DNA, 30 bp, Artificial Sequence
  Synthetic oligonucleotide
cagatcatagtagggaaatctactcaatta

SEQ ID NO: 59376 - DNA, 30 bp, Artificial Sequence
  Synthetic oligonucleotide
cggcaacgttatccgccttaggccgaatta

SEQ ID NO: 59377 - DNA, 30 bp, Artificial Sequence
  Synthetic oligonucleotide
cgcgatacggggtaagacaagggaacatta

SEQ ID NO: 59378 - DNA, 30 bp, Artificial Sequence
  Synthetic oligonucleotide
actacggatagagtagaaattaaggcatta

SEQ ID NO: 59379 - DNA, 30 bp, Artificial Sequence
  Synthetic oligonucleotide
agcctgagccacaatcgaccatgatcatta

SEQ ID NO: 59380 - DNA, 30 bp, Artificial Sequence
  Synthetic oligonucleotide
gccgaaacgagagttactcgcacgtcatta

SEQ ID NO: 59381 - DNA, 30 bp, Artificial Sequence
  Synthetic oligonucleotide
tcgcattgcgggaatcaatcacagagatta

SEQ ID NO: 59382 - DNA, 30 bp, Artificial Sequence
  Synthetic oligonucleotide
gtgatgaggggaaagcacgtctagagatta

SEQ ID NO: 59383 - DNA, 30 bp, Artificial Sequence
  Synthetic oligonucleotide
agaatggccgcttgaggcgaggtccgatta

SEQ ID NO: 59384 - DNA, 30 bp, Artificial Sequence
  Synthetic oligonucleotide
atggcaggagatggcacgaaattcctatta

SEQ ID NO: 59385 - DNA, 30 bp, Artificial Sequence
  Synthetic oligonucleotide
tagggtacgtaagcagggaccccaaactta

SEQ ID NO: 59386 - DNA, 30 bp, Artificial Sequence
  Synthetic oligonucleotide
tcgggtgttaggggaggaggggaggactta

SEQ ID NO: 59387 - DNA, 29 bp, Artificial Sequence
  Synthetic oligonucleotide
gcatgagggatgggcagcctagatactta

SEQ ID NO: 59388 - DNA, 30 bp, Artificial Sequence
  Synthetic oligonucleotide
accgagtatgagtggtgaatctcaagctta

SEQ ID NO: 59389 - DNA, 30 bp, Artificial Sequence
  Synthetic oligonucleotide
ggtgggaggccgcgaccatatcttcgctta

SEQ ID NO: 59390 - DNA, 30 bp, Artificial Sequence
  Synthetic oligonucleotide
acctaacggtaacgatgctaaaggggctta

SEQ ID NO: 59391 - DNA, 30 bp, Artificial Sequence
  Synthetic oligonucleotide
gtgggtggcctggcggaacgacgttgctta

SEQ ID NO: 59392 - DNA, 30 bp, Artificial Sequence
  Synthetic oligonucleotide
agtgtggctagttggaccgaccttgtctta

SEQ ID NO: 59393 - DNA, 30 bp, Artificial Sequence
  Synthetic oligonucleotide
aacgggggtgatacaagctctggcaagtta

SEQ ID NO: 59394 - DNA, 30 bp, Artificial Sequence
  Synthetic oligonucleotide
caagatctcggggcgtcaatcaagcagtta

SEQ ID NO: 59395 - DNA, 31 bp, Artificial Sequence
  Synthetic oligonucleotide
agcgatgacaacacatagccccttctagtta

SEQ ID NO: 59396 - DNA, 30 bp, Artificial Sequence
  Synthetic oligonucleotide
taggagacggcgctagcatgcatcacgtta

SEQ ID NO: 59397 - DNA, 30 bp, Artificial Sequence
  Synthetic oligonucleotide
acagcgtgggaacgtgtgctgagtacgtta

SEQ ID NO: 59398 - DNA, 30 bp, Artificial Sequence
  Synthetic oligonucleotide
aagcgctcagccctacctaacaaagcgtta

SEQ ID NO: 59399 - DNA, 30 bp, Artificial Sequence
  Synthetic oligonucleotide
taacaccgaagacaaatcactctagcgtta

SEQ ID NO: 59400 - DNA, 30 bp, Artificial Sequence
  Synthetic oligonucleotide
agaaaggatccgagtcctcgacaggcgtta

SEQ ID NO: 59401 - DNA, 30 bp, Artificial Sequence
  Synthetic oligonucleotide
tcgatcccccactagctagttagaaggtta

SEQ ID NO: 59402 - DNA, 30 bp, Artificial Sequence
  Synthetic oligonucleotide
cgcattgtagtgccgtagttcggaaggtta

SEQ ID NO: 59403 - DNA, 30 bp, Artificial Sequence
  Synthetic oligonucleotide
cacgatgaattaccttttgggaccaggtta

SEQ ID NO: 59404 - DNA, 30 bp, Artificial Sequence
  Synthetic oligonucleotide
agggttagtcgaatacggcacaggcggtta

SEQ ID NO: 59405 - DNA, 30 bp, Artificial Sequence
  Synthetic oligonucleotide
tagcagagcgtataaagagtgtacgggtta

SEQ ID NO: 59406 - DNA, 30 bp, Artificial Sequence
  Synthetic oligonucleotide
tacgatgaaaagatacagtacgagatgtta

SEQ ID NO: 59407 - DNA, 30 bp, Artificial Sequence
  Synthetic oligonucleotide
cagttggcgagccagaatgtgaccgtgtta

SEQ ID NO: 59408 - DNA, 30 bp, Artificial Sequence
  Synthetic oligonucleotide
aggactcgggtaatgcacaaggctaattta

SEQ ID NO: 59409 - DNA, 30 bp, Artificial Sequence
  Synthetic oligonucleotide
acgaagcgtgctgtacgtaatactcattta

SEQ ID NO: 59410 - DNA, 30 bp, Artificial Sequence
  Synthetic oligonucleotide
aggaggtgagagggggacttaacatattta

SEQ ID NO: 59411 - DNA, 30 bp, Artificial Sequence
  Synthetic oligonucleotide
tacaagagaagggtagttaggacgagttta

SEQ ID NO: 59412 - DNA, 30 bp, Artificial Sequence
  Synthetic oligonucleotide
ggtgtaagtcatacgagcgaacagtgttta

SEQ ID NO: 59413 - DNA, 30 bp, Artificial Sequence
  Synthetic oligonucleotide
ctggatcggatgacggtccaaacgatttta

SEQ ID NO: 59414 - DNA, 30 bp, Artificial Sequence
  Synthetic oligonucleotide
acgagtcagatgattgagtgcacacaaaac

SEQ ID NO: 59415 - DNA, 30 bp, Artificial Sequence
  Synthetic oligonucleotide
gtgggagaaccctttcactgcagggaaaac

SEQ ID NO: 59416 - DNA, 30 bp, Artificial Sequence
  Synthetic oligonucleotide
gatagacacgaatcctcaggaagtgaaaac

SEQ ID NO: 59417 - DNA, 30 bp, Artificial Sequence
  Synthetic oligonucleotide
tcagaacagaagtttcagacactgtaaaac

SEQ ID NO: 59418 - DNA, 30 bp, Artificial Sequence
  Synthetic oligonucleotide
taaggttcacagccctacgcgataacaaac

SEQ ID NO: 59419 - DNA, 30 bp, Artificial Sequence
  Synthetic oligonucleotide
agattggtctgaataacgataaaggcaaac

SEQ ID NO: 59420 - DNA, 30 bp, Artificial Sequence
  Synthetic oligonucleotide
atgtacaagtaaaataaccacactctaaac

SEQ ID NO: 59421 - DNA, 30 bp, Artificial Sequence
  Synthetic oligonucleotide
cggtgatgatcaaaaaaccgtgcagtaaac

SEQ ID NO: 59422 - DNA, 30 bp, Artificial Sequence
  Synthetic oligonucleotide
tgtggagcatgatcttaaataaacgtaaac

SEQ ID NO: 59423 - DNA, 30 bp, Artificial Sequence
  Synthetic oligonucleotide
gcaagaacaaagttcatacacttggtaaac

SEQ ID NO: 59424 - DNA, 30 bp, Artificial Sequence
  Synthetic oligonucleotide
aagagatgttaaggacatcgaagattaaac

SEQ ID NO: 59425 - DNA, 30 bp, Artificial Sequence
  Synthetic oligonucleotide
gcatagggaaggagctaaacacacttaaac

SEQ ID NO: 59426 - DNA, 30 bp, Artificial Sequence
  Synthetic oligonucleotide
accgtccgacaaacatacgataacaacaac

SEQ ID NO: 59427 - DNA, 31 bp, Artificial Sequence
  Synthetic oligonucleotide
cgtaacagatgacgtcggcatctagaacaac

SEQ ID NO: 59428 - DNA, 30 bp, Artificial Sequence
  Synthetic oligonucleotide
aatggacgacagacgatgatgtgtgacaac

SEQ ID NO: 59429 - DNA, 30 bp, Artificial Sequence
  Synthetic oligonucleotide
cagttaaggtagcaaacattcgagtacaac

SEQ ID NO: 59430 - DNA, 30 bp, Artificial Sequence
  Synthetic oligonucleotide
cctcacgggaattgagataaagggtacaac

SEQ ID NO: 59431 - DNA, 30 bp, Artificial Sequence
  Synthetic oligonucleotide
atattggggggaggcgaggaggccaccaac

SEQ ID NO: 59432 - DNA, 30 bp, Artificial Sequence
  Synthetic oligonucleotide
aaagggctgtgacatgatccttccaccaac

SEQ ID NO: 59433 - DNA, 30 bp, Artificial Sequence
  Synthetic oligonucleotide
tgagggaatctaataattcgtcatgccaac

SEQ ID NO: 59434 - DNA, 30 bp, Artificial Sequence
  Synthetic oligonucleotide
ttgaggttaaggatatagtccaaaagcaac

SEQ ID NO: 59435 - DNA, 30 bp, Artificial Sequence
  Synthetic oligonucleotide
agagatatatccagaagggataaaagcaac

SEQ ID NO: 59436 - DNA, 30 bp, Artificial Sequence
  Synthetic oligonucleotide
tgtcaatccaatccgaaaccgaagggcaac

SEQ ID NO: 59437 - DNA, 30 bp, Artificial Sequence
  Synthetic oligonucleotide
gggtcagggaacactgcaagaaggggcaac

SEQ ID NO: 59438 - DNA, 30 bp, Artificial Sequence
  Synthetic oligonucleotide
aggattaagtggagcaaaccacaatgcaac

SEQ ID NO: 59439 - DNA, 28 bp, Artificial Sequence
  Synthetic oligonucleotide
acgaatacggtctagaatctcgctcaac

SEQ ID NO: 59440 - DNA, 30 bp, Artificial Sequence
  Synthetic oligonucleotide
atgacatatggggtggactaggaagtcaac

SEQ ID NO: 59441 - DNA, 30 bp, Artificial Sequence
  Synthetic oligonucleotide
gcggtgaccccaaaaatgagtaaattcaac

SEQ ID NO: 59442 - DNA, 30 bp, Artificial Sequence
  Synthetic oligonucleotide
ggtcaaccgatcatggagcatgtgttcaac

SEQ ID NO: 59443 - DNA, 30 bp, Artificial Sequence
  Synthetic oligonucleotide
atatttacaaggagacacgacgtggagaac

SEQ ID NO: 59444 - DNA, 30 bp, Artificial Sequence
  Synthetic oligonucleotide
gcgtacgccagctcgacataccaatagaac

SEQ ID NO: 59445 - DNA, 30 bp, Artificial Sequence
  Synthetic oligonucleotide
ataggcaactttgaaggatagaggacgaac

SEQ ID NO: 59446 - DNA, 30 bp, Artificial Sequence
  Synthetic oligonucleotide
ccgtaagaacagcgatttaagctgccgaac

SEQ ID NO: 59447 - DNA, 30 bp, Artificial Sequence
  Synthetic oligonucleotide
agtccaaccctcaacactggtccagcgaac

SEQ ID NO: 59448 - DNA, 30 bp, Artificial Sequence
  Synthetic oligonucleotide
gggcggcaccacgtaggtgacgatgcgaac

SEQ ID NO: 59449 - DNA, 30 bp, Artificial Sequence
  Synthetic oligonucleotide
tggacaagaccgattggaatcgctgcgaac

SEQ ID NO: 59450 - DNA, 30 bp, Artificial Sequence
  Synthetic oligonucleotide
cctctcacagagtgggggctacgttcgaac

SEQ ID NO: 59451 - DNA, 30 bp, Artificial Sequence
  Synthetic oligonucleotide
catcatcgaagttccccctcaatcaggaac

SEQ ID NO: 59452 - DNA, 30 bp, Artificial Sequence
  Synthetic oligonucleotide
tcgcgacataatcagaagtctgggaggaac

SEQ ID NO: 59453 - DNA, 29 bp, Artificial Sequence
  Synthetic oligonucleotide
ctgaaggtggcccgcagtaagagcggaac

SEQ ID NO: 59454 - DNA, 30 bp, Artificial Sequence
  Synthetic oligonucleotide
atcgccaattaacgcaaggtgcactggaac

SEQ ID NO: 59455 - DNA, 30 bp, Artificial Sequence
  Synthetic oligonucleotide
taagttcgggccgaggcttacaagtggaac

SEQ ID NO: 59456 - DNA, 30 bp, Artificial Sequence
  Synthetic oligonucleotide
cgtcatagaaatgcgccaggcaccaataac

SEQ ID NO: 59457 - DNA, 30 bp, Artificial Sequence
  Synthetic oligonucleotide
acaacctcccaagccatagactaacataac

SEQ ID NO: 59458 - DNA, 30 bp, Artificial Sequence
  Synthetic oligonucleotide
gcatccatttgggggctaggtcggcataac

SEQ ID NO: 59459 - DNA, 30 bp, Artificial Sequence
  Synthetic oligonucleotide
ggggcagtatggtggacaaagcacactaac

SEQ ID NO: 59460 - DNA, 30 bp, Artificial Sequence
  Synthetic oligonucleotide
tcctgatgctgaactacatatcggactaac

SEQ ID NO: 59461 - DNA, 30 bp, Artificial Sequence
  Synthetic oligonucleotide
taaagggccacaaagacggttctgactaac

SEQ ID NO: 59462 - DNA, 30 bp, Artificial Sequence
  Synthetic oligonucleotide
cctgaacggccggtaacataagaatctaac

SEQ ID NO: 59463 - DNA, 30 bp, Artificial Sequence
  Synthetic oligonucleotide
gatgagctaggatgcccgtggccgagtaac

SEQ ID NO: 59464 - DNA, 30 bp, Artificial Sequence
  Synthetic oligonucleotide
cggggaaatgggtgtgccaaaggacgtaac

SEQ ID NO: 59465 - DNA, 30 bp, Artificial Sequence
  Synthetic oligonucleotide
cacgaataactgctattaaggatccgtaac

SEQ ID NO: 59466 - DNA, 30 bp, Artificial Sequence
  Synthetic oligonucleotide
tgcatatggaattagtcggtacatcgtaac

SEQ ID NO: 59467 - DNA, 30 bp, Artificial Sequence
  Synthetic oligonucleotide
caactacaagtagtgttgagcggtggtaac

SEQ ID NO: 59468 - DNA, 30 bp, Artificial Sequence
  Synthetic oligonucleotide
ccgtgacgaaaaggggtaatgttctgtaac

SEQ ID NO: 59469 - DNA, 30 bp, Artificial Sequence
  Synthetic oligonucleotide
ttatcaggttcaagaaaggtgcgggttaac

SEQ ID NO: 59470 - DNA, 30 bp, Artificial Sequence
  Synthetic oligonucleotide
ttgagaggaaccagctctcacggcaaacac

SEQ ID NO: 59471 - DNA, 31 bp, Artificial Sequence
  Synthetic oligonucleotide
gagagaactgttagacatccagtagaaacac

SEQ ID NO: 59472 - DNA, 30 bp, Artificial Sequence
  Synthetic oligonucleotide
agtaagctagggaaggaacttgttaaacac

SEQ ID NO: 59473 - DNA, 30 bp, Artificial Sequence
  Synthetic oligonucleotide
aatagaatcgagcgtaaagccaacgaacac

SEQ ID NO: 59474 - DNA, 30 bp, Artificial Sequence
  Synthetic oligonucleotide
tctgtaccttaataaaccagccagccacac

SEQ ID NO: 59475 - DNA, 30 bp, Artificial Sequence
  Synthetic oligonucleotide
tacacggctccaagcataagtcggccacac

SEQ ID NO: 59476 - DNA, 30 bp, Artificial Sequence
  Synthetic oligonucleotide
agatgtattggatatggtaaggaggcacac

SEQ ID NO: 59477 - DNA, 30 bp, Artificial Sequence
  Synthetic oligonucleotide
gctagcgtgaagaggatcgctgcatcacac

SEQ ID NO: 59478 - DNA, 30 bp, Artificial Sequence
  Synthetic oligonucleotide
aggcgtaaagaactggtatcgtattcacac

SEQ ID NO: 59479 - DNA, 30 bp, Artificial Sequence
  Synthetic oligonucleotide
atggtacggtcccatgcgggttaacgacac

SEQ ID NO: 59480 - DNA, 30 bp, Artificial Sequence
  Synthetic oligonucleotide
taaaggaacctaaactgtgcatttcgacac

SEQ ID NO: 59481 - DNA, 30 bp, Artificial Sequence
  Synthetic oligonucleotide
ggaacaaaagtcaccatcttaacttgacac

SEQ ID NO: 59482 - DNA, 30 bp, Artificial Sequence
  Synthetic oligonucleotide
aaatgagtctaaggcaacataagtatacac

SEQ ID NO: 59483 - DNA, 30 bp, Artificial Sequence
  Synthetic oligonucleotide
ataccagtgggccatcatgtagagctacac

SEQ ID NO: 59484 - DNA, 30 bp, Artificial Sequence
  Synthetic oligonucleotide
gcggacatcacgcttagggacactttacac

SEQ ID NO: 59485 - DNA, 30 bp, Artificial Sequence
  Synthetic oligonucleotide
gcaataagtaatcagtgatcgcgtaaccac

SEQ ID NO: 59486 - DNA, 30 bp, Artificial Sequence
  Synthetic oligonucleotide
ccggatagggcaattcaagtaattaaccac

SEQ ID NO: 59487 - DNA, 30 bp, Artificial Sequence
  Synthetic oligonucleotide
gcctcccaaggtacgtcccgaaaccaccac

SEQ ID NO: 59488 - DNA, 30 bp, Artificial Sequence
  Synthetic oligonucleotide
ctcgggggcatccgggtagctcgaacccac

SEQ ID NO: 59489 - DNA, 30 bp, Artificial Sequence
  Synthetic oligonucleotide
gccgacagaggttacgcgaatatgccccac

SEQ ID NO: 59490 - DNA, 30 bp, Artificial Sequence
  Synthetic oligonucleotide
ggcaagtgatgaaagtcggcggagagccac

SEQ ID NO: 59491 - DNA, 30 bp, Artificial Sequence
  Synthetic oligonucleotide
ggatagagcactgtaataaatgcgagccac

SEQ ID NO: 59492 - DNA, 35 bp, Artificial Sequence
  Synthetic oligonucleotide
gtcaccgtcgtgcgagggaccagactctgagccac

SEQ ID NO: 59493 - DNA, 30 bp, Artificial Sequence
  Synthetic oligonucleotide
gcgagtcgagtatgacattgtgtgggccac

SEQ ID NO: 59494 - DNA, 30 bp, Artificial Sequence
  Synthetic oligonucleotide
cgcgcgtgtgtaggaggacgccgtatccac

SEQ ID NO: 59495 - DNA, 30 bp, Artificial Sequence
  Synthetic oligonucleotide
aggccaaagtcgttcaaaggacacgtccac

SEQ ID NO: 59496 - DNA, 30 bp, Artificial Sequence
  Synthetic oligonucleotide
tgaaggcactttagggatgggtagttccac

SEQ ID NO: 59497 - DNA, 30 bp, Artificial Sequence
  Synthetic oligonucleotide
gtatatagcgggcaagtctaaaacaagcac

SEQ ID NO: 59498 - DNA, 30 bp, Artificial Sequence
  Synthetic oligonucleotide
ggccccagactaaggtagtgtctgcagcac

SEQ ID NO: 59499 - DNA, 30 bp, Artificial Sequence
  Synthetic oligonucleotide
acatggttccgtgtacacaacattcagcac

SEQ ID NO: 59500 - DNA, 30 bp, Artificial Sequence
  Synthetic oligonucleotide
cacggttatcttagcaaacaacgggagcac

SEQ ID NO: 59501 - DNA, 30 bp, Artificial Sequence
  Synthetic oligonucleotide
aaaagggctctggcggcaacggatgagcac

SEQ ID NO: 59502 - DNA, 30 bp, Artificial Sequence
  Synthetic oligonucleotide
gtaggtggtctggaggatttaatgtagcac

SEQ ID NO: 59503 - DNA, 30 bp, Artificial Sequence
  Synthetic oligonucleotide
ggcatggacaagaataggtcctattagcac

SEQ ID NO: 59504 - DNA, 30 bp, Artificial Sequence
  Synthetic oligonucleotide
atatacgcgatcatacacaggaaaacgcac

SEQ ID NO: 59505 - DNA, 30 bp, Artificial Sequence
  Synthetic oligonucleotide
tagaagtaaaagagggccgtatgcacgcac

SEQ ID NO: 59506 - DNA, 30 bp, Artificial Sequence
  Synthetic oligonucleotide
tggtaacacgggtggaagaattcaccgcac

SEQ ID NO: 59507 - DNA, 30 bp, Artificial Sequence
  Synthetic oligonucleotide
ccgacgaatgtaaggaaatactgaccgcac

SEQ ID NO: 59508 - DNA, 30 bp, Artificial Sequence
  Synthetic oligonucleotide
tacatgccgaatatatagatggtggcgcac

SEQ ID NO: 59509 - DNA, 30 bp, Artificial Sequence
  Synthetic oligonucleotide
ctagataaggaccaatcggatcctgcgcac

SEQ ID NO: 59510 - DNA, 30 bp, Artificial Sequence
  Synthetic oligonucleotide
ggccagagcccctagcagcactttgcgcac

SEQ ID NO: 59511 - DNA, 30 bp, Artificial Sequence
  Synthetic oligonucleotide
ggaaagagatgaattccgatcggctcgcac

SEQ ID NO: 59512 - DNA, 30 bp, Artificial Sequence
  Synthetic oligonucleotide
acacatcaaactttaagcagtatgaggcac

SEQ ID NO: 59513 - DNA, 30 bp, Artificial Sequence
  Synthetic oligonucleotide
agtcataggggaaagaattgtcgacggcac

SEQ ID NO: 59514 - DNA, 30 bp, Artificial Sequence
  Synthetic oligonucleotide
acgtggtcaggtaagctgaaaacccggcac

SEQ ID NO: 59515 - DNA, 30 bp, Artificial Sequence
  Synthetic oligonucleotide
accagaagtgacgtcgagaacactgggcac

SEQ ID NO: 59516 - DNA, 30 bp, Artificial Sequence
  Synthetic oligonucleotide
cgggcctaatagttatgagtggaatggcac

SEQ ID NO: 59517 - DNA, 30 bp, Artificial Sequence
  Synthetic oligonucleotide
cgtggtttgcgatagagttctgtgtggcac

SEQ ID NO: 59518 - DNA, 30 bp, Artificial Sequence
  Synthetic oligonucleotide
taacaacaaagggtgaactcaagttggcac

SEQ ID NO: 59519 - DNA, 30 bp, Artificial Sequence
  Synthetic oligonucleotide
cgatgcactctttttgaatcgagtgtgcac

SEQ ID NO: 59520 - DNA, 30 bp, Artificial Sequence
  Synthetic oligonucleotide
tggtcaagacccaggtgaacaagtaatcac

SEQ ID NO: 59521 - DNA, 30 bp, Artificial Sequence
  Synthetic oligonucleotide
gcgccctcaaacatgcctacaagctatcac

SEQ ID NO: 59522 - DNA, 30 bp, Artificial Sequence
  Synthetic oligonucleotide
cgaacggttagtccaatatataaccctcac

SEQ ID NO: 59523 - DNA, 30 bp, Artificial Sequence
  Synthetic oligonucleotide
acaatgtaaggtaagcataaaggtcctcac

SEQ ID NO: 59524 - DNA, 30 bp, Artificial Sequence
  Synthetic oligonucleotide
taggtgggttgcgtgctggcgaactctcac

SEQ ID NO: 59525 - DNA, 30 bp, Artificial Sequence
  Synthetic oligonucleotide
gcaacgggcgataaacccagttaaagtcac

SEQ ID NO: 59526 - DNA, 30 bp, Artificial Sequence
  Synthetic oligonucleotide
ttggggtaacatcgtatctgaactagtcac

SEQ ID NO: 59527 - DNA, 30 bp, Artificial Sequence
  Synthetic oligonucleotide
aggtgttaacgatcgcaagagtgccgtcac

SEQ ID NO: 59528 - DNA, 30 bp, Artificial Sequence
  Synthetic oligonucleotide
cgagttgctgatcccgtccatgaacttcac

SEQ ID NO: 59529 - DNA, 30 bp, Artificial Sequence
  Synthetic oligonucleotide
cgataaaacgatgataggtaggcacaagac

SEQ ID NO: 59530 - DNA, 30 bp, Artificial Sequence
  Synthetic oligonucleotide
caggactggctcgttgctcacgtctaagac

SEQ ID NO: 59531 - DNA, 30 bp, Artificial Sequence
  Synthetic oligonucleotide
taggtatcattgatctgcgtagtgtaagac

SEQ ID NO: 59532 - DNA, 30 bp, Artificial Sequence
  Synthetic oligonucleotide
ggatgagtaaccagaggcttcgcgacagac

SEQ ID NO: 59533 - DNA, 30 bp, Artificial Sequence
  Synthetic oligonucleotide
ggggcggacgatatatagaacaatccagac

SEQ ID NO: 59534 - DNA, 30 bp, Artificial Sequence
  Synthetic oligonucleotide
catatgagttaagcacagaagcttgcagac

SEQ ID NO: 59535 - DNA, 30 bp, Artificial Sequence
  Synthetic oligonucleotide
gcacgtcgcagaaggcacccgagctcagac

SEQ ID NO: 59536 - DNA, 30 bp, Artificial Sequence
  Synthetic oligonucleotide
aggtgtgaccgaagcgggcgcaccagagac

SEQ ID NO: 59537 - DNA, 30 bp, Artificial Sequence
  Synthetic oligonucleotide
cgaaagttggatcggttcaaaccgagagac

SEQ ID NO: 59538 - DNA, 30 bp, Artificial Sequence
  Synthetic oligonucleotide
gccttggaatagatgccgggtgggagagac

SEQ ID NO: 59539 - DNA, 30 bp, Artificial Sequence
  Synthetic oligonucleotide
gaaacgacaatgtattgtgctgcacgagac

SEQ ID NO: 59540 - DNA, 30 bp, Artificial Sequence
  Synthetic oligonucleotide
atagtactgagcacatggcttgttcgagac

SEQ ID NO: 59541 - DNA, 30 bp, Artificial Sequence
  Synthetic oligonucleotide
tgcaaagcctgaatcggggcgcccggagac

SEQ ID NO: 59542 - DNA, 30 bp, Artificial Sequence
  Synthetic oligonucleotide
ggggaaattagatcacggtgaaggggagac

SEQ ID NO: 59543 - DNA, 30 bp, Artificial Sequence
  Synthetic oligonucleotide
gcccgtaagaccactgcgtagagcatagac

SEQ ID NO: 59544 - DNA, 30 bp, Artificial Sequence
  Synthetic oligonucleotide
aggtatcgggacgacaggaaaggcctagac

SEQ ID NO: 59545 - DNA, 30 bp, Artificial Sequence
  Synthetic oligonucleotide
accgttgtactagtgtgcctaaaattagac

SEQ ID NO: 59546 - DNA, 30 bp, Artificial Sequence
  Synthetic oligonucleotide
tcgccactatattaacgaagacgtaacgac

SEQ ID NO: 59547 - DNA, 30 bp, Artificial Sequence
  Synthetic oligonucleotide
agtgacagactgggtaataaatagaccgac

SEQ ID NO: 59548 - DNA, 30 bp, Artificial Sequence
  Synthetic oligonucleotide
gcttatggactcaagcactactacgccgac

SEQ ID NO: 59549 - DNA, 30 bp, Artificial Sequence
  Synthetic oligonucleotide
cgcccaatcaagacaatcctccgggccgac

SEQ ID NO: 59550 - DNA, 30 bp, Artificial Sequence
  Synthetic oligonucleotide
tagactttctcaaagagagcgtcaagcgac

SEQ ID NO: 59551 - DNA, 30 bp, Artificial Sequence
  Synthetic oligonucleotide
agaaagcccggggacatgcaaaggcgcgac

SEQ ID NO: 59552 - DNA, 30 bp, Artificial Sequence
  Synthetic oligonucleotide
tcgcaagactcatagcgctactagggcgac

SEQ ID NO: 59553 - DNA, 30 bp, Artificial Sequence
  Synthetic oligonucleotide
acataccctcctccacgtgactcgtgcgac

SEQ ID NO: 59554 - DNA, 30 bp, Artificial Sequence
  Synthetic oligonucleotide
gaagaagggagacgagtagactgaatcgac

SEQ ID NO: 59555 - DNA, 30 bp, Artificial Sequence
  Synthetic oligonucleotide
gttgaacatcctggccctacaagcatcgac

SEQ ID NO: 59556 - DNA, 30 bp, Artificial Sequence
  Synthetic oligonucleotide
taaggaaggccgaaatctctgaagatcgac

SEQ ID NO: 59557 - DNA, 30 bp, Artificial Sequence
  Synthetic oligonucleotide
gagcaaacataacctctgtataagatcgac

SEQ ID NO: 59558 - DNA, 30 bp, Artificial Sequence
  Synthetic oligonucleotide
caccataagtgatactatggagacctcgac

SEQ ID NO: 59559 - DNA, 30 bp, Artificial Sequence
  Synthetic oligonucleotide
tcaagaaaaggggctcggcggtacctcgac

SEQ ID NO: 59560 - DNA, 30 bp, Artificial Sequence
  Synthetic oligonucleotide
gggatggctaagcataggagggcggtcgac

SEQ ID NO: 59561 - DNA, 30 bp, Artificial Sequence
  Synthetic oligonucleotide
tccagagatataatttcttagcagttcgac

SEQ ID NO: 59562 - DNA, 30 bp, Artificial Sequence
  Synthetic oligonucleotide
cgaaccaacataagtgtcatacacaaggac

SEQ ID NO: 59563 - DNA, 30 bp, Artificial Sequence
  Synthetic oligonucleotide
ctatgaaagcaaccaacagggcataaggac

SEQ ID NO: 59564 - DNA, 30 bp, Artificial Sequence
  Synthetic oligonucleotide
gctctcgaggaaggatcgctctaccaggac

SEQ ID NO: 59565 - DNA, 30 bp, Artificial Sequence
  Synthetic oligonucleotide
cctaatcaaccgggtaatccgtagcaggac

SEQ ID NO: 59566 - DNA, 30 bp, Artificial Sequence
  Synthetic oligonucleotide
aacgttacgtaactattgattttagaggac

SEQ ID NO: 59567 - DNA, 30 bp, Artificial Sequence
  Synthetic oligonucleotide
cagaactgaacaagcgaccagggcgaggac

SEQ ID NO: 59568 - DNA, 30 bp, Artificial Sequence
  Synthetic oligonucleotide
gtcgtggggagagtcacacatggtgaggac

SEQ ID NO: 59569 - DNA, 30 bp, Artificial Sequence
  Synthetic oligonucleotide
agatccgatgtggctccacaagagtaggac

SEQ ID NO: 59570 - DNA, 30 bp, Artificial Sequence
  Synthetic oligonucleotide
ctgaccaggctagcggagtgaactacggac

SEQ ID NO: 59571 - DNA, 30 bp, Artificial Sequence
  Synthetic oligonucleotide
atgtccccgaaccgaatcggaacagcggac

SEQ ID NO: 59572 - DNA, 30 bp, Artificial Sequence
  Synthetic oligonucleotide
ccaaaagtaccttgtgacactcaggcggac

SEQ ID NO: 59573 - DNA, 30 bp, Artificial Sequence
  Synthetic oligonucleotide
ctgagcatgtcgataatgacagaaagggac

SEQ ID NO: 59574 - DNA, 30 bp, Artificial Sequence
  Synthetic oligonucleotide
gtgtgaaaaataaattctattcgtagggac

SEQ ID NO: 59575 - DNA, 30 bp, Artificial Sequence
  Synthetic oligonucleotide
acgcgggcagaaactattaactaacgggac

SEQ ID NO: 59576 - DNA, 30 bp, Artificial Sequence
  Synthetic oligonucleotide
gtacgtttccgcacgtgatcaacaggggac

SEQ ID NO: 59577 - DNA, 30 bp, Artificial Sequence
  Synthetic oligonucleotide
ggtaccatttctgaaaaactaaagggggac

SEQ ID NO: 59578 - DNA, 30 bp, Artificial Sequence
  Synthetic oligonucleotide
gagaacacaaacgcgccataaattggggac

SEQ ID NO: 59579 - DNA, 30 bp, Artificial Sequence
  Synthetic oligonucleotide
ttaggaggactaaccgaggtgtacctggac

SEQ ID NO: 59580 - DNA, 30 bp, Artificial Sequence
  Synthetic oligonucleotide
acgctcttactaagcatgtgtggagtggac

SEQ ID NO: 59581 - DNA, 30 bp, Artificial Sequence
  Synthetic oligonucleotide
gtggtgagggcaccggtatagaacgtggac

SEQ ID NO: 59582 - DNA, 30 bp, Artificial Sequence
  Synthetic oligonucleotide
cgcggaccgacaagccagttcaatgatgac

SEQ ID NO: 59583 - DNA, 30 bp, Artificial Sequence
  Synthetic oligonucleotide
gtactggggtggacatgtactggatatgac

SEQ ID NO: 59584 - DNA, 30 bp, Artificial Sequence
  Synthetic oligonucleotide
gcgaatcaccatacagctggagcgactgac

SEQ ID NO: 59585 - DNA, 30 bp, Artificial Sequence
  Synthetic oligonucleotide
accaggagacgagtgggtctccgatctgac

SEQ ID NO: 59586 - DNA, 30 bp, Artificial Sequence
  Synthetic oligonucleotide
ctgttgagtacctccatcgatatcagtgac

SEQ ID NO: 59587 - DNA, 30 bp, Artificial Sequence
  Synthetic oligonucleotide
cgggtgacgcttcaaacccatgtacgtgac

SEQ ID NO: 59588 - DNA, 30 bp, Artificial Sequence
  Synthetic oligonucleotide
gcaaaaatcagcgggtgttagacaggtgac

SEQ ID NO: 59589 - DNA, 30 bp, Artificial Sequence
  Synthetic oligonucleotide
cctaatccccaagcgattcggggatgtgac

SEQ ID NO: 59590 - DNA, 30 bp, Artificial Sequence
  Synthetic oligonucleotide
gcgaaggtactagcgggtctaatctgtgac

SEQ ID NO: 59591 - DNA, 30 bp, Artificial Sequence
  Synthetic oligonucleotide
gaaaggggccaaatatcaataccgattgac

SEQ ID NO: 59592 - DNA, 29 bp, Artificial Sequence
  Synthetic oligonucleotide
aagactggtccataagagaaaaaacatac

SEQ ID NO: 59593 - DNA, 30 bp, Artificial Sequence
  Synthetic oligonucleotide
agaaacagaggcctccgttaaaagccatac

SEQ ID NO: 59594 - DNA, 30 bp, Artificial Sequence
  Synthetic oligonucleotide
agacgaaataaaggtcatgtgactccatac

SEQ ID NO: 59595 - DNA, 30 bp, Artificial Sequence
  Synthetic oligonucleotide
ggcgggactgtcacgtcgacaccgagatac

SEQ ID NO: 59596 - DNA, 30 bp, Artificial Sequence
  Synthetic oligonucleotide
agaaccgagctaggtatgtatggacgatac

SEQ ID NO: 59597 - DNA, 30 bp, Artificial Sequence
  Synthetic oligonucleotide
cgctattgtcgggaacaaaaagtgcgatac

SEQ ID NO: 59598 - DNA, 30 bp, Artificial Sequence
  Synthetic oligonucleotide
gcagggccaccataccccactcatcgatac

SEQ ID NO: 59599 - DNA, 30 bp, Artificial Sequence
  Synthetic oligonucleotide
tcccactgactgtagtgagtgtccggatac

SEQ ID NO: 59600 - DNA, 30 bp, Artificial Sequence
  Synthetic oligonucleotide
tcgcgaaggaagatagagagcgtgggatac

SEQ ID NO: 59601 - DNA, 30 bp, Artificial Sequence
  Synthetic oligonucleotide
aggtactcttataaacaccatagaatatac

SEQ ID NO: 59602 - DNA, 30 bp, Artificial Sequence
  Synthetic oligonucleotide
ctagggcacgtcggcaatagtccattatac

SEQ ID NO: 59603 - DNA, 30 bp, Artificial Sequence
  Synthetic oligonucleotide
gtatggtggcgactatagacacgaaactac

SEQ ID NO: 59604 - DNA, 30 bp, Artificial Sequence
  Synthetic oligonucleotide
gacatctccgaatgggacaacgtcaactac

SEQ ID NO: 59605 - DNA, 30 bp, Artificial Sequence
  Synthetic oligonucleotide
cgttcaaatgagagtataatgtagaactac

SEQ ID NO: 59606 - DNA, 30 bp, Artificial Sequence
  Synthetic oligonucleotide
aggactatgactatacacagaatacactac

SEQ ID NO: 59607 - DNA, 30 bp, Artificial Sequence
  Synthetic oligonucleotide
gtaccaccaattataaaatactgaacctac

SEQ ID NO: 59608 - DNA, 30 bp, Artificial Sequence
  Synthetic oligonucleotide
acttgtcttgggaaacaccacaacacctac

SEQ ID NO: 59609 - DNA, 30 bp, Artificial Sequence
  Synthetic oligonucleotide
cggagagagacagtattccgtgtgccctac

SEQ ID NO: 59610 - DNA, 30 bp, Artificial Sequence
  Synthetic oligonucleotide
atcactaagtaacacgtgaaacacggctac

SEQ ID NO: 59611 - DNA, 30 bp, Artificial Sequence
  Synthetic oligonucleotide
gcggtcggactgaaaatgagtgtgtgctac

SEQ ID NO: 59612 - DNA, 30 bp, Artificial Sequence
  Synthetic oligonucleotide
aacgtgagatggaaatcgcctaacctctac

SEQ ID NO: 59613 - DNA, 30 bp, Artificial Sequence
  Synthetic oligonucleotide
accacatgaggaaatgtctcgtgagtctac

SEQ ID NO: 59614 - DNA, 30 bp, Artificial Sequence
  Synthetic oligonucleotide
gggcgatcaccccctaccattaaggtctac

SEQ ID NO: 59615 - DNA, 30 bp, Artificial Sequence
  Synthetic oligonucleotide
cagaggataattgccatagaggggcagtac

SEQ ID NO: 59616 - DNA, 30 bp, Artificial Sequence
  Synthetic oligonucleotide
gacactgtccaaagtggcgtctcggagtac

SEQ ID NO: 59617 - DNA, 30 bp, Artificial Sequence
  Synthetic oligonucleotide
aggaacgtggggtaaaaaggaaatacgtac

SEQ ID NO: 59618 - DNA, 30 bp, Artificial Sequence
  Synthetic oligonucleotide
agagacaacttgaacccaagacccccgtac

SEQ ID NO: 59619 - DNA, 30 bp, Artificial Sequence
  Synthetic oligonucleotide
ggagtgtcataaaaggcacaacgcccgtac

SEQ ID NO: 59620 - DNA, 29 bp, Artificial Sequence
  Synthetic oligonucleotide
gccaaagttggactactgacgaatcgtac

SEQ ID NO: 59621 - DNA, 30 bp, Artificial Sequence
  Synthetic oligonucleotide
gatggctgggcaaaagctacaaaaatgtac

SEQ ID NO: 59622 - DNA, 30 bp, Artificial Sequence
  Synthetic oligonucleotide
cacacttctatcagcagagggtgagtgtac

SEQ ID NO: 59623 - DNA, 30 bp, Artificial Sequence
  Synthetic oligonucleotide
cgcctacgagaagatgaataatcgaattac

SEQ ID NO: 59624 - DNA, 30 bp, Artificial Sequence
  Synthetic oligonucleotide
actagatagaactatcgagcagctcattac

SEQ ID NO: 59625 - DNA, 30 bp, Artificial Sequence
  Synthetic oligonucleotide
acgtctctagccaggcgtatccactcttac

SEQ ID NO: 59626 - DNA, 30 bp, Artificial Sequence
  Synthetic oligonucleotide
acgggcatggtaaatctgtaacggagttac

SEQ ID NO: 59627 - DNA, 30 bp, Artificial Sequence
  Synthetic oligonucleotide
tgtacaacgtaggtccgggtaatgcgttac

SEQ ID NO: 59628 - DNA, 30 bp, Artificial Sequence
  Synthetic oligonucleotide
gtgaggggcgttaaaggaaacgaatgttac

SEQ ID NO: 59629 - DNA, 30 bp, Artificial Sequence
  Synthetic oligonucleotide
agcacaagggagctagtagagcactgttac

SEQ ID NO: 59630 - DNA, 30 bp, Artificial Sequence
  Synthetic oligonucleotide
gataggtagcagagcaaggcgcggatttac

SEQ ID NO: 59631 - DNA, 30 bp, Artificial Sequence
  Synthetic oligonucleotide
cttaacctaacatctgagaacgaacaaacc

SEQ ID NO: 59632 - DNA, 30 bp, Artificial Sequence
  Synthetic oligonucleotide
caaagagcgtcgacaaatgatgggcaaacc

SEQ ID NO: 59633 - DNA, 30 bp, Artificial Sequence
  Synthetic oligonucleotide
agatcgacgaattgaatagtataagaaacc

SEQ ID NO: 59634 - DNA, 30 bp, Artificial Sequence
  Synthetic oligonucleotide
caaacgataacgtataaagctcatgaaacc

SEQ ID NO: 59635 - DNA, 30 bp, Artificial Sequence
  Synthetic oligonucleotide
gtggggaaacggtacagagctgcctaaacc

SEQ ID NO: 59636 - DNA, 30 bp, Artificial Sequence
  Synthetic oligonucleotide
acagtgagcttcaagcaaatggtaacaacc

SEQ ID NO: 59637 - DNA, 30 bp, Artificial Sequence
  Synthetic oligonucleotide
aggcaaggcaaagtggatgtgtagacaacc

SEQ ID NO: 59638 - DNA, 30 bp, Artificial Sequence
  Synthetic oligonucleotide
tgctaatcgaagaggacaatctatgcaacc

SEQ ID NO: 59639 - DNA, 30 bp, Artificial Sequence
  Synthetic oligonucleotide
ggaggccaacggctcatggctaaacgaacc

SEQ ID NO: 59640 - DNA, 30 bp, Artificial Sequence
  Synthetic oligonucleotide
gcgggtaggatggtatcgcaccaacgaacc

SEQ ID NO: 59641 - DNA, 30 bp, Artificial Sequence
  Synthetic oligonucleotide
tgacaaaggctgatggagagttaccgaacc

SEQ ID NO: 59642 - DNA, 30 bp, Artificial Sequence
  Synthetic oligonucleotide
ctcgatgacacaataaacatatgctgaacc

SEQ ID NO: 59643 - DNA, 30 bp, Artificial Sequence
  Synthetic oligonucleotide
atagggaccagtgactccaacccgtgaacc

SEQ ID NO: 59644 - DNA, 30 bp, Artificial Sequence
  Synthetic oligonucleotide
atagcgaaagggaccgggagagtgtgaacc

SEQ ID NO: 59645 - DNA, 30 bp, Artificial Sequence
  Synthetic oligonucleotide
cgacaggccatgaaccccctcagtataacc

SEQ ID NO: 59646 - DNA, 30 bp, Artificial Sequence
  Synthetic oligonucleotide
cggctaacgtgatctagagagtaattaacc

SEQ ID NO: 59647 - DNA, 30 bp, Artificial Sequence
  Synthetic oligonucleotide
aggacaaaacacggatcaagcctaaacacc

SEQ ID NO: 59648 - DNA, 30 bp, Artificial Sequence
  Synthetic oligonucleotide
agcgagggtcgcgcactagtaccagacacc

SEQ ID NO: 59649 - DNA, 30 bp, Artificial Sequence
  Synthetic oligonucleotide
tcgtgcgaagaagctctgaccgtggacacc

SEQ ID NO: 59650 - DNA, 30 bp, Artificial Sequence
  Synthetic oligonucleotide
tcaacaatcgagggacctaaatgctacacc

SEQ ID NO: 59651 - DNA, 30 bp, Artificial Sequence
  Synthetic oligonucleotide
gacacgtaatctaaatagaattataccacc

SEQ ID NO: 59652 - DNA, 30 bp, Artificial Sequence
  Synthetic oligonucleotide
taaatgaaatgagcgatcaaggagtccacc

SEQ ID NO: 59653 - DNA, 30 bp, Artificial Sequence
  Synthetic oligonucleotide
acacacgctaaaaatgaaaaggattccacc

SEQ ID NO: 59654 - DNA, 30 bp, Artificial Sequence
  Synthetic oligonucleotide
ggcaggcataagggcaaagttaacatcacc

SEQ ID NO: 59655 - DNA, 30 bp, Artificial Sequence
  Synthetic oligonucleotide
aagatcgcaacaccaatgataccgatcacc

SEQ ID NO: 59656 - DNA, 30 bp, Artificial Sequence
  Synthetic oligonucleotide
aggtattaggtagggtagatctaaaagacc

SEQ ID NO: 59657 - DNA, 30 bp, Artificial Sequence
  Synthetic oligonucleotide
cacacaactaagaaatagctaagcaagacc

SEQ ID NO: 59658 - DNA, 30 bp, Artificial Sequence
  Synthetic oligonucleotide
ccgcgtggcgcaggggacccaaggaagacc

SEQ ID NO: 59659 - DNA, 30 bp, Artificial Sequence
  Synthetic oligonucleotide
caggtgcatgcttaaacgttaatccagacc

SEQ ID NO: 59660 - DNA, 30 bp, Artificial Sequence
  Synthetic oligonucleotide
aggttaactgccagatagaggcggcagacc

SEQ ID NO: 59661 - DNA, 30 bp, Artificial Sequence
  Synthetic oligonucleotide
gcgctgaagaggaagggatagtggcagacc

SEQ ID NO: 59662 - DNA, 30 bp, Artificial Sequence
  Synthetic oligonucleotide
gatctaaaattggaggaaccgtaagagacc

SEQ ID NO: 59663 - DNA, 30 bp, Artificial Sequence
  Synthetic oligonucleotide
cgagggaggggggtgtatgggtatgagacc

SEQ ID NO: 59664 - DNA, 30 bp, Artificial Sequence
  Synthetic oligonucleotide
ccgagacaacgtggcgactaaggcacgacc

SEQ ID NO: 59665 - DNA, 30 bp, Artificial Sequence
  Synthetic oligonucleotide
accgccggatgttggctcccgaaagcgacc

SEQ ID NO: 59666 - DNA, 30 bp, Artificial Sequence
  Synthetic oligonucleotide
cagaacgatcgaaaagaatgctaaaggacc

SEQ ID NO: 59667 - DNA, 30 bp, Artificial Sequence
  Synthetic oligonucleotide
ccgtacacagcggaggaagataaagggacc

SEQ ID NO: 59668 - DNA, 30 bp, Artificial Sequence
  Synthetic oligonucleotide
gcaagcggactgaagaattagatcatgacc

SEQ ID NO: 59669 - DNA, 30 bp, Artificial Sequence
  Synthetic oligonucleotide
cttgcccaagactcgggtagagaagtgacc

SEQ ID NO: 59670 - DNA, 30 bp, Artificial Sequence
  Synthetic oligonucleotide
tcacagccagtggataaatcaggcgtgacc

SEQ ID NO: 59671 - DNA, 30 bp, Artificial Sequence
  Synthetic oligonucleotide
gaacaatacattcgacaggagagggtgacc

SEQ ID NO: 59672 - DNA, 30 bp, Artificial Sequence
  Synthetic oligonucleotide
gatctaaaaccctgcggagtacataatacc

SEQ ID NO: 59673 - DNA, 30 bp, Artificial Sequence
  Synthetic oligonucleotide
tcgcgagataacagtgctcgccgtcatacc

SEQ ID NO: 59674 - DNA, 30 bp, Artificial Sequence
  Synthetic oligonucleotide
aacggcaaggaggcctaaataatcactacc

SEQ ID NO: 59675 - DNA, 30 bp, Artificial Sequence
  Synthetic oligonucleotide
tacttcacaagggacgtggtggcacctacc

SEQ ID NO: 59676 - DNA, 30 bp, Artificial Sequence
  Synthetic oligonucleotide
aagggtaatcacaccccattgagccctacc

SEQ ID NO: 59677 - DNA, 30 bp, Artificial Sequence
  Synthetic oligonucleotide
atcccaaattagagtgacataaacgctacc

SEQ ID NO: 59678 - DNA, 30 bp, Artificial Sequence
  Synthetic oligonucleotide
aatgagcgaagtcgttgtcgctaatctacc

SEQ ID NO: 59679 - DNA, 30 bp, Artificial Sequence
  Synthetic oligonucleotide
taagatagcgatcataagcctaaaggtacc

SEQ ID NO: 59680 - DNA, 30 bp, Artificial Sequence
  Synthetic oligonucleotide
ggaacgactggtccaaagtttaacggtacc

SEQ ID NO: 59681 - DNA, 30 bp, Artificial Sequence
  Synthetic oligonucleotide
taccgcgcgtataggcgtaagtggggtacc

SEQ ID NO: 59682 - DNA, 30 bp, Artificial Sequence
  Synthetic oligonucleotide
cgtggatacaaagggagtagatctcttacc

SEQ ID NO: 59683 - DNA, 30 bp, Artificial Sequence
  Synthetic oligonucleotide
ggtgctgaatagggcaccccgcgtaaaccc

SEQ ID NO: 59684 - DNA, 30 bp, Artificial Sequence
  Synthetic oligonucleotide
taaagatatatgcgtaggtcgtcacaaccc

SEQ ID NO: 59685 - DNA, 30 bp, Artificial Sequence
  Synthetic oligonucleotide
tcgtgggggagatacatggctacccaaccc

SEQ ID NO: 59686 - DNA, 30 bp, Artificial Sequence
  Synthetic oligonucleotide
gtgagagcaaaacgggaggttgcctaaccc

SEQ ID NO: 59687 - DNA, 30 bp, Artificial Sequence
  Synthetic oligonucleotide
taaagaccaatagtgaagaaaagcacaccc

SEQ ID NO: 59688 - DNA, 30 bp, Artificial Sequence
  Synthetic oligonucleotide
cggtacgcgtcagtccttagtgggccaccc

SEQ ID NO: 59689 - DNA, 30 bp, Artificial Sequence
  Synthetic oligonucleotide
cgtaaatctggtgcatagactcattcaccc

SEQ ID NO: 59690 - DNA, 30 bp, Artificial Sequence
  Synthetic oligonucleotide
gcggtaaacatctcaatagaatacagaccc

SEQ ID NO: 59691 - DNA, 30 bp, Artificial Sequence
  Synthetic oligonucleotide
aagcgaaatataagtgtccgcataggaccc

SEQ ID NO: 59692 - DNA, 30 bp, Artificial Sequence
  Synthetic oligonucleotide
agggaattacacgtgagggagggtggaccc

SEQ ID NO: 59693 - DNA, 30 bp, Artificial Sequence
  Synthetic oligonucleotide
ccaagcgacacctggagtatgccatgaccc

SEQ ID NO: 59694 - DNA, 30 bp, Artificial Sequence
  Synthetic oligonucleotide
tggtcctggatgatgctataacagtgaccc

SEQ ID NO: 59695 - DNA, 30 bp, Artificial Sequence
  Synthetic oligonucleotide
ggatgcataaaacgtctggtaatgataccc

SEQ ID NO: 59696 - DNA, 30 bp, Artificial Sequence
  Synthetic oligonucleotide
agccgtgtaaggacgagacgccatgtaccc

SEQ ID NO: 59697 - DNA, 30 bp, Artificial Sequence
  Synthetic oligonucleotide
aacgagcaggaagagggtcgtactttaccc

SEQ ID NO: 59698 - DNA, 30 bp, Artificial Sequence
  Synthetic oligonucleotide
aaggagatctgacaatccagaaggctcccc

SEQ ID NO: 59699 - DNA, 30 bp, Artificial Sequence
  Synthetic oligonucleotide
atagggtggcaacctaggtcgattctcccc

SEQ ID NO: 59700 - DNA, 30 bp, Artificial Sequence
  Synthetic oligonucleotide
tgtgtgcaacggtacactaaacaagtcccc

SEQ ID NO: 59701 - DNA, 30 bp, Artificial Sequence
  Synthetic oligonucleotide
gtaaatggcacaaaatcgaagttattcccc

SEQ ID NO: 59702 - DNA, 30 bp, Artificial Sequence
  Synthetic oligonucleotide
ccgtcaaacgggtcgtgattgctgaagccc

SEQ ID NO: 59703 - DNA, 30 bp, Artificial Sequence
  Synthetic oligonucleotide
ggacaatctcatacgcaattcagtgagccc

SEQ ID NO: 59704 - DNA, 30 bp, Artificial Sequence
  Synthetic oligonucleotide
aggttcgcgtaagttgaggagggtgagccc

SEQ ID NO: 59705 - DNA, 30 bp, Artificial Sequence
  Synthetic oligonucleotide
catggtttaccgttaaaagcagcttagccc

SEQ ID NO: 59706 - DNA, 30 bp, Artificial Sequence
  Synthetic oligonucleotide
gtaaggaggcacacagctcatattccgccc

SEQ ID NO: 59707 - DNA, 30 bp, Artificial Sequence
  Synthetic oligonucleotide
cggatgtgacttgcatcattgatagcgccc

SEQ ID NO: 59708 - DNA, 30 bp, Artificial Sequence
  Synthetic oligonucleotide
tcatagtatgcaaaaacttgcccgtcgccc

SEQ ID NO: 59709 - DNA, 30 bp, Artificial Sequence
  Synthetic oligonucleotide
cacaaaaacctgtccaggtatgtgtcgccc

SEQ ID NO: 59710 - DNA, 30 bp, Artificial Sequence
  Synthetic oligonucleotide
ttaccaacaggaaacgttgccccctggccc

SEQ ID NO: 59711 - DNA, 30 bp, Artificial Sequence
  Synthetic oligonucleotide
aggttggcttggtgaagcgataagtggccc

SEQ ID NO: 59712 - DNA, 30 bp, Artificial Sequence
  Synthetic oligonucleotide
gtgggcgaggtggtaatgagccataatccc

SEQ ID NO: 59713 - DNA, 30 bp, Artificial Sequence
  Synthetic oligonucleotide
acaaaaacgggaagaccatgatttaatccc

SEQ ID NO: 59714 - DNA, 30 bp, Artificial Sequence
  Synthetic oligonucleotide
cggacggacctacgatcatgctaccatccc

SEQ ID NO: 59715 - DNA, 30 bp, Artificial Sequence
  Synthetic oligonucleotide
ggataactagtagcgaggcgacgtgatccc

SEQ ID NO: 59716 - DNA, 30 bp, Artificial Sequence
  Synthetic oligonucleotide
gcaagagaggatgctagtggaacaagtccc

SEQ ID NO: 59717 - DNA, 30 bp, Artificial Sequence
  Synthetic oligonucleotide
gggtgccacaaaaccgtaatgtcctgtccc

SEQ ID NO: 59718 - DNA, 30 bp, Artificial Sequence
  Synthetic oligonucleotide
ctgcggaggtctataacacaggcttgtccc

SEQ ID NO: 59719 - DNA, 30 bp, Artificial Sequence
  Synthetic oligonucleotide
cggtccgtgacagggaaacacaaacttccc

SEQ ID NO: 59720 - DNA, 30 bp, Artificial Sequence
  Synthetic oligonucleotide
agccgaatagatcgccatcgttaaaaagcc

SEQ ID NO: 59721 - DNA, 30 bp, Artificial Sequence
  Synthetic oligonucleotide
cggcaccactggatcatcgcctaccaagcc

SEQ ID NO: 59722 - DNA, 30 bp, Artificial Sequence
  Synthetic oligonucleotide
ccataaggacttacctcgccgagcagagcc

SEQ ID NO: 59723 - DNA, 30 bp, Artificial Sequence
  Synthetic oligonucleotide
tgggagagttgcggacaccttgagagagcc

SEQ ID NO: 59724 - DNA, 30 bp, Artificial Sequence
  Synthetic oligonucleotide
ttgaaggccaatatcctagatcgccgagcc

SEQ ID NO: 59725 - DNA, 30 bp, Artificial Sequence
  Synthetic oligonucleotide
acaagtatctgttcgagaggtgttcgagcc

SEQ ID NO: 59726 - DNA, 30 bp, Artificial Sequence
  Synthetic oligonucleotide
agaactaaattatcagaacacacttgagcc

SEQ ID NO: 59727 - DNA, 30 bp, Artificial Sequence
  Synthetic oligonucleotide
gcacagggaaagtcacggcaagcaatagcc

SEQ ID NO: 59728 - DNA, 30 bp, Artificial Sequence
  Synthetic oligonucleotide
tcagaccagagctccgatgaaggaatagcc

SEQ ID NO: 59729 - DNA, 30 bp, Artificial Sequence
  Synthetic oligonucleotide
aaggagacaagcgcgtcagaagccatagcc

SEQ ID NO: 59730 - DNA, 30 bp, Artificial Sequence
  Synthetic oligonucleotide
ctagggcgagtggtcccacgtgttatagcc

SEQ ID NO: 59731 - DNA, 30 bp, Artificial Sequence
  Synthetic oligonucleotide
tgcacaccgtgcaaataagaacacaccgcc

SEQ ID NO: 59732 - DNA, 30 bp, Artificial Sequence
  Synthetic oligonucleotide
tcaagcggaaagatagcaaagttaagcgcc

SEQ ID NO: 59733 - DNA, 30 bp, Artificial Sequence
  Synthetic oligonucleotide
ggaaacagagtgccggaccgatagagcgcc

SEQ ID NO: 59734 - DNA, 30 bp, Artificial Sequence
  Synthetic oligonucleotide
cacaacacgggaagaggcgtgcggagcgcc

SEQ ID NO: 59735 - DNA, 30 bp, Artificial Sequence
  Synthetic oligonucleotide
agctgtgatacatggagaatgaagcgcgcc

SEQ ID NO: 59736 - DNA, 30 bp, Artificial Sequence
  Synthetic oligonucleotide
acggaaacatcggcggttgttccgcgcgcc

SEQ ID NO: 59737 - DNA, 30 bp, Artificial Sequence
  Synthetic oligonucleotide
cgaatggtgtgagcgatcgtcttgggcgcc

SEQ ID NO: 59738 - DNA, 30 bp, Artificial Sequence
  Synthetic oligonucleotide
gtacggggttgaacgacgagattcatcgcc

SEQ ID NO: 59739 - DNA, 30 bp, Artificial Sequence
  Synthetic oligonucleotide
ccgcaacataactataatagccaagaggcc

SEQ ID NO: 59740 - DNA, 30 bp, Artificial Sequence
  Synthetic oligonucleotide
ctgtacgagcctgggagagagcaggaggcc

SEQ ID NO: 59741 - DNA, 30 bp, Artificial Sequence
  Synthetic oligonucleotide
agcatcgtgacccttacgggcgaggaggcc

SEQ ID NO: 59742 - DNA, 30 bp, Artificial Sequence
  Synthetic oligonucleotide
caacgtgagtgagtcccactcgtttaggcc

SEQ ID NO: 59743 - DNA, 30 bp, Artificial Sequence
  Synthetic oligonucleotide
tcgatacgggggaagttaacagacccggcc

SEQ ID NO: 59744 - DNA, 30 bp, Artificial Sequence
  Synthetic oligonucleotide
ggggactcggggataaaacgtgattcggcc

SEQ ID NO: 59745 - DNA, 30 bp, Artificial Sequence
  Synthetic oligonucleotide
cgctcgtgaggtgttcatgagatcagggcc

SEQ ID NO: 59746 - DNA, 31 bp, Artificial Sequence
  Synthetic oligonucleotide
tcgtagatgtgaccgcactttggtcagggcc

SEQ ID NO: 59747 - DNA, 30 bp, Artificial Sequence
  Synthetic oligonucleotide
acgtcaatgtgcgtcgggagatatagggcc

SEQ ID NO: 59748 - DNA, 30 bp, Artificial Sequence
  Synthetic oligonucleotide
taaacaaaggtgcacgttacaccgcgggcc

SEQ ID NO: 59749 - DNA, 30 bp, Artificial Sequence
  Synthetic oligonucleotide
tgaccgatgtgtccgaagtgaaagggggcc

SEQ ID NO: 59750 - DNA, 30 bp, Artificial Sequence
  Synthetic oligonucleotide
gaacgataagactgtaccggattgtgggcc

SEQ ID NO: 59751 - DNA, 30 bp, Artificial Sequence
  Synthetic oligonucleotide
gtgcaagcgaatcaaaggctaacaatggcc

SEQ ID NO: 59752 - DNA, 30 bp, Artificial Sequence
  Synthetic oligonucleotide
gctagtgaaccacccgtgatcaagatggcc

SEQ ID NO: 59753 - DNA, 30 bp, Artificial Sequence
  Synthetic oligonucleotide
ggggcccgatagagaataacagacctggcc

SEQ ID NO: 59754 - DNA, 30 bp, Artificial Sequence
  Synthetic oligonucleotide
agcttggagacaatcctgaagttagtggcc

SEQ ID NO: 59755 - DNA, 30 bp, Artificial Sequence
  Synthetic oligonucleotide
tgtgcgacaattgagttggatacgttggcc

SEQ ID NO: 59756 - DNA, 30 bp, Artificial Sequence
  Synthetic oligonucleotide
cccccgcgctaataacaggatgagcatgcc

SEQ ID NO: 59757 - DNA, 30 bp, Artificial Sequence
  Synthetic oligonucleotide
attgcgggcgaataagccacggggcatgcc

SEQ ID NO: 59758 - DNA, 30 bp, Artificial Sequence
  Synthetic oligonucleotide
cgtgatcgagtttggaaaccttgtgatgcc

SEQ ID NO: 59759 - DNA, 30 bp, Artificial Sequence
  Synthetic oligonucleotide
tggaaagaaccagtctcgcctcagactgcc

SEQ ID NO: 59760 - DNA, 30 bp, Artificial Sequence
  Synthetic oligonucleotide
cgtactgaacccgggaagggagcgactgcc

SEQ ID NO: 59761 - DNA, 30 bp, Artificial Sequence
  Synthetic oligonucleotide
ttgaagcgtaccaaaagtcccaacgctgcc

SEQ ID NO: 59762 - DNA, 30 bp, Artificial Sequence
  Synthetic oligonucleotide
agcgtatgttcggcttcggtcgagtgtgcc

SEQ ID NO: 59763 - DNA, 30 bp, Artificial Sequence
  Synthetic oligonucleotide
cgcgcataattatatccgatatagcttgcc

SEQ ID NO: 59764 - DNA, 30 bp, Artificial Sequence
  Synthetic oligonucleotide
agaagccgaggtacgcctgaaacgcaatcc

SEQ ID NO: 59765 - DNA, 30 bp, Artificial Sequence
  Synthetic oligonucleotide
tttcgtgtacacgtaagaagacaataatcc

SEQ ID NO: 59766 - DNA, 30 bp, Artificial Sequence
  Synthetic oligonucleotide
gtaataataaaaaccacacaataaacatcc

SEQ ID NO: 59767 - DNA, 30 bp, Artificial Sequence
  Synthetic oligonucleotide
agcctaccgcgcggtgtgaagtttgcatcc

SEQ ID NO: 59768 - DNA, 30 bp, Artificial Sequence
  Synthetic oligonucleotide
cactctaggacatcgtaatcttgctcatcc

SEQ ID NO: 59769 - DNA, 30 bp, Artificial Sequence
  Synthetic oligonucleotide
aggtgatatcgaattccaaatcacagatcc

SEQ ID NO: 59770 - DNA, 30 bp, Artificial Sequence
  Synthetic oligonucleotide
ggactacggtaaagaaagaaatagcgatcc

SEQ ID NO: 59771 - DNA, 30 bp, Artificial Sequence
  Synthetic oligonucleotide
gcaaataaggcgatttcagagaagtgatcc

SEQ ID NO: 59772 - DNA, 30 bp, Artificial Sequence
  Synthetic oligonucleotide
tcaccacactatgcaaggtcgaacaactcc

SEQ ID NO: 59773 - DNA, 30 bp, Artificial Sequence
  Synthetic oligonucleotide
cgagtggagcgagaagtatacggtaactcc

SEQ ID NO: 59774 - DNA, 30 bp, Artificial Sequence
  Synthetic oligonucleotide
gcacatcgccgatgcaacccactgtactcc

SEQ ID NO: 59775 - DNA, 30 bp, Artificial Sequence
  Synthetic oligonucleotide
cctaaacctcaagcataacatccgacctcc

SEQ ID NO: 59776 - DNA, 30 bp, Artificial Sequence
  Synthetic oligonucleotide
tggccacttaggacgtgtgcgtgaagctcc

SEQ ID NO: 59777 - DNA, 30 bp, Artificial Sequence
  Synthetic oligonucleotide
cttacagaacactccctaacggaaggctcc

SEQ ID NO: 59778 - DNA, 30 bp, Artificial Sequence
  Synthetic oligonucleotide
tatgtagacaaaaaggtggattcgtgctcc

SEQ ID NO: 59779 - DNA, 30 bp, Artificial Sequence
  Synthetic oligonucleotide
ctggaaagtatcataactaagtatgtctcc

SEQ ID NO: 59780 - DNA, 30 bp, Artificial Sequence
  Synthetic oligonucleotide
ccgcgggaaggcaggaacgcccgtaagtcc

SEQ ID NO: 59781 - DNA, 30 bp, Artificial Sequence
  Synthetic oligonucleotide
cctctcacagggggtcagtaaaaccagtcc

SEQ ID NO: 59782 - DNA, 30 bp, Artificial Sequence
  Synthetic oligonucleotide
ggtgtgggcaagttggagacgtatcagtcc

SEQ ID NO: 59783 - DNA, 30 bp, Artificial Sequence
  Synthetic oligonucleotide
catggtctgcaagtaaataaggcatagtcc

SEQ ID NO: 59784 - DNA, 30 bp, Artificial Sequence
  Synthetic oligonucleotide
gctagcaatagtcgagatagactagcgtcc

SEQ ID NO: 59785 - DNA, 30 bp, Artificial Sequence
  Synthetic oligonucleotide
tcctgttcccaaagtggccaaaaggcgtcc

SEQ ID NO: 59786 - DNA, 30 bp, Artificial Sequence
  Synthetic oligonucleotide
gtaatccccgagtagtaacagctgtcgtcc

SEQ ID NO: 59787 - DNA, 30 bp, Artificial Sequence
  Synthetic oligonucleotide
aatgcatcctaggcaagtaagcgcgggtcc

SEQ ID NO: 59788 - DNA, 30 bp, Artificial Sequence
  Synthetic oligonucleotide
aaagggtaataatcaacgagattgtggtcc

SEQ ID NO: 59789 - DNA, 30 bp, Artificial Sequence
  Synthetic oligonucleotide
ctattaaaaggagctgcacggttactgtcc

SEQ ID NO: 59790 - DNA, 30 bp, Artificial Sequence
  Synthetic oligonucleotide
ccaaggatgaaggctgggccgacagcttcc

SEQ ID NO: 59791 - DNA, 30 bp, Artificial Sequence
  Synthetic oligonucleotide
gactacaacatgcgaggacaacatgcttcc

SEQ ID NO: 59792 - DNA, 30 bp, Artificial Sequence
  Synthetic oligonucleotide
aggaaagagtcggttgggaaacaaggttcc

SEQ ID NO: 59793 - DNA, 30 bp, Artificial Sequence
  Synthetic oligonucleotide
tgttacccagtgaccagatggagtggttcc

SEQ ID NO: 59794 - DNA, 30 bp, Artificial Sequence
  Synthetic oligonucleotide
acgggttggatcgcggggcgacgatgttcc

SEQ ID NO: 59795 - DNA, 30 bp, Artificial Sequence
  Synthetic oligonucleotide
acggaaaatgaaagcaggcttgccatttcc

SEQ ID NO: 59796 - DNA, 30 bp, Artificial Sequence
  Synthetic oligonucleotide
acggatagggagtggcacataccgttttcc

SEQ ID NO: 59797 - DNA, 30 bp, Artificial Sequence
  Synthetic oligonucleotide
gcgtaggtatatgcggagggttgaaaaagc

SEQ ID NO: 59798 - DNA, 30 bp, Artificial Sequence
  Synthetic oligonucleotide
tcagggctaagtgaaaccagtgtgaaaagc

SEQ ID NO: 59799 - DNA, 30 bp, Artificial Sequence
  Synthetic oligonucleotide
ggccgtacgatatcgggttcaaaacaaagc

SEQ ID NO: 59800 - DNA, 30 bp, Artificial Sequence
  Synthetic oligonucleotide
actcggggtgaagcgcggcaaaggcaaagc

SEQ ID NO: 59801 - DNA, 30 bp, Artificial Sequence
  Synthetic oligonucleotide
cgatgcttgatataatcggatgttcaaagc

SEQ ID NO: 59802 - DNA, 30 bp, Artificial Sequence
  Synthetic oligonucleotide
gcaaaccgcgcgcaacagaaagcataaagc

SEQ ID NO: 59803 - DNA, 30 bp, Artificial Sequence
  Synthetic oligonucleotide
cgcaaacttaagagtatggttgtataaagc

SEQ ID NO: 59804 - DNA, 30 bp, Artificial Sequence
  Synthetic oligonucleotide
cgtggtggcccagagatataggtgccaagc

SEQ ID NO: 59805 - DNA, 30 bp, Artificial Sequence
  Synthetic oligonucleotide
agggcaccgcgcacattacaagcagcaagc

SEQ ID NO: 59806 - DNA, 30 bp, Artificial Sequence
  Synthetic oligonucleotide
tccgcagagtgtctctaaacaaatgcaagc

SEQ ID NO: 59807 - DNA, 30 bp, Artificial Sequence
  Synthetic oligonucleotide
agacagtcaagtccctgagttaggagaagc

SEQ ID NO: 59808 - DNA, 30 bp, Artificial Sequence
  Synthetic oligonucleotide
agaggtggcatactaagcgtagaaggaagc

SEQ ID NO: 59809 - DNA, 30 bp, Artificial Sequence
  Synthetic oligonucleotide
caacaagcctacgtcgacccttaatgaagc

SEQ ID NO: 59810 - DNA, 30 bp, Artificial Sequence
  Synthetic oligonucleotide
ttactcgtggaatggtaacacgactgaagc

SEQ ID NO: 59811 - DNA, 30 bp, Artificial Sequence
  Synthetic oligonucleotide
ggctagaggaaaactgtacgcgtctgaagc

SEQ ID NO: 59812 - DNA, 30 bp, Artificial Sequence
  Synthetic oligonucleotide
cacaggctagtcatcatgcgtacaataagc

SEQ ID NO: 59813 - DNA, 30 bp, Artificial Sequence
  Synthetic oligonucleotide
gcttccctgtaaggtagcatacgagtaagc

SEQ ID NO: 59814 - DNA, 30 bp, Artificial Sequence
  Synthetic oligonucleotide
gtcgttggggaggacaataatcgattaagc

SEQ ID NO: 59815 - DNA, 30 bp, Artificial Sequence
  Synthetic oligonucleotide
tggtacgagtttagacagaagtgaaacagc

SEQ ID NO: 59816 - DNA, 30 bp, Artificial Sequence
  Synthetic oligonucleotide
gaaaacagaggacgctaatcgtccaacagc

SEQ ID NO: 59817 - DNA, 29 bp, Artificial Sequence
  Synthetic oligonucleotide
ggagtccgaaattagaacccgtcaacagc

SEQ ID NO: 59818 - DNA, 30 bp, Artificial Sequence
  Synthetic oligonucleotide
caacgggcgtcagaacatgcaccgcacagc

SEQ ID NO: 59819 - DNA, 30 bp, Artificial Sequence
  Synthetic oligonucleotide
acgagcttagtcttgaaagctcggcacagc

SEQ ID NO: 59820 - DNA, 30 bp, Artificial Sequence
  Synthetic oligonucleotide
tggcggcaagttacaccaggatacgacagc

SEQ ID NO: 59821 - DNA, 30 bp, Artificial Sequence
  Synthetic oligonucleotide
gacacgatacccacacctatcgtaaccagc

SEQ ID NO: 59822 - DNA, 30 bp, Artificial Sequence
  Synthetic oligonucleotide
cgtctgcatacctaacagcttagtaccagc

SEQ ID NO: 59823 - DNA, 30 bp, Artificial Sequence
  Synthetic oligonucleotide
tcgaatgggggatgttatcactgacccagc

SEQ ID NO: 59824 - DNA, 30 bp, Artificial Sequence
  Synthetic oligonucleotide
cagtacaagtccagagatgaaaatgccagc

SEQ ID NO: 59825 - DNA, 30 bp, Artificial Sequence
  Synthetic oligonucleotide
aggtctatcaaatgtcgaaaagaatccagc

SEQ ID NO: 59826 - DNA, 30 bp, Artificial Sequence
  Synthetic oligonucleotide
tcacacgttgactgaggttagagatccagc

SEQ ID NO: 59827 - DNA, 30 bp, Artificial Sequence
  Synthetic oligonucleotide
tagaacgtcgtacgtgatcgaaactccagc

SEQ ID NO: 59828 - DNA, 30 bp, Artificial Sequence
  Synthetic oligonucleotide
gaagctgaatgcaagaggtggtcgtccagc

SEQ ID NO: 59829 - DNA, 30 bp, Artificial Sequence
  Synthetic oligonucleotide
aatcgtgacagcacgggaagcgggcgcagc

SEQ ID NO: 59830 - DNA, 30 bp, Artificial Sequence
  Synthetic oligonucleotide
tagtagcagtactagagggccagaggcagc

SEQ ID NO: 59831 - DNA, 30 bp, Artificial Sequence
  Synthetic oligonucleotide
gggttatggacagtgtgatagtgcggcagc

SEQ ID NO: 59832 - DNA, 30 bp, Artificial Sequence
  Synthetic oligonucleotide
caaaacctgctccacgttcgcggaatcagc

SEQ ID NO: 59833 - DNA, 30 bp, Artificial Sequence
  Synthetic oligonucleotide
tcagacagggatgacttgtaggagatcagc

SEQ ID NO: 59834 - DNA, 30 bp, Artificial Sequence
  Synthetic oligonucleotide
cacaatggcctggtgtggatctgtctcagc

SEQ ID NO: 59835 - DNA, 30 bp, Artificial Sequence
  Synthetic oligonucleotide
acaggatcgagaaatcgaggtagcaagagc

SEQ ID NO: 59836 - DNA, 30 bp, Artificial Sequence
  Synthetic oligonucleotide
gtggaataaagatgtctaacacctaagagc

SEQ ID NO: 59837 - DNA, 30 bp, Artificial Sequence
  Synthetic oligonucleotide
gcataagacactataactgtatgacagagc

SEQ ID NO: 59838 - DNA, 30 bp, Artificial Sequence
  Synthetic oligonucleotide
tcgccggtcggtatctgacacgaagagagc

SEQ ID NO: 59839 - DNA, 30 bp, Artificial Sequence
  Synthetic oligonucleotide
actgatgggcccatggtagtgaacgagagc

SEQ ID NO: 59840 - DNA, 30 bp, Artificial Sequence
  Synthetic oligonucleotide
tgggaatcataaggccggtaagagtagagc

SEQ ID NO: 59841 - DNA, 30 bp, Artificial Sequence
  Synthetic oligonucleotide
cagggaatctccaacaggcaattgtagagc

SEQ ID NO: 59842 - DNA, 30 bp, Artificial Sequence
  Synthetic oligonucleotide
gtgagtagccgtagttaacagtattagagc

SEQ ID NO: 59843 - DNA, 30 bp, Artificial Sequence
  Synthetic oligonucleotide
acagatcatcgccaatggggttcaacgagc

SEQ ID NO: 59844 - DNA, 30 bp, Artificial Sequence
  Synthetic oligonucleotide
ggcttaaaaggcgtaacaatgtgcacgagc

SEQ ID NO: 59845 - DNA, 30 bp, Artificial Sequence
  Synthetic oligonucleotide
atgaacgacgatattacgacggtgacgagc

SEQ ID NO: 59846 - DNA, 30 bp, Artificial Sequence
  Synthetic oligonucleotide
atctgccgtcggcgacaaattacggcgagc

SEQ ID NO: 59847 - DNA, 30 bp, Artificial Sequence
  Synthetic oligonucleotide
aggcggcaaagcggctcaagcgagtcgagc

SEQ ID NO: 59848 - DNA, 30 bp, Artificial Sequence
  Synthetic oligonucleotide
gattgtgccaaaatcgtaatcacgaggagc

SEQ ID NO: 59849 - DNA, 30 bp, Artificial Sequence
  Synthetic oligonucleotide
gtcgaagggcatagcgagagatctaggagc

SEQ ID NO: 59850 - DNA, 30 bp, Artificial Sequence
  Synthetic oligonucleotide
aagtgatagccagtgggctcgagccggagc

SEQ ID NO: 59851 - DNA, 30 bp, Artificial Sequence
  Synthetic oligonucleotide
gaagaacaccatgtattagtatcgtggagc

SEQ ID NO: 59852 - DNA, 30 bp, Artificial Sequence
  Synthetic oligonucleotide
ctcgttgatcggttatgaggtcggatgagc

SEQ ID NO: 59853 - DNA, 30 bp, Artificial Sequence
  Synthetic oligonucleotide
atgcttagtatactacgggatgggctgagc

SEQ ID NO: 59854 - DNA, 30 bp, Artificial Sequence
  Synthetic oligonucleotide
agtcagagcgggttaagtagcactgtgagc

SEQ ID NO: 59855 - DNA, 30 bp, Artificial Sequence
  Synthetic oligonucleotide
gaataacaaagagcagattccatgcatagc

SEQ ID NO: 59856 - DNA, 30 bp, Artificial Sequence
  Synthetic oligonucleotide
atgaaaatataaaaggctccagctgatagc

SEQ ID NO: 59857 - DNA, 30 bp, Artificial Sequence
  Synthetic oligonucleotide
gccaaagatcaaagcaaaggtaaatatagc

SEQ ID NO: 59858 - DNA, 30 bp, Artificial Sequence
  Synthetic oligonucleotide
gacatcagtcgagtacctcaatgctatagc

SEQ ID NO: 59859 - DNA, 30 bp, Artificial Sequence
  Synthetic oligonucleotide
acaggggacgacggtttccgaagcactagc

SEQ ID NO: 59860 - DNA, 30 bp, Artificial Sequence
  Synthetic oligonucleotide
tcgcgaacacatgttaatagcagcactagc

SEQ ID NO: 59861 - DNA, 30 bp, Artificial Sequence
  Synthetic oligonucleotide
gcgacgtggctctgtaacgagtaatctagc

SEQ ID NO: 59862 - DNA, 30 bp, Artificial Sequence
  Synthetic oligonucleotide
tggtcttggggttcaacacctgcctctagc

SEQ ID NO: 59863 - DNA, 30 bp, Artificial Sequence
  Synthetic oligonucleotide
gtagggagggggaattaagtcgattctagc

SEQ ID NO: 59864 - DNA, 30 bp, Artificial Sequence
  Synthetic oligonucleotide
tcacggagtgtttgaatgaacgagagtagc

SEQ ID NO: 59865 - DNA, 30 bp, Artificial Sequence
  Synthetic oligonucleotide
accgatcgaagaaacgaatacttcggtagc

SEQ ID NO: 59866 - DNA, 30 bp, Artificial Sequence
  Synthetic oligonucleotide
aaacgcattagacgataagaccatggtagc

SEQ ID NO: 59867 - DNA, 30 bp, Artificial Sequence
  Synthetic oligonucleotide
gaggcactaaatattcggaacaggtgtagc

SEQ ID NO: 59868 - DNA, 30 bp, Artificial Sequence
  Synthetic oligonucleotide
agacagtgaaagtgggctctaacttgtagc

SEQ ID NO: 59869 - DNA, 30 bp, Artificial Sequence
  Synthetic oligonucleotide
aggggcattgaatccataaccgatgttagc

SEQ ID NO: 59870 - DNA, 30 bp, Artificial Sequence
  Synthetic oligonucleotide
ttcgcagggtgcatgaatttgccgtttagc

SEQ ID NO: 59871 - DNA, 30 bp, Artificial Sequence
  Synthetic oligonucleotide
ttcaaggaataactgacataaaggtttagc

SEQ ID NO: 59872 - DNA, 31 bp, Artificial Sequence
  Synthetic oligonucleotide
tagatatgaggaatatataccgaaaaaacgc

SEQ ID NO: 59873 - DNA, 30 bp, Artificial Sequence
  Synthetic oligonucleotide
cagaccatacaatcccgagagccaccacgc

SEQ ID NO: 59874 - DNA, 30 bp, Artificial Sequence
  Synthetic oligonucleotide
acgcgaacggccagtggagacggtggacgc

SEQ ID NO: 59875 - DNA, 31 bp, Artificial Sequence
  Synthetic oligonucleotide
cactgctcagaagaacgaggagaagatacgc

SEQ ID NO: 59876 - DNA, 30 bp, Artificial Sequence
  Synthetic oligonucleotide
tagggacctcaataaaaacggtggatacgc

SEQ ID NO: 59877 - DNA, 30 bp, Artificial Sequence
  Synthetic oligonucleotide
acgagtcacggtccaaaagccaaattacgc

SEQ ID NO: 59878 - DNA, 30 bp, Artificial Sequence
  Synthetic oligonucleotide
ccatcaagagtgactcatgaggacaaccgc

SEQ ID NO: 59879 - DNA, 30 bp, Artificial Sequence
  Synthetic oligonucleotide
cggggagtaattcagtagagagcgaaccgc

SEQ ID NO: 59880 - DNA, 30 bp, Artificial Sequence
  Synthetic oligonucleotide
agtcctagggggaaactagtacgtaaccgc

SEQ ID NO: 59881 - DNA, 30 bp, Artificial Sequence
  Synthetic oligonucleotide
gggcctaaacgctagactcgcacccaccgc

SEQ ID NO: 59882 - DNA, 30 bp, Artificial Sequence
  Synthetic oligonucleotide
tgccagggtgatgaaatgtggcgtcaccgc

SEQ ID NO: 59883 - DNA, 30 bp, Artificial Sequence
  Synthetic oligonucleotide
ccaccactctggagggaaactaccgcccgc

SEQ ID NO: 59884 - DNA, 30 bp, Artificial Sequence
  Synthetic oligonucleotide
ccgaatacgaatacaagaacttgctcccgc

SEQ ID NO: 59885 - DNA, 30 bp, Artificial Sequence
  Synthetic oligonucleotide
aacggatctattggggcaagtgcctgccgc

SEQ ID NO: 59886 - DNA, 30 bp, Artificial Sequence
  Synthetic oligonucleotide
gggggagtacgtatcgtcggagcaaagcgc

SEQ ID NO: 59887 - DNA, 30 bp, Artificial Sequence
  Synthetic oligonucleotide
accgttgtggagaaatacctcgagtagcgc

SEQ ID NO: 59888 - DNA, 30 bp, Artificial Sequence
  Synthetic oligonucleotide
agcatggatgggtggggatcagggtagcgc

SEQ ID NO: 59889 - DNA, 30 bp, Artificial Sequence
  Synthetic oligonucleotide
attacctaacatttggatccagatacgcgc

SEQ ID NO: 59890 - DNA, 30 bp, Artificial Sequence
  Synthetic oligonucleotide
ctcaaacttagaacacacaagagtacgcgc

SEQ ID NO: 59891 - DNA, 30 bp, Artificial Sequence
  Synthetic oligonucleotide
acgtgtcccgcgatacccagatgtacgcgc

SEQ ID NO: 59892 - DNA, 30 bp, Artificial Sequence
  Synthetic oligonucleotide
ttacaccataccccaacaagtctaccgcgc

SEQ ID NO: 59893 - DNA, 30 bp, Artificial Sequence
  Synthetic oligonucleotide
agcacatacggtacattcgcaacgtcgcgc

SEQ ID NO: 59894 - DNA, 30 bp, Artificial Sequence
  Synthetic oligonucleotide
gatcggggggtacgtcagaattcggggcgc

SEQ ID NO: 59895 - DNA, 30 bp, Artificial Sequence
  Synthetic oligonucleotide
actatgcgaacagagaaccggtgtatgcgc

SEQ ID NO: 59896 - DNA, 30 bp, Artificial Sequence
  Synthetic oligonucleotide
tgaaggaaatgattgagccgtgaactgcgc

SEQ ID NO: 59897 - DNA, 30 bp, Artificial Sequence
  Synthetic oligonucleotide
tttgaaacgaattgggttagcaacgtgcgc

SEQ ID NO: 59898 - DNA, 30 bp, Artificial Sequence
  Synthetic oligonucleotide
tatctagtgccagacaaccaagaggatcgc

SEQ ID NO: 59899 - DNA, 30 bp, Artificial Sequence
  Synthetic oligonucleotide
gctatgaaacattaagagcgggagtatcgc

SEQ ID NO: 59900 - DNA, 30 bp, Artificial Sequence
  Synthetic oligonucleotide
tggatgcctgtcatccatgaggtttatcgc

SEQ ID NO: 59901 - DNA, 30 bp, Artificial Sequence
  Synthetic oligonucleotide
aacgatcacgggtgttactagcgaactcgc

SEQ ID NO: 59902 - DNA, 30 bp, Artificial Sequence
  Synthetic oligonucleotide
agatggacgatcgacgaaaaggccactcgc

SEQ ID NO: 59903 - DNA, 30 bp, Artificial Sequence
  Synthetic oligonucleotide
gtcacgagaggctatattagaaggactcgc

SEQ ID NO: 59904 - DNA, 30 bp, Artificial Sequence
  Synthetic oligonucleotide
gcctcagtgggacggtacagacatactcgc

SEQ ID NO: 59905 - DNA, 30 bp, Artificial Sequence
  Synthetic oligonucleotide
gccaacaccatcaccgaagcaggagctcgc

SEQ ID NO: 59906 - DNA, 30 bp, Artificial Sequence
  Synthetic oligonucleotide
agtgccggtatgctacggtagtgagctcgc

SEQ ID NO: 59907 - DNA, 30 bp, Artificial Sequence
  Synthetic oligonucleotide
gagacgatggaataccaaccaacgtgtcgc

SEQ ID NO: 59908 - DNA, 30 bp, Artificial Sequence
  Synthetic oligonucleotide
gctcgacggatcagaggtgtggaaattcgc

SEQ ID NO: 59909 - DNA, 30 bp, Artificial Sequence
  Synthetic oligonucleotide
cacgaacggccaactcgggcgagacttcgc

SEQ ID NO: 59910 - DNA, 30 bp, Artificial Sequence
  Synthetic oligonucleotide
aagtgccctgggctgcggggctgacttcgc

SEQ ID NO: 59911 - DNA, 30 bp, Artificial Sequence
  Synthetic oligonucleotide
cggtgaatagagtgcaactagggggttcgc

SEQ ID NO: 59912 - DNA, 30 bp, Artificial Sequence
  Synthetic oligonucleotide
cctggcccgggatgtgataagagttttcgc

SEQ ID NO: 59913 - DNA, 30 bp, Artificial Sequence
  Synthetic oligonucleotide
tgaggcagagcggcacggggtcacaaaggc

SEQ ID NO: 59914 - DNA, 30 bp, Artificial Sequence
  Synthetic oligonucleotide
tgggagtgctgtaggtgactacggaaaggc

SEQ ID NO: 59915 - DNA, 30 bp, Artificial Sequence
  Synthetic oligonucleotide
aggcttcccgatttacacaagcgtaaaggc

SEQ ID NO: 59916 - DNA, 30 bp, Artificial Sequence
  Synthetic oligonucleotide
acacatgaaagaatactcaacccacaaggc

SEQ ID NO: 59917 - DNA, 30 bp, Artificial Sequence
  Synthetic oligonucleotide
gccactgaggagggagcgttacatcaaggc

SEQ ID NO: 59918 - DNA, 30 bp, Artificial Sequence
  Synthetic oligonucleotide
agtacatgagatgaaagcacggtcgaaggc

SEQ ID NO: 59919 - DNA, 30 bp, Artificial Sequence
  Synthetic oligonucleotide
actggacgtcataacgttcggaagacaggc

SEQ ID NO: 59920 - DNA, 30 bp, Artificial Sequence
  Synthetic oligonucleotide
gacaaacaggggaacattcaagcgccaggc

SEQ ID NO: 59921 - DNA, 30 bp, Artificial Sequence
  Synthetic oligonucleotide
gatatccctcacggtattcgaaggccaggc

SEQ ID NO: 59922 - DNA, 30 bp, Artificial Sequence
  Synthetic oligonucleotide
taagaatacattgagggcttacttccaggc

SEQ ID NO: 59923 - DNA, 30 bp, Artificial Sequence
  Synthetic oligonucleotide
agatggtacacaacaaggtggtttccaggc

SEQ ID NO: 59924 - DNA, 30 bp, Artificial Sequence
  Synthetic oligonucleotide
tcccgttaggatcaaacacacctagcaggc

SEQ ID NO: 59925 - DNA, 30 bp, Artificial Sequence
  Synthetic oligonucleotide
tagtcaacgataataacaaataaatcaggc

SEQ ID NO: 59926 - DNA, 30 bp, Artificial Sequence
  Synthetic oligonucleotide
ggaaccgtatagcagatcaacagctcaggc

SEQ ID NO: 59927 - DNA, 30 bp, Artificial Sequence
  Synthetic oligonucleotide
aaggggcagtgttgcgcagtgctgtcaggc

SEQ ID NO: 59928 - DNA, 30 bp, Artificial Sequence
  Synthetic oligonucleotide
acagaaggatagatgggaggtttaagaggc

SEQ ID NO: 59929 - DNA, 30 bp, Artificial Sequence
  Synthetic oligonucleotide
ggggtgagcgcggaatacatatttagaggc

SEQ ID NO: 59930 - DNA, 30 bp, Artificial Sequence
  Synthetic oligonucleotide
agaaatggttctagccagggatagataggc

SEQ ID NO: 59931 - DNA, 30 bp, Artificial Sequence
  Synthetic oligonucleotide
tagagacgccctaatcaagctatactaggc

SEQ ID NO: 59932 - DNA, 30 bp, Artificial Sequence
  Synthetic oligonucleotide
tgtcgaaagcgaatatcacttgcagtaggc

SEQ ID NO: 59933 - DNA, 30 bp, Artificial Sequence
  Synthetic oligonucleotide
acgaacgaagcccagcttctatgagtaggc

SEQ ID NO: 59934 - DNA, 30 bp, Artificial Sequence
  Synthetic oligonucleotide
tcacgactagtatatataaacgaggtaggc

SEQ ID NO: 59935 - DNA, 30 bp, Artificial Sequence
  Synthetic oligonucleotide
tcgataaaccgcgatggaggctctgtaggc

SEQ ID NO: 59936 - DNA, 30 bp, Artificial Sequence
  Synthetic oligonucleotide
ccttaacatcacgtatatcggtcgttaggc

SEQ ID NO: 59937 - DNA, 30 bp, Artificial Sequence
  Synthetic oligonucleotide
caacatcacaagtatagagcaagtaacggc

SEQ ID NO: 59938 - DNA, 30 bp, Artificial Sequence
  Synthetic oligonucleotide
cactcgaaggggatgtatcgttaacacggc

SEQ ID NO: 59939 - DNA, 30 bp, Artificial Sequence
  Synthetic oligonucleotide
aaacgttgactcgtaacttagaaagacggc

SEQ ID NO: 59940 - DNA, 30 bp, Artificial Sequence
  Synthetic oligonucleotide
caacatgagcttattcgaaccttacccggc

SEQ ID NO: 59941 - DNA, 30 bp, Artificial Sequence
  Synthetic oligonucleotide
gaatataacgtcaggcaacacagagccggc

SEQ ID NO: 59942 - DNA, 30 bp, Artificial Sequence
  Synthetic oligonucleotide
gtggtgagcttaagccaatacatagccggc

SEQ ID NO: 59943 - DNA, 30 bp, Artificial Sequence
  Synthetic oligonucleotide
agtagagaccgtcgactagaaaccgccggc

SEQ ID NO: 59944 - DNA, 30 bp, Artificial Sequence
  Synthetic oligonucleotide
tcttggcgcgactttacggaattggccggc

SEQ ID NO: 59945 - DNA, 30 bp, Artificial Sequence
  Synthetic oligonucleotide
aagctggtagagatgatgaaaggtagcggc

SEQ ID NO: 59946 - DNA, 30 bp, Artificial Sequence
  Synthetic oligonucleotide
ccctaaaacaccgaataaagcgtcggcggc

SEQ ID NO: 59947 - DNA, 30 bp, Artificial Sequence
  Synthetic oligonucleotide
caacaggctaccacggctgggctaatcggc

SEQ ID NO: 59948 - DNA, 30 bp, Artificial Sequence
  Synthetic oligonucleotide
ggtgaacctacgcgcttaatgcgtctcggc

SEQ ID NO: 59949 - DNA, 30 bp, Artificial Sequence
  Synthetic oligonucleotide
atcgggttaggatagcgaacaatagtcggc

SEQ ID NO: 59950 - DNA, 30 bp, Artificial Sequence
  Synthetic oligonucleotide
agtgtctgagttgtggcccgggtagtcggc

SEQ ID NO: 59951 - DNA, 31 bp, Artificial Sequence
  Synthetic oligonucleotide
ccgtagcaatgtgcacacaaaaggcgtcggc

SEQ ID NO: 59952 - DNA, 30 bp, Artificial Sequence
  Synthetic oligonucleotide
cgcggacatctcgaaaggcctcagttcggc

SEQ ID NO: 59953 - DNA, 30 bp, Artificial Sequence
  Synthetic oligonucleotide
gttccggcttaatcacaagaactaaagggc

SEQ ID NO: 59954 - DNA, 30 bp, Artificial Sequence
  Synthetic oligonucleotide
gtgcacccaaggaactaaaaggtagcgggc

SEQ ID NO: 59955 - DNA, 30 bp, Artificial Sequence
  Synthetic oligonucleotide
caatgtcaacaacgatgttactgggcgggc

SEQ ID NO: 59956 - DNA, 30 bp, Artificial Sequence
  Synthetic oligonucleotide
tcgctggaagaatatcagatggcctcgggc

SEQ ID NO: 59957 - DNA, 30 bp, Artificial Sequence
  Synthetic oligonucleotide
tggcactgctcaaaccttcggaacgtgggc

SEQ ID NO: 59958 - DNA, 30 bp, Artificial Sequence
  Synthetic oligonucleotide
ctgacgtttagaattaccagaaaggtgggc

SEQ ID NO: 59959 - DNA, 30 bp, Artificial Sequence
  Synthetic oligonucleotide
acttcacattacataacaatgcggttgggc

SEQ ID NO: 59960 - DNA, 30 bp, Artificial Sequence
  Synthetic oligonucleotide
acgaaggatccgtgatgtatagctttgggc

SEQ ID NO: 59961 - DNA, 30 bp, Artificial Sequence
  Synthetic oligonucleotide
tcgacggcaactcgttgccaaggtaatggc

SEQ ID NO: 59962 - DNA, 30 bp, Artificial Sequence
  Synthetic oligonucleotide
atgtaacgggagtaaaggggcgtacatggc

SEQ ID NO: 59963 - DNA, 30 bp, Artificial Sequence
  Synthetic oligonucleotide
cggggtgagggtgtcaggtgcccatatggc

SEQ ID NO: 59964 - DNA, 30 bp, Artificial Sequence
  Synthetic oligonucleotide
ataaacacggcgactgataatccctatggc

SEQ ID NO: 59965 - DNA, 29 bp, Artificial Sequence
  Synthetic oligonucleotide
aggatacaatcggtagatgaggttatggc

SEQ ID NO: 59966 - DNA, 30 bp, Artificial Sequence
  Synthetic oligonucleotide
ctgcgggggaacgatagcccgatcactggc

SEQ ID NO: 59967 - DNA, 30 bp, Artificial Sequence
  Synthetic oligonucleotide
aggtgctacccaatggtggaaatgcctggc

SEQ ID NO: 59968 - DNA, 30 bp, Artificial Sequence
  Synthetic oligonucleotide
acggacggggctcagaaactggtacgtggc

SEQ ID NO: 59969 - DNA, 30 bp, Artificial Sequence
  Synthetic oligonucleotide
gcacggatgtgaaggtttaccgcgcgtggc

SEQ ID NO: 59970 - DNA, 30 bp, Artificial Sequence
  Synthetic oligonucleotide
ggtagagatcgccaactcccttatcgtggc

SEQ ID NO: 59971 - DNA, 30 bp, Artificial Sequence
  Synthetic oligonucleotide
atgtccgactttttccgaccatagggtggc

SEQ ID NO: 59972 - DNA, 30 bp, Artificial Sequence
  Synthetic oligonucleotide
aagacttgaggagtaagtcgaaatgttggc

SEQ ID NO: 59973 - DNA, 30 bp, Artificial Sequence
  Synthetic oligonucleotide
cagaatcgatcgggacggtctcgatttggc

SEQ ID NO: 59974 - DNA, 30 bp, Artificial Sequence
  Synthetic oligonucleotide
gtgggccttatggcagaacttgtgaaatgc

SEQ ID NO: 59975 - DNA, 30 bp, Artificial Sequence
  Synthetic oligonucleotide
tcacgccattaacgagtcaatttcgcatgc

SEQ ID NO: 59976 - DNA, 30 bp, Artificial Sequence
  Synthetic oligonucleotide
agctgccaagaaaacttgtttagctcatgc

SEQ ID NO: 59977 - DNA, 30 bp, Artificial Sequence
  Synthetic oligonucleotide
ccccacggggttcggcgaaagaacagatgc

SEQ ID NO: 59978 - DNA, 30 bp, Artificial Sequence
  Synthetic oligonucleotide
aagatggaatcactagaacgagtcggatgc

SEQ ID NO: 59979 - DNA, 30 bp, Artificial Sequence
  Synthetic oligonucleotide
tcggtcttcgtgcgactaactcgactatgc

SEQ ID NO: 59980 - DNA, 30 bp, Artificial Sequence
  Synthetic oligonucleotide
tatagtacgaaaaaaaatgaaagcaactgc

SEQ ID NO: 59981 - DNA, 30 bp, Artificial Sequence
  Synthetic oligonucleotide
agacgtgtcgggcaccttcgatggaactgc

SEQ ID NO: 59982 - DNA, 30 bp, Artificial Sequence
  Synthetic oligonucleotide
atacatgaaaaacaacctgcacaaacctgc

SEQ ID NO: 59983 - DNA, 30 bp, Artificial Sequence
  Synthetic oligonucleotide
caatccagcgctaagaaatacaagacctgc

SEQ ID NO: 59984 - DNA, 30 bp, Artificial Sequence
  Synthetic oligonucleotide
ggtcattggatccacaccgaacctccctgc

SEQ ID NO: 59985 - DNA, 30 bp, Artificial Sequence
  Synthetic oligonucleotide
tggaaagccaacaggtcgtgggttccctgc

SEQ ID NO: 59986 - DNA, 30 bp, Artificial Sequence
  Synthetic oligonucleotide
acgtacttacatgggcactacgaaagctgc

SEQ ID NO: 59987 - DNA, 30 bp, Artificial Sequence
  Synthetic oligonucleotide
acccaggaccgataactgttagccagctgc

SEQ ID NO: 59988 - DNA, 30 bp, Artificial Sequence
  Synthetic oligonucleotide
ttcatggtaaagtaaggggagagcagctgc

SEQ ID NO: 59989 - DNA, 30 bp, Artificial Sequence
  Synthetic oligonucleotide
gcggcctggacagtcggaacgcaacgctgc

SEQ ID NO: 59990 - DNA, 30 bp, Artificial Sequence
  Synthetic oligonucleotide
gcgtacttatcaccatccacaaagggctgc

SEQ ID NO: 59991 - DNA, 30 bp, Artificial Sequence
  Synthetic oligonucleotide
tcgtaagccgtctgtagattgtcgggctgc

SEQ ID NO: 59992 - DNA, 30 bp, Artificial Sequence
  Synthetic oligonucleotide
acacagatcgacccctaaacggatggctgc

SEQ ID NO: 59993 - DNA, 30 bp, Artificial Sequence
  Synthetic oligonucleotide
cagctaggtggataacttgaaaaaatctgc

SEQ ID NO: 59994 - DNA, 30 bp, Artificial Sequence
  Synthetic oligonucleotide
agcgtaacggaagttgtaacgggactctgc

SEQ ID NO: 59995 - DNA, 30 bp, Artificial Sequence
  Synthetic oligonucleotide
gtcctcgcgaaggtagacctggagctctgc

SEQ ID NO: 59996 - DNA, 30 bp, Artificial Sequence
  Synthetic oligonucleotide
cactacaatttaggtacccgagcggtctgc

SEQ ID NO: 59997 - DNA, 30 bp, Artificial Sequence
  Synthetic oligonucleotide
gcgcaggcgaccgttgaccagcaaaagtgc

SEQ ID NO: 59998 - DNA, 30 bp, Artificial Sequence
  Synthetic oligonucleotide
gctgtagcaggggcaagatctgacaagtgc

SEQ ID NO: 59999 - DNA, 30 bp, Artificial Sequence
  Synthetic oligonucleotide
tcacgccgtagattatagtcccagaagtgc

SEQ ID NO: 60000 - DNA, 30 bp, Artificial Sequence
  Synthetic oligonucleotide
ggagtaggggccacaaaactcttgaagtgc

SEQ ID NO: 60001 - DNA, 30 bp, Artificial Sequence
  Synthetic oligonucleotide
gggcattagggaacagtggtgtatcagtgc

SEQ ID NO: 60002 - DNA, 30 bp, Artificial Sequence
  Synthetic oligonucleotide
caaactaccgctgaaacgtataaggagtgc

SEQ ID NO: 60003 - DNA, 30 bp, Artificial Sequence
  Synthetic oligonucleotide
ataccgggacgaggacaacttttggagtgc

SEQ ID NO: 60004 - DNA, 30 bp, Artificial Sequence
  Synthetic oligonucleotide
aaggtgtgcacgggtaacggggactagtgc

SEQ ID NO: 60005 - DNA, 30 bp, Artificial Sequence
  Synthetic oligonucleotide
aacgctgtaaccgggaagaccatgacgtgc

SEQ ID NO: 60006 - DNA, 30 bp, Artificial Sequence
  Synthetic oligonucleotide
caaagtcggaaggggcccggactatcgtgc

SEQ ID NO: 60007 - DNA, 30 bp, Artificial Sequence
  Synthetic oligonucleotide
tcttgcgtatagtgtagtaggatgtggtgc

SEQ ID NO: 60008 - DNA, 30 bp, Artificial Sequence
  Synthetic oligonucleotide
cgtatcggaacggatctcagtcagttgtgc

SEQ ID NO: 60009 - DNA, 30 bp, Artificial Sequence
  Synthetic oligonucleotide
tgtgagtgaccggacaaggaagtcaattgc

SEQ ID NO: 60010 - DNA, 30 bp, Artificial Sequence
  Synthetic oligonucleotide
tcttgagatgggatgcggcgtgaagattgc

SEQ ID NO: 60011 - DNA, 30 bp, Artificial Sequence
  Synthetic oligonucleotide
gacgatcccaaaatcacgactatagattgc

SEQ ID NO: 60012 - DNA, 30 bp, Artificial Sequence
  Synthetic oligonucleotide
gccgacaggattggactatagttggattgc

SEQ ID NO: 60013 - DNA, 30 bp, Artificial Sequence
  Synthetic oligonucleotide
ggttgcgatacacataaaacccttgattgc

SEQ ID NO: 60014 - DNA, 30 bp, Artificial Sequence
  Synthetic oligonucleotide
agggtggtggcctgtaaacccattagttgc

SEQ ID NO: 60015 - DNA, 30 bp, Artificial Sequence
  Synthetic oligonucleotide
cggacagggtaatgggatacaacaatttgc

SEQ ID NO: 60016 - DNA, 30 bp, Artificial Sequence
  Synthetic oligonucleotide
cccaaacaggcagttccaggaagcatttgc

SEQ ID NO: 60017 - DNA, 30 bp, Artificial Sequence
  Synthetic oligonucleotide
ctaccaaatcgaattagggggaacgtttgc

SEQ ID NO: 60018 - DNA, 30 bp, Artificial Sequence
  Synthetic oligonucleotide
gggttgggatccttagaaaacattcaaatc

SEQ ID NO: 60019 - DNA, 30 bp, Artificial Sequence
  Synthetic oligonucleotide
acgtgtgggtcagctgcactggactaaatc

SEQ ID NO: 60020 - DNA, 30 bp, Artificial Sequence
  Synthetic oligonucleotide
gctcacaaggaccacgaataaagttaaatc

SEQ ID NO: 60021 - DNA, 30 bp, Artificial Sequence
  Synthetic oligonucleotide
ggtccgtcacaccaataaaccatttaaatc

SEQ ID NO: 60022 - DNA, 30 bp, Artificial Sequence
  Synthetic oligonucleotide
tcaatacagcgaataaatcggataacaatc

SEQ ID NO: 60023 - DNA, 30 bp, Artificial Sequence
  Synthetic oligonucleotide
aaaggtggaattcaactgattagtacaatc

SEQ ID NO: 60024 - DNA, 30 bp, Artificial Sequence
  Synthetic oligonucleotide
cgttgctcaacgatgccacgacctgcaatc

SEQ ID NO: 60025 - DNA, 30 bp, Artificial Sequence
  Synthetic oligonucleotide
tgatacagagtgggatgaccgaatcgaatc

SEQ ID NO: 60026 - DNA, 30 bp, Artificial Sequence
  Synthetic oligonucleotide
tggagacatcggaaagctgtgtagggaatc

SEQ ID NO: 60027 - DNA, 30 bp, Artificial Sequence
  Synthetic oligonucleotide
gattgtagaactccaaaccgaagatgaatc

SEQ ID NO: 60028 - DNA, 30 bp, Artificial Sequence
  Synthetic oligonucleotide
tgcggtgaactatggaaaaaaaggataatc

SEQ ID NO: 60029 - DNA, 30 bp, Artificial Sequence
  Synthetic oligonucleotide
cgaccgcgagtgttccaatcaacagtaatc

SEQ ID NO: 60030 - DNA, 30 bp, Artificial Sequence
  Synthetic oligonucleotide
gtagaacctgtggaaatgggaacaaacatc

SEQ ID NO: 60031 - DNA, 30 bp, Artificial Sequence
  Synthetic oligonucleotide
agcgtcgagccctgatctaacttaaacatc

SEQ ID NO: 60032 - DNA, 30 bp, Artificial Sequence
  Synthetic oligonucleotide
accttagcactgaaagtcaaaaaccacatc

SEQ ID NO: 60033 - DNA, 30 bp, Artificial Sequence
  Synthetic oligonucleotide
tggattacgacttagaagctagggcacatc

SEQ ID NO: 60034 - DNA, 30 bp, Artificial Sequence
  Synthetic oligonucleotide
cccagcaaagagaggggctattcagacatc

SEQ ID NO: 60035 - DNA, 30 bp, Artificial Sequence
  Synthetic oligonucleotide
tgagaaagaggcaagaccccgttgcccatc

SEQ ID NO: 60036 - DNA, 30 bp, Artificial Sequence
  Synthetic oligonucleotide
tcacgtcggtgcgctcactggaaaagcatc

SEQ ID NO: 60037 - DNA, 30 bp, Artificial Sequence
  Synthetic oligonucleotide
cagagagagggtcccgcggtagtaagcatc

SEQ ID NO: 60038 - DNA, 30 bp, Artificial Sequence
  Synthetic oligonucleotide
aaggggacttgctagcgtagccatcgcatc

SEQ ID NO: 60039 - DNA, 30 bp, Artificial Sequence
  Synthetic oligonucleotide
cagtgaggtctggctagatggtttcgcatc

SEQ ID NO: 60040 - DNA, 30 bp, Artificial Sequence
  Synthetic oligonucleotide
acgattctaagaccgtatgcctgcggcatc

SEQ ID NO: 60041 - DNA, 30 bp, Artificial Sequence
  Synthetic oligonucleotide
acgaactcgggcagtccctgctagggcatc

SEQ ID NO: 60042 - DNA, 30 bp, Artificial Sequence
  Synthetic oligonucleotide
caaacgaatgcgaactactatttgggcatc

SEQ ID NO: 60043 - DNA, 30 bp, Artificial Sequence
  Synthetic oligonucleotide
acggacagtgaattaataacgaggtgcatc

SEQ ID NO: 60044 - DNA, 30 bp, Artificial Sequence
  Synthetic oligonucleotide
caagagggttacgtgaggtggatagtcatc

SEQ ID NO: 60045 - DNA, 30 bp, Artificial Sequence
  Synthetic oligonucleotide
acaccgaagtgttaactgatcgcgttcatc

SEQ ID NO: 60046 - DNA, 30 bp, Artificial Sequence
  Synthetic oligonucleotide
tcagtgtaacacacaagacagggacagatc

SEQ ID NO: 60047 - DNA, 30 bp, Artificial Sequence
  Synthetic oligonucleotide
attactgcgtgagaacaaggtctacagatc

SEQ ID NO: 60048 - DNA, 30 bp, Artificial Sequence
  Synthetic oligonucleotide
cacgggtctactatgaacaggtcccagatc

SEQ ID NO: 60049 - DNA, 30 bp, Artificial Sequence
  Synthetic oligonucleotide
acggacgggcgcagggaaataggcgagatc

SEQ ID NO: 60050 - DNA, 30 bp, Artificial Sequence
  Synthetic oligonucleotide
caacggtgcatcgcaggtcctaggtagatc

SEQ ID NO: 60051 - DNA, 30 bp, Artificial Sequence
  Synthetic oligonucleotide
ccttagaaaggaagtacacgaactccgatc

SEQ ID NO: 60052 - DNA, 30 bp, Artificial Sequence
  Synthetic oligonucleotide
agcacatggccccaaagtaggctgtggatc

SEQ ID NO: 60053 - DNA, 30 bp, Artificial Sequence
  Synthetic oligonucleotide
aatgaggaaaaggtggcggagcacatgatc

SEQ ID NO: 60054 - DNA, 30 bp, Artificial Sequence
  Synthetic oligonucleotide
taaggagtgcactagggcatcacagtgatc

SEQ ID NO: 60055 - DNA, 30 bp, Artificial Sequence
  Synthetic oligonucleotide
cctaatgggagggaaaaagactgagtgatc

SEQ ID NO: 60056 - DNA, 30 bp, Artificial Sequence
  Synthetic oligonucleotide
tcctcaacaacggataaaaggggtgtgatc

SEQ ID NO: 60057 - DNA, 30 bp, Artificial Sequence
  Synthetic oligonucleotide
gaacggaggaaacgaggcaggtagttgatc

SEQ ID NO: 60058 - DNA, 30 bp, Artificial Sequence
  Synthetic oligonucleotide
aagtgggtaaagatagcgttgttgttgatc

SEQ ID NO: 60059 - DNA, 30 bp, Artificial Sequence
  Synthetic oligonucleotide
ggtcaatcgactgagaacgtgtaaaatatc

SEQ ID NO: 60060 - DNA, 30 bp, Artificial Sequence
  Synthetic oligonucleotide
gaaaagggcattggagtataggcaaatatc

SEQ ID NO: 60061 - DNA, 30 bp, Artificial Sequence
  Synthetic oligonucleotide
caaggtatcaacatagcttcaaactatatc

SEQ ID NO: 60062 - DNA, 30 bp, Artificial Sequence
  Synthetic oligonucleotide
ggtagcacttgctggaatgcggggtatatc

SEQ ID NO: 60063 - DNA, 30 bp, Artificial Sequence
  Synthetic oligonucleotide
atcatcataatcatggtcgccgaacctatc

SEQ ID NO: 60064 - DNA, 30 bp, Artificial Sequence
  Synthetic oligonucleotide
cgctacataatccgaatgcgattacctatc

SEQ ID NO: 60065 - DNA, 30 bp, Artificial Sequence
  Synthetic oligonucleotide
acgtatggtactgggcacaggaatcctatc

SEQ ID NO: 60066 - DNA, 30 bp, Artificial Sequence
  Synthetic oligonucleotide
cgtaataatagtaaaagtggcggatctatc

SEQ ID NO: 60067 - DNA, 30 bp, Artificial Sequence
  Synthetic oligonucleotide
tggagaattgagaatatatgtgcacgtatc

SEQ ID NO: 60068 - DNA, 30 bp, Artificial Sequence
  Synthetic oligonucleotide
acctgggacttaataccacctgcccgtatc

SEQ ID NO: 60069 - DNA, 30 bp, Artificial Sequence
  Synthetic oligonucleotide
aggtatgtgaaacgtttccggagcggtatc

SEQ ID NO: 60070 - DNA, 30 bp, Artificial Sequence
  Synthetic oligonucleotide
gacgtgtcgtggggaaacttaatgggtatc

SEQ ID NO: 60071 - DNA, 30 bp, Artificial Sequence
  Synthetic oligonucleotide
caacgatagttgttaggataatgcgttatc

SEQ ID NO: 60072 - DNA, 30 bp, Artificial Sequence
  Synthetic oligonucleotide
tactcgctcggaaatatgacactcaaactc

SEQ ID NO: 60073 - DNA, 30 bp, Artificial Sequence
  Synthetic oligonucleotide
ccgggttccggatcaacaaacgtgaaactc

SEQ ID NO: 60074 - DNA, 30 bp, Artificial Sequence
  Synthetic oligonucleotide
atgacaactagagccataaaaatcgaactc

SEQ ID NO: 60075 - DNA, 30 bp, Artificial Sequence
  Synthetic oligonucleotide
cgacgcaaggatcctgacagcagttaactc

SEQ ID NO: 60076 - DNA, 30 bp, Artificial Sequence
  Synthetic oligonucleotide
cgtggttacaaagggcgactttgcgcactc

SEQ ID NO: 60077 - DNA, 30 bp, Artificial Sequence
  Synthetic oligonucleotide
ctgatgagctagtaactgctaaaaagactc

SEQ ID NO: 60078 - DNA, 30 bp, Artificial Sequence
  Synthetic oligonucleotide
tgctgaggacaacactagaaggacagactc

SEQ ID NO: 60079 - DNA, 30 bp, Artificial Sequence
  Synthetic oligonucleotide
gcgggcttgagttgaagaccggccagactc

SEQ ID NO: 60080 - DNA, 30 bp, Artificial Sequence
  Synthetic oligonucleotide
ggatgagggaaaaggaccagtaaaaccctc

SEQ ID NO: 60081 - DNA, 30 bp, Artificial Sequence
  Synthetic oligonucleotide
aacttcacagagcgtactaaggcaagcctc

SEQ ID NO: 60082 - DNA, 30 bp, Artificial Sequence
  Synthetic oligonucleotide
cgaaagcgtaatcattgccggataagcctc

SEQ ID NO: 60083 - DNA, 30 bp, Artificial Sequence
  Synthetic oligonucleotide
cgaatgctgactgaaaagctgggtagcctc

SEQ ID NO: 60084 - DNA, 30 bp, Artificial Sequence
  Synthetic oligonucleotide
cagggaatcagatcagtggagtccggcctc

SEQ ID NO: 60085 - DNA, 30 bp, Artificial Sequence
  Synthetic oligonucleotide
acaatgggttagatagcactgcggggcctc

SEQ ID NO: 60086 - DNA, 30 bp, Artificial Sequence
  Synthetic oligonucleotide
ggagaacgaacaaattaaccgctatgcctc

SEQ ID NO: 60087 - DNA, 30 bp, Artificial Sequence
  Synthetic oligonucleotide
acgcgggggatgtctaagtctaaggtcctc

SEQ ID NO: 60088 - DNA, 30 bp, Artificial Sequence
  Synthetic oligonucleotide
gacggttggcgtgaaaggtagcatgagctc

SEQ ID NO: 60089 - DNA, 30 bp, Artificial Sequence
  Synthetic oligonucleotide
cggccaaaggaagtcacccggcgcccgctc

SEQ ID NO: 60090 - DNA, 30 bp, Artificial Sequence
  Synthetic oligonucleotide
acggagtctgagactgacaaaacaaggctc

SEQ ID NO: 60091 - DNA, 30 bp, Artificial Sequence
  Synthetic oligonucleotide
ctgccactcagatgtcaatagctaaggctc

SEQ ID NO: 60092 - DNA, 30 bp, Artificial Sequence
  Synthetic oligonucleotide
tcataaattaggagtgctcctgtacggctc

SEQ ID NO: 60093 - DNA, 30 bp, Artificial Sequence
  Synthetic oligonucleotide
aggcggcagccttactgggacaggatgctc

SEQ ID NO: 60094 - DNA, 30 bp, Artificial Sequence
  Synthetic oligonucleotide
aacgtccgatggctaggaattgagctgctc

SEQ ID NO: 60095 - DNA, 30 bp, Artificial Sequence
  Synthetic oligonucleotide
gctgggctcggcccatccatcgtgctgctc

SEQ ID NO: 60096 - DNA, 30 bp, Artificial Sequence
  Synthetic oligonucleotide
cgtacggcctaatcgacctcgagattgctc

SEQ ID NO: 60097 - DNA, 30 bp, Artificial Sequence
  Synthetic oligonucleotide
cctggctagcgtgcgatgcataaccatctc

SEQ ID NO: 60098 - DNA, 30 bp, Artificial Sequence
  Synthetic oligonucleotide
caggccagtgcgaatagtacacgctatctc

SEQ ID NO: 60099 - DNA, 30 bp, Artificial Sequence
  Synthetic oligonucleotide
ggaaggttatcggtaggcgaacccgctctc

SEQ ID NO: 60100 - DNA, 30 bp, Artificial Sequence
  Synthetic oligonucleotide
accacgagtgtatgagcacaacgatctctc

SEQ ID NO: 60101 - DNA, 30 bp, Artificial Sequence
  Synthetic oligonucleotide
agggcggaggtaccgtttgattgatctctc

SEQ ID NO: 60102 - DNA, 30 bp, Artificial Sequence
  Synthetic oligonucleotide
gcgatcgtggccaatgcgcatcaaagtctc

SEQ ID NO: 60103 - DNA, 30 bp, Artificial Sequence
  Synthetic oligonucleotide
atcggaagaccaggcatggtatgaattctc

SEQ ID NO: 60104 - DNA, 30 bp, Artificial Sequence
  Synthetic oligonucleotide
attgccattagcgttgtggagagacaagtc

SEQ ID NO: 60105 - DNA, 30 bp, Artificial Sequence
  Synthetic oligonucleotide
ataaaggccgtgattctagatatacaagtc

SEQ ID NO: 60106 - DNA, 30 bp, Artificial Sequence
  Synthetic oligonucleotide
acgattctgagtaccaatgggccggaagtc

SEQ ID NO: 60107 - DNA, 30 bp, Artificial Sequence
  Synthetic oligonucleotide
atgcccggtcatagtgatgtcaagtaagtc

SEQ ID NO: 60108 - DNA, 30 bp, Artificial Sequence
  Synthetic oligonucleotide
tccaatgcggaaggcggggacagttaagtc

SEQ ID NO: 60109 - DNA, 30 bp, Artificial Sequence
  Synthetic oligonucleotide
catcgagctcggaggccggtacgcgcagtc

SEQ ID NO: 60110 - DNA, 30 bp, Artificial Sequence
  Synthetic oligonucleotide
attggggataagagggcttcctactcagtc

SEQ ID NO: 60111 - DNA, 30 bp, Artificial Sequence
  Synthetic oligonucleotide
caacggttgcggtagcacgtgaaaagagtc

SEQ ID NO: 60112 - DNA, 30 bp, Artificial Sequence
  Synthetic oligonucleotide
aaataaacgagtctaccagcggcaggagtc

SEQ ID NO: 60113 - DNA, 30 bp, Artificial Sequence
  Synthetic oligonucleotide
cgtgtgaccacctacgaatctaactgagtc

SEQ ID NO: 60114 - DNA, 30 bp, Artificial Sequence
  Synthetic oligonucleotide
catgggaaagaagactgtcactgaatagtc

SEQ ID NO: 60115 - DNA, 30 bp, Artificial Sequence
  Synthetic oligonucleotide
aggggggcaacaaaattggtctccgtagtc

SEQ ID NO: 60116 - DNA, 30 bp, Artificial Sequence
  Synthetic oligonucleotide
actgcgagcggggatgtgtgtgggtacgtc

SEQ ID NO: 60117 - DNA, 30 bp, Artificial Sequence
  Synthetic oligonucleotide
agccacgaacgaaaggcaaggggtaccgtc

SEQ ID NO: 60118 - DNA, 30 bp, Artificial Sequence
  Synthetic oligonucleotide
gcacgagatccatgatggggtctacccgtc

SEQ ID NO: 60119 - DNA, 30 bp, Artificial Sequence
  Synthetic oligonucleotide
ttggacagagtttcggacgtactgcgcgtc

SEQ ID NO: 60120 - DNA, 30 bp, Artificial Sequence
  Synthetic oligonucleotide
tgtatgaggcaaaagagggccgcaatcgtc

SEQ ID NO: 60121 - DNA, 30 bp, Artificial Sequence
  Synthetic oligonucleotide
gggcatagctagagaaacgcacacatcgtc

SEQ ID NO: 60122 - DNA, 30 bp, Artificial Sequence
  Synthetic oligonucleotide
tactaggttgtgaaaagtgtcgctttcgtc

SEQ ID NO: 60123 - DNA, 29 bp, Artificial Sequence
  Synthetic oligonucleotide
gcctacgacattgcgaaagtggcacggtc

SEQ ID NO: 60124 - DNA, 30 bp, Artificial Sequence
  Synthetic oligonucleotide
tcagtgacaacccgagacaaggagacggtc

SEQ ID NO: 60125 - DNA, 30 bp, Artificial Sequence
  Synthetic oligonucleotide
agcggagataggcgagcgacatctagggtc

SEQ ID NO: 60126 - DNA, 30 bp, Artificial Sequence
  Synthetic oligonucleotide
gtgcttaatggcacaactggaatccgggtc

SEQ ID NO: 60127 - DNA, 30 bp, Artificial Sequence
  Synthetic oligonucleotide
ggtgaaaaattcaaagcacagttgcgggtc

SEQ ID NO: 60128 - DNA, 30 bp, Artificial Sequence
  Synthetic oligonucleotide
acatgatgatcgtaaacaacagagggggtc

SEQ ID NO: 60129 - DNA, 30 bp, Artificial Sequence
  Synthetic oligonucleotide
catacatgggcgaactcgggtcagatggtc

SEQ ID NO: 60130 - DNA, 30 bp, Artificial Sequence
  Synthetic oligonucleotide
ggatgatagggaggggatcgcggtatggtc

SEQ ID NO: 60131 - DNA, 30 bp, Artificial Sequence
  Synthetic oligonucleotide
ccgtggctggaccggattggatgaaatgtc

SEQ ID NO: 60132 - DNA, 30 bp, Artificial Sequence
  Synthetic oligonucleotide
cgtactagatttccccacacttgccctgtc

SEQ ID NO: 60133 - DNA, 30 bp, Artificial Sequence
  Synthetic oligonucleotide
acgatagctcataaacaagcgcactctgtc

SEQ ID NO: 60134 - DNA, 30 bp, Artificial Sequence
  Synthetic oligonucleotide
aggaacccgtactgaataaaaggtagtgtc

SEQ ID NO: 60135 - DNA, 30 bp, Artificial Sequence
  Synthetic oligonucleotide
cgaggaaagagaagtacgaaacttggtgtc

SEQ ID NO: 60136 - DNA, 30 bp, Artificial Sequence
  Synthetic oligonucleotide
agtaacacgaaatagcgagtcttcattgtc

SEQ ID NO: 60137 - DNA, 30 bp, Artificial Sequence
  Synthetic oligonucleotide
agtaaggtgaagccacgacctcaagttgtc

SEQ ID NO: 60138 - DNA, 30 bp, Artificial Sequence
  Synthetic oligonucleotide
cgtgaagcaagtctaaagaacagttttgtc

SEQ ID NO: 60139 - DNA, 30 bp, Artificial Sequence
  Synthetic oligonucleotide
cggtacgagaacgacagatgggaagaattc

SEQ ID NO: 60140 - DNA, 30 bp, Artificial Sequence
  Synthetic oligonucleotide
acaggctgcgacggtgataacctggaattc

SEQ ID NO: 60141 - DNA, 30 bp, Artificial Sequence
  Synthetic oligonucleotide
gataagaggcggttgagacaaggtgaattc

SEQ ID NO: 60142 - DNA, 30 bp, Artificial Sequence
  Synthetic oligonucleotide
tgcgccggctggaccttatgctctccattc

SEQ ID NO: 60143 - DNA, 30 bp, Artificial Sequence
  Synthetic oligonucleotide
tgcgttccatgccaaacgtgacacgcattc

SEQ ID NO: 60144 - DNA, 30 bp, Artificial Sequence
  Synthetic oligonucleotide
aacggatctttagagtacagttaggcattc

SEQ ID NO: 60145 - DNA, 30 bp, Artificial Sequence
  Synthetic oligonucleotide
ggctaaggctggcgaatagatagacacttc

SEQ ID NO: 60146 - DNA, 30 bp, Artificial Sequence
  Synthetic oligonucleotide
cggattttcaaagaaataatctagcacttc

SEQ ID NO: 60147 - DNA, 30 bp, Artificial Sequence
  Synthetic oligonucleotide
aaagctgacacaactggactgcgctacttc

SEQ ID NO: 60148 - DNA, 30 bp, Artificial Sequence
  Synthetic oligonucleotide
aacgtgaaaaaccaagttgttaaacgcttc

SEQ ID NO: 60149 - DNA, 30 bp, Artificial Sequence
  Synthetic oligonucleotide
tgtcaagccatccagggaagtcaaggcttc

SEQ ID NO: 60150 - DNA, 30 bp, Artificial Sequence
  Synthetic oligonucleotide
acacgatgacgtaggggccttggttgcttc

SEQ ID NO: 60151 - DNA, 30 bp, Artificial Sequence
  Synthetic oligonucleotide
acgggaggcaggtcgggcttaacgatcttc

SEQ ID NO: 60152 - DNA, 30 bp, Artificial Sequence
  Synthetic oligonucleotide
aactcaaaggtagcaggctggaggctcttc

SEQ ID NO: 60153 - DNA, 30 bp, Artificial Sequence
  Synthetic oligonucleotide
cacgtatggcctggggaaaaccttctcttc

SEQ ID NO: 60154 - DNA, 30 bp, Artificial Sequence
  Synthetic oligonucleotide
agcaagtaataagcaccagcagacaagttc

SEQ ID NO: 60155 - DNA, 30 bp, Artificial Sequence
  Synthetic oligonucleotide
tggcgaaccagtacgtcagtgattcagttc

SEQ ID NO: 60156 - DNA, 30 bp, Artificial Sequence
  Synthetic oligonucleotide
cgcattaaagattaagattgattgtagttc

SEQ ID NO: 60157 - DNA, 30 bp, Artificial Sequence
  Synthetic oligonucleotide
tctgcccgtgaggactaggattagacgttc

SEQ ID NO: 60158 - DNA, 30 bp, Artificial Sequence
  Synthetic oligonucleotide
agcgaacctgctggagtaaatgatacgttc

SEQ ID NO: 60159 - DNA, 30 bp, Artificial Sequence
  Synthetic oligonucleotide
aagcgcgacattccagcgtgcgttgcgttc

SEQ ID NO: 60160 - DNA, 30 bp, Artificial Sequence
  Synthetic oligonucleotide
ccatgcagggaataatatgcaccacggttc

SEQ ID NO: 60161 - DNA, 30 bp, Artificial Sequence
  Synthetic oligonucleotide
acaaactgggcaaggaagaacggacggttc

SEQ ID NO: 60162 - DNA, 30 bp, Artificial Sequence
  Synthetic oligonucleotide
aggacattatcaaatgggtgaatcgggttc

SEQ ID NO: 60163 - DNA, 30 bp, Artificial Sequence
  Synthetic oligonucleotide
aaaagggggaagtaatgagggcgtaatttc

SEQ ID NO: 60164 - DNA, 30 bp, Artificial Sequence
  Synthetic oligonucleotide
ttgattgtaagacgagtaggagcgcatttc

SEQ ID NO: 60165 - DNA, 30 bp, Artificial Sequence
  Synthetic oligonucleotide
aggcacataaggagcgtccagcagtatttc

SEQ ID NO: 60166 - DNA, 30 bp, Artificial Sequence
  Synthetic oligonucleotide
agctaggcgggagctaatacatgacgtttc

SEQ ID NO: 60167 - DNA, 30 bp, Artificial Sequence
  Synthetic oligonucleotide
tcaaggactaagggaacacaccacgttttc

SEQ ID NO: 60168 - DNA, 30 bp, Artificial Sequence
  Synthetic oligonucleotide
ccctaagcaaatgcgtgaggatcatttttc

SEQ ID NO: 60169 - DNA, 30 bp, Artificial Sequence
  Synthetic oligonucleotide
gcagcttcaaggagacgatcaggcaaaaag

SEQ ID NO: 60170 - DNA, 30 bp, Artificial Sequence
  Synthetic oligonucleotide
atcgagggggcaaagaggcaatgtaaaaag

SEQ ID NO: 60171 - DNA, 30 bp, Artificial Sequence
  Synthetic oligonucleotide
tgaccgtacggttccattagcggataaaag

SEQ ID NO: 60172 - DNA, 30 bp, Artificial Sequence
  Synthetic oligonucleotide
atttgaaggtaggaggctaagttaacaaag

SEQ ID NO: 60173 - DNA, 30 bp, Artificial Sequence
  Synthetic oligonucleotide
gggtggcaagtcttattttatttaacaaag

SEQ ID NO: 60174 - DNA, 30 bp, Artificial Sequence
  Synthetic oligonucleotide
attcgtatagtgcgataagcccacacaaag

SEQ ID NO: 60175 - DNA, 30 bp, Artificial Sequence
  Synthetic oligonucleotide
aggacatgttccatagcggtcctcacaaag

SEQ ID NO: 60176 - DNA, 30 bp, Artificial Sequence
  Synthetic oligonucleotide
cgatgggtaacactaagcgtgcccccaaag

SEQ ID NO: 60177 - DNA, 30 bp, Artificial Sequence
  Synthetic oligonucleotide
gacgagtgagcaaacggtcggcggccaaag

SEQ ID NO: 60178 - DNA, 30 bp, Artificial Sequence
  Synthetic oligonucleotide
tagctaatggggcacctcgttaaggcaaag

SEQ ID NO: 60179 - DNA, 30 bp, Artificial Sequence
  Synthetic oligonucleotide
gtggagcggttggacatgagcccggcaaag

SEQ ID NO: 60180 - DNA, 30 bp, Artificial Sequence
  Synthetic oligonucleotide
cagtgtacccagtaccttggaggggcaaag

SEQ ID NO: 60181 - DNA, 30 bp, Artificial Sequence
  Synthetic oligonucleotide
gtaaaagcctggcattatcacatggcaaag

SEQ ID NO: 60182 - DNA, 30 bp, Artificial Sequence
  Synthetic oligonucleotide
cagggcttgattcgcggtatccaatcaaag

SEQ ID NO: 60183 - DNA, 30 bp, Artificial Sequence
  Synthetic oligonucleotide
agggaaccttagagtagcttaggatcaaag

SEQ ID NO: 60184 - DNA, 30 bp, Artificial Sequence
  Synthetic oligonucleotide
taacgatacaagaactcgctcgactcaaag

SEQ ID NO: 60185 - DNA, 30 bp, Artificial Sequence
  Synthetic oligonucleotide
agtacagatgcgtgcagattagtttcaaag

SEQ ID NO: 60186 - DNA, 30 bp, Artificial Sequence
  Synthetic oligonucleotide
gggtggcccttcttggaaaactcacgaaag

SEQ ID NO: 60187 - DNA, 30 bp, Artificial Sequence
  Synthetic oligonucleotide
gatatcaaagacatgtgtgaccgtcgaaag

SEQ ID NO: 60188 - DNA, 30 bp, Artificial Sequence
  Synthetic oligonucleotide
tcgcgacttgttaagtaataacttcgaaag

SEQ ID NO: 60189 - DNA, 30 bp, Artificial Sequence
  Synthetic oligonucleotide
attcgcgattgtgtaacgacgggaggaaag

SEQ ID NO: 60190 - DNA, 29 bp, Artificial Sequence
  Synthetic oligonucleotide
gtgcaggctaacacatgtgtctaggaaag

SEQ ID NO: 60191 - DNA, 30 bp, Artificial Sequence
  Synthetic oligonucleotide
gcgtgttgggatgtcacacggagcggaaag

SEQ ID NO: 60192 - DNA, 30 bp, Artificial Sequence
  Synthetic oligonucleotide
agaacggagaatttggttggcacgggaaag

SEQ ID NO: 60193 - DNA, 30 bp, Artificial Sequence
  Synthetic oligonucleotide
catgaaggcgggtatggtgatttaataaag

SEQ ID NO: 60194 - DNA, 30 bp, Artificial Sequence
  Synthetic oligonucleotide
taaaagcaatatggggaggctaacataaag

SEQ ID NO: 60195 - DNA, 30 bp, Artificial Sequence
  Synthetic oligonucleotide
tcgtgtagcgtatgctaagcgaatataaag

SEQ ID NO: 60196 - DNA, 30 bp, Artificial Sequence
  Synthetic oligonucleotide
accgctgcaggggctcactgatttataaag

SEQ ID NO: 60197 - DNA, 30 bp, Artificial Sequence
  Synthetic oligonucleotide
acctccgggtaaggcataacgttcctaaag

SEQ ID NO: 60198 - DNA, 30 bp, Artificial Sequence
  Synthetic oligonucleotide
ccacgcgtagatttcgggagtccgctaaag

SEQ ID NO: 60199 - DNA, 30 bp, Artificial Sequence
  Synthetic oligonucleotide
tcctcttaacatcttaaagatcggctaaag

SEQ ID NO: 60200 - DNA, 30 bp, Artificial Sequence
  Synthetic oligonucleotide
aagttgaatcacaaaagcgagtctctaaag

SEQ ID NO: 60201 - DNA, 30 bp, Artificial Sequence
  Synthetic oligonucleotide
atgttccttgcgggaacgcatgaggtaaag

SEQ ID NO: 60202 - DNA, 30 bp, Artificial Sequence
  Synthetic oligonucleotide
gtcatgggcaacgagcacctctggaacaag

SEQ ID NO: 60203 - DNA, 30 bp, Artificial Sequence
  Synthetic oligonucleotide
tgatgtaaagatggtcgaagttgtaacaag

SEQ ID NO: 60204 - DNA, 30 bp, Artificial Sequence
  Synthetic oligonucleotide
cgttcgggcggtgtgggtctgtcacacaag

SEQ ID NO: 60205 - DNA, 30 bp, Artificial Sequence
  Synthetic oligonucleotide
attatagcacgtggaaggggaaaagacaag

SEQ ID NO: 60206 - DNA, 30 bp, Artificial Sequence
  Synthetic oligonucleotide
caaaaggtgccttgacgagggattgacaag

SEQ ID NO: 60207 - DNA, 30 bp, Artificial Sequence
  Synthetic oligonucleotide
tacgatgcttctgaagtaggcgcatacaag

SEQ ID NO: 60208 - DNA, 30 bp, Artificial Sequence
  Synthetic oligonucleotide
agcgcattatcgcgcgacctcgactacaag

SEQ ID NO: 60209 - DNA, 30 bp, Artificial Sequence
  Synthetic oligonucleotide
acggcagttatcatgtcacaaatgtacaag

SEQ ID NO: 60210 - DNA, 30 bp, Artificial Sequence
  Synthetic oligonucleotide
gcgtgtgaacgaagataactatttaccaag

SEQ ID NO: 60211 - DNA, 30 bp, Artificial Sequence
  Synthetic oligonucleotide
gttcgagggacgtgtggggggcaacccaag

SEQ ID NO: 60212 - DNA, 30 bp, Artificial Sequence
  Synthetic oligonucleotide
tacagaggtgaacggatcgccatatccaag

SEQ ID NO: 60213 - DNA, 30 bp, Artificial Sequence
  Synthetic oligonucleotide
cgagctggtgagattacgactatatccaag

SEQ ID NO: 60214 - DNA, 30 bp, Artificial Sequence
  Synthetic oligonucleotide
ggccgagtccgcgatagtctgagttccaag

SEQ ID NO: 60215 - DNA, 30 bp, Artificial Sequence
  Synthetic oligonucleotide
tcttccggactgtctagtagagagagcaag

SEQ ID NO: 60216 - DNA, 30 bp, Artificial Sequence
  Synthetic oligonucleotide
acgcgtcatggttcatgactcaggagcaag

SEQ ID NO: 60217 - DNA, 30 bp, Artificial Sequence
  Synthetic oligonucleotide
aggatctggcttggttggtagtatagcaag

SEQ ID NO: 60218 - DNA, 30 bp, Artificial Sequence
  Synthetic oligonucleotide
gggcttcccgaaggaagcgagacgcgcaag

SEQ ID NO: 60219 - DNA, 30 bp, Artificial Sequence
  Synthetic oligonucleotide
tcggcaccataaggtccgaggcatcgcaag

SEQ ID NO: 60220 - DNA, 30 bp, Artificial Sequence
  Synthetic oligonucleotide
gttgaggctcaggaaatgtgatgtcgcaag

SEQ ID NO: 60221 - DNA, 30 bp, Artificial Sequence
  Synthetic oligonucleotide
gaggcatccaagcatccgaggacgggcaag

SEQ ID NO: 60222 - DNA, 30 bp, Artificial Sequence
  Synthetic oligonucleotide
acgcctcacatcgtacctacggggtgcaag

SEQ ID NO: 60223 - DNA, 30 bp, Artificial Sequence
  Synthetic oligonucleotide
gcttagatcatatggcacgaatatatcaag

SEQ ID NO: 60224 - DNA, 30 bp, Artificial Sequence
  Synthetic oligonucleotide
agtcaagagggctaggtctttcctatcaag

SEQ ID NO: 60225 - DNA, 30 bp, Artificial Sequence
  Synthetic oligonucleotide
aggctcaaaggtgttcattatgaactcaag

SEQ ID NO: 60226 - DNA, 30 bp, Artificial Sequence
  Synthetic oligonucleotide
aaaacattgcgacataaggtctccctcaag

SEQ ID NO: 60227 - DNA, 30 bp, Artificial Sequence
  Synthetic oligonucleotide
cattataaagtggggctgatatgagtcaag

SEQ ID NO: 60228 - DNA, 30 bp, Artificial Sequence
  Synthetic oligonucleotide
tgatcgtaggtatactagaaaatagtcaag

SEQ ID NO: 60229 - DNA, 30 bp, Artificial Sequence
  Synthetic oligonucleotide
tgtcgctcagcgaagtacgttggcgtcaag

SEQ ID NO: 60230 - DNA, 30 bp, Artificial Sequence
  Synthetic oligonucleotide
gacgcccagtttagctaactgatcgtcaag

SEQ ID NO: 60231 - DNA, 30 bp, Artificial Sequence
  Synthetic oligonucleotide
caaccggcgatcttgtttagggcattcaag

SEQ ID NO: 60232 - DNA, 30 bp, Artificial Sequence
  Synthetic oligonucleotide
cgtatgagtaacttggtggctagattcaag

SEQ ID NO: 60233 - DNA, 30 bp, Artificial Sequence
  Synthetic oligonucleotide
tcgacatcatacccaatggacaagttcaag

SEQ ID NO: 60234 - DNA, 30 bp, Artificial Sequence
  Synthetic oligonucleotide
tgtgagccacgtctgatgatagggttcaag

SEQ ID NO: 60235 - DNA, 30 bp, Artificial Sequence
  Synthetic oligonucleotide
tgtagaaaggacacacttatcatcaagaag

SEQ ID NO: 60236 - DNA, 30 bp, Artificial Sequence
  Synthetic oligonucleotide
cattcgacaatcgctgggatgatcaagaag

SEQ ID NO: 60237 - DNA, 30 bp, Artificial Sequence
  Synthetic oligonucleotide
aggggccataaagtagtttagattaagaag

SEQ ID NO: 60238 - DNA, 30 bp, Artificial Sequence
  Synthetic oligonucleotide
ggtcaacgacgcccgcgaacagaacagaag

SEQ ID NO: 60239 - DNA, 30 bp, Artificial Sequence
  Synthetic oligonucleotide
gcagagatacgataacggggacgccagaag

SEQ ID NO: 60240 - DNA, 30 bp, Artificial Sequence
  Synthetic oligonucleotide
ggcctacaataccgtcgacacgtccagaag

SEQ ID NO: 60241 - DNA, 30 bp, Artificial Sequence
  Synthetic oligonucleotide
gaaggaggagtccccggtgtgctgtagaag

SEQ ID NO: 60242 - DNA, 30 bp, Artificial Sequence
  Synthetic oligonucleotide
cagcaaaagcatcatgcccgtgtttagaag

SEQ ID NO: 60243 - DNA, 30 bp, Artificial Sequence
  Synthetic oligonucleotide
gctagaagacccctgctacaagaaacgaag

SEQ ID NO: 60244 - DNA, 30 bp, Artificial Sequence
  Synthetic oligonucleotide
ggtcatcggcagctaagcatatacacgaag

SEQ ID NO: 60245 - DNA, 30 bp, Artificial Sequence
  Synthetic oligonucleotide
tagcggttccgaagtatcgaggcaccgaag

SEQ ID NO: 60246 - DNA, 30 bp, Artificial Sequence
  Synthetic oligonucleotide
acttaaatcatgctctataattaatcgaag

SEQ ID NO: 60247 - DNA, 30 bp, Artificial Sequence
  Synthetic oligonucleotide
agcgggcttctaacagcacatgagtcgaag

SEQ ID NO: 60248 - DNA, 30 bp, Artificial Sequence
  Synthetic oligonucleotide
acacgggaatgagcgactgtgtcttcgaag

SEQ ID NO: 60249 - DNA, 30 bp, Artificial Sequence
  Synthetic oligonucleotide
cgcgaatgaatagcagacgatctaaggaag

SEQ ID NO: 60250 - DNA, 30 bp, Artificial Sequence
  Synthetic oligonucleotide
gaccgggtctcgcgggttaaaacgaggaag

SEQ ID NO: 60251 - DNA, 30 bp, Artificial Sequence
  Synthetic oligonucleotide
acgctggcaagccacttagtcctagggaag

SEQ ID NO: 60252 - DNA, 30 bp, Artificial Sequence
  Synthetic oligonucleotide
cctaggtaatgataggtcagctaggggaag

SEQ ID NO: 60253 - DNA, 30 bp, Artificial Sequence
  Synthetic oligonucleotide
ccatagaccaagttgctacctctggggaag

SEQ ID NO: 60254 - DNA, 30 bp, Artificial Sequence
  Synthetic oligonucleotide
atgcgagaggcgaaaattagaacctggaag

SEQ ID NO: 60255 - DNA, 30 bp, Artificial Sequence
  Synthetic oligonucleotide
acgataatcttcacattgggggtgtggaag

SEQ ID NO: 60256 - DNA, 30 bp, Artificial Sequence
  Synthetic oligonucleotide
tcaatgctcaccacgagacacacttggaag

SEQ ID NO: 60257 - DNA, 30 bp, Artificial Sequence
  Synthetic oligonucleotide
acattatgcaacgcaaagttacgcctgaag

SEQ ID NO: 60258 - DNA, 30 bp, Artificial Sequence
  Synthetic oligonucleotide
agacggcgtatacagtacgctaatctgaag

SEQ ID NO: 60259 - DNA, 30 bp, Artificial Sequence
  Synthetic oligonucleotide
gcaaaggggggggctgtcgtggaagtgaag

SEQ ID NO: 60260 - DNA, 30 bp, Artificial Sequence
  Synthetic oligonucleotide
tccgccgactacagtccaacataagtgaag

SEQ ID NO: 60261 - DNA, 30 bp, Artificial Sequence
  Synthetic oligonucleotide
cagtagccaagtcgtcatataggcgtgaag

SEQ ID NO: 60262 - DNA, 30 bp, Artificial Sequence
  Synthetic oligonucleotide
gggcgccaataaagttatcactgattgaag

SEQ ID NO: 60263 - DNA, 30 bp, Artificial Sequence
  Synthetic oligonucleotide
agggggcgtttaagggaaccgcagttgaag

SEQ ID NO: 60264 - DNA, 30 bp, Artificial Sequence
  Synthetic oligonucleotide
tgggagtcaatccactcctatcaaaataag

SEQ ID NO: 60265 - DNA, 30 bp, Artificial Sequence
  Synthetic oligonucleotide
gcgcgaccgctccccagatcctaaaataag

SEQ ID NO: 60266 - DNA, 30 bp, Artificial Sequence
  Synthetic oligonucleotide
gtgactgccctagatgtatcgggacataag

SEQ ID NO: 60267 - DNA, 30 bp, Artificial Sequence
  Synthetic oligonucleotide
atgatacacgtggaggggacaaggcataag

SEQ ID NO: 60268 - DNA, 30 bp, Artificial Sequence
  Synthetic oligonucleotide
ggcaaaccatgcagacggaataggcataag

SEQ ID NO: 60269 - DNA, 30 bp, Artificial Sequence
  Synthetic oligonucleotide
gggtctcgtggtttggtaaatacagataag

SEQ ID NO: 60270 - DNA, 30 bp, Artificial Sequence
  Synthetic oligonucleotide
tacgctcactaagcgtcaaaaccagataag

SEQ ID NO: 60271 - DNA, 30 bp, Artificial Sequence
  Synthetic oligonucleotide
ccctgaagaggtgagtagtgtctagataag

SEQ ID NO: 60272 - DNA, 30 bp, Artificial Sequence
  Synthetic oligonucleotide
ggagtaggtgttaaccagtgtcgggataag

SEQ ID NO: 60273 - DNA, 29 bp, Artificial Sequence
  Synthetic oligonucleotide
agatgtcattcaccaacaattatgataag

SEQ ID NO: 60274 - DNA, 30 bp, Artificial Sequence
  Synthetic oligonucleotide
gcgtgttactgaagagattctgaatataag

SEQ ID NO: 60275 - DNA, 30 bp, Artificial Sequence
  Synthetic oligonucleotide
cactcacgtgatactacgatcacctataag

SEQ ID NO: 60276 - DNA, 30 bp, Artificial Sequence
  Synthetic oligonucleotide
cagcgatgtatccgattgagagtctataag

SEQ ID NO: 60277 - DNA, 30 bp, Artificial Sequence
  Synthetic oligonucleotide
cggagtgcgagctcagatttcttctataag

SEQ ID NO: 60278 - DNA, 30 bp, Artificial Sequence
  Synthetic oligonucleotide
ccatgttcgaaactcactcaatagtataag

SEQ ID NO: 60279 - DNA, 30 bp, Artificial Sequence
  Synthetic oligonucleotide
gcaggagatgtggtatacgatccgtataag

SEQ ID NO: 60280 - DNA, 30 bp, Artificial Sequence
  Synthetic oligonucleotide
acggtccattcagccaccaccatcactaag

SEQ ID NO: 60281 - DNA, 30 bp, Artificial Sequence
  Synthetic oligonucleotide
agggatagcgatcacacaaagaatactaag

SEQ ID NO: 60282 - DNA, 30 bp, Artificial Sequence
  Synthetic oligonucleotide
ggtggaatcacctagctaaagtaacctaag

SEQ ID NO: 60283 - DNA, 30 bp, Artificial Sequence
  Synthetic oligonucleotide
taatgttgtgttggttgcgatagacctaag

SEQ ID NO: 60284 - DNA, 30 bp, Artificial Sequence
  Synthetic oligonucleotide
gtctcaaacagataatggtgtcaccctaag

SEQ ID NO: 60285 - DNA, 30 bp, Artificial Sequence
  Synthetic oligonucleotide
aaacagccaagacggacgtataatcctaag

SEQ ID NO: 60286 - DNA, 30 bp, Artificial Sequence
  Synthetic oligonucleotide
gtagattgcgtgggtgtcaagtctcctaag

SEQ ID NO: 60287 - DNA, 30 bp, Artificial Sequence
  Synthetic oligonucleotide
gtagacggtgagtgcctgtttagtcctaag

SEQ ID NO: 60288 - DNA, 30 bp, Artificial Sequence
  Synthetic oligonucleotide
cgtgtatcagggcctatagtatggtctaag

SEQ ID NO: 60289 - DNA, 30 bp, Artificial Sequence
  Synthetic oligonucleotide
atttaacgcccagggaacagcataagtaag

SEQ ID NO: 60290 - DNA, 30 bp, Artificial Sequence
  Synthetic oligonucleotide
atacccttaccagatggcaaggacagtaag

SEQ ID NO: 60291 - DNA, 30 bp, Artificial Sequence
  Synthetic oligonucleotide
ccttggcgtcgtgcactagttcagagtaag

SEQ ID NO: 60292 - DNA, 30 bp, Artificial Sequence
  Synthetic oligonucleotide
tcaatgatacaggcgcgatttgcgagtaag

SEQ ID NO: 60293 - DNA, 30 bp, Artificial Sequence
  Synthetic oligonucleotide
ctccataatacgaacataggaattagtaag

SEQ ID NO: 60294 - DNA, 30 bp, Artificial Sequence
  Synthetic oligonucleotide
caatcatacataaagttggggtgacgtaag

SEQ ID NO: 60295 - DNA, 30 bp, Artificial Sequence
  Synthetic oligonucleotide
acctgctaggctcccggtctgtaccgtaag

SEQ ID NO: 60296 - DNA, 30 bp, Artificial Sequence
  Synthetic oligonucleotide
taacaactgtcatatcgtgatactggtaag

SEQ ID NO: 60297 - DNA, 30 bp, Artificial Sequence
  Synthetic oligonucleotide
cgtaaggaataatctttaccccttggtaag

SEQ ID NO: 60298 - DNA, 30 bp, Artificial Sequence
  Synthetic oligonucleotide
cgtcaacgggggacggactagcgcattaag

SEQ ID NO: 60299 - DNA, 30 bp, Artificial Sequence
  Synthetic oligonucleotide
gctgtgacaaatccccaaggaattattaag

SEQ ID NO: 60300 - DNA, 30 bp, Artificial Sequence
  Synthetic oligonucleotide
tcgtaggataaagttgcagctgaccttaag

SEQ ID NO: 60301 - DNA, 30 bp, Artificial Sequence
  Synthetic oligonucleotide
ggctcaggatgggtgcaagacgagcttaag

SEQ ID NO: 60302 - DNA, 30 bp, Artificial Sequence
  Synthetic oligonucleotide
acttgatcgaaggagaacataaacgttaag

SEQ ID NO: 60303 - DNA, 30 bp, Artificial Sequence
  Synthetic oligonucleotide
cgcagaggtatgagaggcattcaatttaag

SEQ ID NO: 60304 - DNA, 30 bp, Artificial Sequence
  Synthetic oligonucleotide
tgcgaattggggaacgaaatcgagtttaag

SEQ ID NO: 60305 - DNA, 30 bp, Artificial Sequence
  Synthetic oligonucleotide
gtcaggaaggctgctctgcgaaggtttaag

SEQ ID NO: 60306 - DNA, 30 bp, Artificial Sequence
  Synthetic oligonucleotide
gtgggtcaaaccaacttcactttgtttaag

SEQ ID NO: 60307 - DNA, 30 bp, Artificial Sequence
  Synthetic oligonucleotide
cccagcatttcacgggaccccgcaaaacag

SEQ ID NO: 60308 - DNA, 30 bp, Artificial Sequence
  Synthetic oligonucleotide
ttgtcgtgaaggcgagttctagtcaaacag

SEQ ID NO: 60309 - DNA, 30 bp, Artificial Sequence
  Synthetic oligonucleotide
cgacaggatcaattttgttaccagaaacag

SEQ ID NO: 60310 - DNA, 30 bp, Artificial Sequence
  Synthetic oligonucleotide
taccgtaatcggcagttgcatgaataacag

SEQ ID NO: 60311 - DNA, 30 bp, Artificial Sequence
  Synthetic oligonucleotide
ttgggccgactatgcttaactgcttaacag

SEQ ID NO: 60312 - DNA, 29 bp, Artificial Sequence
  Synthetic oligonucleotide
cgttgcaggcacgaactgctcgaacacag

SEQ ID NO: 60313 - DNA, 30 bp, Artificial Sequence
  Synthetic oligonucleotide
tgttgaaccatgcaggggactagcacacag

SEQ ID NO: 60314 - DNA, 30 bp, Artificial Sequence
  Synthetic oligonucleotide
gcatcagatttcgcggaccgagtgacacag

SEQ ID NO: 60315 - DNA, 30 bp, Artificial Sequence
  Synthetic oligonucleotide
agggtaaccgggcccgcatgaagtccacag

SEQ ID NO: 60316 - DNA, 30 bp, Artificial Sequence
  Synthetic oligonucleotide
agacgaaataccagattaaacgaagcacag

SEQ ID NO: 60317 - DNA, 30 bp, Artificial Sequence
  Synthetic oligonucleotide
cgatgtgtgatatgcgatatactcgcacag

SEQ ID NO: 60318 - DNA, 30 bp, Artificial Sequence
  Synthetic oligonucleotide
gtgtttagcagttcgaccggtaaggcacag

SEQ ID NO: 60319 - DNA, 30 bp, Artificial Sequence
  Synthetic oligonucleotide
caagaagcatagagatccttatacagacag

SEQ ID NO: 60320 - DNA, 30 bp, Artificial Sequence
  Synthetic oligonucleotide
tacacaacgtgggttagaactggcagacag

SEQ ID NO: 60321 - DNA, 30 bp, Artificial Sequence
  Synthetic oligonucleotide
agcgacactgatgggaagcgcatgagacag

SEQ ID NO: 60322 - DNA, 30 bp, Artificial Sequence
  Synthetic oligonucleotide
aagctatcgtgctactgttgggagcgacag

SEQ ID NO: 60323 - DNA, 30 bp, Artificial Sequence
  Synthetic oligonucleotide
gagaggagcggttatactaccatgcgacag

SEQ ID NO: 60324 - DNA, 30 bp, Artificial Sequence
  Synthetic oligonucleotide
gcatgctagaaccatgtcggctgcggacag

SEQ ID NO: 60325 - DNA, 30 bp, Artificial Sequence
  Synthetic oligonucleotide
agactacgtcaaatgatcatcgcgggacag

SEQ ID NO: 60326 - DNA, 30 bp, Artificial Sequence
  Synthetic oligonucleotide
cgtacagattcgaccctaggcgtttgacag

SEQ ID NO: 60327 - DNA, 30 bp, Artificial Sequence
  Synthetic oligonucleotide
caaactaacggtgtgtcgtgccgaatacag

SEQ ID NO: 60328 - DNA, 30 bp, Artificial Sequence
  Synthetic oligonucleotide
ggtgtcttcataatgtgaaaaaagatacag

SEQ ID NO: 60329 - DNA, 30 bp, Artificial Sequence
  Synthetic oligonucleotide
caggcgaactaacgtagcgtcgctatacag

SEQ ID NO: 60330 - DNA, 30 bp, Artificial Sequence
  Synthetic oligonucleotide
gccaaaaagcactatcgcctggaactacag

SEQ ID NO: 60331 - DNA, 30 bp, Artificial Sequence
  Synthetic oligonucleotide
ctcgtgagtgcaacatattttccggtacag

SEQ ID NO: 60332 - DNA, 30 bp, Artificial Sequence
  Synthetic oligonucleotide
gcgactcgatggaaaagcatcagattacag

SEQ ID NO: 60333 - DNA, 30 bp, Artificial Sequence
  Synthetic oligonucleotide
gtagaaagtggagggcctaagagcttacag

SEQ ID NO: 60334 - DNA, 30 bp, Artificial Sequence
  Synthetic oligonucleotide
aacgcgtcgtagggagcataaccgttacag

SEQ ID NO: 60335 - DNA, 30 bp, Artificial Sequence
  Synthetic oligonucleotide
agtcggagcggaacttggagcgagaaccag

SEQ ID NO: 60336 - DNA, 30 bp, Artificial Sequence
  Synthetic oligonucleotide
gacaactgacaaatgatccacagtcaccag

SEQ ID NO: 60337 - DNA, 30 bp, Artificial Sequence
  Synthetic oligonucleotide
ggtgtgcacgaccgagcgatgcttcaccag

SEQ ID NO: 60338 - DNA, 30 bp, Artificial Sequence
  Synthetic oligonucleotide
agacaacccaggctcgtgttagcagaccag

SEQ ID NO: 60339 - DNA, 30 bp, Artificial Sequence
  Synthetic oligonucleotide
ggagtttcactgtaacggataagggaccag

SEQ ID NO: 60340 - DNA, 30 bp, Artificial Sequence
  Synthetic oligonucleotide
atcgtggatgaatgtatctcccgggaccag

SEQ ID NO: 60341 - DNA, 30 bp, Artificial Sequence
  Synthetic oligonucleotide
ataaattggcgggaaggcactcgataccag

SEQ ID NO: 60342 - DNA, 30 bp, Artificial Sequence
  Synthetic oligonucleotide
acaagtagtgtcagatactgtaatacccag

SEQ ID NO: 60343 - DNA, 30 bp, Artificial Sequence
  Synthetic oligonucleotide
gctcacagtaagaacgttgttacgagccag

SEQ ID NO: 60344 - DNA, 30 bp, Artificial Sequence
  Synthetic oligonucleotide
ggtcgcaatagcctccgcgaagtacgccag

SEQ ID NO: 60345 - DNA, 30 bp, Artificial Sequence
  Synthetic oligonucleotide
agcgacatgggtttcagtgtgactggccag

SEQ ID NO: 60346 - DNA, 30 bp, Artificial Sequence
  Synthetic oligonucleotide
acacaccccgaaaaattctagaaactccag

SEQ ID NO: 60347 - DNA, 30 bp, Artificial Sequence
  Synthetic oligonucleotide
actgagggttagtaccccgcaaccgtccag

SEQ ID NO: 60348 - DNA, 30 bp, Artificial Sequence
  Synthetic oligonucleotide
gaggaaatcgtcacaccgaaccaggtccag

SEQ ID NO: 60349 - DNA, 30 bp, Artificial Sequence
  Synthetic oligonucleotide
ctgattatatagtccaacgaccaattccag

SEQ ID NO: 60350 - DNA, 31 bp, Artificial Sequence
  Synthetic oligonucleotide
ccgaacgtaacgcacgtaaggtcatttccag

SEQ ID NO: 60351 - DNA, 30 bp, Artificial Sequence
  Synthetic oligonucleotide
ggtggtttggtagacataacttgtaagcag

SEQ ID NO: 60352 - DNA, 30 bp, Artificial Sequence
  Synthetic oligonucleotide
tcagactgacaggataaagggagtgagcag

SEQ ID NO: 60353 - DNA, 30 bp, Artificial Sequence
  Synthetic oligonucleotide
aagggagttaaaacagtccggcaatagcag

SEQ ID NO: 60354 - DNA, 30 bp, Artificial Sequence
  Synthetic oligonucleotide
tcttacggaggcaattgggtacggtagcag

SEQ ID NO: 60355 - DNA, 31 bp, Artificial Sequence
  Synthetic oligonucleotide
tacgctagaacaccctcaatcaaaaacgcag

SEQ ID NO: 60356 - DNA, 30 bp, Artificial Sequence
  Synthetic oligonucleotide
cgagttacttgaatcgtgacaacaccgcag

SEQ ID NO: 60357 - DNA, 30 bp, Artificial Sequence
  Synthetic oligonucleotide
gttggaccgaaatcctagcagcgcccgcag

SEQ ID NO: 60358 - DNA, 30 bp, Artificial Sequence
  Synthetic oligonucleotide
gttaccaaagggggttagtacaaagcgcag

SEQ ID NO: 60359 - DNA, 30 bp, Artificial Sequence
  Synthetic oligonucleotide
tggaacgataccggggctgaagtatcgcag

SEQ ID NO: 60360 - DNA, 30 bp, Artificial Sequence
  Synthetic oligonucleotide
atacggggtgtagcctttgcaaagaggcag

SEQ ID NO: 60361 - DNA, 30 bp, Artificial Sequence
  Synthetic oligonucleotide
tagtcaacaaaaaattgggacgggaggcag

SEQ ID NO: 60362 - DNA, 30 bp, Artificial Sequence
  Synthetic oligonucleotide
atggtggtgcagaaatgactctcccggcag

SEQ ID NO: 60363 - DNA, 30 bp, Artificial Sequence
  Synthetic oligonucleotide
acgaggaaccccagcattcggatccggcag

SEQ ID NO: 60364 - DNA, 30 bp, Artificial Sequence
  Synthetic oligonucleotide
tcgaaatatatcaccactcaaccgcggcag

SEQ ID NO: 60365 - DNA, 30 bp, Artificial Sequence
  Synthetic oligonucleotide
ccgcgtgcgttgcacggagcagatgggcag

SEQ ID NO: 60366 - DNA, 30 bp, Artificial Sequence
  Synthetic oligonucleotide
agttcacccaagcgaaagagagcgtggcag

SEQ ID NO: 60367 - DNA, 30 bp, Artificial Sequence
  Synthetic oligonucleotide
ggtgagcttagaagtttccagtcaatgcag

SEQ ID NO: 60368 - DNA, 30 bp, Artificial Sequence
  Synthetic oligonucleotide
ttccgggcctagagggggatgagcatgcag

SEQ ID NO: 60369 - DNA, 30 bp, Artificial Sequence
  Synthetic oligonucleotide
tgctggtcattgtatcaggttcgtctgcag

SEQ ID NO: 60370 - DNA, 30 bp, Artificial Sequence
  Synthetic oligonucleotide
aacaatgtaataggaaaatggctagtgcag

SEQ ID NO: 60371 - DNA, 30 bp, Artificial Sequence
  Synthetic oligonucleotide
ttggccaaaatcagcgtgaaggccgtgcag

SEQ ID NO: 60372 - DNA, 30 bp, Artificial Sequence
  Synthetic oligonucleotide
gtgaaggtggagtaaatgcgttgggtgcag

SEQ ID NO: 60373 - DNA, 30 bp, Artificial Sequence
  Synthetic oligonucleotide
gcagtctccgcggggtgccggccaaatcag

SEQ ID NO: 60374 - DNA, 30 bp, Artificial Sequence
  Synthetic oligonucleotide
ctaggagagccacaaagacacagaaatcag

SEQ ID NO: 60375 - DNA, 30 bp, Artificial Sequence
  Synthetic oligonucleotide
agtatactgaatgaaagattccgatatcag

SEQ ID NO: 60376 - DNA, 30 bp, Artificial Sequence
  Synthetic oligonucleotide
agtaccggccatacaaagtcagtctatcag

SEQ ID NO: 60377 - DNA, 30 bp, Artificial Sequence
  Synthetic oligonucleotide
atgacgtccatgggggacgattaccctcag

SEQ ID NO: 60378 - DNA, 30 bp, Artificial Sequence
  Synthetic oligonucleotide
aaggtagccagtgtatattaggcgcctcag

SEQ ID NO: 60379 - DNA, 30 bp, Artificial Sequence
  Synthetic oligonucleotide
aagtggtaaccgcagtgattccgatctcag

SEQ ID NO: 60380 - DNA, 30 bp, Artificial Sequence
  Synthetic oligonucleotide
gtgacattaagattgaattagggatctcag

SEQ ID NO: 60381 - DNA, 30 bp, Artificial Sequence
  Synthetic oligonucleotide
catagccgctacggactacgggcaagtcag

SEQ ID NO: 60382 - DNA, 30 bp, Artificial Sequence
  Synthetic oligonucleotide
atgcaccgctacacagatgaaataagtcag

SEQ ID NO: 60383 - DNA, 30 bp, Artificial Sequence
  Synthetic oligonucleotide
tgcttcagctcctgaagcctaatgcgtcag

SEQ ID NO: 60384 - DNA, 30 bp, Artificial Sequence
  Synthetic oligonucleotide
ccaagaaggcgtggatggttaaccggtcag

SEQ ID NO: 60385 - DNA, 30 bp, Artificial Sequence
  Synthetic oligonucleotide
tacgagcacagatatgtgtgtatgggtcag

SEQ ID NO: 60386 - DNA, 30 bp, Artificial Sequence
  Synthetic oligonucleotide
gttacgtggcgaacggaggaagtaattcag

SEQ ID NO: 60387 - DNA, 30 bp, Artificial Sequence
  Synthetic oligonucleotide
gggacgtaattggggttccagaggattcag

SEQ ID NO: 60388 - DNA, 30 bp, Artificial Sequence
  Synthetic oligonucleotide
tgcagatgcgtgcaagaggcttggattcag

SEQ ID NO: 60389 - DNA, 30 bp, Artificial Sequence
  Synthetic oligonucleotide
actgctccgaataggatatgagcgcttcag

SEQ ID NO: 60390 - DNA, 30 bp, Artificial Sequence
  Synthetic oligonucleotide
acgacttcgcaccgggacagagggtttcag

SEQ ID NO: 60391 - DNA, 30 bp, Artificial Sequence
  Synthetic oligonucleotide
taggatacaacgcctccttgcaacaaagag

SEQ ID NO: 60392 - DNA, 30 bp, Artificial Sequence
  Synthetic oligonucleotide
gggaggccgctttcatgaatagacaaagag

SEQ ID NO: 60393 - DNA, 30 bp, Artificial Sequence
  Synthetic oligonucleotide
tgtaccttgattcatacgacggcgaaagag

SEQ ID NO: 60394 - DNA, 30 bp, Artificial Sequence
  Synthetic oligonucleotide
cagttcaggcaaggccagtgtgcacaagag

SEQ ID NO: 60395 - DNA, 30 bp, Artificial Sequence
  Synthetic oligonucleotide
cagatctaactgtccactgcgggacaagag

SEQ ID NO: 60396 - DNA, 30 bp, Artificial Sequence
  Synthetic oligonucleotide
tcacgcgatatattggcatttatacaagag

SEQ ID NO: 60397 - DNA, 30 bp, Artificial Sequence
  Synthetic oligonucleotide
tcacatcaggttggagatacgccgcaagag

SEQ ID NO: 60398 - DNA, 30 bp, Artificial Sequence
  Synthetic oligonucleotide
ggacgaatgaactcaaagatcaacgaagag

SEQ ID NO: 60399 - DNA, 30 bp, Artificial Sequence
  Synthetic oligonucleotide
ggaagctgctagagctgtccctccgaagag

SEQ ID NO: 60400 - DNA, 30 bp, Artificial Sequence
  Synthetic oligonucleotide
ggctgtaaatgtttctccggattggaagag

SEQ ID NO: 60401 - DNA, 30 bp, Artificial Sequence
  Synthetic oligonucleotide
aggagtgtgaggacatacctcggataagag

SEQ ID NO: 60402 - DNA, 30 bp, Artificial Sequence
  Synthetic oligonucleotide
attgccaatggaaccgcatcaacaacagag

SEQ ID NO: 60403 - DNA, 30 bp, Artificial Sequence
  Synthetic oligonucleotide
gaacggatctgacggtacttctcgacagag

SEQ ID NO: 60404 - DNA, 30 bp, Artificial Sequence
  Synthetic oligonucleotide
ccatccctagttctgcgaaggtgtacagag

SEQ ID NO: 60405 - DNA, 30 bp, Artificial Sequence
  Synthetic oligonucleotide
ggtgggaggaccaatttataatgagcagag

SEQ ID NO: 60406 - DNA, 30 bp, Artificial Sequence
  Synthetic oligonucleotide
ctaggtaaagaatgctactgcagcgcagag

SEQ ID NO: 60407 - DNA, 30 bp, Artificial Sequence
  Synthetic oligonucleotide
tgctgacttgtcatgaacttcctatcagag

SEQ ID NO: 60408 - DNA, 30 bp, Artificial Sequence
  Synthetic oligonucleotide
gccataagacgaattaagatatggtcagag

SEQ ID NO: 60409 - DNA, 30 bp, Artificial Sequence
  Synthetic oligonucleotide
catctaaagctactggaccgcgaaagagag

SEQ ID NO: 60410 - DNA, 30 bp, Artificial Sequence
  Synthetic oligonucleotide
tggacaaggggtctgggattacccagagag

SEQ ID NO: 60411 - DNA, 30 bp, Artificial Sequence
  Synthetic oligonucleotide
tgccaagatgaacatattgatcatagagag

SEQ ID NO: 60412 - DNA, 30 bp, Artificial Sequence
  Synthetic oligonucleotide
ggtaatggatattgaaacgcacttagagag

SEQ ID NO: 60413 - DNA, 30 bp, Artificial Sequence
  Synthetic oligonucleotide
actacaatgggcaccgagtaccctcgagag

SEQ ID NO: 60414 - DNA, 30 bp, Artificial Sequence
  Synthetic oligonucleotide
gtcagaataacgggagaccacttaggagag

SEQ ID NO: 60415 - DNA, 31 bp, Artificial Sequence
  Synthetic oligonucleotide
ggcgaagacgactgctaacaacaggggagag

SEQ ID NO: 60416 - DNA, 30 bp, Artificial Sequence
  Synthetic oligonucleotide
acagccaacagacaatgaatctgatgagag

SEQ ID NO: 60417 - DNA, 30 bp, Artificial Sequence
  Synthetic oligonucleotide
gcaaagcaaagtgcgaaatttatatgagag

SEQ ID NO: 60418 - DNA, 30 bp, Artificial Sequence
  Synthetic oligonucleotide
gaggaaagatttcttaataagagcatagag

SEQ ID NO: 60419 - DNA, 30 bp, Artificial Sequence
  Synthetic oligonucleotide
tgtatccgtgcgcgttgaatggggatagag

SEQ ID NO: 60420 - DNA, 30 bp, Artificial Sequence
  Synthetic oligonucleotide
cggcgatctgctatagtggtcaagctagag

SEQ ID NO: 60421 - DNA, 30 bp, Artificial Sequence
  Synthetic oligonucleotide
acgggacctccagggacctaagaggtagag

SEQ ID NO: 60422 - DNA, 30 bp, Artificial Sequence
  Synthetic oligonucleotide
ttggaggttagagttctaatcagtgtagag

SEQ ID NO: 60423 - DNA, 30 bp, Artificial Sequence
  Synthetic oligonucleotide
taacgcgcatgtctatcatataacttagag

SEQ ID NO: 60424 - DNA, 30 bp, Artificial Sequence
  Synthetic oligonucleotide
agggaccatttgttcagtaaagaaaacgag

SEQ ID NO: 60425 - DNA, 30 bp, Artificial Sequence
  Synthetic oligonucleotide
agtgtgggacatgatggccatacgaacgag

SEQ ID NO: 60426 - DNA, 30 bp, Artificial Sequence
  Synthetic oligonucleotide
caagataacatcatacataatctgaacgag

SEQ ID NO: 60427 - DNA, 30 bp, Artificial Sequence
  Synthetic oligonucleotide
aatgaatctcatattccctgattgaacgag

SEQ ID NO: 60428 - DNA, 30 bp, Artificial Sequence
  Synthetic oligonucleotide
cttacactagtaaacactacggttaacgag

SEQ ID NO: 60429 - DNA, 30 bp, Artificial Sequence
  Synthetic oligonucleotide
gccgaaaaccttgggtctcctgttaacgag

SEQ ID NO: 60430 - DNA, 30 bp, Artificial Sequence
  Synthetic oligonucleotide
gggggggaacgaggccagagaatacacgag

SEQ ID NO: 60431 - DNA, 30 bp, Artificial Sequence
  Synthetic oligonucleotide
ccggtgccggccataataagagtacacgag

SEQ ID NO: 60432 - DNA, 30 bp, Artificial Sequence
  Synthetic oligonucleotide
ttatcacggaaagttgggatccacgacgag

SEQ ID NO: 60433 - DNA, 30 bp, Artificial Sequence
  Synthetic oligonucleotide
actgcttacatccagcataaccgcgacgag

SEQ ID NO: 60434 - DNA, 30 bp, Artificial Sequence
  Synthetic oligonucleotide
agcaacggcaaagggtgggcaggtgacgag

SEQ ID NO: 60435 - DNA, 30 bp, Artificial Sequence
  Synthetic oligonucleotide
aagatcatcgtggaaatgaacatatacgag

SEQ ID NO: 60436 - DNA, 30 bp, Artificial Sequence
  Synthetic oligonucleotide
ttggggtacctatgctcggaatcgtacgag

SEQ ID NO: 60437 - DNA, 30 bp, Artificial Sequence
  Synthetic oligonucleotide
tcggaatccagctacccctaatggtacgag

SEQ ID NO: 60438 - DNA, 30 bp, Artificial Sequence
  Synthetic oligonucleotide
gaacgtgtgtgttcgaataaagcaaccgag

SEQ ID NO: 60439 - DNA, 30 bp, Artificial Sequence
  Synthetic oligonucleotide
cctagagctaacacgaactgcgggaccgag

SEQ ID NO: 60440 - DNA, 30 bp, Artificial Sequence
  Synthetic oligonucleotide
atgattaccggctgataagccaatcccgag

SEQ ID NO: 60441 - DNA, 30 bp, Artificial Sequence
  Synthetic oligonucleotide
gcgagagcctcgtggcgctcctaagccgag

SEQ ID NO: 60442 - DNA, 30 bp, Artificial Sequence
  Synthetic oligonucleotide
cggagtaagaatgcggatgtggtagccgag

SEQ ID NO: 60443 - DNA, 30 bp, Artificial Sequence
  Synthetic oligonucleotide
atctgcctaccgtgatatctaggcgccgag

SEQ ID NO: 60444 - DNA, 30 bp, Artificial Sequence
  Synthetic oligonucleotide
aaactcgatcaaaggatcgaaggtgccgag

SEQ ID NO: 60445 - DNA, 30 bp, Artificial Sequence
  Synthetic oligonucleotide
ggtgtccggatgaaaaccgtgtaatccgag

SEQ ID NO: 60446 - DNA, 30 bp, Artificial Sequence
  Synthetic oligonucleotide
acacggactgggcaattaaaatgatccgag

SEQ ID NO: 60447 - DNA, 30 bp, Artificial Sequence
  Synthetic oligonucleotide
gcagacaggtaaaaaagggacaagtccgag

SEQ ID NO: 60448 - DNA, 30 bp, Artificial Sequence
  Synthetic oligonucleotide
ccctcataaataaatccgtcctagtccgag

SEQ ID NO: 60449 - DNA, 30 bp, Artificial Sequence
  Synthetic oligonucleotide
gatcgatttatgacgtccctcgaaagcgag

SEQ ID NO: 60450 - DNA, 30 bp, Artificial Sequence
  Synthetic oligonucleotide
ccggagagcctacggggctcgccccgcgag

SEQ ID NO: 60451 - DNA, 30 bp, Artificial Sequence
  Synthetic oligonucleotide
aacgattgcgtacggacatccaccggcgag

SEQ ID NO: 60452 - DNA, 30 bp, Artificial Sequence
  Synthetic oligonucleotide
gttgcgatctcgtttcagtcaacctgcgag

SEQ ID NO: 60453 - DNA, 30 bp, Artificial Sequence
  Synthetic oligonucleotide
ctcggccgaggggcatcaaattgcatcgag

SEQ ID NO: 60454 - DNA, 30 bp, Artificial Sequence
  Synthetic oligonucleotide
tgtgctcctcagtcggggaagttgatcgag

SEQ ID NO: 60455 - DNA, 30 bp, Artificial Sequence
  Synthetic oligonucleotide
gtcattcagaaactcagattacatatcgag

SEQ ID NO: 60456 - DNA, 30 bp, Artificial Sequence
  Synthetic oligonucleotide
cctgaaaagatagaaccgtctttactcgag

SEQ ID NO: 60457 - DNA, 30 bp, Artificial Sequence
  Synthetic oligonucleotide
accaaaattaagacgaagaatggcctcgag

SEQ ID NO: 60458 - DNA, 30 bp, Artificial Sequence
  Synthetic oligonucleotide
gcaggggattgcaatatatgtggggtcgag

SEQ ID NO: 60459 - DNA, 30 bp, Artificial Sequence
  Synthetic oligonucleotide
gcaagatctagactcagtgcagtcttcgag

SEQ ID NO: 60460 - DNA, 30 bp, Artificial Sequence
  Synthetic oligonucleotide
ttggggtatcatcattgtatacggttcgag

SEQ ID NO: 60461 - DNA, 30 bp, Artificial Sequence
  Synthetic oligonucleotide
ggtcaccgcattgcttagagcacaaaggag

SEQ ID NO: 60462 - DNA, 30 bp, Artificial Sequence
  Synthetic oligonucleotide
ctaagtccggcggcatacctgccgaaggag

SEQ ID NO: 60463 - DNA, 30 bp, Artificial Sequence
  Synthetic oligonucleotide
ggcttatggctccgtgaagtgcataaggag

SEQ ID NO: 60464 - DNA, 30 bp, Artificial Sequence
  Synthetic oligonucleotide
ctcaacggcgttctcataaaggaggaggag

SEQ ID NO: 60465 - DNA, 31 bp, Artificial Sequence
  Synthetic oligonucleotide
gactggtttacgaagtaatccgctttaggag

SEQ ID NO: 60466 - DNA, 30 bp, Artificial Sequence
  Synthetic oligonucleotide
aagggccaacagtttaggctcttttaggag

SEQ ID NO: 60467 - DNA, 30 bp, Artificial Sequence
  Synthetic oligonucleotide
ttagcggtagcctgtagtccaacaccggag

SEQ ID NO: 60468 - DNA, 30 bp, Artificial Sequence
  Synthetic oligonucleotide
acgcccaacttacgcattatattaccggag

SEQ ID NO: 60469 - DNA, 30 bp, Artificial Sequence
  Synthetic oligonucleotide
agcggtcaccgacaacttagcgttccggag

SEQ ID NO: 60470 - DNA, 30 bp, Artificial Sequence
  Synthetic oligonucleotide
taggacagggtagcgactaataaagcggag

SEQ ID NO: 60471 - DNA, 30 bp, Artificial Sequence
  Synthetic oligonucleotide
atcatactttaagcgatctacttagcggag

SEQ ID NO: 60472 - DNA, 30 bp, Artificial Sequence
  Synthetic oligonucleotide
tgtacgaccctacgatggctcgtggcggag

SEQ ID NO: 60473 - DNA, 30 bp, Artificial Sequence
  Synthetic oligonucleotide
ccgggacttattagagcacattgctcggag

SEQ ID NO: 60474 - DNA, 30 bp, Artificial Sequence
  Synthetic oligonucleotide
acgcatacgttcggactaatagggtcggag

SEQ ID NO: 60475 - DNA, 30 bp, Artificial Sequence
  Synthetic oligonucleotide
cgactgtaagcaaaagtggttgtgtcggag

SEQ ID NO: 60476 - DNA, 30 bp, Artificial Sequence
  Synthetic oligonucleotide
aggggtcgttcggagcgccactaaagggag

SEQ ID NO: 60477 - DNA, 30 bp, Artificial Sequence
  Synthetic oligonucleotide
gtctcgaaatcaggaaaggaagtgagggag

SEQ ID NO: 60478 - DNA, 30 bp, Artificial Sequence
  Synthetic oligonucleotide
tccatgggtcatattagggtcgtacgggag

SEQ ID NO: 60479 - DNA, 30 bp, Artificial Sequence
  Synthetic oligonucleotide
gaccttgagcctgcgaaattcaaaggggag

SEQ ID NO: 60480 - DNA, 30 bp, Artificial Sequence
  Synthetic oligonucleotide
taagaacgggccacaccaaccgcatgggag

SEQ ID NO: 60481 - DNA, 30 bp, Artificial Sequence
  Synthetic oligonucleotide
acgtatgtggggcttagtaagatatgggag

SEQ ID NO: 60482 - DNA, 30 bp, Artificial Sequence
  Synthetic oligonucleotide
gatagatttccctaccgcactgtgtgggag

SEQ ID NO: 60483 - DNA, 30 bp, Artificial Sequence
  Synthetic oligonucleotide
aagtcactcgagtcatggacgtccatggag

SEQ ID NO: 60484 - DNA, 30 bp, Artificial Sequence
  Synthetic oligonucleotide
tcgcggtaacgcgtattccgcttgatggag

SEQ ID NO: 60485 - DNA, 30 bp, Artificial Sequence
  Synthetic oligonucleotide
cggtaacagggtattgcttaaactatggag

SEQ ID NO: 60486 - DNA, 30 bp, Artificial Sequence
  Synthetic oligonucleotide
gtcacaaccataacttcggtttacctggag

SEQ ID NO: 60487 - DNA, 30 bp, Artificial Sequence
  Synthetic oligonucleotide
gattgccggaacatgataattcatctggag

SEQ ID NO: 60488 - DNA, 30 bp, Artificial Sequence
  Synthetic oligonucleotide
taatgctgtagaaagaacaaccgagtggag

SEQ ID NO: 60489 - DNA, 30 bp, Artificial Sequence
  Synthetic oligonucleotide
agaaatgttggagtacggcatatcgtggag

SEQ ID NO: 60490 - DNA, 30 bp, Artificial Sequence
  Synthetic oligonucleotide
tcacaatgggcatgagctctccaggtggag

SEQ ID NO: 60491 - DNA, 30 bp, Artificial Sequence
  Synthetic oligonucleotide
aagtggaatgtgtgaatggatacggtggag

SEQ ID NO: 60492 - DNA, 30 bp, Artificial Sequence
  Synthetic oligonucleotide
attgggataccctagcgtattagtgtggag

SEQ ID NO: 60493 - DNA, 30 bp, Artificial Sequence
  Synthetic oligonucleotide
ttatcgtgcaagcgcaacgatattgtggag

SEQ ID NO: 60494 - DNA, 30 bp, Artificial Sequence
  Synthetic oligonucleotide
tacggcgtttcgacacataagattttggag

SEQ ID NO: 60495 - DNA, 30 bp, Artificial Sequence
  Synthetic oligonucleotide
cgggttacaggacaaagaacataaaatgag

SEQ ID NO: 60496 - DNA, 30 bp, Artificial Sequence
  Synthetic oligonucleotide
tcggcggggggactggtgtttctaaatgag

SEQ ID NO: 60497 - DNA, 30 bp, Artificial Sequence
  Synthetic oligonucleotide
aaacgaagttcttatacatcgacacatgag

SEQ ID NO: 60498 - DNA, 31 bp, Artificial Sequence
  Synthetic oligonucleotide
gcgcttaaaaattttggtgggaatggatgag

SEQ ID NO: 60499 - DNA, 30 bp, Artificial Sequence
  Synthetic oligonucleotide
cgaagcttgaccttgtctcgcgatgatgag

SEQ ID NO: 60500 - DNA, 30 bp, Artificial Sequence
  Synthetic oligonucleotide
ggactgacatagggcgtgaaaggatatgag

SEQ ID NO: 60501 - DNA, 30 bp, Artificial Sequence
  Synthetic oligonucleotide
gtatcgaacaatcttgccatccagtatgag

SEQ ID NO: 60502 - DNA, 30 bp, Artificial Sequence
  Synthetic oligonucleotide
ccgtatgtgtcactacaagtgcgttatgag

SEQ ID NO: 60503 - DNA, 30 bp, Artificial Sequence
  Synthetic oligonucleotide
tacgacggggaggtttgatattcaactgag

SEQ ID NO: 60504 - DNA, 30 bp, Artificial Sequence
  Synthetic oligonucleotide
cttactagccgactaacgcaggttactgag

SEQ ID NO: 60505 - DNA, 30 bp, Artificial Sequence
  Synthetic oligonucleotide
ttgtgcggaggcgcactgaattctcctgag

SEQ ID NO: 60506 - DNA, 30 bp, Artificial Sequence
  Synthetic oligonucleotide
cccggacgtgtcgggcagtataatcgtgag

SEQ ID NO: 60507 - DNA, 30 bp, Artificial Sequence
  Synthetic oligonucleotide
cgccgcgagtgaagtcgcaatagtcgtgag

SEQ ID NO: 60508 - DNA, 30 bp, Artificial Sequence
  Synthetic oligonucleotide
gggagcggcaagcgcttaactaaaggtgag

SEQ ID NO: 60509 - DNA, 30 bp, Artificial Sequence
  Synthetic oligonucleotide
gcggggggtgtccatatcttggtaggtgag

SEQ ID NO: 60510 - DNA, 30 bp, Artificial Sequence
  Synthetic oligonucleotide
acatgaatgcagttagcatgattaggtgag

SEQ ID NO: 60511 - DNA, 30 bp, Artificial Sequence
  Synthetic oligonucleotide
ccggcagtatgaaacacttggtagggtgag

SEQ ID NO: 60512 - DNA, 30 bp, Artificial Sequence
  Synthetic oligonucleotide
acacagacgtcaatctaacagattggtgag

SEQ ID NO: 60513 - DNA, 30 bp, Artificial Sequence
  Synthetic oligonucleotide
caactcgcagagacgttatcctgctgtgag

SEQ ID NO: 60514 - DNA, 30 bp, Artificial Sequence
  Synthetic oligonucleotide
cgtatttgttaggtaatcaacgtgtgtgag

SEQ ID NO: 60515 - DNA, 30 bp, Artificial Sequence
  Synthetic oligonucleotide
agaaggccgagcatacatgtgtccattgag

SEQ ID NO: 60516 - DNA, 30 bp, Artificial Sequence
  Synthetic oligonucleotide
tagggacattaactcaaggctaggattgag

SEQ ID NO: 60517 - DNA, 30 bp, Artificial Sequence
  Synthetic oligonucleotide
cgggcttaacacacggctaagggtattgag

SEQ ID NO: 60518 - DNA, 30 bp, Artificial Sequence
  Synthetic oligonucleotide
taccacatgaccgagcagttgaatcttgag

SEQ ID NO: 60519 - DNA, 31 bp, Artificial Sequence
  Synthetic oligonucleotide
gcaggctcgaaataataatcgtcccgttgag

SEQ ID NO: 60520 - DNA, 30 bp, Artificial Sequence
  Synthetic oligonucleotide
atctcgcgacagtgggttacacaggttgag

SEQ ID NO: 60521 - DNA, 30 bp, Artificial Sequence
  Synthetic oligonucleotide
cggggtaagccacagctagtaagggttgag

SEQ ID NO: 60522 - DNA, 30 bp, Artificial Sequence
  Synthetic oligonucleotide
tcggtgcgagaaaaactacgtagatttgag

SEQ ID NO: 60523 - DNA, 30 bp, Artificial Sequence
  Synthetic oligonucleotide
taaccatgtatacgtcttgctcagtttgag

SEQ ID NO: 60524 - DNA, 30 bp, Artificial Sequence
  Synthetic oligonucleotide
cgagtactacacccttcacaacggtttgag

SEQ ID NO: 60525 - DNA, 30 bp, Artificial Sequence
  Synthetic oligonucleotide
actacactagataattcacgacggtttgag

SEQ ID NO: 60526 - DNA, 30 bp, Artificial Sequence
  Synthetic oligonucleotide
ctaactaatcgtggaagagctcgttttgag

SEQ ID NO: 60527 - DNA, 30 bp, Artificial Sequence
  Synthetic oligonucleotide
taggtcggtatagggacgcgtataaaatag

SEQ ID NO: 60528 - DNA, 30 bp, Artificial Sequence
  Synthetic oligonucleotide
aaagtaagctccactccttaggtcgaatag

SEQ ID NO: 60529 - DNA, 30 bp, Artificial Sequence
  Synthetic oligonucleotide
gaagcgtatgatgttactgtacttgaatag

SEQ ID NO: 60530 - DNA, 30 bp, Artificial Sequence
  Synthetic oligonucleotide
ccttgatattcagatagatagaagtaatag

SEQ ID NO: 60531 - DNA, 30 bp, Artificial Sequence
  Synthetic oligonucleotide
gtcaaatcaggctccaggcaccagtaatag

SEQ ID NO: 60532 - DNA, 30 bp, Artificial Sequence
  Synthetic oligonucleotide
gttgccacgattaatatgatcgagtaatag

SEQ ID NO: 60533 - DNA, 30 bp, Artificial Sequence
  Synthetic oligonucleotide
gctagggaggtgggagtataatcgtaatag

SEQ ID NO: 60534 - DNA, 30 bp, Artificial Sequence
  Synthetic oligonucleotide
tcggtccagggggtattaaggagaacatag

SEQ ID NO: 60535 - DNA, 30 bp, Artificial Sequence
  Synthetic oligonucleotide
atgcggtagcataccgacagcgggacatag

SEQ ID NO: 60536 - DNA, 30 bp, Artificial Sequence
  Synthetic oligonucleotide
cgcaccggtacgcgaggagccgttacatag

SEQ ID NO: 60537 - DNA, 30 bp, Artificial Sequence
  Synthetic oligonucleotide
ccgttaccggagaccgttaacacaccatag

SEQ ID NO: 60538 - DNA, 30 bp, Artificial Sequence
  Synthetic oligonucleotide
ccgcagcaactaccgacaaaatgcccatag

SEQ ID NO: 60539 - DNA, 30 bp, Artificial Sequence
  Synthetic oligonucleotide
gctctcaccccagaaataacgaatgcatag

SEQ ID NO: 60540 - DNA, 30 bp, Artificial Sequence
  Synthetic oligonucleotide
taggcacgcgtccggaggtcgtgatcatag

SEQ ID NO: 60541 - DNA, 30 bp, Artificial Sequence
  Synthetic oligonucleotide
aagaatgcgggcataaggactgtacgatag

SEQ ID NO: 60542 - DNA, 30 bp, Artificial Sequence
  Synthetic oligonucleotide
aggaccgaacccacagcagtcatccgatag

SEQ ID NO: 60543 - DNA, 30 bp, Artificial Sequence
  Synthetic oligonucleotide
tgcgaaaacgtcagatcgcaaccaggatag

SEQ ID NO: 60544 - DNA, 30 bp, Artificial Sequence
  Synthetic oligonucleotide
tgggaggggctgtactgcgagcggggatag

SEQ ID NO: 60545 - DNA, 30 bp, Artificial Sequence
  Synthetic oligonucleotide
cggctgcaaaatcggcttcatcgtggatag

SEQ ID NO: 60546 - DNA, 30 bp, Artificial Sequence
  Synthetic oligonucleotide
acgtactggcgccagctatcgacctgatag

SEQ ID NO: 60547 - DNA, 29 bp, Artificial Sequence
  Synthetic oligonucleotide
gatcgcatttaaacggcgagctgtgatag

SEQ ID NO: 60548 - DNA, 30 bp, Artificial Sequence
  Synthetic oligonucleotide
tgcgcggggcgacgcatattaggttgatag

SEQ ID NO: 60549 - DNA, 30 bp, Artificial Sequence
  Synthetic oligonucleotide
atgttaatccactaaagactcggttgatag

SEQ ID NO: 60550 - DNA, 30 bp, Artificial Sequence
  Synthetic oligonucleotide
ttaacggccgagactctatcgcctatatag

SEQ ID NO: 60551 - DNA, 30 bp, Artificial Sequence
  Synthetic oligonucleotide
ccagggctccccggaaacccatacgtatag

SEQ ID NO: 60552 - DNA, 30 bp, Artificial Sequence
  Synthetic oligonucleotide
agttagaggtgctgcttacgatgggtatag

SEQ ID NO: 60553 - DNA, 30 bp, Artificial Sequence
  Synthetic oligonucleotide
ttgtgcacaagtaggaaatgcaagaactag

SEQ ID NO: 60554 - DNA, 30 bp, Artificial Sequence
  Synthetic oligonucleotide
atcgatcgcgtgggagtggaatcacactag

SEQ ID NO: 60555 - DNA, 30 bp, Artificial Sequence
  Synthetic oligonucleotide
aaccaaggattcagtgcccgttagcactag

SEQ ID NO: 60556 - DNA, 30 bp, Artificial Sequence
  Synthetic oligonucleotide
gcaaaccttatcaaaggggggtgagactag

SEQ ID NO: 60557 - DNA, 30 bp, Artificial Sequence
  Synthetic oligonucleotide
cggctacaataggggaaggcggtttactag

SEQ ID NO: 60558 - DNA, 30 bp, Artificial Sequence
  Synthetic oligonucleotide
catgacgtcatcgcctgatttcacacctag

SEQ ID NO: 60559 - DNA, 30 bp, Artificial Sequence
  Synthetic oligonucleotide
ggtcatagcaactaaatgcgtcgcacctag

SEQ ID NO: 60560 - DNA, 30 bp, Artificial Sequence
  Synthetic oligonucleotide
cagcaattaagaaatacaatgcaaccctag

SEQ ID NO: 60561 - DNA, 30 bp, Artificial Sequence
  Synthetic oligonucleotide
gaccgtcaaacgggctctaatcgctcctag

SEQ ID NO: 60562 - DNA, 30 bp, Artificial Sequence
  Synthetic oligonucleotide
cggtcgattcctgagaacagctaaagctag

SEQ ID NO: 60563 - DNA, 30 bp, Artificial Sequence
  Synthetic oligonucleotide
agccgttccgggatgccgacgaacagctag

SEQ ID NO: 60564 - DNA, 30 bp, Artificial Sequence
  Synthetic oligonucleotide
ttgtgacagatctaaggatcagcgagctag

SEQ ID NO: 60565 - DNA, 30 bp, Artificial Sequence
  Synthetic oligonucleotide
tatgcgacagtcgtctcggtccagcgctag

SEQ ID NO: 60566 - DNA, 30 bp, Artificial Sequence
  Synthetic oligonucleotide
aagggtacgaccccttgcttacctcgctag

SEQ ID NO: 60567 - DNA, 30 bp, Artificial Sequence
  Synthetic oligonucleotide
ttacatagcagtggaagctatagtcgctag

SEQ ID NO: 60568 - DNA, 30 bp, Artificial Sequence
  Synthetic oligonucleotide
aggagacatcggccgattagtatcggctag

SEQ ID NO: 60569 - DNA, 30 bp, Artificial Sequence
  Synthetic oligonucleotide
cctatggacggcaattaaacgatcatctag

SEQ ID NO: 60570 - DNA, 30 bp, Artificial Sequence
  Synthetic oligonucleotide
aaactgagtcgtaagagggaatgtctctag

SEQ ID NO: 60571 - DNA, 30 bp, Artificial Sequence
  Synthetic oligonucleotide
cgggagagtagcacagcatttggagtctag

SEQ ID NO: 60572 - DNA, 30 bp, Artificial Sequence
  Synthetic oligonucleotide
aggtgggaggtcgtccgtccgctcgtctag

SEQ ID NO: 60573 - DNA, 30 bp, Artificial Sequence
  Synthetic oligonucleotide
agaatgagaaatcacgcgtgattcttctag

SEQ ID NO: 60574 - DNA, 30 bp, Artificial Sequence
  Synthetic oligonucleotide
aggatagtatctccgtgcttgtagttctag

SEQ ID NO: 60575 - DNA, 30 bp, Artificial Sequence
  Synthetic oligonucleotide
tcttgtaatgtagttatcaactaaaagtag

SEQ ID NO: 60576 - DNA, 30 bp, Artificial Sequence
  Synthetic oligonucleotide
tgtccagagacacaggccgcaagaaagtag

SEQ ID NO: 60577 - DNA, 30 bp, Artificial Sequence
  Synthetic oligonucleotide
ctgagtaaggtatctgcttaaccgaagtag

SEQ ID NO: 60578 - DNA, 30 bp, Artificial Sequence
  Synthetic oligonucleotide
gtgagcgtcaatttagtttgaggacagtag

SEQ ID NO: 60579 - DNA, 30 bp, Artificial Sequence
  Synthetic oligonucleotide
agggctagtgtctccctgtaagatcagtag

SEQ ID NO: 60580 - DNA, 30 bp, Artificial Sequence
  Synthetic oligonucleotide
atcacctgtaccgtggtgtgtggcgagtag

SEQ ID NO: 60581 - DNA, 30 bp, Artificial Sequence
  Synthetic oligonucleotide
ttgtccgaccgcctaaaagcatgcgagtag

SEQ ID NO: 60582 - DNA, 30 bp, Artificial Sequence
  Synthetic oligonucleotide
ctacgaccaatatttatgtggttcgagtag

SEQ ID NO: 60583 - DNA, 30 bp, Artificial Sequence
  Synthetic oligonucleotide
gcaaggtgaagcttcgcttagtcctagtag

SEQ ID NO: 60584 - DNA, 30 bp, Artificial Sequence
  Synthetic oligonucleotide
agagttccgcgcggaagggctgtttagtag

SEQ ID NO: 60585 - DNA, 30 bp, Artificial Sequence
  Synthetic oligonucleotide
tcaggggaaacgtgaagacccaggacgtag

SEQ ID NO: 60586 - DNA, 30 bp, Artificial Sequence
  Synthetic oligonucleotide
gtaggtcagttgctgggaaatgatacgtag

SEQ ID NO: 60587 - DNA, 30 bp, Artificial Sequence
  Synthetic oligonucleotide
cgcttagacaaaagcttcagttatacgtag

SEQ ID NO: 60588 - DNA, 30 bp, Artificial Sequence
  Synthetic oligonucleotide
acggacacactactcttacactgtccgtag

SEQ ID NO: 60589 - DNA, 30 bp, Artificial Sequence
  Synthetic oligonucleotide
aagcaagcattgctttaatgaacagcgtag

SEQ ID NO: 60590 - DNA, 30 bp, Artificial Sequence
  Synthetic oligonucleotide
gccgccggtgagaagtcggggggggcgtag

SEQ ID NO: 60591 - DNA, 30 bp, Artificial Sequence
  Synthetic oligonucleotide
tcacaagatagaactctacccgatgcgtag

SEQ ID NO: 60592 - DNA, 30 bp, Artificial Sequence
  Synthetic oligonucleotide
catcggaaggatatcacgattgatgcgtag

SEQ ID NO: 60593 - DNA, 30 bp, Artificial Sequence
  Synthetic oligonucleotide
tgatcgatgttgagtcgcataactgcgtag

SEQ ID NO: 60594 - DNA, 30 bp, Artificial Sequence
  Synthetic oligonucleotide
agacagattggtggccagaagtgtgcgtag

SEQ ID NO: 60595 - DNA, 30 bp, Artificial Sequence
  Synthetic oligonucleotide
aggattacggcgactgcgataacctcgtag

SEQ ID NO: 60596 - DNA, 30 bp, Artificial Sequence
  Synthetic oligonucleotide
gggcctcccgcgtaagtattaggaaggtag

SEQ ID NO: 60597 - DNA, 30 bp, Artificial Sequence
  Synthetic oligonucleotide
tgagtaaagtttgattatctcgagaggtag

SEQ ID NO: 60598 - DNA, 30 bp, Artificial Sequence
  Synthetic oligonucleotide
cggtagtgagcaaagaactgttaacggtag

SEQ ID NO: 60599 - DNA, 30 bp, Artificial Sequence
  Synthetic oligonucleotide
tcgtggatgcaaggtttttccgcttggtag

SEQ ID NO: 60600 - DNA, 30 bp, Artificial Sequence
  Synthetic oligonucleotide
acgggtacgttgaaactcactctcatgtag

SEQ ID NO: 60601 - DNA, 30 bp, Artificial Sequence
  Synthetic oligonucleotide
cgatgaggccaatccagagacaaggtgtag

SEQ ID NO: 60602 - DNA, 30 bp, Artificial Sequence
  Synthetic oligonucleotide
acggccaacggaaaccagagattcttgtag

SEQ ID NO: 60603 - DNA, 30 bp, Artificial Sequence
  Synthetic oligonucleotide
atacggagatctagcactgtgaacaattag

SEQ ID NO: 60604 - DNA, 30 bp, Artificial Sequence
  Synthetic oligonucleotide
acggacaaaaagttgtcttcgagcaattag

SEQ ID NO: 60605 - DNA, 30 bp, Artificial Sequence
  Synthetic oligonucleotide
ttgagaagagaacctatagtcgaacattag

SEQ ID NO: 60606 - DNA, 30 bp, Artificial Sequence
  Synthetic oligonucleotide
aggtgaggcgtccttctaagttcccattag

SEQ ID NO: 60607 - DNA, 30 bp, Artificial Sequence
  Synthetic oligonucleotide
gcgatcgatcttgagtcgtccggagattag

SEQ ID NO: 60608 - DNA, 30 bp, Artificial Sequence
  Synthetic oligonucleotide
tcacggtccacttctgccagctacgattag

SEQ ID NO: 60609 - DNA, 30 bp, Artificial Sequence
  Synthetic oligonucleotide
atagggttagatgttagaggacatgattag

SEQ ID NO: 60610 - DNA, 30 bp, Artificial Sequence
  Synthetic oligonucleotide
ccatatacagctgatgaaatgtttgattag

SEQ ID NO: 60611 - DNA, 30 bp, Artificial Sequence
  Synthetic oligonucleotide
caatatcgtaggagagggacttaatattag

SEQ ID NO: 60612 - DNA, 30 bp, Artificial Sequence
  Synthetic oligonucleotide
actgagtacttgaagggttaacggtattag

SEQ ID NO: 60613 - DNA, 30 bp, Artificial Sequence
  Synthetic oligonucleotide
agttgcgtggtgatgaaacaggaaacttag

SEQ ID NO: 60614 - DNA, 30 bp, Artificial Sequence
  Synthetic oligonucleotide
aacgaccgctacgaaaattcccacacttag

SEQ ID NO: 60615 - DNA, 30 bp, Artificial Sequence
  Synthetic oligonucleotide
tagacagcgtgtcctacgagcgcgacttag

SEQ ID NO: 60616 - DNA, 30 bp, Artificial Sequence
  Synthetic oligonucleotide
ctgtatgcgacaggagggcgtcgtccttag

SEQ ID NO: 60617 - DNA, 30 bp, Artificial Sequence
  Synthetic oligonucleotide
tgaggataggggctgccttgcacagcttag

SEQ ID NO: 60618 - DNA, 30 bp, Artificial Sequence
  Synthetic oligonucleotide
tgaggctgggttgtgagcgcccaaagttag

SEQ ID NO: 60619 - DNA, 30 bp, Artificial Sequence
  Synthetic oligonucleotide
cagggcagttttgttgtatcttgaagttag

SEQ ID NO: 60620 - DNA, 30 bp, Artificial Sequence
  Synthetic oligonucleotide
cgtgactcacgcgtagcgctgaacagttag

SEQ ID NO: 60621 - DNA, 30 bp, Artificial Sequence
  Synthetic oligonucleotide
gtgggaatagagtgtctgttcgtgagttag

SEQ ID NO: 60622 - DNA, 30 bp, Artificial Sequence
  Synthetic oligonucleotide
gtgacgaattcgcaaacattggggggttag

SEQ ID NO: 60623 - DNA, 30 bp, Artificial Sequence
  Synthetic oligonucleotide
tgggcgcaacggctttcaccggcttgttag

SEQ ID NO: 60624 - DNA, 30 bp, Artificial Sequence
  Synthetic oligonucleotide
tagcgcaagcagaaactcctgcagatttag

SEQ ID NO: 60625 - DNA, 30 bp, Artificial Sequence
  Synthetic oligonucleotide
aacgtggcacgtcagccaacccggatttag

SEQ ID NO: 60626 - DNA, 30 bp, Artificial Sequence
  Synthetic oligonucleotide
agtacacacagagcgattaggattatttag

SEQ ID NO: 60627 - DNA, 30 bp, Artificial Sequence
  Synthetic oligonucleotide
tctacaagctaagtgagggacagcgtttag

SEQ ID NO: 60628 - DNA, 30 bp, Artificial Sequence
  Synthetic oligonucleotide
agctggcggtataataggcttatcttttag

SEQ ID NO: 60629 - DNA, 30 bp, Artificial Sequence
  Synthetic oligonucleotide
gacgttatcatagctaaagataacaaaacg

SEQ ID NO: 60630 - DNA, 30 bp, Artificial Sequence
  Synthetic oligonucleotide
cgatcccgaaagtaaaaacccgagaaaacg

SEQ ID NO: 60631 - DNA, 30 bp, Artificial Sequence
  Synthetic oligonucleotide
ccgggccgtagcgagcataaccgtcaaacg

SEQ ID NO: 60632 - DNA, 30 bp, Artificial Sequence
  Synthetic oligonucleotide
atatcggacggtaactagtggggtcaaacg

SEQ ID NO: 60633 - DNA, 30 bp, Artificial Sequence
  Synthetic oligonucleotide
ctacgcaaagctgtctagtgagaaacaacg

SEQ ID NO: 60634 - DNA, 30 bp, Artificial Sequence
  Synthetic oligonucleotide
cactccactgggcaagagttaacaacaacg

SEQ ID NO: 60635 - DNA, 30 bp, Artificial Sequence
  Synthetic oligonucleotide
gcgtgtccacaagtcttgccgataacaacg

SEQ ID NO: 60636 - DNA, 30 bp, Artificial Sequence
  Synthetic oligonucleotide
atataggagggaagctatgaaagcccaacg

SEQ ID NO: 60637 - DNA, 30 bp, Artificial Sequence
  Synthetic oligonucleotide
cgttcgttcgacacaaaaaaatagccaacg

SEQ ID NO: 60638 - DNA, 30 bp, Artificial Sequence
  Synthetic oligonucleotide
gaactatcagcgagcatgtgaatcgcaacg

SEQ ID NO: 60639 - DNA, 30 bp, Artificial Sequence
  Synthetic oligonucleotide
tggttcatagcaataagaaacgtggcaacg

SEQ ID NO: 60640 - DNA, 30 bp, Artificial Sequence
  Synthetic oligonucleotide
gcaaaagggtagtctaaaaaagggtcaacg

SEQ ID NO: 60641 - DNA, 30 bp, Artificial Sequence
  Synthetic oligonucleotide
actacgatcacgggttacagcgaaagaacg

SEQ ID NO: 60642 - DNA, 30 bp, Artificial Sequence
  Synthetic oligonucleotide
tggaggagtcggcaacgtctgcaacgaacg

SEQ ID NO: 60643 - DNA, 30 bp, Artificial Sequence
  Synthetic oligonucleotide
ttgtgctgggtcagcgaagtcaacggaacg

SEQ ID NO: 60644 - DNA, 30 bp, Artificial Sequence
  Synthetic oligonucleotide
agctttgggacacatctgaggaacggaacg

SEQ ID NO: 60645 - DNA, 30 bp, Artificial Sequence
  Synthetic oligonucleotide
gtgctcgcgcgccggaggagcagtggaacg

SEQ ID NO: 60646 - DNA, 30 bp, Artificial Sequence
  Synthetic oligonucleotide
acaatcgccggccatatagatagcataacg

SEQ ID NO: 60647 - DNA, 30 bp, Artificial Sequence
  Synthetic oligonucleotide
agcgatacagggtgaatggcaggtataacg

SEQ ID NO: 60648 - DNA, 30 bp, Artificial Sequence
  Synthetic oligonucleotide
aaggagaagtacgcgccccgcggattaacg

SEQ ID NO: 60649 - DNA, 30 bp, Artificial Sequence
  Synthetic oligonucleotide
aaggctaagcaagttataaaggatttaacg

SEQ ID NO: 60650 - DNA, 30 bp, Artificial Sequence
  Synthetic oligonucleotide
ccaatgtgaagcgtggctgaatctaacacg

SEQ ID NO: 60651 - DNA, 30 bp, Artificial Sequence
  Synthetic oligonucleotide
caacgggcccggttaaagtaagttcacacg

SEQ ID NO: 60652 - DNA, 30 bp, Artificial Sequence
  Synthetic oligonucleotide
ataggggcacaaggtgtttcgcactacacg

SEQ ID NO: 60653 - DNA, 30 bp, Artificial Sequence
  Synthetic oligonucleotide
aggtcagcaaatcaaccctcatattacacg

SEQ ID NO: 60654 - DNA, 30 bp, Artificial Sequence
  Synthetic oligonucleotide
aaacgacctgcatactcatcatttgccacg

SEQ ID NO: 60655 - DNA, 30 bp, Artificial Sequence
  Synthetic oligonucleotide
ctacttacaagacataccggggccagcacg

SEQ ID NO: 60656 - DNA, 30 bp, Artificial Sequence
  Synthetic oligonucleotide
attgctacacccacttaaacccagagcacg

SEQ ID NO: 60657 - DNA, 30 bp, Artificial Sequence
  Synthetic oligonucleotide
cagcttcagaacttggttcacaggagcacg

SEQ ID NO: 60658 - DNA, 30 bp, Artificial Sequence
  Synthetic oligonucleotide
cacagaattcatgagtaaggcaggggcacg

SEQ ID NO: 60659 - DNA, 30 bp, Artificial Sequence
  Synthetic oligonucleotide
ggccaacagtaaggactgtagaactgcacg

SEQ ID NO: 60660 - DNA, 30 bp, Artificial Sequence
  Synthetic oligonucleotide
attgcgatggccgtcgagcagtagtgcacg

SEQ ID NO: 60661 - DNA, 30 bp, Artificial Sequence
  Synthetic oligonucleotide
gctacaagacaatgcaaaatcgcgatcacg

SEQ ID NO: 60662 - DNA, 30 bp, Artificial Sequence
  Synthetic oligonucleotide
agactagtatggtcgcccgattcgatcacg

SEQ ID NO: 60663 - DNA, 30 bp, Artificial Sequence
  Synthetic oligonucleotide
tcatgacttgaggagtggccagatgtcacg

SEQ ID NO: 60664 - DNA, 30 bp, Artificial Sequence
  Synthetic oligonucleotide
gggatcgacaacagcctccctactgtcacg

SEQ ID NO: 60665 - DNA, 30 bp, Artificial Sequence
  Synthetic oligonucleotide
tacgatgcgtaagcgcggtcggacaagacg

SEQ ID NO: 60666 - DNA, 30 bp, Artificial Sequence
  Synthetic oligonucleotide
aacacagggggtagcataatgcgccagacg

SEQ ID NO: 60667 - DNA, 30 bp, Artificial Sequence
  Synthetic oligonucleotide
atcaatgtagcctcaaatccgagagagacg

SEQ ID NO: 60668 - DNA, 30 bp, Artificial Sequence
  Synthetic oligonucleotide
cggctagatgaaagtcggagcgtggagacg

SEQ ID NO: 60669 - DNA, 30 bp, Artificial Sequence
  Synthetic oligonucleotide
acggtcctggaactcattaagagatagacg

SEQ ID NO: 60670 - DNA, 30 bp, Artificial Sequence
  Synthetic oligonucleotide
ccataccctattgcttggagtgaaacgacg

SEQ ID NO: 60671 - DNA, 30 bp, Artificial Sequence
  Synthetic oligonucleotide
gttgctgtcgacccgaaaatgcgcacgacg

SEQ ID NO: 60672 - DNA, 30 bp, Artificial Sequence
  Synthetic oligonucleotide
acattgccgagtaattctgccacgacgacg

SEQ ID NO: 60673 - DNA, 30 bp, Artificial Sequence
  Synthetic oligonucleotide
cacccccagcgaaggcattgcgccccgacg

SEQ ID NO: 60674 - DNA, 30 bp, Artificial Sequence
  Synthetic oligonucleotide
agacggtacttatccgcgcacagggcgacg

SEQ ID NO: 60675 - DNA, 30 bp, Artificial Sequence
  Synthetic oligonucleotide
acgtgggggaatggaaatggggcaaggacg

SEQ ID NO: 60676 - DNA, 30 bp, Artificial Sequence
  Synthetic oligonucleotide
ctgtagaagtatttgcaagcaagcaggacg

SEQ ID NO: 60677 - DNA, 30 bp, Artificial Sequence
  Synthetic oligonucleotide
ctacaaaggggactgtgcgctcggcggacg

SEQ ID NO: 60678 - DNA, 30 bp, Artificial Sequence
  Synthetic oligonucleotide
tcggtcacgaggtgaacactagaagggacg

SEQ ID NO: 60679 - DNA, 30 bp, Artificial Sequence
  Synthetic oligonucleotide
gtgtggcaggagatgagggctatgtggacg

SEQ ID NO: 60680 - DNA, 30 bp, Artificial Sequence
  Synthetic oligonucleotide
ctgacaatgattcataaagaattaatgacg

SEQ ID NO: 60681 - DNA, 30 bp, Artificial Sequence
  Synthetic oligonucleotide
aaatggaattaggggcccgcccggatgacg

SEQ ID NO: 60682 - DNA, 30 bp, Artificial Sequence
  Synthetic oligonucleotide
gcgaggcgactcataactgctcaaaatacg

SEQ ID NO: 60683 - DNA, 30 bp, Artificial Sequence
  Synthetic oligonucleotide
acacgccccaagtttcaacgagcaaatacg

SEQ ID NO: 60684 - DNA, 30 bp, Artificial Sequence
  Synthetic oligonucleotide
aagctaagcagtctagcttggatcaatacg

SEQ ID NO: 60685 - DNA, 30 bp, Artificial Sequence
  Synthetic oligonucleotide
acgcctcgaaggatgccgacatttaatacg

SEQ ID NO: 60686 - DNA, 30 bp, Artificial Sequence
  Synthetic oligonucleotide
taaagcagaagtcaaacctgtcatcatacg

SEQ ID NO: 60687 - DNA, 30 bp, Artificial Sequence
  Synthetic oligonucleotide
aagtaatagaagccatcacaagtggatacg

SEQ ID NO: 60688 - DNA, 30 bp, Artificial Sequence
  Synthetic oligonucleotide
accggcgagaaggaaatgtacgatgatacg

SEQ ID NO: 60689 - DNA, 30 bp, Artificial Sequence
  Synthetic oligonucleotide
tccgaagagtacatgcgcatgcactatacg

SEQ ID NO: 60690 - DNA, 30 bp, Artificial Sequence
  Synthetic oligonucleotide
ttaaggacggacgatcaccaggggtatacg

SEQ ID NO: 60691 - DNA, 30 bp, Artificial Sequence
  Synthetic oligonucleotide
acggcaaagtatttacgatggatgtatacg

SEQ ID NO: 60692 - DNA, 30 bp, Artificial Sequence
  Synthetic oligonucleotide
atacttgaggggcgccaactatcgactacg

SEQ ID NO: 60693 - DNA, 30 bp, Artificial Sequence
  Synthetic oligonucleotide
aagcgacaaagaattattgtcgtgactacg

SEQ ID NO: 60694 - DNA, 30 bp, Artificial Sequence
  Synthetic oligonucleotide
agtagcaccgagcctaagatgaaccctacg

SEQ ID NO: 60695 - DNA, 30 bp, Artificial Sequence
  Synthetic oligonucleotide
aactcgctgaacctgtgcttgaaccctacg

SEQ ID NO: 60696 - DNA, 30 bp, Artificial Sequence
  Synthetic oligonucleotide
taggctgcagatttgttcgaataccctacg

SEQ ID NO: 60697 - DNA, 30 bp, Artificial Sequence
  Synthetic oligonucleotide
gttggggggccgatctatcaatcagctacg

SEQ ID NO: 60698 - DNA, 30 bp, Artificial Sequence
  Synthetic oligonucleotide
agtttgcgaaacactcgtccgccatctacg

SEQ ID NO: 60699 - DNA, 30 bp, Artificial Sequence
  Synthetic oligonucleotide
cgtaactcggaatcgagcgcgattagtacg

SEQ ID NO: 60700 - DNA, 30 bp, Artificial Sequence
  Synthetic oligonucleotide
agccgatgtaacacaaggcgcggtggtacg

SEQ ID NO: 60701 - DNA, 30 bp, Artificial Sequence
  Synthetic oligonucleotide
cgtgtccacgacccgaacagacccattacg

SEQ ID NO: 60702 - DNA, 30 bp, Artificial Sequence
  Synthetic oligonucleotide
attggtaactagcattaggaggatattacg

SEQ ID NO: 60703 - DNA, 30 bp, Artificial Sequence
  Synthetic oligonucleotide
tggtgggttgccgtatgtgcccaagttacg

SEQ ID NO: 60704 - DNA, 30 bp, Artificial Sequence
  Synthetic oligonucleotide
ctgcgttagtgggaacagtgaaggtttacg

SEQ ID NO: 60705 - DNA, 30 bp, Artificial Sequence
  Synthetic oligonucleotide
actcggcgtggccagcgccaacaaaaaccg

SEQ ID NO: 60706 - DNA, 30 bp, Artificial Sequence
  Synthetic oligonucleotide
tgaaacttgtatctttcactacataaaccg

SEQ ID NO: 60707 - DNA, 30 bp, Artificial Sequence
  Synthetic oligonucleotide
gagtcaaaacggggatattgagcccaaccg

SEQ ID NO: 60708 - DNA, 30 bp, Artificial Sequence
  Synthetic oligonucleotide
ggtgccgcaaaattgataatgctctaaccg

SEQ ID NO: 60709 - DNA, 30 bp, Artificial Sequence
  Synthetic oligonucleotide
aacacctgctactacaaggaggtctaaccg

SEQ ID NO: 60710 - DNA, 30 bp, Artificial Sequence
  Synthetic oligonucleotide
ttgctgcgttagcgtatggaactcacaccg

SEQ ID NO: 60711 - DNA, 30 bp, Artificial Sequence
  Synthetic oligonucleotide
caaactagttcggttcgtaataaaccaccg

SEQ ID NO: 60712 - DNA, 30 bp, Artificial Sequence
  Synthetic oligonucleotide
ggcgtattagcggacataccctacgcaccg

SEQ ID NO: 60713 - DNA, 30 bp, Artificial Sequence
  Synthetic oligonucleotide
gtttggaccagagtaagctacagtgcaccg

SEQ ID NO: 60714 - DNA, 30 bp, Artificial Sequence
  Synthetic oligonucleotide
acaatggagtccaacgtcccactatcaccg

SEQ ID NO: 60715 - DNA, 30 bp, Artificial Sequence
  Synthetic oligonucleotide
cgcgatcggacaggtgtggcctactcaccg

SEQ ID NO: 60716 - DNA, 30 bp, Artificial Sequence
  Synthetic oligonucleotide
taaataactagtggacacgcaacctcaccg

SEQ ID NO: 60717 - DNA, 30 bp, Artificial Sequence
  Synthetic oligonucleotide
gaacttaaattcacaaaacccaatcgaccg

SEQ ID NO: 60718 - DNA, 30 bp, Artificial Sequence
  Synthetic oligonucleotide
gggcgatcgacaacggaacgggcgtgaccg

SEQ ID NO: 60719 - DNA, 30 bp, Artificial Sequence
  Synthetic oligonucleotide
tcgcatcgaaaccactgagctactataccg

SEQ ID NO: 60720 - DNA, 30 bp, Artificial Sequence
  Synthetic oligonucleotide
tgtgggattgcaggtttggcatgattaccg

SEQ ID NO: 60721 - DNA, 30 bp, Artificial Sequence
  Synthetic oligonucleotide
caaggggattttatgaccaaaaccttaccg

SEQ ID NO: 60722 - DNA, 30 bp, Artificial Sequence
  Synthetic oligonucleotide
tgccatcgcgaagtgagcaaaaagttaccg

SEQ ID NO: 60723 - DNA, 30 bp, Artificial Sequence
  Synthetic oligonucleotide
cagtcggagtatcccacgcgaggacacccg

SEQ ID NO: 60724 - DNA, 30 bp, Artificial Sequence
  Synthetic oligonucleotide
gggcggcgataggatacagatcagcacccg

SEQ ID NO: 60725 - DNA, 30 bp, Artificial Sequence
  Synthetic oligonucleotide
tggtaaatcttattaaaggcgtgggacccg

SEQ ID NO: 60726 - DNA, 30 bp, Artificial Sequence
  Synthetic oligonucleotide
ctcaacgtaggagcaacagaaacatacccg

SEQ ID NO: 60727 - DNA, 30 bp, Artificial Sequence
  Synthetic oligonucleotide
tgaggatatcacaatactagccattacccg

SEQ ID NO: 60728 - DNA, 30 bp, Artificial Sequence
  Synthetic oligonucleotide
cggtcatcttgcgccatgaaacgacccccg

SEQ ID NO: 60729 - DNA, 30 bp, Artificial Sequence
  Synthetic oligonucleotide
actcaacaagactatccttgcaaatccccg

SEQ ID NO: 60730 - DNA, 30 bp, Artificial Sequence
  Synthetic oligonucleotide
agccgacgcgttaggttcaaggactccccg

SEQ ID NO: 60731 - DNA, 30 bp, Artificial Sequence
  Synthetic oligonucleotide
tcgtctccaatgggtcagtaaagaagcccg

SEQ ID NO: 60732 - DNA, 30 bp, Artificial Sequence
  Synthetic oligonucleotide
gtgtagtggggttacattaatcgccgcccg

SEQ ID NO: 60733 - DNA, 30 bp, Artificial Sequence
  Synthetic oligonucleotide
ggaggttcagtacacaacctattgcgcccg

SEQ ID NO: 60734 - DNA, 30 bp, Artificial Sequence
  Synthetic oligonucleotide
acctggggatgccatgcgtgcataggcccg

SEQ ID NO: 60735 - DNA, 30 bp, Artificial Sequence
  Synthetic oligonucleotide
tacaactgctacattcgcccattcatcccg

SEQ ID NO: 60736 - DNA, 30 bp, Artificial Sequence
  Synthetic oligonucleotide
gatgcacattggttaatctgaatcctcccg

SEQ ID NO: 60737 - DNA, 30 bp, Artificial Sequence
  Synthetic oligonucleotide
acacgataaatcaaaaccagcaaggtcccg

SEQ ID NO: 60738 - DNA, 30 bp, Artificial Sequence
  Synthetic oligonucleotide
accgcatctgatagtgaaaatgtggtcccg

SEQ ID NO: 60739 - DNA, 30 bp, Artificial Sequence
  Synthetic oligonucleotide
gtcgcccctagtaaactatagcacaagccg

SEQ ID NO: 60740 - DNA, 30 bp, Artificial Sequence
  Synthetic oligonucleotide
acgtgtggaatagctcataggaagaagccg

SEQ ID NO: 60741 - DNA, 30 bp, Artificial Sequence
  Synthetic oligonucleotide
tggcagggcacaaagaaagtgtacgagccg

SEQ ID NO: 60742 - DNA, 30 bp, Artificial Sequence
  Synthetic oligonucleotide
ccggcaacggatggtgaatgcattgagccg

SEQ ID NO: 60743 - DNA, 30 bp, Artificial Sequence
  Synthetic oligonucleotide
cgcaaaccaagtgacatgaggtttgagccg

SEQ ID NO: 60744 - DNA, 30 bp, Artificial Sequence
  Synthetic oligonucleotide
gtaggtcaagaacgactaaagagctagccg

SEQ ID NO: 60745 - DNA, 30 bp, Artificial Sequence
  Synthetic oligonucleotide
gttgccagtgagtctggttgtaagtagccg

SEQ ID NO: 60746 - DNA, 30 bp, Artificial Sequence
  Synthetic oligonucleotide
aagtttcaaacatcagagctgacaccgccg

SEQ ID NO: 60747 - DNA, 30 bp, Artificial Sequence
  Synthetic oligonucleotide
cgtaatcagtcgcgatcttcaacagcgccg

SEQ ID NO: 60748 - DNA, 30 bp, Artificial Sequence
  Synthetic oligonucleotide
atcacaattcaggtcacctccagcgcgccg

SEQ ID NO: 60749 - DNA, 30 bp, Artificial Sequence
  Synthetic oligonucleotide
gtacaaatatcccccacgggtcgggcgccg

SEQ ID NO: 60750 - DNA, 30 bp, Artificial Sequence
  Synthetic oligonucleotide
cgccgagtcccaagccattcgcaatcgccg

SEQ ID NO: 60751 - DNA, 30 bp, Artificial Sequence
  Synthetic oligonucleotide
ataggtggacagaatgctcggtcacggccg

SEQ ID NO: 60752 - DNA, 30 bp, Artificial Sequence
  Synthetic oligonucleotide
caacgatacgacagaggttccgttcggccg

SEQ ID NO: 60753 - DNA, 30 bp, Artificial Sequence
  Synthetic oligonucleotide
gggaaaggaggatcaactgcaaaagggccg

SEQ ID NO: 60754 - DNA, 30 bp, Artificial Sequence
  Synthetic oligonucleotide
cgacaaatcatcaagcattaagaagggccg

SEQ ID NO: 60755 - DNA, 30 bp, Artificial Sequence
  Synthetic oligonucleotide
gcgagagcgcgtcctgtcggtacaatgccg

SEQ ID NO: 60756 - DNA, 30 bp, Artificial Sequence
  Synthetic oligonucleotide
gggggtggaccaggcttgatttacctgccg

SEQ ID NO: 60757 - DNA, 30 bp, Artificial Sequence
  Synthetic oligonucleotide
agaaattggcaagtgcaagtagtattgccg

SEQ ID NO: 60758 - DNA, 30 bp, Artificial Sequence
  Synthetic oligonucleotide
tcgctgctaacataaattgcgcataatccg

SEQ ID NO: 60759 - DNA, 30 bp, Artificial Sequence
  Synthetic oligonucleotide
tcagatgttatattcgtgaggaccgatccg

SEQ ID NO: 60760 - DNA, 30 bp, Artificial Sequence
  Synthetic oligonucleotide
ggcatgacccgcgtgacaacaggtgatccg

SEQ ID NO: 60761 - DNA, 30 bp, Artificial Sequence
  Synthetic oligonucleotide
tcgattatgccgggtcaggagcacactccg

SEQ ID NO: 60762 - DNA, 30 bp, Artificial Sequence
  Synthetic oligonucleotide
gctcaggctgttagaatcagactgactccg

SEQ ID NO: 60763 - DNA, 30 bp, Artificial Sequence
  Synthetic oligonucleotide
acagagattatgtgcggctgtggtactccg

SEQ ID NO: 60764 - DNA, 30 bp, Artificial Sequence
  Synthetic oligonucleotide
gctcacgccaaccccgactatggacctccg

SEQ ID NO: 60765 - DNA, 30 bp, Artificial Sequence
  Synthetic oligonucleotide
tatggagcatatgaaacaggtgacgctccg

SEQ ID NO: 60766 - DNA, 30 bp, Artificial Sequence
  Synthetic oligonucleotide
tacgggggataatcacatggcagcgctccg

SEQ ID NO: 60767 - DNA, 30 bp, Artificial Sequence
  Synthetic oligonucleotide
ggtgtatctttgccgactagaagaagtccg

SEQ ID NO: 60768 - DNA, 30 bp, Artificial Sequence
  Synthetic oligonucleotide
gctacattacgggaaccacgtgggagtccg

SEQ ID NO: 60769 - DNA, 30 bp, Artificial Sequence
  Synthetic oligonucleotide
gattcatgccgagtagtccgactgagtccg

SEQ ID NO: 60770 - DNA, 30 bp, Artificial Sequence
  Synthetic oligonucleotide
gaagcggtacatggaacgtcgttaggtccg

SEQ ID NO: 60771 - DNA, 30 bp, Artificial Sequence
  Synthetic oligonucleotide
gtgttatgcaccgaagtaaaggcgtgtccg

SEQ ID NO: 60772 - DNA, 30 bp, Artificial Sequence
  Synthetic oligonucleotide
ggacccaggctcatgtaattcaggtgtccg

SEQ ID NO: 60773 - DNA, 30 bp, Artificial Sequence
  Synthetic oligonucleotide
ctacgtacgaactattcggcgcgacttccg

SEQ ID NO: 60774 - DNA, 30 bp, Artificial Sequence
  Synthetic oligonucleotide
caccgagcgaccgcaaggcctgggcaagcg

SEQ ID NO: 60775 - DNA, 30 bp, Artificial Sequence
  Synthetic oligonucleotide
ggcattcaaagacgatggtagcccgaagcg

SEQ ID NO: 60776 - DNA, 30 bp, Artificial Sequence
  Synthetic oligonucleotide
gacaccagaatagattcggtagaaccagcg

SEQ ID NO: 60777 - DNA, 30 bp, Artificial Sequence
  Synthetic oligonucleotide
aacgtgaagcgcaggattaggggcccagcg

SEQ ID NO: 60778 - DNA, 29 bp, Artificial Sequence
  Synthetic oligonucleotide
gatcagataagaaaaacagccctgcagcg

SEQ ID NO: 60779 - DNA, 30 bp, Artificial Sequence
  Synthetic oligonucleotide
catccagaccgtaggatcttaatcagagcg

SEQ ID NO: 60780 - DNA, 30 bp, Artificial Sequence
  Synthetic oligonucleotide
tgcacaatgtactagtgcagatttagagcg

SEQ ID NO: 60781 - DNA, 30 bp, Artificial Sequence
  Synthetic oligonucleotide
catctaggacgacaccaatcaaaacgagcg

SEQ ID NO: 60782 - DNA, 30 bp, Artificial Sequence
  Synthetic oligonucleotide
tctaaaagtgagcaggattccgtacgagcg

SEQ ID NO: 60783 - DNA, 30 bp, Artificial Sequence
  Synthetic oligonucleotide
ttaggtgaagttaagtcaggtctctgagcg

SEQ ID NO: 60784 - DNA, 30 bp, Artificial Sequence
  Synthetic oligonucleotide
ctgtgtacgaaaacagcctattggtgagcg

SEQ ID NO: 60785 - DNA, 30 bp, Artificial Sequence
  Synthetic oligonucleotide
tggatatcatccctgcggtgacagatagcg

SEQ ID NO: 60786 - DNA, 30 bp, Artificial Sequence
  Synthetic oligonucleotide
gtcggtcggtcggtgccactagagatagcg

SEQ ID NO: 60787 - DNA, 30 bp, Artificial Sequence
  Synthetic oligonucleotide
ttagactgtcaaccatttgaagaactagcg

SEQ ID NO: 60788 - DNA, 31 bp, Artificial Sequence
  Synthetic oligonucleotide
ataaccatgcgagtatgaacgatccctagcg

SEQ ID NO: 60789 - DNA, 30 bp, Artificial Sequence
  Synthetic oligonucleotide
gcaccgggagtgtcgtcaattattctagcg

SEQ ID NO: 60790 - DNA, 30 bp, Artificial Sequence
  Synthetic oligonucleotide
tcaaagacatagctagaggcggggaacgcg

SEQ ID NO: 60791 - DNA, 30 bp, Artificial Sequence
  Synthetic oligonucleotide
gaagggtggagcgggagttagccgcccgcg

SEQ ID NO: 60792 - DNA, 30 bp, Artificial Sequence
  Synthetic oligonucleotide
cctattggacccagacataccgtcgccgcg

SEQ ID NO: 60793 - DNA, 30 bp, Artificial Sequence
  Synthetic oligonucleotide
ttgactaaaacaacaaatgttactgccgcg

SEQ ID NO: 60794 - DNA, 30 bp, Artificial Sequence
  Synthetic oligonucleotide
gcatcttcatcggaaccatgtgactccgcg

SEQ ID NO: 60795 - DNA, 30 bp, Artificial Sequence
  Synthetic oligonucleotide
acttacaattagtagtaggcggaaggcgcg

SEQ ID NO: 60796 - DNA, 30 bp, Artificial Sequence
  Synthetic oligonucleotide
cgcgttaatgagtgtaagagatagggcgcg

SEQ ID NO: 60797 - DNA, 30 bp, Artificial Sequence
  Synthetic oligonucleotide
cagtgagaaccttaccctagagaatgcgcg

SEQ ID NO: 60798 - DNA, 30 bp, Artificial Sequence
  Synthetic oligonucleotide
aggtaactctgcagagtacataaagtcgcg

SEQ ID NO: 60799 - DNA, 30 bp, Artificial Sequence
  Synthetic oligonucleotide
aggatctgggtagtgggtcaatgtttcgcg

SEQ ID NO: 60800 - DNA, 30 bp, Artificial Sequence
  Synthetic oligonucleotide
ttagtgtggttgcaagaaggcgggaaggcg

SEQ ID NO: 60801 - DNA, 30 bp, Artificial Sequence
  Synthetic oligonucleotide
caaggctcctcaagtgttgaggatcaggcg

SEQ ID NO: 60802 - DNA, 30 bp, Artificial Sequence
  Synthetic oligonucleotide
tcccatagaattcgggaactatttcaggcg

SEQ ID NO: 60803 - DNA, 29 bp, Artificial Sequence
  Synthetic oligonucleotide
aaggggagaatgtgaagggtagagaggcg

SEQ ID NO: 60804 - DNA, 30 bp, Artificial Sequence
  Synthetic oligonucleotide
gccctacacgggtaacccagataaacggcg

SEQ ID NO: 60805 - DNA, 30 bp, Artificial Sequence
  Synthetic oligonucleotide
tgagacagagctgccttaagaatggcggcg

SEQ ID NO: 60806 - DNA, 30 bp, Artificial Sequence
  Synthetic oligonucleotide
acgaaatcaacggcgttgagattggcggcg

SEQ ID NO: 60807 - DNA, 30 bp, Artificial Sequence
  Synthetic oligonucleotide
gtgagtaggtagttaccgtggatatcggcg

SEQ ID NO: 60808 - DNA, 30 bp, Artificial Sequence
  Synthetic oligonucleotide
cattcgggttgaaacacacgggattcggcg

SEQ ID NO: 60809 - DNA, 30 bp, Artificial Sequence
  Synthetic oligonucleotide
ggagtaagcaaataccggttgtctagggcg

SEQ ID NO: 60810 - DNA, 30 bp, Artificial Sequence
  Synthetic oligonucleotide
aatgagacatacacctcggataaacgggcg

SEQ ID NO: 60811 - DNA, 30 bp, Artificial Sequence
  Synthetic oligonucleotide
tggtacagcaggtgaagttgagtacgggcg

SEQ ID NO: 60812 - DNA, 30 bp, Artificial Sequence
  Synthetic oligonucleotide
agctaagagacagtcggacgactccgggcg

SEQ ID NO: 60813 - DNA, 30 bp, Artificial Sequence
  Synthetic oligonucleotide
agtcgtgcatggggacatatttacggggcg

SEQ ID NO: 60814 - DNA, 30 bp, Artificial Sequence
  Synthetic oligonucleotide
tcctgaaatggacaggtgaatagtggggcg

SEQ ID NO: 60815 - DNA, 30 bp, Artificial Sequence
  Synthetic oligonucleotide
catcgagttagtacagaacagtggctggcg

SEQ ID NO: 60816 - DNA, 30 bp, Artificial Sequence
  Synthetic oligonucleotide
ctaagagaagtacaaagccatagggtggcg

SEQ ID NO: 60817 - DNA, 30 bp, Artificial Sequence
  Synthetic oligonucleotide
atattgagtctatgggcaacgcatgtggcg

SEQ ID NO: 60818 - DNA, 30 bp, Artificial Sequence
  Synthetic oligonucleotide
cgagaagcgtagcgcacgttcagtgtggcg

SEQ ID NO: 60819 - DNA, 30 bp, Artificial Sequence
  Synthetic oligonucleotide
gtacacgtaagaggacctggaactttggcg

SEQ ID NO: 60820 - DNA, 30 bp, Artificial Sequence
  Synthetic oligonucleotide
cgacactcggtagccgagacaaagaatgcg

SEQ ID NO: 60821 - DNA, 30 bp, Artificial Sequence
  Synthetic oligonucleotide
agagcgcgggtacatgcgccgatacatgcg

SEQ ID NO: 60822 - DNA, 30 bp, Artificial Sequence
  Synthetic oligonucleotide
acggctgagggactaaaatgtcttcatgcg

SEQ ID NO: 60823 - DNA, 30 bp, Artificial Sequence
  Synthetic oligonucleotide
cgggttgagggtcatagcgatcgtgatgcg

SEQ ID NO: 60824 - DNA, 30 bp, Artificial Sequence
  Synthetic oligonucleotide
ggatgatcgctgatgggagagagttatgcg

SEQ ID NO: 60825 - DNA, 30 bp, Artificial Sequence
  Synthetic oligonucleotide
ataaccgattgtcacgaacgtcaccctgcg

SEQ ID NO: 60826 - DNA, 30 bp, Artificial Sequence
  Synthetic oligonucleotide
ataacgtaaaatctggcagacctatctgcg

SEQ ID NO: 60827 - DNA, 30 bp, Artificial Sequence
  Synthetic oligonucleotide
ttgaaataagaagggacccgatggtctgcg

SEQ ID NO: 60828 - DNA, 30 bp, Artificial Sequence
  Synthetic oligonucleotide
taagatcggtcactaccaggatcaagtgcg

SEQ ID NO: 60829 - DNA, 30 bp, Artificial Sequence
  Synthetic oligonucleotide
agcacgtaaccaactgaacccctgcgtgcg

SEQ ID NO: 60830 - DNA, 30 bp, Artificial Sequence
  Synthetic oligonucleotide
aaaaccggagaatcctaggggccaggtgcg

SEQ ID NO: 60831 - DNA, 30 bp, Artificial Sequence
  Synthetic oligonucleotide
ggctccgctacgaacgatattaagggtgcg

SEQ ID NO: 60832 - DNA, 30 bp, Artificial Sequence
  Synthetic oligonucleotide
acacgggtgtaggatgggcggttgtgtgcg

SEQ ID NO: 60833 - DNA, 30 bp, Artificial Sequence
  Synthetic oligonucleotide
aagggatagctcattggctagttttgtgcg

SEQ ID NO: 60834 - DNA, 30 bp, Artificial Sequence
  Synthetic oligonucleotide
catgggcgctactaggggaaaagaattgcg

SEQ ID NO: 60835 - DNA, 30 bp, Artificial Sequence
  Synthetic oligonucleotide
atgagaacaagcaaactctctgctattgcg

SEQ ID NO: 60836 - DNA, 30 bp, Artificial Sequence
  Synthetic oligonucleotide
ggagcgactacagaataggctagagttgcg

SEQ ID NO: 60837 - DNA, 30 bp, Artificial Sequence
  Synthetic oligonucleotide
gttagggcgataacggaccatggagttgcg

SEQ ID NO: 60838 - DNA, 30 bp, Artificial Sequence
  Synthetic oligonucleotide
gggggtaagttagtaatgcgagcgtttgcg

SEQ ID NO: 60839 - DNA, 30 bp, Artificial Sequence
  Synthetic oligonucleotide
gcgtacgaacgttgaggtaagaataaatcg

SEQ ID NO: 60840 - DNA, 30 bp, Artificial Sequence
  Synthetic oligonucleotide
gcgagcggaaccgggatgaggcataaatcg

SEQ ID NO: 60841 - DNA, 30 bp, Artificial Sequence
  Synthetic oligonucleotide
gggggtacttgaaggtgtggcgctaaatcg

SEQ ID NO: 60842 - DNA, 30 bp, Artificial Sequence
  Synthetic oligonucleotide
taaaacattcatgagactcgttcgcaatcg

SEQ ID NO: 60843 - DNA, 30 bp, Artificial Sequence
  Synthetic oligonucleotide
tagggtaggcgcactatccgtaaagaatcg

SEQ ID NO: 60844 - DNA, 30 bp, Artificial Sequence
  Synthetic oligonucleotide
agggttgttatttgaatgggggaggaatcg

SEQ ID NO: 60845 - DNA, 30 bp, Artificial Sequence
  Synthetic oligonucleotide
aggcctcgcgagtctaggggtcctgaatcg

SEQ ID NO: 60846 - DNA, 30 bp, Artificial Sequence
  Synthetic oligonucleotide
ggtgtgatcttacatgctcctctctaatcg

SEQ ID NO: 60847 - DNA, 30 bp, Artificial Sequence
  Synthetic oligonucleotide
gtcacgtaactggtaccaacagcttaatcg

SEQ ID NO: 60848 - DNA, 30 bp, Artificial Sequence
  Synthetic oligonucleotide
gtactagcagataaatccgcgtgaacatcg

SEQ ID NO: 60849 - DNA, 30 bp, Artificial Sequence
  Synthetic oligonucleotide
aggcctcgtaggtgtcatacacgtacatcg

SEQ ID NO: 60850 - DNA, 30 bp, Artificial Sequence
  Synthetic oligonucleotide
atcacatgtcggctgcgtgctattccatcg

SEQ ID NO: 60851 - DNA, 30 bp, Artificial Sequence
  Synthetic oligonucleotide
ggtcgttaaaaaaagaggcacccaagatcg

SEQ ID NO: 60852 - DNA, 30 bp, Artificial Sequence
  Synthetic oligonucleotide
attcccacgcccaggcagagtttaagatcg

SEQ ID NO: 60853 - DNA, 30 bp, Artificial Sequence
  Synthetic oligonucleotide
agtgaattagggggctgcggtttcagatcg

SEQ ID NO: 60854 - DNA, 30 bp, Artificial Sequence
  Synthetic oligonucleotide
gtaaaagacagggcggcgtcagggagatcg

SEQ ID NO: 60855 - DNA, 30 bp, Artificial Sequence
  Synthetic oligonucleotide
ctgagtgatgacggaatcaggaggcgatcg

SEQ ID NO: 60856 - DNA, 30 bp, Artificial Sequence
  Synthetic oligonucleotide
tggaggaagtttgggcgtcccctgcgatcg

SEQ ID NO: 60857 - DNA, 30 bp, Artificial Sequence
  Synthetic oligonucleotide
gtcggtgatatcaaatgcaggaagggatcg

SEQ ID NO: 60858 - DNA, 30 bp, Artificial Sequence
  Synthetic oligonucleotide
aacacaactctgacccgcgtcttgtgatcg

SEQ ID NO: 60859 - DNA, 30 bp, Artificial Sequence
  Synthetic oligonucleotide
tgaaggaacacagagcatgaatagctatcg

SEQ ID NO: 60860 - DNA, 30 bp, Artificial Sequence
  Synthetic oligonucleotide
agtctagtgacatgggagaacatggtatcg

SEQ ID NO: 60861 - DNA, 30 bp, Artificial Sequence
  Synthetic oligonucleotide
catactgaggaatgtttataggatgtatcg

SEQ ID NO: 60862 - DNA, 30 bp, Artificial Sequence
  Synthetic oligonucleotide
gacatattaccactaacaaactgtgtatcg

SEQ ID NO: 60863 - DNA, 30 bp, Artificial Sequence
  Synthetic oligonucleotide
actaaagaaagttcagtctaaacattatcg

SEQ ID NO: 60864 - DNA, 30 bp, Artificial Sequence
  Synthetic oligonucleotide
aggagaagaagtataaatctatgcttatcg

SEQ ID NO: 60865 - DNA, 30 bp, Artificial Sequence
  Synthetic oligonucleotide
atacgatcaggcacaagggccatgttatcg

SEQ ID NO: 60866 - DNA, 30 bp, Artificial Sequence
  Synthetic oligonucleotide
ggacttgagtgcacatctggcatgaactcg

SEQ ID NO: 60867 - DNA, 30 bp, Artificial Sequence
  Synthetic oligonucleotide
gacggaatgaaatgaaatccgtctaactcg

SEQ ID NO: 60868 - DNA, 30 bp, Artificial Sequence
  Synthetic oligonucleotide
ccgtacgaagggcaggtaaagacccactcg

SEQ ID NO: 60869 - DNA, 30 bp, Artificial Sequence
  Synthetic oligonucleotide
ccgtaacgttgatacaatgttcagcactcg

SEQ ID NO: 60870 - DNA, 30 bp, Artificial Sequence
  Synthetic oligonucleotide
gaacgtgtggtgtagatggcaatggactcg

SEQ ID NO: 60871 - DNA, 30 bp, Artificial Sequence
  Synthetic oligonucleotide
taggaacacagacgacacgccgagtactcg

SEQ ID NO: 60872 - DNA, 30 bp, Artificial Sequence
  Synthetic oligonucleotide
acgtttaagacctcctgattccccacctcg

SEQ ID NO: 60873 - DNA, 30 bp, Artificial Sequence
  Synthetic oligonucleotide
acggacccccaataacccttcacggcctcg

SEQ ID NO: 60874 - DNA, 30 bp, Artificial Sequence
  Synthetic oligonucleotide
tagtcgaccagtggtggtgagtatgcctcg

SEQ ID NO: 60875 - DNA, 30 bp, Artificial Sequence
  Synthetic oligonucleotide
gatgggagctcaccggcagaagaatcctcg

SEQ ID NO: 60876 - DNA, 30 bp, Artificial Sequence
  Synthetic oligonucleotide
cgataaattgaacgtggaaggtcatcctcg

SEQ ID NO: 60877 - DNA, 30 bp, Artificial Sequence
  Synthetic oligonucleotide
attcgggatagaaagacatcggagggctcg

SEQ ID NO: 60878 - DNA, 30 bp, Artificial Sequence
  Synthetic oligonucleotide
ttaattcagagtagctgaggccgtggctcg

SEQ ID NO: 60879 - DNA, 30 bp, Artificial Sequence
  Synthetic oligonucleotide
gctgggaatatggccacttcagcctgctcg

SEQ ID NO: 60880 - DNA, 30 bp, Artificial Sequence
  Synthetic oligonucleotide
ggcggctactttgctcgaaggagttgctcg

SEQ ID NO: 60881 - DNA, 30 bp, Artificial Sequence
  Synthetic oligonucleotide
tacgattgagttaatccataatagatctcg

SEQ ID NO: 60882 - DNA, 30 bp, Artificial Sequence
  Synthetic oligonucleotide
ctggatagaggtctcattcagcaggtctcg

SEQ ID NO: 60883 - DNA, 30 bp, Artificial Sequence
  Synthetic oligonucleotide
ggagacctggaagcaaacggtaaattctcg

SEQ ID NO: 60884 - DNA, 30 bp, Artificial Sequence
  Synthetic oligonucleotide
cgaatgttgtcctgcgacccaatattctcg

SEQ ID NO: 60885 - DNA, 30 bp, Artificial Sequence
  Synthetic oligonucleotide
aataaaggagtgcgaaagggcttaaagtcg

SEQ ID NO: 60886 - DNA, 30 bp, Artificial Sequence
  Synthetic oligonucleotide
tcgcgatgctatagacccataatgaagtcg

SEQ ID NO: 60887 - DNA, 30 bp, Artificial Sequence
  Synthetic oligonucleotide
gtgtcaccaaaaatggatactattaagtcg

SEQ ID NO: 60888 - DNA, 30 bp, Artificial Sequence
  Synthetic oligonucleotide
cctaagcgttctccagcagaagcacagtcg

SEQ ID NO: 60889 - DNA, 30 bp, Artificial Sequence
  Synthetic oligonucleotide
aagaggggcactgggtgcgtcctacagtcg

SEQ ID NO: 60890 - DNA, 30 bp, Artificial Sequence
  Synthetic oligonucleotide
gcatgcgaattccgcacggcagaccagtcg

SEQ ID NO: 60891 - DNA, 30 bp, Artificial Sequence
  Synthetic oligonucleotide
gggcgaagctagtgaaacgtcagccagtcg

SEQ ID NO: 60892 - DNA, 30 bp, Artificial Sequence
  Synthetic oligonucleotide
gtcactctgaaggatacctgatcagagtcg

SEQ ID NO: 60893 - DNA, 30 bp, Artificial Sequence
  Synthetic oligonucleotide
cggtcttgtacccgctgaatctcagagtcg

SEQ ID NO: 60894 - DNA, 30 bp, Artificial Sequence
  Synthetic oligonucleotide
cccgcgtaaatacaagatgaagtagagtcg

SEQ ID NO: 60895 - DNA, 30 bp, Artificial Sequence
  Synthetic oligonucleotide
ttgtcgcaaagcataccaggaatatagtcg

SEQ ID NO: 60896 - DNA, 30 bp, Artificial Sequence
  Synthetic oligonucleotide
ttcgaaaaagggttaacacaatgtacgtcg

SEQ ID NO: 60897 - DNA, 30 bp, Artificial Sequence
  Synthetic oligonucleotide
tctacagaggctatgaattagcgcccgtcg

SEQ ID NO: 60898 - DNA, 30 bp, Artificial Sequence
  Synthetic oligonucleotide
cgttccggcctcactacaagctcagcgtcg

SEQ ID NO: 60899 - DNA, 30 bp, Artificial Sequence
  Synthetic oligonucleotide
tcagttcacatgtgctgttccatagcgtcg

SEQ ID NO: 60900 - DNA, 30 bp, Artificial Sequence
  Synthetic oligonucleotide
ggaccgtaacctaggtaaagagtcgcgtcg

SEQ ID NO: 60901 - DNA, 30 bp, Artificial Sequence
  Synthetic oligonucleotide
accaagaaatttagaatgtggtctgcgtcg

SEQ ID NO: 60902 - DNA, 30 bp, Artificial Sequence
  Synthetic oligonucleotide
gtaccggtaggagctacacagtataggtcg

SEQ ID NO: 60903 - DNA, 30 bp, Artificial Sequence
  Synthetic oligonucleotide
acgcgaacaatatatcgcgacggacggtcg

SEQ ID NO: 60904 - DNA, 30 bp, Artificial Sequence
  Synthetic oligonucleotide
gcaatcggaaaatgctatgggccagggtcg

SEQ ID NO: 60905 - DNA, 30 bp, Artificial Sequence
  Synthetic oligonucleotide
acggaacaatgtgccatcgacaaggggtcg

SEQ ID NO: 60906 - DNA, 30 bp, Artificial Sequence
  Synthetic oligonucleotide
tgcagcagataagcgaggggtgagtggtcg

SEQ ID NO: 60907 - DNA, 30 bp, Artificial Sequence
  Synthetic oligonucleotide
cagtgaaaccgattgagctagaccatgtcg

SEQ ID NO: 60908 - DNA, 30 bp, Artificial Sequence
  Synthetic oligonucleotide
gcacggggaaagtacaccttagccatgtcg

SEQ ID NO: 60909 - DNA, 30 bp, Artificial Sequence
  Synthetic oligonucleotide
ccattatgttgtatcgtgcccttgctgtcg

SEQ ID NO: 60910 - DNA, 30 bp, Artificial Sequence
  Synthetic oligonucleotide
aggccttaatgtaaaaggcttcaagtgtcg

SEQ ID NO: 60911 - DNA, 30 bp, Artificial Sequence
  Synthetic oligonucleotide
attcgatcctagtaaggtggtaaggtgtcg

SEQ ID NO: 60912 - DNA, 30 bp, Artificial Sequence
  Synthetic oligonucleotide
aacggtagggaacaagactcccccttgtcg

SEQ ID NO: 60913 - DNA, 30 bp, Artificial Sequence
  Synthetic oligonucleotide
cgccagtcagatgataaacagcggttgtcg

SEQ ID NO: 60914 - DNA, 30 bp, Artificial Sequence
  Synthetic oligonucleotide
acatggcgaatcgccgggggagggttgtcg

SEQ ID NO: 60915 - DNA, 30 bp, Artificial Sequence
  Synthetic oligonucleotide
gagacgaccgagggggagaagtgtttgtcg

SEQ ID NO: 60916 - DNA, 30 bp, Artificial Sequence
  Synthetic oligonucleotide
cagaggccgatatagttgaccacaaattcg

SEQ ID NO: 60917 - DNA, 30 bp, Artificial Sequence
  Synthetic oligonucleotide
gcatgctgggaaagcttgggaagaaattcg

SEQ ID NO: 60918 - DNA, 30 bp, Artificial Sequence
  Synthetic oligonucleotide
cccaataccacaaaaaagcagtatcattcg

SEQ ID NO: 60919 - DNA, 30 bp, Artificial Sequence
  Synthetic oligonucleotide
ttgcgtaaaagagggaccgcattggattcg

SEQ ID NO: 60920 - DNA, 30 bp, Artificial Sequence
  Synthetic oligonucleotide
cggtaaaaggcatccagagaaacttattcg

SEQ ID NO: 60921 - DNA, 30 bp, Artificial Sequence
  Synthetic oligonucleotide
ctgagtagccaccaagatcccatcacttcg

SEQ ID NO: 60922 - DNA, 30 bp, Artificial Sequence
  Synthetic oligonucleotide
actatgtgaggaagcgatcacttgacttcg

SEQ ID NO: 60923 - DNA, 30 bp, Artificial Sequence
  Synthetic oligonucleotide
cacgggaagtcgaccctaaagcacccttcg

SEQ ID NO: 60924 - DNA, 30 bp, Artificial Sequence
  Synthetic oligonucleotide
tgctggcaaatgctacggcatagcccttcg

SEQ ID NO: 60925 - DNA, 30 bp, Artificial Sequence
  Synthetic oligonucleotide
tggcggtgaggtctggtcgcgattccttcg

SEQ ID NO: 60926 - DNA, 30 bp, Artificial Sequence
  Synthetic oligonucleotide
gttagttaagactaggaccaattagcttcg

SEQ ID NO: 60927 - DNA, 30 bp, Artificial Sequence
  Synthetic oligonucleotide
cgactgcttatgcaaagaagagccgcttcg

SEQ ID NO: 60928 - DNA, 30 bp, Artificial Sequence
  Synthetic oligonucleotide
cgtgatagcaagagtcagttgcgctcttcg

SEQ ID NO: 60929 - DNA, 30 bp, Artificial Sequence
  Synthetic oligonucleotide
agagcaaggcgtcgcgctagagcaagttcg

SEQ ID NO: 60930 - DNA, 30 bp, Artificial Sequence
  Synthetic oligonucleotide
ccattggggtaaacatgtcacaacagttcg

SEQ ID NO: 60931 - DNA, 30 bp, Artificial Sequence
  Synthetic oligonucleotide
caagcatcttaaaagtgcagatttagttcg

SEQ ID NO: 60932 - DNA, 30 bp, Artificial Sequence
  Synthetic oligonucleotide
gagcgagtgatcattacactctttagttcg

SEQ ID NO: 60933 - DNA, 30 bp, Artificial Sequence
  Synthetic oligonucleotide
cttgaatagaagtggaaattctcgggttcg

SEQ ID NO: 60934 - DNA, 30 bp, Artificial Sequence
  Synthetic oligonucleotide
ggaaatcgagtgggacggtaaccatgttcg

SEQ ID NO: 60935 - DNA, 30 bp, Artificial Sequence
  Synthetic oligonucleotide
gcatcaggcggacaagctcgaccatgttcg

SEQ ID NO: 60936 - DNA, 30 bp, Artificial Sequence
  Synthetic oligonucleotide
ggagggctagtcggtcagtccggatgttcg

SEQ ID NO: 60937 - DNA, 30 bp, Artificial Sequence
  Synthetic oligonucleotide
cacaacgtacggagagcattcttgtgttcg

SEQ ID NO: 60938 - DNA, 30 bp, Artificial Sequence
  Synthetic oligonucleotide
gtgctcgtcgaaaggagtgtttacgtttcg

SEQ ID NO: 60939 - DNA, 30 bp, Artificial Sequence
  Synthetic oligonucleotide
gtcacgatctgtcaggacgtgggaaaaagg

SEQ ID NO: 60940 - DNA, 30 bp, Artificial Sequence
  Synthetic oligonucleotide
gaggtcacctcatcagcacaaataaaaagg

SEQ ID NO: 60941 - DNA, 30 bp, Artificial Sequence
  Synthetic oligonucleotide
cgacataacttgcaacgtatgcgacaaagg

SEQ ID NO: 60942 - DNA, 30 bp, Artificial Sequence
  Synthetic oligonucleotide
aggatttctgcgctttcccgaacccaaagg

SEQ ID NO: 60943 - DNA, 30 bp, Artificial Sequence
  Synthetic oligonucleotide
cacaaccgtattacccgagaggaggaaagg

SEQ ID NO: 60944 - DNA, 30 bp, Artificial Sequence
  Synthetic oligonucleotide
gcgtaagccgctccgatccagtcggaaagg

SEQ ID NO: 60945 - DNA, 30 bp, Artificial Sequence
  Synthetic oligonucleotide
catgacggctgggggaaagctggataaagg

SEQ ID NO: 60946 - DNA, 30 bp, Artificial Sequence
  Synthetic oligonucleotide
tcgtcaagcggctagagctaaggctaaagg

SEQ ID NO: 60947 - DNA, 30 bp, Artificial Sequence
  Synthetic oligonucleotide
gcgcgatcataccccgccccgccaacaagg

SEQ ID NO: 60948 - DNA, 30 bp, Artificial Sequence
  Synthetic oligonucleotide
ccggtaaacgggtggcgctccgccacaagg

SEQ ID NO: 60949 - DNA, 30 bp, Artificial Sequence
  Synthetic oligonucleotide
agagggctactggtagaattgttcacaagg

SEQ ID NO: 60950 - DNA, 30 bp, Artificial Sequence
  Synthetic oligonucleotide
ccgtgaatctgcaagtcccgcctgacaagg

SEQ ID NO: 60951 - DNA, 30 bp, Artificial Sequence
  Synthetic oligonucleotide
tctccacgccataaagctcgatttacaagg

SEQ ID NO: 60952 - DNA, 30 bp, Artificial Sequence
  Synthetic oligonucleotide
cgagacatccggtacagtagtaaagcaagg

SEQ ID NO: 60953 - DNA, 30 bp, Artificial Sequence
  Synthetic oligonucleotide
ccagttaaccgtggggaaaatatggcaagg

SEQ ID NO: 60954 - DNA, 30 bp, Artificial Sequence
  Synthetic oligonucleotide
tggcacggggtcatagacgatatggcaagg

SEQ ID NO: 60955 - DNA, 30 bp, Artificial Sequence
  Synthetic oligonucleotide
gtaggcgcacgtgtattatctgtggcaagg

SEQ ID NO: 60956 - DNA, 30 bp, Artificial Sequence
  Synthetic oligonucleotide
ccagtcgactcattacaaccagtttcaagg

SEQ ID NO: 60957 - DNA, 30 bp, Artificial Sequence
  Synthetic oligonucleotide
tggcgtacctgaagggtagaaacaagaagg

SEQ ID NO: 60958 - DNA, 30 bp, Artificial Sequence
  Synthetic oligonucleotide
ctcgatagtccgagcgtgtaatcaagaagg

SEQ ID NO: 60959 - DNA, 30 bp, Artificial Sequence
  Synthetic oligonucleotide
caagaggacatttgtggctttataagaagg

SEQ ID NO: 60960 - DNA, 30 bp, Artificial Sequence
  Synthetic oligonucleotide
acggccagatttgccagttacgacagaagg

SEQ ID NO: 60961 - DNA, 30 bp, Artificial Sequence
  Synthetic oligonucleotide
tttcaaacgccgtggacatgccagagaagg

SEQ ID NO: 60962 - DNA, 30 bp, Artificial Sequence
  Synthetic oligonucleotide
ggagaaaaacttcgtgttccgaggagaagg

SEQ ID NO: 60963 - DNA, 30 bp, Artificial Sequence
  Synthetic oligonucleotide
tcgacaagactggacggcgctgatcgaagg

SEQ ID NO: 60964 - DNA, 30 bp, Artificial Sequence
  Synthetic oligonucleotide
caaccgactcctcagtatccaccaggaagg

SEQ ID NO: 60965 - DNA, 30 bp, Artificial Sequence
  Synthetic oligonucleotide
tctagttccgcgtatcgcaaaattggaagg

SEQ ID NO: 60966 - DNA, 30 bp, Artificial Sequence
  Synthetic oligonucleotide
gtcaataaggctgaactgctcagaataagg

SEQ ID NO: 60967 - DNA, 30 bp, Artificial Sequence
  Synthetic oligonucleotide
ctcgagcccataatgaggaacctgataagg

SEQ ID NO: 60968 - DNA, 30 bp, Artificial Sequence
  Synthetic oligonucleotide
ccacacaaaagagatacgatacttataagg

SEQ ID NO: 60969 - DNA, 30 bp, Artificial Sequence
  Synthetic oligonucleotide
cgttacatgtgggtacacatataactaagg

SEQ ID NO: 60970 - DNA, 30 bp, Artificial Sequence
  Synthetic oligonucleotide
gacgggtcgcggtatttcatgtagctaagg

SEQ ID NO: 60971 - DNA, 30 bp, Artificial Sequence
  Synthetic oligonucleotide
ggggatgatcacactgaggactctctaagg

SEQ ID NO: 60972 - DNA, 30 bp, Artificial Sequence
  Synthetic oligonucleotide
tcgatcgagggaacagccgatagagtaagg

SEQ ID NO: 60973 - DNA, 30 bp, Artificial Sequence
  Synthetic oligonucleotide
cgtatctgactaggcaggcgaatggtaagg

SEQ ID NO: 60974 - DNA, 30 bp, Artificial Sequence
  Synthetic oligonucleotide
attaccgcgtggagggatacaatcttaagg

SEQ ID NO: 60975 - DNA, 30 bp, Artificial Sequence
  Synthetic oligonucleotide
ggttacattaaggaacgattacatttaagg

SEQ ID NO: 60976 - DNA, 30 bp, Artificial Sequence
  Synthetic oligonucleotide
ccggacggcggggagcatagaaaaaacagg

SEQ ID NO: 60977 - DNA, 30 bp, Artificial Sequence
  Synthetic oligonucleotide
cttgtgtaggccacgaatgcgaaacacagg

SEQ ID NO: 60978 - DNA, 30 bp, Artificial Sequence
  Synthetic oligonucleotide
gatacgtgactaagaagctaggcacacagg

SEQ ID NO: 60979 - DNA, 30 bp, Artificial Sequence
  Synthetic oligonucleotide
gcacagcccgaacacatagcgaaagacagg

SEQ ID NO: 60980 - DNA, 30 bp, Artificial Sequence
  Synthetic oligonucleotide
ggcgaggaatgggctactactcaggacagg

SEQ ID NO: 60981 - DNA, 30 bp, Artificial Sequence
  Synthetic oligonucleotide
atgttatcaacccaagtttgtcgatacagg

SEQ ID NO: 60982 - DNA, 30 bp, Artificial Sequence
  Synthetic oligonucleotide
atagccaggtattcgaatgagcggtacagg

SEQ ID NO: 60983 - DNA, 30 bp, Artificial Sequence
  Synthetic oligonucleotide
aacaggacattaattacatgagtgtacagg

SEQ ID NO: 60984 - DNA, 30 bp, Artificial Sequence
  Synthetic oligonucleotide
gatcatttaggagatcttgtcgaacccagg

SEQ ID NO: 60985 - DNA, 30 bp, Artificial Sequence
  Synthetic oligonucleotide
ccactatgttttcagctaaccattcccagg

SEQ ID NO: 60986 - DNA, 30 bp, Artificial Sequence
  Synthetic oligonucleotide
tcattagcacaatttacaattgaagccagg

SEQ ID NO: 60987 - DNA, 30 bp, Artificial Sequence
  Synthetic oligonucleotide
taggggggacactttaataggtactccagg

SEQ ID NO: 60988 - DNA, 30 bp, Artificial Sequence
  Synthetic oligonucleotide
cccatggcatggcgagaatacaggagcagg

SEQ ID NO: 60989 - DNA, 30 bp, Artificial Sequence
  Synthetic oligonucleotide
tcggtgtgaggttaattgtaccaccgcagg

SEQ ID NO: 60990 - DNA, 30 bp, Artificial Sequence
  Synthetic oligonucleotide
cgcgtatggtatccaagggaaatgcgcagg

SEQ ID NO: 60991 - DNA, 30 bp, Artificial Sequence
  Synthetic oligonucleotide
atgactatctaggtgaataaagtcggcagg

SEQ ID NO: 60992 - DNA, 30 bp, Artificial Sequence
  Synthetic oligonucleotide
gcgcagtatgggaagaggacccttggcagg

SEQ ID NO: 60993 - DNA, 30 bp, Artificial Sequence
  Synthetic oligonucleotide
gatacataccgagcaaaggaagcatgcagg

SEQ ID NO: 60994 - DNA, 30 bp, Artificial Sequence
  Synthetic oligonucleotide
aaccgtggcgtagactaaaccgcgtgcagg

SEQ ID NO: 60995 - DNA, 30 bp, Artificial Sequence
  Synthetic oligonucleotide
ttagcgccatgaatcttagtaaacatcagg

SEQ ID NO: 60996 - DNA, 30 bp, Artificial Sequence
  Synthetic oligonucleotide
attggagcacaagagcgactggtcatcagg

SEQ ID NO: 60997 - DNA, 30 bp, Artificial Sequence
  Synthetic oligonucleotide
aggcgggagagacggattagtcggatcagg

SEQ ID NO: 60998 - DNA, 30 bp, Artificial Sequence
  Synthetic oligonucleotide
taggcactaaggcaacatcgaagtctcagg

SEQ ID NO: 60999 - DNA, 30 bp, Artificial Sequence
  Synthetic oligonucleotide
aggtcacccatcttagagcgcgaaaagagg

SEQ ID NO: 61000 - DNA, 30 bp, Artificial Sequence
  Synthetic oligonucleotide
agcaaattgctcgtctgtgctgcaaagagg

SEQ ID NO: 61001 - DNA, 30 bp, Artificial Sequence
  Synthetic oligonucleotide
gtagattcgagatctctcgaagggcagagg

SEQ ID NO: 61002 - DNA, 30 bp, Artificial Sequence
  Synthetic oligonucleotide
atcaggtgatactaatctgggggtgagagg

SEQ ID NO: 61003 - DNA, 30 bp, Artificial Sequence
  Synthetic oligonucleotide
ggactccaaacttagtgtaactgtgagagg

SEQ ID NO: 61004 - DNA, 30 bp, Artificial Sequence
  Synthetic oligonucleotide
ttaagatttggaggttggaggacatagagg

SEQ ID NO: 61005 - DNA, 30 bp, Artificial Sequence
  Synthetic oligonucleotide
cgagggctcacagattacaaacgatagagg

SEQ ID NO: 61006 - DNA, 30 bp, Artificial Sequence
  Synthetic oligonucleotide
acgtcgtggtgtgcgagtccgccctagagg

SEQ ID NO: 61007 - DNA, 30 bp, Artificial Sequence
  Synthetic oligonucleotide
gcttcagtccaatctaagggaggaacgagg

SEQ ID NO: 61008 - DNA, 30 bp, Artificial Sequence
  Synthetic oligonucleotide
ataatagaacccgtacggacatgaacgagg

SEQ ID NO: 61009 - DNA, 30 bp, Artificial Sequence
  Synthetic oligonucleotide
gaaagaacagctttatggccgcccccgagg

SEQ ID NO: 61010 - DNA, 30 bp, Artificial Sequence
  Synthetic oligonucleotide
agaatagtgggcacataacgtggagcgagg

SEQ ID NO: 61011 - DNA, 30 bp, Artificial Sequence
  Synthetic oligonucleotide
ttgtacgtattcattagtcacattgcgagg

SEQ ID NO: 61012 - DNA, 30 bp, Artificial Sequence
  Synthetic oligonucleotide
ggtatgagccggtcggtggtagcaaggagg

SEQ ID NO: 61013 - DNA, 30 bp, Artificial Sequence
  Synthetic oligonucleotide
gcgactcaccacttaaacttaaggaggagg

SEQ ID NO: 61014 - DNA, 31 bp, Artificial Sequence
  Synthetic oligonucleotide
ccatatgagtaactgcacgccgtggaggagg

SEQ ID NO: 61015 - DNA, 30 bp, Artificial Sequence
  Synthetic oligonucleotide
gacgcgtaaccctggaagctgtggaggagg

SEQ ID NO: 61016 - DNA, 30 bp, Artificial Sequence
  Synthetic oligonucleotide
tgttaaaatgcgatgatacatcataggagg

SEQ ID NO: 61017 - DNA, 30 bp, Artificial Sequence
  Synthetic oligonucleotide
ttatgtagccgacgtcgtgggaaacggagg

SEQ ID NO: 61018 - DNA, 30 bp, Artificial Sequence
  Synthetic oligonucleotide
cggcctagcgtgtgtctaattggggggagg

SEQ ID NO: 61019 - DNA, 30 bp, Artificial Sequence
  Synthetic oligonucleotide
aatcgcgcgagaaatcctcgtcctgggagg

SEQ ID NO: 61020 - DNA, 30 bp, Artificial Sequence
  Synthetic oligonucleotide
cgccggggagctaagcccaagtgttggagg

SEQ ID NO: 61021 - DNA, 30 bp, Artificial Sequence
  Synthetic oligonucleotide
caccagtcgtgcgaggatggggaaatgagg

SEQ ID NO: 61022 - DNA, 30 bp, Artificial Sequence
  Synthetic oligonucleotide
gtcggagataacgctttagtggacatgagg

SEQ ID NO: 61023 - DNA, 30 bp, Artificial Sequence
  Synthetic oligonucleotide
aagtagtgagtctgcgacgggtagatgagg

SEQ ID NO: 61024 - DNA, 30 bp, Artificial Sequence
  Synthetic oligonucleotide
cactagagggaccttcagcagagcctgagg

SEQ ID NO: 61025 - DNA, 30 bp, Artificial Sequence
  Synthetic oligonucleotide
gcgaaacgcgtacagccttgttatttgagg

SEQ ID NO: 61026 - DNA, 30 bp, Artificial Sequence
  Synthetic oligonucleotide
ggaggaaaacaggattgtcaggttttgagg

SEQ ID NO: 61027 - DNA, 30 bp, Artificial Sequence
  Synthetic oligonucleotide
aggaccggtcaaacatccgcctgtaatagg

SEQ ID NO: 61028 - DNA, 30 bp, Artificial Sequence
  Synthetic oligonucleotide
atcattgcgaaggacttaacccttaatagg

SEQ ID NO: 61029 - DNA, 30 bp, Artificial Sequence
  Synthetic oligonucleotide
tcttcgaggtaaattaatgcatgcgatagg

SEQ ID NO: 61030 - DNA, 30 bp, Artificial Sequence
  Synthetic oligonucleotide
gcgatagatctgccagggattctcgatagg

SEQ ID NO: 61031 - DNA, 30 bp, Artificial Sequence
  Synthetic oligonucleotide
ggtaagatacctaaaatatctggttatagg

SEQ ID NO: 61032 - DNA, 30 bp, Artificial Sequence
  Synthetic oligonucleotide
gttgcacaggaggaagccagccaaactagg

SEQ ID NO: 61033 - DNA, 30 bp, Artificial Sequence
  Synthetic oligonucleotide
tccgagaaagaagtccggacgtcgactagg

SEQ ID NO: 61034 - DNA, 30 bp, Artificial Sequence
  Synthetic oligonucleotide
ccagtacattggacatcgactatgactagg

SEQ ID NO: 61035 - DNA, 30 bp, Artificial Sequence
  Synthetic oligonucleotide
tcccaattggaaatccgtcaaaaccctagg

SEQ ID NO: 61036 - DNA, 30 bp, Artificial Sequence
  Synthetic oligonucleotide
gcgatgttcatacgaagacaggcggctagg

SEQ ID NO: 61037 - DNA, 30 bp, Artificial Sequence
  Synthetic oligonucleotide
gcaacaaggatataatgcacgagaagtagg

SEQ ID NO: 61038 - DNA, 30 bp, Artificial Sequence
  Synthetic oligonucleotide
aggttcccacgtaagggctaaggcagtagg

SEQ ID NO: 61039 - DNA, 30 bp, Artificial Sequence
  Synthetic oligonucleotide
ctaagtaaaggtgagtacccaatacgtagg

SEQ ID NO: 61040 - DNA, 30 bp, Artificial Sequence
  Synthetic oligonucleotide
atggtccaaactatcggcacattacgtagg

SEQ ID NO: 61041 - DNA, 30 bp, Artificial Sequence
  Synthetic oligonucleotide
catggacactggctctgaaaacagggtagg

SEQ ID NO: 61042 - DNA, 30 bp, Artificial Sequence
  Synthetic oligonucleotide
gcccactaatatcgagacgagtcgtgtagg

SEQ ID NO: 61043 - DNA, 30 bp, Artificial Sequence
  Synthetic oligonucleotide
cattctcgcaaaagagaaataaaaattagg

SEQ ID NO: 61044 - DNA, 30 bp, Artificial Sequence
  Synthetic oligonucleotide
tagaagaacagccaaaggttaagcattagg

SEQ ID NO: 61045 - DNA, 30 bp, Artificial Sequence
  Synthetic oligonucleotide
tacaataaagaaatcgatgtcctgattagg

SEQ ID NO: 61046 - DNA, 30 bp, Artificial Sequence
  Synthetic oligonucleotide
atcgacaaacacggcctcatgccacttagg

SEQ ID NO: 61047 - DNA, 30 bp, Artificial Sequence
  Synthetic oligonucleotide
cgggataatgtcatagctgtggagtttagg

SEQ ID NO: 61048 - DNA, 30 bp, Artificial Sequence
  Synthetic oligonucleotide
acctaccacgaaagtaacgggtattttagg

SEQ ID NO: 61049 - DNA, 30 bp, Artificial Sequence
  Synthetic oligonucleotide
cttgaacctcaaacatcgacatttaaacgg

SEQ ID NO: 61050 - DNA, 30 bp, Artificial Sequence
  Synthetic oligonucleotide
ggacatgagatatggccgcatacagaacgg

SEQ ID NO: 61051 - DNA, 30 bp, Artificial Sequence
  Synthetic oligonucleotide
cctgacatacggaaaaatgatcctgaacgg

SEQ ID NO: 61052 - DNA, 30 bp, Artificial Sequence
  Synthetic oligonucleotide
cgtcgtataaacgggctctatgctgaacgg

SEQ ID NO: 61053 - DNA, 30 bp, Artificial Sequence
  Synthetic oligonucleotide
caccgggcggattgcgactgaatataacgg

SEQ ID NO: 61054 - DNA, 30 bp, Artificial Sequence
  Synthetic oligonucleotide
agatacttcagcgctagagggcgaacacgg

SEQ ID NO: 61055 - DNA, 30 bp, Artificial Sequence
  Synthetic oligonucleotide
agctaatgcgcgaccagtacattagcacgg

SEQ ID NO: 61056 - DNA, 30 bp, Artificial Sequence
  Synthetic oligonucleotide
aggcccaaaaagtctattaacacgagacgg

SEQ ID NO: 61057 - DNA, 30 bp, Artificial Sequence
  Synthetic oligonucleotide
cacacggccattggaggatatacacgacgg

SEQ ID NO: 61058 - DNA, 30 bp, Artificial Sequence
  Synthetic oligonucleotide
gctgtaatagctgtgagcatagcacgacgg

SEQ ID NO: 61059 - DNA, 30 bp, Artificial Sequence
  Synthetic oligonucleotide
tgaaagctaacagataggtggtacatacgg

SEQ ID NO: 61060 - DNA, 30 bp, Artificial Sequence
  Synthetic oligonucleotide
gtcacacagaatatatctaacaggctacgg

SEQ ID NO: 61061 - DNA, 30 bp, Artificial Sequence
  Synthetic oligonucleotide
taaaccctcgagtaaaccccccgaaaccgg

SEQ ID NO: 61062 - DNA, 30 bp, Artificial Sequence
  Synthetic oligonucleotide
ggggaggttaaatattgccatggcaaccgg

SEQ ID NO: 61063 - DNA, 30 bp, Artificial Sequence
  Synthetic oligonucleotide
tgagatgacatgtctgaaggccgtaaccgg

SEQ ID NO: 61064 - DNA, 30 bp, Artificial Sequence
  Synthetic oligonucleotide
tggaggatgtagcgctagaagaaacaccgg

SEQ ID NO: 61065 - DNA, 30 bp, Artificial Sequence
  Synthetic oligonucleotide
ggtgaattggcgttcgggaacagataccgg

SEQ ID NO: 61066 - DNA, 30 bp, Artificial Sequence
  Synthetic oligonucleotide
ataaccggaacagtgtgttaaggttaccgg

SEQ ID NO: 61067 - DNA, 30 bp, Artificial Sequence
  Synthetic oligonucleotide
aggggacccaggatactctagatatcccgg

SEQ ID NO: 61068 - DNA, 30 bp, Artificial Sequence
  Synthetic oligonucleotide
tcctcaggacacgaccgtagataaagccgg

SEQ ID NO: 61069 - DNA, 30 bp, Artificial Sequence
  Synthetic oligonucleotide
acaaaaaggagtagcggtgaaattggccgg

SEQ ID NO: 61070 - DNA, 30 bp, Artificial Sequence
  Synthetic oligonucleotide
gctgagaatctcaggaccctgccgatccgg

SEQ ID NO: 61071 - DNA, 30 bp, Artificial Sequence
  Synthetic oligonucleotide
acaaactccagatcagacggtgacgtccgg

SEQ ID NO: 61072 - DNA, 30 bp, Artificial Sequence
  Synthetic oligonucleotide
gggagtcacctgacttctagagctttccgg

SEQ ID NO: 61073 - DNA, 30 bp, Artificial Sequence
  Synthetic oligonucleotide
acatcagaagctgggcgcacgaaacagcgg

SEQ ID NO: 61074 - DNA, 30 bp, Artificial Sequence
  Synthetic oligonucleotide
gccaactatagggattatgaaaaccagcgg

SEQ ID NO: 61075 - DNA, 30 bp, Artificial Sequence
  Synthetic oligonucleotide
ggaacggaaaccggagtgttagatcagcgg

SEQ ID NO: 61076 - DNA, 30 bp, Artificial Sequence
  Synthetic oligonucleotide
ggtcgttacgaaactactgtagcagagcgg

SEQ ID NO: 61077 - DNA, 30 bp, Artificial Sequence
  Synthetic oligonucleotide
gctgaatgacagcttgatgaacaatagcgg

SEQ ID NO: 61078 - DNA, 30 bp, Artificial Sequence
  Synthetic oligonucleotide
gcggactgaatacgtgccaggtgttagcgg

SEQ ID NO: 61079 - DNA, 30 bp, Artificial Sequence
  Synthetic oligonucleotide
cacgtatcgtattcaatagtcacaccgcgg

SEQ ID NO: 61080 - DNA, 30 bp, Artificial Sequence
  Synthetic oligonucleotide
cacgattcctacgctatcgatcaatcgcgg

SEQ ID NO: 61081 - DNA, 30 bp, Artificial Sequence
  Synthetic oligonucleotide
tagagacccctagagcagctggcctcgcgg

SEQ ID NO: 61082 - DNA, 30 bp, Artificial Sequence
  Synthetic oligonucleotide
agattgagacgtcgatatagactaaggcgg

SEQ ID NO: 61083 - DNA, 30 bp, Artificial Sequence
  Synthetic oligonucleotide
gcacttcgtacgagggggaagagcaggcgg

SEQ ID NO: 61084 - DNA, 30 bp, Artificial Sequence
  Synthetic oligonucleotide
accggggcacaggtttcgataacgaggcgg

SEQ ID NO: 61085 - DNA, 30 bp, Artificial Sequence
  Synthetic oligonucleotide
agattggcacgtcagttgaacagccggcgg

SEQ ID NO: 61086 - DNA, 30 bp, Artificial Sequence
  Synthetic oligonucleotide
gaatgagcgtcaacggtctaacgccggcgg

SEQ ID NO: 61087 - DNA, 30 bp, Artificial Sequence
  Synthetic oligonucleotide
ataaccaatagggtaatcaaaacgcggcgg

SEQ ID NO: 61088 - DNA, 30 bp, Artificial Sequence
  Synthetic oligonucleotide
tcgaaagtgatgagcagttaaggctggcgg

SEQ ID NO: 61089 - DNA, 30 bp, Artificial Sequence
  Synthetic oligonucleotide
cgctggtgtgagtgaacttgagtgtggcgg

SEQ ID NO: 61090 - DNA, 30 bp, Artificial Sequence
  Synthetic oligonucleotide
tggcatgctggactagaacatataatgcgg

SEQ ID NO: 61091 - DNA, 30 bp, Artificial Sequence
  Synthetic oligonucleotide
ccatacatcgctcgcgagcaggatatgcgg

SEQ ID NO: 61092 - DNA, 30 bp, Artificial Sequence
  Synthetic oligonucleotide
atcaactgacctgattacgtgaagctgcgg

SEQ ID NO: 61093 - DNA, 30 bp, Artificial Sequence
  Synthetic oligonucleotide
agtccagtggcaacgggttcctctctgcgg

SEQ ID NO: 61094 - DNA, 30 bp, Artificial Sequence
  Synthetic oligonucleotide
tcgaggacgctcaataatcagaccgtgcgg

SEQ ID NO: 61095 - DNA, 30 bp, Artificial Sequence
  Synthetic oligonucleotide
agcaaccagcggaggcaaatacgcgtgcgg

SEQ ID NO: 61096 - DNA, 30 bp, Artificial Sequence
  Synthetic oligonucleotide
acaatggatggtggtaggcaacaattgcgg

SEQ ID NO: 61097 - DNA, 30 bp, Artificial Sequence
  Synthetic oligonucleotide
cgtgagattggatccgagatctatttgcgg

SEQ ID NO: 61098 - DNA, 30 bp, Artificial Sequence
  Synthetic oligonucleotide
cggcaggttattcaggcagagggtaatcgg

SEQ ID NO: 61099 - DNA, 30 bp, Artificial Sequence
  Synthetic oligonucleotide
tggatggttccccacgagtaagccgatcgg

SEQ ID NO: 61100 - DNA, 30 bp, Artificial Sequence
  Synthetic oligonucleotide
agttcagtccccaaaggagaggtctatcgg

SEQ ID NO: 61101 - DNA, 30 bp, Artificial Sequence
  Synthetic oligonucleotide
cgagagcgacggccgtaaccgcattatcgg

SEQ ID NO: 61102 - DNA, 30 bp, Artificial Sequence
  Synthetic oligonucleotide
ccagttgcgttagcaaagatcggaagtcgg

SEQ ID NO: 61103 - DNA, 30 bp, Artificial Sequence
  Synthetic oligonucleotide
cagattagctggcagggttcgtacagtcgg

SEQ ID NO: 61104 - DNA, 30 bp, Artificial Sequence
  Synthetic oligonucleotide
tagcaaaattcgagttcccttacgagtcgg

SEQ ID NO: 61105 - DNA, 30 bp, Artificial Sequence
  Synthetic oligonucleotide
cgagactgtgtccagctcaatgcgagtcgg

SEQ ID NO: 61106 - DNA, 30 bp, Artificial Sequence
  Synthetic oligonucleotide
tacgaattcgcactcaaattgctgagtcgg

SEQ ID NO: 61107 - DNA, 30 bp, Artificial Sequence
  Synthetic oligonucleotide
agctgcctagattagggcaaggatagtcgg

SEQ ID NO: 61108 - DNA, 30 bp, Artificial Sequence
  Synthetic oligonucleotide
tcacaggtcggatattagatcccacgtcgg

SEQ ID NO: 61109 - DNA, 30 bp, Artificial Sequence
  Synthetic oligonucleotide
tagggctaacctatgggaaagaatcgtcgg

SEQ ID NO: 61110 - DNA, 30 bp, Artificial Sequence
  Synthetic oligonucleotide
ggcggcaggagaggcgcaagaccaggtcgg

SEQ ID NO: 61111 - DNA, 30 bp, Artificial Sequence
  Synthetic oligonucleotide
acaaagctcaagagtttaccaaagtgtcgg

SEQ ID NO: 61112 - DNA, 30 bp, Artificial Sequence
  Synthetic oligonucleotide
ggggcgagacaccaggcggcgccaattcgg

SEQ ID NO: 61113 - DNA, 30 bp, Artificial Sequence
  Synthetic oligonucleotide
aggattcgaacgtggtcgaagaaacttcgg

SEQ ID NO: 61114 - DNA, 30 bp, Artificial Sequence
  Synthetic oligonucleotide
gggaggatacagattccaaagattcttcgg

SEQ ID NO: 61115 - DNA, 30 bp, Artificial Sequence
  Synthetic oligonucleotide
tcaaaaggggcactcaaaggggcagttcgg

SEQ ID NO: 61116 - DNA, 30 bp, Artificial Sequence
  Synthetic oligonucleotide
cactatgcgtgtatcgatcccagacaaggg

SEQ ID NO: 61117 - DNA, 30 bp, Artificial Sequence
  Synthetic oligonucleotide
aggtgcaaagggcgaatgtcgtgacaaggg

SEQ ID NO: 61118 - DNA, 30 bp, Artificial Sequence
  Synthetic oligonucleotide
ttaaacaagtatggtcgtaggggccaaggg

SEQ ID NO: 61119 - DNA, 30 bp, Artificial Sequence
  Synthetic oligonucleotide
ctgtcggccacgcggagtccgccgcaaggg

SEQ ID NO: 61120 - DNA, 30 bp, Artificial Sequence
  Synthetic oligonucleotide
tcagaggacaacggagatctcaatcaaggg

SEQ ID NO: 61121 - DNA, 30 bp, Artificial Sequence
  Synthetic oligonucleotide
tacagtcgagaaagctgcgcggatcaaggg

SEQ ID NO: 61122 - DNA, 30 bp, Artificial Sequence
  Synthetic oligonucleotide
aagcaatgattctccaagtaaggagaaggg

SEQ ID NO: 61123 - DNA, 30 bp, Artificial Sequence
  Synthetic oligonucleotide
cattggtgtatcctttgctttatggaaggg

SEQ ID NO: 61124 - DNA, 30 bp, Artificial Sequence
  Synthetic oligonucleotide
tatgagggctaacagaatacgcggacaggg

SEQ ID NO: 61125 - DNA, 30 bp, Artificial Sequence
  Synthetic oligonucleotide
ttgcaacagtggcaaaagcaacaaccaggg

SEQ ID NO: 61126 - DNA, 30 bp, Artificial Sequence
  Synthetic oligonucleotide
gtggtaggtacctgcccctcacacccaggg

SEQ ID NO: 61127 - DNA, 30 bp, Artificial Sequence
  Synthetic oligonucleotide
gtgcctgagtcgattgtattctcagcaggg

SEQ ID NO: 61128 - DNA, 30 bp, Artificial Sequence
  Synthetic oligonucleotide
ggcgatacaaagagattgatatttgcaggg

SEQ ID NO: 61129 - DNA, 30 bp, Artificial Sequence
  Synthetic oligonucleotide
tcgatcggcccatatcaagggctatcaggg

SEQ ID NO: 61130 - DNA, 30 bp, Artificial Sequence
  Synthetic oligonucleotide
tgaagatgtatggccgagacgtgctcaggg

SEQ ID NO: 61131 - DNA, 30 bp, Artificial Sequence
  Synthetic oligonucleotide
ggaagcatccgataccgcgacaaaggaggg

SEQ ID NO: 61132 - DNA, 30 bp, Artificial Sequence
  Synthetic oligonucleotide
ggggacgcggatgaaaggagaataggaggg

SEQ ID NO: 61133 - DNA, 30 bp, Artificial Sequence
  Synthetic oligonucleotide
ggcgtttgcgcgatcgtaaaggtatgaggg

SEQ ID NO: 61134 - DNA, 30 bp, Artificial Sequence
  Synthetic oligonucleotide
tcctcatcgaggtttgcgccgacaataggg

SEQ ID NO: 61135 - DNA, 30 bp, Artificial Sequence
  Synthetic oligonucleotide
cgaaggagcttccgggatattgtcataggg

SEQ ID NO: 61136 - DNA, 30 bp, Artificial Sequence
  Synthetic oligonucleotide
ctttaaaaaacgaatcgactcacgataggg

SEQ ID NO: 61137 - DNA, 30 bp, Artificial Sequence
  Synthetic oligonucleotide
ctagtaacggaaaaacatagcatgctaggg

SEQ ID NO: 61138 - DNA, 30 bp, Artificial Sequence
  Synthetic oligonucleotide
actacacgatcctgctcagcacaagtaggg

SEQ ID NO: 61139 - DNA, 30 bp, Artificial Sequence
  Synthetic oligonucleotide
tgctctctaaacactgtgatccacttaggg

SEQ ID NO: 61140 - DNA, 30 bp, Artificial Sequence
  Synthetic oligonucleotide
gctcgaagggatcgacaactgaagttaggg

SEQ ID NO: 61141 - DNA, 30 bp, Artificial Sequence
  Synthetic oligonucleotide
cggccaggacgggtaggtgcaaatttaggg

SEQ ID NO: 61142 - DNA, 30 bp, Artificial Sequence
  Synthetic oligonucleotide
cgttcgggaatgaaggcgtcgcaaaacggg

SEQ ID NO: 61143 - DNA, 30 bp, Artificial Sequence
  Synthetic oligonucleotide
taaagaacgcgtatgcgactcagaaacggg

SEQ ID NO: 61144 - DNA, 30 bp, Artificial Sequence
  Synthetic oligonucleotide
cggaaggatgtatggctgagtgccaacggg

SEQ ID NO: 61145 - DNA, 30 bp, Artificial Sequence
  Synthetic oligonucleotide
tcctactcgccgaaaatcgatcctaacggg

SEQ ID NO: 61146 - DNA, 30 bp, Artificial Sequence
  Synthetic oligonucleotide
ggcccggtgaaagacagtaaaaatcacggg

SEQ ID NO: 61147 - DNA, 30 bp, Artificial Sequence
  Synthetic oligonucleotide
catcagaccaaatttgactccggagacggg

SEQ ID NO: 61148 - DNA, 30 bp, Artificial Sequence
  Synthetic oligonucleotide
aaggggcactaacgttccaaggtcgacggg

SEQ ID NO: 61149 - DNA, 30 bp, Artificial Sequence
  Synthetic oligonucleotide
gtgaaaacagcggccttcgacggatacggg

SEQ ID NO: 61150 - DNA, 30 bp, Artificial Sequence
  Synthetic oligonucleotide
cccgatacagctcagattcgtcaaaccggg

SEQ ID NO: 61151 - DNA, 30 bp, Artificial Sequence
  Synthetic oligonucleotide
atgccaaaagtcaaaagcatcaccaccggg

SEQ ID NO: 61152 - DNA, 30 bp, Artificial Sequence
  Synthetic oligonucleotide
gttacacgctcaggactaggtcaccccggg

SEQ ID NO: 61153 - DNA, 30 bp, Artificial Sequence
  Synthetic oligonucleotide
gaaccaacttaggagtcaacatggagcggg

SEQ ID NO: 61154 - DNA, 30 bp, Artificial Sequence
  Synthetic oligonucleotide
aagagcgattagacgaccgtattaggcggg

SEQ ID NO: 61155 - DNA, 30 bp, Artificial Sequence
  Synthetic oligonucleotide
acaggtggcatactccaatgtagcatcggg

SEQ ID NO: 61156 - DNA, 30 bp, Artificial Sequence
  Synthetic oligonucleotide
gcgggaccaaaagtatatggactgatcggg

SEQ ID NO: 61157 - DNA, 30 bp, Artificial Sequence
  Synthetic oligonucleotide
cgagtgataacggaaaaataaaatctcggg

SEQ ID NO: 61158 - DNA, 30 bp, Artificial Sequence
  Synthetic oligonucleotide
tgtcgctacgtgtgtagaaggtcagtcggg

SEQ ID NO: 61159 - DNA, 30 bp, Artificial Sequence
  Synthetic oligonucleotide
accatcagttcactcggctggaatgtcggg

SEQ ID NO: 61160 - DNA, 30 bp, Artificial Sequence
  Synthetic oligonucleotide
atcatgccaaaatcaacggctacattcggg

SEQ ID NO: 61161 - DNA, 30 bp, Artificial Sequence
  Synthetic oligonucleotide
gagctgctcgaaaccgccacacacttcggg

SEQ ID NO: 61162 - DNA, 30 bp, Artificial Sequence
  Synthetic oligonucleotide
aagatggaagtcactctgggcctgttcggg

SEQ ID NO: 61163 - DNA, 30 bp, Artificial Sequence
  Synthetic oligonucleotide
tgcatgccgaccatctcgcagttaaagggg

SEQ ID NO: 61164 - DNA, 30 bp, Artificial Sequence
  Synthetic oligonucleotide
acgatttcggtgatattattaaacaagggg

SEQ ID NO: 61165 - DNA, 30 bp, Artificial Sequence
  Synthetic oligonucleotide
cagtcacatatcgggacaaattacaagggg

SEQ ID NO: 61166 - DNA, 30 bp, Artificial Sequence
  Synthetic oligonucleotide
gtccaataagataattctagctccaagggg

SEQ ID NO: 61167 - DNA, 30 bp, Artificial Sequence
  Synthetic oligonucleotide
ggtgctgtcgaggcaagacaactcaagggg

SEQ ID NO: 61168 - DNA, 30 bp, Artificial Sequence
  Synthetic oligonucleotide
cacttcaccattcacgagggagtatagggg

SEQ ID NO: 61169 - DNA, 30 bp, Artificial Sequence
  Synthetic oligonucleotide
ggataatgctctgtaacggcgatcacgggg

SEQ ID NO: 61170 - DNA, 30 bp, Artificial Sequence
  Synthetic oligonucleotide
tccgccaaggtgtggtaaatttagacgggg

SEQ ID NO: 61171 - DNA, 30 bp, Artificial Sequence
  Synthetic oligonucleotide
ggaccaaggaagtaccggaggaatgcgggg

SEQ ID NO: 61172 - DNA, 30 bp, Artificial Sequence
  Synthetic oligonucleotide
taagaaaagttgtcaaatgaagaatcgggg

SEQ ID NO: 61173 - DNA, 30 bp, Artificial Sequence
  Synthetic oligonucleotide
aatgcatacgatggcgtggaatagtcgggg

SEQ ID NO: 61174 - DNA, 30 bp, Artificial Sequence
  Synthetic oligonucleotide
atcagtgctaacgcatatgcgcggtcgggg

SEQ ID NO: 61175 - DNA, 30 bp, Artificial Sequence
  Synthetic oligonucleotide
caaccgcaagacctggtgtgtgacaggggg

SEQ ID NO: 61176 - DNA, 30 bp, Artificial Sequence
  Synthetic oligonucleotide
ccactcaccaggtgatatagatagaggggg

SEQ ID NO: 61177 - DNA, 30 bp, Artificial Sequence
  Synthetic oligonucleotide
agcttctgcagagttatttcggaagggggg

SEQ ID NO: 61178 - DNA, 30 bp, Artificial Sequence
  Synthetic oligonucleotide
gtgatgttcccagtgtggtcgatcgggggg

SEQ ID NO: 61179 - DNA, 30 bp, Artificial Sequence
  Synthetic oligonucleotide
agtgcggtgatacgcgtggttactgggggg

SEQ ID NO: 61180 - DNA, 30 bp, Artificial Sequence
  Synthetic oligonucleotide
tggaccgtaatggcagcatctgactggggg

SEQ ID NO: 61181 - DNA, 30 bp, Artificial Sequence
  Synthetic oligonucleotide
ggaggggaaactgtaaaacactcttggggg

SEQ ID NO: 61182 - DNA, 30 bp, Artificial Sequence
  Synthetic oligonucleotide
gcataggtcgtaacaattgggccgatgggg

SEQ ID NO: 61183 - DNA, 30 bp, Artificial Sequence
  Synthetic oligonucleotide
cgtataggcctagtagtgctgaatatgggg

SEQ ID NO: 61184 - DNA, 30 bp, Artificial Sequence
  Synthetic oligonucleotide
cgcaagttcgaagttttggtagtgctgggg

SEQ ID NO: 61185 - DNA, 30 bp, Artificial Sequence
  Synthetic oligonucleotide
atacttcgcaaatatcgagctggtctgggg

SEQ ID NO: 61186 - DNA, 30 bp, Artificial Sequence
  Synthetic oligonucleotide
gacgcaggtatggtcaggcgagagttgggg

SEQ ID NO: 61187 - DNA, 30 bp, Artificial Sequence
  Synthetic oligonucleotide
ggcctaggggaagcacaaatcgaaaatggg

SEQ ID NO: 61188 - DNA, 30 bp, Artificial Sequence
  Synthetic oligonucleotide
cttagggggggtcggaaccgcataaatggg

SEQ ID NO: 61189 - DNA, 30 bp, Artificial Sequence
  Synthetic oligonucleotide
gggactcgagcagggtaaggtctaaatggg

SEQ ID NO: 61190 - DNA, 30 bp, Artificial Sequence
  Synthetic oligonucleotide
gtggaatagagaaaggtgattcacaatggg

SEQ ID NO: 61191 - DNA, 30 bp, Artificial Sequence
  Synthetic oligonucleotide
gggtgaagcgaggtgtaactgcataatggg

SEQ ID NO: 61192 - DNA, 30 bp, Artificial Sequence
  Synthetic oligonucleotide
ttaaggacaatcgatataccgagccatggg

SEQ ID NO: 61193 - DNA, 30 bp, Artificial Sequence
  Synthetic oligonucleotide
tgtctgaagaaacctgcttgacgatatggg

SEQ ID NO: 61194 - DNA, 30 bp, Artificial Sequence
  Synthetic oligonucleotide
gcctcgatccaatctaacggttaccctggg

SEQ ID NO: 61195 - DNA, 30 bp, Artificial Sequence
  Synthetic oligonucleotide
cagggacatagaatgagtatacactctggg

SEQ ID NO: 61196 - DNA, 30 bp, Artificial Sequence
  Synthetic oligonucleotide
gtgactggttcaatatgcagaaggtctggg

SEQ ID NO: 61197 - DNA, 30 bp, Artificial Sequence
  Synthetic oligonucleotide
gagaaatgtatgtaggatcataaccgtggg

SEQ ID NO: 61198 - DNA, 30 bp, Artificial Sequence
  Synthetic oligonucleotide
gacatgctgtaagaaataccatggcgtggg

SEQ ID NO: 61199 - DNA, 30 bp, Artificial Sequence
  Synthetic oligonucleotide
ggccaagctagagtccgagggagaggtggg

SEQ ID NO: 61200 - DNA, 29 bp, Artificial Sequence
  Synthetic oligonucleotide
cggtcataagaaccaatacatgcattggg

SEQ ID NO: 61201 - DNA, 30 bp, Artificial Sequence
  Synthetic oligonucleotide
ttcaaaaaatgggcaataggctagattggg

SEQ ID NO: 61202 - DNA, 30 bp, Artificial Sequence
  Synthetic oligonucleotide
ggtgcaagttgttatcctggagaccttggg

SEQ ID NO: 61203 - DNA, 30 bp, Artificial Sequence
  Synthetic oligonucleotide
cctgaccgcttacaatcgaaaagtcttggg

SEQ ID NO: 61204 - DNA, 30 bp, Artificial Sequence
  Synthetic oligonucleotide
tcggtgacgcgtgagacgggttgatttggg

SEQ ID NO: 61205 - DNA, 30 bp, Artificial Sequence
  Synthetic oligonucleotide
taagtagtaaacactccgagaatatttggg

SEQ ID NO: 61206 - DNA, 30 bp, Artificial Sequence
  Synthetic oligonucleotide
gatcacgatgctccgaatttgaactttggg

SEQ ID NO: 61207 - DNA, 30 bp, Artificial Sequence
  Synthetic oligonucleotide
ggaactcactcagcggtatggcgaaaatgg

SEQ ID NO: 61208 - DNA, 30 bp, Artificial Sequence
  Synthetic oligonucleotide
tggtcttggttagggggccaatgaaaatgg

SEQ ID NO: 61209 - DNA, 30 bp, Artificial Sequence
  Synthetic oligonucleotide
atgtaccgggttgagtgaaacatcaaatgg

SEQ ID NO: 61210 - DNA, 30 bp, Artificial Sequence
  Synthetic oligonucleotide
atagatcggatatgtaatggttagaaatgg

SEQ ID NO: 61211 - DNA, 30 bp, Artificial Sequence
  Synthetic oligonucleotide
tacaagggggggaattacgagatacaatgg

SEQ ID NO: 61212 - DNA, 30 bp, Artificial Sequence
  Synthetic oligonucleotide
gtgcacagtgagagtagcaacccgcaatgg

SEQ ID NO: 61213 - DNA, 30 bp, Artificial Sequence
  Synthetic oligonucleotide
gaggcgccgatgagaacggctccgcaatgg

SEQ ID NO: 61214 - DNA, 30 bp, Artificial Sequence
  Synthetic oligonucleotide
acggagctgggccgcaactatatagaatgg

SEQ ID NO: 61215 - DNA, 30 bp, Artificial Sequence
  Synthetic oligonucleotide
agaatggagtcgagctatactctggaatgg

SEQ ID NO: 61216 - DNA, 30 bp, Artificial Sequence
  Synthetic oligonucleotide
gtacagtcatgcataccgagtctggaatgg

SEQ ID NO: 61217 - DNA, 30 bp, Artificial Sequence
  Synthetic oligonucleotide
gcctatacagtaaatcgagaagctgaatgg

SEQ ID NO: 61218 - DNA, 30 bp, Artificial Sequence
  Synthetic oligonucleotide
gggaggctcgaccgcttatctacctaatgg

SEQ ID NO: 61219 - DNA, 30 bp, Artificial Sequence
  Synthetic oligonucleotide
tgcggatctatatgtggattgagaacatgg

SEQ ID NO: 61220 - DNA, 30 bp, Artificial Sequence
  Synthetic oligonucleotide
ctgcatccgaaaagtccttaatgaacatgg

SEQ ID NO: 61221 - DNA, 30 bp, Artificial Sequence
  Synthetic oligonucleotide
actttggaaggtaaatcggggctaacatgg

SEQ ID NO: 61222 - DNA, 30 bp, Artificial Sequence
  Synthetic oligonucleotide
ctgaatgtgtaacattattaggagacatgg

SEQ ID NO: 61223 - DNA, 30 bp, Artificial Sequence
  Synthetic oligonucleotide
tggcgatcgaaccgggatacagtcccatgg

SEQ ID NO: 61224 - DNA, 30 bp, Artificial Sequence
  Synthetic oligonucleotide
cgatgtaaatcatttaaaaagcgagcatgg

SEQ ID NO: 61225 - DNA, 30 bp, Artificial Sequence
  Synthetic oligonucleotide
caaacaggcccgcaagtctacggatcatgg

SEQ ID NO: 61226 - DNA, 30 bp, Artificial Sequence
  Synthetic oligonucleotide
agccggatgcaataactaaaataccgatgg

SEQ ID NO: 61227 - DNA, 30 bp, Artificial Sequence
  Synthetic oligonucleotide
agaaattagtagagctctatgatccgatgg

SEQ ID NO: 61228 - DNA, 30 bp, Artificial Sequence
  Synthetic oligonucleotide
cgaggtggatatagagattttttgcgatgg

SEQ ID NO: 61229 - DNA, 30 bp, Artificial Sequence
  Synthetic oligonucleotide
aaggagaagacggtaaaacagtccggatgg

SEQ ID NO: 61230 - DNA, 30 bp, Artificial Sequence
  Synthetic oligonucleotide
actaacaggagttaccactatgcgggatgg

SEQ ID NO: 61231 - DNA, 30 bp, Artificial Sequence
  Synthetic oligonucleotide
ttagtgaattggatggacacaatatgatgg

SEQ ID NO: 61232 - DNA, 30 bp, Artificial Sequence
  Synthetic oligonucleotide
ttgacaggtgagaggccctaaggaatatgg

SEQ ID NO: 61233 - DNA, 30 bp, Artificial Sequence
  Synthetic oligonucleotide
agggagaatcccttgataatacaagtatgg

SEQ ID NO: 61234 - DNA, 30 bp, Artificial Sequence
  Synthetic oligonucleotide
taggctagtcgcaaatggcaaaacgtatgg

SEQ ID NO: 61235 - DNA, 30 bp, Artificial Sequence
  Synthetic oligonucleotide
agacccagagtctgggcgcattgtgtatgg

SEQ ID NO: 61236 - DNA, 30 bp, Artificial Sequence
  Synthetic oligonucleotide
agggagttagaaaagaattacttgttatgg

SEQ ID NO: 61237 - DNA, 30 bp, Artificial Sequence
  Synthetic oligonucleotide
acactggagcgtaagaagcgtcaccactgg

SEQ ID NO: 61238 - DNA, 30 bp, Artificial Sequence
  Synthetic oligonucleotide
acttgttaggatcacaggagaaagcactgg

SEQ ID NO: 61239 - DNA, 31 bp, Artificial Sequence
  Synthetic oligonucleotide
ccattgacaagggtagcgggccacgcactgg

SEQ ID NO: 61240 - DNA, 30 bp, Artificial Sequence
  Synthetic oligonucleotide
tgagaatactgcgattagagctcggactgg

SEQ ID NO: 61241 - DNA, 30 bp, Artificial Sequence
  Synthetic oligonucleotide
tgatgagtattgaacgtccctggttactgg

SEQ ID NO: 61242 - DNA, 30 bp, Artificial Sequence
  Synthetic oligonucleotide
gcgatccctgttaggaaaagtatttactgg

SEQ ID NO: 61243 - DNA, 30 bp, Artificial Sequence
  Synthetic oligonucleotide
cacggggaattagtttaggaataaccctgg

SEQ ID NO: 61244 - DNA, 30 bp, Artificial Sequence
  Synthetic oligonucleotide
acggtccacaacgggactcaatcaccctgg

SEQ ID NO: 61245 - DNA, 30 bp, Artificial Sequence
  Synthetic oligonucleotide
caatggagcaacttaataaatttgcgctgg

SEQ ID NO: 61246 - DNA, 30 bp, Artificial Sequence
  Synthetic oligonucleotide
agtcaggccctacgtccgacgtctggctgg

SEQ ID NO: 61247 - DNA, 30 bp, Artificial Sequence
  Synthetic oligonucleotide
catacgataattcctaaagtcaaatgctgg

SEQ ID NO: 61248 - DNA, 30 bp, Artificial Sequence
  Synthetic oligonucleotide
aagatctgaaaaaaagtctagtaatgctgg

SEQ ID NO: 61249 - DNA, 30 bp, Artificial Sequence
  Synthetic oligonucleotide
aagggggttagtaacactacagggtgctgg

SEQ ID NO: 61250 - DNA, 30 bp, Artificial Sequence
  Synthetic oligonucleotide
cttgctggatcgaagagtacaaggatctgg

SEQ ID NO: 61251 - DNA, 30 bp, Artificial Sequence
  Synthetic oligonucleotide
ccgcagaattggacaacattgatgatctgg

SEQ ID NO: 61252 - DNA, 30 bp, Artificial Sequence
  Synthetic oligonucleotide
ggggtgactagtgagaccaaagtgatctgg

SEQ ID NO: 61253 - DNA, 30 bp, Artificial Sequence
  Synthetic oligonucleotide
tggcggaaagaatgaggtagtgttatctgg

SEQ ID NO: 61254 - DNA, 30 bp, Artificial Sequence
  Synthetic oligonucleotide
gaaccgtagaatagaaaaacgccggtctgg

SEQ ID NO: 61255 - DNA, 30 bp, Artificial Sequence
  Synthetic oligonucleotide
agcaaaataccatggaccgacgagttctgg

SEQ ID NO: 61256 - DNA, 30 bp, Artificial Sequence
  Synthetic oligonucleotide
ggtgtaaagagggatgagctggccaagtgg

SEQ ID NO: 61257 - DNA, 30 bp, Artificial Sequence
  Synthetic oligonucleotide
gagcaaacacacggttgtaccctgaagtgg

SEQ ID NO: 61258 - DNA, 30 bp, Artificial Sequence
  Synthetic oligonucleotide
tgccaaccggtacgtataacatatcagtgg

SEQ ID NO: 61259 - DNA, 30 bp, Artificial Sequence
  Synthetic oligonucleotide
tcgtggcgccaaagcggtagtcatgagtgg

SEQ ID NO: 61260 - DNA, 30 bp, Artificial Sequence
  Synthetic oligonucleotide
gcggtcccaagaaggaaacaatgcacgtgg

SEQ ID NO: 61261 - DNA, 30 bp, Artificial Sequence
  Synthetic oligonucleotide
taagaggggaagagaccatccgatacgtgg

SEQ ID NO: 61262 - DNA, 30 bp, Artificial Sequence
  Synthetic oligonucleotide
acacgacttacatggatgctgatcgcgtgg

SEQ ID NO: 61263 - DNA, 30 bp, Artificial Sequence
  Synthetic oligonucleotide
tctgagaccgaaatttggccttcgaggtgg

SEQ ID NO: 61264 - DNA, 30 bp, Artificial Sequence
  Synthetic oligonucleotide
cctcgaaggctaccgtacatgggtaggtgg

SEQ ID NO: 61265 - DNA, 30 bp, Artificial Sequence
  Synthetic oligonucleotide
gcttcaagcgtgaggtgctggggcgggtgg

SEQ ID NO: 61266 - DNA, 30 bp, Artificial Sequence
  Synthetic oligonucleotide
tccggatcattattggcaacttgaatgtgg

SEQ ID NO: 61267 - DNA, 30 bp, Artificial Sequence
  Synthetic oligonucleotide
ccggattggaggcgtaaatcgcagatgtgg

SEQ ID NO: 61268 - DNA, 30 bp, Artificial Sequence
  Synthetic oligonucleotide
aaatggaaccagactgatatggacctgtgg

SEQ ID NO: 61269 - DNA, 30 bp, Artificial Sequence
  Synthetic oligonucleotide
gcggccaagaagatactttgtcggaattgg

SEQ ID NO: 61270 - DNA, 30 bp, Artificial Sequence
  Synthetic oligonucleotide
agtggtcagtagggcaaatatgataattgg

SEQ ID NO: 61271 - DNA, 30 bp, Artificial Sequence
  Synthetic oligonucleotide
cggagagcggagcgcacggtccctaattgg

SEQ ID NO: 61272 - DNA, 30 bp, Artificial Sequence
  Synthetic oligonucleotide
tgataatattacaacaataggagcgattgg

SEQ ID NO: 61273 - DNA, 30 bp, Artificial Sequence
  Synthetic oligonucleotide
atccgtcgactcaaaataacgaaatattgg

SEQ ID NO: 61274 - DNA, 30 bp, Artificial Sequence
  Synthetic oligonucleotide
ccatgcgggtgcactactactccatattgg

SEQ ID NO: 61275 - DNA, 30 bp, Artificial Sequence
  Synthetic oligonucleotide
cccaaatagaaagggggtagtacggcttgg

SEQ ID NO: 61276 - DNA, 30 bp, Artificial Sequence
  Synthetic oligonucleotide
tacagtgcaccagtgcctagttagagttgg

SEQ ID NO: 61277 - DNA, 30 bp, Artificial Sequence
  Synthetic oligonucleotide
acaattcagggattagggtcgtaacgttgg

SEQ ID NO: 61278 - DNA, 30 bp, Artificial Sequence
  Synthetic oligonucleotide
aggttagactatgaccgcacgagaggttgg

SEQ ID NO: 61279 - DNA, 30 bp, Artificial Sequence
  Synthetic oligonucleotide
gagaccgattagacttgcgtatatggttgg

SEQ ID NO: 61280 - DNA, 30 bp, Artificial Sequence
  Synthetic oligonucleotide
tggcctagtcggagtagttaccgatgttgg

SEQ ID NO: 61281 - DNA, 30 bp, Artificial Sequence
  Synthetic oligonucleotide
cgaatgaaggagcgtccaagacactgttgg

SEQ ID NO: 61282 - DNA, 30 bp, Artificial Sequence
  Synthetic oligonucleotide
gggggagatgcttgcaattatgagtgttgg

SEQ ID NO: 61283 - DNA, 30 bp, Artificial Sequence
  Synthetic oligonucleotide
tgggcgtcaaccatggacaattaaatttgg

SEQ ID NO: 61284 - DNA, 30 bp, Artificial Sequence
  Synthetic oligonucleotide
aacaggtgaccgcaggtatagagactttgg

SEQ ID NO: 61285 - DNA, 30 bp, Artificial Sequence
  Synthetic oligonucleotide
cggacacacgggaagtgtgtagcgctttgg

SEQ ID NO: 61286 - DNA, 30 bp, Artificial Sequence
  Synthetic oligonucleotide
agaagatatctgggctataggtacttttgg

SEQ ID NO: 61287 - DNA, 30 bp, Artificial Sequence
  Synthetic oligonucleotide
cgtccatcccgatcggactggtgcaaaatg

SEQ ID NO: 61288 - DNA, 30 bp, Artificial Sequence
  Synthetic oligonucleotide
tcgtatcgcgctcgaggggaaaaggaaatg

SEQ ID NO: 61289 - DNA, 30 bp, Artificial Sequence
  Synthetic oligonucleotide
atggaattatggtactaccagcgataaatg

SEQ ID NO: 61290 - DNA, 30 bp, Artificial Sequence
  Synthetic oligonucleotide
gaactaagcttaacggatgggaagtaaatg

SEQ ID NO: 61291 - DNA, 30 bp, Artificial Sequence
  Synthetic oligonucleotide
ttaaggaccgaatcacatacagacccaatg

SEQ ID NO: 61292 - DNA, 30 bp, Artificial Sequence
  Synthetic oligonucleotide
cctcggcacgacgggggcaattctccaatg

SEQ ID NO: 61293 - DNA, 30 bp, Artificial Sequence
  Synthetic oligonucleotide
gaacacaatacggatgaagagacttcaatg

SEQ ID NO: 61294 - DNA, 30 bp, Artificial Sequence
  Synthetic oligonucleotide
ccgctatctcacgcgactagataacgaatg

SEQ ID NO: 61295 - DNA, 30 bp, Artificial Sequence
  Synthetic oligonucleotide
tcctagggggattgaatagcgtaacgaatg

SEQ ID NO: 61296 - DNA, 31 bp, Artificial Sequence
  Synthetic oligonucleotide
gcgggcttgaagggtttcagatctgcgaatg

SEQ ID NO: 61297 - DNA, 30 bp, Artificial Sequence
  Synthetic oligonucleotide
ccacagccgctcgattgggacgagggaatg

SEQ ID NO: 61298 - DNA, 30 bp, Artificial Sequence
  Synthetic oligonucleotide
tgccgaagggggcctggtgcgcccgtaatg

SEQ ID NO: 61299 - DNA, 30 bp, Artificial Sequence
  Synthetic oligonucleotide
ggagactatacatctagtcaggctgtaatg

SEQ ID NO: 61300 - DNA, 30 bp, Artificial Sequence
  Synthetic oligonucleotide
taggacgtcggatggagcttatctttaatg

SEQ ID NO: 61301 - DNA, 30 bp, Artificial Sequence
  Synthetic oligonucleotide
cgttgggcgatatgtcgaggcaaaaacatg

SEQ ID NO: 61302 - DNA, 30 bp, Artificial Sequence
  Synthetic oligonucleotide
aacgccggatattgtaccgaaccaaacatg

SEQ ID NO: 61303 - DNA, 30 bp, Artificial Sequence
  Synthetic oligonucleotide
ctgtagttcgtcaaacaaccgtcaaacatg

SEQ ID NO: 61304 - DNA, 30 bp, Artificial Sequence
  Synthetic oligonucleotide
tggctcattagcaagcaaggaaagaacatg

SEQ ID NO: 61305 - DNA, 30 bp, Artificial Sequence
  Synthetic oligonucleotide
actgggcacagggagactacatcagacatg

SEQ ID NO: 61306 - DNA, 30 bp, Artificial Sequence
  Synthetic oligonucleotide
caaggactgtagcgatgggcatacgacatg

SEQ ID NO: 61307 - DNA, 30 bp, Artificial Sequence
  Synthetic oligonucleotide
ccttggcataagaagctgggtttatacatg

SEQ ID NO: 61308 - DNA, 30 bp, Artificial Sequence
  Synthetic oligonucleotide
cgtaagattcttaccacctgccggaccatg

SEQ ID NO: 61309 - DNA, 30 bp, Artificial Sequence
  Synthetic oligonucleotide
aatacaaggacgcggaaaggagggaccatg

SEQ ID NO: 61310 - DNA, 30 bp, Artificial Sequence
  Synthetic oligonucleotide
caggagtcaaaaattttgatcacccccatg

SEQ ID NO: 61311 - DNA, 30 bp, Artificial Sequence
  Synthetic oligonucleotide
cggcgatattacatactccgttaagccatg

SEQ ID NO: 61312 - DNA, 30 bp, Artificial Sequence
  Synthetic oligonucleotide
ttttcaagatcaagctaagaacgagccatg

SEQ ID NO: 61313 - DNA, 31 bp, Artificial Sequence
  Synthetic oligonucleotide
ggattgagggaatgaatcccgaaggtccatg

SEQ ID NO: 61314 - DNA, 30 bp, Artificial Sequence
  Synthetic oligonucleotide
agggactatttttaaggagcgcattccatg

SEQ ID NO: 61315 - DNA, 30 bp, Artificial Sequence
  Synthetic oligonucleotide
gatggtgtcgtacagggcaacaacagcatg

SEQ ID NO: 61316 - DNA, 30 bp, Artificial Sequence
  Synthetic oligonucleotide
ggataggacaaggaataggccgccggcatg

SEQ ID NO: 61317 - DNA, 30 bp, Artificial Sequence
  Synthetic oligonucleotide
cgaagcgcttcctgagtccgagggtgcatg

SEQ ID NO: 61318 - DNA, 30 bp, Artificial Sequence
  Synthetic oligonucleotide
cgcggatcgactcggagactaattatcatg

SEQ ID NO: 61319 - DNA, 30 bp, Artificial Sequence
  Synthetic oligonucleotide
gaacgtcgtacaaagttgggtgaactcatg

SEQ ID NO: 61320 - DNA, 30 bp, Artificial Sequence
  Synthetic oligonucleotide
agcacgacttaccaggcatcgtcactcatg

SEQ ID NO: 61321 - DNA, 30 bp, Artificial Sequence
  Synthetic oligonucleotide
aacgtcatttatacacgtcttccagtcatg

SEQ ID NO: 61322 - DNA, 30 bp, Artificial Sequence
  Synthetic oligonucleotide
caaaaaagtggttagtatcatctattcatg

SEQ ID NO: 61323 - DNA, 30 bp, Artificial Sequence
  Synthetic oligonucleotide
ggcataacaactcagctaaaggacttcatg

SEQ ID NO: 61324 - DNA, 30 bp, Artificial Sequence
  Synthetic oligonucleotide
tcagcagcgactaaggggaatacgttcatg

SEQ ID NO: 61325 - DNA, 30 bp, Artificial Sequence
  Synthetic oligonucleotide
accagcttatgtataggacaaggcaagatg

SEQ ID NO: 61326 - DNA, 30 bp, Artificial Sequence
  Synthetic oligonucleotide
taaagtagctatggaaacgccatcaagatg

SEQ ID NO: 61327 - DNA, 30 bp, Artificial Sequence
  Synthetic oligonucleotide
ccaggatgccggactgagtaaaagaagatg

SEQ ID NO: 61328 - DNA, 30 bp, Artificial Sequence
  Synthetic oligonucleotide
gttcttcgggtgcgggaggtgagtaagatg

SEQ ID NO: 61329 - DNA, 30 bp, Artificial Sequence
  Synthetic oligonucleotide
cgtgcaggttacggatttgagctacagatg

SEQ ID NO: 61330 - DNA, 30 bp, Artificial Sequence
  Synthetic oligonucleotide
atgtagtgaacagacataagcgcccagatg

SEQ ID NO: 61331 - DNA, 30 bp, Artificial Sequence
  Synthetic oligonucleotide
gtcacatgtgccggatcacaaatagagatg

SEQ ID NO: 61332 - DNA, 30 bp, Artificial Sequence
  Synthetic oligonucleotide
agcgtagctgcacacgttcaggttgagatg

SEQ ID NO: 61333 - DNA, 30 bp, Artificial Sequence
  Synthetic oligonucleotide
gagggaaatcgaaatactagcctaacgatg

SEQ ID NO: 61334 - DNA, 30 bp, Artificial Sequence
  Synthetic oligonucleotide
tgagacacaatgattggcgtcactccgatg

SEQ ID NO: 61335 - DNA, 30 bp, Artificial Sequence
  Synthetic oligonucleotide
tacaaccatcgagggcgctcgggagcgatg

SEQ ID NO: 61336 - DNA, 30 bp, Artificial Sequence
  Synthetic oligonucleotide
cgacgattagtctcaaacccttcttcgatg

SEQ ID NO: 61337 - DNA, 30 bp, Artificial Sequence
  Synthetic oligonucleotide
aaggttgtattgtaaaaaaaattcaggatg

SEQ ID NO: 61338 - DNA, 30 bp, Artificial Sequence
  Synthetic oligonucleotide
tacaggttattggcactgctcccgaggatg

SEQ ID NO: 61339 - DNA, 30 bp, Artificial Sequence
  Synthetic oligonucleotide
agattgcactcactcaacaccccacggatg

SEQ ID NO: 61340 - DNA, 30 bp, Artificial Sequence
  Synthetic oligonucleotide
aagcgctaagtgccgatcctgcttcggatg

SEQ ID NO: 61341 - DNA, 30 bp, Artificial Sequence
  Synthetic oligonucleotide
caaatatttgggcaggatataagagggatg

SEQ ID NO: 61342 - DNA, 29 bp, Artificial Sequence
  Synthetic oligonucleotide
aagcgcacgtggtccagaaaaacgggatg

SEQ ID NO: 61343 - DNA, 30 bp, Artificial Sequence
  Synthetic oligonucleotide
cctggaagttctgaacccacagagtggatg

SEQ ID NO: 61344 - DNA, 30 bp, Artificial Sequence
  Synthetic oligonucleotide
atgctgcaatcaaatacggcgcgcatgatg

SEQ ID NO: 61345 - DNA, 30 bp, Artificial Sequence
  Synthetic oligonucleotide
tcgccccgagacacgctcccaaccctgatg

SEQ ID NO: 61346 - DNA, 30 bp, Artificial Sequence
  Synthetic oligonucleotide
caagaggggagggaatatcaccttctgatg

SEQ ID NO: 61347 - DNA, 30 bp, Artificial Sequence
  Synthetic oligonucleotide
tactgaaacttatactaggaaccagtgatg

SEQ ID NO: 61348 - DNA, 30 bp, Artificial Sequence
  Synthetic oligonucleotide
gagaacgtcctgatctattgtaaggtgatg

SEQ ID NO: 61349 - DNA, 30 bp, Artificial Sequence
  Synthetic oligonucleotide
tatgcacgaccttaagatgaactacatatg

SEQ ID NO: 61350 - DNA, 30 bp, Artificial Sequence
  Synthetic oligonucleotide
caatcgcatactacgagctgaaaccatatg

SEQ ID NO: 61351 - DNA, 30 bp, Artificial Sequence
  Synthetic oligonucleotide
atcactgagtgtaggctcgcgaccgatatg

SEQ ID NO: 61352 - DNA, 30 bp, Artificial Sequence
  Synthetic oligonucleotide
cgagctgcaatggagatcaggcccgatatg

SEQ ID NO: 61353 - DNA, 30 bp, Artificial Sequence
  Synthetic oligonucleotide
tcctcaggtatgccacctgatcaggatatg

SEQ ID NO: 61354 - DNA, 30 bp, Artificial Sequence
  Synthetic oligonucleotide
tgtggagccggcaacctaagtacggatatg

SEQ ID NO: 61355 - DNA, 30 bp, Artificial Sequence
  Synthetic oligonucleotide
acagaggaggggcaagacggccactatatg

SEQ ID NO: 61356 - DNA, 30 bp, Artificial Sequence
  Synthetic oligonucleotide
gtgagaaatggacgaaattgattgtatatg

SEQ ID NO: 61357 - DNA, 30 bp, Artificial Sequence
  Synthetic oligonucleotide
gctccaagtgggttggagagcggttatatg

SEQ ID NO: 61358 - DNA, 30 bp, Artificial Sequence
  Synthetic oligonucleotide
ttcgatagggggccaacggttgcgactatg

SEQ ID NO: 61359 - DNA, 30 bp, Artificial Sequence
  Synthetic oligonucleotide
accgaatacaaatagggaaagttacctatg

SEQ ID NO: 61360 - DNA, 30 bp, Artificial Sequence
  Synthetic oligonucleotide
agcaatatggcgattgcctgtgtcgctatg

SEQ ID NO: 61361 - DNA, 30 bp, Artificial Sequence
  Synthetic oligonucleotide
ggaatatcatacgaagggggttaggctatg

SEQ ID NO: 61362 - DNA, 30 bp, Artificial Sequence
  Synthetic oligonucleotide
cagtgtgaactattcggaatgattgctatg

SEQ ID NO: 61363 - DNA, 30 bp, Artificial Sequence
  Synthetic oligonucleotide
agcgccccttgacatggaagccgatctatg

SEQ ID NO: 61364 - DNA, 30 bp, Artificial Sequence
  Synthetic oligonucleotide
gttaagctgaccttccaaaaacgacgtatg

SEQ ID NO: 61365 - DNA, 30 bp, Artificial Sequence
  Synthetic oligonucleotide
tgttaaattcatactaggaccaacggtatg

SEQ ID NO: 61366 - DNA, 30 bp, Artificial Sequence
  Synthetic oligonucleotide
actcaaccagctaggcctggaatatgtatg

SEQ ID NO: 61367 - DNA, 30 bp, Artificial Sequence
  Synthetic oligonucleotide
gaggggactgagtgaagccgacaaattatg

SEQ ID NO: 61368 - DNA, 30 bp, Artificial Sequence
  Synthetic oligonucleotide
acacgctaaggcaggggtatgggaattatg

SEQ ID NO: 61369 - DNA, 30 bp, Artificial Sequence
  Synthetic oligonucleotide
ttgcagctgcaggtgcatggttgggttatg

SEQ ID NO: 61370 - DNA, 30 bp, Artificial Sequence
  Synthetic oligonucleotide
tcaatatgttaaaggagcgctactaaactg

SEQ ID NO: 61371 - DNA, 30 bp, Artificial Sequence
  Synthetic oligonucleotide
gcgaccacgagcatattttggtatcaactg

SEQ ID NO: 61372 - DNA, 30 bp, Artificial Sequence
  Synthetic oligonucleotide
agcttacctacgagtctaacctctcaactg

SEQ ID NO: 61373 - DNA, 30 bp, Artificial Sequence
  Synthetic oligonucleotide
acgacaatgcagttacaagctgcagaactg

SEQ ID NO: 61374 - DNA, 30 bp, Artificial Sequence
  Synthetic oligonucleotide
gaggttgagcgttaaatatagcactaactg

SEQ ID NO: 61375 - DNA, 30 bp, Artificial Sequence
  Synthetic oligonucleotide
tgatagagctaagaaagttttgcaccactg

SEQ ID NO: 61376 - DNA, 30 bp, Artificial Sequence
  Synthetic oligonucleotide
gtgggggaggggtgggtcgcatagtcactg

SEQ ID NO: 61377 - DNA, 30 bp, Artificial Sequence
  Synthetic oligonucleotide
tgcgggacaatggggggttcagcacgactg

SEQ ID NO: 61378 - DNA, 30 bp, Artificial Sequence
  Synthetic oligonucleotide
cgcgcccgatccaaccttagctcgcgactg

SEQ ID NO: 61379 - DNA, 30 bp, Artificial Sequence
  Synthetic oligonucleotide
agctaatgactaaaactagcgtgaggactg

SEQ ID NO: 61380 - DNA, 30 bp, Artificial Sequence
  Synthetic oligonucleotide
actgagggaaagagatctttgtgtggactg

SEQ ID NO: 61381 - DNA, 30 bp, Artificial Sequence
  Synthetic oligonucleotide
gcacgtagtgacggataatcttttggactg

SEQ ID NO: 61382 - DNA, 30 bp, Artificial Sequence
  Synthetic oligonucleotide
gtgcactacaaatggctattcggatgactg

SEQ ID NO: 61383 - DNA, 30 bp, Artificial Sequence
  Synthetic oligonucleotide
tcacagatatctatccgggtgcgctgactg

SEQ ID NO: 61384 - DNA, 30 bp, Artificial Sequence
  Synthetic oligonucleotide
acggtgcgaggtaaagttatcctgtgactg

SEQ ID NO: 61385 - DNA, 30 bp, Artificial Sequence
  Synthetic oligonucleotide
agcgtgtaacacgcgaacactcttctactg

SEQ ID NO: 61386 - DNA, 30 bp, Artificial Sequence
  Synthetic oligonucleotide
tggggaaagcgattagccgtcagggtactg

SEQ ID NO: 61387 - DNA, 30 bp, Artificial Sequence
  Synthetic oligonucleotide
gaaaggggcaaagtgatttctcgtgtactg

SEQ ID NO: 61388 - DNA, 30 bp, Artificial Sequence
  Synthetic oligonucleotide
agggctcgtcgtattcagccgccattactg

SEQ ID NO: 61389 - DNA, 30 bp, Artificial Sequence
  Synthetic oligonucleotide
tggctcagaactaagataatgtgtcacctg

SEQ ID NO: 61390 - DNA, 30 bp, Artificial Sequence
  Synthetic oligonucleotide
acggttaggacccacgagggctgacccctg

SEQ ID NO: 61391 - DNA, 30 bp, Artificial Sequence
  Synthetic oligonucleotide
gggcaaattccgttaaagtatgagatcctg

SEQ ID NO: 61392 - DNA, 30 bp, Artificial Sequence
  Synthetic oligonucleotide
tagcgccgacattccctggattaactcctg

SEQ ID NO: 61393 - DNA, 30 bp, Artificial Sequence
  Synthetic oligonucleotide
acgagtggatgaccagccaacggaaagctg

SEQ ID NO: 61394 - DNA, 30 bp, Artificial Sequence
  Synthetic oligonucleotide
cggcgtgagaggtaagaaaagtataagctg

SEQ ID NO: 61395 - DNA, 30 bp, Artificial Sequence
  Synthetic oligonucleotide
agtaagtgacatccgagagtttgacagctg

SEQ ID NO: 61396 - DNA, 30 bp, Artificial Sequence
  Synthetic oligonucleotide
gtcgaggcgatagccgaagggttacagctg

SEQ ID NO: 61397 - DNA, 30 bp, Artificial Sequence
  Synthetic oligonucleotide
ctcataagccccgtacgatactccgagctg

SEQ ID NO: 61398 - DNA, 30 bp, Artificial Sequence
  Synthetic oligonucleotide
tcacatcgtgtaagacaatgatgcgcgctg

SEQ ID NO: 61399 - DNA, 30 bp, Artificial Sequence
  Synthetic oligonucleotide
ctaggtctaatcacgactaagtgaaggctg

SEQ ID NO: 61400 - DNA, 30 bp, Artificial Sequence
  Synthetic oligonucleotide
agaaaaagtgtgcttacctacccagggctg

SEQ ID NO: 61401 - DNA, 30 bp, Artificial Sequence
  Synthetic oligonucleotide
cgggctggccccgaatgcaaaactgggctg

SEQ ID NO: 61402 - DNA, 30 bp, Artificial Sequence
  Synthetic oligonucleotide
cgatcgatcatcatgaatccggcttggctg

SEQ ID NO: 61403 - DNA, 30 bp, Artificial Sequence
  Synthetic oligonucleotide
gaggacttataaaggtgagtggctgtgctg

SEQ ID NO: 61404 - DNA, 30 bp, Artificial Sequence
  Synthetic oligonucleotide
aagaaaagataccgtattacaggtgtgctg

SEQ ID NO: 61405 - DNA, 30 bp, Artificial Sequence
  Synthetic oligonucleotide
tgttcggtccgtagtaggcaaggtaatctg

SEQ ID NO: 61406 - DNA, 30 bp, Artificial Sequence
  Synthetic oligonucleotide
ccaaggaaacttcgtcgagatcgacatctg

SEQ ID NO: 61407 - DNA, 30 bp, Artificial Sequence
  Synthetic oligonucleotide
atggagcatgtaagataaattgtacatctg

SEQ ID NO: 61408 - DNA, 30 bp, Artificial Sequence
  Synthetic oligonucleotide
aatgaataagtctcgggagtgcctcatctg

SEQ ID NO: 61409 - DNA, 30 bp, Artificial Sequence
  Synthetic oligonucleotide
gatcggatcgctagacactacggggatctg

SEQ ID NO: 61410 - DNA, 30 bp, Artificial Sequence
  Synthetic oligonucleotide
gaaagcgcctataaactcgtacgatatctg

SEQ ID NO: 61411 - DNA, 30 bp, Artificial Sequence
  Synthetic oligonucleotide
taacgtgctcatgacgatttagactatctg

SEQ ID NO: 61412 - DNA, 29 bp, Artificial Sequence
  Synthetic oligonucleotide
ctgcagatgaagaaggtaaagggactctg

SEQ ID NO: 61413 - DNA, 30 bp, Artificial Sequence
  Synthetic oligonucleotide
agacgtcaaggtgtaagcgtgtctgctctg

SEQ ID NO: 61414 - DNA, 30 bp, Artificial Sequence
  Synthetic oligonucleotide
cggatggatagagagaataacacatctctg

SEQ ID NO: 61415 - DNA, 30 bp, Artificial Sequence
  Synthetic oligonucleotide
tcaagtagctgaaggcggtgtgcgtctctg

SEQ ID NO: 61416 - DNA, 30 bp, Artificial Sequence
  Synthetic oligonucleotide
cgctctatccaagaaatgcagatcagtctg

SEQ ID NO: 61417 - DNA, 30 bp, Artificial Sequence
  Synthetic oligonucleotide
cccgggagccagaaatgaacgcggtgtctg

SEQ ID NO: 61418 - DNA, 30 bp, Artificial Sequence
  Synthetic oligonucleotide
gggacggcccgcagagatgaataacaagtg

SEQ ID NO: 61419 - DNA, 30 bp, Artificial Sequence
  Synthetic oligonucleotide
tagctcaggtggttaatgagggcacaagtg

SEQ ID NO: 61420 - DNA, 30 bp, Artificial Sequence
  Synthetic oligonucleotide
aggagatgtattgtctcctatgtgcaagtg

SEQ ID NO: 61421 - DNA, 30 bp, Artificial Sequence
  Synthetic oligonucleotide
tggagaccggtgtttcctagagtagaagtg

SEQ ID NO: 61422 - DNA, 30 bp, Artificial Sequence
  Synthetic oligonucleotide
acccaacttgataacgcccggtaggaagtg

SEQ ID NO: 61423 - DNA, 30 bp, Artificial Sequence
  Synthetic oligonucleotide
ggcatcatgtactggtggatgttggaagtg

SEQ ID NO: 61424 - DNA, 31 bp, Artificial Sequence
  Synthetic oligonucleotide
tcgtcgatctttggctaagacgtgtgaagtg

SEQ ID NO: 61425 - DNA, 30 bp, Artificial Sequence
  Synthetic oligonucleotide
agctgtcggtaacagaggatcgttgaagtg

SEQ ID NO: 61426 - DNA, 30 bp, Artificial Sequence
  Synthetic oligonucleotide
aggcctcgaccacctactgcttaataagtg

SEQ ID NO: 61427 - DNA, 30 bp, Artificial Sequence
  Synthetic oligonucleotide
gcgagcgtggtcaagcggcacgattaagtg

SEQ ID NO: 61428 - DNA, 30 bp, Artificial Sequence
  Synthetic oligonucleotide
tagagcagggcctggcaaattagcacagtg

SEQ ID NO: 61429 - DNA, 30 bp, Artificial Sequence
  Synthetic oligonucleotide
aactgcaagatggctcacagctttacagtg

SEQ ID NO: 61430 - DNA, 30 bp, Artificial Sequence
  Synthetic oligonucleotide
aacaacaagcgactcttcgttggcccagtg

SEQ ID NO: 61431 - DNA, 30 bp, Artificial Sequence
  Synthetic oligonucleotide
aaaccgttacctaatttgatatgtccagtg

SEQ ID NO: 61432 - DNA, 30 bp, Artificial Sequence
  Synthetic oligonucleotide
ttgacgtaggcagaaagctcgtgatcagtg

SEQ ID NO: 61433 - DNA, 30 bp, Artificial Sequence
  Synthetic oligonucleotide
aacgaggcagacgttggaaactgccgagtg

SEQ ID NO: 61434 - DNA, 30 bp, Artificial Sequence
  Synthetic oligonucleotide
acaatagtcgtctcggaatatacgcgagtg

SEQ ID NO: 61435 - DNA, 30 bp, Artificial Sequence
  Synthetic oligonucleotide
caatgcgagggtatatgggctgcgcgagtg

SEQ ID NO: 61436 - DNA, 30 bp, Artificial Sequence
  Synthetic oligonucleotide
ttgagacgcccttctgcgaactcgtgagtg

SEQ ID NO: 61437 - DNA, 30 bp, Artificial Sequence
  Synthetic oligonucleotide
tcgatttatgaggctggaattcagctagtg

SEQ ID NO: 61438 - DNA, 30 bp, Artificial Sequence
  Synthetic oligonucleotide
atgcaaacgaagctgtgaataaccgtagtg

SEQ ID NO: 61439 - DNA, 29 bp, Artificial Sequence
  Synthetic oligonucleotide
atgggggcggactgctaggtgcggtagtg

SEQ ID NO: 61440 - DNA, 30 bp, Artificial Sequence
  Synthetic oligonucleotide
tcggccattgtaggattcgaccgattagtg

SEQ ID NO: 61441 - DNA, 30 bp, Artificial Sequence
  Synthetic oligonucleotide
acgtacagcgtctaatagagtaccttagtg

SEQ ID NO: 61442 - DNA, 30 bp, Artificial Sequence
  Synthetic oligonucleotide
tcattcatcgccatgtatgaacaaaacgtg

SEQ ID NO: 61443 - DNA, 30 bp, Artificial Sequence
  Synthetic oligonucleotide
ttgccgccaacaggccgtggtgataacgtg

SEQ ID NO: 61444 - DNA, 30 bp, Artificial Sequence
  Synthetic oligonucleotide
tttaaggtggaggaagcaaagggtaacgtg

SEQ ID NO: 61445 - DNA, 30 bp, Artificial Sequence
  Synthetic oligonucleotide
gcgacgagtgctctactctaactacacgtg

SEQ ID NO: 61446 - DNA, 30 bp, Artificial Sequence
  Synthetic oligonucleotide
tcgaaccgtttaggcgcgttagcccacgtg

SEQ ID NO: 61447 - DNA, 30 bp, Artificial Sequence
  Synthetic oligonucleotide
ttaatcacattagctacatatagccacgtg

SEQ ID NO: 61448 - DNA, 30 bp, Artificial Sequence
  Synthetic oligonucleotide
acctcggctagaacgaacagtcgggacgtg

SEQ ID NO: 61449 - DNA, 30 bp, Artificial Sequence
  Synthetic oligonucleotide
gcggtctcaagataaaaatgcatatacgtg

SEQ ID NO: 61450 - DNA, 30 bp, Artificial Sequence
  Synthetic oligonucleotide
gctggggtcggttagagtggaaactacgtg

SEQ ID NO: 61451 - DNA, 30 bp, Artificial Sequence
  Synthetic oligonucleotide
aggaagccagtgtagacaggatactacgtg

SEQ ID NO: 61452 - DNA, 30 bp, Artificial Sequence
  Synthetic oligonucleotide
agcacagtagaacatccatctacgtacgtg

SEQ ID NO: 61453 - DNA, 30 bp, Artificial Sequence
  Synthetic oligonucleotide
tgcgattgtctaggctaaggaatcaccgtg

SEQ ID NO: 61454 - DNA, 30 bp, Artificial Sequence
  Synthetic oligonucleotide
ggcgtgtcccgacaggttccaggtgccgtg

SEQ ID NO: 61455 - DNA, 30 bp, Artificial Sequence
  Synthetic oligonucleotide
gtaggcatgacgaccaccagctcaggcgtg

SEQ ID NO: 61456 - DNA, 30 bp, Artificial Sequence
  Synthetic oligonucleotide
actgtcggagttctagtaggggccggcgtg

SEQ ID NO: 61457 - DNA, 30 bp, Artificial Sequence
  Synthetic oligonucleotide
acgaatgataagcttgtcgacatcggcgtg

SEQ ID NO: 61458 - DNA, 30 bp, Artificial Sequence
  Synthetic oligonucleotide
agggataataacatttattaaagtggcgtg

SEQ ID NO: 61459 - DNA, 30 bp, Artificial Sequence
  Synthetic oligonucleotide
tgctcccggacacatggtaatagatgcgtg

SEQ ID NO: 61460 - DNA, 30 bp, Artificial Sequence
  Synthetic oligonucleotide
ctacgagcgtaattacgatagtagatcgtg

SEQ ID NO: 61461 - DNA, 30 bp, Artificial Sequence
  Synthetic oligonucleotide
aagggcatcgatcccccgccgaatatcgtg

SEQ ID NO: 61462 - DNA, 30 bp, Artificial Sequence
  Synthetic oligonucleotide
gtgggcacttaccactagtgtcctatcgtg

SEQ ID NO: 61463 - DNA, 30 bp, Artificial Sequence
  Synthetic oligonucleotide
aactcaccttccgaacataagcctgtcgtg

SEQ ID NO: 61464 - DNA, 30 bp, Artificial Sequence
  Synthetic oligonucleotide
tccgatactgagtaagagtttgacttcgtg

SEQ ID NO: 61465 - DNA, 30 bp, Artificial Sequence
  Synthetic oligonucleotide
taggcgtatacattgtcacggcagttcgtg

SEQ ID NO: 61466 - DNA, 30 bp, Artificial Sequence
  Synthetic oligonucleotide
gacggtgccgcgcacaagcgcaataaggtg

SEQ ID NO: 61467 - DNA, 30 bp, Artificial Sequence
  Synthetic oligonucleotide
taggagtagattttaaatggttttaaggtg

SEQ ID NO: 61468 - DNA, 30 bp, Artificial Sequence
  Synthetic oligonucleotide
taatacggtattgaacaaataacccaggtg

SEQ ID NO: 61469 - DNA, 31 bp, Artificial Sequence
  Synthetic oligonucleotide
acctcaggatggctcatcgaaattgcaggtg

SEQ ID NO: 61470 - DNA, 30 bp, Artificial Sequence
  Synthetic oligonucleotide
cagatagtgttgagaacgggagctcaggtg

SEQ ID NO: 61471 - DNA, 30 bp, Artificial Sequence
  Synthetic oligonucleotide
atcagcttggttagtgtggagtgagaggtg

SEQ ID NO: 61472 - DNA, 30 bp, Artificial Sequence
  Synthetic oligonucleotide
tctcgctgacaatcaaatgatccataggtg

SEQ ID NO: 61473 - DNA, 30 bp, Artificial Sequence
  Synthetic oligonucleotide
agggagagtggtgttaagcccgtgacggtg

SEQ ID NO: 61474 - DNA, 30 bp, Artificial Sequence
  Synthetic oligonucleotide
ccatagactcagataacgggcggcagggtg

SEQ ID NO: 61475 - DNA, 30 bp, Artificial Sequence
  Synthetic oligonucleotide
catgacaaaacacttctacgataacgggtg

SEQ ID NO: 61476 - DNA, 30 bp, Artificial Sequence
  Synthetic oligonucleotide
gtaggagcgcttaattgaaataatcgggtg

SEQ ID NO: 61477 - DNA, 30 bp, Artificial Sequence
  Synthetic oligonucleotide
gtgagaccgtgatgtaaggctcaaggggtg

SEQ ID NO: 61478 - DNA, 30 bp, Artificial Sequence
  Synthetic oligonucleotide
taagctcgatggactggaactgtgggggtg

SEQ ID NO: 61479 - DNA, 30 bp, Artificial Sequence
  Synthetic oligonucleotide
actcgggcatagacgaataggggctgggtg

SEQ ID NO: 61480 - DNA, 30 bp, Artificial Sequence
  Synthetic oligonucleotide
ggtaaccgagtatgtggactcccttgggtg

SEQ ID NO: 61481 - DNA, 30 bp, Artificial Sequence
  Synthetic oligonucleotide
cgactcggttatggggaacgtctggtggtg

SEQ ID NO: 61482 - DNA, 30 bp, Artificial Sequence
  Synthetic oligonucleotide
agtgtgaagggacatcaacagtagaatgtg

SEQ ID NO: 61483 - DNA, 30 bp, Artificial Sequence
  Synthetic oligonucleotide
caggagtttatcgaaagaatctggaatgtg

SEQ ID NO: 61484 - DNA, 30 bp, Artificial Sequence
  Synthetic oligonucleotide
gaaggggtaatgagcgtcacgacacatgtg

SEQ ID NO: 61485 - DNA, 30 bp, Artificial Sequence
  Synthetic oligonucleotide
ggggtttgataattctccgaaacagatgtg

SEQ ID NO: 61486 - DNA, 30 bp, Artificial Sequence
  Synthetic oligonucleotide
atatcaggtgagagccaagtactagatgtg

SEQ ID NO: 61487 - DNA, 30 bp, Artificial Sequence
  Synthetic oligonucleotide
caaaacgggtataaggggttaaaggatgtg

SEQ ID NO: 61488 - DNA, 30 bp, Artificial Sequence
  Synthetic oligonucleotide
cgtatgtatacgtctcggaatcaggatgtg

SEQ ID NO: 61489 - DNA, 30 bp, Artificial Sequence
  Synthetic oligonucleotide
aggccattggcgggcaacgcgagaactgtg

SEQ ID NO: 61490 - DNA, 30 bp, Artificial Sequence
  Synthetic oligonucleotide
tggatcgcgtaggtgcataaacccactgtg

SEQ ID NO: 61491 - DNA, 30 bp, Artificial Sequence
  Synthetic oligonucleotide
gtatgccagggataaagcgagcccgctgtg

SEQ ID NO: 61492 - DNA, 30 bp, Artificial Sequence
  Synthetic oligonucleotide
aagacccatagccattgatccgattctgtg

SEQ ID NO: 61493 - DNA, 30 bp, Artificial Sequence
  Synthetic oligonucleotide
tcaggctgccgaattccgtcacaaagtgtg

SEQ ID NO: 61494 - DNA, 30 bp, Artificial Sequence
  Synthetic oligonucleotide
ctaaacacttgagaatctaaatggggtgtg

SEQ ID NO: 61495 - DNA, 30 bp, Artificial Sequence
  Synthetic oligonucleotide
acgtttaacgcgacaagacttgaatgtgtg

SEQ ID NO: 61496 - DNA, 30 bp, Artificial Sequence
  Synthetic oligonucleotide
ccgcggagcttgagaagcgagctggttgtg

SEQ ID NO: 61497 - DNA, 30 bp, Artificial Sequence
  Synthetic oligonucleotide
cgagatgtcaaaaatagccgtcagtttgtg

SEQ ID NO: 61498 - DNA, 30 bp, Artificial Sequence
  Synthetic oligonucleotide
atggccgattaaggacgagtgtttaaattg

SEQ ID NO: 61499 - DNA, 30 bp, Artificial Sequence
  Synthetic oligonucleotide
acatagggacggcgaagaacagaacaattg

SEQ ID NO: 61500 - DNA, 30 bp, Artificial Sequence
  Synthetic oligonucleotide
tacgagctgaactttaaggaagcgcaattg

SEQ ID NO: 61501 - DNA, 30 bp, Artificial Sequence
  Synthetic oligonucleotide
agtacattgtggagaaatcaagatcaattg

SEQ ID NO: 61502 - DNA, 30 bp, Artificial Sequence
  Synthetic oligonucleotide
gacatcaatacgttatcctacggcgaattg

SEQ ID NO: 61503 - DNA, 30 bp, Artificial Sequence
  Synthetic oligonucleotide
aaggaatacaactatcgttttcgaacattg

SEQ ID NO: 61504 - DNA, 30 bp, Artificial Sequence
  Synthetic oligonucleotide
tctagattctaatagtcaaccactccattg

SEQ ID NO: 61505 - DNA, 30 bp, Artificial Sequence
  Synthetic oligonucleotide
acgtgtcagggttcgacgccccgatcattg

SEQ ID NO: 61506 - DNA, 30 bp, Artificial Sequence
  Synthetic oligonucleotide
gtgagtgttatagagctcatgcattcattg

SEQ ID NO: 61507 - DNA, 30 bp, Artificial Sequence
  Synthetic oligonucleotide
tctaacctacttgaatttacccccagattg

SEQ ID NO: 61508 - DNA, 30 bp, Artificial Sequence
  Synthetic oligonucleotide
ggaagaaaatcgatcaacacaggcagattg

SEQ ID NO: 61509 - DNA, 30 bp, Artificial Sequence
  Synthetic oligonucleotide
ccggatcgccgccggtgtcagctgagattg

SEQ ID NO: 61510 - DNA, 30 bp, Artificial Sequence
  Synthetic oligonucleotide
gggcagagtcgcccatctaatactagattg

SEQ ID NO: 61511 - DNA, 30 bp, Artificial Sequence
  Synthetic oligonucleotide
gcgatagctgcgagaaatagccctagattg

SEQ ID NO: 61512 - DNA, 30 bp, Artificial Sequence
  Synthetic oligonucleotide
tcgtcccagatgtataagacacaaggattg

SEQ ID NO: 61513 - DNA, 30 bp, Artificial Sequence
  Synthetic oligonucleotide
cgtagcagcggcctcgtaaaatccggattg

SEQ ID NO: 61514 - DNA, 30 bp, Artificial Sequence
  Synthetic oligonucleotide
ctagggtagcccagaattccaattggattg

SEQ ID NO: 61515 - DNA, 30 bp, Artificial Sequence
  Synthetic oligonucleotide
cgtcccttgacgaggtggtggattatattg

SEQ ID NO: 61516 - DNA, 30 bp, Artificial Sequence
  Synthetic oligonucleotide
atgaaagacggtgaataaaccaggctattg

SEQ ID NO: 61517 - DNA, 30 bp, Artificial Sequence
  Synthetic oligonucleotide
gcatcaagatgcaataggatatgattattg

SEQ ID NO: 61518 - DNA, 30 bp, Artificial Sequence
  Synthetic oligonucleotide
ccgtccacaaagcagacttagcccttattg

SEQ ID NO: 61519 - DNA, 30 bp, Artificial Sequence
  Synthetic oligonucleotide
ggggtcaaagcctaacgatcacgcttattg

SEQ ID NO: 61520 - DNA, 30 bp, Artificial Sequence
  Synthetic oligonucleotide
attcgacgggtaaaaaagaaggctaacttg

SEQ ID NO: 61521 - DNA, 30 bp, Artificial Sequence
  Synthetic oligonucleotide
ttacggggctatcatgcacttacacacttg

SEQ ID NO: 61522 - DNA, 30 bp, Artificial Sequence
  Synthetic oligonucleotide
gtggcgagggtagtaaaaggtcggcacttg

SEQ ID NO: 61523 - DNA, 30 bp, Artificial Sequence
  Synthetic oligonucleotide
caggattcccggcccattcaagcggacttg

SEQ ID NO: 61524 - DNA, 30 bp, Artificial Sequence
  Synthetic oligonucleotide
caacgtagaagatttaggcttaccaccttg

SEQ ID NO: 61525 - DNA, 30 bp, Artificial Sequence
  Synthetic oligonucleotide
cgagttatagataacaatagtagagccttg

SEQ ID NO: 61526 - DNA, 30 bp, Artificial Sequence
  Synthetic oligonucleotide
ctaggaagagaactttcctacctcgccttg

SEQ ID NO: 61527 - DNA, 30 bp, Artificial Sequence
  Synthetic oligonucleotide
gcgcaagcgtgcaacgcaaaggattccttg

SEQ ID NO: 61528 - DNA, 30 bp, Artificial Sequence
  Synthetic oligonucleotide
acacacgagtaaggtagattagagagcttg

SEQ ID NO: 61529 - DNA, 30 bp, Artificial Sequence
  Synthetic oligonucleotide
acatagggaagtcaaaaaactgtccgcttg

SEQ ID NO: 61530 - DNA, 30 bp, Artificial Sequence
  Synthetic oligonucleotide
taatttgcaaaactgtacaaggatggcttg

SEQ ID NO: 61531 - DNA, 30 bp, Artificial Sequence
  Synthetic oligonucleotide
atgataagtatgtgtacggtatttggcttg

SEQ ID NO: 61532 - DNA, 30 bp, Artificial Sequence
  Synthetic oligonucleotide
gctcatgaaacgaaatacctcctatgcttg

SEQ ID NO: 61533 - DNA, 30 bp, Artificial Sequence
  Synthetic oligonucleotide
cgccgtcgatgcaagtcgatcgatctcttg

SEQ ID NO: 61534 - DNA, 30 bp, Artificial Sequence
  Synthetic oligonucleotide
ggcaggtgctacatcccggtacagttcttg

SEQ ID NO: 61535 - DNA, 30 bp, Artificial Sequence
  Synthetic oligonucleotide
ctaagcgggcagtgctaaatccagttcttg

SEQ ID NO: 61536 - DNA, 30 bp, Artificial Sequence
  Synthetic oligonucleotide
atgcccggcagtaggtggctgagtaagttg

SEQ ID NO: 61537 - DNA, 30 bp, Artificial Sequence
  Synthetic oligonucleotide
tcagcgaaggtcgaggaactctcagagttg

SEQ ID NO: 61538 - DNA, 29 bp, Artificial Sequence
  Synthetic oligonucleotide
ggaaactacagtcagattagggggagttg

SEQ ID NO: 61539 - DNA, 30 bp, Artificial Sequence
  Synthetic oligonucleotide
acacaggaaattatgcaaatgatctagttg

SEQ ID NO: 61540 - DNA, 30 bp, Artificial Sequence
  Synthetic oligonucleotide
acgcgtatctgtaatttacgagagtagttg

SEQ ID NO: 61541 - DNA, 30 bp, Artificial Sequence
  Synthetic oligonucleotide
cgtattcgattgcataaggagttgtagttg

SEQ ID NO: 61542 - DNA, 30 bp, Artificial Sequence
  Synthetic oligonucleotide
ttaccataccaagcactgagaaactcgttg

SEQ ID NO: 61543 - DNA, 30 bp, Artificial Sequence
  Synthetic oligonucleotide
catcctcgcgtttaatgctatctctcgttg

SEQ ID NO: 61544 - DNA, 30 bp, Artificial Sequence
  Synthetic oligonucleotide
tatcagcagcttaggtggcagaaaaggttg

SEQ ID NO: 61545 - DNA, 30 bp, Artificial Sequence
  Synthetic oligonucleotide
cggcgtgggcggtttatttgaacgaggttg

SEQ ID NO: 61546 - DNA, 30 bp, Artificial Sequence
  Synthetic oligonucleotide
cgattgtaggggtgaaagtccttacggttg

SEQ ID NO: 61547 - DNA, 30 bp, Artificial Sequence
  Synthetic oligonucleotide
gcaacgtaaagcactaagatcttgcggttg

SEQ ID NO: 61548 - DNA, 30 bp, Artificial Sequence
  Synthetic oligonucleotide
tcggctggtcacgtctacccgcttcggttg

SEQ ID NO: 61549 - DNA, 30 bp, Artificial Sequence
  Synthetic oligonucleotide
cagaactgtgaaccgacacaggaagggttg

SEQ ID NO: 61550 - DNA, 30 bp, Artificial Sequence
  Synthetic oligonucleotide
acgaattgtaggtcaagtcatgccgggttg

SEQ ID NO: 61551 - DNA, 30 bp, Artificial Sequence
  Synthetic oligonucleotide
ctacccaacagagaagacatcatcgggttg

SEQ ID NO: 61552 - DNA, 30 bp, Artificial Sequence
  Synthetic oligonucleotide
atgatacagggcgtcattcctcctgggttg

SEQ ID NO: 61553 - DNA, 30 bp, Artificial Sequence
  Synthetic oligonucleotide
atgggccgggcggaaaggtagcttgggttg

SEQ ID NO: 61554 - DNA, 30 bp, Artificial Sequence
  Synthetic oligonucleotide
cgttgctattatatcgatgcgaattggttg

SEQ ID NO: 61555 - DNA, 30 bp, Artificial Sequence
  Synthetic oligonucleotide
acctaaaattggatacgtgggttcatgttg

SEQ ID NO: 61556 - DNA, 30 bp, Artificial Sequence
  Synthetic oligonucleotide
gaacgctaaaagtgtaggtgtagattgttg

SEQ ID NO: 61557 - DNA, 30 bp, Artificial Sequence
  Synthetic oligonucleotide
cggcaccaccctggcaggcataccaatttg

SEQ ID NO: 61558 - DNA, 31 bp, Artificial Sequence
  Synthetic oligonucleotide
tggtaatgatagcactagagccacgaatttg

SEQ ID NO: 61559 - DNA, 30 bp, Artificial Sequence
  Synthetic oligonucleotide
acaaaactatctaggatcgaaattaatttg

SEQ ID NO: 61560 - DNA, 30 bp, Artificial Sequence
  Synthetic oligonucleotide
ttgagggaattcatcaagtacgagtatttg

SEQ ID NO: 61561 - DNA, 30 bp, Artificial Sequence
  Synthetic oligonucleotide
gaccgataattggaaaactgtcggactttg

SEQ ID NO: 61562 - DNA, 30 bp, Artificial Sequence
  Synthetic oligonucleotide
aaaggctggcttcctgaggggtgacctttg

SEQ ID NO: 61563 - DNA, 30 bp, Artificial Sequence
  Synthetic oligonucleotide
tggcgagacccgtatcgtgtatccggtttg

SEQ ID NO: 61564 - DNA, 30 bp, Artificial Sequence
  Synthetic oligonucleotide
aactgtggacgacaagagttgaccgttttg

SEQ ID NO: 61565 - DNA, 30 bp, Artificial Sequence
  Synthetic oligonucleotide
cttaacatgatggggggaccataggttttg

SEQ ID NO: 61566 - DNA, 30 bp, Artificial Sequence
  Synthetic oligonucleotide
actgtggagggacataaacccgctgttttg

SEQ ID NO: 61567 - DNA, 30 bp, Artificial Sequence
  Synthetic oligonucleotide
tcagaaggtgttctacagacccaacaaaat

SEQ ID NO: 61568 - DNA, 30 bp, Artificial Sequence
  Synthetic oligonucleotide
cgccacaaccgatacgggagtagagaaaat

SEQ ID NO: 61569 - DNA, 30 bp, Artificial Sequence
  Synthetic oligonucleotide
acggaaaatggactgccatatctataaaat

SEQ ID NO: 61570 - DNA, 30 bp, Artificial Sequence
  Synthetic oligonucleotide
gtgcagagagctgttgcgaacgtgtaaaat

SEQ ID NO: 61571 - DNA, 30 bp, Artificial Sequence
  Synthetic oligonucleotide
tccagaccgaacgagaggttatcaacaaat

SEQ ID NO: 61572 - DNA, 30 bp, Artificial Sequence
  Synthetic oligonucleotide
gcgaaagcttctgacgaagacacaccaaat

SEQ ID NO: 61573 - DNA, 30 bp, Artificial Sequence
  Synthetic oligonucleotide
ggcgacaggtatggatctgtcgtgccaaat

SEQ ID NO: 61574 - DNA, 30 bp, Artificial Sequence
  Synthetic oligonucleotide
cggatgagttattgaccatgtagaagaaat

SEQ ID NO: 61575 - DNA, 30 bp, Artificial Sequence
  Synthetic oligonucleotide
ctcgcaaaaacgtggggtcagtgtagaaat

SEQ ID NO: 61576 - DNA, 30 bp, Artificial Sequence
  Synthetic oligonucleotide
tcggggaaaaactgggcattgtttagaaat

SEQ ID NO: 61577 - DNA, 30 bp, Artificial Sequence
  Synthetic oligonucleotide
gtgcggacattcttacaaaccaaacgaaat

SEQ ID NO: 61578 - DNA, 30 bp, Artificial Sequence
  Synthetic oligonucleotide
gcactgccccgattacaaagtgtgcgaaat

SEQ ID NO: 61579 - DNA, 30 bp, Artificial Sequence
  Synthetic oligonucleotide
caggtacgcccgaaaatgattgctcgaaat

SEQ ID NO: 61580 - DNA, 30 bp, Artificial Sequence
  Synthetic oligonucleotide
cgaggaactatgtcaaagaaggaatgaaat

SEQ ID NO: 61581 - DNA, 30 bp, Artificial Sequence
  Synthetic oligonucleotide
agcaccacttgagacggttcgagatgaaat

SEQ ID NO: 61582 - DNA, 30 bp, Artificial Sequence
  Synthetic oligonucleotide
cacacgcaaaccgcgacgtagacctgaaat

SEQ ID NO: 61583 - DNA, 30 bp, Artificial Sequence
  Synthetic oligonucleotide
atcatacaaaaccaataagtatgctgaaat

SEQ ID NO: 61584 - DNA, 30 bp, Artificial Sequence
  Synthetic oligonucleotide
tagaccccttgattaagagtatgctgaaat

SEQ ID NO: 61585 - DNA, 30 bp, Artificial Sequence
  Synthetic oligonucleotide
gtaggatcgttcgagataggactggtaaat

SEQ ID NO: 61586 - DNA, 30 bp, Artificial Sequence
  Synthetic oligonucleotide
gccattatcgccaacagatagaaagacaat

SEQ ID NO: 61587 - DNA, 30 bp, Artificial Sequence
  Synthetic oligonucleotide
ggggcaggagatcgagtaaatagggacaat

SEQ ID NO: 61588 - DNA, 30 bp, Artificial Sequence
  Synthetic oligonucleotide
aacgtacacaattaacgtgccttggacaat

SEQ ID NO: 61589 - DNA, 30 bp, Artificial Sequence
  Synthetic oligonucleotide
tactgtagcatgagactgtagtgtgacaat

SEQ ID NO: 61590 - DNA, 30 bp, Artificial Sequence
  Synthetic oligonucleotide
gccgcggggaaagagtgtcatgcaaccaat

SEQ ID NO: 61591 - DNA, 30 bp, Artificial Sequence
  Synthetic oligonucleotide
taagcgagtgagttaccgcatcccagcaat

SEQ ID NO: 61592 - DNA, 29 bp, Artificial Sequence
  Synthetic oligonucleotide
tctagcagaacaaaaccatgacgagcaat

SEQ ID NO: 61593 - DNA, 30 bp, Artificial Sequence
  Synthetic oligonucleotide
gccagcgtaaaggcatatcacctgagcaat

SEQ ID NO: 61594 - DNA, 30 bp, Artificial Sequence
  Synthetic oligonucleotide
agaccaaggaaccgtaggcgagtgagcaat

SEQ ID NO: 61595 - DNA, 30 bp, Artificial Sequence
  Synthetic oligonucleotide
tgatatcacatcccacgataccggcgcaat

SEQ ID NO: 61596 - DNA, 30 bp, Artificial Sequence
  Synthetic oligonucleotide
aacggtagcggaagttctgccagcggcaat

SEQ ID NO: 61597 - DNA, 30 bp, Artificial Sequence
  Synthetic oligonucleotide
cctatcgggaccatatagaagaaaatcaat

SEQ ID NO: 61598 - DNA, 30 bp, Artificial Sequence
  Synthetic oligonucleotide
aggaagcgtaggatcatatctcatatcaat

SEQ ID NO: 61599 - DNA, 30 bp, Artificial Sequence
  Synthetic oligonucleotide
gaatacaaccgagggaacgtcagtatcaat

SEQ ID NO: 61600 - DNA, 30 bp, Artificial Sequence
  Synthetic oligonucleotide
gggtagaagcgaaagagggttgtgctcaat

SEQ ID NO: 61601 - DNA, 30 bp, Artificial Sequence
  Synthetic oligonucleotide
ggaagctacggaaaatggactaaattcaat

SEQ ID NO: 61602 - DNA, 30 bp, Artificial Sequence
  Synthetic oligonucleotide
aacacgagatcccacggtattatacagaat

SEQ ID NO: 61603 - DNA, 30 bp, Artificial Sequence
  Synthetic oligonucleotide
atgggaccgccggtgtgagcaccgcagaat

SEQ ID NO: 61604 - DNA, 30 bp, Artificial Sequence
  Synthetic oligonucleotide
cttcgatacaaccacgataaggctcagaat

SEQ ID NO: 61605 - DNA, 30 bp, Artificial Sequence
  Synthetic oligonucleotide
gttcgaagagaatatatggcacgtgagaat

SEQ ID NO: 61606 - DNA, 30 bp, Artificial Sequence
  Synthetic oligonucleotide
cggtactcagttagggccatggtaacgaat

SEQ ID NO: 61607 - DNA, 30 bp, Artificial Sequence
  Synthetic oligonucleotide
gaaaacacatcctccaagcgagatacgaat

SEQ ID NO: 61608 - DNA, 30 bp, Artificial Sequence
  Synthetic oligonucleotide
gaacagctcgacggtcacggaagcccgaat

SEQ ID NO: 61609 - DNA, 30 bp, Artificial Sequence
  Synthetic oligonucleotide
aacctcaagaaacattacaaaaggccgaat

SEQ ID NO: 61610 - DNA, 30 bp, Artificial Sequence
  Synthetic oligonucleotide
ctgtaaaggtgcggaatccgaaactcgaat

SEQ ID NO: 61611 - DNA, 30 bp, Artificial Sequence
  Synthetic oligonucleotide
gtcgttgagcggtaatggcatggaaggaat

SEQ ID NO: 61612 - DNA, 30 bp, Artificial Sequence
  Synthetic oligonucleotide
caagagctgagtccctctctcgtcaggaat

SEQ ID NO: 61613 - DNA, 30 bp, Artificial Sequence
  Synthetic oligonucleotide
agttaatacagaggcgagacagggaggaat

SEQ ID NO: 61614 - DNA, 30 bp, Artificial Sequence
  Synthetic oligonucleotide
agagtaatgcaatgagagtgatagcggaat

SEQ ID NO: 61615 - DNA, 30 bp, Artificial Sequence
  Synthetic oligonucleotide
cggaatggaaaccgtatccataaggggaat

SEQ ID NO: 61616 - DNA, 30 bp, Artificial Sequence
  Synthetic oligonucleotide
ggccttcaggtcaccacatcaaaatggaat

SEQ ID NO: 61617 - DNA, 31 bp, Artificial Sequence
  Synthetic oligonucleotide
tggccttgggaacacccagactcaaaataat

SEQ ID NO: 61618 - DNA, 30 bp, Artificial Sequence
  Synthetic oligonucleotide
ctagtctactatggagtgagcccgaataat

SEQ ID NO: 61619 - DNA, 30 bp, Artificial Sequence
  Synthetic oligonucleotide
gacactaaggatggttgaactcgacataat

SEQ ID NO: 61620 - DNA, 30 bp, Artificial Sequence
  Synthetic oligonucleotide
actacatgacaacgttattggggacataat

SEQ ID NO: 61621 - DNA, 30 bp, Artificial Sequence
  Synthetic oligonucleotide
tcacacaggagaatatttggtggccataat

SEQ ID NO: 61622 - DNA, 30 bp, Artificial Sequence
  Synthetic oligonucleotide
aaaggagaggttgtcacccacattcataat

SEQ ID NO: 61623 - DNA, 30 bp, Artificial Sequence
  Synthetic oligonucleotide
aagattgcgcaagagtgttatcaagataat

SEQ ID NO: 61624 - DNA, 30 bp, Artificial Sequence
  Synthetic oligonucleotide
aatgtacgagttatagatagagagcctaat

SEQ ID NO: 61625 - DNA, 30 bp, Artificial Sequence
  Synthetic oligonucleotide
taggagtgttcaggagtagcgaacgctaat

SEQ ID NO: 61626 - DNA, 30 bp, Artificial Sequence
  Synthetic oligonucleotide
taaggattaagtagcaatttaggacttaat

SEQ ID NO: 61627 - DNA, 30 bp, Artificial Sequence
  Synthetic oligonucleotide
ggggccgatccggcgacaaatgcgcttaat

SEQ ID NO: 61628 - DNA, 30 bp, Artificial Sequence
  Synthetic oligonucleotide
ccagataacgagacagcgaccagcgttaat

SEQ ID NO: 61629 - DNA, 30 bp, Artificial Sequence
  Synthetic oligonucleotide
cgggaaaaatacagtggatgtgggtttaat

SEQ ID NO: 61630 - DNA, 30 bp, Artificial Sequence
  Synthetic oligonucleotide
atgggatggatagcatgtgcgtggtttaat

SEQ ID NO: 61631 - DNA, 30 bp, Artificial Sequence
  Synthetic oligonucleotide
cgacctacggtatcgtttgaacacaaacat

SEQ ID NO: 61632 - DNA, 30 bp, Artificial Sequence
  Synthetic oligonucleotide
tcaggcgaaacgggaagttgacggaaacat

SEQ ID NO: 61633 - DNA, 30 bp, Artificial Sequence
  Synthetic oligonucleotide
gactcggcggagcacgggattcggaaacat

SEQ ID NO: 61634 - DNA, 30 bp, Artificial Sequence
  Synthetic oligonucleotide
ccggaacgcaactgatcgaagcgtaaacat

SEQ ID NO: 61635 - DNA, 30 bp, Artificial Sequence
  Synthetic oligonucleotide
tcgtacttatggtgagagtagttacaacat

SEQ ID NO: 61636 - DNA, 30 bp, Artificial Sequence
  Synthetic oligonucleotide
aagaaagagtatggggtccaaaaccaacat

SEQ ID NO: 61637 - DNA, 30 bp, Artificial Sequence
  Synthetic oligonucleotide
cccggaacgaagatcaataacattcaacat

SEQ ID NO: 61638 - DNA, 30 bp, Artificial Sequence
  Synthetic oligonucleotide
gtaagaaatcaaggacataccgtctaacat

SEQ ID NO: 61639 - DNA, 30 bp, Artificial Sequence
  Synthetic oligonucleotide
tgccaccgggtatgagcacgtgcgacacat

SEQ ID NO: 61640 - DNA, 30 bp, Artificial Sequence
  Synthetic oligonucleotide
caacccaagtggtcattggagcggccacat

SEQ ID NO: 61641 - DNA, 30 bp, Artificial Sequence
  Synthetic oligonucleotide
ggggtagataaagcagattgtacagcacat

SEQ ID NO: 61642 - DNA, 30 bp, Artificial Sequence
  Synthetic oligonucleotide
acttaaagtatggaaatgtcagacagacat

SEQ ID NO: 61643 - DNA, 30 bp, Artificial Sequence
  Synthetic oligonucleotide
caatcaaaataccgcgcagaatctggacat

SEQ ID NO: 61644 - DNA, 30 bp, Artificial Sequence
  Synthetic oligonucleotide
ggagcacataacgccacatggaatatacat

SEQ ID NO: 61645 - DNA, 30 bp, Artificial Sequence
  Synthetic oligonucleotide
acgcgatacagtcaacgctattctctacat

SEQ ID NO: 61646 - DNA, 30 bp, Artificial Sequence
  Synthetic oligonucleotide
ctatgacagaggtatggggtcaaagtacat

SEQ ID NO: 61647 - DNA, 30 bp, Artificial Sequence
  Synthetic oligonucleotide
ccggacgtaaaaggtcacaatcgcttacat

SEQ ID NO: 61648 - DNA, 30 bp, Artificial Sequence
  Synthetic oligonucleotide
agagcgaaacgcactaactagtagttacat

SEQ ID NO: 61649 - DNA, 30 bp, Artificial Sequence
  Synthetic oligonucleotide
ccagagagcacaatagacgttgtacaccat

SEQ ID NO: 61650 - DNA, 30 bp, Artificial Sequence
  Synthetic oligonucleotide
gttgcggaataagcctgaagtgtccaccat

SEQ ID NO: 61651 - DNA, 30 bp, Artificial Sequence
  Synthetic oligonucleotide
tgtgtaaatactaattcgatgtgataccat

SEQ ID NO: 61652 - DNA, 30 bp, Artificial Sequence
  Synthetic oligonucleotide
gcttcgcaggcgcgcgtcactgagtaccat

SEQ ID NO: 61653 - DNA, 30 bp, Artificial Sequence
  Synthetic oligonucleotide
gggttcctagtaaccaaacgtgcgtaccat

SEQ ID NO: 61654 - DNA, 30 bp, Artificial Sequence
  Synthetic oligonucleotide
ggcaagctcgagtcactgcatgccacccat

SEQ ID NO: 61655 - DNA, 30 bp, Artificial Sequence
  Synthetic oligonucleotide
atgcgaaccaggactggtatgtgtacccat

SEQ ID NO: 61656 - DNA, 30 bp, Artificial Sequence
  Synthetic oligonucleotide
tgataacctctaagatggcaaacctcccat

SEQ ID NO: 61657 - DNA, 30 bp, Artificial Sequence
  Synthetic oligonucleotide
taatctacagacagagccgaagaacgccat

SEQ ID NO: 61658 - DNA, 30 bp, Artificial Sequence
  Synthetic oligonucleotide
gcaatctagggtgcgatccagacaatccat

SEQ ID NO: 61659 - DNA, 30 bp, Artificial Sequence
  Synthetic oligonucleotide
ccgggcacggctccaacctgtaagatccat

SEQ ID NO: 61660 - DNA, 30 bp, Artificial Sequence
  Synthetic oligonucleotide
tgccgcaaggagcgggtaggtcaaaagcat

SEQ ID NO: 61661 - DNA, 30 bp, Artificial Sequence
  Synthetic oligonucleotide
ccgagagatcggtctgaattacaggagcat

SEQ ID NO: 61662 - DNA, 30 bp, Artificial Sequence
  Synthetic oligonucleotide
tgggagtattcggaccatatgtgttagcat

SEQ ID NO: 61663 - DNA, 31 bp, Artificial Sequence
  Synthetic oligonucleotide
tccttatatgagaaacggagtgcgcacgcat

SEQ ID NO: 61664 - DNA, 30 bp, Artificial Sequence
  Synthetic oligonucleotide
aagaggtgtgacttgaggggtcgatcgcat

SEQ ID NO: 61665 - DNA, 30 bp, Artificial Sequence
  Synthetic oligonucleotide
tggcccgatcaaggagacacgttatcgcat

SEQ ID NO: 61666 - DNA, 30 bp, Artificial Sequence
  Synthetic oligonucleotide
gaacgttaaatgtgacgtgtcaggaggcat

SEQ ID NO: 61667 - DNA, 30 bp, Artificial Sequence
  Synthetic oligonucleotide
ggcacgattcactgtagcactactcggcat

SEQ ID NO: 61668 - DNA, 30 bp, Artificial Sequence
  Synthetic oligonucleotide
atgagaactgcgggatcgctagtggggcat

SEQ ID NO: 61669 - DNA, 30 bp, Artificial Sequence
  Synthetic oligonucleotide
gagaaccgctaataatgagaaggtgggcat

SEQ ID NO: 61670 - DNA, 30 bp, Artificial Sequence
  Synthetic oligonucleotide
cgttacgccttccgacggggacttgggcat

SEQ ID NO: 61671 - DNA, 30 bp, Artificial Sequence
  Synthetic oligonucleotide
atgcaggtgaacctagctatgtggatgcat

SEQ ID NO: 61672 - DNA, 30 bp, Artificial Sequence
  Synthetic oligonucleotide
acgtcggaaatgtgcatcaagagggtgcat

SEQ ID NO: 61673 - DNA, 30 bp, Artificial Sequence
  Synthetic oligonucleotide
tcgagtgtagcggataaactttagttgcat

SEQ ID NO: 61674 - DNA, 30 bp, Artificial Sequence
  Synthetic oligonucleotide
gtcgcgggtctgaacatttcgactaatcat

SEQ ID NO: 61675 - DNA, 30 bp, Artificial Sequence
  Synthetic oligonucleotide
aatggatgggggatgggcatatgagatcat

SEQ ID NO: 61676 - DNA, 30 bp, Artificial Sequence
  Synthetic oligonucleotide
tagagaggggacgacccgacacacgatcat

SEQ ID NO: 61677 - DNA, 30 bp, Artificial Sequence
  Synthetic oligonucleotide
ggacgcgtttcaccacacaaaccttatcat

SEQ ID NO: 61678 - DNA, 30 bp, Artificial Sequence
  Synthetic oligonucleotide
atacgctacccatcgcccgactccactcat

SEQ ID NO: 61679 - DNA, 30 bp, Artificial Sequence
  Synthetic oligonucleotide
tagcgtctcgtacgggtaggctgacctcat

SEQ ID NO: 61680 - DNA, 30 bp, Artificial Sequence
  Synthetic oligonucleotide
ggctgtaacgactatcaaagcgtgcctcat

SEQ ID NO: 61681 - DNA, 30 bp, Artificial Sequence
  Synthetic oligonucleotide
cacaagtcctatataaaacttatggctcat

SEQ ID NO: 61682 - DNA, 30 bp, Artificial Sequence
  Synthetic oligonucleotide
agatagaaagaaggcctatagacaagtcat

SEQ ID NO: 61683 - DNA, 30 bp, Artificial Sequence
  Synthetic oligonucleotide
ggagagaggcatgtgtggaggtagcgtcat

SEQ ID NO: 61684 - DNA, 30 bp, Artificial Sequence
  Synthetic oligonucleotide
agtgatcaaccaaagaagtaacaaggtcat

SEQ ID NO: 61685 - DNA, 30 bp, Artificial Sequence
  Synthetic oligonucleotide
cacttacgggaattttcgggatactgtcat

SEQ ID NO: 61686 - DNA, 30 bp, Artificial Sequence
  Synthetic oligonucleotide
aggtaaagtctggtgatagtgacacttcat

SEQ ID NO: 61687 - DNA, 30 bp, Artificial Sequence
  Synthetic oligonucleotide
ataaggtgcgtggcgctgagtgaaaaagat

SEQ ID NO: 61688 - DNA, 30 bp, Artificial Sequence
  Synthetic oligonucleotide
gagcgggttcgggcatcattggacaaagat

SEQ ID NO: 61689 - DNA, 30 bp, Artificial Sequence
  Synthetic oligonucleotide
catataggaccgaaacaccgcagccaagat

SEQ ID NO: 61690 - DNA, 30 bp, Artificial Sequence
  Synthetic oligonucleotide
aggatgagcggtggttatctgatccaagat

SEQ ID NO: 61691 - DNA, 30 bp, Artificial Sequence
  Synthetic oligonucleotide
tagtaccagatggtgaaagtaggataagat

SEQ ID NO: 61692 - DNA, 30 bp, Artificial Sequence
  Synthetic oligonucleotide
agtccggtaaaatcccaacggatttaagat

SEQ ID NO: 61693 - DNA, 30 bp, Artificial Sequence
  Synthetic oligonucleotide
agtagccggaatcatataaaggtgacagat

SEQ ID NO: 61694 - DNA, 30 bp, Artificial Sequence
  Synthetic oligonucleotide
gtaagatccggaggtcgtcttgtgacagat

SEQ ID NO: 61695 - DNA, 30 bp, Artificial Sequence
  Synthetic oligonucleotide
agcctataccggctcacgggcgacccagat

SEQ ID NO: 61696 - DNA, 30 bp, Artificial Sequence
  Synthetic oligonucleotide
attcggctgttggagaatggtcagccagat

SEQ ID NO: 61697 - DNA, 30 bp, Artificial Sequence
  Synthetic oligonucleotide
tacaccaaaagtcaatatcgtctgccagat

SEQ ID NO: 61698 - DNA, 30 bp, Artificial Sequence
  Synthetic oligonucleotide
attggggactattatactcagctagcagat

SEQ ID NO: 61699 - DNA, 30 bp, Artificial Sequence
  Synthetic oligonucleotide
ttgagaagtgatacagatacagtagcagat

SEQ ID NO: 61700 - DNA, 30 bp, Artificial Sequence
  Synthetic oligonucleotide
agggggattctggctaagtttagatcagat

SEQ ID NO: 61701 - DNA, 30 bp, Artificial Sequence
  Synthetic oligonucleotide
tacgtccgtgaaaccaacttagagtcagat

SEQ ID NO: 61702 - DNA, 30 bp, Artificial Sequence
  Synthetic oligonucleotide
aacgtgctatagactctgagaaggtcagat

SEQ ID NO: 61703 - DNA, 30 bp, Artificial Sequence
  Synthetic oligonucleotide
ctagtaggagtaaatggagagaggagagat

SEQ ID NO: 61704 - DNA, 30 bp, Artificial Sequence
  Synthetic oligonucleotide
tagacagacttgaaggtagggaggagagat

SEQ ID NO: 61705 - DNA, 31 bp, Artificial Sequence
  Synthetic oligonucleotide
cgctcaaatatgggtggctactggtagagat

SEQ ID NO: 61706 - DNA, 30 bp, Artificial Sequence
  Synthetic oligonucleotide
cgagtagcggttaagaagtcgctacgagat

SEQ ID NO: 61707 - DNA, 30 bp, Artificial Sequence
  Synthetic oligonucleotide
agggacttctggatccgggagtgcggagat

SEQ ID NO: 61708 - DNA, 30 bp, Artificial Sequence
  Synthetic oligonucleotide
tgagaagtggatcaaggtatccatggagat

SEQ ID NO: 61709 - DNA, 30 bp, Artificial Sequence
  Synthetic oligonucleotide
gtgccaagaacgattgggagagcttgagat

SEQ ID NO: 61710 - DNA, 30 bp, Artificial Sequence
  Synthetic oligonucleotide
tgggcagcaggagcgcaatcgtcaatagat

SEQ ID NO: 61711 - DNA, 30 bp, Artificial Sequence
  Synthetic oligonucleotide
gcgttgaccggatggacttagatagtagat

SEQ ID NO: 61712 - DNA, 30 bp, Artificial Sequence
  Synthetic oligonucleotide
ggaaagcgctagagagggaataatttagat

SEQ ID NO: 61713 - DNA, 30 bp, Artificial Sequence
  Synthetic oligonucleotide
aacgacccccacgagggccaaaataacgat

SEQ ID NO: 61714 - DNA, 30 bp, Artificial Sequence
  Synthetic oligonucleotide
tgaaatctactgagaaccgcgcataacgat

SEQ ID NO: 61715 - DNA, 30 bp, Artificial Sequence
  Synthetic oligonucleotide
ataaaggaatcaaggtgaacacacgacgat

SEQ ID NO: 61716 - DNA, 30 bp, Artificial Sequence
  Synthetic oligonucleotide
acggaaccaataaggacgctccttaccgat

SEQ ID NO: 61717 - DNA, 30 bp, Artificial Sequence
  Synthetic oligonucleotide
gtacgaggattggctgacagttagcccgat

SEQ ID NO: 61718 - DNA, 30 bp, Artificial Sequence
  Synthetic oligonucleotide
gcagacatagcatttctaagtgcgcgcgat

SEQ ID NO: 61719 - DNA, 30 bp, Artificial Sequence
  Synthetic oligonucleotide
accttgcctgcgatagagggtacctgcgat

SEQ ID NO: 61720 - DNA, 30 bp, Artificial Sequence
  Synthetic oligonucleotide
cccgtagtagaggaccggaaggcaatcgat

SEQ ID NO: 61721 - DNA, 30 bp, Artificial Sequence
  Synthetic oligonucleotide
tatggaagcatggtgctctgtgatctcgat

SEQ ID NO: 61722 - DNA, 30 bp, Artificial Sequence
  Synthetic oligonucleotide
cgtccacatatcatgatagcgtaagtcgat

SEQ ID NO: 61723 - DNA, 28 bp, Artificial Sequence
  Synthetic oligonucleotide
tcagggtatgtgtagatatagggtcgat

SEQ ID NO: 61724 - DNA, 30 bp, Artificial Sequence
  Synthetic oligonucleotide
gggagatgtagcatcttacgttacaaggat

SEQ ID NO: 61725 - DNA, 30 bp, Artificial Sequence
  Synthetic oligonucleotide
acgtttgtgtccgacaattgattccaggat

SEQ ID NO: 61726 - DNA, 30 bp, Artificial Sequence
  Synthetic oligonucleotide
gtaagtctgggcgcgggccaatgagaggat

SEQ ID NO: 61727 - DNA, 30 bp, Artificial Sequence
  Synthetic oligonucleotide
gcagcaagaagtaacgccaataacgaggat

SEQ ID NO: 61728 - DNA, 30 bp, Artificial Sequence
  Synthetic oligonucleotide
gtctggatcgtcccagcgtaggactaggat

SEQ ID NO: 61729 - DNA, 30 bp, Artificial Sequence
  Synthetic oligonucleotide
cgttgcgtggaaatgcaccaggctgcggat

SEQ ID NO: 61730 - DNA, 30 bp, Artificial Sequence
  Synthetic oligonucleotide
ccagatcaaagggcggaacggcaaggggat

SEQ ID NO: 61731 - DNA, 30 bp, Artificial Sequence
  Synthetic oligonucleotide
tcgatctaagtggatgacatcgtaggggat

SEQ ID NO: 61732 - DNA, 30 bp, Artificial Sequence
  Synthetic oligonucleotide
cgtaacgattaagtagttgaattttgggat

SEQ ID NO: 61733 - DNA, 30 bp, Artificial Sequence
  Synthetic oligonucleotide
ccggacgatagataggtcttacccatggat

SEQ ID NO: 61734 - DNA, 30 bp, Artificial Sequence
  Synthetic oligonucleotide
tctcgaggatagagctttgagccactggat

SEQ ID NO: 61735 - DNA, 30 bp, Artificial Sequence
  Synthetic oligonucleotide
ggcaagtgcgatagattcttgggaaatgat

SEQ ID NO: 61736 - DNA, 30 bp, Artificial Sequence
  Synthetic oligonucleotide
ctggagtaatgatggtaaatagtgaatgat

SEQ ID NO: 61737 - DNA, 30 bp, Artificial Sequence
  Synthetic oligonucleotide
gaaaggtgtcgcaccgcgtgagaagatgat

SEQ ID NO: 61738 - DNA, 30 bp, Artificial Sequence
  Synthetic oligonucleotide
cagagggttaaacccttgcaacgagatgat

SEQ ID NO: 61739 - DNA, 31 bp, Artificial Sequence
  Synthetic oligonucleotide
gtggtactccttcagaaaaaggctggatgat

SEQ ID NO: 61740 - DNA, 30 bp, Artificial Sequence
  Synthetic oligonucleotide
aacgcaccacgtccccaagaatagtatgat

SEQ ID NO: 61741 - DNA, 30 bp, Artificial Sequence
  Synthetic oligonucleotide
ggggaggccatcctattgaaacaatctgat

SEQ ID NO: 61742 - DNA, 30 bp, Artificial Sequence
  Synthetic oligonucleotide
tacgaacgatacaaagcggttaagtctgat

SEQ ID NO: 61743 - DNA, 30 bp, Artificial Sequence
  Synthetic oligonucleotide
cgtgtctggggtccatcaataaattctgat

SEQ ID NO: 61744 - DNA, 30 bp, Artificial Sequence
  Synthetic oligonucleotide
ggctggcgtaactcggtccataacagtgat

SEQ ID NO: 61745 - DNA, 30 bp, Artificial Sequence
  Synthetic oligonucleotide
acgtgaggctcgagtaaaatacgcagtgat

SEQ ID NO: 61746 - DNA, 30 bp, Artificial Sequence
  Synthetic oligonucleotide
tgggagaataatactgcaatgaagagtgat

SEQ ID NO: 61747 - DNA, 30 bp, Artificial Sequence
  Synthetic oligonucleotide
cgagaaaggtgggcgcaatcctagagtgat

SEQ ID NO: 61748 - DNA, 30 bp, Artificial Sequence
  Synthetic oligonucleotide
tacagctcatagcccatcatacagcgtgat

SEQ ID NO: 61749 - DNA, 30 bp, Artificial Sequence
  Synthetic oligonucleotide
agcttaaccatcgatgcgtagaagggtgat

SEQ ID NO: 61750 - DNA, 30 bp, Artificial Sequence
  Synthetic oligonucleotide
tcaactcgccagcaagcataacgatgtgat

SEQ ID NO: 61751 - DNA, 30 bp, Artificial Sequence
  Synthetic oligonucleotide
ggcgcagcgggaggtgtgcgcgtggttgat

SEQ ID NO: 61752 - DNA, 30 bp, Artificial Sequence
  Synthetic oligonucleotide
gaaggtcgaaaaagcgttatctaatttgat

SEQ ID NO: 61753 - DNA, 30 bp, Artificial Sequence
  Synthetic oligonucleotide
tggcgtggaatcatagtagtagcaaaatat

SEQ ID NO: 61754 - DNA, 30 bp, Artificial Sequence
  Synthetic oligonucleotide
ttacgaaatcgaatccatggtcagaaatat

SEQ ID NO: 61755 - DNA, 30 bp, Artificial Sequence
  Synthetic oligonucleotide
tagtgagacatagaagaactaccgaaatat

SEQ ID NO: 61756 - DNA, 30 bp, Artificial Sequence
  Synthetic oligonucleotide
gggcccagcggatgatagctgagtcaatat

SEQ ID NO: 61757 - DNA, 30 bp, Artificial Sequence
  Synthetic oligonucleotide
tcgcgttaacgcggtgagtggtcgtaatat

SEQ ID NO: 61758 - DNA, 30 bp, Artificial Sequence
  Synthetic oligonucleotide
taagataccgcatgaaagacggccacatat

SEQ ID NO: 61759 - DNA, 30 bp, Artificial Sequence
  Synthetic oligonucleotide
acggtgggaattgagcaggtgaagacatat

SEQ ID NO: 61760 - DNA, 30 bp, Artificial Sequence
  Synthetic oligonucleotide
tgagacgcacccatgaatagggacgcatat

SEQ ID NO: 61761 - DNA, 30 bp, Artificial Sequence
  Synthetic oligonucleotide
gcgaggtctcgttaactaaagtatgcatat

SEQ ID NO: 61762 - DNA, 30 bp, Artificial Sequence
  Synthetic oligonucleotide
acgctgaaccggtgtcattagtgatcatat

SEQ ID NO: 61763 - DNA, 30 bp, Artificial Sequence
  Synthetic oligonucleotide
ccaagactactacgaatctatagtcgatat

SEQ ID NO: 61764 - DNA, 30 bp, Artificial Sequence
  Synthetic oligonucleotide
ggatatggtaaataaatcagattgggatat

SEQ ID NO: 61765 - DNA, 30 bp, Artificial Sequence
  Synthetic oligonucleotide
ccaagacaggaaacaagcatgccatgatat

SEQ ID NO: 61766 - DNA, 30 bp, Artificial Sequence
  Synthetic oligonucleotide
ggtgggctccgaagtggtcagagatgatat

SEQ ID NO: 61767 - DNA, 30 bp, Artificial Sequence
  Synthetic oligonucleotide
ggataccaatacccgtaataaggatgatat

SEQ ID NO: 61768 - DNA, 30 bp, Artificial Sequence
  Synthetic oligonucleotide
cctaccatgatatggcgacaagcgtgatat

SEQ ID NO: 61769 - DNA, 30 bp, Artificial Sequence
  Synthetic oligonucleotide
tcgactaccagtaagttcaacaacatatat

SEQ ID NO: 61770 - DNA, 30 bp, Artificial Sequence
  Synthetic oligonucleotide
gactgaaacgtgcctgtataccgcgtatat

SEQ ID NO: 61771 - DNA, 30 bp, Artificial Sequence
  Synthetic oligonucleotide
gccactaataaggagtatacgtgaaactat

SEQ ID NO: 61772 - DNA, 30 bp, Artificial Sequence
  Synthetic oligonucleotide
gcgagaccgatgggggggccaacgcactat

SEQ ID NO: 61773 - DNA, 30 bp, Artificial Sequence
  Synthetic oligonucleotide
gagggcgaacgtatgagtgaaagctactat

SEQ ID NO: 61774 - DNA, 30 bp, Artificial Sequence
  Synthetic oligonucleotide
ttgttgtgttctctttttgtgtttacctat

SEQ ID NO: 61775 - DNA, 30 bp, Artificial Sequence
  Synthetic oligonucleotide
ccgagggccgtatgctgtgataagggctat

SEQ ID NO: 61776 - DNA, 30 bp, Artificial Sequence
  Synthetic oligonucleotide
caagtaccaattaacggatggaacatctat

SEQ ID NO: 61777 - DNA, 30 bp, Artificial Sequence
  Synthetic oligonucleotide
cgcatagcgttcgactaagttaggatctat

SEQ ID NO: 61778 - DNA, 30 bp, Artificial Sequence
  Synthetic oligonucleotide
gaccataaatgacatgtgcgcctgttctat

SEQ ID NO: 61779 - DNA, 30 bp, Artificial Sequence
  Synthetic oligonucleotide
cgtgatataacatagtataggttaaagtat

SEQ ID NO: 61780 - DNA, 30 bp, Artificial Sequence
  Synthetic oligonucleotide
catccaaggaacgcaaagtgactctagtat

SEQ ID NO: 61781 - DNA, 30 bp, Artificial Sequence
  Synthetic oligonucleotide
atcattccccaagggatagtccagtagtat

SEQ ID NO: 61782 - DNA, 30 bp, Artificial Sequence
  Synthetic oligonucleotide
aacgggccaatgaccgtcataagtacgtat

SEQ ID NO: 61783 - DNA, 30 bp, Artificial Sequence
  Synthetic oligonucleotide
cgagccgtcttacctcactagcaaccgtat

SEQ ID NO: 61784 - DNA, 30 bp, Artificial Sequence
  Synthetic oligonucleotide
agcaacagttatcgacaccgaacaccgtat

SEQ ID NO: 61785 - DNA, 30 bp, Artificial Sequence
  Synthetic oligonucleotide
taggaggtgcaaagcggcgagaatgcgtat

SEQ ID NO: 61786 - DNA, 30 bp, Artificial Sequence
  Synthetic oligonucleotide
ctgcgtggatagagatatgtaatccggtat

SEQ ID NO: 61787 - DNA, 30 bp, Artificial Sequence
  Synthetic oligonucleotide
cgtaaagagctagtcatcgttatgatgtat

SEQ ID NO: 61788 - DNA, 30 bp, Artificial Sequence
  Synthetic oligonucleotide
accagatgggattgcgatgccgacctgtat

SEQ ID NO: 61789 - DNA, 30 bp, Artificial Sequence
  Synthetic oligonucleotide
acgctaacgtaagcatatgtgccagtgtat

SEQ ID NO: 61790 - DNA, 30 bp, Artificial Sequence
  Synthetic oligonucleotide
tcgcggattcagagcattggtctagtgtat

SEQ ID NO: 61791 - DNA, 30 bp, Artificial Sequence
  Synthetic oligonucleotide
caggataccagaagaagattgcatgtgtat

SEQ ID NO: 61792 - DNA, 30 bp, Artificial Sequence
  Synthetic oligonucleotide
tcttagctgttgtgttttcctcttgtgtat

SEQ ID NO: 61793 - DNA, 30 bp, Artificial Sequence
  Synthetic oligonucleotide
ggcccaggggagtctagattggacttgtat

SEQ ID NO: 61794 - DNA, 30 bp, Artificial Sequence
  Synthetic oligonucleotide
agtctcgggggagccagcagagcacattat

SEQ ID NO: 61795 - DNA, 30 bp, Artificial Sequence
  Synthetic oligonucleotide
atcggaaccatcccgagtgcccgacattat

SEQ ID NO: 61796 - DNA, 30 bp, Artificial Sequence
  Synthetic oligonucleotide
cgatcatcaaatagcaatgctggacgttat

SEQ ID NO: 61797 - DNA, 30 bp, Artificial Sequence
  Synthetic oligonucleotide
tcgagcaaccttgaagtggcattgggttat

SEQ ID NO: 61798 - DNA, 30 bp, Artificial Sequence
  Synthetic oligonucleotide
cgagtaccgaatgattttaacgaacaaact

SEQ ID NO: 61799 - DNA, 30 bp, Artificial Sequence
  Synthetic oligonucleotide
acagtagctgataacctatccacacaaact

SEQ ID NO: 61800 - DNA, 30 bp, Artificial Sequence
  Synthetic oligonucleotide
cgggatgcacctaaaccgactccgcaaact

SEQ ID NO: 61801 - DNA, 30 bp, Artificial Sequence
  Synthetic oligonucleotide
tacggcccacaaggaaataatgtggaaact

SEQ ID NO: 61802 - DNA, 30 bp, Artificial Sequence
  Synthetic oligonucleotide
acttcagggacatatgggatgacaacaact

SEQ ID NO: 61803 - DNA, 30 bp, Artificial Sequence
  Synthetic oligonucleotide
ttcagcgggggactgaggtgctagccaact

SEQ ID NO: 61804 - DNA, 30 bp, Artificial Sequence
  Synthetic oligonucleotide
gtaacgtggactgggcgtgcgcgtccaact

SEQ ID NO: 61805 - DNA, 30 bp, Artificial Sequence
  Synthetic oligonucleotide
tcctgaacagtgaataatccaatagcaact

SEQ ID NO: 61806 - DNA, 30 bp, Artificial Sequence
  Synthetic oligonucleotide
cggcacagagacgtgcctagcaagtcaact

SEQ ID NO: 61807 - DNA, 30 bp, Artificial Sequence
  Synthetic oligonucleotide
cctattggaggcggaggccacatacgaact

SEQ ID NO: 61808 - DNA, 30 bp, Artificial Sequence
  Synthetic oligonucleotide
aacccgcgaggtggagctgaactgcgaact

SEQ ID NO: 61809 - DNA, 30 bp, Artificial Sequence
  Synthetic oligonucleotide
ataaacatcgccaaaaccatgtagtgaact

SEQ ID NO: 61810 - DNA, 30 bp, Artificial Sequence
  Synthetic oligonucleotide
aggtgtatccgttacaggtgacagaacact

SEQ ID NO: 61811 - DNA, 30 bp, Artificial Sequence
  Synthetic oligonucleotide
ggactagcgcaatctaagactcggaacact

SEQ ID NO: 61812 - DNA, 30 bp, Artificial Sequence
  Synthetic oligonucleotide
cgatatgcgagtaggacgatacagcacact

SEQ ID NO: 61813 - DNA, 30 bp, Artificial Sequence
  Synthetic oligonucleotide
ttaatcaggcggacaccgaaacttaccact

SEQ ID NO: 61814 - DNA, 30 bp, Artificial Sequence
  Synthetic oligonucleotide
taggttagtccgagttggaggacaagcact

SEQ ID NO: 61815 - DNA, 30 bp, Artificial Sequence
  Synthetic oligonucleotide
tcccgaaatcccaggacgaccggaagcact

SEQ ID NO: 61816 - DNA, 30 bp, Artificial Sequence
  Synthetic oligonucleotide
gtatggagaccatatgtgcaggtaagcact

SEQ ID NO: 61817 - DNA, 30 bp, Artificial Sequence
  Synthetic oligonucleotide
gtcaaagtacatctgaatcaaatgagcact

SEQ ID NO: 61818 - DNA, 30 bp, Artificial Sequence
  Synthetic oligonucleotide
ttgaccacgcccggaatcctacatagcact

SEQ ID NO: 61819 - DNA, 30 bp, Artificial Sequence
  Synthetic oligonucleotide
cgcccagcggggccgtccttgggtagcact

SEQ ID NO: 61820 - DNA, 30 bp, Artificial Sequence
  Synthetic oligonucleotide
gaccatcaaaggttggaagaatcccgcact

SEQ ID NO: 61821 - DNA, 30 bp, Artificial Sequence
  Synthetic oligonucleotide
cggccagctactacgagacagaacatcact

SEQ ID NO: 61822 - DNA, 30 bp, Artificial Sequence
  Synthetic oligonucleotide
tacggggaatccatctgcattccgatcact

SEQ ID NO: 61823 - DNA, 30 bp, Artificial Sequence
  Synthetic oligonucleotide
cgtggaagacggataggataggcggtcact

SEQ ID NO: 61824 - DNA, 30 bp, Artificial Sequence
  Synthetic oligonucleotide
catcaaaacccaaatgaaacctgtgtcact

SEQ ID NO: 61825 - DNA, 30 bp, Artificial Sequence
  Synthetic oligonucleotide
agccggactaacaaagccctaagacagact

SEQ ID NO: 61826 - DNA, 30 bp, Artificial Sequence
  Synthetic oligonucleotide
tagccagcaattaacaggtagttcgagact

SEQ ID NO: 61827 - DNA, 30 bp, Artificial Sequence
  Synthetic oligonucleotide
atccgagatactcaggtcttaagcccgact

SEQ ID NO: 61828 - DNA, 30 bp, Artificial Sequence
  Synthetic oligonucleotide
aagaagaagtcgcgtaggctgcggccgact

SEQ ID NO: 61829 - DNA, 30 bp, Artificial Sequence
  Synthetic oligonucleotide
atcgaatgccctatgtcaggtcaagcgact

SEQ ID NO: 61830 - DNA, 30 bp, Artificial Sequence
  Synthetic oligonucleotide
tgataacaggagaccaataccctgtcgact

SEQ ID NO: 61831 - DNA, 30 bp, Artificial Sequence
  Synthetic oligonucleotide
ggccaatcgcggttactaaaaataaggact

SEQ ID NO: 61832 - DNA, 30 bp, Artificial Sequence
  Synthetic oligonucleotide
atgcgtccaaacggccacgaatcggggact

SEQ ID NO: 61833 - DNA, 30 bp, Artificial Sequence
  Synthetic oligonucleotide
aagtaaagggagggtaccgcgacatggact

SEQ ID NO: 61834 - DNA, 30 bp, Artificial Sequence
  Synthetic oligonucleotide
gcatagatagaataagtgtggcagatgact

SEQ ID NO: 61835 - DNA, 30 bp, Artificial Sequence
  Synthetic oligonucleotide
gcgccaaagtttgtaacagactgaaatact

SEQ ID NO: 61836 - DNA, 30 bp, Artificial Sequence
  Synthetic oligonucleotide
aggtcgcaacgtgaacgctgacccaatact

SEQ ID NO: 61837 - DNA, 30 bp, Artificial Sequence
  Synthetic oligonucleotide
agagacggggggcagagatacacagatact

SEQ ID NO: 61838 - DNA, 30 bp, Artificial Sequence
  Synthetic oligonucleotide
cgccaacacaccgagaacaatattcctact

SEQ ID NO: 61839 - DNA, 30 bp, Artificial Sequence
  Synthetic oligonucleotide
aggtggcatgagtaaatatggttgcgtact

SEQ ID NO: 61840 - DNA, 30 bp, Artificial Sequence
  Synthetic oligonucleotide
cggagagtcttcttgatagtgagctgtact

SEQ ID NO: 61841 - DNA, 30 bp, Artificial Sequence
  Synthetic oligonucleotide
cgtggtgtagacatcatttgggattgtact

SEQ ID NO: 61842 - DNA, 30 bp, Artificial Sequence
  Synthetic oligonucleotide
cgtccgaaccaaattcacctgaaacttact

SEQ ID NO: 61843 - DNA, 30 bp, Artificial Sequence
  Synthetic oligonucleotide
cggtacaatcctgcaccgagcaaatttact

SEQ ID NO: 61844 - DNA, 30 bp, Artificial Sequence
  Synthetic oligonucleotide
ttaggtataggggagagcatactaaaacct

SEQ ID NO: 61845 - DNA, 30 bp, Artificial Sequence
  Synthetic oligonucleotide
ctcagatacctgatgtaagcagcgaaacct

SEQ ID NO: 61846 - DNA, 31 bp, Artificial Sequence
  Synthetic oligonucleotide
gggctgcgactccaaggaaaccgctgaacct

SEQ ID NO: 61847 - DNA, 30 bp, Artificial Sequence
  Synthetic oligonucleotide
gcaccgcggacctgggtatgtgtaacacct

SEQ ID NO: 61848 - DNA, 30 bp, Artificial Sequence
  Synthetic oligonucleotide
tgccatgcattggccgagaaacaagcacct

SEQ ID NO: 61849 - DNA, 30 bp, Artificial Sequence
  Synthetic oligonucleotide
tagcgtatgagccaagacgggtttggacct

SEQ ID NO: 61850 - DNA, 30 bp, Artificial Sequence
  Synthetic oligonucleotide
tactgggcaagacgatgtccattgtgacct

SEQ ID NO: 61851 - DNA, 30 bp, Artificial Sequence
  Synthetic oligonucleotide
aagaaccgtaagatggtggaggattgacct

SEQ ID NO: 61852 - DNA, 30 bp, Artificial Sequence
  Synthetic oligonucleotide
tacatcaggcaggctcgtactcgcatacct

SEQ ID NO: 61853 - DNA, 30 bp, Artificial Sequence
  Synthetic oligonucleotide
taccaggggggatataaataatgattacct

SEQ ID NO: 61854 - DNA, 30 bp, Artificial Sequence
  Synthetic oligonucleotide
cggacctgacccctaatgcctgtgttacct

SEQ ID NO: 61855 - DNA, 30 bp, Artificial Sequence
  Synthetic oligonucleotide
aacggggggtagttaagattcggtaaccct

SEQ ID NO: 61856 - DNA, 30 bp, Artificial Sequence
  Synthetic oligonucleotide
acgcggattatgcttgtggtgtgcgaccct

SEQ ID NO: 61857 - DNA, 30 bp, Artificial Sequence
  Synthetic oligonucleotide
gtcgaagtataaaccaaacgtacttcccct

SEQ ID NO: 61858 - DNA, 30 bp, Artificial Sequence
  Synthetic oligonucleotide
ccggagagctggtggatagggtgaagccct

SEQ ID NO: 61859 - DNA, 30 bp, Artificial Sequence
  Synthetic oligonucleotide
tgcataatatggcaacagggagagcgccct

SEQ ID NO: 61860 - DNA, 30 bp, Artificial Sequence
  Synthetic oligonucleotide
gccaaggttaaacaagaataggaagtccct

SEQ ID NO: 61861 - DNA, 30 bp, Artificial Sequence
  Synthetic oligonucleotide
ctacgtggagtcgatatcccaactaagcct

SEQ ID NO: 61862 - DNA, 30 bp, Artificial Sequence
  Synthetic oligonucleotide
cgaaactcgcctggagggtaagtggagcct

SEQ ID NO: 61863 - DNA, 30 bp, Artificial Sequence
  Synthetic oligonucleotide
agcagggatcaggggaacctaccgtagcct

SEQ ID NO: 61864 - DNA, 30 bp, Artificial Sequence
  Synthetic oligonucleotide
aacggtaggtgtgtagacgtacgtgcgcct

SEQ ID NO: 61865 - DNA, 30 bp, Artificial Sequence
  Synthetic oligonucleotide
agcgtgatctggtgacggtctcaactgcct

SEQ ID NO: 61866 - DNA, 30 bp, Artificial Sequence
  Synthetic oligonucleotide
agagacaaagttgcagaatgcggattgcct

SEQ ID NO: 61867 - DNA, 30 bp, Artificial Sequence
  Synthetic oligonucleotide
ctgccagaagtcgggagtcaaactaatcct

SEQ ID NO: 61868 - DNA, 30 bp, Artificial Sequence
  Synthetic oligonucleotide
agtcgactaggacaacgatcaacagctcct

SEQ ID NO: 61869 - DNA, 30 bp, Artificial Sequence
  Synthetic oligonucleotide
acaggaatctcagagcggggcataagtcct

SEQ ID NO: 61870 - DNA, 30 bp, Artificial Sequence
  Synthetic oligonucleotide
aggcacagccatcgcgtggtgtatcgtcct

SEQ ID NO: 61871 - DNA, 30 bp, Artificial Sequence
  Synthetic oligonucleotide
agtcatattccagataacgggcggggtcct

SEQ ID NO: 61872 - DNA, 31 bp, Artificial Sequence
  Synthetic oligonucleotide
aacggttgacagcaccttacagagttgtcct

SEQ ID NO: 61873 - DNA, 30 bp, Artificial Sequence
  Synthetic oligonucleotide
taggggctgagagaagagcgcagaattcct

SEQ ID NO: 61874 - DNA, 30 bp, Artificial Sequence
  Synthetic oligonucleotide
cagggcacgtttcacaatcgagccattcct

SEQ ID NO: 61875 - DNA, 30 bp, Artificial Sequence
  Synthetic oligonucleotide
tagatggttgcactggcgtaacgtcttcct

SEQ ID NO: 61876 - DNA, 30 bp, Artificial Sequence
  Synthetic oligonucleotide
agtacaggggataggtgccagcagaaagct

SEQ ID NO: 61877 - DNA, 30 bp, Artificial Sequence
  Synthetic oligonucleotide
acaggcgagaaaaaaatcactgcataagct

SEQ ID NO: 61878 - DNA, 30 bp, Artificial Sequence
  Synthetic oligonucleotide
cttatactgccatcacagggagggtaagct

SEQ ID NO: 61879 - DNA, 30 bp, Artificial Sequence
  Synthetic oligonucleotide
tagggctaaaatgtcctggcaggtccagct

SEQ ID NO: 61880 - DNA, 30 bp, Artificial Sequence
  Synthetic oligonucleotide
tgacactagtgcttacgtctaccttcagct

SEQ ID NO: 61881 - DNA, 30 bp, Artificial Sequence
  Synthetic oligonucleotide
agggcaacctaagttagcatgaagggagct

SEQ ID NO: 61882 - DNA, 30 bp, Artificial Sequence
  Synthetic oligonucleotide
gcgtaccaaacctgaatcataattggagct

SEQ ID NO: 61883 - DNA, 30 bp, Artificial Sequence
  Synthetic oligonucleotide
agacgaatcgaagtgaaacccatttgagct

SEQ ID NO: 61884 - DNA, 30 bp, Artificial Sequence
  Synthetic oligonucleotide
gtgttgaaaaaagatagatcggtaatagct

SEQ ID NO: 61885 - DNA, 30 bp, Artificial Sequence
  Synthetic oligonucleotide
tgagcacaatatgttacaggcactatagct

SEQ ID NO: 61886 - DNA, 30 bp, Artificial Sequence
  Synthetic oligonucleotide
agcaggtgatcatctcctagactagtagct

SEQ ID NO: 61887 - DNA, 30 bp, Artificial Sequence
  Synthetic oligonucleotide
acaacgtgttccgggagtgcatagcacgct

SEQ ID NO: 61888 - DNA, 30 bp, Artificial Sequence
  Synthetic oligonucleotide
cgagaagttcatgggtggagttaccccgct

SEQ ID NO: 61889 - DNA, 30 bp, Artificial Sequence
  Synthetic oligonucleotide
gggcggcgatacctgaagaaacgatccgct

SEQ ID NO: 61890 - DNA, 30 bp, Artificial Sequence
  Synthetic oligonucleotide
gtacgagggacttgaatagcggctatcgct

SEQ ID NO: 61891 - DNA, 30 bp, Artificial Sequence
  Synthetic oligonucleotide
ggctagacatccaagtagtataacctcgct

SEQ ID NO: 61892 - DNA, 30 bp, Artificial Sequence
  Synthetic oligonucleotide
cgtcaatagcagattacaagctgccaggct

SEQ ID NO: 61893 - DNA, 30 bp, Artificial Sequence
  Synthetic oligonucleotide
gagcttgtgtggtaaggaggaagagcggct

SEQ ID NO: 61894 - DNA, 30 bp, Artificial Sequence
  Synthetic oligonucleotide
accgggactgcaatggaaccgtgggcggct

SEQ ID NO: 61895 - DNA, 30 bp, Artificial Sequence
  Synthetic oligonucleotide
gacaacagttatcgtagagctgatgcggct

SEQ ID NO: 61896 - DNA, 30 bp, Artificial Sequence
  Synthetic oligonucleotide
cgagacgtaggtttaactaattattcggct

SEQ ID NO: 61897 - DNA, 30 bp, Artificial Sequence
  Synthetic oligonucleotide
gcctcaacattgtatcacgggggaagggct

SEQ ID NO: 61898 - DNA, 30 bp, Artificial Sequence
  Synthetic oligonucleotide
ggatataacaactagcatagaaccagggct

SEQ ID NO: 61899 - DNA, 30 bp, Artificial Sequence
  Synthetic oligonucleotide
acgtcgttgggcgttaggaggtcacgggct

SEQ ID NO: 61900 - DNA, 30 bp, Artificial Sequence
  Synthetic oligonucleotide
cgttgagagcgagctgctggaggactggct

SEQ ID NO: 61901 - DNA, 30 bp, Artificial Sequence
  Synthetic oligonucleotide
gttgaccattgagtggtcgagtggaatgct

SEQ ID NO: 61902 - DNA, 29 bp, Artificial Sequence
  Synthetic oligonucleotide
acactgaagggggcgacacgaaagatgct

SEQ ID NO: 61903 - DNA, 30 bp, Artificial Sequence
  Synthetic oligonucleotide
ggaggcattgacgtcctagtgtggtatgct

SEQ ID NO: 61904 - DNA, 30 bp, Artificial Sequence
  Synthetic oligonucleotide
agaggcaaagacaatctaattgcccctgct

SEQ ID NO: 61905 - DNA, 30 bp, Artificial Sequence
  Synthetic oligonucleotide
cgacattccagaagagaaacctgacgtgct

SEQ ID NO: 61906 - DNA, 30 bp, Artificial Sequence
  Synthetic oligonucleotide
ccgagtgtcatgaatgaggacagtggtgct

SEQ ID NO: 61907 - DNA, 30 bp, Artificial Sequence
  Synthetic oligonucleotide
cgggatccgggacgaatcccacaatgtgct

SEQ ID NO: 61908 - DNA, 30 bp, Artificial Sequence
  Synthetic oligonucleotide
cacgagtgtacgagttgctgacgatgtgct

SEQ ID NO: 61909 - DNA, 30 bp, Artificial Sequence
  Synthetic oligonucleotide
atggcacgaagctcagagcaaagctttgct

SEQ ID NO: 61910 - DNA, 30 bp, Artificial Sequence
  Synthetic oligonucleotide
gcgagccataaaacatacgctcataaatct

SEQ ID NO: 61911 - DNA, 31 bp, Artificial Sequence
  Synthetic oligonucleotide
ggaacgattaagtcgccacaatagttaatct

SEQ ID NO: 61912 - DNA, 30 bp, Artificial Sequence
  Synthetic oligonucleotide
cgaaacgcgtagtgtaaggacgtaacatct

SEQ ID NO: 61913 - DNA, 30 bp, Artificial Sequence
  Synthetic oligonucleotide
aacatacaagtaagttaagctgagccatct

SEQ ID NO: 61914 - DNA, 30 bp, Artificial Sequence
  Synthetic oligonucleotide
ccgagtaaaagcgttaacatcccgccatct

SEQ ID NO: 61915 - DNA, 30 bp, Artificial Sequence
  Synthetic oligonucleotide
gggatacttgacaacgacgactagtcatct

SEQ ID NO: 61916 - DNA, 30 bp, Artificial Sequence
  Synthetic oligonucleotide
ccagagacaaatgtgaaaaatccgagatct

SEQ ID NO: 61917 - DNA, 30 bp, Artificial Sequence
  Synthetic oligonucleotide
caacgttactagtcatgaccctatcgatct

SEQ ID NO: 61918 - DNA, 30 bp, Artificial Sequence
  Synthetic oligonucleotide
cgaagaggctacaaggatctggagtgatct

SEQ ID NO: 61919 - DNA, 30 bp, Artificial Sequence
  Synthetic oligonucleotide
acgtatcatttaggctagcccttgatatct

SEQ ID NO: 61920 - DNA, 30 bp, Artificial Sequence
  Synthetic oligonucleotide
cacgggaaagataacgggggggatatatct

SEQ ID NO: 61921 - DNA, 30 bp, Artificial Sequence
  Synthetic oligonucleotide
ccgttgggggaagggcaaccaaacgtatct

SEQ ID NO: 61922 - DNA, 30 bp, Artificial Sequence
  Synthetic oligonucleotide
acaacgaggtgaaaggttacatttgtatct

SEQ ID NO: 61923 - DNA, 30 bp, Artificial Sequence
  Synthetic oligonucleotide
aaggaagagcgatcggaagattgtttatct

SEQ ID NO: 61924 - DNA, 30 bp, Artificial Sequence
  Synthetic oligonucleotide
cggcctagagggatggcaagccaaaactct

SEQ ID NO: 61925 - DNA, 30 bp, Artificial Sequence
  Synthetic oligonucleotide
atggcgaccccgtcggagtacgtggcctct

SEQ ID NO: 61926 - DNA, 30 bp, Artificial Sequence
  Synthetic oligonucleotide
agacgtgtataattaatgccgtatgcctct

SEQ ID NO: 61927 - DNA, 30 bp, Artificial Sequence
  Synthetic oligonucleotide
ctcgcgggggttgcggtgaactgtgcctct

SEQ ID NO: 61928 - DNA, 30 bp, Artificial Sequence
  Synthetic oligonucleotide
acgtacgaaggcgggcagtttgtcagctct

SEQ ID NO: 61929 - DNA, 30 bp, Artificial Sequence
  Synthetic oligonucleotide
aagcgtgagtgtcacagcgcgaaacagtct

SEQ ID NO: 61930 - DNA, 30 bp, Artificial Sequence
  Synthetic oligonucleotide
tagaacaggcaccatcagacagggccgtct

SEQ ID NO: 61931 - DNA, 30 bp, Artificial Sequence
  Synthetic oligonucleotide
tcatcaggcgcgggggcttcacacaggtct

SEQ ID NO: 61932 - DNA, 30 bp, Artificial Sequence
  Synthetic oligonucleotide
acgctcaggcgtgttgaactctaagggtct

SEQ ID NO: 61933 - DNA, 30 bp, Artificial Sequence
  Synthetic oligonucleotide
cgtcgtgcaaaaaatgtgaagcactggtct

SEQ ID NO: 61934 - DNA, 30 bp, Artificial Sequence
  Synthetic oligonucleotide
ccacatgaaatcttgaaggcgatggtgtct

SEQ ID NO: 61935 - DNA, 30 bp, Artificial Sequence
  Synthetic oligonucleotide
taagcgtccaaacctcgactaatattgtct

SEQ ID NO: 61936 - DNA, 30 bp, Artificial Sequence
  Synthetic oligonucleotide
acgcaaaggggattcaaccgacagcattct

SEQ ID NO: 61937 - DNA, 30 bp, Artificial Sequence
  Synthetic oligonucleotide
aggtcctaagcaatgtgtgtccaggattct

SEQ ID NO: 61938 - DNA, 30 bp, Artificial Sequence
  Synthetic oligonucleotide
tcgagcgagagttgccgtccgttcagttct

SEQ ID NO: 61939 - DNA, 30 bp, Artificial Sequence
  Synthetic oligonucleotide
tcgaggggaaaggattgaaccgtgttttct

SEQ ID NO: 61940 - DNA, 30 bp, Artificial Sequence
  Synthetic oligonucleotide
acacccggttatgggtacggattagaaagt

SEQ ID NO: 61941 - DNA, 30 bp, Artificial Sequence
  Synthetic oligonucleotide
atacaatcggaaagtggggcgttagaaagt

SEQ ID NO: 61942 - DNA, 30 bp, Artificial Sequence
  Synthetic oligonucleotide
catagggtgtcagcacatggcagtgaaagt

SEQ ID NO: 61943 - DNA, 30 bp, Artificial Sequence
  Synthetic oligonucleotide
gacagaacgacattaatgatcggctcaagt

SEQ ID NO: 61944 - DNA, 30 bp, Artificial Sequence
  Synthetic oligonucleotide
tcgagtatagcacaaaatgattgttcaagt

SEQ ID NO: 61945 - DNA, 30 bp, Artificial Sequence
  Synthetic oligonucleotide
gggagcaggtgacagacatcttgaagaagt

SEQ ID NO: 61946 - DNA, 30 bp, Artificial Sequence
  Synthetic oligonucleotide
gaggtaaaggatctataagctgggagaagt

SEQ ID NO: 61947 - DNA, 30 bp, Artificial Sequence
  Synthetic oligonucleotide
cgctacctcacaggcgagagacatagaagt

SEQ ID NO: 61948 - DNA, 30 bp, Artificial Sequence
  Synthetic oligonucleotide
acatacaagggaccgccacttcaacgaagt

SEQ ID NO: 61949 - DNA, 30 bp, Artificial Sequence
  Synthetic oligonucleotide
cgagatatataaacgacaacgtcaggaagt

SEQ ID NO: 61950 - DNA, 30 bp, Artificial Sequence
  Synthetic oligonucleotide
ggctgcggacccgtaaaacgctagtgaagt

SEQ ID NO: 61951 - DNA, 30 bp, Artificial Sequence
  Synthetic oligonucleotide
tctgtagaaaaaggctggcaaacgtgaagt

SEQ ID NO: 61952 - DNA, 30 bp, Artificial Sequence
  Synthetic oligonucleotide
tcgtggagggaccaaacatggatttgaagt

SEQ ID NO: 61953 - DNA, 30 bp, Artificial Sequence
  Synthetic oligonucleotide
tgcaaagaattgaacaaagctgataacagt

SEQ ID NO: 61954 - DNA, 30 bp, Artificial Sequence
  Synthetic oligonucleotide
gcactgattccgagtggagtaaaacacagt

SEQ ID NO: 61955 - DNA, 30 bp, Artificial Sequence
  Synthetic oligonucleotide
cttacagagaggagcgtgtactatcacagt

SEQ ID NO: 61956 - DNA, 30 bp, Artificial Sequence
  Synthetic oligonucleotide
aatggaacccacgaaggatacgatgacagt

SEQ ID NO: 61957 - DNA, 30 bp, Artificial Sequence
  Synthetic oligonucleotide
ctaaaatgtgggtggattggagagtacagt

SEQ ID NO: 61958 - DNA, 30 bp, Artificial Sequence
  Synthetic oligonucleotide
gaagcgatacaattcaatcgatcgtacagt

SEQ ID NO: 61959 - DNA, 30 bp, Artificial Sequence
  Synthetic oligonucleotide
agaaggggcacccagtactagacaaccagt

SEQ ID NO: 61960 - DNA, 30 bp, Artificial Sequence
  Synthetic oligonucleotide
tctaagccgtatcaccgatgtttaaccagt

SEQ ID NO: 61961 - DNA, 30 bp, Artificial Sequence
  Synthetic oligonucleotide
tggcatgacctccggcaatagaacaccagt

SEQ ID NO: 61962 - DNA, 30 bp, Artificial Sequence
  Synthetic oligonucleotide
ggggttcaacacacagtcaagcgccccagt

SEQ ID NO: 61963 - DNA, 30 bp, Artificial Sequence
  Synthetic oligonucleotide
gcataagagggccttgggactatagccagt

SEQ ID NO: 61964 - DNA, 30 bp, Artificial Sequence
  Synthetic oligonucleotide
atgtaaaatgtaggttaaggtgcgcgcagt

SEQ ID NO: 61965 - DNA, 30 bp, Artificial Sequence
  Synthetic oligonucleotide
gtctaaaagccgagtgaaacgacgggcagt

SEQ ID NO: 61966 - DNA, 30 bp, Artificial Sequence
  Synthetic oligonucleotide
ccataaatatagtaagaagttggtggcagt

SEQ ID NO: 61967 - DNA, 30 bp, Artificial Sequence
  Synthetic oligonucleotide
tgaagatcgaaggtgatctttcagtgcagt

SEQ ID NO: 61968 - DNA, 30 bp, Artificial Sequence
  Synthetic oligonucleotide
tggagctgctagagtcacagagaaatcagt

SEQ ID NO: 61969 - DNA, 30 bp, Artificial Sequence
  Synthetic oligonucleotide
tggaatattgtggcgtagggctatgtcagt

SEQ ID NO: 61970 - DNA, 30 bp, Artificial Sequence
  Synthetic oligonucleotide
tgcttgactttcacgcgagtgagaaagagt

SEQ ID NO: 61971 - DNA, 30 bp, Artificial Sequence
  Synthetic oligonucleotide
gggagttggcacagagattggaataagagt

SEQ ID NO: 61972 - DNA, 30 bp, Artificial Sequence
  Synthetic oligonucleotide
atgagcaacccgggttaagctagccagagt

SEQ ID NO: 61973 - DNA, 30 bp, Artificial Sequence
  Synthetic oligonucleotide
ctaccaggcaggcggttgcgctatcagagt

SEQ ID NO: 61974 - DNA, 30 bp, Artificial Sequence
  Synthetic oligonucleotide
tacgacggtagggtaagctattatcagagt

SEQ ID NO: 61975 - DNA, 30 bp, Artificial Sequence
  Synthetic oligonucleotide
atgaacgtgaagccgcggatccaatagagt

SEQ ID NO: 61976 - DNA, 30 bp, Artificial Sequence
  Synthetic oligonucleotide
gcacggttccgtgcttcaataaactagagt

SEQ ID NO: 61977 - DNA, 31 bp, Artificial Sequence
  Synthetic oligonucleotide
tccaaaagtaccgacatgagttaactagagt

SEQ ID NO: 61978 - DNA, 30 bp, Artificial Sequence
  Synthetic oligonucleotide
taagatcagaccgaacagaaaggcccgagt

SEQ ID NO: 61979 - DNA, 30 bp, Artificial Sequence
  Synthetic oligonucleotide
tacgtaacatacacgtcatgacttccgagt

SEQ ID NO: 61980 - DNA, 30 bp, Artificial Sequence
  Synthetic oligonucleotide
tatacggaacttggttaatgtagagcgagt

SEQ ID NO: 61981 - DNA, 30 bp, Artificial Sequence
  Synthetic oligonucleotide
tcggccattctgatgtttagaataaggagt

SEQ ID NO: 61982 - DNA, 30 bp, Artificial Sequence
  Synthetic oligonucleotide
aaccgtaggattgatcgccgtatgaggagt

SEQ ID NO: 61983 - DNA, 30 bp, Artificial Sequence
  Synthetic oligonucleotide
tcgcattcgacgttagaagtacccgggagt

SEQ ID NO: 61984 - DNA, 30 bp, Artificial Sequence
  Synthetic oligonucleotide
catttactcagagtacaccgctaatggagt

SEQ ID NO: 61985 - DNA, 30 bp, Artificial Sequence
  Synthetic oligonucleotide
acaaatgattcgtgccctagaccattgagt

SEQ ID NO: 61986 - DNA, 30 bp, Artificial Sequence
  Synthetic oligonucleotide
tgaccatggtggtggttcaaaggattgagt

SEQ ID NO: 61987 - DNA, 30 bp, Artificial Sequence
  Synthetic oligonucleotide
agtcaggggcaagccagtgctaagttgagt

SEQ ID NO: 61988 - DNA, 30 bp, Artificial Sequence
  Synthetic oligonucleotide
aaaagttaactgaagaaaatcggccatagt

SEQ ID NO: 61989 - DNA, 30 bp, Artificial Sequence
  Synthetic oligonucleotide
ataaccgagtgggtagccacagcgcctagt

SEQ ID NO: 61990 - DNA, 30 bp, Artificial Sequence
  Synthetic oligonucleotide
gtgcgtggggggggtgattgagtatctagt

SEQ ID NO: 61991 - DNA, 30 bp, Artificial Sequence
  Synthetic oligonucleotide
tgtgatgggtcggatgtgaacccaagtagt

SEQ ID NO: 61992 - DNA, 30 bp, Artificial Sequence
  Synthetic oligonucleotide
gccgatgagttaaagacttgcccaagtagt

SEQ ID NO: 61993 - DNA, 30 bp, Artificial Sequence
  Synthetic oligonucleotide
cgcacctgatccacggagtggctgagtagt

SEQ ID NO: 61994 - DNA, 30 bp, Artificial Sequence
  Synthetic oligonucleotide
gagacgtgtgaggatggtaatacgattagt

SEQ ID NO: 61995 - DNA, 30 bp, Artificial Sequence
  Synthetic oligonucleotide
tgaaaacaggaagaggagcaatagcttagt

SEQ ID NO: 61996 - DNA, 30 bp, Artificial Sequence
  Synthetic oligonucleotide
tcactggctttgcggacgagtgaggttagt

SEQ ID NO: 61997 - DNA, 30 bp, Artificial Sequence
  Synthetic oligonucleotide
ccgaacagcagtaatcgtcaaggggttagt

SEQ ID NO: 61998 - DNA, 30 bp, Artificial Sequence
  Synthetic oligonucleotide
cgaacatgaccacaggagagccaaacacgt

SEQ ID NO: 61999 - DNA, 30 bp, Artificial Sequence
  Synthetic oligonucleotide
accagtaagaactgtgcaccatcaacacgt

SEQ ID NO: 62000 - DNA, 30 bp, Artificial Sequence
  Synthetic oligonucleotide
ggtggacagtgagacggggacgttccacgt

SEQ ID NO: 62001 - DNA, 30 bp, Artificial Sequence
  Synthetic oligonucleotide
gcggccactaaaggatgaggtagatcacgt

SEQ ID NO: 62002 - DNA, 30 bp, Artificial Sequence
  Synthetic oligonucleotide
cgtaaagagtgtggcgcaaaggcctcacgt

SEQ ID NO: 62003 - DNA, 30 bp, Artificial Sequence
  Synthetic oligonucleotide
aaactaactatcatgtacagaagaagacgt

SEQ ID NO: 62004 - DNA, 30 bp, Artificial Sequence
  Synthetic oligonucleotide
ttgtaacacgatacgtatgagaatagacgt

SEQ ID NO: 62005 - DNA, 30 bp, Artificial Sequence
  Synthetic oligonucleotide
caacgcctcagcgggacgaacgagggacgt

SEQ ID NO: 62006 - DNA, 30 bp, Artificial Sequence
  Synthetic oligonucleotide
tcacagagcgacagtcataccgaagtacgt

SEQ ID NO: 62007 - DNA, 30 bp, Artificial Sequence
  Synthetic oligonucleotide
aggtcgggaggcttgataaaagtattacgt

SEQ ID NO: 62008 - DNA, 30 bp, Artificial Sequence
  Synthetic oligonucleotide
acaaatccgaatgaaacgagaactttacgt

SEQ ID NO: 62009 - DNA, 30 bp, Artificial Sequence
  Synthetic oligonucleotide
atagccattgacagcggaaaaaagtaccgt

SEQ ID NO: 62010 - DNA, 30 bp, Artificial Sequence
  Synthetic oligonucleotide
aatgaacaagcgtaacggtccggtacccgt

SEQ ID NO: 62011 - DNA, 30 bp, Artificial Sequence
  Synthetic oligonucleotide
tgcgccagcggactccttcaaataccccgt

SEQ ID NO: 62012 - DNA, 30 bp, Artificial Sequence
  Synthetic oligonucleotide
aaaggagaagaatgcctactccacccccgt

SEQ ID NO: 62013 - DNA, 30 bp, Artificial Sequence
  Synthetic oligonucleotide
ctgggttacccccactgaacctctagccgt

SEQ ID NO: 62014 - DNA, 30 bp, Artificial Sequence
  Synthetic oligonucleotide
agtaaaagtgcaccccaaagtccgcgccgt

SEQ ID NO: 62015 - DNA, 30 bp, Artificial Sequence
  Synthetic oligonucleotide
agattctccgacgaagtcctgacctgccgt

SEQ ID NO: 62016 - DNA, 30 bp, Artificial Sequence
  Synthetic oligonucleotide
ggcgccaaggaaagaacgtgaaattgccgt

SEQ ID NO: 62017 - DNA, 30 bp, Artificial Sequence
  Synthetic oligonucleotide
gggaacggtgcgtcatacactccaatccgt

SEQ ID NO: 62018 - DNA, 30 bp, Artificial Sequence
  Synthetic oligonucleotide
tagaaggagatatggcgaacagacatccgt

SEQ ID NO: 62019 - DNA, 30 bp, Artificial Sequence
  Synthetic oligonucleotide
aaggattcaaaatcatagaatgcactccgt

SEQ ID NO: 62020 - DNA, 30 bp, Artificial Sequence
  Synthetic oligonucleotide
aggcccggcctaccgcccgaccaaaagcgt

SEQ ID NO: 62021 - DNA, 30 bp, Artificial Sequence
  Synthetic oligonucleotide
gggaagaaatccgggtaagctaccgcgcgt

SEQ ID NO: 62022 - DNA, 30 bp, Artificial Sequence
  Synthetic oligonucleotide
ctaggactggacgtgacacatcccgcgcgt

SEQ ID NO: 62023 - DNA, 30 bp, Artificial Sequence
  Synthetic oligonucleotide
cctaccacgaaggatcataggctggggcgt

SEQ ID NO: 62024 - DNA, 30 bp, Artificial Sequence
  Synthetic oligonucleotide
agagcagaacagtagtcgcgcgaactgcgt

SEQ ID NO: 62025 - DNA, 30 bp, Artificial Sequence
  Synthetic oligonucleotide
gaaagggtataatggaggtcgcgcgtgcgt

SEQ ID NO: 62026 - DNA, 30 bp, Artificial Sequence
  Synthetic oligonucleotide
tgaagaggtcggtaaacgtgagggttgcgt

SEQ ID NO: 62027 - DNA, 30 bp, Artificial Sequence
  Synthetic oligonucleotide
acggcatggcaacccatggtgtaaaatcgt

SEQ ID NO: 62028 - DNA, 30 bp, Artificial Sequence
  Synthetic oligonucleotide
acggcgtttgtcgaaccgagttatgatcgt

SEQ ID NO: 62029 - DNA, 30 bp, Artificial Sequence
  Synthetic oligonucleotide
tctggaagttaagcagcgaatccgtatcgt

SEQ ID NO: 62030 - DNA, 30 bp, Artificial Sequence
  Synthetic oligonucleotide
gaacaatcataccaagtacaaggaagtcgt

SEQ ID NO: 62031 - DNA, 30 bp, Artificial Sequence
  Synthetic oligonucleotide
gtccaaggcaagttggtagtggagggtcgt

SEQ ID NO: 62032 - DNA, 30 bp, Artificial Sequence
  Synthetic oligonucleotide
gacatggaatgcgggacaccacaatgtcgt

SEQ ID NO: 62033 - DNA, 30 bp, Artificial Sequence
  Synthetic oligonucleotide
cggggtggcgtcagacgatgataatgtcgt

SEQ ID NO: 62034 - DNA, 30 bp, Artificial Sequence
  Synthetic oligonucleotide
acagacactaaggcaggcaaattgtgtcgt

SEQ ID NO: 62035 - DNA, 30 bp, Artificial Sequence
  Synthetic oligonucleotide
gtggaaataactaatcacggtgaccttcgt

SEQ ID NO: 62036 - DNA, 30 bp, Artificial Sequence
  Synthetic oligonucleotide
ccttgggcacatcccgcgaccactgttcgt

SEQ ID NO: 62037 - DNA, 30 bp, Artificial Sequence
  Synthetic oligonucleotide
cgtcacatcctaattcgagcagtaaaaggt

SEQ ID NO: 62038 - DNA, 30 bp, Artificial Sequence
  Synthetic oligonucleotide
gatacgtaatgaagacggactaggaaaggt

SEQ ID NO: 62039 - DNA, 30 bp, Artificial Sequence
  Synthetic oligonucleotide
accagagtcacactgctcctccctcaaggt

SEQ ID NO: 62040 - DNA, 30 bp, Artificial Sequence
  Synthetic oligonucleotide
cgaattcgttgcgggatgtgggctcaaggt

SEQ ID NO: 62041 - DNA, 30 bp, Artificial Sequence
  Synthetic oligonucleotide
gtcgtccctggatatccgggaatcgaaggt

SEQ ID NO: 62042 - DNA, 30 bp, Artificial Sequence
  Synthetic oligonucleotide
cgaaaatcgacatgtcttcatcccacaggt

SEQ ID NO: 62043 - DNA, 30 bp, Artificial Sequence
  Synthetic oligonucleotide
ggagaacgggaactagagagggtcccaggt

SEQ ID NO: 62044 - DNA, 30 bp, Artificial Sequence
  Synthetic oligonucleotide
cgagaataaggctgccgtacccgtccaggt

SEQ ID NO: 62045 - DNA, 30 bp, Artificial Sequence
  Synthetic oligonucleotide
ctagtgaaacagctccaacagggggcaggt

SEQ ID NO: 62046 - DNA, 30 bp, Artificial Sequence
  Synthetic oligonucleotide
ggtgaaggagtaataaatgggaaatcaggt

SEQ ID NO: 62047 - DNA, 30 bp, Artificial Sequence
  Synthetic oligonucleotide
atacacgggaaggctcaaggcgactcaggt

SEQ ID NO: 62048 - DNA, 30 bp, Artificial Sequence
  Synthetic oligonucleotide
gtatagcaatgaaggagtgggacgtcaggt

SEQ ID NO: 62049 - DNA, 30 bp, Artificial Sequence
  Synthetic oligonucleotide
agtggagtcgattaggatctggattcaggt

SEQ ID NO: 62050 - DNA, 30 bp, Artificial Sequence
  Synthetic oligonucleotide
ggtgcgcgaattagacggactcaacgaggt

SEQ ID NO: 62051 - DNA, 30 bp, Artificial Sequence
  Synthetic oligonucleotide
attatggggaattactgagtaaacggaggt

SEQ ID NO: 62052 - DNA, 30 bp, Artificial Sequence
  Synthetic oligonucleotide
ttcgacgtcgtctgcgcaaagattggaggt

SEQ ID NO: 62053 - DNA, 30 bp, Artificial Sequence
  Synthetic oligonucleotide
cttcgatgatgtggacctgcgaactgaggt

SEQ ID NO: 62054 - DNA, 30 bp, Artificial Sequence
  Synthetic oligonucleotide
ggggcagatcattccagttgggtgtgaggt

SEQ ID NO: 62055 - DNA, 30 bp, Artificial Sequence
  Synthetic oligonucleotide
ctaagggtaaatcatcgtgccgcagtaggt

SEQ ID NO: 62056 - DNA, 30 bp, Artificial Sequence
  Synthetic oligonucleotide
acggccatcttgagctctggaaccgtaggt

SEQ ID NO: 62057 - DNA, 30 bp, Artificial Sequence
  Synthetic oligonucleotide
gcgccacaaggggagcagggttatgtaggt

SEQ ID NO: 62058 - DNA, 30 bp, Artificial Sequence
  Synthetic oligonucleotide
agggtcaacgtgtttgaggtcgtattaggt

SEQ ID NO: 62059 - DNA, 30 bp, Artificial Sequence
  Synthetic oligonucleotide
cggctttcccaccgagttgaacagcacggt

SEQ ID NO: 62060 - DNA, 30 bp, Artificial Sequence
  Synthetic oligonucleotide
tggggagctacaggtcgagcagcttgcggt

SEQ ID NO: 62061 - DNA, 30 bp, Artificial Sequence
  Synthetic oligonucleotide
tctacagggcaccccagagacgtaatcggt

SEQ ID NO: 62062 - DNA, 30 bp, Artificial Sequence
  Synthetic oligonucleotide
cctgaagttagagggatatcgtagatcggt

SEQ ID NO: 62063 - DNA, 30 bp, Artificial Sequence
  Synthetic oligonucleotide
gcgtgcttgtggatttaaagtcaattcggt

SEQ ID NO: 62064 - DNA, 30 bp, Artificial Sequence
  Synthetic oligonucleotide
gggggagaggatgttgtagggttattcggt

SEQ ID NO: 62065 - DNA, 30 bp, Artificial Sequence
  Synthetic oligonucleotide
gaagggcactgttacaaataacgtttcggt

SEQ ID NO: 62066 - DNA, 30 bp, Artificial Sequence
  Synthetic oligonucleotide
aaccaaaagcggtgggcaaagcgaaagggt

SEQ ID NO: 62067 - DNA, 30 bp, Artificial Sequence
  Synthetic oligonucleotide
atacacagagacatgaccagaacccagggt

SEQ ID NO: 62068 - DNA, 30 bp, Artificial Sequence
  Synthetic oligonucleotide
gttgtcgaaggtccatacaaagggcagggt

SEQ ID NO: 62069 - DNA, 30 bp, Artificial Sequence
  Synthetic oligonucleotide
agcacgaaaggattgaggtgcttgcagggt

SEQ ID NO: 62070 - DNA, 30 bp, Artificial Sequence
  Synthetic oligonucleotide
atgaaggtgtgagtaattggcaacgagggt

SEQ ID NO: 62071 - DNA, 30 bp, Artificial Sequence
  Synthetic oligonucleotide
ctggcacaaaaatcggaatgcgcatagggt

SEQ ID NO: 62072 - DNA, 30 bp, Artificial Sequence
  Synthetic oligonucleotide
tcgttggcggcttaatgtgaggcatagggt

SEQ ID NO: 62073 - DNA, 30 bp, Artificial Sequence
  Synthetic oligonucleotide
ggcgtaggggtgtctagaaagaggacgggt

SEQ ID NO: 62074 - DNA, 30 bp, Artificial Sequence
  Synthetic oligonucleotide
agcggtaactgtggttaaggcgagcggggt

SEQ ID NO: 62075 - DNA, 30 bp, Artificial Sequence
  Synthetic oligonucleotide
tccacaagcacatccagaaaaactgggggt

SEQ ID NO: 62076 - DNA, 30 bp, Artificial Sequence
  Synthetic oligonucleotide
gtcaataagtcactcgataaccgtatgggt

SEQ ID NO: 62077 - DNA, 30 bp, Artificial Sequence
  Synthetic oligonucleotide
tgagccagcggtgatccaaagttgttgggt

SEQ ID NO: 62078 - DNA, 30 bp, Artificial Sequence
  Synthetic oligonucleotide
ccagggttgagctgcgcatgagatttgggt

SEQ ID NO: 62079 - DNA, 30 bp, Artificial Sequence
  Synthetic oligonucleotide
tcaagagcccatccgccactctggaatggt

SEQ ID NO: 62080 - DNA, 30 bp, Artificial Sequence
  Synthetic oligonucleotide
ggtgggggtattgtgcgcggtgtacatggt

SEQ ID NO: 62081 - DNA, 30 bp, Artificial Sequence
  Synthetic oligonucleotide
ggaggaaatacctagccttcatgccatggt

SEQ ID NO: 62082 - DNA, 30 bp, Artificial Sequence
  Synthetic oligonucleotide
acgaatcaaagttagtcctgcattcatggt

SEQ ID NO: 62083 - DNA, 30 bp, Artificial Sequence
  Synthetic oligonucleotide
cgtggtagcaatgccccaggttcaactggt

SEQ ID NO: 62084 - DNA, 30 bp, Artificial Sequence
  Synthetic oligonucleotide
cgaactacccataacgataatagtactggt

SEQ ID NO: 62085 - DNA, 30 bp, Artificial Sequence
  Synthetic oligonucleotide
tcatgggcgatcatcctttatggatctggt

SEQ ID NO: 62086 - DNA, 30 bp, Artificial Sequence
  Synthetic oligonucleotide
ctacaagcgtgtgcggtagagcagtctggt

SEQ ID NO: 62087 - DNA, 30 bp, Artificial Sequence
  Synthetic oligonucleotide
acaagggcgcgaggcacaaatcgaagtggt

SEQ ID NO: 62088 - DNA, 30 bp, Artificial Sequence
  Synthetic oligonucleotide
aggaattgacgacaaataacagtaagtggt

SEQ ID NO: 62089 - DNA, 30 bp, Artificial Sequence
  Synthetic oligonucleotide
ggtcgggtacatggaatcatcctgagtggt

SEQ ID NO: 62090 - DNA, 30 bp, Artificial Sequence
  Synthetic oligonucleotide
aagttactggcgacagatgaacggcgtggt

SEQ ID NO: 62091 - DNA, 30 bp, Artificial Sequence
  Synthetic oligonucleotide
gcgggcaccagtcgattatgcaatattggt

SEQ ID NO: 62092 - DNA, 30 bp, Artificial Sequence
  Synthetic oligonucleotide
aatgcgtacactcggaaggaaggggttggt

SEQ ID NO: 62093 - DNA, 30 bp, Artificial Sequence
  Synthetic oligonucleotide
tgaggaataccggttagctaagacaaatgt

SEQ ID NO: 62094 - DNA, 30 bp, Artificial Sequence
  Synthetic oligonucleotide
gtgggtgacaaacatagttgtgataaatgt

SEQ ID NO: 62095 - DNA, 30 bp, Artificial Sequence
  Synthetic oligonucleotide
acggacaagtcaacattgctatcacaatgt

SEQ ID NO: 62096 - DNA, 30 bp, Artificial Sequence
  Synthetic oligonucleotide
caaactcaggaaataacgtacctacaatgt

SEQ ID NO: 62097 - DNA, 30 bp, Artificial Sequence
  Synthetic oligonucleotide
cgaagggctgaaaggttactccctcaatgt

SEQ ID NO: 62098 - DNA, 30 bp, Artificial Sequence
  Synthetic oligonucleotide
cgcatggtcgaggtcgatagttacgaatgt

SEQ ID NO: 62099 - DNA, 30 bp, Artificial Sequence
  Synthetic oligonucleotide
tgaagtggagcggtgtaggcccattaatgt

SEQ ID NO: 62100 - DNA, 30 bp, Artificial Sequence
  Synthetic oligonucleotide
cgataccctcaggaactaccttcgccatgt

SEQ ID NO: 62101 - DNA, 30 bp, Artificial Sequence
  Synthetic oligonucleotide
tgcgcagcataaaaaatatatcaagcatgt

SEQ ID NO: 62102 - DNA, 30 bp, Artificial Sequence
  Synthetic oligonucleotide
cgatacagggggaacaatagtgtcgtatgt

SEQ ID NO: 62103 - DNA, 30 bp, Artificial Sequence
  Synthetic oligonucleotide
gcggagaactaggcgtaaacaaggttatgt

SEQ ID NO: 62104 - DNA, 30 bp, Artificial Sequence
  Synthetic oligonucleotide
gtgtagtaggtaaagcgtagtcggttatgt

SEQ ID NO: 62105 - DNA, 30 bp, Artificial Sequence
  Synthetic oligonucleotide
acaatattgtggcatcgatcgcaacactgt

SEQ ID NO: 62106 - DNA, 30 bp, Artificial Sequence
  Synthetic oligonucleotide
aggctctgcctcgaagccaggccaacctgt

SEQ ID NO: 62107 - DNA, 30 bp, Artificial Sequence
  Synthetic oligonucleotide
taacagagttatcctgagtgtaccccctgt

SEQ ID NO: 62108 - DNA, 30 bp, Artificial Sequence
  Synthetic oligonucleotide
gccgagggaagggaatctcgaaggccctgt

SEQ ID NO: 62109 - DNA, 30 bp, Artificial Sequence
  Synthetic oligonucleotide
ggtaagcgtgtacaatcccgcaatgcctgt

SEQ ID NO: 62110 - DNA, 30 bp, Artificial Sequence
  Synthetic oligonucleotide
aaaggggagactaggaggcaatagagctgt

SEQ ID NO: 62111 - DNA, 30 bp, Artificial Sequence
  Synthetic oligonucleotide
tcgatttgggaaacggtatattatagctgt

SEQ ID NO: 62112 - DNA, 30 bp, Artificial Sequence
  Synthetic oligonucleotide
taactaggggaaagtaaatgaagaaagtgt

SEQ ID NO: 62113 - DNA, 30 bp, Artificial Sequence
  Synthetic oligonucleotide
tacaagaaacgacaaggtcaagtcgagtgt

SEQ ID NO: 62114 - DNA, 30 bp, Artificial Sequence
  Synthetic oligonucleotide
ggacgtatgtagtgagcgtatttggagtgt

SEQ ID NO: 62115 - DNA, 30 bp, Artificial Sequence
  Synthetic oligonucleotide
tgcggagagcgggtatgtatactgtagtgt

SEQ ID NO: 62116 - DNA, 30 bp, Artificial Sequence
  Synthetic oligonucleotide
acgggagaaactcgattgatgaccgcgtgt

SEQ ID NO: 62117 - DNA, 30 bp, Artificial Sequence
  Synthetic oligonucleotide
atgaagggaagatcggatattctaaggtgt

SEQ ID NO: 62118 - DNA, 30 bp, Artificial Sequence
  Synthetic oligonucleotide
gagcccaataccgtgctaacgaaggggtgt

SEQ ID NO: 62119 - DNA, 30 bp, Artificial Sequence
  Synthetic oligonucleotide
aggcacgagctaaacgtgcatagcatgtgt

SEQ ID NO: 62120 - DNA, 30 bp, Artificial Sequence
  Synthetic oligonucleotide
acaggccacatattgggcgcgatagtgtgt

SEQ ID NO: 62121 - DNA, 30 bp, Artificial Sequence
  Synthetic oligonucleotide
agtgagccgaactgtagatagtgtttgtgt

SEQ ID NO: 62122 - DNA, 30 bp, Artificial Sequence
  Synthetic oligonucleotide
ggcaaatacaagtacgagcaatacaattgt

SEQ ID NO: 62123 - DNA, 30 bp, Artificial Sequence
  Synthetic oligonucleotide
gggctgtcaaaaaagacatatgagccttgt

SEQ ID NO: 62124 - DNA, 30 bp, Artificial Sequence
  Synthetic oligonucleotide
ctagtcatagcgaacgaacctgctccttgt

SEQ ID NO: 62125 - DNA, 30 bp, Artificial Sequence
  Synthetic oligonucleotide
actgcgagttaaatctgagactgtccttgt

SEQ ID NO: 62126 - DNA, 30 bp, Artificial Sequence
  Synthetic oligonucleotide
gaagatagatcggcgagactgacatcttgt

SEQ ID NO: 62127 - DNA, 30 bp, Artificial Sequence
  Synthetic oligonucleotide
gcgcagtggagatgtaaattgacaagttgt

SEQ ID NO: 62128 - DNA, 30 bp, Artificial Sequence
  Synthetic oligonucleotide
ttgatacgggtgcaattgagaataagttgt

SEQ ID NO: 62129 - DNA, 30 bp, Artificial Sequence
  Synthetic oligonucleotide
gcggtagtggttagacaagtgggcagttgt

SEQ ID NO: 62130 - DNA, 30 bp, Artificial Sequence
  Synthetic oligonucleotide
tcgttcaaggggaacactgctcagtgttgt

SEQ ID NO: 62131 - DNA, 30 bp, Artificial Sequence
  Synthetic oligonucleotide
ggcataatagcccaacgagagcgaatttgt

SEQ ID NO: 62132 - DNA, 30 bp, Artificial Sequence
  Synthetic oligonucleotide
ctaaaaccaactaccgccgattggcaaatt

SEQ ID NO: 62133 - DNA, 30 bp, Artificial Sequence
  Synthetic oligonucleotide
cggcacgccatctcaagtgcttgtcaaatt

SEQ ID NO: 62134 - DNA, 30 bp, Artificial Sequence
  Synthetic oligonucleotide
tcgcaaatggcgaaatagaggacagaaatt

SEQ ID NO: 62135 - DNA, 30 bp, Artificial Sequence
  Synthetic oligonucleotide
ccgtaattctgatacgaccaacaggaaatt

SEQ ID NO: 62136 - DNA, 30 bp, Artificial Sequence
  Synthetic oligonucleotide
aacacaattaaatcatcacggcgggaaatt

SEQ ID NO: 62137 - DNA, 30 bp, Artificial Sequence
  Synthetic oligonucleotide
gcctaatcagctaaaaatcccacgccaatt

SEQ ID NO: 62138 - DNA, 30 bp, Artificial Sequence
  Synthetic oligonucleotide
tgaggttcgatcgattaggcgttggcaatt

SEQ ID NO: 62139 - DNA, 30 bp, Artificial Sequence
  Synthetic oligonucleotide
catcgaccagttctacttaggccaagaatt

SEQ ID NO: 62140 - DNA, 30 bp, Artificial Sequence
  Synthetic oligonucleotide
aatcccgcgaagcgacagtcatagcgaatt

SEQ ID NO: 62141 - DNA, 30 bp, Artificial Sequence
  Synthetic oligonucleotide
aacgatacgccactcccaaagacaggaatt

SEQ ID NO: 62142 - DNA, 30 bp, Artificial Sequence
  Synthetic oligonucleotide
gaaacggagcggcacactgaggagggaatt

SEQ ID NO: 62143 - DNA, 30 bp, Artificial Sequence
  Synthetic oligonucleotide
gtaggtatggcctacgcaaggtactgaatt

SEQ ID NO: 62144 - DNA, 30 bp, Artificial Sequence
  Synthetic oligonucleotide
ggggtggagcaagcacctcatcagataatt

SEQ ID NO: 62145 - DNA, 30 bp, Artificial Sequence
  Synthetic oligonucleotide
cagtcgggacaccattaccatccgctaatt

SEQ ID NO: 62146 - DNA, 30 bp, Artificial Sequence
  Synthetic oligonucleotide
cagggaggaaaaacaagagatagggtaatt

SEQ ID NO: 62147 - DNA, 30 bp, Artificial Sequence
  Synthetic oligonucleotide
caagtatggcacagtagggtgatattaatt

SEQ ID NO: 62148 - DNA, 30 bp, Artificial Sequence
  Synthetic oligonucleotide
cacgcgagctcggggcattagcaaaacatt

SEQ ID NO: 62149 - DNA, 31 bp, Artificial Sequence
  Synthetic oligonucleotide
aggtcacatttcgaccccatgacacaacatt

SEQ ID NO: 62150 - DNA, 30 bp, Artificial Sequence
  Synthetic oligonucleotide
agggcctgcgtgactgagtagacacccatt

SEQ ID NO: 62151 - DNA, 30 bp, Artificial Sequence
  Synthetic oligonucleotide
cccaagaggaatactaaattaagatccatt

SEQ ID NO: 62152 - DNA, 30 bp, Artificial Sequence
  Synthetic oligonucleotide
cgggatgtcgtggagtcgtaacgatccatt

SEQ ID NO: 62153 - DNA, 30 bp, Artificial Sequence
  Synthetic oligonucleotide
aggcggttcgcactagaaactcattccatt

SEQ ID NO: 62154 - DNA, 30 bp, Artificial Sequence
  Synthetic oligonucleotide
ggctcgtttaagaggtcacagactagcatt

SEQ ID NO: 62155 - DNA, 30 bp, Artificial Sequence
  Synthetic oligonucleotide
ccacggatgccgacgaccgcatctcgcatt

SEQ ID NO: 62156 - DNA, 30 bp, Artificial Sequence
  Synthetic oligonucleotide
cagggtgtgatgaagaaacgaagaatcatt

SEQ ID NO: 62157 - DNA, 30 bp, Artificial Sequence
  Synthetic oligonucleotide
aaaggggtgtattgccgcgatggaatcatt

SEQ ID NO: 62158 - DNA, 30 bp, Artificial Sequence
  Synthetic oligonucleotide
agggggaagaccaacctagaagtgatcatt

SEQ ID NO: 62159 - DNA, 30 bp, Artificial Sequence
  Synthetic oligonucleotide
aacgaaaggtgggcaccttgattgttcatt

SEQ ID NO: 62160 - DNA, 30 bp, Artificial Sequence
  Synthetic oligonucleotide
cacgtctagaactcgtatgacacaaagatt

SEQ ID NO: 62161 - DNA, 30 bp, Artificial Sequence
  Synthetic oligonucleotide
gatgtcatcacatcgataaaggctaagatt

SEQ ID NO: 62162 - DNA, 30 bp, Artificial Sequence
  Synthetic oligonucleotide
caggtgatcaaggggacggaagttaagatt

SEQ ID NO: 62163 - DNA, 30 bp, Artificial Sequence
  Synthetic oligonucleotide
gctaagcaagtcgactattaaacaacgatt

SEQ ID NO: 62164 - DNA, 30 bp, Artificial Sequence
  Synthetic oligonucleotide
aaagttgaattcacaaaagatgaatcgatt

SEQ ID NO: 62165 - DNA, 30 bp, Artificial Sequence
  Synthetic oligonucleotide
taacactggactgagacctagtggtcgatt

SEQ ID NO: 62166 - DNA, 30 bp, Artificial Sequence
  Synthetic oligonucleotide
ccggacagtgtcgagtaacaaacgcggatt

SEQ ID NO: 62167 - DNA, 30 bp, Artificial Sequence
  Synthetic oligonucleotide
cgatgttacattgagactagtatatggatt

SEQ ID NO: 62168 - DNA, 30 bp, Artificial Sequence
  Synthetic oligonucleotide
ccgggagcgttggggatactgtaggtgatt

SEQ ID NO: 62169 - DNA, 30 bp, Artificial Sequence
  Synthetic oligonucleotide
ggctcgggcgaattaagcgacaaccatatt

SEQ ID NO: 62170 - DNA, 30 bp, Artificial Sequence
  Synthetic oligonucleotide
agaagggaggagtagcgacgagtggatatt

SEQ ID NO: 62171 - DNA, 30 bp, Artificial Sequence
  Synthetic oligonucleotide
acgggacgaggtgctagcacactgactatt

SEQ ID NO: 62172 - DNA, 30 bp, Artificial Sequence
  Synthetic oligonucleotide
tgatattagtgacgaagggcggatactatt

SEQ ID NO: 62173 - DNA, 30 bp, Artificial Sequence
  Synthetic oligonucleotide
ggaaaaggatagacgtacagtgggagtatt

SEQ ID NO: 62174 - DNA, 30 bp, Artificial Sequence
  Synthetic oligonucleotide
cgacgagtccgaagatggcattttagtatt

SEQ ID NO: 62175 - DNA, 29 bp, Artificial Sequence
  Synthetic oligonucleotide
agtcctacgaagcggatgaaggccttatt

SEQ ID NO: 62176 - DNA, 30 bp, Artificial Sequence
  Synthetic oligonucleotide
catcgagctaatagggggaaccgcaaactt

SEQ ID NO: 62177 - DNA, 30 bp, Artificial Sequence
  Synthetic oligonucleotide
aactgccggggagtctaacatggggaactt

SEQ ID NO: 62178 - DNA, 30 bp, Artificial Sequence
  Synthetic oligonucleotide
cgagcgagtctcggagtggactatgaactt

SEQ ID NO: 62179 - DNA, 30 bp, Artificial Sequence
  Synthetic oligonucleotide
gcttgaactcgcatgggcgacgaataactt

SEQ ID NO: 62180 - DNA, 30 bp, Artificial Sequence
  Synthetic oligonucleotide
cactgggagatatacgaacgattgtaactt

SEQ ID NO: 62181 - DNA, 30 bp, Artificial Sequence
  Synthetic oligonucleotide
ggctcaacccagcacgcgagaagcacactt

SEQ ID NO: 62182 - DNA, 30 bp, Artificial Sequence
  Synthetic oligonucleotide
tacaaaatggcaccggctcgtacacgactt

SEQ ID NO: 62183 - DNA, 30 bp, Artificial Sequence
  Synthetic oligonucleotide
aacacgacatgtcagtaacacccaatactt

SEQ ID NO: 62184 - DNA, 30 bp, Artificial Sequence
  Synthetic oligonucleotide
aatatgaagcaagaggaggctaggatactt

SEQ ID NO: 62185 - DNA, 30 bp, Artificial Sequence
  Synthetic oligonucleotide
ggggtacaagcaactccaattagggtactt

SEQ ID NO: 62186 - DNA, 30 bp, Artificial Sequence
  Synthetic oligonucleotide
tcataacatgggagaattaaaaaatccctt

SEQ ID NO: 62187 - DNA, 30 bp, Artificial Sequence
  Synthetic oligonucleotide
gggcaccaaacctactcgtgtgtaagcctt

SEQ ID NO: 62188 - DNA, 30 bp, Artificial Sequence
  Synthetic oligonucleotide
tgaaggacatgtacaggggtgcacatcctt

SEQ ID NO: 62189 - DNA, 30 bp, Artificial Sequence
  Synthetic oligonucleotide
gaagacaaggcaagtccagtaccactcctt

SEQ ID NO: 62190 - DNA, 30 bp, Artificial Sequence
  Synthetic oligonucleotide
aagtataccccgccagaccagagcccgctt

SEQ ID NO: 62191 - DNA, 30 bp, Artificial Sequence
  Synthetic oligonucleotide
tcactagcaggggaaggatgatccgcgctt

SEQ ID NO: 62192 - DNA, 30 bp, Artificial Sequence
  Synthetic oligonucleotide
catgctatccgcaaatcaaacagatcgctt

SEQ ID NO: 62193 - DNA, 30 bp, Artificial Sequence
  Synthetic oligonucleotide
aggccacaaaaatagttgggccgtaggctt

SEQ ID NO: 62194 - DNA, 30 bp, Artificial Sequence
  Synthetic oligonucleotide
gggaagcgcgtaaatgcctcaagtcggctt

SEQ ID NO: 62195 - DNA, 30 bp, Artificial Sequence
  Synthetic oligonucleotide
cgtccggcgatagacgcaaaattgtggctt

SEQ ID NO: 62196 - DNA, 30 bp, Artificial Sequence
  Synthetic oligonucleotide
aaaatgagaagaggtaggcgagcatctctt

SEQ ID NO: 62197 - DNA, 30 bp, Artificial Sequence
  Synthetic oligonucleotide
gccacgaagggtcgcagagaaggacgtctt

SEQ ID NO: 62198 - DNA, 30 bp, Artificial Sequence
  Synthetic oligonucleotide
cgctagtgcaggtggtaccgccagtgtctt

SEQ ID NO: 62199 - DNA, 30 bp, Artificial Sequence
  Synthetic oligonucleotide
tgagggcgtattaggctgtcgtcacaagtt

SEQ ID NO: 62200 - DNA, 30 bp, Artificial Sequence
  Synthetic oligonucleotide
cgtccaaggcccatcaaattgaaagaagtt

SEQ ID NO: 62201 - DNA, 30 bp, Artificial Sequence
  Synthetic oligonucleotide
cggtagagtcatatagaaatcgcggaagtt

SEQ ID NO: 62202 - DNA, 31 bp, Artificial Sequence
  Synthetic oligonucleotide
taatgttgtcgaaatggagcgcaaataagtt

SEQ ID NO: 62203 - DNA, 30 bp, Artificial Sequence
  Synthetic oligonucleotide
tgagccggggacggcataaattcctaagtt

SEQ ID NO: 62204 - DNA, 30 bp, Artificial Sequence
  Synthetic oligonucleotide
tggacgaaggtcggttcattgtccccagtt

SEQ ID NO: 62205 - DNA, 30 bp, Artificial Sequence
  Synthetic oligonucleotide
gaggtggaaaagttagttcgcgatccagtt

SEQ ID NO: 62206 - DNA, 30 bp, Artificial Sequence
  Synthetic oligonucleotide
ggtggactgggtgacagtttaagctcagtt

SEQ ID NO: 62207 - DNA, 30 bp, Artificial Sequence
  Synthetic oligonucleotide
tagggaagactacgtacgggtcagtcagtt

SEQ ID NO: 62208 - DNA, 30 bp, Artificial Sequence
  Synthetic oligonucleotide
ggggtggtccatcgcaggcatctgagagtt

SEQ ID NO: 62209 - DNA, 30 bp, Artificial Sequence
  Synthetic oligonucleotide
taggaaaccggtacaccatgctgtggagtt

SEQ ID NO: 62210 - DNA, 30 bp, Artificial Sequence
  Synthetic oligonucleotide
gaaggcgaggcttgagagcccaaatgagtt

SEQ ID NO: 62211 - DNA, 30 bp, Artificial Sequence
  Synthetic oligonucleotide
tcgcggaagccggacatcaagaagatagtt

SEQ ID NO: 62212 - DNA, 30 bp, Artificial Sequence
  Synthetic oligonucleotide
acatcatgcaccctgaccccacgtatagtt

SEQ ID NO: 62213 - DNA, 30 bp, Artificial Sequence
  Synthetic oligonucleotide
cccagagaccgaacgtcaggccagttagtt

SEQ ID NO: 62214 - DNA, 30 bp, Artificial Sequence
  Synthetic oligonucleotide
aggcggtactggtcaatagaaagcaacgtt

SEQ ID NO: 62215 - DNA, 31 bp, Artificial Sequence
  Synthetic oligonucleotide
aatcaaggtggacataggggtaaggtacgtt

SEQ ID NO: 62216 - DNA, 30 bp, Artificial Sequence
  Synthetic oligonucleotide
agtacagtgatacagcgtagggttcgcgtt

SEQ ID NO: 62217 - DNA, 30 bp, Artificial Sequence
  Synthetic oligonucleotide
cgacacgtcatgcgtccacatgcgaaggtt

SEQ ID NO: 62218 - DNA, 30 bp, Artificial Sequence
  Synthetic oligonucleotide
caaagtgcgaggtgacctagtccacaggtt

SEQ ID NO: 62219 - DNA, 30 bp, Artificial Sequence
  Synthetic oligonucleotide
ggaacacagctctaatggcacggataggtt

SEQ ID NO: 62220 - DNA, 30 bp, Artificial Sequence
  Synthetic oligonucleotide
ggaagactttcaaaatacacgagttaggtt

SEQ ID NO: 62221 - DNA, 30 bp, Artificial Sequence
  Synthetic oligonucleotide
cgacggcgacctttgaatcgactaacggtt

SEQ ID NO: 62222 - DNA, 30 bp, Artificial Sequence
  Synthetic oligonucleotide
acggaaggcacactagtcggaaaggcggtt

SEQ ID NO: 62223 - DNA, 30 bp, Artificial Sequence
  Synthetic oligonucleotide
tgacactagacgtggcacagggacatggtt

SEQ ID NO: 62224 - DNA, 30 bp, Artificial Sequence
  Synthetic oligonucleotide
tgccgggaagaccggggagcatgagtggtt

SEQ ID NO: 62225 - DNA, 30 bp, Artificial Sequence
  Synthetic oligonucleotide
gggcgcgaagtatccaggctgagttatgtt

SEQ ID NO: 62226 - DNA, 30 bp, Artificial Sequence
  Synthetic oligonucleotide
gcatggccgacgtgcccaggtactgctgtt

SEQ ID NO: 62227 - DNA, 30 bp, Artificial Sequence
  Synthetic oligonucleotide
gcttaagcatcaacgtaatggaaatgtgtt

SEQ ID NO: 62228 - DNA, 30 bp, Artificial Sequence
  Synthetic oligonucleotide
cagactcgagtcggacaagcagaataattt

SEQ ID NO: 62229 - DNA, 30 bp, Artificial Sequence
  Synthetic oligonucleotide
acatcagaaaaccataacatcgcataattt

SEQ ID NO: 62230 - DNA, 30 bp, Artificial Sequence
  Synthetic oligonucleotide
acgtaagatatcagagagtcgaaaacattt

SEQ ID NO: 62231 - DNA, 30 bp, Artificial Sequence
  Synthetic oligonucleotide
gcggttaaccgaacaaaaaatacatcattt

SEQ ID NO: 62232 - DNA, 30 bp, Artificial Sequence
  Synthetic oligonucleotide
cgaaacgtagatcaatgttggtcaggattt

SEQ ID NO: 62233 - DNA, 30 bp, Artificial Sequence
  Synthetic oligonucleotide
acgggtggtgtggggattcaaatctgattt

SEQ ID NO: 62234 - DNA, 30 bp, Artificial Sequence
  Synthetic oligonucleotide
cgagtaaaacggtcgtggtgtgacgtattt

SEQ ID NO: 62235 - DNA, 30 bp, Artificial Sequence
  Synthetic oligonucleotide
acgtgctggagataagcagccttacacttt

SEQ ID NO: 62236 - DNA, 30 bp, Artificial Sequence
  Synthetic oligonucleotide
atggcacataaccgtgacgaaaaccacttt

SEQ ID NO: 62237 - DNA, 30 bp, Artificial Sequence
  Synthetic oligonucleotide
gttggcggtgtggatgaattagctgacttt

SEQ ID NO: 62238 - DNA, 30 bp, Artificial Sequence
  Synthetic oligonucleotide
gagcaacatatatagggaaagcttgacttt

SEQ ID NO: 62239 - DNA, 30 bp, Artificial Sequence
  Synthetic oligonucleotide
caaggtgcctggctaatggaagtatacttt

SEQ ID NO: 62240 - DNA, 30 bp, Artificial Sequence
  Synthetic oligonucleotide
agaggacaaggtcaggtcatatcgagcttt

SEQ ID NO: 62241 - DNA, 30 bp, Artificial Sequence
  Synthetic oligonucleotide
actggggagtgatagtccaggtaccgcttt

SEQ ID NO: 62242 - DNA, 30 bp, Artificial Sequence
  Synthetic oligonucleotide
tcgtcctgagaatcagagggcaggggcttt

SEQ ID NO: 62243 - DNA, 30 bp, Artificial Sequence
  Synthetic oligonucleotide
tcgaaggaggtcctcaaataatcattcttt

SEQ ID NO: 62244 - DNA, 30 bp, Artificial Sequence
  Synthetic oligonucleotide
ccgagatcgccgccggataatcagaagttt

SEQ ID NO: 62245 - DNA, 30 bp, Artificial Sequence
  Synthetic oligonucleotide
cgacatgtagaaatgtataaagctgagttt

SEQ ID NO: 62246 - DNA, 30 bp, Artificial Sequence
  Synthetic oligonucleotide
aaggtgcacagcgactaggtagtatagttt

SEQ ID NO: 62247 - DNA, 30 bp, Artificial Sequence
  Synthetic oligonucleotide
gcgcgcatcgtgtgggcacacccttagttt

SEQ ID NO: 62248 - DNA, 30 bp, Artificial Sequence
  Synthetic oligonucleotide
cctcgcaggtgggggcaggggagagcgttt

SEQ ID NO: 62249 - DNA, 30 bp, Artificial Sequence
  Synthetic oligonucleotide
ggagttgccttcggataggggcgctcgttt

SEQ ID NO: 62250 - DNA, 30 bp, Artificial Sequence
  Synthetic oligonucleotide
tcgaggagtgtgactgtgacaataaggttt

SEQ ID NO: 62251 - DNA, 30 bp, Artificial Sequence
  Synthetic oligonucleotide
cgtcagtcttagctagagaacatgaggttt

SEQ ID NO: 62252 - DNA, 30 bp, Artificial Sequence
  Synthetic oligonucleotide
acgaaggatgtcgaggggcattctcggttt

SEQ ID NO: 62253 - DNA, 30 bp, Artificial Sequence
  Synthetic oligonucleotide
agacggtgaaacggttaatcaaatgggttt

SEQ ID NO: 62254 - DNA, 30 bp, Artificial Sequence
  Synthetic oligonucleotide
cgcggatttgtgacggtatgcctatggttt

SEQ ID NO: 62255 - DNA, 30 bp, Artificial Sequence
  Synthetic oligonucleotide
ccgtaagggcggggcgataagatgatgttt

SEQ ID NO: 62256 - DNA, 30 bp, Artificial Sequence
  Synthetic oligonucleotide
agaactctcagagcttagaaacaagtgttt

SEQ ID NO: 62257 - DNA, 30 bp, Artificial Sequence
  Synthetic oligonucleotide
caatacggccaaggagacaaaaacactttt

SEQ ID NO: 62258 - DNA, 30 bp, Artificial Sequence
  Synthetic oligonucleotide
cgtacgagaataatatgtgcgggaaaaaaa

SEQ ID NO: 62259 - DNA, 30 bp, Artificial Sequence
  Synthetic oligonucleotide
cgggatctcacataaagcactgggaaaaaa

SEQ ID NO: 62260 - DNA, 30 bp, Artificial Sequence
  Synthetic oligonucleotide
gtcatggatagtgtatgtcgcccacaaaaa

SEQ ID NO: 62261 - DNA, 30 bp, Artificial Sequence
  Synthetic oligonucleotide
gaacaggggcatgtagtaacgtgataaaaa

SEQ ID NO: 62262 - DNA, 30 bp, Artificial Sequence
  Synthetic oligonucleotide
agataaatccggcgactcatcctataaaaa

SEQ ID NO: 62263 - DNA, 30 bp, Artificial Sequence
  Synthetic oligonucleotide
gggaccatcattagttcagacgaaacaaaa

SEQ ID NO: 62264 - DNA, 30 bp, Artificial Sequence
  Synthetic oligonucleotide
cgtggatggattggtttcaagtacacaaaa

SEQ ID NO: 62265 - DNA, 30 bp, Artificial Sequence
  Synthetic oligonucleotide
tcaatctttcgctaaaacctcattacaaaa

SEQ ID NO: 62266 - DNA, 30 bp, Artificial Sequence
  Synthetic oligonucleotide
ttgagtacggctgccgactacgtcccaaaa

SEQ ID NO: 62267 - DNA, 30 bp, Artificial Sequence
  Synthetic oligonucleotide
aggcaataagattacgcaataagggcaaaa

SEQ ID NO: 62268 - DNA, 30 bp, Artificial Sequence
  Synthetic oligonucleotide
acaaggagaatccggtcttaggcctcaaaa

SEQ ID NO: 62269 - DNA, 30 bp, Artificial Sequence
  Synthetic oligonucleotide
aaggcgcacgagtaagggaatattagaaaa

SEQ ID NO: 62270 - DNA, 30 bp, Artificial Sequence
  Synthetic oligonucleotide
gtgttccattgggatacaggcgaacgaaaa

SEQ ID NO: 62271 - DNA, 30 bp, Artificial Sequence
  Synthetic oligonucleotide
gacacatcaataaagcgagtcgaacgaaaa

SEQ ID NO: 62272 - DNA, 30 bp, Artificial Sequence
  Synthetic oligonucleotide
acggcaccgtccccgctatacgtacgaaaa

SEQ ID NO: 62273 - DNA, 30 bp, Artificial Sequence
  Synthetic oligonucleotide
cgatggaaaaggagtcggcccgaccgaaaa

SEQ ID NO: 62274 - DNA, 30 bp, Artificial Sequence
  Synthetic oligonucleotide
aagatgtaaccgtgttagggcaattgaaaa

SEQ ID NO: 62275 - DNA, 30 bp, Artificial Sequence
  Synthetic oligonucleotide
gtgaggacttcctcaatgccagcttgaaaa

SEQ ID NO: 62276 - DNA, 30 bp, Artificial Sequence
  Synthetic oligonucleotide
acgagagattgggatccgcatttaataaaa

SEQ ID NO: 62277 - DNA, 30 bp, Artificial Sequence
  Synthetic oligonucleotide
gctcaataggcgagttggagagtcataaaa

SEQ ID NO: 62278 - DNA, 30 bp, Artificial Sequence
  Synthetic oligonucleotide
agcaattacaacccaaggttccatataaaa

SEQ ID NO: 62279 - DNA, 30 bp, Artificial Sequence
  Synthetic oligonucleotide
tctaagtgatcaacaaatacgacactaaaa

SEQ ID NO: 62280 - DNA, 31 bp, Artificial Sequence
  Synthetic oligonucleotide
ttattcatggcgtcaaacggtgtaagtaaaa

SEQ ID NO: 62281 - DNA, 30 bp, Artificial Sequence
  Synthetic oligonucleotide
cgttccacagatcgtccaatgtcattaaaa

SEQ ID NO: 62282 - DNA, 30 bp, Artificial Sequence
  Synthetic oligonucleotide
ctgtaaagagtgaacgacccgcgattaaaa

SEQ ID NO: 62283 - DNA, 30 bp, Artificial Sequence
  Synthetic oligonucleotide
cggaaggcttaaggcgtgcggtgcttaaaa

SEQ ID NO: 62284 - DNA, 30 bp, Artificial Sequence
  Synthetic oligonucleotide
gtatcgtaatactaagggaacggtcacaaa

SEQ ID NO: 62285 - DNA, 30 bp, Artificial Sequence
  Synthetic oligonucleotide
aaaaatgggacgggttcgagcaccgacaaa

SEQ ID NO: 62286 - DNA, 30 bp, Artificial Sequence
  Synthetic oligonucleotide
cgttcgatatgtgctaatctatctgacaaa

SEQ ID NO: 62287 - DNA, 30 bp, Artificial Sequence
  Synthetic oligonucleotide
aagtggccatatcgaggggtggaatacaaa

SEQ ID NO: 62288 - DNA, 30 bp, Artificial Sequence
  Synthetic oligonucleotide
acaagcgtagcgccccagcatcagtacaaa

SEQ ID NO: 62289 - DNA, 30 bp, Artificial Sequence
  Synthetic oligonucleotide
tagcgcaaattaaagagaccacacaccaaa

SEQ ID NO: 62290 - DNA, 30 bp, Artificial Sequence
  Synthetic oligonucleotide
aacgcaagttacgtcaagtgtagtcccaaa

SEQ ID NO: 62291 - DNA, 30 bp, Artificial Sequence
  Synthetic oligonucleotide
atggaagcggaggagacaatgttccgcaaa

SEQ ID NO: 62292 - DNA, 30 bp, Artificial Sequence
  Synthetic oligonucleotide
tgagattagtctcgtaactgcaacggcaaa

SEQ ID NO: 62293 - DNA, 30 bp, Artificial Sequence
  Synthetic oligonucleotide
tcaagcatatcgtaggggggcgccggcaaa

SEQ ID NO: 62294 - DNA, 30 bp, Artificial Sequence
  Synthetic oligonucleotide
gcaaagagcgaggcatatagtggcggcaaa

SEQ ID NO: 62295 - DNA, 30 bp, Artificial Sequence
  Synthetic oligonucleotide
agagcacgggcgggctccgttaactgcaaa

SEQ ID NO: 62296 - DNA, 30 bp, Artificial Sequence
  Synthetic oligonucleotide
attacatgataaggggagaataagtgcaaa

SEQ ID NO: 62297 - DNA, 30 bp, Artificial Sequence
  Synthetic oligonucleotide
caatagactcatttcaagcctcggtgcaaa

SEQ ID NO: 62298 - DNA, 30 bp, Artificial Sequence
  Synthetic oligonucleotide
ggactcatggcgagacagctacttatcaaa

SEQ ID NO: 62299 - DNA, 30 bp, Artificial Sequence
  Synthetic oligonucleotide
gaggcgatgacgatgtagcccaagctcaaa

SEQ ID NO: 62300 - DNA, 30 bp, Artificial Sequence
  Synthetic oligonucleotide
tgggagacctggcagacggtccatctcaaa

SEQ ID NO: 62301 - DNA, 30 bp, Artificial Sequence
  Synthetic oligonucleotide
tatcgctaagcacaagccagtgacgtcaaa

SEQ ID NO: 62302 - DNA, 30 bp, Artificial Sequence
  Synthetic oligonucleotide
gaagggctgacgaacgtgcgctatgtcaaa

SEQ ID NO: 62303 - DNA, 30 bp, Artificial Sequence
  Synthetic oligonucleotide
gtcggtccctacaacggatacaagttcaaa

SEQ ID NO: 62304 - DNA, 29 bp, Artificial Sequence
  Synthetic oligonucleotide
atcagcagcagttatgtcgtagtaagaaa

SEQ ID NO: 62305 - DNA, 30 bp, Artificial Sequence
  Synthetic oligonucleotide
ggctgagtccgggacttagtggcacagaaa

SEQ ID NO: 62306 - DNA, 30 bp, Artificial Sequence
  Synthetic oligonucleotide
agagccattaagggcccaagtatacagaaa

SEQ ID NO: 62307 - DNA, 30 bp, Artificial Sequence
  Synthetic oligonucleotide
cgcgagcttcattggcagctaacccagaaa

SEQ ID NO: 62308 - DNA, 30 bp, Artificial Sequence
  Synthetic oligonucleotide
acaaatggggcgatgagggtagggcagaaa

SEQ ID NO: 62309 - DNA, 30 bp, Artificial Sequence
  Synthetic oligonucleotide
aggaggtaactagctcgaagagtgcagaaa

SEQ ID NO: 62310 - DNA, 30 bp, Artificial Sequence
  Synthetic oligonucleotide
caaagtcatggtcggaggcctccagagaaa

SEQ ID NO: 62311 - DNA, 30 bp, Artificial Sequence
  Synthetic oligonucleotide
ggagcgacgtgaattatataacgagagaaa

SEQ ID NO: 62312 - DNA, 30 bp, Artificial Sequence
  Synthetic oligonucleotide
gaggcgggcatagcctttgaaagcgagaaa

SEQ ID NO: 62313 - DNA, 30 bp, Artificial Sequence
  Synthetic oligonucleotide
gagacagtattaacagtgcggcgcgagaaa

SEQ ID NO: 62314 - DNA, 30 bp, Artificial Sequence
  Synthetic oligonucleotide
gacaggaagcctgagccactgtctgagaaa

SEQ ID NO: 62315 - DNA, 30 bp, Artificial Sequence
  Synthetic oligonucleotide
tacagcgtaaattcgccgggtggtgagaaa

SEQ ID NO: 62316 - DNA, 30 bp, Artificial Sequence
  Synthetic oligonucleotide
ttgtaatcgcgaccccagaaagaatagaaa

SEQ ID NO: 62317 - DNA, 30 bp, Artificial Sequence
  Synthetic oligonucleotide
taagaacgtcctatggtagaggaatagaaa

SEQ ID NO: 62318 - DNA, 30 bp, Artificial Sequence
  Synthetic oligonucleotide
ggtaaagccgtcgcggagaaacattagaaa

SEQ ID NO: 62319 - DNA, 30 bp, Artificial Sequence
  Synthetic oligonucleotide
caccacgcgtgacaggcggcagacacgaaa

SEQ ID NO: 62320 - DNA, 30 bp, Artificial Sequence
  Synthetic oligonucleotide
cagttacatcacaagcgtgacttaccgaaa

SEQ ID NO: 62321 - DNA, 30 bp, Artificial Sequence
  Synthetic oligonucleotide
gcgaggtaaaggatcccgggtgagccgaaa

SEQ ID NO: 62322 - DNA, 30 bp, Artificial Sequence
  Synthetic oligonucleotide
agagagggggagaaacaggagtatccgaaa

SEQ ID NO: 62323 - DNA, 30 bp, Artificial Sequence
  Synthetic oligonucleotide
agccggaaaatgggctttgggacaaggaaa

SEQ ID NO: 62324 - DNA, 30 bp, Artificial Sequence
  Synthetic oligonucleotide
ctcgtagagaactcgttctgaaccaggaaa

SEQ ID NO: 62325 - DNA, 30 bp, Artificial Sequence
  Synthetic oligonucleotide
acaggagggacctcgaaggaattcaggaaa

SEQ ID NO: 62326 - DNA, 30 bp, Artificial Sequence
  Synthetic oligonucleotide
acgcagatgaggcaccgtcttagtaggaaa

SEQ ID NO: 62327 - DNA, 30 bp, Artificial Sequence
  Synthetic oligonucleotide
cgtatagtaagcgtaaactgctgtaggaaa

SEQ ID NO: 62328 - DNA, 30 bp, Artificial Sequence
  Synthetic oligonucleotide
cgtaatcgacggtcaacggcatgacggaaa

SEQ ID NO: 62329 - DNA, 30 bp, Artificial Sequence
  Synthetic oligonucleotide
ttacgtcggtaaacacgtcgggctcggaaa

SEQ ID NO: 62330 - DNA, 30 bp, Artificial Sequence
  Synthetic oligonucleotide
ggtaactgacaatattcagtatccgggaaa

SEQ ID NO: 62331 - DNA, 30 bp, Artificial Sequence
  Synthetic oligonucleotide
ggtcacagtcggggaggaggggaatggaaa

SEQ ID NO: 62332 - DNA, 30 bp, Artificial Sequence
  Synthetic oligonucleotide
gggtagagtaaggactactgctcatggaaa

SEQ ID NO: 62333 - DNA, 30 bp, Artificial Sequence
  Synthetic oligonucleotide
agatcagctagaagctaattatactggaaa

SEQ ID NO: 62334 - DNA, 30 bp, Artificial Sequence
  Synthetic oligonucleotide
gttccaaggtgatcgaatgagtggtggaaa

SEQ ID NO: 62335 - DNA, 30 bp, Artificial Sequence
  Synthetic oligonucleotide
aacccggatctggcaaactcaagcatgaaa

SEQ ID NO: 62336 - DNA, 30 bp, Artificial Sequence
  Synthetic oligonucleotide
ttacagtggggaggaaaaaaggttatgaaa

SEQ ID NO: 62337 - DNA, 30 bp, Artificial Sequence
  Synthetic oligonucleotide
agacagcaatgagtctaggggatactgaaa

SEQ ID NO: 62338 - DNA, 30 bp, Artificial Sequence
  Synthetic oligonucleotide
cgtaaatatagggtaaacaataggctgaaa

SEQ ID NO: 62339 - DNA, 30 bp, Artificial Sequence
  Synthetic oligonucleotide
gcgattgtgcaagaaatctacaaggtgaaa

SEQ ID NO: 62340 - DNA, 30 bp, Artificial Sequence
  Synthetic oligonucleotide
ggcgatattctagcgacatctccggtgaaa

SEQ ID NO: 62341 - DNA, 30 bp, Artificial Sequence
  Synthetic oligonucleotide
agcgcatgcggcgtttgagtcaggttgaaa

SEQ ID NO: 62342 - DNA, 30 bp, Artificial Sequence
  Synthetic oligonucleotide
acggcattgttggcgatcgggaggttgaaa

SEQ ID NO: 62343 - DNA, 30 bp, Artificial Sequence
  Synthetic oligonucleotide
aactgtgactagagcagtatagtgttgaaa

SEQ ID NO: 62344 - DNA, 30 bp, Artificial Sequence
  Synthetic oligonucleotide
gcaactcatgagcacactacggatttgaaa

SEQ ID NO: 62345 - DNA, 30 bp, Artificial Sequence
  Synthetic oligonucleotide
caccaacacacgcacaccgtcccgcataaa

SEQ ID NO: 62346 - DNA, 30 bp, Artificial Sequence
  Synthetic oligonucleotide
ggtgcctcaggcaggagtgcagcgcataaa

SEQ ID NO: 62347 - DNA, 30 bp, Artificial Sequence
  Synthetic oligonucleotide
caaaccggggaatggcgacgtggtcataaa

SEQ ID NO: 62348 - DNA, 30 bp, Artificial Sequence
  Synthetic oligonucleotide
tgagtacgatacgatgccttcgaagataaa

SEQ ID NO: 62349 - DNA, 30 bp, Artificial Sequence
  Synthetic oligonucleotide
ggctgagatctatccaatcaggcatataaa

SEQ ID NO: 62350 - DNA, 30 bp, Artificial Sequence
  Synthetic oligonucleotide
cgtaccgaacatattactgaggtatataaa

SEQ ID NO: 62351 - DNA, 30 bp, Artificial Sequence
  Synthetic oligonucleotide
gtgtggcggaactgtccaaacgcgactaaa

SEQ ID NO: 62352 - DNA, 30 bp, Artificial Sequence
  Synthetic oligonucleotide
aacggcaccaggatagcgctgaatactaaa

SEQ ID NO: 62353 - DNA, 30 bp, Artificial Sequence
  Synthetic oligonucleotide
cgagtataataaagtctcgcccatactaaa

SEQ ID NO: 62354 - DNA, 30 bp, Artificial Sequence
  Synthetic oligonucleotide
ccgtcacgttaacaagtttatcggcctaaa

SEQ ID NO: 62355 - DNA, 30 bp, Artificial Sequence
  Synthetic oligonucleotide
tgcgacaccgaccggaccggcatgcctaaa

SEQ ID NO: 62356 - DNA, 30 bp, Artificial Sequence
  Synthetic oligonucleotide
agatggagaaccgaaaagcgtcgagctaaa

SEQ ID NO: 62357 - DNA, 30 bp, Artificial Sequence
  Synthetic oligonucleotide
agtattgatcaaggaaacgcctgcgctaaa

SEQ ID NO: 62358 - DNA, 30 bp, Artificial Sequence
  Synthetic oligonucleotide
tgaaccaccacaaaagagtaaactgctaaa

SEQ ID NO: 62359 - DNA, 30 bp, Artificial Sequence
  Synthetic oligonucleotide
gcggattgtgcaaaaacgatcccaagtaaa

SEQ ID NO: 62360 - DNA, 30 bp, Artificial Sequence
  Synthetic oligonucleotide
taggcgcagtctgacgacgactgcagtaaa

SEQ ID NO: 62361 - DNA, 30 bp, Artificial Sequence
  Synthetic oligonucleotide
tcaatactattcaaagaatgcgaccgtaaa

SEQ ID NO: 62362 - DNA, 30 bp, Artificial Sequence
  Synthetic oligonucleotide
caagcggcaaagttggagtacgccggtaaa

SEQ ID NO: 62363 - DNA, 30 bp, Artificial Sequence
  Synthetic oligonucleotide
cgagggaccgattgcccgtgtagtggtaaa

SEQ ID NO: 62364 - DNA, 30 bp, Artificial Sequence
  Synthetic oligonucleotide
taacggtcttaccgtagcagcggatgtaaa

SEQ ID NO: 62365 - DNA, 30 bp, Artificial Sequence
  Synthetic oligonucleotide
ggaacggttcaaccggggtgccactgtaaa

SEQ ID NO: 62366 - DNA, 30 bp, Artificial Sequence
  Synthetic oligonucleotide
caggtcggtatctaactggagcactgtaaa

SEQ ID NO: 62367 - DNA, 30 bp, Artificial Sequence
  Synthetic oligonucleotide
ggctaagacccatccaattacgtcattaaa

SEQ ID NO: 62368 - DNA, 30 bp, Artificial Sequence
  Synthetic oligonucleotide
gcggaaccgcaatctaagttggaggttaaa

SEQ ID NO: 62369 - DNA, 30 bp, Artificial Sequence
  Synthetic oligonucleotide
agcaggtatcatcaaatcggtccgaaacaa

SEQ ID NO: 62370 - DNA, 30 bp, Artificial Sequence
  Synthetic oligonucleotide
aatgcggtccgaaccgaaaggcagtaacaa

SEQ ID NO: 62371 - DNA, 30 bp, Artificial Sequence
  Synthetic oligonucleotide
tcgcaagaactctagcctgacatttaacaa

SEQ ID NO: 62372 - DNA, 30 bp, Artificial Sequence
  Synthetic oligonucleotide
gtgtggcacagttcattgcagcaaacacaa

SEQ ID NO: 62373 - DNA, 30 bp, Artificial Sequence
  Synthetic oligonucleotide
atgaccaccggacaacctagccccccacaa

SEQ ID NO: 62374 - DNA, 29 bp, Artificial Sequence
  Synthetic oligonucleotide
gcatatgaagcctagggagagccccacaa

SEQ ID NO: 62375 - DNA, 30 bp, Artificial Sequence
  Synthetic oligonucleotide
gctcaaagaatcatgagacaggttccacaa

SEQ ID NO: 62376 - DNA, 30 bp, Artificial Sequence
  Synthetic oligonucleotide
atagcatagccagtctcctgtgaagcacaa

SEQ ID NO: 62377 - DNA, 30 bp, Artificial Sequence
  Synthetic oligonucleotide
tgcatatggagaccagaactgatcgcacaa

SEQ ID NO: 62378 - DNA, 30 bp, Artificial Sequence
  Synthetic oligonucleotide
cgaggaagtgttgtgcgggaagtggcacaa

SEQ ID NO: 62379 - DNA, 30 bp, Artificial Sequence
  Synthetic oligonucleotide
gcacggcctagcctcagctacgaatcacaa

SEQ ID NO: 62380 - DNA, 30 bp, Artificial Sequence
  Synthetic oligonucleotide
agcgacccccaccaagctaggatctcacaa

SEQ ID NO: 62381 - DNA, 30 bp, Artificial Sequence
  Synthetic oligonucleotide
gaggggttggagatcagacactacagacaa

SEQ ID NO: 62382 - DNA, 30 bp, Artificial Sequence
  Synthetic oligonucleotide
agaaattcgtagtcaaacggctacagacaa

SEQ ID NO: 62383 - DNA, 30 bp, Artificial Sequence
  Synthetic oligonucleotide
ccaacccgcgcccaaccgaaacctagacaa

SEQ ID NO: 62384 - DNA, 30 bp, Artificial Sequence
  Synthetic oligonucleotide
gtacgcacccaatacggcgaaagtagacaa

SEQ ID NO: 62385 - DNA, 30 bp, Artificial Sequence
  Synthetic oligonucleotide
tcaaaattcatcaatgccatatttagacaa

SEQ ID NO: 62386 - DNA, 30 bp, Artificial Sequence
  Synthetic oligonucleotide
cgaacccagggagggaacgtcatccgacaa

SEQ ID NO: 62387 - DNA, 30 bp, Artificial Sequence
  Synthetic oligonucleotide
aattgtggagcaagagcagccaagcgacaa

SEQ ID NO: 62388 - DNA, 30 bp, Artificial Sequence
  Synthetic oligonucleotide
aggcgtaccgatcacgaggataggcgacaa

SEQ ID NO: 62389 - DNA, 30 bp, Artificial Sequence
  Synthetic oligonucleotide
tccaacggggttacatccgccatgcgacaa

SEQ ID NO: 62390 - DNA, 30 bp, Artificial Sequence
  Synthetic oligonucleotide
tcacgaaccggagcctattagtgctgacaa

SEQ ID NO: 62391 - DNA, 30 bp, Artificial Sequence
  Synthetic oligonucleotide
agctatcacagcgtgtggcctccgtgacaa

SEQ ID NO: 62392 - DNA, 30 bp, Artificial Sequence
  Synthetic oligonucleotide
cgaagccaagggcattgcacgtcttgacaa

SEQ ID NO: 62393 - DNA, 30 bp, Artificial Sequence
  Synthetic oligonucleotide
acacatgtgtcgttaagctcataaatacaa

SEQ ID NO: 62394 - DNA, 30 bp, Artificial Sequence
  Synthetic oligonucleotide
ggcctatggtgaggtctgtcaaagatacaa

SEQ ID NO: 62395 - DNA, 30 bp, Artificial Sequence
  Synthetic oligonucleotide
ccccacaacaaggcacgaagtggtcaccaa

SEQ ID NO: 62396 - DNA, 30 bp, Artificial Sequence
  Synthetic oligonucleotide
aggtcccagagataacgccaaaacgaccaa

SEQ ID NO: 62397 - DNA, 30 bp, Artificial Sequence
  Synthetic oligonucleotide
aacggacaaattcgcaccatggccgaccaa

SEQ ID NO: 62398 - DNA, 30 bp, Artificial Sequence
  Synthetic oligonucleotide
cgaatgaacacggccggacagtacacccaa

SEQ ID NO: 62399 - DNA, 30 bp, Artificial Sequence
  Synthetic oligonucleotide
agagaacaggagatgttgaaagggacccaa

SEQ ID NO: 62400 - DNA, 30 bp, Artificial Sequence
  Synthetic oligonucleotide
ctacaatacgagtcgtcaaatgaaccccaa

SEQ ID NO: 62401 - DNA, 30 bp, Artificial Sequence
  Synthetic oligonucleotide
acatgagggattcattcaattacaccccaa

SEQ ID NO: 62402 - DNA, 30 bp, Artificial Sequence
  Synthetic oligonucleotide
gcctacgagtccgtagcggctgacagccaa

SEQ ID NO: 62403 - DNA, 30 bp, Artificial Sequence
  Synthetic oligonucleotide
ggaaacataacagaaccgcaacccagccaa

SEQ ID NO: 62404 - DNA, 30 bp, Artificial Sequence
  Synthetic oligonucleotide
cgtatatgggggtcttactatatgagccaa

SEQ ID NO: 62405 - DNA, 30 bp, Artificial Sequence
  Synthetic oligonucleotide
aggcacctacgtaagctacgcttgcgccaa

SEQ ID NO: 62406 - DNA, 30 bp, Artificial Sequence
  Synthetic oligonucleotide
tgccataagtgctactaaggttacggccaa

SEQ ID NO: 62407 - DNA, 30 bp, Artificial Sequence
  Synthetic oligonucleotide
agattgacgattacaaacgacacaatccaa

SEQ ID NO: 62408 - DNA, 30 bp, Artificial Sequence
  Synthetic oligonucleotide
cacgctacatcgcccggctagtccatccaa

SEQ ID NO: 62409 - DNA, 30 bp, Artificial Sequence
  Synthetic oligonucleotide
agcgggacccagcgtaagcccctcctccaa

SEQ ID NO: 62410 - DNA, 30 bp, Artificial Sequence
  Synthetic oligonucleotide
tgtgtgcgggaaactcattatcaggtccaa

SEQ ID NO: 62411 - DNA, 30 bp, Artificial Sequence
  Synthetic oligonucleotide
tgtaacactggctaccattccatattccaa

SEQ ID NO: 62412 - DNA, 30 bp, Artificial Sequence
  Synthetic oligonucleotide
ccgacgagatggcgcccgcgctgcttccaa

SEQ ID NO: 62413 - DNA, 30 bp, Artificial Sequence
  Synthetic oligonucleotide
atagaggggtgcgatcggaatcggttccaa

SEQ ID NO: 62414 - DNA, 30 bp, Artificial Sequence
  Synthetic oligonucleotide
caaccagaggaaaagaacggctatttccaa

SEQ ID NO: 62415 - DNA, 30 bp, Artificial Sequence
  Synthetic oligonucleotide
agtacactaaggccccagtgagtacagcaa

SEQ ID NO: 62416 - DNA, 30 bp, Artificial Sequence
  Synthetic oligonucleotide
taaggggaaggtccaccctcagaagagcaa

SEQ ID NO: 62417 - DNA, 30 bp, Artificial Sequence
  Synthetic oligonucleotide
cccggacctcagaagtggcggaccgagcaa

SEQ ID NO: 62418 - DNA, 30 bp, Artificial Sequence
  Synthetic oligonucleotide
ataggcgacatacgggagcctctcgagcaa

SEQ ID NO: 62419 - DNA, 30 bp, Artificial Sequence
  Synthetic oligonucleotide
ggacccttaacgtcgagcaagatcacgcaa

SEQ ID NO: 62420 - DNA, 30 bp, Artificial Sequence
  Synthetic oligonucleotide
agatgcgaacagaagggctactctacgcaa

SEQ ID NO: 62421 - DNA, 30 bp, Artificial Sequence
  Synthetic oligonucleotide
agagagctctaacgcaaggtcaaagcgcaa

SEQ ID NO: 62422 - DNA, 30 bp, Artificial Sequence
  Synthetic oligonucleotide
cggtatcgtcatgcgtcgaaattcgcgcaa

SEQ ID NO: 62423 - DNA, 30 bp, Artificial Sequence
  Synthetic oligonucleotide
atggtgatgttgagacacgtgtgatcgcaa

SEQ ID NO: 62424 - DNA, 30 bp, Artificial Sequence
  Synthetic oligonucleotide
attaggtggttaaagcttggtcacaggcaa

SEQ ID NO: 62425 - DNA, 30 bp, Artificial Sequence
  Synthetic oligonucleotide
ctatgggagcatctgggacagcaatggcaa

SEQ ID NO: 62426 - DNA, 30 bp, Artificial Sequence
  Synthetic oligonucleotide
acctaccggccaggtaagcaatcgtggcaa

SEQ ID NO: 62427 - DNA, 30 bp, Artificial Sequence
  Synthetic oligonucleotide
agttcacaaaggagcgacttagatatgcaa

SEQ ID NO: 62428 - DNA, 30 bp, Artificial Sequence
  Synthetic oligonucleotide
ggccacaatcagctaaaaaagtatgtgcaa

SEQ ID NO: 62429 - DNA, 30 bp, Artificial Sequence
  Synthetic oligonucleotide
taaaacgaagacaagcacgtattacatcaa

SEQ ID NO: 62430 - DNA, 30 bp, Artificial Sequence
  Synthetic oligonucleotide
acagtcatgaaaagtgcagacacgcatcaa

SEQ ID NO: 62431 - DNA, 30 bp, Artificial Sequence
  Synthetic oligonucleotide
gctactgctgaactaagctctaaggatcaa

SEQ ID NO: 62432 - DNA, 30 bp, Artificial Sequence
  Synthetic oligonucleotide
aggtttaccgccctcgcacacacaactcaa

SEQ ID NO: 62433 - DNA, 30 bp, Artificial Sequence
  Synthetic oligonucleotide
ggagaggggcatagatatctggtcactcaa

SEQ ID NO: 62434 - DNA, 30 bp, Artificial Sequence
  Synthetic oligonucleotide
tacctagaatgggccaggggtgcagctcaa

SEQ ID NO: 62435 - DNA, 30 bp, Artificial Sequence
  Synthetic oligonucleotide
gacgggtaataaataagcccaacggctcaa

SEQ ID NO: 62436 - DNA, 30 bp, Artificial Sequence
  Synthetic oligonucleotide
tataaagtgagaaacaatcgcagggctcaa

SEQ ID NO: 62437 - DNA, 30 bp, Artificial Sequence
  Synthetic oligonucleotide
gtgatggcgataacgtcgtcctcacgtcaa

SEQ ID NO: 62438 - DNA, 30 bp, Artificial Sequence
  Synthetic oligonucleotide
cagggtgtagagagtccttcagaaggtcaa

SEQ ID NO: 62439 - DNA, 30 bp, Artificial Sequence
  Synthetic oligonucleotide
agctcgaccacgttggaaaagctttgtcaa

SEQ ID NO: 62440 - DNA, 30 bp, Artificial Sequence
  Synthetic oligonucleotide
tcaacatgacgagtgtggttgcgtattcaa

SEQ ID NO: 62441 - DNA, 30 bp, Artificial Sequence
  Synthetic oligonucleotide
gtatcagcagcccgagggaataaacttcaa

SEQ ID NO: 62442 - DNA, 30 bp, Artificial Sequence
  Synthetic oligonucleotide
ggtgctgataaaccagctaatcggcttcaa

SEQ ID NO: 62443 - DNA, 30 bp, Artificial Sequence
  Synthetic oligonucleotide
accccatagcagggagtgacctcagttcaa

SEQ ID NO: 62444 - DNA, 30 bp, Artificial Sequence
  Synthetic oligonucleotide
atgttaacacccaaaacggatcgcgttcaa

SEQ ID NO: 62445 - DNA, 30 bp, Artificial Sequence
  Synthetic oligonucleotide
tcattaagccagaggtactgcaaaaaagaa

SEQ ID NO: 62446 - DNA, 30 bp, Artificial Sequence
  Synthetic oligonucleotide
gctgcaaggtcctcgtgtaatataaaagaa

SEQ ID NO: 62447 - DNA, 30 bp, Artificial Sequence
  Synthetic oligonucleotide
cgtattaatcacacaaggagatggaaagaa

SEQ ID NO: 62448 - DNA, 30 bp, Artificial Sequence
  Synthetic oligonucleotide
ggtaagcacgtcgaaaaccaacataaagaa

SEQ ID NO: 62449 - DNA, 30 bp, Artificial Sequence
  Synthetic oligonucleotide
gcggcggattccaatgctactgatcaagaa

SEQ ID NO: 62450 - DNA, 30 bp, Artificial Sequence
  Synthetic oligonucleotide
atcgctcggtaacaagtaccagacgaagaa

SEQ ID NO: 62451 - DNA, 30 bp, Artificial Sequence
  Synthetic oligonucleotide
tatgtccggcgagtgtctagaaaggaagaa

SEQ ID NO: 62452 - DNA, 30 bp, Artificial Sequence
  Synthetic oligonucleotide
gcacagtaatgggtttaacaaagggaagaa

SEQ ID NO: 62453 - DNA, 30 bp, Artificial Sequence
  Synthetic oligonucleotide
gcctggtcgtcgaaccaatcgatggaagaa

SEQ ID NO: 62454 - DNA, 30 bp, Artificial Sequence
  Synthetic oligonucleotide
gttggttagacgtcacaatgaacctaagaa

SEQ ID NO: 62455 - DNA, 30 bp, Artificial Sequence
  Synthetic oligonucleotide
caggggttggtcgagatgaaatcttaagaa

SEQ ID NO: 62456 - DNA, 30 bp, Artificial Sequence
  Synthetic oligonucleotide
gcgttattgcagagcatggtgttcacagaa

SEQ ID NO: 62457 - DNA, 30 bp, Artificial Sequence
  Synthetic oligonucleotide
acaacaacgtgtctatatagtaaaccagaa

SEQ ID NO: 62458 - DNA, 30 bp, Artificial Sequence
  Synthetic oligonucleotide
ttaattggagcaaggttaagtataccagaa

SEQ ID NO: 62459 - DNA, 30 bp, Artificial Sequence
  Synthetic oligonucleotide
agtagccacgcacaagatagcgtgccagaa

SEQ ID NO: 62460 - DNA, 30 bp, Artificial Sequence
  Synthetic oligonucleotide
gcattgccgcgcaagatatggagtccagaa

SEQ ID NO: 62461 - DNA, 30 bp, Artificial Sequence
  Synthetic oligonucleotide
tgcacttatgtaagggttcaccaatcagaa

SEQ ID NO: 62462 - DNA, 30 bp, Artificial Sequence
  Synthetic oligonucleotide
tgagggggcgtgtactgttacgattcagaa

SEQ ID NO: 62463 - DNA, 30 bp, Artificial Sequence
  Synthetic oligonucleotide
gagcgagtgtctcgcacaaacccttcagaa

SEQ ID NO: 62464 - DNA, 30 bp, Artificial Sequence
  Synthetic oligonucleotide
aagtgtggagttaacggaacaattagagaa

SEQ ID NO: 62465 - DNA, 30 bp, Artificial Sequence
  Synthetic oligonucleotide
gtacctagaactggtgcgggcgccggagaa

SEQ ID NO: 62466 - DNA, 30 bp, Artificial Sequence
  Synthetic oligonucleotide
cagagatctatcatttcgcgtatcggagaa

SEQ ID NO: 62467 - DNA, 30 bp, Artificial Sequence
  Synthetic oligonucleotide
gacagggctttagtcaaggacactggagaa

SEQ ID NO: 62468 - DNA, 30 bp, Artificial Sequence
  Synthetic oligonucleotide
gtaaacgaagttaccttactggaatgagaa

SEQ ID NO: 62469 - DNA, 30 bp, Artificial Sequence
  Synthetic oligonucleotide
gacgttagattgacctgcttggtttgagaa

SEQ ID NO: 62470 - DNA, 30 bp, Artificial Sequence
  Synthetic oligonucleotide
cgttgggcagcgacgtcccacggcatagaa

SEQ ID NO: 62471 - DNA, 30 bp, Artificial Sequence
  Synthetic oligonucleotide
tagtggaatcgtcttacaaatgggatagaa

SEQ ID NO: 62472 - DNA, 30 bp, Artificial Sequence
  Synthetic oligonucleotide
aacaagaaaatatggccaatcagagtagaa

SEQ ID NO: 62473 - DNA, 30 bp, Artificial Sequence
  Synthetic oligonucleotide
aggctctagccagaccgccccgttgtagaa

SEQ ID NO: 62474 - DNA, 30 bp, Artificial Sequence
  Synthetic oligonucleotide
cgtgcgaaagtaaatgcaccatagttagaa

SEQ ID NO: 62475 - DNA, 30 bp, Artificial Sequence
  Synthetic oligonucleotide
ccagggttcaagcaatgcatacgtttagaa

SEQ ID NO: 62476 - DNA, 30 bp, Artificial Sequence
  Synthetic oligonucleotide
aatacggggaagttgtcagaagccaacgaa

SEQ ID NO: 62477 - DNA, 30 bp, Artificial Sequence
  Synthetic oligonucleotide
agacgcccatcaactgagtgaacgaacgaa

SEQ ID NO: 62478 - DNA, 30 bp, Artificial Sequence
  Synthetic oligonucleotide
tggctccgcacgaacaagtgcagacacgaa

SEQ ID NO: 62479 - DNA, 30 bp, Artificial Sequence
  Synthetic oligonucleotide
gggtcatcgctaagggagttaaaggacgaa

SEQ ID NO: 62480 - DNA, 30 bp, Artificial Sequence
  Synthetic oligonucleotide
caacgtaacatcgtgtgagtttgggacgaa

SEQ ID NO: 62481 - DNA, 30 bp, Artificial Sequence
  Synthetic oligonucleotide
tccactcagctgggttagaacgtttacgaa

SEQ ID NO: 62482 - DNA, 30 bp, Artificial Sequence
  Synthetic oligonucleotide
ggcgactgaaattgtaactcggagaccgaa

SEQ ID NO: 62483 - DNA, 30 bp, Artificial Sequence
  Synthetic oligonucleotide
gtgaacatgtttccgcgcgatgcttccgaa

SEQ ID NO: 62484 - DNA, 30 bp, Artificial Sequence
  Synthetic oligonucleotide
aacgggttcattgataagcgtatcagcgaa

SEQ ID NO: 62485 - DNA, 30 bp, Artificial Sequence
  Synthetic oligonucleotide
gaaactgcttcgaagaacactttcagcgaa

SEQ ID NO: 62486 - DNA, 30 bp, Artificial Sequence
  Synthetic oligonucleotide
tattcggcggctgacacatagtatagcgaa

SEQ ID NO: 62487 - DNA, 30 bp, Artificial Sequence
  Synthetic oligonucleotide
tctccccacgaacttagaatacctagcgaa

SEQ ID NO: 62488 - DNA, 30 bp, Artificial Sequence
  Synthetic oligonucleotide
tggcagccgtcggtcgagacgggaggcgaa

SEQ ID NO: 62489 - DNA, 30 bp, Artificial Sequence
  Synthetic oligonucleotide
cagtcgcaattggcaggggatgagggcgaa

SEQ ID NO: 62490 - DNA, 30 bp, Artificial Sequence
  Synthetic oligonucleotide
ttgagacgacggttgtgagtgtaatgcgaa

SEQ ID NO: 62491 - DNA, 30 bp, Artificial Sequence
  Synthetic oligonucleotide
tcactaccttcttgagggtagccatgcgaa

SEQ ID NO: 62492 - DNA, 30 bp, Artificial Sequence
  Synthetic oligonucleotide
atcgggctgcgaaggaaaaagtactgcgaa

SEQ ID NO: 62493 - DNA, 30 bp, Artificial Sequence
  Synthetic oligonucleotide
cccatattaactcagaagaataggtgcgaa

SEQ ID NO: 62494 - DNA, 30 bp, Artificial Sequence
  Synthetic oligonucleotide
acttaggcttgagtagaacgggcaatcgaa

SEQ ID NO: 62495 - DNA, 30 bp, Artificial Sequence
  Synthetic oligonucleotide
actaaaagggccgcgtgatccgtactcgaa

SEQ ID NO: 62496 - DNA, 30 bp, Artificial Sequence
  Synthetic oligonucleotide
caatcagcagttgtgtcgcatccgctcgaa

SEQ ID NO: 62497 - DNA, 30 bp, Artificial Sequence
  Synthetic oligonucleotide
agcagcaaggtgagtgggaagtgtctcgaa

SEQ ID NO: 62498 - DNA, 30 bp, Artificial Sequence
  Synthetic oligonucleotide
ttgtcgtaggtggtaagggaagttctcgaa

SEQ ID NO: 62499 - DNA, 30 bp, Artificial Sequence
  Synthetic oligonucleotide
aactgccactaggttcgatatacggtcgaa

SEQ ID NO: 62500 - DNA, 30 bp, Artificial Sequence
  Synthetic oligonucleotide
cagagcggacaggctaaacggttgttcgaa

SEQ ID NO: 62501 - DNA, 30 bp, Artificial Sequence
  Synthetic oligonucleotide
ccttaatacggggtactcaaggtaaaggaa

SEQ ID NO: 62502 - DNA, 30 bp, Artificial Sequence
  Synthetic oligonucleotide
ggacggaattttgtcacgttatgtaaggaa

SEQ ID NO: 62503 - DNA, 30 bp, Artificial Sequence
  Synthetic oligonucleotide
ggttcatgacccagatgtagactagaggaa

SEQ ID NO: 62504 - DNA, 30 bp, Artificial Sequence
  Synthetic oligonucleotide
aatgctataaatagtcgcccatgataggaa

SEQ ID NO: 62505 - DNA, 30 bp, Artificial Sequence
  Synthetic oligonucleotide
gacacgtacaggttggctcatcgctaggaa

SEQ ID NO: 62506 - DNA, 30 bp, Artificial Sequence
  Synthetic oligonucleotide
atgcctgtgtaaggctgggttagtacggaa

SEQ ID NO: 62507 - DNA, 30 bp, Artificial Sequence
  Synthetic oligonucleotide
caggaaaatgaaaggttacaattttcggaa

SEQ ID NO: 62508 - DNA, 30 bp, Artificial Sequence
  Synthetic oligonucleotide
ctcaaattggggatctaccgcataagggaa

SEQ ID NO: 62509 - DNA, 30 bp, Artificial Sequence
  Synthetic oligonucleotide
ctaggggtcactggtttatgaacgagggaa

SEQ ID NO: 62510 - DNA, 30 bp, Artificial Sequence
  Synthetic oligonucleotide
caagtgttagaccccgcgtgtgcgagggaa

SEQ ID NO: 62511 - DNA, 30 bp, Artificial Sequence
  Synthetic oligonucleotide
aggagtactcggggatactgttctagggaa

SEQ ID NO: 62512 - DNA, 30 bp, Artificial Sequence
  Synthetic oligonucleotide
tgaggtgtgcaatgaacaggtatacgggaa

SEQ ID NO: 62513 - DNA, 30 bp, Artificial Sequence
  Synthetic oligonucleotide
agactcagaatacgaagaatgcggcgggaa

SEQ ID NO: 62514 - DNA, 30 bp, Artificial Sequence
  Synthetic oligonucleotide
gcgaggaatacagcggttgaccccggggaa

SEQ ID NO: 62515 - DNA, 30 bp, Artificial Sequence
  Synthetic oligonucleotide
agtcatagggcgagtaattcctctggggaa

SEQ ID NO: 62516 - DNA, 30 bp, Artificial Sequence
  Synthetic oligonucleotide
accggtgatatagcgacgagtaaatgggaa

SEQ ID NO: 62517 - DNA, 30 bp, Artificial Sequence
  Synthetic oligonucleotide
ctgcttaacgagagtcgccagacatgggaa

SEQ ID NO: 62518 - DNA, 30 bp, Artificial Sequence
  Synthetic oligonucleotide
gctggaatcgaacaaaggccgttgtgggaa

SEQ ID NO: 62519 - DNA, 30 bp, Artificial Sequence
  Synthetic oligonucleotide
agctatcagaagagtgctgacgacatggaa

SEQ ID NO: 62520 - DNA, 30 bp, Artificial Sequence
  Synthetic oligonucleotide
aagaccacggacagggttgggcagatggaa

SEQ ID NO: 62521 - DNA, 30 bp, Artificial Sequence
  Synthetic oligonucleotide
tgacagggctcgaatatgggcctgatggaa

SEQ ID NO: 62522 - DNA, 30 bp, Artificial Sequence
  Synthetic oligonucleotide
aaaccaagcgcattgcgtacgtcactggaa

SEQ ID NO: 62523 - DNA, 30 bp, Artificial Sequence
  Synthetic oligonucleotide
tatgatcaaccaatacaagcgaatctggaa

SEQ ID NO: 62524 - DNA, 30 bp, Artificial Sequence
  Synthetic oligonucleotide
ttacagaagtcagtccataggaggttggaa

SEQ ID NO: 62525 - DNA, 30 bp, Artificial Sequence
  Synthetic oligonucleotide
cgcacatgagcatcaagttcccaaaatgaa

SEQ ID NO: 62526 - DNA, 30 bp, Artificial Sequence
  Synthetic oligonucleotide
ccggctcaaatggagtaacatcgaaatgaa

SEQ ID NO: 62527 - DNA, 30 bp, Artificial Sequence
  Synthetic oligonucleotide
ttgagcgggcatgggaccgtcgtaaatgaa

SEQ ID NO: 62528 - DNA, 30 bp, Artificial Sequence
  Synthetic oligonucleotide
ggggggggaatgtagaccggataggatgaa

SEQ ID NO: 62529 - DNA, 30 bp, Artificial Sequence
  Synthetic oligonucleotide
aagatacgagcataacacgcatcctatgaa

SEQ ID NO: 62530 - DNA, 30 bp, Artificial Sequence
  Synthetic oligonucleotide
acagggagtatgggtacagcttcctatgaa

SEQ ID NO: 62531 - DNA, 30 bp, Artificial Sequence
  Synthetic oligonucleotide
ggtgcacataccggcagcactagccctgaa

SEQ ID NO: 62532 - DNA, 30 bp, Artificial Sequence
  Synthetic oligonucleotide
tatgtgacatagcgatgaatgggtgctgaa

SEQ ID NO: 62533 - DNA, 30 bp, Artificial Sequence
  Synthetic oligonucleotide
caagcactagttgtgccgaaatttgctgaa

SEQ ID NO: 62534 - DNA, 30 bp, Artificial Sequence
  Synthetic oligonucleotide
atgcagagaacgacgggtagatagtctgaa

SEQ ID NO: 62535 - DNA, 30 bp, Artificial Sequence
  Synthetic oligonucleotide
atggttcgtggaagtatcaacctgagtgaa

SEQ ID NO: 62536 - DNA, 30 bp, Artificial Sequence
  Synthetic oligonucleotide
aacttaagactagggcacaggtatagtgaa

SEQ ID NO: 62537 - DNA, 30 bp, Artificial Sequence
  Synthetic oligonucleotide
taatacgagcaaaggccaggatacggtgaa

SEQ ID NO: 62538 - DNA, 30 bp, Artificial Sequence
  Synthetic oligonucleotide
cgaacaagtggcttgtactttaagtgtgaa

SEQ ID NO: 62539 - DNA, 30 bp, Artificial Sequence
  Synthetic oligonucleotide
ctatgtgacgagacaaagcggtagtgtgaa

SEQ ID NO: 62540 - DNA, 30 bp, Artificial Sequence
  Synthetic oligonucleotide
ggagagtatcgttgaccgcatcgaattgaa

SEQ ID NO: 62541 - DNA, 30 bp, Artificial Sequence
  Synthetic oligonucleotide
acgttcggggtgttgccaggcggagttgaa

SEQ ID NO: 62542 - DNA, 30 bp, Artificial Sequence
  Synthetic oligonucleotide
taagggacggagtcgtctgaatcgtttgaa

SEQ ID NO: 62543 - DNA, 30 bp, Artificial Sequence
  Synthetic oligonucleotide
cggagtgaaccatatgagagatacaaataa

SEQ ID NO: 62544 - DNA, 30 bp, Artificial Sequence
  Synthetic oligonucleotide
gagccgcgccgaagggttagaatcaaataa

SEQ ID NO: 62545 - DNA, 30 bp, Artificial Sequence
  Synthetic oligonucleotide
tggggaggagtctgttggcagaaagaataa

SEQ ID NO: 62546 - DNA, 30 bp, Artificial Sequence
  Synthetic oligonucleotide
caacccgatgctccgagcgaacatgaataa

SEQ ID NO: 62547 - DNA, 30 bp, Artificial Sequence
  Synthetic oligonucleotide
tcaagcgagtaccggatccccaggacataa

SEQ ID NO: 62548 - DNA, 30 bp, Artificial Sequence
  Synthetic oligonucleotide
ggtaaaaaagacttgatgggtgggccataa

SEQ ID NO: 62549 - DNA, 30 bp, Artificial Sequence
  Synthetic oligonucleotide
cggagcacgcgactgtcggatcgagcataa

SEQ ID NO: 62550 - DNA, 30 bp, Artificial Sequence
  Synthetic oligonucleotide
cattcccgggcacggaggaggatcgcataa

SEQ ID NO: 62551 - DNA, 30 bp, Artificial Sequence
  Synthetic oligonucleotide
aaccggaaaagtgtcgaggagttcgcataa

SEQ ID NO: 62552 - DNA, 30 bp, Artificial Sequence
  Synthetic oligonucleotide
atcgtgagcaagtctaaacaataatcataa

SEQ ID NO: 62553 - DNA, 30 bp, Artificial Sequence
  Synthetic oligonucleotide
cagaaacacgtctatgattcgagaagataa

SEQ ID NO: 62554 - DNA, 30 bp, Artificial Sequence
  Synthetic oligonucleotide
tttaccgtcgtacgatacgtgcgcagataa

SEQ ID NO: 62555 - DNA, 30 bp, Artificial Sequence
  Synthetic oligonucleotide
tcggggccgaccgttatttgacagagataa

SEQ ID NO: 62556 - DNA, 30 bp, Artificial Sequence
  Synthetic oligonucleotide
catccgtaacaacatacaggcggacgataa

SEQ ID NO: 62557 - DNA, 30 bp, Artificial Sequence
  Synthetic oligonucleotide
attggtggagggaaataattaagccgataa

SEQ ID NO: 62558 - DNA, 30 bp, Artificial Sequence
  Synthetic oligonucleotide
caatgtaagcgaccggaaagtgggcgataa

SEQ ID NO: 62559 - DNA, 30 bp, Artificial Sequence
  Synthetic oligonucleotide
gtggggaccctaaccatcaccttgcgataa

SEQ ID NO: 62560 - DNA, 30 bp, Artificial Sequence
  Synthetic oligonucleotide
cgttggacagtgttttaatggcgtcgataa

SEQ ID NO: 62561 - DNA, 30 bp, Artificial Sequence
  Synthetic oligonucleotide
ccgtgcttagcataaaaccctggtcgataa

SEQ ID NO: 62562 - DNA, 30 bp, Artificial Sequence
  Synthetic oligonucleotide
taccaaaggatgttggctaaaccaggataa

SEQ ID NO: 62563 - DNA, 30 bp, Artificial Sequence
  Synthetic oligonucleotide
tctaagaggatgtgaatttagagaggataa

SEQ ID NO: 62564 - DNA, 30 bp, Artificial Sequence
  Synthetic oligonucleotide
aagcgtggatagtcctgaggacagggataa

SEQ ID NO: 62565 - DNA, 30 bp, Artificial Sequence
  Synthetic oligonucleotide
ccccgaagagaggataggaaccggggataa

SEQ ID NO: 62566 - DNA, 30 bp, Artificial Sequence
  Synthetic oligonucleotide
tcgattacatgaacagtgttgtggggataa

SEQ ID NO: 62567 - DNA, 30 bp, Artificial Sequence
  Synthetic oligonucleotide
aacagcgatagcatgcatggctgtggataa

SEQ ID NO: 62568 - DNA, 30 bp, Artificial Sequence
  Synthetic oligonucleotide
catggagaatgtaccagaatgcagtgataa

SEQ ID NO: 62569 - DNA, 30 bp, Artificial Sequence
  Synthetic oligonucleotide
gttgcgacataacaaaagccagattgataa

SEQ ID NO: 62570 - DNA, 30 bp, Artificial Sequence
  Synthetic oligonucleotide
gacgctaatcccgggtgatagctgatataa

SEQ ID NO: 62571 - DNA, 30 bp, Artificial Sequence
  Synthetic oligonucleotide
ggaaacaagtcgtatgtaggaagggtataa

SEQ ID NO: 62572 - DNA, 30 bp, Artificial Sequence
  Synthetic oligonucleotide
tcagaaccggaatattgtgcttgaaactaa

SEQ ID NO: 62573 - DNA, 30 bp, Artificial Sequence
  Synthetic oligonucleotide
tatggcagtcgtagacggtggtacaactaa

SEQ ID NO: 62574 - DNA, 30 bp, Artificial Sequence
  Synthetic oligonucleotide
cggtaataataagttatacactccaactaa

SEQ ID NO: 62575 - DNA, 30 bp, Artificial Sequence
  Synthetic oligonucleotide
gtcatatgaggatccggatcagtcaactaa

SEQ ID NO: 62576 - DNA, 30 bp, Artificial Sequence
  Synthetic oligonucleotide
ggtaatatcgtggagagggtaagtaactaa

SEQ ID NO: 62577 - DNA, 29 bp, Artificial Sequence
  Synthetic oligonucleotide
caaaataactgtggatcgggctacactaa

SEQ ID NO: 62578 - DNA, 30 bp, Artificial Sequence
  Synthetic oligonucleotide
gtacagacattcggaaacatagcgcactaa

SEQ ID NO: 62579 - DNA, 30 bp, Artificial Sequence
  Synthetic oligonucleotide
atgcactgcggaacactggagcatcactaa

SEQ ID NO: 62580 - DNA, 30 bp, Artificial Sequence
  Synthetic oligonucleotide
cccatgggtaacgactgaaaacgagactaa

SEQ ID NO: 62581 - DNA, 30 bp, Artificial Sequence
  Synthetic oligonucleotide
acgacgggctggcagcagatactagactaa

SEQ ID NO: 62582 - DNA, 30 bp, Artificial Sequence
  Synthetic oligonucleotide
tgtgcagtagtcacggtgcaggaggactaa

SEQ ID NO: 62583 - DNA, 30 bp, Artificial Sequence
  Synthetic oligonucleotide
ccgagttcacctctaagatttgagtactaa

SEQ ID NO: 62584 - DNA, 30 bp, Artificial Sequence
  Synthetic oligonucleotide
tgcgcatgaattgaggagaaacaggcctaa

SEQ ID NO: 62585 - DNA, 30 bp, Artificial Sequence
  Synthetic oligonucleotide
acacgggtcacgatccagccgccggcctaa

SEQ ID NO: 62586 - DNA, 30 bp, Artificial Sequence
  Synthetic oligonucleotide
tattaccataacatcgaaactacctcctaa

SEQ ID NO: 62587 - DNA, 30 bp, Artificial Sequence
  Synthetic oligonucleotide
atgtaaaattgagtgagaggtacctcctaa

SEQ ID NO: 62588 - DNA, 30 bp, Artificial Sequence
  Synthetic oligonucleotide
cgggcacgaagttgcagaattcgacgctaa

SEQ ID NO: 62589 - DNA, 30 bp, Artificial Sequence
  Synthetic oligonucleotide
aacgggcgtgatgagcgtatgagccgctaa

SEQ ID NO: 62590 - DNA, 30 bp, Artificial Sequence
  Synthetic oligonucleotide
ggcctgatttacgtgactaagcaaggctaa

SEQ ID NO: 62591 - DNA, 30 bp, Artificial Sequence
  Synthetic oligonucleotide
agcgacatccagtccaatagaaccggctaa

SEQ ID NO: 62592 - DNA, 30 bp, Artificial Sequence
  Synthetic oligonucleotide
cggaaaattcctaacgacctctggtgctaa

SEQ ID NO: 62593 - DNA, 30 bp, Artificial Sequence
  Synthetic oligonucleotide
acgtagtctagaacaatgtcaaggatctaa

SEQ ID NO: 62594 - DNA, 30 bp, Artificial Sequence
  Synthetic oligonucleotide
cagcggacagtggagcgcgtgtgtatctaa

SEQ ID NO: 62595 - DNA, 30 bp, Artificial Sequence
  Synthetic oligonucleotide
ggctggagtcttacgtggaaaaccctctaa

SEQ ID NO: 62596 - DNA, 30 bp, Artificial Sequence
  Synthetic oligonucleotide
ggtgcagtgtagtctatatatcatctctaa

SEQ ID NO: 62597 - DNA, 30 bp, Artificial Sequence
  Synthetic oligonucleotide
tgtccatgtgggccacaaagatcagtctaa

SEQ ID NO: 62598 - DNA, 30 bp, Artificial Sequence
  Synthetic oligonucleotide
ccactggcacaacctgagacgggtaagtaa

SEQ ID NO: 62599 - DNA, 30 bp, Artificial Sequence
  Synthetic oligonucleotide
ggcgcacacattggcgaagtcgcatagtaa

SEQ ID NO: 62600 - DNA, 30 bp, Artificial Sequence
  Synthetic oligonucleotide
atcttcggcgggcggaggcgcgtatagtaa

SEQ ID NO: 62601 - DNA, 30 bp, Artificial Sequence
  Synthetic oligonucleotide
acggaagaaaatataggaggcccttagtaa

SEQ ID NO: 62602 - DNA, 30 bp, Artificial Sequence
  Synthetic oligonucleotide
ccatacggtcctcagagcaacggcacgtaa

SEQ ID NO: 62603 - DNA, 30 bp, Artificial Sequence
  Synthetic oligonucleotide
cctaagggcagtatcttatgtaggccgtaa

SEQ ID NO: 62604 - DNA, 30 bp, Artificial Sequence
  Synthetic oligonucleotide
ctaccaagtactatgctctgactgccgtaa

SEQ ID NO: 62605 - DNA, 30 bp, Artificial Sequence
  Synthetic oligonucleotide
gccgtagacctaagtagaagaagcgcgtaa

SEQ ID NO: 62606 - DNA, 30 bp, Artificial Sequence
  Synthetic oligonucleotide
gtcgttaaagcaacaatgttctatgcgtaa

SEQ ID NO: 62607 - DNA, 30 bp, Artificial Sequence
  Synthetic oligonucleotide
caccgcggatcttaggaagccgagaggtaa

SEQ ID NO: 62608 - DNA, 30 bp, Artificial Sequence
  Synthetic oligonucleotide
gtacagcgcgtcaacttcaaccaccggtaa

SEQ ID NO: 62609 - DNA, 30 bp, Artificial Sequence
  Synthetic oligonucleotide
acaatatgcggggatcgaccaggagggtaa

SEQ ID NO: 62610 - DNA, 30 bp, Artificial Sequence
  Synthetic oligonucleotide
aggtaaatgcacggtggattcaagtggtaa

SEQ ID NO: 62611 - DNA, 30 bp, Artificial Sequence
  Synthetic oligonucleotide
tctttagaggatacaaccagcgcgtggtaa

SEQ ID NO: 62612 - DNA, 30 bp, Artificial Sequence
  Synthetic oligonucleotide
cacgtgaacgttatagcttccgcaatgtaa

SEQ ID NO: 62613 - DNA, 30 bp, Artificial Sequence
  Synthetic oligonucleotide
gggtgcataactcggcatcggcaactgtaa

SEQ ID NO: 62614 - DNA, 30 bp, Artificial Sequence
  Synthetic oligonucleotide
gatcagaaataattgtcaggcctgctgtaa

SEQ ID NO: 62615 - DNA, 30 bp, Artificial Sequence
  Synthetic oligonucleotide
gagcgcggtgggttacgagttacgttgtaa

SEQ ID NO: 62616 - DNA, 30 bp, Artificial Sequence
  Synthetic oligonucleotide
tactcacaggcaaggctacagagcgattaa

SEQ ID NO: 62617 - DNA, 30 bp, Artificial Sequence
  Synthetic oligonucleotide
agccacaagtaagatagggttgtgtattaa

SEQ ID NO: 62618 - DNA, 30 bp, Artificial Sequence
  Synthetic oligonucleotide
ggtgtactatcgagtacagaggaaacttaa

SEQ ID NO: 62619 - DNA, 31 bp, Artificial Sequence
  Synthetic oligonucleotide
gggcggaagacatttcataacgcgaccttaa

SEQ ID NO: 62620 - DNA, 30 bp, Artificial Sequence
  Synthetic oligonucleotide
tcgagactctgagcagggactccaagttaa

SEQ ID NO: 62621 - DNA, 30 bp, Artificial Sequence
  Synthetic oligonucleotide
accattgcgctagtcggagaaaacagttaa

SEQ ID NO: 62622 - DNA, 30 bp, Artificial Sequence
  Synthetic oligonucleotide
tagtaaaatagcaaagatcccgacagttaa

SEQ ID NO: 62623 - DNA, 30 bp, Artificial Sequence
  Synthetic oligonucleotide
accgaccggaaagataggattatcagttaa

SEQ ID NO: 62624 - DNA, 30 bp, Artificial Sequence
  Synthetic oligonucleotide
gcgcccgaaagggatcagacgctcagttaa

SEQ ID NO: 62625 - DNA, 30 bp, Artificial Sequence
  Synthetic oligonucleotide
tcgcgtaccgtaatccagaaacatagttaa

SEQ ID NO: 62626 - DNA, 30 bp, Artificial Sequence
  Synthetic oligonucleotide
cggtttggtagaaatgactgtgatagttaa

SEQ ID NO: 62627 - DNA, 30 bp, Artificial Sequence
  Synthetic oligonucleotide
caagtactcgtaaaggctgaagatcgttaa

SEQ ID NO: 62628 - DNA, 30 bp, Artificial Sequence
  Synthetic oligonucleotide
atggagtacatgcacggtcaacagggttaa

SEQ ID NO: 62629 - DNA, 30 bp, Artificial Sequence
  Synthetic oligonucleotide
caggcggtcgaccaatattgtacttgttaa

SEQ ID NO: 62630 - DNA, 30 bp, Artificial Sequence
  Synthetic oligonucleotide
caggggacaccgagggaagcattttgttaa

SEQ ID NO: 62631 - DNA, 30 bp, Artificial Sequence
  Synthetic oligonucleotide
accaaaaccgccaaacggactccaatttaa

SEQ ID NO: 62632 - DNA, 30 bp, Artificial Sequence
  Synthetic oligonucleotide
aagggtgtacgcgaggcaataccgatttaa

SEQ ID NO: 62633 - DNA, 30 bp, Artificial Sequence
  Synthetic oligonucleotide
cgggccacaggcatgtcaacgtaagaaaca

SEQ ID NO: 62634 - DNA, 30 bp, Artificial Sequence
  Synthetic oligonucleotide
ggggagtgtaattctgcataggcggaaaca

SEQ ID NO: 62635 - DNA, 30 bp, Artificial Sequence
  Synthetic oligonucleotide
cccactaatcctccgatggaatgggaaaca

SEQ ID NO: 62636 - DNA, 30 bp, Artificial Sequence
  Synthetic oligonucleotide
gacggaatggatgatagttgacttacaaca

SEQ ID NO: 62637 - DNA, 30 bp, Artificial Sequence
  Synthetic oligonucleotide
ggatcaactcgacaattcgcatccccaaca

SEQ ID NO: 62638 - DNA, 30 bp, Artificial Sequence
  Synthetic oligonucleotide
gtagatgagccaggtaagcgtgccgcaaca

SEQ ID NO: 62639 - DNA, 30 bp, Artificial Sequence
  Synthetic oligonucleotide
acttcacccgtaagggggatacgggcaaca

SEQ ID NO: 62640 - DNA, 30 bp, Artificial Sequence
  Synthetic oligonucleotide
atccgaattcgggcataaggatctgcaaca

SEQ ID NO: 62641 - DNA, 30 bp, Artificial Sequence
  Synthetic oligonucleotide
ccgataggggggcgtctcaagtcctcaaca

SEQ ID NO: 62642 - DNA, 30 bp, Artificial Sequence
  Synthetic oligonucleotide
cctgtggtagcaaggtcggcatgctcaaca

SEQ ID NO: 62643 - DNA, 30 bp, Artificial Sequence
  Synthetic oligonucleotide
actcgaggattagacacatttgaaagaaca

SEQ ID NO: 62644 - DNA, 30 bp, Artificial Sequence
  Synthetic oligonucleotide
tggagagggttgtctcaacctcacagaaca

SEQ ID NO: 62645 - DNA, 30 bp, Artificial Sequence
  Synthetic oligonucleotide
atgctccaacgtccgagaaattcacgaaca

SEQ ID NO: 62646 - DNA, 30 bp, Artificial Sequence
  Synthetic oligonucleotide
tgtgaccccgcatggaagacctaaggaaca

SEQ ID NO: 62647 - DNA, 30 bp, Artificial Sequence
  Synthetic oligonucleotide
acgtatatgggtattccgacctgcggaaca

SEQ ID NO: 62648 - DNA, 30 bp, Artificial Sequence
  Synthetic oligonucleotide
aagcagattctcgagaagatgtaatgaaca

SEQ ID NO: 62649 - DNA, 30 bp, Artificial Sequence
  Synthetic oligonucleotide
tgatgaatggacgtatgggaaaccataaca

SEQ ID NO: 62650 - DNA, 30 bp, Artificial Sequence
  Synthetic oligonucleotide
ggggccgtcaagggtaaagttcggataaca

SEQ ID NO: 62651 - DNA, 30 bp, Artificial Sequence
  Synthetic oligonucleotide
aacttagaggaccagagggcaatgataaca

SEQ ID NO: 62652 - DNA, 30 bp, Artificial Sequence
  Synthetic oligonucleotide
gtgcccattaaagaagtaaggtatataaca

SEQ ID NO: 62653 - DNA, 30 bp, Artificial Sequence
  Synthetic oligonucleotide
ggaagtggaaaggtcttaccatggctaaca

SEQ ID NO: 62654 - DNA, 30 bp, Artificial Sequence
  Synthetic oligonucleotide
ctggggagcaacagctcaataggattaaca

SEQ ID NO: 62655 - DNA, 30 bp, Artificial Sequence
  Synthetic oligonucleotide
cgtttcgaggtcaggcggggtcgcaacaca

SEQ ID NO: 62656 - DNA, 30 bp, Artificial Sequence
  Synthetic oligonucleotide
ttatgactaaggtgccactcagcggacaca

SEQ ID NO: 62657 - DNA, 30 bp, Artificial Sequence
  Synthetic oligonucleotide
ggtcagcaaacgcgaactagagctgacaca

SEQ ID NO: 62658 - DNA, 30 bp, Artificial Sequence
  Synthetic oligonucleotide
tatatcacagttctagcgaagaagaccaca

SEQ ID NO: 62659 - DNA, 30 bp, Artificial Sequence
  Synthetic oligonucleotide
acttaccttacgagaatcttgacccccaca

SEQ ID NO: 62660 - DNA, 30 bp, Artificial Sequence
  Synthetic oligonucleotide
cagctacgggaataccttcaaaacgccaca

SEQ ID NO: 62661 - DNA, 30 bp, Artificial Sequence
  Synthetic oligonucleotide
aaccctgagggacaagccaagtgcgccaca

SEQ ID NO: 62662 - DNA, 30 bp, Artificial Sequence
  Synthetic oligonucleotide
cgtctcgacgaaaattactatactgccaca

SEQ ID NO: 62663 - DNA, 30 bp, Artificial Sequence
  Synthetic oligonucleotide
aaggattgcggtgagctttcacatagcaca

SEQ ID NO: 62664 - DNA, 30 bp, Artificial Sequence
  Synthetic oligonucleotide
ggtgaaacgggtagtcgacttgggggcaca

SEQ ID NO: 62665 - DNA, 30 bp, Artificial Sequence
  Synthetic oligonucleotide
ccttgaaagttgacggttattagtggcaca

SEQ ID NO: 62666 - DNA, 30 bp, Artificial Sequence
  Synthetic oligonucleotide
actggtaatcaagcgtccccacactgcaca

SEQ ID NO: 62667 - DNA, 30 bp, Artificial Sequence
  Synthetic oligonucleotide
aaagtcggggctacttagagtacctgcaca

SEQ ID NO: 62668 - DNA, 30 bp, Artificial Sequence
  Synthetic oligonucleotide
ctacaggaagattcctacaacaacatcaca

SEQ ID NO: 62669 - DNA, 30 bp, Artificial Sequence
  Synthetic oligonucleotide
catcttaatatcacatagttgagcatcaca

SEQ ID NO: 62670 - DNA, 30 bp, Artificial Sequence
  Synthetic oligonucleotide
aggtgaggcctagtatcattgaagatcaca

SEQ ID NO: 62671 - DNA, 30 bp, Artificial Sequence
  Synthetic oligonucleotide
ggtgcgggaattgtatagcagcaagtcaca

SEQ ID NO: 62672 - DNA, 30 bp, Artificial Sequence
  Synthetic oligonucleotide
tatcaccgagtgtgagctaggtgcgtcaca

SEQ ID NO: 62673 - DNA, 30 bp, Artificial Sequence
  Synthetic oligonucleotide
catcaaaaatcgactcaatcgtatgtcaca

SEQ ID NO: 62674 - DNA, 30 bp, Artificial Sequence
  Synthetic oligonucleotide
tcataacgggatcatcaacccacgttcaca

SEQ ID NO: 62675 - DNA, 30 bp, Artificial Sequence
  Synthetic oligonucleotide
gtaatcaaaccttcagagcggacgttcaca

SEQ ID NO: 62676 - DNA, 30 bp, Artificial Sequence
  Synthetic oligonucleotide
acggacccttgcgggtgaccgataaagaca

SEQ ID NO: 62677 - DNA, 30 bp, Artificial Sequence
  Synthetic oligonucleotide
tgggagctcgtaatttatccgatgaagaca

SEQ ID NO: 62678 - DNA, 30 bp, Artificial Sequence
  Synthetic oligonucleotide
gtacgggacaggttgcattcccacgagaca

SEQ ID NO: 62679 - DNA, 30 bp, Artificial Sequence
  Synthetic oligonucleotide
aggtattccagcattgggcagagatagaca

SEQ ID NO: 62680 - DNA, 30 bp, Artificial Sequence
  Synthetic oligonucleotide
tcactagtcaaacgtatgctggagtagaca

SEQ ID NO: 62681 - DNA, 30 bp, Artificial Sequence
  Synthetic oligonucleotide
gggaagcgctgcacactgtgacaaacgaca

SEQ ID NO: 62682 - DNA, 30 bp, Artificial Sequence
  Synthetic oligonucleotide
ggacttggccagagcatctggagtacgaca

SEQ ID NO: 62683 - DNA, 30 bp, Artificial Sequence
  Synthetic oligonucleotide
aagtagcaggacccctacgtgaatccgaca

SEQ ID NO: 62684 - DNA, 30 bp, Artificial Sequence
  Synthetic oligonucleotide
agttggtagggctccaaccgagcagcgaca

SEQ ID NO: 62685 - DNA, 30 bp, Artificial Sequence
  Synthetic oligonucleotide
cggccatggcccatagatgtcaacgcgaca

SEQ ID NO: 62686 - DNA, 30 bp, Artificial Sequence
  Synthetic oligonucleotide
gattcatgcacaatttttcaaagagggaca

SEQ ID NO: 62687 - DNA, 30 bp, Artificial Sequence
  Synthetic oligonucleotide
aacatacttattaggaatgcaagagggaca

SEQ ID NO: 62688 - DNA, 30 bp, Artificial Sequence
  Synthetic oligonucleotide
tgtcgagggcagttgatgggggcggggaca

SEQ ID NO: 62689 - DNA, 30 bp, Artificial Sequence
  Synthetic oligonucleotide
tcacgatcgggagcgctttgcctggggaca

SEQ ID NO: 62690 - DNA, 30 bp, Artificial Sequence
  Synthetic oligonucleotide
tgccgataacatcaggtgaggtgatggaca

SEQ ID NO: 62691 - DNA, 30 bp, Artificial Sequence
  Synthetic oligonucleotide
ggtgcggatggattgtctcgctgaatgaca

SEQ ID NO: 62692 - DNA, 30 bp, Artificial Sequence
  Synthetic oligonucleotide
tcggagcgcgcaactgcaggctgaatgaca

SEQ ID NO: 62693 - DNA, 30 bp, Artificial Sequence
  Synthetic oligonucleotide
gagaaaggcactctcaagcaacgcctgaca

SEQ ID NO: 62694 - DNA, 30 bp, Artificial Sequence
  Synthetic oligonucleotide
cgtataactgtacaaggagcatgcctgaca

SEQ ID NO: 62695 - DNA, 30 bp, Artificial Sequence
  Synthetic oligonucleotide
acgggggggctcgtcctgtgggcagtgaca

SEQ ID NO: 62696 - DNA, 30 bp, Artificial Sequence
  Synthetic oligonucleotide
ggacgtcgacaagggcgatgtgagttgaca

SEQ ID NO: 62697 - DNA, 30 bp, Artificial Sequence
  Synthetic oligonucleotide
gttataagggagagatccgtcctgaataca

SEQ ID NO: 62698 - DNA, 30 bp, Artificial Sequence
  Synthetic oligonucleotide
acttaaatagtaaatctcccactacataca

SEQ ID NO: 62699 - DNA, 30 bp, Artificial Sequence
  Synthetic oligonucleotide
aggctaactggggaaaaaccataggataca

SEQ ID NO: 62700 - DNA, 30 bp, Artificial Sequence
  Synthetic oligonucleotide
acactagtccatatggtgatcactgataca

SEQ ID NO: 62701 - DNA, 30 bp, Artificial Sequence
  Synthetic oligonucleotide
ccatcgcgactcatagggccgagttataca

SEQ ID NO: 62702 - DNA, 30 bp, Artificial Sequence
  Synthetic oligonucleotide
cgatcagcctattgcacatcgataactaca

SEQ ID NO: 62703 - DNA, 30 bp, Artificial Sequence
  Synthetic oligonucleotide
gtcattcgacatgggagagccagatctaca

SEQ ID NO: 62704 - DNA, 30 bp, Artificial Sequence
  Synthetic oligonucleotide
ctgtaggcttgaaggtaacggaacagtaca

SEQ ID NO: 62705 - DNA, 30 bp, Artificial Sequence
  Synthetic oligonucleotide
acacgacttctggagatccgctcacgtaca

SEQ ID NO: 62706 - DNA, 30 bp, Artificial Sequence
  Synthetic oligonucleotide
tcggcggggggattacagttgaaccgtaca

SEQ ID NO: 62707 - DNA, 30 bp, Artificial Sequence
  Synthetic oligonucleotide
cgcgtgttcaacaatccaaccatgcgtaca

SEQ ID NO: 62708 - DNA, 30 bp, Artificial Sequence
  Synthetic oligonucleotide
agcatgtagaggtccagataaaaaggtaca

SEQ ID NO: 62709 - DNA, 30 bp, Artificial Sequence
  Synthetic oligonucleotide
taacctaagcgagatgccaacccttgtaca

SEQ ID NO: 62710 - DNA, 30 bp, Artificial Sequence
  Synthetic oligonucleotide
cactccaaacaagcgtaaggaacatttaca

SEQ ID NO: 62711 - DNA, 30 bp, Artificial Sequence
  Synthetic oligonucleotide
gctcagagatcctcagtggcccagtttaca

SEQ ID NO: 62712 - DNA, 30 bp, Artificial Sequence
  Synthetic oligonucleotide
gccggcgaaggtaccgtgatttaccaacca

SEQ ID NO: 62713 - DNA, 30 bp, Artificial Sequence
  Synthetic oligonucleotide
aacaaaggattagagtggtaattccaacca

SEQ ID NO: 62714 - DNA, 30 bp, Artificial Sequence
  Synthetic oligonucleotide
gaacaagtctggagagcaccaaatgaacca

SEQ ID NO: 62715 - DNA, 30 bp, Artificial Sequence
  Synthetic oligonucleotide
tacgtgtgaacgtggtaatgtgatgaacca

SEQ ID NO: 62716 - DNA, 30 bp, Artificial Sequence
  Synthetic oligonucleotide
caacatcgcacaaatgacgaatggtaacca

SEQ ID NO: 62717 - DNA, 30 bp, Artificial Sequence
  Synthetic oligonucleotide
tcctgccaaagcccacccagagccacacca

SEQ ID NO: 62718 - DNA, 30 bp, Artificial Sequence
  Synthetic oligonucleotide
tggcggaatagagccatgctgaagacacca

SEQ ID NO: 62719 - DNA, 30 bp, Artificial Sequence
  Synthetic oligonucleotide
ggtcgggacaacaagttgaatctgacacca

SEQ ID NO: 62720 - DNA, 30 bp, Artificial Sequence
  Synthetic oligonucleotide
acacgtgtcgtaacagaagagaatccacca

SEQ ID NO: 62721 - DNA, 30 bp, Artificial Sequence
  Synthetic oligonucleotide
ctacgacctggggagttaggagtatcacca

SEQ ID NO: 62722 - DNA, 30 bp, Artificial Sequence
  Synthetic oligonucleotide
aacaatggacataacgagagcccttcacca

SEQ ID NO: 62723 - DNA, 30 bp, Artificial Sequence
  Synthetic oligonucleotide
tctgagttagcagtgagtagtgagagacca

SEQ ID NO: 62724 - DNA, 30 bp, Artificial Sequence
  Synthetic oligonucleotide
gagaggcctaattgaaactaggctagacca

SEQ ID NO: 62725 - DNA, 30 bp, Artificial Sequence
  Synthetic oligonucleotide
tgtcataactcagagaggacccgccgacca

SEQ ID NO: 62726 - DNA, 30 bp, Artificial Sequence
  Synthetic oligonucleotide
aagcagagaacggtgcagttccgccgacca

SEQ ID NO: 62727 - DNA, 30 bp, Artificial Sequence
  Synthetic oligonucleotide
tcagtagtcctacatcctctggagcgacca

SEQ ID NO: 62728 - DNA, 30 bp, Artificial Sequence
  Synthetic oligonucleotide
gactgaaacatgacgtgaagttagcgacca

SEQ ID NO: 62729 - DNA, 30 bp, Artificial Sequence
  Synthetic oligonucleotide
ataagcgggatcaagtgtaccggtcgacca

SEQ ID NO: 62730 - DNA, 30 bp, Artificial Sequence
  Synthetic oligonucleotide
acgtcttgtgcggtgccatggccctgacca

SEQ ID NO: 62731 - DNA, 30 bp, Artificial Sequence
  Synthetic oligonucleotide
aaccgcattgtaaatggatgcaagtgacca

SEQ ID NO: 62732 - DNA, 30 bp, Artificial Sequence
  Synthetic oligonucleotide
accagagtcgcataagggtggatcctacca

SEQ ID NO: 62733 - DNA, 30 bp, Artificial Sequence
  Synthetic oligonucleotide
cgtcaagtctatccgtaaaaatgcgtacca

SEQ ID NO: 62734 - DNA, 30 bp, Artificial Sequence
  Synthetic oligonucleotide
ggctcgttggagggtcgcatacaggtacca

SEQ ID NO: 62735 - DNA, 30 bp, Artificial Sequence
  Synthetic oligonucleotide
tcatatcacatactcgatgctccggtacca

SEQ ID NO: 62736 - DNA, 30 bp, Artificial Sequence
  Synthetic oligonucleotide
gtgcacgattaaggggtctataacttacca

SEQ ID NO: 62737 - DNA, 30 bp, Artificial Sequence
  Synthetic oligonucleotide
cacatggataagaattatcaagtaaaccca

SEQ ID NO: 62738 - DNA, 30 bp, Artificial Sequence
  Synthetic oligonucleotide
catgaagtaaaaatcaaggtctagaaccca

SEQ ID NO: 62739 - DNA, 30 bp, Artificial Sequence
  Synthetic oligonucleotide
aacgtggcgagatactgtggtcattaccca

SEQ ID NO: 62740 - DNA, 30 bp, Artificial Sequence
  Synthetic oligonucleotide
gtacaagagagcttagagtacagttaccca

SEQ ID NO: 62741 - DNA, 30 bp, Artificial Sequence
  Synthetic oligonucleotide
gcgacaccacctcggaaatggggaccccca

SEQ ID NO: 62742 - DNA, 30 bp, Artificial Sequence
  Synthetic oligonucleotide
aagagaagctcagagacttccctgccccca

SEQ ID NO: 62743 - DNA, 30 bp, Artificial Sequence
  Synthetic oligonucleotide
tagagacaatgtgaaggcgagtacagccca

SEQ ID NO: 62744 - DNA, 30 bp, Artificial Sequence
  Synthetic oligonucleotide
tgtcgcgcagcggcaactgatactagccca

SEQ ID NO: 62745 - DNA, 30 bp, Artificial Sequence
  Synthetic oligonucleotide
gattgcagtaagatgccaaacaaacgccca

SEQ ID NO: 62746 - DNA, 30 bp, Artificial Sequence
  Synthetic oligonucleotide
aggcgccgggttaacattagaaacggccca

SEQ ID NO: 62747 - DNA, 30 bp, Artificial Sequence
  Synthetic oligonucleotide
ggtaagaacaagccaagtcgtagttgccca

SEQ ID NO: 62748 - DNA, 30 bp, Artificial Sequence
  Synthetic oligonucleotide
gagatgcttagagacacactaaaaaagcca

SEQ ID NO: 62749 - DNA, 30 bp, Artificial Sequence
  Synthetic oligonucleotide
tcccaatacatgccggatgaataaaagcca

SEQ ID NO: 62750 - DNA, 30 bp, Artificial Sequence
  Synthetic oligonucleotide
actgtggtgatttgctcggggacaaagcca

SEQ ID NO: 62751 - DNA, 30 bp, Artificial Sequence
  Synthetic oligonucleotide
catcaggtgcgccgctaaagctctcagcca

SEQ ID NO: 62752 - DNA, 30 bp, Artificial Sequence
  Synthetic oligonucleotide
ggttctaagaagtaggaccatggcgagcca

SEQ ID NO: 62753 - DNA, 30 bp, Artificial Sequence
  Synthetic oligonucleotide
agtacacaacggtgggccagacgggagcca

SEQ ID NO: 62754 - DNA, 30 bp, Artificial Sequence
  Synthetic oligonucleotide
atggcaacccaaggcgtaaatgtggagcca

SEQ ID NO: 62755 - DNA, 30 bp, Artificial Sequence
  Synthetic oligonucleotide
ttagtggacccgcatataatcgagtagcca

SEQ ID NO: 62756 - DNA, 30 bp, Artificial Sequence
  Synthetic oligonucleotide
ccggaaggagctaggagttgcgcaacgcca

SEQ ID NO: 62757 - DNA, 30 bp, Artificial Sequence
  Synthetic oligonucleotide
agaaatgcctgtagggactgaaccacgcca

SEQ ID NO: 62758 - DNA, 30 bp, Artificial Sequence
  Synthetic oligonucleotide
gatgacagacacaacgggaaacgaccgcca

SEQ ID NO: 62759 - DNA, 30 bp, Artificial Sequence
  Synthetic oligonucleotide
agcataatctcacacagacaacttccgcca

SEQ ID NO: 62760 - DNA, 30 bp, Artificial Sequence
  Synthetic oligonucleotide
ccgtaccagaacgtacctaatcttgcgcca

SEQ ID NO: 62761 - DNA, 30 bp, Artificial Sequence
  Synthetic oligonucleotide
acgtaacttacacgcgcgtcatcctcgcca

SEQ ID NO: 62762 - DNA, 30 bp, Artificial Sequence
  Synthetic oligonucleotide
cgccggacaacctaaccgactgacgggcca

SEQ ID NO: 62763 - DNA, 30 bp, Artificial Sequence
  Synthetic oligonucleotide
caggaaatgacggtagtggaactttggcca

SEQ ID NO: 62764 - DNA, 30 bp, Artificial Sequence
  Synthetic oligonucleotide
gctcgcggaaatatcgggagctcaatgcca

SEQ ID NO: 62765 - DNA, 30 bp, Artificial Sequence
  Synthetic oligonucleotide
aagtacaaggctgatggtggatcgatgcca

SEQ ID NO: 62766 - DNA, 30 bp, Artificial Sequence
  Synthetic oligonucleotide
cttcggagggtgtgagtagccgatttgcca

SEQ ID NO: 62767 - DNA, 30 bp, Artificial Sequence
  Synthetic oligonucleotide
agggcgggaaagatctggattcttttgcca

SEQ ID NO: 62768 - DNA, 30 bp, Artificial Sequence
  Synthetic oligonucleotide
catcagaggttccgagtaactggcaatcca

SEQ ID NO: 62769 - DNA, 30 bp, Artificial Sequence
  Synthetic oligonucleotide
ggcaattaagttgggaccatccctcatcca

SEQ ID NO: 62770 - DNA, 30 bp, Artificial Sequence
  Synthetic oligonucleotide
gctagagtcgtagtatccggcaaggatcca

SEQ ID NO: 62771 - DNA, 30 bp, Artificial Sequence
  Synthetic oligonucleotide
agcgttcagtcgtatcacgaggcaactcca

SEQ ID NO: 62772 - DNA, 30 bp, Artificial Sequence
  Synthetic oligonucleotide
gggcagtacatcaagtcggcgtaagctcca

SEQ ID NO: 62773 - DNA, 30 bp, Artificial Sequence
  Synthetic oligonucleotide
agggtaggttcgcgttggccaacggctcca

SEQ ID NO: 62774 - DNA, 30 bp, Artificial Sequence
  Synthetic oligonucleotide
cggggaggatggcaggctcagactgctcca

SEQ ID NO: 62775 - DNA, 30 bp, Artificial Sequence
  Synthetic oligonucleotide
gcgggacggatatttagaactttatctcca

SEQ ID NO: 62776 - DNA, 30 bp, Artificial Sequence
  Synthetic oligonucleotide
gcgacagggctctaatgagcttcgtctcca

SEQ ID NO: 62777 - DNA, 30 bp, Artificial Sequence
  Synthetic oligonucleotide
cacgagatcgattaaagcgtcagaagtcca

SEQ ID NO: 62778 - DNA, 30 bp, Artificial Sequence
  Synthetic oligonucleotide
tcaacttggggcccagtaaaacccagtcca

SEQ ID NO: 62779 - DNA, 30 bp, Artificial Sequence
  Synthetic oligonucleotide
atgggcaggtaagctagcgtcgaccgtcca

SEQ ID NO: 62780 - DNA, 30 bp, Artificial Sequence
  Synthetic oligonucleotide
ggtgcgttacggtatcatgatatctgtcca

SEQ ID NO: 62781 - DNA, 30 bp, Artificial Sequence
  Synthetic oligonucleotide
taggcaccccgaggtccgaagaattgtcca

SEQ ID NO: 62782 - DNA, 30 bp, Artificial Sequence
  Synthetic oligonucleotide
tgtacgggcttaaacaaaaccgaagttcca

SEQ ID NO: 62783 - DNA, 30 bp, Artificial Sequence
  Synthetic oligonucleotide
ccgcgatttggctaacctggaaacgttcca

SEQ ID NO: 62784 - DNA, 30 bp, Artificial Sequence
  Synthetic oligonucleotide
cgttagcggggctacatttactcaaaagca

SEQ ID NO: 62785 - DNA, 30 bp, Artificial Sequence
  Synthetic oligonucleotide
agggcatggacattaaggctggccaaagca

SEQ ID NO: 62786 - DNA, 30 bp, Artificial Sequence
  Synthetic oligonucleotide
gctacgtaggggacatcatgcatcaaagca

SEQ ID NO: 62787 - DNA, 30 bp, Artificial Sequence
  Synthetic oligonucleotide
ctaaacttgcatcaccctcgattcaaagca

SEQ ID NO: 62788 - DNA, 30 bp, Artificial Sequence
  Synthetic oligonucleotide
gaacaacggacggagtgtcgggataaagca

SEQ ID NO: 62789 - DNA, 30 bp, Artificial Sequence
  Synthetic oligonucleotide
acaaatgagcagcccgcctgcgccgaagca

SEQ ID NO: 62790 - DNA, 30 bp, Artificial Sequence
  Synthetic oligonucleotide
tctcgctcatggctagacagttagtaagca

SEQ ID NO: 62791 - DNA, 30 bp, Artificial Sequence
  Synthetic oligonucleotide
gtccgtcgtaatcagagtaagtgttaagca

SEQ ID NO: 62792 - DNA, 30 bp, Artificial Sequence
  Synthetic oligonucleotide
cgttccgacatctcgatacaggctacagca

SEQ ID NO: 62793 - DNA, 30 bp, Artificial Sequence
  Synthetic oligonucleotide
tacgtggaatcttccaccttacgtccagca

SEQ ID NO: 62794 - DNA, 30 bp, Artificial Sequence
  Synthetic oligonucleotide
attgcacgatataaagtggcgacggcagca

SEQ ID NO: 62795 - DNA, 30 bp, Artificial Sequence
  Synthetic oligonucleotide
ttgggggcgtaagttgcgatgtactcagca

SEQ ID NO: 62796 - DNA, 30 bp, Artificial Sequence
  Synthetic oligonucleotide
acaaccgtggttctagtgtcccgaagagca

SEQ ID NO: 62797 - DNA, 30 bp, Artificial Sequence
  Synthetic oligonucleotide
agtcctaagggtaagcggcacgtaagagca

SEQ ID NO: 62798 - DNA, 30 bp, Artificial Sequence
  Synthetic oligonucleotide
caagagaactttcagttacatgtaagagca

SEQ ID NO: 62799 - DNA, 30 bp, Artificial Sequence
  Synthetic oligonucleotide
tcacctggaaggctgtgggcgcgcagagca

SEQ ID NO: 62800 - DNA, 31 bp, Artificial Sequence
  Synthetic oligonucleotide
acgagttcaattgattggaaggccgagagca

SEQ ID NO: 62801 - DNA, 30 bp, Artificial Sequence
  Synthetic oligonucleotide
aaagacaagggcggtaggagggggagagca

SEQ ID NO: 62802 - DNA, 30 bp, Artificial Sequence
  Synthetic oligonucleotide
tgttagttcacgaaagtgacgtgtagagca

SEQ ID NO: 62803 - DNA, 30 bp, Artificial Sequence
  Synthetic oligonucleotide
agtactaaaataacggattaggaaggagca

SEQ ID NO: 62804 - DNA, 30 bp, Artificial Sequence
  Synthetic oligonucleotide
tcgcgttacggacaagaatgaccgggagca

SEQ ID NO: 62805 - DNA, 30 bp, Artificial Sequence
  Synthetic oligonucleotide
ggctacagcgaccgctagcgaaaatgagca

SEQ ID NO: 62806 - DNA, 30 bp, Artificial Sequence
  Synthetic oligonucleotide
acgggctgcttctgaaccactgggatagca

SEQ ID NO: 62807 - DNA, 30 bp, Artificial Sequence
  Synthetic oligonucleotide
atgatataaaaggcttagcactgtatagca

SEQ ID NO: 62808 - DNA, 30 bp, Artificial Sequence
  Synthetic oligonucleotide
cgaggcccatacgggaaaccagcactagca

SEQ ID NO: 62809 - DNA, 30 bp, Artificial Sequence
  Synthetic oligonucleotide
gtagaaacgttggcgtgggcatagctagca

SEQ ID NO: 62810 - DNA, 30 bp, Artificial Sequence
  Synthetic oligonucleotide
tcttgacgagacccgtagggacttctagca

SEQ ID NO: 62811 - DNA, 30 bp, Artificial Sequence
  Synthetic oligonucleotide
gtgtgcccacgtgagataggtcgaaacgca

SEQ ID NO: 62812 - DNA, 30 bp, Artificial Sequence
  Synthetic oligonucleotide
caaggatcatcggctggaataggcaacgca

SEQ ID NO: 62813 - DNA, 29 bp, Artificial Sequence
  Synthetic oligonucleotide
gagccattcaaccgaaaaattcgaacgca

SEQ ID NO: 62814 - DNA, 30 bp, Artificial Sequence
  Synthetic oligonucleotide
caggggaatatattgtagggagaccacgca

SEQ ID NO: 62815 - DNA, 30 bp, Artificial Sequence
  Synthetic oligonucleotide
ctagcaaagtgagggaggctagaccacgca

SEQ ID NO: 62816 - DNA, 30 bp, Artificial Sequence
  Synthetic oligonucleotide
tagggtaagcaacactatgtagtctacgca

SEQ ID NO: 62817 - DNA, 30 bp, Artificial Sequence
  Synthetic oligonucleotide
tccacgagctgaggtggggagcgccccgca

SEQ ID NO: 62818 - DNA, 30 bp, Artificial Sequence
  Synthetic oligonucleotide
ggtgaaaattagctaaactaatgtcccgca

SEQ ID NO: 62819 - DNA, 30 bp, Artificial Sequence
  Synthetic oligonucleotide
agttcgataaagggcaaggatggtgccgca

SEQ ID NO: 62820 - DNA, 30 bp, Artificial Sequence
  Synthetic oligonucleotide
tgaagatgaacatatcggtagccttccgca

SEQ ID NO: 62821 - DNA, 30 bp, Artificial Sequence
  Synthetic oligonucleotide
cgctggatatcaaatcttatcagcagcgca

SEQ ID NO: 62822 - DNA, 30 bp, Artificial Sequence
  Synthetic oligonucleotide
ggatcatcgcatgtgcatccaaatcgcgca

SEQ ID NO: 62823 - DNA, 30 bp, Artificial Sequence
  Synthetic oligonucleotide
gctgctgggagaccagagcgagagggcgca

SEQ ID NO: 62824 - DNA, 30 bp, Artificial Sequence
  Synthetic oligonucleotide
cacacgagcgagtgcgcgggagactgcgca

SEQ ID NO: 62825 - DNA, 30 bp, Artificial Sequence
  Synthetic oligonucleotide
cgtgctaggcaatcgtgtagagtgatcgca

SEQ ID NO: 62826 - DNA, 30 bp, Artificial Sequence
  Synthetic oligonucleotide
atgccacatcttgcaacgaacattatcgca

SEQ ID NO: 62827 - DNA, 29 bp, Artificial Sequence
  Synthetic oligonucleotide
acggattgaatcggtttcagctcctcgca

SEQ ID NO: 62828 - DNA, 30 bp, Artificial Sequence
  Synthetic oligonucleotide
acgtggctgttcgaagaggttggagtcgca

SEQ ID NO: 62829 - DNA, 30 bp, Artificial Sequence
  Synthetic oligonucleotide
taacatttactgaaaataaagggcgtcgca

SEQ ID NO: 62830 - DNA, 30 bp, Artificial Sequence
  Synthetic oligonucleotide
cagaagtcagatacccgagccggaaaggca

SEQ ID NO: 62831 - DNA, 30 bp, Artificial Sequence
  Synthetic oligonucleotide
cagggctgttggttcgtttaagacaaggca

SEQ ID NO: 62832 - DNA, 30 bp, Artificial Sequence
  Synthetic oligonucleotide
atctacatcttcgatccgagagacaaggca

SEQ ID NO: 62833 - DNA, 30 bp, Artificial Sequence
  Synthetic oligonucleotide
aacaggaccagctacacacttacgaaggca

SEQ ID NO: 62834 - DNA, 30 bp, Artificial Sequence
  Synthetic oligonucleotide
gtcttggagaggacataggtgtgtaaggca

SEQ ID NO: 62835 - DNA, 30 bp, Artificial Sequence
  Synthetic oligonucleotide
agggtggaatgatctaatgtacgacaggca

SEQ ID NO: 62836 - DNA, 30 bp, Artificial Sequence
  Synthetic oligonucleotide
atggagtcaatgagcgatgaatgacaggca

SEQ ID NO: 62837 - DNA, 30 bp, Artificial Sequence
  Synthetic oligonucleotide
gtgcctcgcagggactaatagagtcaggca

SEQ ID NO: 62838 - DNA, 30 bp, Artificial Sequence
  Synthetic oligonucleotide
gcttagacgccatcgtggaatgaagaggca

SEQ ID NO: 62839 - DNA, 30 bp, Artificial Sequence
  Synthetic oligonucleotide
ggtcaaaaacaatcacaaacctacgaggca

SEQ ID NO: 62840 - DNA, 30 bp, Artificial Sequence
  Synthetic oligonucleotide
cgtccatcagcacggcaaacaggtgaggca

SEQ ID NO: 62841 - DNA, 30 bp, Artificial Sequence
  Synthetic oligonucleotide
tcctagcgaatgtagacccagggaacggca

SEQ ID NO: 62842 - DNA, 30 bp, Artificial Sequence
  Synthetic oligonucleotide
gtcataagttctgaaaaatgccgcacggca

SEQ ID NO: 62843 - DNA, 30 bp, Artificial Sequence
  Synthetic oligonucleotide
acacagttgggtcgatgtgatgagacggca

SEQ ID NO: 62844 - DNA, 30 bp, Artificial Sequence
  Synthetic oligonucleotide
taagcttgaaaattacgagtatgtacggca

SEQ ID NO: 62845 - DNA, 30 bp, Artificial Sequence
  Synthetic oligonucleotide
gacgcaatatgggcatagtggccagcggca

SEQ ID NO: 62846 - DNA, 30 bp, Artificial Sequence
  Synthetic oligonucleotide
acgctatagtactgttagtcttcatcggca

SEQ ID NO: 62847 - DNA, 30 bp, Artificial Sequence
  Synthetic oligonucleotide
cggaacgattaatcgcgcgtcaactcggca

SEQ ID NO: 62848 - DNA, 30 bp, Artificial Sequence
  Synthetic oligonucleotide
cgcgtgccacttaccttaaccgtctcggca

SEQ ID NO: 62849 - DNA, 30 bp, Artificial Sequence
  Synthetic oligonucleotide
cgtgataggttcgtataggatgtgtcggca

SEQ ID NO: 62850 - DNA, 30 bp, Artificial Sequence
  Synthetic oligonucleotide
caagagctaggccagctagtaacgagggca

SEQ ID NO: 62851 - DNA, 30 bp, Artificial Sequence
  Synthetic oligonucleotide
atgagagtcgagcggatcccgtcgagggca

SEQ ID NO: 62852 - DNA, 30 bp, Artificial Sequence
  Synthetic oligonucleotide
gttgcgcggttgtgtgcgtaagggagggca

SEQ ID NO: 62853 - DNA, 30 bp, Artificial Sequence
  Synthetic oligonucleotide
ggcactgacagttcggcatacgatagggca

SEQ ID NO: 62854 - DNA, 30 bp, Artificial Sequence
  Synthetic oligonucleotide
ccgcagatatacataggataagctcgggca

SEQ ID NO: 62855 - DNA, 30 bp, Artificial Sequence
  Synthetic oligonucleotide
aacgcggaggcgagatgtaaacgtcgggca

SEQ ID NO: 62856 - DNA, 30 bp, Artificial Sequence
  Synthetic oligonucleotide
agccggtaaacaatttcaagggaaggggca

SEQ ID NO: 62857 - DNA, 30 bp, Artificial Sequence
  Synthetic oligonucleotide
gaacgccgccaggttgatacaataggggca

SEQ ID NO: 62858 - DNA, 30 bp, Artificial Sequence
  Synthetic oligonucleotide
agcgttttgtaagctgaatgtatgggggca

SEQ ID NO: 62859 - DNA, 30 bp, Artificial Sequence
  Synthetic oligonucleotide
agctgatgctaaatacggtcgggctgggca

SEQ ID NO: 62860 - DNA, 30 bp, Artificial Sequence
  Synthetic oligonucleotide
ggagcctcactgcgtgacaaagcaatggca

SEQ ID NO: 62861 - DNA, 30 bp, Artificial Sequence
  Synthetic oligonucleotide
ggcagagttaaagtcaacactcgcctggca

SEQ ID NO: 62862 - DNA, 30 bp, Artificial Sequence
  Synthetic oligonucleotide
cgaaagacatgaagagagtggacgctggca

SEQ ID NO: 62863 - DNA, 30 bp, Artificial Sequence
  Synthetic oligonucleotide
aagagaaggcttcaagcttgatagaatgca

SEQ ID NO: 62864 - DNA, 30 bp, Artificial Sequence
  Synthetic oligonucleotide
cgaagtaagaggggctttatggcacatgca

SEQ ID NO: 62865 - DNA, 30 bp, Artificial Sequence
  Synthetic oligonucleotide
ctaacagaatctgaacgtgctgtgcatgca

SEQ ID NO: 62866 - DNA, 30 bp, Artificial Sequence
  Synthetic oligonucleotide
aatcaggaaatcgctggcactaactatgca

SEQ ID NO: 62867 - DNA, 30 bp, Artificial Sequence
  Synthetic oligonucleotide
tcgcgagacgggcctacaggcgcgtatgca

SEQ ID NO: 62868 - DNA, 30 bp, Artificial Sequence
  Synthetic oligonucleotide
gggataatgatgcagtgggaacagcctgca

SEQ ID NO: 62869 - DNA, 30 bp, Artificial Sequence
  Synthetic oligonucleotide
aacacataatatctccgtcaaccgcctgca

SEQ ID NO: 62870 - DNA, 30 bp, Artificial Sequence
  Synthetic oligonucleotide
atccatgggaccaggaagtggcctcctgca

SEQ ID NO: 62871 - DNA, 30 bp, Artificial Sequence
  Synthetic oligonucleotide
caagtaacgttgatacgggagagtcctgca

SEQ ID NO: 62872 - DNA, 30 bp, Artificial Sequence
  Synthetic oligonucleotide
agcggtatcgagcgaaacacactagctgca

SEQ ID NO: 62873 - DNA, 30 bp, Artificial Sequence
  Synthetic oligonucleotide
gtaagtgaggagtcgaaccaaggaagtgca

SEQ ID NO: 62874 - DNA, 30 bp, Artificial Sequence
  Synthetic oligonucleotide
cctgtgccagatactcaagagaacagtgca

SEQ ID NO: 62875 - DNA, 30 bp, Artificial Sequence
  Synthetic oligonucleotide
tgcttacagtcgaacatacgttggagtgca

SEQ ID NO: 62876 - DNA, 30 bp, Artificial Sequence
  Synthetic oligonucleotide
tcacagtagtgtcttgtcgttaagcgtgca

SEQ ID NO: 62877 - DNA, 30 bp, Artificial Sequence
  Synthetic oligonucleotide
taaatgaaaacagtggggcggtgcggtgca

SEQ ID NO: 62878 - DNA, 30 bp, Artificial Sequence
  Synthetic oligonucleotide
gcgtcactgcgtgtggtcggtacgtgtgca

SEQ ID NO: 62879 - DNA, 30 bp, Artificial Sequence
  Synthetic oligonucleotide
aagtagggtgtaaacctgcaattgtgtgca

SEQ ID NO: 62880 - DNA, 30 bp, Artificial Sequence
  Synthetic oligonucleotide
cacgtgaacacacgggtgtctttgtgtgca

SEQ ID NO: 62881 - DNA, 30 bp, Artificial Sequence
  Synthetic oligonucleotide
ttgagaggctatggttgagataaagttgca

SEQ ID NO: 62882 - DNA, 30 bp, Artificial Sequence
  Synthetic oligonucleotide
actaaaaccatagaaaaaagggttgttgca

SEQ ID NO: 62883 - DNA, 30 bp, Artificial Sequence
  Synthetic oligonucleotide
tggggcggtccaatctcgacatactttgca

SEQ ID NO: 62884 - DNA, 30 bp, Artificial Sequence
  Synthetic oligonucleotide
acaacaatcaacaggactacctagtttgca

SEQ ID NO: 62885 - DNA, 30 bp, Artificial Sequence
  Synthetic oligonucleotide
gaacgagggttaccagccaacctgtttgca

SEQ ID NO: 62886 - DNA, 30 bp, Artificial Sequence
  Synthetic oligonucleotide
tcgtatgtcgggtggccgatcgcttttgca

SEQ ID NO: 62887 - DNA, 30 bp, Artificial Sequence
  Synthetic oligonucleotide
tgacggcgggtcgtcctcgtacgttttgca

SEQ ID NO: 62888 - DNA, 30 bp, Artificial Sequence
  Synthetic oligonucleotide
cgggccgccagagcacgggggtaaaaatca

SEQ ID NO: 62889 - DNA, 30 bp, Artificial Sequence
  Synthetic oligonucleotide
ataagagccgacagcgaaggcttcaaatca

SEQ ID NO: 62890 - DNA, 30 bp, Artificial Sequence
  Synthetic oligonucleotide
ccttgttaaagtgaacatcgcgtgaaatca

SEQ ID NO: 62891 - DNA, 30 bp, Artificial Sequence
  Synthetic oligonucleotide
ggggagtttgagtgggaaaaataggaatca

SEQ ID NO: 62892 - DNA, 30 bp, Artificial Sequence
  Synthetic oligonucleotide
ggcagtcgccgtcactgtatcgcggaatca

SEQ ID NO: 62893 - DNA, 30 bp, Artificial Sequence
  Synthetic oligonucleotide
atgtaacagatggcctggttctgggaatca

SEQ ID NO: 62894 - DNA, 30 bp, Artificial Sequence
  Synthetic oligonucleotide
catggtccgaattgcgagtccccaacatca

SEQ ID NO: 62895 - DNA, 30 bp, Artificial Sequence
  Synthetic oligonucleotide
tacgatggaagatatacagagagaccatca

SEQ ID NO: 62896 - DNA, 30 bp, Artificial Sequence
  Synthetic oligonucleotide
ctaaaccatatgtaccgtgacttgccatca

SEQ ID NO: 62897 - DNA, 30 bp, Artificial Sequence
  Synthetic oligonucleotide
taccggacatcaaagccatcgcaagcatca

SEQ ID NO: 62898 - DNA, 30 bp, Artificial Sequence
  Synthetic oligonucleotide
ggaaataagtgcagcaaaacggatgcatca

SEQ ID NO: 62899 - DNA, 30 bp, Artificial Sequence
  Synthetic oligonucleotide
ttactgttccggaaaggggtaacgagatca

SEQ ID NO: 62900 - DNA, 30 bp, Artificial Sequence
  Synthetic oligonucleotide
cacctagccaagttgactgtgacgagatca

SEQ ID NO: 62901 - DNA, 30 bp, Artificial Sequence
  Synthetic oligonucleotide
gagactggtcgaccttggcttcgtagatca

SEQ ID NO: 62902 - DNA, 30 bp, Artificial Sequence
  Synthetic oligonucleotide
taggagcgcgaacacgtgagcttacgatca

SEQ ID NO: 62903 - DNA, 30 bp, Artificial Sequence
  Synthetic oligonucleotide
gaatgaacgaaggaatttgaaccgggatca

SEQ ID NO: 62904 - DNA, 30 bp, Artificial Sequence
  Synthetic oligonucleotide
atggtgctacaacaagtagctcaatgatca

SEQ ID NO: 62905 - DNA, 30 bp, Artificial Sequence
  Synthetic oligonucleotide
gcgatgcgaatctcaaagctggactgatca

SEQ ID NO: 62906 - DNA, 30 bp, Artificial Sequence
  Synthetic oligonucleotide
cacataaatggcatacgggccagctgatca

SEQ ID NO: 62907 - DNA, 30 bp, Artificial Sequence
  Synthetic oligonucleotide
agcgtactcatcactacggctcggtgatca

SEQ ID NO: 62908 - DNA, 30 bp, Artificial Sequence
  Synthetic oligonucleotide
gagcagtggaggaagcgagtggggatatca

SEQ ID NO: 62909 - DNA, 30 bp, Artificial Sequence
  Synthetic oligonucleotide
cagtggcgaaatgttagcaacctgatatca

SEQ ID NO: 62910 - DNA, 30 bp, Artificial Sequence
  Synthetic oligonucleotide
aggcgtttaaactcaacgggggacttatca

SEQ ID NO: 62911 - DNA, 30 bp, Artificial Sequence
  Synthetic oligonucleotide
gacatctggtactagaaagcgtcaaactca

SEQ ID NO: 62912 - DNA, 30 bp, Artificial Sequence
  Synthetic oligonucleotide
cggaaatcacgagggactgaccaggactca

SEQ ID NO: 62913 - DNA, 30 bp, Artificial Sequence
  Synthetic oligonucleotide
tccttcaggccagatagatagatatactca

SEQ ID NO: 62914 - DNA, 30 bp, Artificial Sequence
  Synthetic oligonucleotide
agagggattggtcgatcttgataaacctca

SEQ ID NO: 62915 - DNA, 30 bp, Artificial Sequence
  Synthetic oligonucleotide
actagtaacagtgagggcaaattgacctca

SEQ ID NO: 62916 - DNA, 30 bp, Artificial Sequence
  Synthetic oligonucleotide
acattacaaaaaagcgtggtttgagcctca

SEQ ID NO: 62917 - DNA, 30 bp, Artificial Sequence
  Synthetic oligonucleotide
gcgaagcttgcagaagaagcacttgcctca

SEQ ID NO: 62918 - DNA, 30 bp, Artificial Sequence
  Synthetic oligonucleotide
cccatagatgtgcctttggtgggaagctca

SEQ ID NO: 62919 - DNA, 30 bp, Artificial Sequence
  Synthetic oligonucleotide
tgggagagtgcttagatgtaatggagctca

SEQ ID NO: 62920 - DNA, 30 bp, Artificial Sequence
  Synthetic oligonucleotide
cagcgccaattagtggccatccttagctca

SEQ ID NO: 62921 - DNA, 30 bp, Artificial Sequence
  Synthetic oligonucleotide
atatgtggagcagttggtaacctgggctca

SEQ ID NO: 62922 - DNA, 30 bp, Artificial Sequence
  Synthetic oligonucleotide
gcgcggaacagggtcagcgtacgtatctca

SEQ ID NO: 62923 - DNA, 30 bp, Artificial Sequence
  Synthetic oligonucleotide
gtacgcccgagtttagataagttcaagtca

SEQ ID NO: 62924 - DNA, 30 bp, Artificial Sequence
  Synthetic oligonucleotide
aacagctgagtggtaggcatacataagtca

SEQ ID NO: 62925 - DNA, 30 bp, Artificial Sequence
  Synthetic oligonucleotide
caagataaaatcaagtacaacctacagtca

SEQ ID NO: 62926 - DNA, 30 bp, Artificial Sequence
  Synthetic oligonucleotide
aatcacggcccagtaacactggcagagtca

SEQ ID NO: 62927 - DNA, 30 bp, Artificial Sequence
  Synthetic oligonucleotide
accttgagagaatcgtggaaatttgagtca

SEQ ID NO: 62928 - DNA, 30 bp, Artificial Sequence
  Synthetic oligonucleotide
tactgcacagttacccgttatcgatagtca

SEQ ID NO: 62929 - DNA, 30 bp, Artificial Sequence
  Synthetic oligonucleotide
tatcacttgaaagagaggcgcgcctagtca

SEQ ID NO: 62930 - DNA, 30 bp, Artificial Sequence
  Synthetic oligonucleotide
agagacagtactagccgcctcccaacgtca

SEQ ID NO: 62931 - DNA, 30 bp, Artificial Sequence
  Synthetic oligonucleotide
acaccccgatgtcttgatctatcaccgtca

SEQ ID NO: 62932 - DNA, 30 bp, Artificial Sequence
  Synthetic oligonucleotide
cgggtatcggctacgggcagaagtgcgtca

SEQ ID NO: 62933 - DNA, 30 bp, Artificial Sequence
  Synthetic oligonucleotide
ctcgactggatcagggtgaactattcgtca

SEQ ID NO: 62934 - DNA, 30 bp, Artificial Sequence
  Synthetic oligonucleotide
acgatcattgggacgagcaattaaaggtca

SEQ ID NO: 62935 - DNA, 30 bp, Artificial Sequence
  Synthetic oligonucleotide
atgtcaatgggaccgtgtatcggaaggtca

SEQ ID NO: 62936 - DNA, 30 bp, Artificial Sequence
  Synthetic oligonucleotide
tcaaactacacgggaattcaatggaggtca

SEQ ID NO: 62937 - DNA, 30 bp, Artificial Sequence
  Synthetic oligonucleotide
gccaatgtgagctggtgaatggcagggtca

SEQ ID NO: 62938 - DNA, 30 bp, Artificial Sequence
  Synthetic oligonucleotide
aaacggcaagggcgcctgagagacgggtca

SEQ ID NO: 62939 - DNA, 30 bp, Artificial Sequence
  Synthetic oligonucleotide
catattcagggccttcgagaaagctggtca

SEQ ID NO: 62940 - DNA, 30 bp, Artificial Sequence
  Synthetic oligonucleotide
gatgtaggtgctcagagtaccaggtggtca

SEQ ID NO: 62941 - DNA, 30 bp, Artificial Sequence
  Synthetic oligonucleotide
atggtacatcggttgtgacctggaatgtca

SEQ ID NO: 62942 - DNA, 30 bp, Artificial Sequence
  Synthetic oligonucleotide
agcagcgattccaactgagggcgcatgtca

SEQ ID NO: 62943 - DNA, 30 bp, Artificial Sequence
  Synthetic oligonucleotide
cagtccggttaaccatcccgattgatgtca

SEQ ID NO: 62944 - DNA, 30 bp, Artificial Sequence
  Synthetic oligonucleotide
taacagggcggcgggtattctggcgtgtca

SEQ ID NO: 62945 - DNA, 30 bp, Artificial Sequence
  Synthetic oligonucleotide
gaagatcgcacggtcgatcacggtgtgtca

SEQ ID NO: 62946 - DNA, 30 bp, Artificial Sequence
  Synthetic oligonucleotide
cagaagaactacttttttaatgccttgtca

SEQ ID NO: 62947 - DNA, 30 bp, Artificial Sequence
  Synthetic oligonucleotide
ggaaggatctgctcaagtagagcgaattca

SEQ ID NO: 62948 - DNA, 30 bp, Artificial Sequence
  Synthetic oligonucleotide
gcggcatggccgcgccatccaaagcattca

SEQ ID NO: 62949 - DNA, 30 bp, Artificial Sequence
  Synthetic oligonucleotide
actgctcaacacgaggtaacgaattattca

SEQ ID NO: 62950 - DNA, 30 bp, Artificial Sequence
  Synthetic oligonucleotide
cccgttaagcgggaagggacgccttattca

SEQ ID NO: 62951 - DNA, 30 bp, Artificial Sequence
  Synthetic oligonucleotide
tcgcggtttaagcgggcgagggaaacttca

SEQ ID NO: 62952 - DNA, 30 bp, Artificial Sequence
  Synthetic oligonucleotide
ttggttaggcaaataccggaatacacttca

SEQ ID NO: 62953 - DNA, 30 bp, Artificial Sequence
  Synthetic oligonucleotide
tcacggaaacataagtggggcgtgccttca

SEQ ID NO: 62954 - DNA, 30 bp, Artificial Sequence
  Synthetic oligonucleotide
cagcgcgagtaaaattagcggcgggcttca

SEQ ID NO: 62955 - DNA, 30 bp, Artificial Sequence
  Synthetic oligonucleotide
tgcatactggacaagtgcgaggcgtcttca

SEQ ID NO: 62956 - DNA, 30 bp, Artificial Sequence
  Synthetic oligonucleotide
acaagtaagctcgactaggaaacaagttca

SEQ ID NO: 62957 - DNA, 30 bp, Artificial Sequence
  Synthetic oligonucleotide
atagcgaaggtggcattacgtacaagttca

SEQ ID NO: 62958 - DNA, 30 bp, Artificial Sequence
  Synthetic oligonucleotide
ttcggctcacggagagacggatttagttca

SEQ ID NO: 62959 - DNA, 30 bp, Artificial Sequence
  Synthetic oligonucleotide
cgcaaaccattctacactacgtcccgttca

SEQ ID NO: 62960 - DNA, 30 bp, Artificial Sequence
  Synthetic oligonucleotide
ctataaaccaacagtggcgagtccatttca

SEQ ID NO: 62961 - DNA, 30 bp, Artificial Sequence
  Synthetic oligonucleotide
agcggtatcagctgagcagctcgcatttca

SEQ ID NO: 62962 - DNA, 30 bp, Artificial Sequence
  Synthetic oligonucleotide
tctggcgaggactcacgcgcgcgaaaaaga

SEQ ID NO: 62963 - DNA, 30 bp, Artificial Sequence
  Synthetic oligonucleotide
agcaggtgtgagatcactgtcaggaaaaga

SEQ ID NO: 62964 - DNA, 30 bp, Artificial Sequence
  Synthetic oligonucleotide
aggtatggagggtattaagcgcatcaaaga

SEQ ID NO: 62965 - DNA, 30 bp, Artificial Sequence
  Synthetic oligonucleotide
ttcacggagggcctcatgaatggagaaaga

SEQ ID NO: 62966 - DNA, 30 bp, Artificial Sequence
  Synthetic oligonucleotide
gtctcagtagagacccacacgaccgaaaga

SEQ ID NO: 62967 - DNA, 30 bp, Artificial Sequence
  Synthetic oligonucleotide
gagacatgagagacagaataccactaaaga

SEQ ID NO: 62968 - DNA, 31 bp, Artificial Sequence
  Synthetic oligonucleotide
gcgcagtgtgggtaccaccgatagaacaaga

SEQ ID NO: 62969 - DNA, 30 bp, Artificial Sequence
  Synthetic oligonucleotide
ctctaaagttatagtctccgaggaacaaga

SEQ ID NO: 62970 - DNA, 30 bp, Artificial Sequence
  Synthetic oligonucleotide
agggagtatggctagtctagcacggcaaga

SEQ ID NO: 62971 - DNA, 30 bp, Artificial Sequence
  Synthetic oligonucleotide
taagcaatagagtgatacggtacggcaaga

SEQ ID NO: 62972 - DNA, 30 bp, Artificial Sequence
  Synthetic oligonucleotide
gccttatgcgagcataacgaatggtcaaga

SEQ ID NO: 62973 - DNA, 30 bp, Artificial Sequence
  Synthetic oligonucleotide
cgtatggacagtgtcacgaagttaagaaga

SEQ ID NO: 62974 - DNA, 30 bp, Artificial Sequence
  Synthetic oligonucleotide
ccaaaaactcatcacgtatcaaatagaaga

SEQ ID NO: 62975 - DNA, 30 bp, Artificial Sequence
  Synthetic oligonucleotide
actacacgattggtagtgaataaacgaaga

SEQ ID NO: 62976 - DNA, 30 bp, Artificial Sequence
  Synthetic oligonucleotide
gcgtgaccaagggacgatcgtgcacgaaga

SEQ ID NO: 62977 - DNA, 30 bp, Artificial Sequence
  Synthetic oligonucleotide
ctgccagattacatccactacgtgggaaga

SEQ ID NO: 62978 - DNA, 30 bp, Artificial Sequence
  Synthetic oligonucleotide
taacaaaacgctgggtagcaccgctgaaga

SEQ ID NO: 62979 - DNA, 30 bp, Artificial Sequence
  Synthetic oligonucleotide
caggggagccgggcagtctctcagtgaaga

SEQ ID NO: 62980 - DNA, 30 bp, Artificial Sequence
  Synthetic oligonucleotide
ggtcggtgaggttgataagtgctcctaaga

SEQ ID NO: 62981 - DNA, 30 bp, Artificial Sequence
  Synthetic oligonucleotide
gaatggacctcaaccgatcaatctctaaga

SEQ ID NO: 62982 - DNA, 30 bp, Artificial Sequence
  Synthetic oligonucleotide
tcttgccgagggagacataaacgtgtaaga

SEQ ID NO: 62983 - DNA, 30 bp, Artificial Sequence
  Synthetic oligonucleotide
cgcgatacagagtaggattcacgcttaaga

SEQ ID NO: 62984 - DNA, 30 bp, Artificial Sequence
  Synthetic oligonucleotide
taatgaggggatttatggcgtaagttaaga

SEQ ID NO: 62985 - DNA, 30 bp, Artificial Sequence
  Synthetic oligonucleotide
ggtaactggggtctcgttataaggttaaga

SEQ ID NO: 62986 - DNA, 30 bp, Artificial Sequence
  Synthetic oligonucleotide
tggcaagtaacggtactataccggaacaga

SEQ ID NO: 62987 - DNA, 30 bp, Artificial Sequence
  Synthetic oligonucleotide
tacgacgttcggggatagttatataacaga

SEQ ID NO: 62988 - DNA, 30 bp, Artificial Sequence
  Synthetic oligonucleotide
taatgcctgaaggagttacgagctaacaga

SEQ ID NO: 62989 - DNA, 30 bp, Artificial Sequence
  Synthetic oligonucleotide
tttcataaaccaaatggaaacttacacaga

SEQ ID NO: 62990 - DNA, 30 bp, Artificial Sequence
  Synthetic oligonucleotide
gtacgcctggtaaaacaccggggtcacaga

SEQ ID NO: 62991 - DNA, 30 bp, Artificial Sequence
  Synthetic oligonucleotide
ggcgaggttataagcaagtgttttcacaga

SEQ ID NO: 62992 - DNA, 30 bp, Artificial Sequence
  Synthetic oligonucleotide
cgcaatgggcttggtaaggggtaagacaga

SEQ ID NO: 62993 - DNA, 30 bp, Artificial Sequence
  Synthetic oligonucleotide
cggaggggtgggtcacaaaagacagacaga

SEQ ID NO: 62994 - DNA, 30 bp, Artificial Sequence
  Synthetic oligonucleotide
ctaatctgaattgttagaaacgtcgacaga

SEQ ID NO: 62995 - DNA, 30 bp, Artificial Sequence
  Synthetic oligonucleotide
ttcaagttaaggtagggcccaacggacaga

SEQ ID NO: 62996 - DNA, 30 bp, Artificial Sequence
  Synthetic oligonucleotide
taagagcataaaccggggaactcggacaga

SEQ ID NO: 62997 - DNA, 30 bp, Artificial Sequence
  Synthetic oligonucleotide
gcatggtaagagtcccggtattatgacaga

SEQ ID NO: 62998 - DNA, 30 bp, Artificial Sequence
  Synthetic oligonucleotide
ggtctaccacggctcggaacgaggtacaga

SEQ ID NO: 62999 - DNA, 30 bp, Artificial Sequence
  Synthetic oligonucleotide
cgttgctagtgccccttaataaccaccaga

SEQ ID NO: 63000 - DNA, 30 bp, Artificial Sequence
  Synthetic oligonucleotide
gtcttggcggaaaagtcataaccgaccaga

SEQ ID NO: 63001 - DNA, 30 bp, Artificial Sequence
  Synthetic oligonucleotide
gtcgcggctaaaagcagagagaggcccaga

SEQ ID NO: 63002 - DNA, 30 bp, Artificial Sequence
  Synthetic oligonucleotide
ccaactgtcggcttagcgaagtatcccaga

SEQ ID NO: 63003 - DNA, 30 bp, Artificial Sequence
  Synthetic oligonucleotide
taggaacaaccgcacgcggcccgtgccaga

SEQ ID NO: 63004 - DNA, 30 bp, Artificial Sequence
  Synthetic oligonucleotide
cggaatccacatacaggagatgcttccaga

SEQ ID NO: 63005 - DNA, 30 bp, Artificial Sequence
  Synthetic oligonucleotide
tttagtgcagggtaataaagatccagcaga

SEQ ID NO: 63006 - DNA, 30 bp, Artificial Sequence
  Synthetic oligonucleotide
ttgggatgtgccaatcgactcaatagcaga

SEQ ID NO: 63007 - DNA, 30 bp, Artificial Sequence
  Synthetic oligonucleotide
ggcgtagtctaacaacacccataatgcaga

SEQ ID NO: 63008 - DNA, 30 bp, Artificial Sequence
  Synthetic oligonucleotide
acccgggcagtaaaggtaaggatatgcaga

SEQ ID NO: 63009 - DNA, 30 bp, Artificial Sequence
  Synthetic oligonucleotide
accatcacacacgaagtgttagattgcaga

SEQ ID NO: 63010 - DNA, 30 bp, Artificial Sequence
  Synthetic oligonucleotide
acactggttgtgcagatggcctaaatcaga

SEQ ID NO: 63011 - DNA, 30 bp, Artificial Sequence
  Synthetic oligonucleotide
ccaacgcgcgctaaacgtgatgatatcaga

SEQ ID NO: 63012 - DNA, 30 bp, Artificial Sequence
  Synthetic oligonucleotide
cggtaatcgagagaggcttactttatcaga

SEQ ID NO: 63013 - DNA, 30 bp, Artificial Sequence
  Synthetic oligonucleotide
ataacgtggcacctagtaataggactcaga

SEQ ID NO: 63014 - DNA, 30 bp, Artificial Sequence
  Synthetic oligonucleotide
cgcaaacttcattagacctgtacagtcaga

SEQ ID NO: 63015 - DNA, 30 bp, Artificial Sequence
  Synthetic oligonucleotide
agctccggccaggcagttaggtacgtcaga

SEQ ID NO: 63016 - DNA, 30 bp, Artificial Sequence
  Synthetic oligonucleotide
gtacctggcatgggagagtcatctgtcaga

SEQ ID NO: 63017 - DNA, 30 bp, Artificial Sequence
  Synthetic oligonucleotide
tagtgcagccaagccgggcgagtcttcaga

SEQ ID NO: 63018 - DNA, 30 bp, Artificial Sequence
  Synthetic oligonucleotide
tgaaatgaaggctaactgcagttcttcaga

SEQ ID NO: 63019 - DNA, 30 bp, Artificial Sequence
  Synthetic oligonucleotide
ttctagatcaaaagatgaagtatgttcaga

SEQ ID NO: 63020 - DNA, 30 bp, Artificial Sequence
  Synthetic oligonucleotide
tcgaggacactgtaccaagaataaaagaga

SEQ ID NO: 63021 - DNA, 30 bp, Artificial Sequence
  Synthetic oligonucleotide
cacacaatccctcgagtccccaggaagaga

SEQ ID NO: 63022 - DNA, 30 bp, Artificial Sequence
  Synthetic oligonucleotide
ggattaggtcgaggtaactatgctaagaga

SEQ ID NO: 63023 - DNA, 30 bp, Artificial Sequence
  Synthetic oligonucleotide
agggccgctccggcatcagtaatacagaga

SEQ ID NO: 63024 - DNA, 30 bp, Artificial Sequence
  Synthetic oligonucleotide
tacgatacctgtgtgagcccaagagagaga

SEQ ID NO: 63025 - DNA, 30 bp, Artificial Sequence
  Synthetic oligonucleotide
acctacgtcagggatcatggactcgagaga

SEQ ID NO: 63026 - DNA, 30 bp, Artificial Sequence
  Synthetic oligonucleotide
agatcgctactcttcacatagccggagaga

SEQ ID NO: 63027 - DNA, 30 bp, Artificial Sequence
  Synthetic oligonucleotide
atggagtagaccaggaccgcactatagaga

SEQ ID NO: 63028 - DNA, 30 bp, Artificial Sequence
  Synthetic oligonucleotide
gatcagaatgatatgacatgtgcctagaga

SEQ ID NO: 63029 - DNA, 30 bp, Artificial Sequence
  Synthetic oligonucleotide
aggtagcgaagtgggcgtgcctaagcgaga

SEQ ID NO: 63030 - DNA, 30 bp, Artificial Sequence
  Synthetic oligonucleotide
tggacacacgcggataaggggcgagcgaga

SEQ ID NO: 63031 - DNA, 30 bp, Artificial Sequence
  Synthetic oligonucleotide
cgggggggttggtatagactaaaggcgaga

SEQ ID NO: 63032 - DNA, 30 bp, Artificial Sequence
  Synthetic oligonucleotide
cgcctagattatgccttccccactgcgaga

SEQ ID NO: 63033 - DNA, 30 bp, Artificial Sequence
  Synthetic oligonucleotide
atcgacaagtgtttcagaaatcggtcgaga

SEQ ID NO: 63034 - DNA, 30 bp, Artificial Sequence
  Synthetic oligonucleotide
tcgggagcattgactagaaaaagttcgaga

SEQ ID NO: 63035 - DNA, 30 bp, Artificial Sequence
  Synthetic oligonucleotide
ttatacagactcgagaaacgacagaggaga

SEQ ID NO: 63036 - DNA, 30 bp, Artificial Sequence
  Synthetic oligonucleotide
ctaggacttgttcgatcaagtgggaggaga

SEQ ID NO: 63037 - DNA, 30 bp, Artificial Sequence
  Synthetic oligonucleotide
gggagtaccatctaatcgggcacagggaga

SEQ ID NO: 63038 - DNA, 30 bp, Artificial Sequence
  Synthetic oligonucleotide
tctacggatttaaaagaacacgaggggaga

SEQ ID NO: 63039 - DNA, 30 bp, Artificial Sequence
  Synthetic oligonucleotide
aagcagaagtcggtcatgtaagctgggaga

SEQ ID NO: 63040 - DNA, 30 bp, Artificial Sequence
  Synthetic oligonucleotide
gagatgatgtaacaccagtttcgatggaga

SEQ ID NO: 63041 - DNA, 30 bp, Artificial Sequence
  Synthetic oligonucleotide
ggagggttgttgaagcgctaaaattggaga

SEQ ID NO: 63042 - DNA, 30 bp, Artificial Sequence
  Synthetic oligonucleotide
cgagcaccactttagcgctacccttggaga

SEQ ID NO: 63043 - DNA, 30 bp, Artificial Sequence
  Synthetic oligonucleotide
cacatcggcaccaagttttcggtttggaga

SEQ ID NO: 63044 - DNA, 30 bp, Artificial Sequence
  Synthetic oligonucleotide
tccatgagcagtatgcgaggagtcatgaga

SEQ ID NO: 63045 - DNA, 30 bp, Artificial Sequence
  Synthetic oligonucleotide
cacctggcgtacacagactgaatcctgaga

SEQ ID NO: 63046 - DNA, 30 bp, Artificial Sequence
  Synthetic oligonucleotide
gtggagatatgatacatgggcgggctgaga

SEQ ID NO: 63047 - DNA, 30 bp, Artificial Sequence
  Synthetic oligonucleotide
ggtgagccatttccgtttcagggagtgaga

SEQ ID NO: 63048 - DNA, 30 bp, Artificial Sequence
  Synthetic oligonucleotide
cgtaacagtgtgttatgtcacgtagtgaga

SEQ ID NO: 63049 - DNA, 30 bp, Artificial Sequence
  Synthetic oligonucleotide
aggggaaccacattcgagacggttgtgaga

SEQ ID NO: 63050 - DNA, 30 bp, Artificial Sequence
  Synthetic oligonucleotide
agggaatgagatatcccgtaagaattgaga

SEQ ID NO: 63051 - DNA, 30 bp, Artificial Sequence
  Synthetic oligonucleotide
gcaccacagtaacgaaagcaccgattgaga

SEQ ID NO: 63052 - DNA, 30 bp, Artificial Sequence
  Synthetic oligonucleotide
cgggcgtacaccttgtacgtaagtttgaga

SEQ ID NO: 63053 - DNA, 30 bp, Artificial Sequence
  Synthetic oligonucleotide
aacagtagaatgatagtagattgaaataga

SEQ ID NO: 63054 - DNA, 30 bp, Artificial Sequence
  Synthetic oligonucleotide
aaagaaggatacgctcaggggaataataga

SEQ ID NO: 63055 - DNA, 30 bp, Artificial Sequence
  Synthetic oligonucleotide
ggaattaaggagacgtggtgtcaacataga

SEQ ID NO: 63056 - DNA, 30 bp, Artificial Sequence
  Synthetic oligonucleotide
tcgtccggaagcgaactttgagcacataga

SEQ ID NO: 63057 - DNA, 31 bp, Artificial Sequence
  Synthetic oligonucleotide
ggatcgccggacccccggttactcggataga

SEQ ID NO: 63058 - DNA, 30 bp, Artificial Sequence
  Synthetic oligonucleotide
ctttagacgaattgggaacgtatgtataga

SEQ ID NO: 63059 - DNA, 30 bp, Artificial Sequence
  Synthetic oligonucleotide
ctagactcgttacctacatcccggactaga

SEQ ID NO: 63060 - DNA, 30 bp, Artificial Sequence
  Synthetic oligonucleotide
ctgtaaggtggaacaagcacactacctaga

SEQ ID NO: 63061 - DNA, 30 bp, Artificial Sequence
  Synthetic oligonucleotide
agagggagactaagtgccctttgatctaga

SEQ ID NO: 63062 - DNA, 30 bp, Artificial Sequence
  Synthetic oligonucleotide
ggtctgaactctcgaaacattgactctaga

SEQ ID NO: 63063 - DNA, 30 bp, Artificial Sequence
  Synthetic oligonucleotide
gaccgagcgtattgaacggtggatagtaga

SEQ ID NO: 63064 - DNA, 30 bp, Artificial Sequence
  Synthetic oligonucleotide
aaaggggattcccgtaaatcgtatcgtaga

SEQ ID NO: 63065 - DNA, 30 bp, Artificial Sequence
  Synthetic oligonucleotide
gagcagactcggagagagctgtctcgtaga

SEQ ID NO: 63066 - DNA, 30 bp, Artificial Sequence
  Synthetic oligonucleotide
tctggccaatgcggataatgcaccggtaga

SEQ ID NO: 63067 - DNA, 30 bp, Artificial Sequence
  Synthetic oligonucleotide
cctgcgtgtacctgaaaggatgggggtaga

SEQ ID NO: 63068 - DNA, 30 bp, Artificial Sequence
  Synthetic oligonucleotide
agtcgggggtccggcgtaaacactattaga

SEQ ID NO: 63069 - DNA, 30 bp, Artificial Sequence
  Synthetic oligonucleotide
atgagacatacaacacggcgcgggtttaga

SEQ ID NO: 63070 - DNA, 30 bp, Artificial Sequence
  Synthetic oligonucleotide
gttaggacacttgcgatcgagattgaacga

SEQ ID NO: 63071 - DNA, 30 bp, Artificial Sequence
  Synthetic oligonucleotide
catcactccagcaaattgtacaattaacga

SEQ ID NO: 63072 - DNA, 30 bp, Artificial Sequence
  Synthetic oligonucleotide
gagcatagacatatggtagcaagcacacga

SEQ ID NO: 63073 - DNA, 30 bp, Artificial Sequence
  Synthetic oligonucleotide
gcacgggtatagactggactattcacacga

SEQ ID NO: 63074 - DNA, 30 bp, Artificial Sequence
  Synthetic oligonucleotide
agtgcataggggctagtggagtatacacga

SEQ ID NO: 63075 - DNA, 30 bp, Artificial Sequence
  Synthetic oligonucleotide
ggcagagaacgattttaaagcatggcacga

SEQ ID NO: 63076 - DNA, 30 bp, Artificial Sequence
  Synthetic oligonucleotide
ggagcatctcaacgaagatacaaacgacga

SEQ ID NO: 63077 - DNA, 30 bp, Artificial Sequence
  Synthetic oligonucleotide
ttacagggcgggcgattggtccaccgacga

SEQ ID NO: 63078 - DNA, 30 bp, Artificial Sequence
  Synthetic oligonucleotide
aataaggtgtatgagcataagtgtcgacga

SEQ ID NO: 63079 - DNA, 30 bp, Artificial Sequence
  Synthetic oligonucleotide
gccctgaggacggcaagaatacaaggacga

SEQ ID NO: 63080 - DNA, 30 bp, Artificial Sequence
  Synthetic oligonucleotide
agatggtatgtcagacacacgaccggacga

SEQ ID NO: 63081 - DNA, 30 bp, Artificial Sequence
  Synthetic oligonucleotide
tgacgcgaattgctggaatccctcggacga

SEQ ID NO: 63082 - DNA, 30 bp, Artificial Sequence
  Synthetic oligonucleotide
aggtcttcgcttctagctatagggggacga

SEQ ID NO: 63083 - DNA, 30 bp, Artificial Sequence
  Synthetic oligonucleotide
cgtgacagaaagacgttacgtcgttgacga

SEQ ID NO: 63084 - DNA, 30 bp, Artificial Sequence
  Synthetic oligonucleotide
gtcccgagggacaaaggcactcgaatacga

SEQ ID NO: 63085 - DNA, 30 bp, Artificial Sequence
  Synthetic oligonucleotide
agagacggaagcctgtccgggcttatacga

SEQ ID NO: 63086 - DNA, 30 bp, Artificial Sequence
  Synthetic oligonucleotide
tcacgtgggcactcaaatgatcgcctacga

SEQ ID NO: 63087 - DNA, 30 bp, Artificial Sequence
  Synthetic oligonucleotide
aaagggctcactcctggtgaaatgctacga

SEQ ID NO: 63088 - DNA, 30 bp, Artificial Sequence
  Synthetic oligonucleotide
cgctgtaatgaagtggtaccggcagtacga

SEQ ID NO: 63089 - DNA, 30 bp, Artificial Sequence
  Synthetic oligonucleotide
tcgatgtgatcgtggaggctgctagtacga

SEQ ID NO: 63090 - DNA, 30 bp, Artificial Sequence
  Synthetic oligonucleotide
acgcgggtcacccgtgtgaacaacgtacga

SEQ ID NO: 63091 - DNA, 30 bp, Artificial Sequence
  Synthetic oligonucleotide
gaaggtggagtgcgactttgaggtgtacga

SEQ ID NO: 63092 - DNA, 30 bp, Artificial Sequence
  Synthetic oligonucleotide
cgaggccatccatacggaagtcaattacga

SEQ ID NO: 63093 - DNA, 30 bp, Artificial Sequence
  Synthetic oligonucleotide
gcacgctaagaccctatgatagtgttacga

SEQ ID NO: 63094 - DNA, 30 bp, Artificial Sequence
  Synthetic oligonucleotide
ggggaaggcgacccaagaacatcaaaccga

SEQ ID NO: 63095 - DNA, 30 bp, Artificial Sequence
  Synthetic oligonucleotide
aggatatgaaactattctgcaagacaccga

SEQ ID NO: 63096 - DNA, 30 bp, Artificial Sequence
  Synthetic oligonucleotide
gctcgtaccgcattaaactactaccaccga

SEQ ID NO: 63097 - DNA, 30 bp, Artificial Sequence
  Synthetic oligonucleotide
cgaaccaacatcgacgggagtatgcaccga

SEQ ID NO: 63098 - DNA, 30 bp, Artificial Sequence
  Synthetic oligonucleotide
actcacagggctcaacgcacgactcaccga

SEQ ID NO: 63099 - DNA, 30 bp, Artificial Sequence
  Synthetic oligonucleotide
cggcaaaaaaatcgggtacgggctcaccga

SEQ ID NO: 63100 - DNA, 30 bp, Artificial Sequence
  Synthetic oligonucleotide
gaggcaaatgcccggacaggcatagaccga

SEQ ID NO: 63101 - DNA, 30 bp, Artificial Sequence
  Synthetic oligonucleotide
attcaaggcaagtaatataggtgtgaccga

SEQ ID NO: 63102 - DNA, 30 bp, Artificial Sequence
  Synthetic oligonucleotide
gggtactgaagggtgggattaaattaccga

SEQ ID NO: 63103 - DNA, 30 bp, Artificial Sequence
  Synthetic oligonucleotide
atctgaaggggatatatgggaggttaccga

SEQ ID NO: 63104 - DNA, 30 bp, Artificial Sequence
  Synthetic oligonucleotide
agtaacacaattgagaagttctggacccga

SEQ ID NO: 63105 - DNA, 30 bp, Artificial Sequence
  Synthetic oligonucleotide
aggacggtgagatggtggtagtatacccga

SEQ ID NO: 63106 - DNA, 30 bp, Artificial Sequence
  Synthetic oligonucleotide
gggcacgtcgattatatgccctctacccga

SEQ ID NO: 63107 - DNA, 30 bp, Artificial Sequence
  Synthetic oligonucleotide
catgatggttttgtgagctgaatcgcccga

SEQ ID NO: 63108 - DNA, 30 bp, Artificial Sequence
  Synthetic oligonucleotide
agcacgttataggtgataagcttatcccga

SEQ ID NO: 63109 - DNA, 30 bp, Artificial Sequence
  Synthetic oligonucleotide
tctcagcgggggaagggactagtgtcccga

SEQ ID NO: 63110 - DNA, 30 bp, Artificial Sequence
  Synthetic oligonucleotide
gctcgagaaaagatgagattaggtcgccga

SEQ ID NO: 63111 - DNA, 30 bp, Artificial Sequence
  Synthetic oligonucleotide
tacacactcgtcgaaaaagttgaaggccga

SEQ ID NO: 63112 - DNA, 30 bp, Artificial Sequence
  Synthetic oligonucleotide
agggatcgcgctcgaaagagtgcaggccga

SEQ ID NO: 63113 - DNA, 30 bp, Artificial Sequence
  Synthetic oligonucleotide
agttagtcgaggaattaagggtgaggccga

SEQ ID NO: 63114 - DNA, 30 bp, Artificial Sequence
  Synthetic oligonucleotide
agccgaagatgataaagcgcagcgggccga

SEQ ID NO: 63115 - DNA, 30 bp, Artificial Sequence
  Synthetic oligonucleotide
cagacgatcatacgtacaatacgatgccga

SEQ ID NO: 63116 - DNA, 30 bp, Artificial Sequence
  Synthetic oligonucleotide
atggggacagtgtaacgatactgctgccga

SEQ ID NO: 63117 - DNA, 30 bp, Artificial Sequence
  Synthetic oligonucleotide
aggcgaaattccgcgagttccgggatccga

SEQ ID NO: 63118 - DNA, 30 bp, Artificial Sequence
  Synthetic oligonucleotide
cacagtgctgggttaacctcggaggagcga

SEQ ID NO: 63119 - DNA, 30 bp, Artificial Sequence
  Synthetic oligonucleotide
gtacgggtacgcacctgactggcttagcga

SEQ ID NO: 63120 - DNA, 30 bp, Artificial Sequence
  Synthetic oligonucleotide
ctcagacattaaattaagttgtgaacgcga

SEQ ID NO: 63121 - DNA, 30 bp, Artificial Sequence
  Synthetic oligonucleotide
aggcgataggaaaaaatattattcacgcga

SEQ ID NO: 63122 - DNA, 30 bp, Artificial Sequence
  Synthetic oligonucleotide
acggtgctaggtgcaaagcctaatacgcga

SEQ ID NO: 63123 - DNA, 29 bp, Artificial Sequence
  Synthetic oligonucleotide
ctaccagtacaaggcaatgttaaccgcga

SEQ ID NO: 63124 - DNA, 30 bp, Artificial Sequence
  Synthetic oligonucleotide
acagcgaggtctggtacatggaggccgcga

SEQ ID NO: 63125 - DNA, 30 bp, Artificial Sequence
  Synthetic oligonucleotide
caagcgtgcgaataatggtaggacaggcga

SEQ ID NO: 63126 - DNA, 30 bp, Artificial Sequence
  Synthetic oligonucleotide
ggcttaacgagcgtcaattgcagtaggcga

SEQ ID NO: 63127 - DNA, 30 bp, Artificial Sequence
  Synthetic oligonucleotide
gagacattgcgacacaacgtgtacgggcga

SEQ ID NO: 63128 - DNA, 30 bp, Artificial Sequence
  Synthetic oligonucleotide
tacggagaataaacttactgccatgggcga

SEQ ID NO: 63129 - DNA, 30 bp, Artificial Sequence
  Synthetic oligonucleotide
gagaaaaggtgtgtcgcacaatggatgcga

SEQ ID NO: 63130 - DNA, 30 bp, Artificial Sequence
  Synthetic oligonucleotide
agcgtaagtttgttgactcacggactgcga

SEQ ID NO: 63131 - DNA, 30 bp, Artificial Sequence
  Synthetic oligonucleotide
atccggaaatgcaagacgaaattagtgcga

SEQ ID NO: 63132 - DNA, 30 bp, Artificial Sequence
  Synthetic oligonucleotide
gaaggaggtttcatgttccaacctgtgcga

SEQ ID NO: 63133 - DNA, 30 bp, Artificial Sequence
  Synthetic oligonucleotide
cgattgcggcaagtaagccaaccgttgcga

SEQ ID NO: 63134 - DNA, 30 bp, Artificial Sequence
  Synthetic oligonucleotide
tcggtgaacgatagttgcgaagtgcatcga

SEQ ID NO: 63135 - DNA, 30 bp, Artificial Sequence
  Synthetic oligonucleotide
cgaacactacacgcgacagagaatcatcga

SEQ ID NO: 63136 - DNA, 30 bp, Artificial Sequence
  Synthetic oligonucleotide
tacggattgtcccatacctatcctcatcga

SEQ ID NO: 63137 - DNA, 30 bp, Artificial Sequence
  Synthetic oligonucleotide
ggggacctttgttctagggatttagatcga

SEQ ID NO: 63138 - DNA, 30 bp, Artificial Sequence
  Synthetic oligonucleotide
gtcatttacgagcggggggcgagatatcga

SEQ ID NO: 63139 - DNA, 30 bp, Artificial Sequence
  Synthetic oligonucleotide
ccatcagggaggaacaatatgtagtatcga

SEQ ID NO: 63140 - DNA, 30 bp, Artificial Sequence
  Synthetic oligonucleotide
cgttcgaacgaacggcggagtcttactcga

SEQ ID NO: 63141 - DNA, 30 bp, Artificial Sequence
  Synthetic oligonucleotide
aaagtcgacgaaggtggcgggtcagctcga

SEQ ID NO: 63142 - DNA, 30 bp, Artificial Sequence
  Synthetic oligonucleotide
agctgaacggctaggataacaggcgctcga

SEQ ID NO: 63143 - DNA, 30 bp, Artificial Sequence
  Synthetic oligonucleotide
aaaggcgatgtgtatgatgatacttctcga

SEQ ID NO: 63144 - DNA, 30 bp, Artificial Sequence
  Synthetic oligonucleotide
caacggcaaggaacctaaggctgaagtcga

SEQ ID NO: 63145 - DNA, 30 bp, Artificial Sequence
  Synthetic oligonucleotide
cgtaggacaatagaaattgcggaccgtcga

SEQ ID NO: 63146 - DNA, 30 bp, Artificial Sequence
  Synthetic oligonucleotide
caccctaagcgaaaacccgtatagcgtcga

SEQ ID NO: 63147 - DNA, 30 bp, Artificial Sequence
  Synthetic oligonucleotide
cacccaacgatgaaacgaggcaggcgtcga

SEQ ID NO: 63148 - DNA, 30 bp, Artificial Sequence
  Synthetic oligonucleotide
tcgtaatgacattgataccctgtcggtcga

SEQ ID NO: 63149 - DNA, 30 bp, Artificial Sequence
  Synthetic oligonucleotide
taaggtcgcacggtggaagtggcctgtcga

SEQ ID NO: 63150 - DNA, 30 bp, Artificial Sequence
  Synthetic oligonucleotide
agcctagaagggcatcaagtaacttttcga

SEQ ID NO: 63151 - DNA, 30 bp, Artificial Sequence
  Synthetic oligonucleotide
tgagtaggcaaacacggaaagagaaaagga

SEQ ID NO: 63152 - DNA, 30 bp, Artificial Sequence
  Synthetic oligonucleotide
agtgtcgccagaacggattagcagaaagga

SEQ ID NO: 63153 - DNA, 30 bp, Artificial Sequence
  Synthetic oligonucleotide
gttgagacgggactctgaacacgcgaagga

SEQ ID NO: 63154 - DNA, 30 bp, Artificial Sequence
  Synthetic oligonucleotide
aagggcgggagttgtgcgtatcgggaagga

SEQ ID NO: 63155 - DNA, 30 bp, Artificial Sequence
  Synthetic oligonucleotide
ccgttcagaacccgagccatccctgaagga

SEQ ID NO: 63156 - DNA, 30 bp, Artificial Sequence
  Synthetic oligonucleotide
gccggccgaagtcggtattgagggacagga

SEQ ID NO: 63157 - DNA, 30 bp, Artificial Sequence
  Synthetic oligonucleotide
taatgggattgcgaccgaccacctacagga

SEQ ID NO: 63158 - DNA, 30 bp, Artificial Sequence
  Synthetic oligonucleotide
cttgtggacaaccgcccgaaacccccagga

SEQ ID NO: 63159 - DNA, 30 bp, Artificial Sequence
  Synthetic oligonucleotide
tggcgtagctcacatcatcttaaagcagga

SEQ ID NO: 63160 - DNA, 30 bp, Artificial Sequence
  Synthetic oligonucleotide
gggctctagtcaatcaaggaaggatcagga

SEQ ID NO: 63161 - DNA, 30 bp, Artificial Sequence
  Synthetic oligonucleotide
ggatcggataggctatagcgtggctcagga

SEQ ID NO: 63162 - DNA, 30 bp, Artificial Sequence
  Synthetic oligonucleotide
gacagcccggtaccccgtatacgaagagga

SEQ ID NO: 63163 - DNA, 30 bp, Artificial Sequence
  Synthetic oligonucleotide
gacaacgtcccgctcaggtgtaagcgagga

SEQ ID NO: 63164 - DNA, 30 bp, Artificial Sequence
  Synthetic oligonucleotide
ggggcgcatagaacgtgttactggcgagga

SEQ ID NO: 63165 - DNA, 30 bp, Artificial Sequence
  Synthetic oligonucleotide
tgaaaaggtggctcttctctaactcgagga

SEQ ID NO: 63166 - DNA, 30 bp, Artificial Sequence
  Synthetic oligonucleotide
tcggacatcctgtctgctgggcgcggagga

SEQ ID NO: 63167 - DNA, 30 bp, Artificial Sequence
  Synthetic oligonucleotide
gtcaagacaagattggccctaccgggagga

SEQ ID NO: 63168 - DNA, 30 bp, Artificial Sequence
  Synthetic oligonucleotide
gtattggcggtagcggacttcgagatagga

SEQ ID NO: 63169 - DNA, 30 bp, Artificial Sequence
  Synthetic oligonucleotide
gaaacacatacacaggatggtaggatagga

SEQ ID NO: 63170 - DNA, 30 bp, Artificial Sequence
  Synthetic oligonucleotide
gcgctaaatagaatgatgaaaggtatagga

SEQ ID NO: 63171 - DNA, 30 bp, Artificial Sequence
  Synthetic oligonucleotide
agatacgtcgggcatagaacagacctagga

SEQ ID NO: 63172 - DNA, 30 bp, Artificial Sequence
  Synthetic oligonucleotide
agaacggcaatgataatgcaaaagctagga

SEQ ID NO: 63173 - DNA, 30 bp, Artificial Sequence
  Synthetic oligonucleotide
ccacaggggctcgaaaaattcaagctagga

SEQ ID NO: 63174 - DNA, 30 bp, Artificial Sequence
  Synthetic oligonucleotide
caaaacgacacacagagtgtaagtttagga

SEQ ID NO: 63175 - DNA, 30 bp, Artificial Sequence
  Synthetic oligonucleotide
gaagattgcgacggcatgggactcgacgga

SEQ ID NO: 63176 - DNA, 30 bp, Artificial Sequence
  Synthetic oligonucleotide
caacattggtgcgtacgtctgaaggacgga

SEQ ID NO: 63177 - DNA, 30 bp, Artificial Sequence
  Synthetic oligonucleotide
ggagtgccctcctcttattagagctacgga

SEQ ID NO: 63178 - DNA, 30 bp, Artificial Sequence
  Synthetic oligonucleotide
gaggatatactgtggtggtccgaacccgga

SEQ ID NO: 63179 - DNA, 30 bp, Artificial Sequence
  Synthetic oligonucleotide
atcaaatactggctgtggctcatagccgga

SEQ ID NO: 63180 - DNA, 30 bp, Artificial Sequence
  Synthetic oligonucleotide
ttgacaaactcggtatgcacaaacgccgga

SEQ ID NO: 63181 - DNA, 30 bp, Artificial Sequence
  Synthetic oligonucleotide
tcggctcggggtcatggaattccggccgga

SEQ ID NO: 63182 - DNA, 30 bp, Artificial Sequence
  Synthetic oligonucleotide
aaggggaacacttttacgccgccgtccgga

SEQ ID NO: 63183 - DNA, 30 bp, Artificial Sequence
  Synthetic oligonucleotide
gcgtagtgacttgtaagcacactgagcgga

SEQ ID NO: 63184 - DNA, 30 bp, Artificial Sequence
  Synthetic oligonucleotide
ccatttatcacggtgtaaaaaactagcgga

SEQ ID NO: 63185 - DNA, 30 bp, Artificial Sequence
  Synthetic oligonucleotide
acaagggattttccaaggtgaccaggcgga

SEQ ID NO: 63186 - DNA, 30 bp, Artificial Sequence
  Synthetic oligonucleotide
ggtacaggccaacagcggatccggtgcgga

SEQ ID NO: 63187 - DNA, 30 bp, Artificial Sequence
  Synthetic oligonucleotide
ggcatagccgtcctgtaggggtattgcgga

SEQ ID NO: 63188 - DNA, 30 bp, Artificial Sequence
  Synthetic oligonucleotide
cacttgtgcgaagcgcgtcgctgtatcgga

SEQ ID NO: 63189 - DNA, 30 bp, Artificial Sequence
  Synthetic oligonucleotide
cgttaacacatagcgccagccgttctcgga

SEQ ID NO: 63190 - DNA, 30 bp, Artificial Sequence
  Synthetic oligonucleotide
cctatgcttgagtgtagacgtgacgtcgga

SEQ ID NO: 63191 - DNA, 30 bp, Artificial Sequence
  Synthetic oligonucleotide
ggggcgtgcttggacttgcaagtcgtcgga

SEQ ID NO: 63192 - DNA, 30 bp, Artificial Sequence
  Synthetic oligonucleotide
atgcatgtgggccaggacgaatcggtcgga

SEQ ID NO: 63193 - DNA, 30 bp, Artificial Sequence
  Synthetic oligonucleotide
taaagcacacgatcgagctcgatattcgga

SEQ ID NO: 63194 - DNA, 30 bp, Artificial Sequence
  Synthetic oligonucleotide
aaatcacgttgtgcaaagaacctcaaggga

SEQ ID NO: 63195 - DNA, 30 bp, Artificial Sequence
  Synthetic oligonucleotide
attagggagatgacaacaggggtgcaggga

SEQ ID NO: 63196 - DNA, 30 bp, Artificial Sequence
  Synthetic oligonucleotide
cttgtccgatgaaacacaactaacgaggga

SEQ ID NO: 63197 - DNA, 30 bp, Artificial Sequence
  Synthetic oligonucleotide
tcactcatacacaacgtcaccgtagcggga

SEQ ID NO: 63198 - DNA, 30 bp, Artificial Sequence
  Synthetic oligonucleotide
accgtgtgcccatagtgcagttagagggga

SEQ ID NO: 63199 - DNA, 30 bp, Artificial Sequence
  Synthetic oligonucleotide
tgttgcaaacgacctatggtatagcgggga

SEQ ID NO: 63200 - DNA, 30 bp, Artificial Sequence
  Synthetic oligonucleotide
tacgtaaatgagaagaccgttcacggggga

SEQ ID NO: 63201 - DNA, 30 bp, Artificial Sequence
  Synthetic oligonucleotide
agggcaactctgggactactctacggggga

SEQ ID NO: 63202 - DNA, 30 bp, Artificial Sequence
  Synthetic oligonucleotide
acatgttggggttagcacgtattgggggga

SEQ ID NO: 63203 - DNA, 30 bp, Artificial Sequence
  Synthetic oligonucleotide
gccgcggacgccgtgcagaggattggggga

SEQ ID NO: 63204 - DNA, 30 bp, Artificial Sequence
  Synthetic oligonucleotide
cacgtcaatccaatgttctgtgtgatggga

SEQ ID NO: 63205 - DNA, 30 bp, Artificial Sequence
  Synthetic oligonucleotide
tctaaaacgttcaaagtgccgggtatggga

SEQ ID NO: 63206 - DNA, 30 bp, Artificial Sequence
  Synthetic oligonucleotide
ggcgaacctaacacgcaagagcttatggga

SEQ ID NO: 63207 - DNA, 30 bp, Artificial Sequence
  Synthetic oligonucleotide
acagtcgtgaggccgtcacatcatctggga

SEQ ID NO: 63208 - DNA, 30 bp, Artificial Sequence
  Synthetic oligonucleotide
atagctaccgagttgggcacttccgtggga

SEQ ID NO: 63209 - DNA, 30 bp, Artificial Sequence
  Synthetic oligonucleotide
gattaaaagaacaataacattagggtggga

SEQ ID NO: 63210 - DNA, 30 bp, Artificial Sequence
  Synthetic oligonucleotide
gcaggggtaggcgagatccgaaatgtggga

SEQ ID NO: 63211 - DNA, 30 bp, Artificial Sequence
  Synthetic oligonucleotide
gtgggttatagtcaaacgcaaagattggga

SEQ ID NO: 63212 - DNA, 30 bp, Artificial Sequence
  Synthetic oligonucleotide
gtactacaacgtaagccagccaagaatgga

SEQ ID NO: 63213 - DNA, 30 bp, Artificial Sequence
  Synthetic oligonucleotide
cggtgaggtgcaaagtctttgctgaatgga

SEQ ID NO: 63214 - DNA, 30 bp, Artificial Sequence
  Synthetic oligonucleotide
gctcgagagctcttgggcaacatacatgga

SEQ ID NO: 63215 - DNA, 30 bp, Artificial Sequence
  Synthetic oligonucleotide
acctaagaaggatggtaaaatatccatgga

SEQ ID NO: 63216 - DNA, 30 bp, Artificial Sequence
  Synthetic oligonucleotide
agttggccaccgagtaacgaataagatgga

SEQ ID NO: 63217 - DNA, 30 bp, Artificial Sequence
  Synthetic oligonucleotide
tcgtaagatcctcaggagcctatagctgga

SEQ ID NO: 63218 - DNA, 30 bp, Artificial Sequence
  Synthetic oligonucleotide
ggcagtggtgaggaacttagtaacagtgga

SEQ ID NO: 63219 - DNA, 30 bp, Artificial Sequence
  Synthetic oligonucleotide
atatcatagaaacccgatctgagccgtgga

SEQ ID NO: 63220 - DNA, 30 bp, Artificial Sequence
  Synthetic oligonucleotide
cacagattacaatgcgtgataaagcgtgga

SEQ ID NO: 63221 - DNA, 30 bp, Artificial Sequence
  Synthetic oligonucleotide
caacagagccagacccttcgcctgcgtgga

SEQ ID NO: 63222 - DNA, 30 bp, Artificial Sequence
  Synthetic oligonucleotide
tggaacatagaaacacccacatacggtgga

SEQ ID NO: 63223 - DNA, 30 bp, Artificial Sequence
  Synthetic oligonucleotide
accgattacccagtaaagactagctgtgga

SEQ ID NO: 63224 - DNA, 30 bp, Artificial Sequence
  Synthetic oligonucleotide
gtacgaaagggtactcaaaagggaattgga

SEQ ID NO: 63225 - DNA, 30 bp, Artificial Sequence
  Synthetic oligonucleotide
tcgggtgcaaagtactcgaggcgtattgga

SEQ ID NO: 63226 - DNA, 30 bp, Artificial Sequence
  Synthetic oligonucleotide
caccgcatagttcaacatatgtgcgttgga

SEQ ID NO: 63227 - DNA, 30 bp, Artificial Sequence
  Synthetic oligonucleotide
cgggaaaagtcagcggcgtaagatgttgga

SEQ ID NO: 63228 - DNA, 30 bp, Artificial Sequence
  Synthetic oligonucleotide
cctcaaggcaactccacgggtaagaaatga

SEQ ID NO: 63229 - DNA, 30 bp, Artificial Sequence
  Synthetic oligonucleotide
atggcagagagtgaacatggtgctaaatga

SEQ ID NO: 63230 - DNA, 30 bp, Artificial Sequence
  Synthetic oligonucleotide
caaacgagcaaatgaaactagttggaatga

SEQ ID NO: 63231 - DNA, 30 bp, Artificial Sequence
  Synthetic oligonucleotide
cagttggaacttaatcagaaaggttaatga

SEQ ID NO: 63232 - DNA, 30 bp, Artificial Sequence
  Synthetic oligonucleotide
gcttgccgagcctcgataggaaaaacatga

SEQ ID NO: 63233 - DNA, 30 bp, Artificial Sequence
  Synthetic oligonucleotide
tcacggttagggcgtagaggttacacatga

SEQ ID NO: 63234 - DNA, 30 bp, Artificial Sequence
  Synthetic oligonucleotide
cgtggactttctgacaatgaatagacatga

SEQ ID NO: 63235 - DNA, 30 bp, Artificial Sequence
  Synthetic oligonucleotide
catgccaccataagtgaggggcaggcatga

SEQ ID NO: 63236 - DNA, 30 bp, Artificial Sequence
  Synthetic oligonucleotide
atgcgccacacgaaggccagcccgtcatga

SEQ ID NO: 63237 - DNA, 30 bp, Artificial Sequence
  Synthetic oligonucleotide
gtgttccgaaggatagtgctatacagatga

SEQ ID NO: 63238 - DNA, 30 bp, Artificial Sequence
  Synthetic oligonucleotide
ccattaacgataagtatgccgacgagatga

SEQ ID NO: 63239 - DNA, 30 bp, Artificial Sequence
  Synthetic oligonucleotide
accttactgtaggtgacaaagttgagatga

SEQ ID NO: 63240 - DNA, 30 bp, Artificial Sequence
  Synthetic oligonucleotide
gggttagtaagtgggataggattacgatga

SEQ ID NO: 63241 - DNA, 30 bp, Artificial Sequence
  Synthetic oligonucleotide
cttgctagaagagctgtcatgatgtgatga

SEQ ID NO: 63242 - DNA, 30 bp, Artificial Sequence
  Synthetic oligonucleotide
ggcggtcagagttggtcactcagaatatga

SEQ ID NO: 63243 - DNA, 30 bp, Artificial Sequence
  Synthetic oligonucleotide
gcgaaatcgagggcctcaacctccatatga

SEQ ID NO: 63244 - DNA, 30 bp, Artificial Sequence
  Synthetic oligonucleotide
gatggacggtgtaagtaacgtctcatatga

SEQ ID NO: 63245 - DNA, 30 bp, Artificial Sequence
  Synthetic oligonucleotide
ctgatagtccaaaggtccagagctctatga

SEQ ID NO: 63246 - DNA, 30 bp, Artificial Sequence
  Synthetic oligonucleotide
tcgtggtggatgcgacgccacgcagtatga

SEQ ID NO: 63247 - DNA, 30 bp, Artificial Sequence
  Synthetic oligonucleotide
tcggtcctacgtaaggttatattcgtatga

SEQ ID NO: 63248 - DNA, 30 bp, Artificial Sequence
  Synthetic oligonucleotide
atcacgctaacggagtgttgcatggtatga

SEQ ID NO: 63249 - DNA, 30 bp, Artificial Sequence
  Synthetic oligonucleotide
gtggggttcaccaagcatagcagtgtatga

SEQ ID NO: 63250 - DNA, 30 bp, Artificial Sequence
  Synthetic oligonucleotide
cataacagagtcatgtggtgcctcttatga

SEQ ID NO: 63251 - DNA, 30 bp, Artificial Sequence
  Synthetic oligonucleotide
gacggcacgccaagaggttgtgtcttatga

SEQ ID NO: 63252 - DNA, 30 bp, Artificial Sequence
  Synthetic oligonucleotide
tggggcacaccggtaaatcctcgaaactga

SEQ ID NO: 63253 - DNA, 30 bp, Artificial Sequence
  Synthetic oligonucleotide
tcaagggctagataaaacatggacaactga

SEQ ID NO: 63254 - DNA, 30 bp, Artificial Sequence
  Synthetic oligonucleotide
cagaggctgacttgcgcgataatcgactga

SEQ ID NO: 63255 - DNA, 30 bp, Artificial Sequence
  Synthetic oligonucleotide
accagcgagcagtaaggactttgggactga

SEQ ID NO: 63256 - DNA, 30 bp, Artificial Sequence
  Synthetic oligonucleotide
ccgctaagacgggggatataactctactga

SEQ ID NO: 63257 - DNA, 30 bp, Artificial Sequence
  Synthetic oligonucleotide
cagctccgaagagctacatatcgttactga

SEQ ID NO: 63258 - DNA, 30 bp, Artificial Sequence
  Synthetic oligonucleotide
tcatttgctatgtgtcaacccagaacctga

SEQ ID NO: 63259 - DNA, 30 bp, Artificial Sequence
  Synthetic oligonucleotide
acttggtaaatgggagcctacaagacctga

SEQ ID NO: 63260 - DNA, 30 bp, Artificial Sequence
  Synthetic oligonucleotide
cactgataaattccgatcatgtcgacctga

SEQ ID NO: 63261 - DNA, 30 bp, Artificial Sequence
  Synthetic oligonucleotide
cctagcaggggccccagagacactacctga

SEQ ID NO: 63262 - DNA, 30 bp, Artificial Sequence
  Synthetic oligonucleotide
catggtatgctcgatagctgccgatcctga

SEQ ID NO: 63263 - DNA, 30 bp, Artificial Sequence
  Synthetic oligonucleotide
gagcgagcccggactagagacaagggctga

SEQ ID NO: 63264 - DNA, 30 bp, Artificial Sequence
  Synthetic oligonucleotide
cgtggataggtgcttggaacaattatctga

SEQ ID NO: 63265 - DNA, 30 bp, Artificial Sequence
  Synthetic oligonucleotide
tccgagccagtataagacgataaagtctga

SEQ ID NO: 63266 - DNA, 30 bp, Artificial Sequence
  Synthetic oligonucleotide
gtggattccagtgacaaaccgcacttctga

SEQ ID NO: 63267 - DNA, 30 bp, Artificial Sequence
  Synthetic oligonucleotide
gatccgcttaaggctagcggtagaaagtga

SEQ ID NO: 63268 - DNA, 30 bp, Artificial Sequence
  Synthetic oligonucleotide
caggcggtttgactatgcgattacaagtga

SEQ ID NO: 63269 - DNA, 30 bp, Artificial Sequence
  Synthetic oligonucleotide
cagagcttacctcggttaagagccaagtga

SEQ ID NO: 63270 - DNA, 29 bp, Artificial Sequence
  Synthetic oligonucleotide
ctaggctctaattgatgacggaagagtga

SEQ ID NO: 63271 - DNA, 30 bp, Artificial Sequence
  Synthetic oligonucleotide
cccataaaacttttgtggagagccgagtga

SEQ ID NO: 63272 - DNA, 30 bp, Artificial Sequence
  Synthetic oligonucleotide
ggaatgctggggtgctagccttatgagtga

SEQ ID NO: 63273 - DNA, 30 bp, Artificial Sequence
  Synthetic oligonucleotide
gattggggagcgtagactggaaaatagtga

SEQ ID NO: 63274 - DNA, 30 bp, Artificial Sequence
  Synthetic oligonucleotide
tcccagggccgaaatcaaaaagaaacgtga

SEQ ID NO: 63275 - DNA, 31 bp, Artificial Sequence
  Synthetic oligonucleotide
aggctcggctggaacaatcctagaaacgtga

SEQ ID NO: 63276 - DNA, 30 bp, Artificial Sequence
  Synthetic oligonucleotide
gcttatactagcggtgagggatcaacgtga

SEQ ID NO: 63277 - DNA, 30 bp, Artificial Sequence
  Synthetic oligonucleotide
tagaggtaatactcggctgatttaacgtga

SEQ ID NO: 63278 - DNA, 30 bp, Artificial Sequence
  Synthetic oligonucleotide
tgaataggagaacatccgttagatccgtga

SEQ ID NO: 63279 - DNA, 30 bp, Artificial Sequence
  Synthetic oligonucleotide
tgtggaaggtgcgggtaccacagagcgtga

SEQ ID NO: 63280 - DNA, 30 bp, Artificial Sequence
  Synthetic oligonucleotide
atcaggaaagcattgttcattcgatcgtga

SEQ ID NO: 63281 - DNA, 30 bp, Artificial Sequence
  Synthetic oligonucleotide
tcctcatcgaagttagaagctaggtcgtga

SEQ ID NO: 63282 - DNA, 30 bp, Artificial Sequence
  Synthetic oligonucleotide
tggggtcgctaagtaacagaggaaaggtga

SEQ ID NO: 63283 - DNA, 30 bp, Artificial Sequence
  Synthetic oligonucleotide
gactagacaaacgtcgtgcgatgaaggtga

SEQ ID NO: 63284 - DNA, 30 bp, Artificial Sequence
  Synthetic oligonucleotide
acacttgcctgggagacagttgtaaggtga

SEQ ID NO: 63285 - DNA, 30 bp, Artificial Sequence
  Synthetic oligonucleotide
aataggggactcgagcggggtcacaggtga

SEQ ID NO: 63286 - DNA, 30 bp, Artificial Sequence
  Synthetic oligonucleotide
tctaagtcagtatgttaggtatcgaggtga

SEQ ID NO: 63287 - DNA, 30 bp, Artificial Sequence
  Synthetic oligonucleotide
ataaatgcaatgcgccagaccgtagggtga

SEQ ID NO: 63288 - DNA, 30 bp, Artificial Sequence
  Synthetic oligonucleotide
taggagtggggatatcaagcaaattggtga

SEQ ID NO: 63289 - DNA, 30 bp, Artificial Sequence
  Synthetic oligonucleotide
aaggaggaaatcactacgaaaaggctgtga

SEQ ID NO: 63290 - DNA, 30 bp, Artificial Sequence
  Synthetic oligonucleotide
accagtacgatatcgggccaagacttgtga

SEQ ID NO: 63291 - DNA, 30 bp, Artificial Sequence
  Synthetic oligonucleotide
cgtaacacaatctgagggtaggtcttgtga

SEQ ID NO: 63292 - DNA, 30 bp, Artificial Sequence
  Synthetic oligonucleotide
cgggcagtgacataagtgaccctagattga

SEQ ID NO: 63293 - DNA, 30 bp, Artificial Sequence
  Synthetic oligonucleotide
taaatgtgcgaattgaagaagggtacttga

SEQ ID NO: 63294 - DNA, 30 bp, Artificial Sequence
  Synthetic oligonucleotide
acgcaaatgatggcggttagggtctcttga

SEQ ID NO: 63295 - DNA, 30 bp, Artificial Sequence
  Synthetic oligonucleotide
aggggaatagtcatcgacaggctccgttga

SEQ ID NO: 63296 - DNA, 30 bp, Artificial Sequence
  Synthetic oligonucleotide
cgccattgccgtccgaggttggaatgttga

SEQ ID NO: 63297 - DNA, 30 bp, Artificial Sequence
  Synthetic oligonucleotide
acgatcaagttcctaggtaccacttgttga

SEQ ID NO: 63298 - DNA, 31 bp, Artificial Sequence
  Synthetic oligonucleotide
cttgaagggcgagaacaggtctcaggtttga

SEQ ID NO: 63299 - DNA, 30 bp, Artificial Sequence
  Synthetic oligonucleotide
tcacgcagaatgaggtggtggaatttttga

SEQ ID NO: 63300 - DNA, 30 bp, Artificial Sequence
  Synthetic oligonucleotide
tcggtccacagtagagaagatcgaaaaata

SEQ ID NO: 63301 - DNA, 30 bp, Artificial Sequence
  Synthetic oligonucleotide
cgtactaaggaccattaactcgacaaaata

SEQ ID NO: 63302 - DNA, 30 bp, Artificial Sequence
  Synthetic oligonucleotide
ggcactgtctgaaagattgaagatcaaata

SEQ ID NO: 63303 - DNA, 30 bp, Artificial Sequence
  Synthetic oligonucleotide
cggggagaatgcaaaggcccgggataaata

SEQ ID NO: 63304 - DNA, 30 bp, Artificial Sequence
  Synthetic oligonucleotide
ccagacaccctagggtattcacaagcaata

SEQ ID NO: 63305 - DNA, 30 bp, Artificial Sequence
  Synthetic oligonucleotide
gctaagtgctcggcaacctgggattcaata

SEQ ID NO: 63306 - DNA, 30 bp, Artificial Sequence
  Synthetic oligonucleotide
cgcggtagggacgggagtaccgtttcaata

SEQ ID NO: 63307 - DNA, 30 bp, Artificial Sequence
  Synthetic oligonucleotide
aggcaagaatgagtgcactgacaaagaata

SEQ ID NO: 63308 - DNA, 30 bp, Artificial Sequence
  Synthetic oligonucleotide
cgtggaccggggttaagcgttgctagaata

SEQ ID NO: 63309 - DNA, 30 bp, Artificial Sequence
  Synthetic oligonucleotide
ggggtaaaataccaatgagaaaaacgaata

SEQ ID NO: 63310 - DNA, 30 bp, Artificial Sequence
  Synthetic oligonucleotide
agagtccattgagacggatcaagtcgaata

SEQ ID NO: 63311 - DNA, 30 bp, Artificial Sequence
  Synthetic oligonucleotide
actaaaaacactaaccagtacggaggaata

SEQ ID NO: 63312 - DNA, 30 bp, Artificial Sequence
  Synthetic oligonucleotide
cagccctgaaaatatggggatgagtgaata

SEQ ID NO: 63313 - DNA, 30 bp, Artificial Sequence
  Synthetic oligonucleotide
gggtaaagagaggctccgcgcagttgaata

SEQ ID NO: 63314 - DNA, 30 bp, Artificial Sequence
  Synthetic oligonucleotide
cgcgcattcgaggtaagtggcttttgaata

SEQ ID NO: 63315 - DNA, 30 bp, Artificial Sequence
  Synthetic oligonucleotide
agtatgataggaaaaaggctcaaagtaata

SEQ ID NO: 63316 - DNA, 30 bp, Artificial Sequence
  Synthetic oligonucleotide
gatgaaagcggcgatcacgatcccttaata

SEQ ID NO: 63317 - DNA, 30 bp, Artificial Sequence
  Synthetic oligonucleotide
aggcgaatcagttctcttacaccgttaata

SEQ ID NO: 63318 - DNA, 30 bp, Artificial Sequence
  Synthetic oligonucleotide
caacgtaccagtgatgcgaactcaaacata

SEQ ID NO: 63319 - DNA, 30 bp, Artificial Sequence
  Synthetic oligonucleotide
acaggcctttagagaactatcgacaacata

SEQ ID NO: 63320 - DNA, 30 bp, Artificial Sequence
  Synthetic oligonucleotide
gtccacctagcgtcatgaaaagaagacata

SEQ ID NO: 63321 - DNA, 30 bp, Artificial Sequence
  Synthetic oligonucleotide
gtactggtcgaattgcgatctcaggacata

SEQ ID NO: 63322 - DNA, 30 bp, Artificial Sequence
  Synthetic oligonucleotide
ggtgctgtcgagctcaccgttccgtacata

SEQ ID NO: 63323 - DNA, 30 bp, Artificial Sequence
  Synthetic oligonucleotide
taacaaaaacccaggcggacacagtccata

SEQ ID NO: 63324 - DNA, 30 bp, Artificial Sequence
  Synthetic oligonucleotide
aggttgacattaccctcgatcgagtccata

SEQ ID NO: 63325 - DNA, 30 bp, Artificial Sequence
  Synthetic oligonucleotide
acggagcgttgtcagagcggaaattccata

SEQ ID NO: 63326 - DNA, 30 bp, Artificial Sequence
  Synthetic oligonucleotide
aaaaggggcaataagtagacgacttccata

SEQ ID NO: 63327 - DNA, 30 bp, Artificial Sequence
  Synthetic oligonucleotide
cagaataatgatctacctaacttcagcata

SEQ ID NO: 63328 - DNA, 30 bp, Artificial Sequence
  Synthetic oligonucleotide
acgaggctcggtgtatcagtcgagagcata

SEQ ID NO: 63329 - DNA, 30 bp, Artificial Sequence
  Synthetic oligonucleotide
tccgcagtgcgtgacaaaaagcggcgcata

SEQ ID NO: 63330 - DNA, 30 bp, Artificial Sequence
  Synthetic oligonucleotide
aagcgaaatcgtgcaatccaggagggcata

SEQ ID NO: 63331 - DNA, 30 bp, Artificial Sequence
  Synthetic oligonucleotide
gcgaactcggactgtcaagggtagggcata

SEQ ID NO: 63332 - DNA, 30 bp, Artificial Sequence
  Synthetic oligonucleotide
acctgccaacggggccgacaggaatgcata

SEQ ID NO: 63333 - DNA, 30 bp, Artificial Sequence
  Synthetic oligonucleotide
cagacggcacattcaagatattaatgcata

SEQ ID NO: 63334 - DNA, 30 bp, Artificial Sequence
  Synthetic oligonucleotide
gcagctctctaaaggggcgacacatgcata

SEQ ID NO: 63335 - DNA, 30 bp, Artificial Sequence
  Synthetic oligonucleotide
acacactagtaatgctaaaacaaactcata

SEQ ID NO: 63336 - DNA, 30 bp, Artificial Sequence
  Synthetic oligonucleotide
agcgtaaaggagttacgatattttctcata

SEQ ID NO: 63337 - DNA, 30 bp, Artificial Sequence
  Synthetic oligonucleotide
agagtcgtctacagtgaatactccgtcata

SEQ ID NO: 63338 - DNA, 30 bp, Artificial Sequence
  Synthetic oligonucleotide
cacacccataaaggctcatcaacattcata

SEQ ID NO: 63339 - DNA, 30 bp, Artificial Sequence
  Synthetic oligonucleotide
tgcgcgcacactgtggcgagccatttcata

SEQ ID NO: 63340 - DNA, 30 bp, Artificial Sequence
  Synthetic oligonucleotide
aacgggataaccatgctaccatgagagata

SEQ ID NO: 63341 - DNA, 30 bp, Artificial Sequence
  Synthetic oligonucleotide
acaacacgaaataggtaagacgtggagata

SEQ ID NO: 63342 - DNA, 30 bp, Artificial Sequence
  Synthetic oligonucleotide
gatcctacgtaaccgaacagaaatgagata

SEQ ID NO: 63343 - DNA, 31 bp, Artificial Sequence
  Synthetic oligonucleotide
ggcaacggtttggcgaaagcctcatgagata

SEQ ID NO: 63344 - DNA, 30 bp, Artificial Sequence
  Synthetic oligonucleotide
taataaagaaagcttaagtgtcatgagata

SEQ ID NO: 63345 - DNA, 30 bp, Artificial Sequence
  Synthetic oligonucleotide
ggctcacaagggaatactgcgactgagata

SEQ ID NO: 63346 - DNA, 30 bp, Artificial Sequence
  Synthetic oligonucleotide
gagagacgaccttcaactgaataaacgata

SEQ ID NO: 63347 - DNA, 30 bp, Artificial Sequence
  Synthetic oligonucleotide
gcaagccaaccgcttacaatagaaccgata

SEQ ID NO: 63348 - DNA, 30 bp, Artificial Sequence
  Synthetic oligonucleotide
ccgtatatgatataaagtaatctcccgata

SEQ ID NO: 63349 - DNA, 30 bp, Artificial Sequence
  Synthetic oligonucleotide
taaacattcacaggggctcctgaagcgata

SEQ ID NO: 63350 - DNA, 30 bp, Artificial Sequence
  Synthetic oligonucleotide
tcagtcgaagtaaaaacaaagatggcgata

SEQ ID NO: 63351 - DNA, 30 bp, Artificial Sequence
  Synthetic oligonucleotide
ttctgtcggttaaacgcggggaatgcgata

SEQ ID NO: 63352 - DNA, 30 bp, Artificial Sequence
  Synthetic oligonucleotide
gtagtgagggacattagcaaaacctcgata

SEQ ID NO: 63353 - DNA, 30 bp, Artificial Sequence
  Synthetic oligonucleotide
cgggttgccggtttacatggaaagtcgata

SEQ ID NO: 63354 - DNA, 30 bp, Artificial Sequence
  Synthetic oligonucleotide
gtacactattgggcctgcaaagaaaggata

SEQ ID NO: 63355 - DNA, 30 bp, Artificial Sequence
  Synthetic oligonucleotide
ttgaacacgtccactagtccctgaaggata

SEQ ID NO: 63356 - DNA, 30 bp, Artificial Sequence
  Synthetic oligonucleotide
cgcaccaaaagttagcgtcaatgcaggata

SEQ ID NO: 63357 - DNA, 30 bp, Artificial Sequence
  Synthetic oligonucleotide
gtagcactgggagtacgatacctcaggata

SEQ ID NO: 63358 - DNA, 30 bp, Artificial Sequence
  Synthetic oligonucleotide
cgagggaataagtacaagaaattacggata

SEQ ID NO: 63359 - DNA, 30 bp, Artificial Sequence
  Synthetic oligonucleotide
ttgtacgccgccaagaagtggcaagggata

SEQ ID NO: 63360 - DNA, 30 bp, Artificial Sequence
  Synthetic oligonucleotide
gtgagcgtgagcaactgtgcatcggggata

SEQ ID NO: 63361 - DNA, 30 bp, Artificial Sequence
  Synthetic oligonucleotide
tccgtagtaactgagaatcggccgtggata

SEQ ID NO: 63362 - DNA, 30 bp, Artificial Sequence
  Synthetic oligonucleotide
ctcgaaatcaattgaccacaaacgatgata

SEQ ID NO: 63363 - DNA, 30 bp, Artificial Sequence
  Synthetic oligonucleotide
tattacataggagtgtcgtatggtctgata

SEQ ID NO: 63364 - DNA, 30 bp, Artificial Sequence
  Synthetic oligonucleotide
aggtacataagggagggaagggcagtgata

SEQ ID NO: 63365 - DNA, 30 bp, Artificial Sequence
  Synthetic oligonucleotide
tcgtagatcagagcaccggatttgaatata

SEQ ID NO: 63366 - DNA, 30 bp, Artificial Sequence
  Synthetic oligonucleotide
gaaaagacagcgaaagtaatccataatata

SEQ ID NO: 63367 - DNA, 30 bp, Artificial Sequence
  Synthetic oligonucleotide
tgggagtgggaatgggtgcacgcaactata

SEQ ID NO: 63368 - DNA, 30 bp, Artificial Sequence
  Synthetic oligonucleotide
aaccgacgcccaccgtccgaataacctata

SEQ ID NO: 63369 - DNA, 30 bp, Artificial Sequence
  Synthetic oligonucleotide
ggagcacatctgaacggacggatgagtata

SEQ ID NO: 63370 - DNA, 30 bp, Artificial Sequence
  Synthetic oligonucleotide
cgatagagtcggtagatgaatctgcgtata

SEQ ID NO: 63371 - DNA, 30 bp, Artificial Sequence
  Synthetic oligonucleotide
gcgagcgaggcctaacgaaactcaggtata

SEQ ID NO: 63372 - DNA, 30 bp, Artificial Sequence
  Synthetic oligonucleotide
cgggccgcagagggttgttaaagcggtata

SEQ ID NO: 63373 - DNA, 30 bp, Artificial Sequence
  Synthetic oligonucleotide
cagtagaatgtatcgctcggagggtgtata

SEQ ID NO: 63374 - DNA, 30 bp, Artificial Sequence
  Synthetic oligonucleotide
aggcgggtgtgttggaacagattgtgtata

SEQ ID NO: 63375 - DNA, 30 bp, Artificial Sequence
  Synthetic oligonucleotide
gaggtcacagtatgctacaatgaggaacta

SEQ ID NO: 63376 - DNA, 30 bp, Artificial Sequence
  Synthetic oligonucleotide
aaaacatgccccagaaagatgagtgaacta

SEQ ID NO: 63377 - DNA, 30 bp, Artificial Sequence
  Synthetic oligonucleotide
acatgacagtgtagatatcagacgggacta

SEQ ID NO: 63378 - DNA, 30 bp, Artificial Sequence
  Synthetic oligonucleotide
agtggcaaatttacctctcacaagtgacta

SEQ ID NO: 63379 - DNA, 30 bp, Artificial Sequence
  Synthetic oligonucleotide
cgcctacacgcgataaagaaatggtgacta

SEQ ID NO: 63380 - DNA, 30 bp, Artificial Sequence
  Synthetic oligonucleotide
aagctacggtttggaattgcgtccatacta

SEQ ID NO: 63381 - DNA, 31 bp, Artificial Sequence
  Synthetic oligonucleotide
ggggtggcatatatgacagtgaaacctacta

SEQ ID NO: 63382 - DNA, 30 bp, Artificial Sequence
  Synthetic oligonucleotide
catggccagaaaaagtggcttatgctacta

SEQ ID NO: 63383 - DNA, 30 bp, Artificial Sequence
  Synthetic oligonucleotide
atgcgacggtatcggctgcggtatctacta

SEQ ID NO: 63384 - DNA, 30 bp, Artificial Sequence
  Synthetic oligonucleotide
tccaaggagccacggagatcggatgtacta

SEQ ID NO: 63385 - DNA, 30 bp, Artificial Sequence
  Synthetic oligonucleotide
caaccccccataatcaacaaatcattacta

SEQ ID NO: 63386 - DNA, 30 bp, Artificial Sequence
  Synthetic oligonucleotide
cacggagtgaggaccgtataagcaaaccta

SEQ ID NO: 63387 - DNA, 30 bp, Artificial Sequence
  Synthetic oligonucleotide
gggactcgaacgtagaccaaagcgaaccta

SEQ ID NO: 63388 - DNA, 30 bp, Artificial Sequence
  Synthetic oligonucleotide
ctcagatcacacaagagctaacggaaccta

SEQ ID NO: 63389 - DNA, 30 bp, Artificial Sequence
  Synthetic oligonucleotide
acgagcacaatccctcccacgcgccaccta

SEQ ID NO: 63390 - DNA, 30 bp, Artificial Sequence
  Synthetic oligonucleotide
cagttgggttagacaaaatatcagtaccta

SEQ ID NO: 63391 - DNA, 30 bp, Artificial Sequence
  Synthetic oligonucleotide
cattatgtgaaaggcggaaacgtggcccta

SEQ ID NO: 63392 - DNA, 30 bp, Artificial Sequence
  Synthetic oligonucleotide
gcctgtggaactcatggcacataaagccta

SEQ ID NO: 63393 - DNA, 30 bp, Artificial Sequence
  Synthetic oligonucleotide
tacaggtagatttagagtggaagaagccta

SEQ ID NO: 63394 - DNA, 30 bp, Artificial Sequence
  Synthetic oligonucleotide
cgcttgaatgatccaggggcgatattccta

SEQ ID NO: 63395 - DNA, 30 bp, Artificial Sequence
  Synthetic oligonucleotide
agatacgcggagacggccacagctttccta

SEQ ID NO: 63396 - DNA, 30 bp, Artificial Sequence
  Synthetic oligonucleotide
gcgttttacactcaaaagatcagaaagcta

SEQ ID NO: 63397 - DNA, 30 bp, Artificial Sequence
  Synthetic oligonucleotide
aacgatatattccgtgccacctcacagcta

SEQ ID NO: 63398 - DNA, 30 bp, Artificial Sequence
  Synthetic oligonucleotide
aggacaaatcaggtacggggtgttgagcta

SEQ ID NO: 63399 - DNA, 30 bp, Artificial Sequence
  Synthetic oligonucleotide
cagtgcactggaacgggatctattgcgcta

SEQ ID NO: 63400 - DNA, 30 bp, Artificial Sequence
  Synthetic oligonucleotide
catacccagcggggtggaacagtatcgcta

SEQ ID NO: 63401 - DNA, 30 bp, Artificial Sequence
  Synthetic oligonucleotide
acgacagattattagtcacagcgctcgcta

SEQ ID NO: 63402 - DNA, 30 bp, Artificial Sequence
  Synthetic oligonucleotide
ttaacgtgtcctatctaaagcgcaaggcta

SEQ ID NO: 63403 - DNA, 30 bp, Artificial Sequence
  Synthetic oligonucleotide
gtaacgagtgagatggaaagcaacaggcta

SEQ ID NO: 63404 - DNA, 30 bp, Artificial Sequence
  Synthetic oligonucleotide
tcagaaccattcagggtaaactataggcta

SEQ ID NO: 63405 - DNA, 30 bp, Artificial Sequence
  Synthetic oligonucleotide
agaaatagggtagcatccgaagcacggcta

SEQ ID NO: 63406 - DNA, 30 bp, Artificial Sequence
  Synthetic oligonucleotide
cagaacaactcgtcacgtggcagtcggcta

SEQ ID NO: 63407 - DNA, 30 bp, Artificial Sequence
  Synthetic oligonucleotide
ccagcgagacgtggcgactctgcgaatcta

SEQ ID NO: 63408 - DNA, 30 bp, Artificial Sequence
  Synthetic oligonucleotide
aggcgcgtgataattagaagtatgcatcta

SEQ ID NO: 63409 - DNA, 30 bp, Artificial Sequence
  Synthetic oligonucleotide
aggccacatatactagtagtaagttatcta

SEQ ID NO: 63410 - DNA, 30 bp, Artificial Sequence
  Synthetic oligonucleotide
ggaaccaccccgcgacgggaagcgactcta

SEQ ID NO: 63411 - DNA, 30 bp, Artificial Sequence
  Synthetic oligonucleotide
accctggggctcaagcagggaactagtcta

SEQ ID NO: 63412 - DNA, 30 bp, Artificial Sequence
  Synthetic oligonucleotide
gacgaaccgatcttattcagtggccgtcta

SEQ ID NO: 63413 - DNA, 30 bp, Artificial Sequence
  Synthetic oligonucleotide
acggcgtagagaaccagccctcacggtcta

SEQ ID NO: 63414 - DNA, 30 bp, Artificial Sequence
  Synthetic oligonucleotide
acggaggacgacccacgaaagaggggtcta

SEQ ID NO: 63415 - DNA, 30 bp, Artificial Sequence
  Synthetic oligonucleotide
cgtgaagctatgaacgaacatccctgtcta

SEQ ID NO: 63416 - DNA, 30 bp, Artificial Sequence
  Synthetic oligonucleotide
gcaactcgtgggggtagagcgcgctgtcta

SEQ ID NO: 63417 - DNA, 30 bp, Artificial Sequence
  Synthetic oligonucleotide
cgcggaaggttattggagggcctgattcta

SEQ ID NO: 63418 - DNA, 30 bp, Artificial Sequence
  Synthetic oligonucleotide
atacagttaccagcgtgggcaaaggttcta

SEQ ID NO: 63419 - DNA, 30 bp, Artificial Sequence
  Synthetic oligonucleotide
ttcggcggggggtatcgaaagaaaaaagta

SEQ ID NO: 63420 - DNA, 30 bp, Artificial Sequence
  Synthetic oligonucleotide
tccgcggcacagtcacagagatcaaaagta

SEQ ID NO: 63421 - DNA, 30 bp, Artificial Sequence
  Synthetic oligonucleotide
tgaaagagcccttatgcgcaagctaaagta

SEQ ID NO: 63422 - DNA, 30 bp, Artificial Sequence
  Synthetic oligonucleotide
caggcaactgaagatgcctttcgacaagta

SEQ ID NO: 63423 - DNA, 30 bp, Artificial Sequence
  Synthetic oligonucleotide
cccagtaatggcaataacccaaagcaagta

SEQ ID NO: 63424 - DNA, 30 bp, Artificial Sequence
  Synthetic oligonucleotide
ctcgtttgcaggaacccaagttcagaagta

SEQ ID NO: 63425 - DNA, 30 bp, Artificial Sequence
  Synthetic oligonucleotide
atcacaaaattaagcaagaagtaggaagta

SEQ ID NO: 63426 - DNA, 30 bp, Artificial Sequence
  Synthetic oligonucleotide
cgcagtggagtaaaggaaaactttgaagta

SEQ ID NO: 63427 - DNA, 30 bp, Artificial Sequence
  Synthetic oligonucleotide
tcacgtcacgtaggcaggtccgggacagta

SEQ ID NO: 63428 - DNA, 30 bp, Artificial Sequence
  Synthetic oligonucleotide
aggggaagacgatatctgtgcaacccagta

SEQ ID NO: 63429 - DNA, 30 bp, Artificial Sequence
  Synthetic oligonucleotide
tgtcaatcgatcgtgacccggtagccagta

SEQ ID NO: 63430 - DNA, 30 bp, Artificial Sequence
  Synthetic oligonucleotide
gcctacaacggttcagccggaattagagta

SEQ ID NO: 63431 - DNA, 30 bp, Artificial Sequence
  Synthetic oligonucleotide
tcggaatgttgattaagggggactggagta

SEQ ID NO: 63432 - DNA, 40 bp, Artificial Sequence
  Synthetic oligonucleotide
attacctgtacccctccatctcgtaacccattggtgagta

SEQ ID NO: 63433 - DNA, 30 bp, Artificial Sequence
  Synthetic oligonucleotide
ctagaacgatgagacataggcttaatagta

SEQ ID NO: 63434 - DNA, 30 bp, Artificial Sequence
  Synthetic oligonucleotide
tacgagagagaaggaatatcgatcatagta

SEQ ID NO: 63435 - DNA, 30 bp, Artificial Sequence
  Synthetic oligonucleotide
gctcatcaagagtcacgtggccaagtagta

SEQ ID NO: 63436 - DNA, 30 bp, Artificial Sequence
  Synthetic oligonucleotide
ggtcaataaggacgttcaagctgagtagta

SEQ ID NO: 63437 - DNA, 30 bp, Artificial Sequence
  Synthetic oligonucleotide
acaggcatgacttcgaagaggagcgtagta

SEQ ID NO: 63438 - DNA, 30 bp, Artificial Sequence
  Synthetic oligonucleotide
ggaggggggttaaccgccgtcatcgtagta

SEQ ID NO: 63439 - DNA, 30 bp, Artificial Sequence
  Synthetic oligonucleotide
atcgcacctaacgggtgtgggttcgtagta

SEQ ID NO: 63440 - DNA, 30 bp, Artificial Sequence
  Synthetic oligonucleotide
gggaagattaaactagaggctcgattagta

SEQ ID NO: 63441 - DNA, 30 bp, Artificial Sequence
  Synthetic oligonucleotide
cagtgtgaatggggcacgcctttattagta

SEQ ID NO: 63442 - DNA, 30 bp, Artificial Sequence
  Synthetic oligonucleotide
aagctatggtaggcggcgggaccgaacgta

SEQ ID NO: 63443 - DNA, 30 bp, Artificial Sequence
  Synthetic oligonucleotide
agggaccggaggagcattgctcgacacgta

SEQ ID NO: 63444 - DNA, 30 bp, Artificial Sequence
  Synthetic oligonucleotide
tccataaagacaacggtaacctggcacgta

SEQ ID NO: 63445 - DNA, 30 bp, Artificial Sequence
  Synthetic oligonucleotide
gatcactcgtaattcaatagagcagacgta

SEQ ID NO: 63446 - DNA, 30 bp, Artificial Sequence
  Synthetic oligonucleotide
tcacgttgggatgaataggaatgtgacgta

SEQ ID NO: 63447 - DNA, 30 bp, Artificial Sequence
  Synthetic oligonucleotide
aggaagagggaattatctaacccatacgta

SEQ ID NO: 63448 - DNA, 30 bp, Artificial Sequence
  Synthetic oligonucleotide
ctagcgcagggccccgattcggcatacgta

SEQ ID NO: 63449 - DNA, 30 bp, Artificial Sequence
  Synthetic oligonucleotide
cgatacaggtgtcgcgtgattggatacgta

SEQ ID NO: 63450 - DNA, 30 bp, Artificial Sequence
  Synthetic oligonucleotide
aaagggtaggggagcatatgacactacgta

SEQ ID NO: 63451 - DNA, 30 bp, Artificial Sequence
  Synthetic oligonucleotide
ggttaccgttatgattctcaggtgcccgta

SEQ ID NO: 63452 - DNA, 30 bp, Artificial Sequence
  Synthetic oligonucleotide
gcagagcatattgcgaattaccctcccgta

SEQ ID NO: 63453 - DNA, 30 bp, Artificial Sequence
  Synthetic oligonucleotide
agaggtgtgcctcgaagtattcccgccgta

SEQ ID NO: 63454 - DNA, 30 bp, Artificial Sequence
  Synthetic oligonucleotide
tcgaggggaagtacatagactcgggccgta

SEQ ID NO: 63455 - DNA, 30 bp, Artificial Sequence
  Synthetic oligonucleotide
agactgagaggcccaagctccagctccgta

SEQ ID NO: 63456 - DNA, 30 bp, Artificial Sequence
  Synthetic oligonucleotide
ggtctagaggtacacttcgagaaaatcgta

SEQ ID NO: 63457 - DNA, 30 bp, Artificial Sequence
  Synthetic oligonucleotide
ctcaacaatggactgagcgcatttatcgta

SEQ ID NO: 63458 - DNA, 30 bp, Artificial Sequence
  Synthetic oligonucleotide
gacaaatggttcgtagaatctcgattcgta

SEQ ID NO: 63459 - DNA, 31 bp, Artificial Sequence
  Synthetic oligonucleotide
aggcacaagttgccctcctatggggttcgta

SEQ ID NO: 63460 - DNA, 30 bp, Artificial Sequence
  Synthetic oligonucleotide
atgtaataacgagagggcgcttcaaaggta

SEQ ID NO: 63461 - DNA, 30 bp, Artificial Sequence
  Synthetic oligonucleotide
accgtgagggcagactgccgaaataaggta

SEQ ID NO: 63462 - DNA, 30 bp, Artificial Sequence
  Synthetic oligonucleotide
atcgagacctaactgacaattggtaaggta

SEQ ID NO: 63463 - DNA, 30 bp, Artificial Sequence
  Synthetic oligonucleotide
aaaatggaagcggaaggggttagagaggta

SEQ ID NO: 63464 - DNA, 30 bp, Artificial Sequence
  Synthetic oligonucleotide
ggagggagagtgtgcacgtcggtataggta

SEQ ID NO: 63465 - DNA, 30 bp, Artificial Sequence
  Synthetic oligonucleotide
cgagccttatgctaatgacgagagtaggta

SEQ ID NO: 63466 - DNA, 30 bp, Artificial Sequence
  Synthetic oligonucleotide
acgcgacggccatataagtgatctacggta

SEQ ID NO: 63467 - DNA, 30 bp, Artificial Sequence
  Synthetic oligonucleotide
tacgatcgtggcttaaaaaaggatgcggta

SEQ ID NO: 63468 - DNA, 30 bp, Artificial Sequence
  Synthetic oligonucleotide
agaagagctgtgctgttttagtaaagggta

SEQ ID NO: 63469 - DNA, 30 bp, Artificial Sequence
  Synthetic oligonucleotide
ctcacataatcgtcgtgcaaggccagggta

SEQ ID NO: 63470 - DNA, 30 bp, Artificial Sequence
  Synthetic oligonucleotide
ataaggccggcaggaccttcacgcagggta

SEQ ID NO: 63471 - DNA, 30 bp, Artificial Sequence
  Synthetic oligonucleotide
tggtggacggggatgaagcgccctagggta

SEQ ID NO: 63472 - DNA, 30 bp, Artificial Sequence
  Synthetic oligonucleotide
tcttacacaatcaaaacagccacccgggta

SEQ ID NO: 63473 - DNA, 30 bp, Artificial Sequence
  Synthetic oligonucleotide
gcttgatgggaagtcatgtgcgggctggta

SEQ ID NO: 63474 - DNA, 30 bp, Artificial Sequence
  Synthetic oligonucleotide
taatagagcggcggcacacaaagagtggta

SEQ ID NO: 63475 - DNA, 30 bp, Artificial Sequence
  Synthetic oligonucleotide
atgttgcgccacaaacagcaaaaggtggta

SEQ ID NO: 63476 - DNA, 30 bp, Artificial Sequence
  Synthetic oligonucleotide
atgctaatcccgtgcgatctggttgtggta

SEQ ID NO: 63477 - DNA, 30 bp, Artificial Sequence
  Synthetic oligonucleotide
caactaagggactaactgccattgaatgta

SEQ ID NO: 63478 - DNA, 30 bp, Artificial Sequence
  Synthetic oligonucleotide
gatgtgaggctgggtacagatatagatgta

SEQ ID NO: 63479 - DNA, 30 bp, Artificial Sequence
  Synthetic oligonucleotide
tcgcataccaacgcctcgaaaagtgatgta

SEQ ID NO: 63480 - DNA, 30 bp, Artificial Sequence
  Synthetic oligonucleotide
tacgggaagtcgcggatagatggatatgta

SEQ ID NO: 63481 - DNA, 30 bp, Artificial Sequence
  Synthetic oligonucleotide
gcgggagaagcgagcacggacgaaactgta

SEQ ID NO: 63482 - DNA, 30 bp, Artificial Sequence
  Synthetic oligonucleotide
cgagtagaaactgtgcaatccagtactgta

SEQ ID NO: 63483 - DNA, 30 bp, Artificial Sequence
  Synthetic oligonucleotide
cagctgtagtaaggaagtcttaacgctgta

SEQ ID NO: 63484 - DNA, 30 bp, Artificial Sequence
  Synthetic oligonucleotide
aggacgggtcgataaacgctataggctgta

SEQ ID NO: 63485 - DNA, 30 bp, Artificial Sequence
  Synthetic oligonucleotide
ctgctccgataaccatggaacagtgctgta

SEQ ID NO: 63486 - DNA, 30 bp, Artificial Sequence
  Synthetic oligonucleotide
tatcggggtaaatcgtgacaaatgtctgta

SEQ ID NO: 63487 - DNA, 31 bp, Artificial Sequence
  Synthetic oligonucleotide
cgctccaccggtgttaagcgtaccaagtgta

SEQ ID NO: 63488 - DNA, 30 bp, Artificial Sequence
  Synthetic oligonucleotide
ctgatgtcgagacaactcataataagtgta

SEQ ID NO: 63489 - DNA, 30 bp, Artificial Sequence
  Synthetic oligonucleotide
tccgcgctgttaaataatgctccgagtgta

SEQ ID NO: 63490 - DNA, 30 bp, Artificial Sequence
  Synthetic oligonucleotide
gcgtacagttatgctcacgaatgacgtgta

SEQ ID NO: 63491 - DNA, 30 bp, Artificial Sequence
  Synthetic oligonucleotide
cggcgagccgcgcaagctatttggcgtgta

SEQ ID NO: 63492 - DNA, 30 bp, Artificial Sequence
  Synthetic oligonucleotide
ccaatcagttgaaccgggactcgtcgtgta

SEQ ID NO: 63493 - DNA, 30 bp, Artificial Sequence
  Synthetic oligonucleotide
aggagggagcgaggattagggtctggtgta

SEQ ID NO: 63494 - DNA, 30 bp, Artificial Sequence
  Synthetic oligonucleotide
gctaacatactaattgtatgaaactgtgta

SEQ ID NO: 63495 - DNA, 30 bp, Artificial Sequence
  Synthetic oligonucleotide
atcaagagacaaaagcagaagtagtgtgta

SEQ ID NO: 63496 - DNA, 30 bp, Artificial Sequence
  Synthetic oligonucleotide
cagtatagtccagtatgaagctcgtgtgta

SEQ ID NO: 63497 - DNA, 30 bp, Artificial Sequence
  Synthetic oligonucleotide
agcttgagtcagggataacgagaaattgta

SEQ ID NO: 63498 - DNA, 30 bp, Artificial Sequence
  Synthetic oligonucleotide
agaaaaaacaagtatgctaaacaccttgta

SEQ ID NO: 63499 - DNA, 30 bp, Artificial Sequence
  Synthetic oligonucleotide
cctggattagagaaccctacgatatttgta

SEQ ID NO: 63500 - DNA, 30 bp, Artificial Sequence
  Synthetic oligonucleotide
ttgagagaggtatatgcgttgcacaaatta

SEQ ID NO: 63501 - DNA, 30 bp, Artificial Sequence
  Synthetic oligonucleotide
ctctccgaacatctaaatcgcccgaaatta

SEQ ID NO: 63502 - DNA, 30 bp, Artificial Sequence
  Synthetic oligonucleotide
cgtctggaaaggaatcatttgcggaaatta

SEQ ID NO: 63503 - DNA, 30 bp, Artificial Sequence
  Synthetic oligonucleotide
ccagtcgactagatctggaattgcgaatta

SEQ ID NO: 63504 - DNA, 30 bp, Artificial Sequence
  Synthetic oligonucleotide
tgaaggggtgcaatgtatggtccggaatta

SEQ ID NO: 63505 - DNA, 30 bp, Artificial Sequence
  Synthetic oligonucleotide
tcggacgagcgtcatcgccactagtaatta

SEQ ID NO: 63506 - DNA, 30 bp, Artificial Sequence
  Synthetic oligonucleotide
gcttgagagcgcgctataggcctgtaatta

SEQ ID NO: 63507 - DNA, 30 bp, Artificial Sequence
  Synthetic oligonucleotide
gtgaatagggtaataggactacattaatta

SEQ ID NO: 63508 - DNA, 30 bp, Artificial Sequence
  Synthetic oligonucleotide
acgcaagtagacatatccacagtggcatta

SEQ ID NO: 63509 - DNA, 30 bp, Artificial Sequence
  Synthetic oligonucleotide
gcgtaaggcaaccagtaccgtcatagatta

SEQ ID NO: 63510 - DNA, 30 bp, Artificial Sequence
  Synthetic oligonucleotide
gcgggaatcgacgaacgtagttttagatta

SEQ ID NO: 63511 - DNA, 30 bp, Artificial Sequence
  Synthetic oligonucleotide
cgcaataaggagcaacttctgcaacgatta

SEQ ID NO: 63512 - DNA, 30 bp, Artificial Sequence
  Synthetic oligonucleotide
cggataaagtcaaatgactttgcacgatta

SEQ ID NO: 63513 - DNA, 30 bp, Artificial Sequence
  Synthetic oligonucleotide
actgcgtgcggtaaaggtcacagtggatta

SEQ ID NO: 63514 - DNA, 30 bp, Artificial Sequence
  Synthetic oligonucleotide
gggacaatgggtcaggaattgagcatatta

SEQ ID NO: 63515 - DNA, 30 bp, Artificial Sequence
  Synthetic oligonucleotide
ggcggcaggcatggaggctcagtgatatta

SEQ ID NO: 63516 - DNA, 30 bp, Artificial Sequence
  Synthetic oligonucleotide
cacgtccattaagcgcacagcgagctatta

SEQ ID NO: 63517 - DNA, 30 bp, Artificial Sequence
  Synthetic oligonucleotide
agtggaaggtgtgcctcgttacgcgtatta

SEQ ID NO: 63518 - DNA, 30 bp, Artificial Sequence
  Synthetic oligonucleotide
ctaatagccggacatgctggtgatgtatta

SEQ ID NO: 63519 - DNA, 30 bp, Artificial Sequence
  Synthetic oligonucleotide
gatcgtcgcaaactcgaaacacctgtatta

SEQ ID NO: 63520 - DNA, 30 bp, Artificial Sequence
  Synthetic oligonucleotide
tgcgagcgtaaccatattcatccccactta

SEQ ID NO: 63521 - DNA, 30 bp, Artificial Sequence
  Synthetic oligonucleotide
ggtcagggaacgaataacccaaagcactta

SEQ ID NO: 63522 - DNA, 30 bp, Artificial Sequence
  Synthetic oligonucleotide
gggacaaacaaactgctagatgatgactta

SEQ ID NO: 63523 - DNA, 30 bp, Artificial Sequence
  Synthetic oligonucleotide
atagctaacggagtagcatcgcctgactta

SEQ ID NO: 63524 - DNA, 30 bp, Artificial Sequence
  Synthetic oligonucleotide
ggaccagagcctgagagtagcagtcgctta

SEQ ID NO: 63525 - DNA, 30 bp, Artificial Sequence
  Synthetic oligonucleotide
gcctaggccaccccgaaatgaaacggctta

SEQ ID NO: 63526 - DNA, 30 bp, Artificial Sequence
  Synthetic oligonucleotide
cgaatagcgagcttatatgccatcggctta

SEQ ID NO: 63527 - DNA, 30 bp, Artificial Sequence
  Synthetic oligonucleotide
ccaacgacagagtgtctaatgaatatctta

SEQ ID NO: 63528 - DNA, 30 bp, Artificial Sequence
  Synthetic oligonucleotide
gcgaaactgggtgcattctatggcaagtta

SEQ ID NO: 63529 - DNA, 30 bp, Artificial Sequence
  Synthetic oligonucleotide
gaccggccagatagctagaacttcaagtta

SEQ ID NO: 63530 - DNA, 30 bp, Artificial Sequence
  Synthetic oligonucleotide
tcgagcgaaccgaattgcttggtgaagtta

SEQ ID NO: 63531 - DNA, 30 bp, Artificial Sequence
  Synthetic oligonucleotide
ctcaatcgaatgcaatgggggagtcagtta

SEQ ID NO: 63532 - DNA, 30 bp, Artificial Sequence
  Synthetic oligonucleotide
tggatcccaggaaaaatcacgcgtccgtta

SEQ ID NO: 63533 - DNA, 30 bp, Artificial Sequence
  Synthetic oligonucleotide
actgtggaaagtaatgactcgagatcgtta

SEQ ID NO: 63534 - DNA, 30 bp, Artificial Sequence
  Synthetic oligonucleotide
ttaataagaagctagagcaacaagtcgtta

SEQ ID NO: 63535 - DNA, 30 bp, Artificial Sequence
  Synthetic oligonucleotide
tgtacaccctcccaacggaacaagtcgtta

SEQ ID NO: 63536 - DNA, 30 bp, Artificial Sequence
  Synthetic oligonucleotide
ggcgtcacctctcgcgggagtgcgcggtta

SEQ ID NO: 63537 - DNA, 30 bp, Artificial Sequence
  Synthetic oligonucleotide
ataatcgggggaacggagtacatgcggtta

SEQ ID NO: 63538 - DNA, 30 bp, Artificial Sequence
  Synthetic oligonucleotide
gcaacagacaccggaagagcgaaagggtta

SEQ ID NO: 63539 - DNA, 30 bp, Artificial Sequence
  Synthetic oligonucleotide
taatggatggtagatattagaggtgggtta

SEQ ID NO: 63540 - DNA, 30 bp, Artificial Sequence
  Synthetic oligonucleotide
gtacaattggactgataatgtgcgtggtta

SEQ ID NO: 63541 - DNA, 30 bp, Artificial Sequence
  Synthetic oligonucleotide
catggttcgcaatcgttaagacgttggtta

SEQ ID NO: 63542 - DNA, 30 bp, Artificial Sequence
  Synthetic oligonucleotide
ttatcacgactcgttgccccaccaatgtta

SEQ ID NO: 63543 - DNA, 30 bp, Artificial Sequence
  Synthetic oligonucleotide
aggggtatatcctgtgcaatagtgatgtta

SEQ ID NO: 63544 - DNA, 30 bp, Artificial Sequence
  Synthetic oligonucleotide
atggtggattgagacacaccatggctgtta

SEQ ID NO: 63545 - DNA, 30 bp, Artificial Sequence
  Synthetic oligonucleotide
gcgtaattgagtcagaacatggctgtgtta

SEQ ID NO: 63546 - DNA, 30 bp, Artificial Sequence
  Synthetic oligonucleotide
acgacgacgcggtggtacaaggttgattta

SEQ ID NO: 63547 - DNA, 30 bp, Artificial Sequence
  Synthetic oligonucleotide
gcaggacatgcagcggatcctaagacttta

SEQ ID NO: 63548 - DNA, 30 bp, Artificial Sequence
  Synthetic oligonucleotide
cggagaccagctgaagcgatagaccgttta

SEQ ID NO: 63549 - DNA, 30 bp, Artificial Sequence
  Synthetic oligonucleotide
ggatacattaacatcgaaaaacggggttta

SEQ ID NO: 63550 - DNA, 30 bp, Artificial Sequence
  Synthetic oligonucleotide
gcaaaggtgtcatcgagggaagtcgtttta

SEQ ID NO: 63551 - DNA, 30 bp, Artificial Sequence
  Synthetic oligonucleotide
aagggcgtggcagcgtagagtaggaaaaac

SEQ ID NO: 63552 - DNA, 30 bp, Artificial Sequence
  Synthetic oligonucleotide
ggctcgttgagtattctgttgagtaaaaac

SEQ ID NO: 63553 - DNA, 30 bp, Artificial Sequence
  Synthetic oligonucleotide
aatacagagcgacacgtccacttacaaaac

SEQ ID NO: 63554 - DNA, 30 bp, Artificial Sequence
  Synthetic oligonucleotide
gaaggctagaattatagtgaaggcgaaaac

SEQ ID NO: 63555 - DNA, 30 bp, Artificial Sequence
  Synthetic oligonucleotide
tggaagatgagtgggctggttaatgaaaac

SEQ ID NO: 63556 - DNA, 30 bp, Artificial Sequence
  Synthetic oligonucleotide
tgggacccagtaggtcaaaacgcgtaaaac

SEQ ID NO: 63557 - DNA, 30 bp, Artificial Sequence
  Synthetic oligonucleotide
cttaggcggatatgataccccaattaaaac

SEQ ID NO: 63558 - DNA, 30 bp, Artificial Sequence
  Synthetic oligonucleotide
attggaacagtagtgtatcgtatgccaaac

SEQ ID NO: 63559 - DNA, 30 bp, Artificial Sequence
  Synthetic oligonucleotide
cagaatgtaggcaactcgcattggtcaaac

SEQ ID NO: 63560 - DNA, 30 bp, Artificial Sequence
  Synthetic oligonucleotide
atgttgcttgcgacgggtactgtacgaaac

SEQ ID NO: 63561 - DNA, 30 bp, Artificial Sequence
  Synthetic oligonucleotide
ctggagtccgttgctcaacccaaccgaaac

SEQ ID NO: 63562 - DNA, 30 bp, Artificial Sequence
  Synthetic oligonucleotide
agaatactggaagaccagtgataccgaaac

SEQ ID NO: 63563 - DNA, 30 bp, Artificial Sequence
  Synthetic oligonucleotide
aacgatgtcataaagtttttaacgcgaaac

SEQ ID NO: 63564 - DNA, 30 bp, Artificial Sequence
  Synthetic oligonucleotide
agcttaaatagttggttagtgcgcggaaac

SEQ ID NO: 63565 - DNA, 30 bp, Artificial Sequence
  Synthetic oligonucleotide
agctaagatagaagaatctaggttggaaac

SEQ ID NO: 63566 - DNA, 30 bp, Artificial Sequence
  Synthetic oligonucleotide
ctagaagcgttcgaggtccaggagataaac

SEQ ID NO: 63567 - DNA, 30 bp, Artificial Sequence
  Synthetic oligonucleotide
cgtgggccggagttatgaggagcgataaac

SEQ ID NO: 63568 - DNA, 30 bp, Artificial Sequence
  Synthetic oligonucleotide
cacgcgttacggctacaaaaatcccacaac

SEQ ID NO: 63569 - DNA, 30 bp, Artificial Sequence
  Synthetic oligonucleotide
acgaactccatccttaatcgccaggacaac

SEQ ID NO: 63570 - DNA, 30 bp, Artificial Sequence
  Synthetic oligonucleotide
aggagctgggtgagcaactgtactgacaac

SEQ ID NO: 63571 - DNA, 30 bp, Artificial Sequence
  Synthetic oligonucleotide
tgacagcactctccaactcaatagtacaac

SEQ ID NO: 63572 - DNA, 30 bp, Artificial Sequence
  Synthetic oligonucleotide
agggctctccgtcaggggcattgaaccaac

SEQ ID NO: 63573 - DNA, 30 bp, Artificial Sequence
  Synthetic oligonucleotide
ctgagagatgtgtcaaagaaacaagccaac

SEQ ID NO: 63574 - DNA, 30 bp, Artificial Sequence
  Synthetic oligonucleotide
gggacggctgggccagccttattcagcaac

SEQ ID NO: 63575 - DNA, 30 bp, Artificial Sequence
  Synthetic oligonucleotide
ggagaggggcgtgggaggcacgtgagcaac

SEQ ID NO: 63576 - DNA, 30 bp, Artificial Sequence
  Synthetic oligonucleotide
ttggaacgggctaaatcctctgacggcaac

SEQ ID NO: 63577 - DNA, 30 bp, Artificial Sequence
  Synthetic oligonucleotide
agggcttgggggataacacgagcgggcaac

SEQ ID NO: 63578 - DNA, 30 bp, Artificial Sequence
  Synthetic oligonucleotide
gttggcggagacatcattacgaggggcaac

SEQ ID NO: 63579 - DNA, 30 bp, Artificial Sequence
  Synthetic oligonucleotide
atgcaacaacgcgcggggcacgtcgtcaac

SEQ ID NO: 63580 - DNA, 30 bp, Artificial Sequence
  Synthetic oligonucleotide
agggaaagttgagtaaaataagcgaagaac

SEQ ID NO: 63581 - DNA, 30 bp, Artificial Sequence
  Synthetic oligonucleotide
caggacgtataacctggcctgaataagaac

SEQ ID NO: 63582 - DNA, 30 bp, Artificial Sequence
  Synthetic oligonucleotide
ctcgaaaccaatcgttagacatgtgagaac

SEQ ID NO: 63583 - DNA, 30 bp, Artificial Sequence
  Synthetic oligonucleotide
gggaccaaagccgctaccacgacttagaac

SEQ ID NO: 63584 - DNA, 30 bp, Artificial Sequence
  Synthetic oligonucleotide
agaggtgaaataggattacttaaaacgaac

SEQ ID NO: 63585 - DNA, 30 bp, Artificial Sequence
  Synthetic oligonucleotide
ttgcgaaggaggaaatcagtcaagacgaac

SEQ ID NO: 63586 - DNA, 30 bp, Artificial Sequence
  Synthetic oligonucleotide
agggaacatatgtgatcgggcaacgcgaac

SEQ ID NO: 63587 - DNA, 30 bp, Artificial Sequence
  Synthetic oligonucleotide
gggttgcagatctagagggcctagtcgaac

SEQ ID NO: 63588 - DNA, 30 bp, Artificial Sequence
  Synthetic oligonucleotide
aatcagactgcttgaattgccacgtcgaac

SEQ ID NO: 63589 - DNA, 30 bp, Artificial Sequence
  Synthetic oligonucleotide
gtgcttggagcgaatggcatacaaaggaac

SEQ ID NO: 63590 - DNA, 30 bp, Artificial Sequence
  Synthetic oligonucleotide
tcgggatcgacgagctatggcctaaggaac

SEQ ID NO: 63591 - DNA, 30 bp, Artificial Sequence
  Synthetic oligonucleotide
acctgacgatcagccgaagcactgaggaac

SEQ ID NO: 63592 - DNA, 30 bp, Artificial Sequence
  Synthetic oligonucleotide
aatgggacaagtgcttgggcgtgttggaac

SEQ ID NO: 63593 - DNA, 30 bp, Artificial Sequence
  Synthetic oligonucleotide
ccgtacggggcgggcggcgctacagtgaac

SEQ ID NO: 63594 - DNA, 30 bp, Artificial Sequence
  Synthetic oligonucleotide
gccgtggtttgtagtcatataagagtgaac

SEQ ID NO: 63595 - DNA, 30 bp, Artificial Sequence
  Synthetic oligonucleotide
tccgggggatgccaatacaagctattgaac

SEQ ID NO: 63596 - DNA, 30 bp, Artificial Sequence
  Synthetic oligonucleotide
gaaaccaacaaagaatggcaaggcaataac

SEQ ID NO: 63597 - DNA, 30 bp, Artificial Sequence
  Synthetic oligonucleotide
tcggacgccagcgaaaagggaaaagataac

SEQ ID NO: 63598 - DNA, 30 bp, Artificial Sequence
  Synthetic oligonucleotide
tacacgctcaatgctttagttcgacctaac

SEQ ID NO: 63599 - DNA, 30 bp, Artificial Sequence
  Synthetic oligonucleotide
cgtgtgtcgatacgaccccccacttctaac

SEQ ID NO: 63600 - DNA, 30 bp, Artificial Sequence
  Synthetic oligonucleotide
gcttagcgaatttaactatcaaagagtaac

SEQ ID NO: 63601 - DNA, 30 bp, Artificial Sequence
  Synthetic oligonucleotide
ttacaatgtgcaaacacgagtcgacgtaac

SEQ ID NO: 63602 - DNA, 30 bp, Artificial Sequence
  Synthetic oligonucleotide
agagtgggttggacttgacaaatacgtaac

SEQ ID NO: 63603 - DNA, 30 bp, Artificial Sequence
  Synthetic oligonucleotide
tctggaacctaagcctgaaaactaggtaac

SEQ ID NO: 63604 - DNA, 30 bp, Artificial Sequence
  Synthetic oligonucleotide
gtacccgagggagggaccgaaactggtaac

SEQ ID NO: 63605 - DNA, 30 bp, Artificial Sequence
  Synthetic oligonucleotide
ccagggcaaatatttagaaatttttgtaac

SEQ ID NO: 63606 - DNA, 30 bp, Artificial Sequence
  Synthetic oligonucleotide
aagcagcaagacaaagcaccgtcaattaac

SEQ ID NO: 63607 - DNA, 30 bp, Artificial Sequence
  Synthetic oligonucleotide
tgtagccagtcctactttacagtgattaac

SEQ ID NO: 63608 - DNA, 30 bp, Artificial Sequence
  Synthetic oligonucleotide
caatatgagggggcatataaccacaaacac

SEQ ID NO: 63609 - DNA, 30 bp, Artificial Sequence
  Synthetic oligonucleotide
aactggcaatacttcaccaacaagcaacac

SEQ ID NO: 63610 - DNA, 30 bp, Artificial Sequence
  Synthetic oligonucleotide
gcacgacagtcctaaatatgcgctcaacac

SEQ ID NO: 63611 - DNA, 30 bp, Artificial Sequence
  Synthetic oligonucleotide
tcagtgcagggggagagcgggttgtaacac

SEQ ID NO: 63612 - DNA, 30 bp, Artificial Sequence
  Synthetic oligonucleotide
acaaaccgggttcgtcggtcatgcccacac

SEQ ID NO: 63613 - DNA, 30 bp, Artificial Sequence
  Synthetic oligonucleotide
ggtcagacttccaaaataactacgccacac

SEQ ID NO: 63614 - DNA, 30 bp, Artificial Sequence
  Synthetic oligonucleotide
atcttagcaacactacatcttaaggcacac

SEQ ID NO: 63615 - DNA, 30 bp, Artificial Sequence
  Synthetic oligonucleotide
actacccagcaacacggaagtagggcacac

SEQ ID NO: 63616 - DNA, 30 bp, Artificial Sequence
  Synthetic oligonucleotide
acggaactcggagacgaaccacctgcacac

SEQ ID NO: 63617 - DNA, 30 bp, Artificial Sequence
  Synthetic oligonucleotide
gcggtaggtgatcagaggcgtcttgcacac

SEQ ID NO: 63618 - DNA, 30 bp, Artificial Sequence
  Synthetic oligonucleotide
ggtgcaggccacgatgtaaccgtcagacac

SEQ ID NO: 63619 - DNA, 30 bp, Artificial Sequence
  Synthetic oligonucleotide
tggctatgactgcggggacttgaccgacac

SEQ ID NO: 63620 - DNA, 30 bp, Artificial Sequence
  Synthetic oligonucleotide
gaacagaggacacagccactcgtccgacac

SEQ ID NO: 63621 - DNA, 30 bp, Artificial Sequence
  Synthetic oligonucleotide
ccgcgacggcacccccctccgactcgacac

SEQ ID NO: 63622 - DNA, 30 bp, Artificial Sequence
  Synthetic oligonucleotide
ggcctaagatagccaagcgtattctgacac

SEQ ID NO: 63623 - DNA, 30 bp, Artificial Sequence
  Synthetic oligonucleotide
aagttagtgcaggggcaacaggcttgacac

SEQ ID NO: 63624 - DNA, 30 bp, Artificial Sequence
  Synthetic oligonucleotide
gattaccttcactgtatcctgagttgacac

SEQ ID NO: 63625 - DNA, 30 bp, Artificial Sequence
  Synthetic oligonucleotide
cgtgtgattatcccggactgcatggtacac

SEQ ID NO: 63626 - DNA, 30 bp, Artificial Sequence
  Synthetic oligonucleotide
atatgccagacggcgtgagagctaaaccac

SEQ ID NO: 63627 - DNA, 30 bp, Artificial Sequence
  Synthetic oligonucleotide
atggtaagtcgatcagcacgtctacaccac

SEQ ID NO: 63628 - DNA, 30 bp, Artificial Sequence
  Synthetic oligonucleotide
tcggggataagatagtcagccaatcaccac

SEQ ID NO: 63629 - DNA, 30 bp, Artificial Sequence
  Synthetic oligonucleotide
ataaatcgaatgtgccagaaaactcaccac

SEQ ID NO: 63630 - DNA, 30 bp, Artificial Sequence
  Synthetic oligonucleotide
tacggagccccagaacctcatgagtaccac

SEQ ID NO: 63631 - DNA, 30 bp, Artificial Sequence
  Synthetic oligonucleotide
gtctaagggagctaaaagggcataccccac

SEQ ID NO: 63632 - DNA, 30 bp, Artificial Sequence
  Synthetic oligonucleotide
atggctaaccggtggaatacactagcccac

SEQ ID NO: 63633 - DNA, 30 bp, Artificial Sequence
  Synthetic oligonucleotide
acgatgcggtccctcgaggtaagtagccac

SEQ ID NO: 63634 - DNA, 30 bp, Artificial Sequence
  Synthetic oligonucleotide
aggctcaaatgtgaccgtagctttcgccac

SEQ ID NO: 63635 - DNA, 30 bp, Artificial Sequence
  Synthetic oligonucleotide
cgtgggagagatgtagtattcatcggccac

SEQ ID NO: 63636 - DNA, 30 bp, Artificial Sequence
  Synthetic oligonucleotide
tcgagcattaacagtcgagtcgcgatccac

SEQ ID NO: 63637 - DNA, 30 bp, Artificial Sequence
  Synthetic oligonucleotide
ggtaccgagagcatctagctaaaggtccac

SEQ ID NO: 63638 - DNA, 30 bp, Artificial Sequence
  Synthetic oligonucleotide
tggcttgaattacaaagtagtaaggtccac

SEQ ID NO: 63639 - DNA, 30 bp, Artificial Sequence
  Synthetic oligonucleotide
caacaataaactatttacggaaggttccac

SEQ ID NO: 63640 - DNA, 30 bp, Artificial Sequence
  Synthetic oligonucleotide
ggcctaaggaccgcataattttaaaagcac

SEQ ID NO: 63641 - DNA, 30 bp, Artificial Sequence
  Synthetic oligonucleotide
ctttcgaagcaaaagaggagtttcaagcac

SEQ ID NO: 63642 - DNA, 30 bp, Artificial Sequence
  Synthetic oligonucleotide
agtaaagctgaagtcataaaccataagcac

SEQ ID NO: 63643 - DNA, 30 bp, Artificial Sequence
  Synthetic oligonucleotide
ggggagattagaaggagagaacctgagcac

SEQ ID NO: 63644 - DNA, 30 bp, Artificial Sequence
  Synthetic oligonucleotide
aggggcacgcgtgatcacatcattgagcac

SEQ ID NO: 63645 - DNA, 30 bp, Artificial Sequence
  Synthetic oligonucleotide
cggtctgatactcaagaccacaacccgcac

SEQ ID NO: 63646 - DNA, 30 bp, Artificial Sequence
  Synthetic oligonucleotide
tccctcgtccaggcattagaaccagcgcac

SEQ ID NO: 63647 - DNA, 30 bp, Artificial Sequence
  Synthetic oligonucleotide
gtaaccgtgtagtaacataaagagaggcac

SEQ ID NO: 63648 - DNA, 30 bp, Artificial Sequence
  Synthetic oligonucleotide
ttagaacgccagacgaaaatgacgaggcac

SEQ ID NO: 63649 - DNA, 30 bp, Artificial Sequence
  Synthetic oligonucleotide
tcagatactgtcatataagttcataggcac

SEQ ID NO: 63650 - DNA, 30 bp, Artificial Sequence
  Synthetic oligonucleotide
cttgagattgcgaatatatgaccagggcac

SEQ ID NO: 63651 - DNA, 30 bp, Artificial Sequence
  Synthetic oligonucleotide
aatgcatacatgccatcagattcagggcac

SEQ ID NO: 63652 - DNA, 30 bp, Artificial Sequence
  Synthetic oligonucleotide
cgggcgactcataccatttagcaactgcac

SEQ ID NO: 63653 - DNA, 30 bp, Artificial Sequence
  Synthetic oligonucleotide
tagtggtgatccgcgagtcccaaggtgcac

SEQ ID NO: 63654 - DNA, 30 bp, Artificial Sequence
  Synthetic oligonucleotide
gggtcacgatccacgtacgtaacaaatcac

SEQ ID NO: 63655 - DNA, 30 bp, Artificial Sequence
  Synthetic oligonucleotide
cgagctggccttgattcgcacgagaatcac

SEQ ID NO: 63656 - DNA, 30 bp, Artificial Sequence
  Synthetic oligonucleotide
ttagggtgcagaacataagattcgaatcac

SEQ ID NO: 63657 - DNA, 30 bp, Artificial Sequence
  Synthetic oligonucleotide
aaatcgagggctgggcatgaggataatcac

SEQ ID NO: 63658 - DNA, 30 bp, Artificial Sequence
  Synthetic oligonucleotide
cgtaatcaaaacttgccacctcgtcctcac

SEQ ID NO: 63659 - DNA, 30 bp, Artificial Sequence
  Synthetic oligonucleotide
ctccaaaagtagatggcaattgaatctcac

SEQ ID NO: 63660 - DNA, 30 bp, Artificial Sequence
  Synthetic oligonucleotide
gggcggaaaaacggtaggtatgggagtcac

SEQ ID NO: 63661 - DNA, 30 bp, Artificial Sequence
  Synthetic oligonucleotide
agcacggatataaatgattacgcgcgtcac

SEQ ID NO: 63662 - DNA, 30 bp, Artificial Sequence
  Synthetic oligonucleotide
cggctataagggtgaccacaggagattcac

SEQ ID NO: 63663 - DNA, 30 bp, Artificial Sequence
  Synthetic oligonucleotide
ggcacaaaccttggttcaggctatattcac

SEQ ID NO: 63664 - DNA, 30 bp, Artificial Sequence
  Synthetic oligonucleotide
gaaacggcctcaacttaatcacaagttcac

SEQ ID NO: 63665 - DNA, 30 bp, Artificial Sequence
  Synthetic oligonucleotide
agagaaggtcgccattactaacggtttcac

SEQ ID NO: 63666 - DNA, 30 bp, Artificial Sequence
  Synthetic oligonucleotide
aaaacactaaaagtcgggaacagcgaagac

SEQ ID NO: 63667 - DNA, 30 bp, Artificial Sequence
  Synthetic oligonucleotide
ttggtggaatccgtttctagtgaataagac

SEQ ID NO: 63668 - DNA, 30 bp, Artificial Sequence
  Synthetic oligonucleotide
gaaagggttggtctaaatccaagctaagac

SEQ ID NO: 63669 - DNA, 30 bp, Artificial Sequence
  Synthetic oligonucleotide
cgagcccgacggctcgacgaaattacagac

SEQ ID NO: 63670 - DNA, 30 bp, Artificial Sequence
  Synthetic oligonucleotide
aatgtatcagcaataaagaactcaccagac

SEQ ID NO: 63671 - DNA, 30 bp, Artificial Sequence
  Synthetic oligonucleotide
gttgccatcatccatccacggagcccagac

SEQ ID NO: 63672 - DNA, 30 bp, Artificial Sequence
  Synthetic oligonucleotide
tcccgaaagagataaaacagatggccagac

SEQ ID NO: 63673 - DNA, 30 bp, Artificial Sequence
  Synthetic oligonucleotide
agctctgtagcctacacgtcttaagcagac

SEQ ID NO: 63674 - DNA, 30 bp, Artificial Sequence
  Synthetic oligonucleotide
tgtcgccggcatacaaatggttaagcagac

SEQ ID NO: 63675 - DNA, 30 bp, Artificial Sequence
  Synthetic oligonucleotide
gaaaccgaaggacaaacataagtctcagac

SEQ ID NO: 63676 - DNA, 30 bp, Artificial Sequence
  Synthetic oligonucleotide
cttaaacagggttagtaggggcatagagac

SEQ ID NO: 63677 - DNA, 30 bp, Artificial Sequence
  Synthetic oligonucleotide
accaggggggcttcacgactggagtgagac

SEQ ID NO: 63678 - DNA, 30 bp, Artificial Sequence
  Synthetic oligonucleotide
ccaggaggacagagctcgcaagtaatagac

SEQ ID NO: 63679 - DNA, 30 bp, Artificial Sequence
  Synthetic oligonucleotide
agcggacggtgccgcgaccaggctatagac

SEQ ID NO: 63680 - DNA, 30 bp, Artificial Sequence
  Synthetic oligonucleotide
attcgcgaagttgaatcgtcatgcctagac

SEQ ID NO: 63681 - DNA, 30 bp, Artificial Sequence
  Synthetic oligonucleotide
caagaatacatgccataacagggtgtagac

SEQ ID NO: 63682 - DNA, 30 bp, Artificial Sequence
  Synthetic oligonucleotide
gtggcgcacaccagcgaggaaatcaacgac

SEQ ID NO: 63683 - DNA, 30 bp, Artificial Sequence
  Synthetic oligonucleotide
taggaaagcaacgcgggtcttctacacgac

SEQ ID NO: 63684 - DNA, 30 bp, Artificial Sequence
  Synthetic oligonucleotide
gggatctcaaaccgtactaagtgccacgac

SEQ ID NO: 63685 - DNA, 30 bp, Artificial Sequence
  Synthetic oligonucleotide
ggatgtaccccaggcataatatcgcacgac

SEQ ID NO: 63686 - DNA, 30 bp, Artificial Sequence
  Synthetic oligonucleotide
atcggttcacctgcaggcacggcatacgac

SEQ ID NO: 63687 - DNA, 30 bp, Artificial Sequence
  Synthetic oligonucleotide
tcgattagatggctacccattgcctacgac

SEQ ID NO: 63688 - DNA, 30 bp, Artificial Sequence
  Synthetic oligonucleotide
agagaggcgagtgctgtggtctataccgac

SEQ ID NO: 63689 - DNA, 31 bp, Artificial Sequence
  Synthetic oligonucleotide
tcagagggaaccagtattcacaggacccgac

SEQ ID NO: 63690 - DNA, 30 bp, Artificial Sequence
  Synthetic oligonucleotide
catgcgataccagtgctaacgatcgccgac

SEQ ID NO: 63691 - DNA, 30 bp, Artificial Sequence
  Synthetic oligonucleotide
gcgcatacccgttacttcttgcaggccgac

SEQ ID NO: 63692 - DNA, 30 bp, Artificial Sequence
  Synthetic oligonucleotide
ggtcaccaacatgagtcaggattctgcgac

SEQ ID NO: 63693 - DNA, 30 bp, Artificial Sequence
  Synthetic oligonucleotide
gcaataccaattggctgaagaacgtgcgac

SEQ ID NO: 63694 - DNA, 30 bp, Artificial Sequence
  Synthetic oligonucleotide
gcccgaaaggaaagttttcgacgaatcgac

SEQ ID NO: 63695 - DNA, 30 bp, Artificial Sequence
  Synthetic oligonucleotide
tactgcaactggcccaatatcggaatcgac

SEQ ID NO: 63696 - DNA, 30 bp, Artificial Sequence
  Synthetic oligonucleotide
catgtcgtccatctcgatatcagcatcgac

SEQ ID NO: 63697 - DNA, 30 bp, Artificial Sequence
  Synthetic oligonucleotide
ggagccagacaaggatatgttacggtcgac

SEQ ID NO: 63698 - DNA, 30 bp, Artificial Sequence
  Synthetic oligonucleotide
gtgataggataactccaggagaagttcgac

SEQ ID NO: 63699 - DNA, 30 bp, Artificial Sequence
  Synthetic oligonucleotide
cgctgggcggaaggccgcacaacgttcgac

SEQ ID NO: 63700 - DNA, 30 bp, Artificial Sequence
  Synthetic oligonucleotide
tgcgaatgcactacgcggatccataaggac

SEQ ID NO: 63701 - DNA, 30 bp, Artificial Sequence
  Synthetic oligonucleotide
ttgagcggggcgagtatgggtcgacaggac

SEQ ID NO: 63702 - DNA, 30 bp, Artificial Sequence
  Synthetic oligonucleotide
gtaaggcgagatgtcgacttgcatgaggac

SEQ ID NO: 63703 - DNA, 30 bp, Artificial Sequence
  Synthetic oligonucleotide
ctggaaaactgcggtccgtaacgtgaggac

SEQ ID NO: 63704 - DNA, 30 bp, Artificial Sequence
  Synthetic oligonucleotide
acgggagatacctcagataaaccctaggac

SEQ ID NO: 63705 - DNA, 31 bp, Artificial Sequence
  Synthetic oligonucleotide
actaaggctatggtaatgtggcgcgtaggac

SEQ ID NO: 63706 - DNA, 30 bp, Artificial Sequence
  Synthetic oligonucleotide
cacaaatctggggatccaccgcaagcggac

SEQ ID NO: 63707 - DNA, 30 bp, Artificial Sequence
  Synthetic oligonucleotide
tatgggctgtgagttgtcaagagggcggac

SEQ ID NO: 63708 - DNA, 30 bp, Artificial Sequence
  Synthetic oligonucleotide
tatctgctgtgacccacaggaggaagggac

SEQ ID NO: 63709 - DNA, 30 bp, Artificial Sequence
  Synthetic oligonucleotide
cgtagaggtaattcggtgcatccgcgggac

SEQ ID NO: 63710 - DNA, 29 bp, Artificial Sequence
  Synthetic oligonucleotide
tcaaatggtagtaagcctgtagtcgggac

SEQ ID NO: 63711 - DNA, 30 bp, Artificial Sequence
  Synthetic oligonucleotide
tgtgcttcacagctacggactcctggggac

SEQ ID NO: 63712 - DNA, 30 bp, Artificial Sequence
  Synthetic oligonucleotide
aggagggagatgcgacgcgattttggggac

SEQ ID NO: 63713 - DNA, 30 bp, Artificial Sequence
  Synthetic oligonucleotide
acgtagttccgatttgacactgggatggac

SEQ ID NO: 63714 - DNA, 30 bp, Artificial Sequence
  Synthetic oligonucleotide
gctacggtatcgacaagtgctcacaatgac

SEQ ID NO: 63715 - DNA, 30 bp, Artificial Sequence
  Synthetic oligonucleotide
gagctaagaaaatggattgaccctaatgac

SEQ ID NO: 63716 - DNA, 30 bp, Artificial Sequence
  Synthetic oligonucleotide
cgggctaaccacaagcggtatccccatgac

SEQ ID NO: 63717 - DNA, 30 bp, Artificial Sequence
  Synthetic oligonucleotide
acgcgcacacttacaattcacgccgatgac

SEQ ID NO: 63718 - DNA, 30 bp, Artificial Sequence
  Synthetic oligonucleotide
gcaggacagtgatttaaactcagtgatgac

SEQ ID NO: 63719 - DNA, 30 bp, Artificial Sequence
  Synthetic oligonucleotide
agatgggatggtttgtcgagctgtactgac

SEQ ID NO: 63720 - DNA, 30 bp, Artificial Sequence
  Synthetic oligonucleotide
tgcgggcaacgcccagtcgcagcacctgac

SEQ ID NO: 63721 - DNA, 30 bp, Artificial Sequence
  Synthetic oligonucleotide
acctaggagaagtatgagtcatgttctgac

SEQ ID NO: 63722 - DNA, 30 bp, Artificial Sequence
  Synthetic oligonucleotide
acgagctggttactttgactagtaagtgac

SEQ ID NO: 63723 - DNA, 30 bp, Artificial Sequence
  Synthetic oligonucleotide
cgtgcgggcggataggcgaaccacagtgac

SEQ ID NO: 63724 - DNA, 30 bp, Artificial Sequence
  Synthetic oligonucleotide
agggctgcgtaactcctaatttgcagtgac

SEQ ID NO: 63725 - DNA, 30 bp, Artificial Sequence
  Synthetic oligonucleotide
agtcaccgtgccggtttaaacttacgtgac

SEQ ID NO: 63726 - DNA, 30 bp, Artificial Sequence
  Synthetic oligonucleotide
caccatatggtaggactacaagacggtgac

SEQ ID NO: 63727 - DNA, 30 bp, Artificial Sequence
  Synthetic oligonucleotide
cgcaagggcttagattaattagacggtgac

SEQ ID NO: 63728 - DNA, 30 bp, Artificial Sequence
  Synthetic oligonucleotide
cagtcggtgacttaaaaagtcaagggtgac

SEQ ID NO: 63729 - DNA, 30 bp, Artificial Sequence
  Synthetic oligonucleotide
aactgctatacgaagccgaaatgtggtgac

SEQ ID NO: 63730 - DNA, 30 bp, Artificial Sequence
  Synthetic oligonucleotide
gggatcgatacattcgtcggtcactgtgac

SEQ ID NO: 63731 - DNA, 30 bp, Artificial Sequence
  Synthetic oligonucleotide
ttgccagacaaagtgatgcaggaatttgac

SEQ ID NO: 63732 - DNA, 30 bp, Artificial Sequence
  Synthetic oligonucleotide
gcggaagtaaacggacctcatgcacaatac

SEQ ID NO: 63733 - DNA, 30 bp, Artificial Sequence
  Synthetic oligonucleotide
agagatttgggcgccggcgactgagaatac

SEQ ID NO: 63734 - DNA, 30 bp, Artificial Sequence
  Synthetic oligonucleotide
agcaaatgtcacggtgatatgcaggaatac

SEQ ID NO: 63735 - DNA, 30 bp, Artificial Sequence
  Synthetic oligonucleotide
cgtgggacaaagggataagggtctgaatac

SEQ ID NO: 63736 - DNA, 30 bp, Artificial Sequence
  Synthetic oligonucleotide
atcgctgagggccacaaaatgagtgaatac

SEQ ID NO: 63737 - DNA, 30 bp, Artificial Sequence
  Synthetic oligonucleotide
gatcgcgatatgcaataaaaaggtgaatac

SEQ ID NO: 63738 - DNA, 30 bp, Artificial Sequence
  Synthetic oligonucleotide
ggcaaaatgttgtagagagaaacctaatac

SEQ ID NO: 63739 - DNA, 30 bp, Artificial Sequence
  Synthetic oligonucleotide
ggcggctaaagaccgagagggtctacatac

SEQ ID NO: 63740 - DNA, 30 bp, Artificial Sequence
  Synthetic oligonucleotide
atcgaaatcccaaacatcccaagcccatac

SEQ ID NO: 63741 - DNA, 30 bp, Artificial Sequence
  Synthetic oligonucleotide
gctaaaaacgacataaggtcaggagcatac

SEQ ID NO: 63742 - DNA, 30 bp, Artificial Sequence
  Synthetic oligonucleotide
caggagctgtgtaactgcgccaggtcatac

SEQ ID NO: 63743 - DNA, 30 bp, Artificial Sequence
  Synthetic oligonucleotide
gcacgagattggtcgcctgagcagagatac

SEQ ID NO: 63744 - DNA, 30 bp, Artificial Sequence
  Synthetic oligonucleotide
acaggttcgtatacaaataaactgagatac

SEQ ID NO: 63745 - DNA, 30 bp, Artificial Sequence
  Synthetic oligonucleotide
gagggcgaggaagatcttatttaacgatac

SEQ ID NO: 63746 - DNA, 30 bp, Artificial Sequence
  Synthetic oligonucleotide
ataggtgcgtcaaggaagtattgtcgatac

SEQ ID NO: 63747 - DNA, 30 bp, Artificial Sequence
  Synthetic oligonucleotide
aggcatcacgaagaatggcacataggatac

SEQ ID NO: 63748 - DNA, 30 bp, Artificial Sequence
  Synthetic oligonucleotide
tgggcatcggctagatgaacctggatatac

SEQ ID NO: 63749 - DNA, 30 bp, Artificial Sequence
  Synthetic oligonucleotide
ccatacctacatcaacgatcttacctatac

SEQ ID NO: 63750 - DNA, 30 bp, Artificial Sequence
  Synthetic oligonucleotide
cacaagagaggagcggtatcaccgcactac

SEQ ID NO: 63751 - DNA, 30 bp, Artificial Sequence
  Synthetic oligonucleotide
atacaggacggcatcctaacatgtcactac

SEQ ID NO: 63752 - DNA, 30 bp, Artificial Sequence
  Synthetic oligonucleotide
agtgccaatatggaatattatcgcgactac

SEQ ID NO: 63753 - DNA, 30 bp, Artificial Sequence
  Synthetic oligonucleotide
cctcgagcgcaagacggattatgcccctac

SEQ ID NO: 63754 - DNA, 30 bp, Artificial Sequence
  Synthetic oligonucleotide
actagctcagcatgaactgagtaaagctac

SEQ ID NO: 63755 - DNA, 30 bp, Artificial Sequence
  Synthetic oligonucleotide
gaacccagacactaagaacgcgagagctac

SEQ ID NO: 63756 - DNA, 30 bp, Artificial Sequence
  Synthetic oligonucleotide
tgtaccgaacagaaaccagatgccatctac

SEQ ID NO: 63757 - DNA, 30 bp, Artificial Sequence
  Synthetic oligonucleotide
aaggagccagtgctctgcaatatcaagtac

SEQ ID NO: 63758 - DNA, 30 bp, Artificial Sequence
  Synthetic oligonucleotide
tggatacccggctatggttgaacgaagtac

SEQ ID NO: 63759 - DNA, 30 bp, Artificial Sequence
  Synthetic oligonucleotide
tagacgacattcaaccttgtctacgagtac

SEQ ID NO: 63760 - DNA, 30 bp, Artificial Sequence
  Synthetic oligonucleotide
tcggggagcacgttctgagtagtctagtac

SEQ ID NO: 63761 - DNA, 30 bp, Artificial Sequence
  Synthetic oligonucleotide
tgctataacgggcgggatcctgcaacgtac

SEQ ID NO: 63762 - DNA, 30 bp, Artificial Sequence
  Synthetic oligonucleotide
gtcgagtcggcgatgaaagacgtaacgtac

SEQ ID NO: 63763 - DNA, 30 bp, Artificial Sequence
  Synthetic oligonucleotide
gtcacatggagtgactattacgtgccgtac

SEQ ID NO: 63764 - DNA, 30 bp, Artificial Sequence
  Synthetic oligonucleotide
tcagtgtggagagattgagatcgtccgtac

SEQ ID NO: 63765 - DNA, 30 bp, Artificial Sequence
  Synthetic oligonucleotide
cgttcgcaaggacaccaagtgtggaggtac

SEQ ID NO: 63766 - DNA, 30 bp, Artificial Sequence
  Synthetic oligonucleotide
agacataggcacgcgaagttgaaacggtac

SEQ ID NO: 63767 - DNA, 30 bp, Artificial Sequence
  Synthetic oligonucleotide
agtgggcgaagaatagtgttcccacggtac

SEQ ID NO: 63768 - DNA, 30 bp, Artificial Sequence
  Synthetic oligonucleotide
tcgtcatgtacaaaaggtatgtgtcggtac

SEQ ID NO: 63769 - DNA, 30 bp, Artificial Sequence
  Synthetic oligonucleotide
agggcatggacatcgtgcaaaagatggtac

SEQ ID NO: 63770 - DNA, 30 bp, Artificial Sequence
  Synthetic oligonucleotide
cagggaattagagctctggtaaattggtac

SEQ ID NO: 63771 - DNA, 30 bp, Artificial Sequence
  Synthetic oligonucleotide
atgtgagaagtgggtacgtcaacagtgtac

SEQ ID NO: 63772 - DNA, 30 bp, Artificial Sequence
  Synthetic oligonucleotide
aggcagaagtcaataaacagtaagttgtac

SEQ ID NO: 63773 - DNA, 30 bp, Artificial Sequence
  Synthetic oligonucleotide
cctggaaacaggatacttataaggcattac

SEQ ID NO: 63774 - DNA, 30 bp, Artificial Sequence
  Synthetic oligonucleotide
agggacaaaaagtaaattgagctggattac

SEQ ID NO: 63775 - DNA, 30 bp, Artificial Sequence
  Synthetic oligonucleotide
acgttcggtcggagtgtcagagatgattac

SEQ ID NO: 63776 - DNA, 30 bp, Artificial Sequence
  Synthetic oligonucleotide
aaggcacgcgtgttccagaagtgctattac

SEQ ID NO: 63777 - DNA, 30 bp, Artificial Sequence
  Synthetic oligonucleotide
ccttgctagggatagtagaccaagtattac

SEQ ID NO: 63778 - DNA, 30 bp, Artificial Sequence
  Synthetic oligonucleotide
tggaatgtataagggttgttcaagagttac

SEQ ID NO: 63779 - DNA, 30 bp, Artificial Sequence
  Synthetic oligonucleotide
ataaaagggcgagggcgacggcacctttac

SEQ ID NO: 63780 - DNA, 30 bp, Artificial Sequence
  Synthetic oligonucleotide
aacaggacaaagtgggagaggctaaaaacc

SEQ ID NO: 63781 - DNA, 30 bp, Artificial Sequence
  Synthetic oligonucleotide
ggttcatgaccagtcccagagcgccaaacc

SEQ ID NO: 63782 - DNA, 30 bp, Artificial Sequence
  Synthetic oligonucleotide
aacaaagtatgagagcatggggcgtaaacc

SEQ ID NO: 63783 - DNA, 30 bp, Artificial Sequence
  Synthetic oligonucleotide
acttgcaatgtgaaatgcttagagcgaacc

SEQ ID NO: 63784 - DNA, 30 bp, Artificial Sequence
  Synthetic oligonucleotide
tgaatgctcaatattaaccagactcgaacc

SEQ ID NO: 63785 - DNA, 30 bp, Artificial Sequence
  Synthetic oligonucleotide
acggtctgtgcaagttactccgcgtgaacc

SEQ ID NO: 63786 - DNA, 30 bp, Artificial Sequence
  Synthetic oligonucleotide
agccggtggttagcggagttgcacataacc

SEQ ID NO: 63787 - DNA, 30 bp, Artificial Sequence
  Synthetic oligonucleotide
tgtcatcccgtgcagtgaccgcatctaacc

SEQ ID NO: 63788 - DNA, 30 bp, Artificial Sequence
  Synthetic oligonucleotide
cgaaagcgctaattattctcaagcgtaacc

SEQ ID NO: 63789 - DNA, 30 bp, Artificial Sequence
  Synthetic oligonucleotide
ataggaaggcgtgtctagacactcgtaacc

SEQ ID NO: 63790 - DNA, 30 bp, Artificial Sequence
  Synthetic oligonucleotide
agtgcgcaaagaatgactctaagggtaacc

SEQ ID NO: 63791 - DNA, 30 bp, Artificial Sequence
  Synthetic oligonucleotide
cgaatagtcactgggacatcggatttaacc

SEQ ID NO: 63792 - DNA, 30 bp, Artificial Sequence
  Synthetic oligonucleotide
gaacagggaggtaagcgtggtacgaacacc

SEQ ID NO: 63793 - DNA, 30 bp, Artificial Sequence
  Synthetic oligonucleotide
agcacgtcaaaagatacacggtatgacacc

SEQ ID NO: 63794 - DNA, 30 bp, Artificial Sequence
  Synthetic oligonucleotide
taacagggttgggctattagtgaagccacc

SEQ ID NO: 63795 - DNA, 30 bp, Artificial Sequence
  Synthetic oligonucleotide
gcttgtaaaggtaccgggttaagtagcacc

SEQ ID NO: 63796 - DNA, 30 bp, Artificial Sequence
  Synthetic oligonucleotide
acggtaaataaaggcgagtaagaccgcacc

SEQ ID NO: 63797 - DNA, 30 bp, Artificial Sequence
  Synthetic oligonucleotide
gtgcggaagtgagcacggtaatatcgcacc

SEQ ID NO: 63798 - DNA, 30 bp, Artificial Sequence
  Synthetic oligonucleotide
ttggctggaagaccagggtccaaaggcacc

SEQ ID NO: 63799 - DNA, 30 bp, Artificial Sequence
  Synthetic oligonucleotide
accgacaagaacgactatacatggggcacc

SEQ ID NO: 63800 - DNA, 30 bp, Artificial Sequence
  Synthetic oligonucleotide
gaggagatcacactggtcgatcttctcacc

SEQ ID NO: 63801 - DNA, 30 bp, Artificial Sequence
  Synthetic oligonucleotide
caagaacagttgcatcaatccgtcgtcacc

SEQ ID NO: 63802 - DNA, 30 bp, Artificial Sequence
  Synthetic oligonucleotide
actagacccagagtcaaaacgcgattcacc

SEQ ID NO: 63803 - DNA, 30 bp, Artificial Sequence
  Synthetic oligonucleotide
ctagacagttgactcagattacacaagacc

SEQ ID NO: 63804 - DNA, 30 bp, Artificial Sequence
  Synthetic oligonucleotide
agaaccatacaaagatttccagttaagacc

SEQ ID NO: 63805 - DNA, 30 bp, Artificial Sequence
  Synthetic oligonucleotide
cacgacccgggctatctcaagcgacagacc

SEQ ID NO: 63806 - DNA, 30 bp, Artificial Sequence
  Synthetic oligonucleotide
tatagtggagataactaaagcagccagacc

SEQ ID NO: 63807 - DNA, 30 bp, Artificial Sequence
  Synthetic oligonucleotide
gcggagcgatcgaggaaaacctatcagacc

SEQ ID NO: 63808 - DNA, 30 bp, Artificial Sequence
  Synthetic oligonucleotide
taccgtgggggctggaaatagttgacgacc

SEQ ID NO: 63809 - DNA, 30 bp, Artificial Sequence
  Synthetic oligonucleotide
acgaattaacataccgtgagagctacgacc

SEQ ID NO: 63810 - DNA, 30 bp, Artificial Sequence
  Synthetic oligonucleotide
aactacgtgactatgtagctaaggcggacc

SEQ ID NO: 63811 - DNA, 30 bp, Artificial Sequence
  Synthetic oligonucleotide
aagtaggcgaagccattgaagaccgggacc

SEQ ID NO: 63812 - DNA, 30 bp, Artificial Sequence
  Synthetic oligonucleotide
acgtgattgatttacccacgggatgggacc

SEQ ID NO: 63813 - DNA, 30 bp, Artificial Sequence
  Synthetic oligonucleotide
cgtagatcagtaaccaaatcgcacatgacc

SEQ ID NO: 63814 - DNA, 30 bp, Artificial Sequence
  Synthetic oligonucleotide
cgttactaagtgcttcctaaaagtatgacc

SEQ ID NO: 63815 - DNA, 30 bp, Artificial Sequence
  Synthetic oligonucleotide
aagggagtcgatgcaccgttctccgtgacc

SEQ ID NO: 63816 - DNA, 30 bp, Artificial Sequence
  Synthetic oligonucleotide
ttactctaagtccacagcattgcggtgacc

SEQ ID NO: 63817 - DNA, 30 bp, Artificial Sequence
  Synthetic oligonucleotide
gcagaggcaagggctggagttcagaatacc

SEQ ID NO: 63818 - DNA, 30 bp, Artificial Sequence
  Synthetic oligonucleotide
gccacgcacaaaacaaagatacagcatacc

SEQ ID NO: 63819 - DNA, 30 bp, Artificial Sequence
  Synthetic oligonucleotide
gagtacggcgagtggacaagagcatatacc

SEQ ID NO: 63820 - DNA, 30 bp, Artificial Sequence
  Synthetic oligonucleotide
cgatcgagagaaggctaggaacctgctacc

SEQ ID NO: 63821 - DNA, 30 bp, Artificial Sequence
  Synthetic oligonucleotide
cgaacagtcatggtttctttgagtgctacc

SEQ ID NO: 63822 - DNA, 30 bp, Artificial Sequence
  Synthetic oligonucleotide
ccaagagaggagggacggttacatagtacc

SEQ ID NO: 63823 - DNA, 30 bp, Artificial Sequence
  Synthetic oligonucleotide
agggtgcgaccacgaatacgggccattacc

SEQ ID NO: 63824 - DNA, 30 bp, Artificial Sequence
  Synthetic oligonucleotide
gcaacaaccagcgtaactggcgcccaaccc

SEQ ID NO: 63825 - DNA, 30 bp, Artificial Sequence
  Synthetic oligonucleotide
gggagacgtataatcgtacttgaataaccc

SEQ ID NO: 63826 - DNA, 30 bp, Artificial Sequence
  Synthetic oligonucleotide
atgatcgatgtgacggttccactcacaccc

SEQ ID NO: 63827 - DNA, 30 bp, Artificial Sequence
  Synthetic oligonucleotide
tgaggcgtgcccgattgtccgaaagcaccc

SEQ ID NO: 63828 - DNA, 30 bp, Artificial Sequence
  Synthetic oligonucleotide
aacagggattatctaacaagcttagcaccc

SEQ ID NO: 63829 - DNA, 30 bp, Artificial Sequence
  Synthetic oligonucleotide
tgggccgtggcgagacggtggagtgcaccc

SEQ ID NO: 63830 - DNA, 30 bp, Artificial Sequence
  Synthetic oligonucleotide
tcgtggacgggggtcgtagagggctcaccc

SEQ ID NO: 63831 - DNA, 30 bp, Artificial Sequence
  Synthetic oligonucleotide
gcactaaccagagtctaagtgcgtagaccc

SEQ ID NO: 63832 - DNA, 30 bp, Artificial Sequence
  Synthetic oligonucleotide
gggcatgaactgtgagggatcggtggaccc

SEQ ID NO: 63833 - DNA, 30 bp, Artificial Sequence
  Synthetic oligonucleotide
acagggcccacaggtaggagatactgaccc

SEQ ID NO: 63834 - DNA, 30 bp, Artificial Sequence
  Synthetic oligonucleotide
gggcaacgtatttcaattagtgcgtgaccc

SEQ ID NO: 63835 - DNA, 30 bp, Artificial Sequence
  Synthetic oligonucleotide
tacgacaggatcaatgtagagtgcataccc

SEQ ID NO: 63836 - DNA, 30 bp, Artificial Sequence
  Synthetic oligonucleotide
cgtactagcaacaaatactaaactttaccc

SEQ ID NO: 63837 - DNA, 30 bp, Artificial Sequence
  Synthetic oligonucleotide
gcgtcaaccatacattagtaacgatacccc

SEQ ID NO: 63838 - DNA, 30 bp, Artificial Sequence
  Synthetic oligonucleotide
cagaggaccatagggcaggtagggttcccc

SEQ ID NO: 63839 - DNA, 30 bp, Artificial Sequence
  Synthetic oligonucleotide
cgtataggaggtcatagagcgaatgagccc

SEQ ID NO: 63840 - DNA, 30 bp, Artificial Sequence
  Synthetic oligonucleotide
aaaccgaactaagaccattggggctagccc

SEQ ID NO: 63841 - DNA, 30 bp, Artificial Sequence
  Synthetic oligonucleotide
tcacgtgccagccgacaagtgattctgccc

SEQ ID NO: 63842 - DNA, 30 bp, Artificial Sequence
  Synthetic oligonucleotide
acaatcagaacgagggtacagtgagtgccc

SEQ ID NO: 63843 - DNA, 30 bp, Artificial Sequence
  Synthetic oligonucleotide
ctaaaagttaaaacactagcaaatttgccc

SEQ ID NO: 63844 - DNA, 30 bp, Artificial Sequence
  Synthetic oligonucleotide
tacgacaggtactctcgttgcatacatccc

SEQ ID NO: 63845 - DNA, 30 bp, Artificial Sequence
  Synthetic oligonucleotide
acgaattggcgagtaatcggccattatccc

SEQ ID NO: 63846 - DNA, 30 bp, Artificial Sequence
  Synthetic oligonucleotide
cgaatcgccttatacgaggtagagactccc

SEQ ID NO: 63847 - DNA, 30 bp, Artificial Sequence
  Synthetic oligonucleotide
acgaaatgctctagtcatgataaacgtccc

SEQ ID NO: 63848 - DNA, 30 bp, Artificial Sequence
  Synthetic oligonucleotide
ctcatggtgaaacttgataacggacgtccc

SEQ ID NO: 63849 - DNA, 30 bp, Artificial Sequence
  Synthetic oligonucleotide
gcatggcggatggagtacacgatgggtccc

SEQ ID NO: 63850 - DNA, 30 bp, Artificial Sequence
  Synthetic oligonucleotide
cgtatggttccagtgttgaggtgagttccc

SEQ ID NO: 63851 - DNA, 30 bp, Artificial Sequence
  Synthetic oligonucleotide
gtaaaacggcggatcatagaacaatttccc

SEQ ID NO: 63852 - DNA, 30 bp, Artificial Sequence
  Synthetic oligonucleotide
acgaggacgtaccgagggaaaacaaaagcc

SEQ ID NO: 63853 - DNA, 30 bp, Artificial Sequence
  Synthetic oligonucleotide
atggaccgagacaggatgcggtctaaagcc

SEQ ID NO: 63854 - DNA, 30 bp, Artificial Sequence
  Synthetic oligonucleotide
cgaagtagtcaaagctcatgaaaacaagcc

SEQ ID NO: 63855 - DNA, 30 bp, Artificial Sequence
  Synthetic oligonucleotide
cgccgggtggaatctccataaaaccaagcc

SEQ ID NO: 63856 - DNA, 30 bp, Artificial Sequence
  Synthetic oligonucleotide
tagaagagggtgtgaaatgggtgttaagcc

SEQ ID NO: 63857 - DNA, 30 bp, Artificial Sequence
  Synthetic oligonucleotide
gaccattcacatggtgatgagagggcagcc

SEQ ID NO: 63858 - DNA, 30 bp, Artificial Sequence
  Synthetic oligonucleotide
gtacgggagaatgcgaagaatgcttcagcc

SEQ ID NO: 63859 - DNA, 30 bp, Artificial Sequence
  Synthetic oligonucleotide
catgtaggggacacacagtgggacagagcc

SEQ ID NO: 63860 - DNA, 30 bp, Artificial Sequence
  Synthetic oligonucleotide
aagatcggtaaagtcataagtggtcgagcc

SEQ ID NO: 63861 - DNA, 30 bp, Artificial Sequence
  Synthetic oligonucleotide
taccagtcgcatacgaactagcagggagcc

SEQ ID NO: 63862 - DNA, 30 bp, Artificial Sequence
  Synthetic oligonucleotide
gcgaagttgcgttgcgggatcacctgagcc

SEQ ID NO: 63863 - DNA, 30 bp, Artificial Sequence
  Synthetic oligonucleotide
aagccattcgcatgtaaaaaataaatagcc

SEQ ID NO: 63864 - DNA, 30 bp, Artificial Sequence
  Synthetic oligonucleotide
acggttgtaactggtaatctgctaatagcc

SEQ ID NO: 63865 - DNA, 30 bp, Artificial Sequence
  Synthetic oligonucleotide
ctcaagtgtcataaagaacctagggtagcc

SEQ ID NO: 63866 - DNA, 30 bp, Artificial Sequence
  Synthetic oligonucleotide
aagacaacatgtatcgaaagagtaaacgcc

SEQ ID NO: 63867 - DNA, 30 bp, Artificial Sequence
  Synthetic oligonucleotide
taggtctgagcatcgtgaaaccagaacgcc

SEQ ID NO: 63868 - DNA, 30 bp, Artificial Sequence
  Synthetic oligonucleotide
aacgagcgcaattcgatcgaatgttccgcc

SEQ ID NO: 63869 - DNA, 30 bp, Artificial Sequence
  Synthetic oligonucleotide
ctgtgcgggatcaaagaggccactagcgcc

SEQ ID NO: 63870 - DNA, 30 bp, Artificial Sequence
  Synthetic oligonucleotide
ctgcccgcagtttaaatcggtgaatgcgcc

SEQ ID NO: 63871 - DNA, 30 bp, Artificial Sequence
  Synthetic oligonucleotide
cgacacccagccagaacacatggcatcgcc

SEQ ID NO: 63872 - DNA, 30 bp, Artificial Sequence
  Synthetic oligonucleotide
gaagagagggatgtgacttgaggcctcgcc

SEQ ID NO: 63873 - DNA, 30 bp, Artificial Sequence
  Synthetic oligonucleotide
cgtcaatcataagctacttaatgggtcgcc

SEQ ID NO: 63874 - DNA, 30 bp, Artificial Sequence
  Synthetic oligonucleotide
gtaggggtgagcatggcaatggaattcgcc

SEQ ID NO: 63875 - DNA, 30 bp, Artificial Sequence
  Synthetic oligonucleotide
tagggcagtaatcgtataagggtgcaggcc

SEQ ID NO: 63876 - DNA, 30 bp, Artificial Sequence
  Synthetic oligonucleotide
acagccgatgttcgtgtcaagagagaggcc

SEQ ID NO: 63877 - DNA, 30 bp, Artificial Sequence
  Synthetic oligonucleotide
ttagatagagaagtgctagaagatgaggcc

SEQ ID NO: 63878 - DNA, 30 bp, Artificial Sequence
  Synthetic oligonucleotide
gagccgaggtcaaacggaagaagtgaggcc

SEQ ID NO: 63879 - DNA, 30 bp, Artificial Sequence
  Synthetic oligonucleotide
catagagtcaacgcctggtaccaaacggcc

SEQ ID NO: 63880 - DNA, 30 bp, Artificial Sequence
  Synthetic oligonucleotide
aagcgggacaagttaagagtcctcacggcc

SEQ ID NO: 63881 - DNA, 30 bp, Artificial Sequence
  Synthetic oligonucleotide
ctgccaagctgtgaatgggcacatacggcc

SEQ ID NO: 63882 - DNA, 30 bp, Artificial Sequence
  Synthetic oligonucleotide
actgcggataaagtgcatgctattacggcc

SEQ ID NO: 63883 - DNA, 30 bp, Artificial Sequence
  Synthetic oligonucleotide
tgaaacccaaaattacgtcactcggcggcc

SEQ ID NO: 63884 - DNA, 30 bp, Artificial Sequence
  Synthetic oligonucleotide
tgtcatggcaacagacacagaatggcggcc

SEQ ID NO: 63885 - DNA, 30 bp, Artificial Sequence
  Synthetic oligonucleotide
tcaggtggcgactgagcgagtccgtcggcc

SEQ ID NO: 63886 - DNA, 30 bp, Artificial Sequence
  Synthetic oligonucleotide
ttgatgagcatatgggaaatagtgagggcc

SEQ ID NO: 63887 - DNA, 30 bp, Artificial Sequence
  Synthetic oligonucleotide
cgggaaggaagaagacgccagaggcgggcc

SEQ ID NO: 63888 - DNA, 30 bp, Artificial Sequence
  Synthetic oligonucleotide
ggaggggaaagaaagccatcgtgatgggcc

SEQ ID NO: 63889 - DNA, 30 bp, Artificial Sequence
  Synthetic oligonucleotide
acgagggattacaaaagaatgatagatgcc

SEQ ID NO: 63890 - DNA, 30 bp, Artificial Sequence
  Synthetic oligonucleotide
gagcgctggctacgagaagaaatgactgcc

SEQ ID NO: 63891 - DNA, 30 bp, Artificial Sequence
  Synthetic oligonucleotide
gattggacgacaaaagtgggtgaatctgcc

SEQ ID NO: 63892 - DNA, 30 bp, Artificial Sequence
  Synthetic oligonucleotide
agacgtacgagccctataatacaacgtgcc

SEQ ID NO: 63893 - DNA, 30 bp, Artificial Sequence
  Synthetic oligonucleotide
ggcttggaatgtctgatgaccctgggtgcc

SEQ ID NO: 63894 - DNA, 30 bp, Artificial Sequence
  Synthetic oligonucleotide
acggggcgaatccccacaggttaatgtgcc

SEQ ID NO: 63895 - DNA, 30 bp, Artificial Sequence
  Synthetic oligonucleotide
ggcgaagctccccatgctgtgtgctgtgcc

SEQ ID NO: 63896 - DNA, 30 bp, Artificial Sequence
  Synthetic oligonucleotide
aagtgagtgtaagccaaacctggcgttgcc

SEQ ID NO: 63897 - DNA, 30 bp, Artificial Sequence
  Synthetic oligonucleotide
accattaaggtgtgtacacaaatcgttgcc

SEQ ID NO: 63898 - DNA, 30 bp, Artificial Sequence
  Synthetic oligonucleotide
aaagcggtccgtgggtggataacatttgcc

SEQ ID NO: 63899 - DNA, 30 bp, Artificial Sequence
  Synthetic oligonucleotide
tcgatcagcatcactgagaagcattttgcc

SEQ ID NO: 63900 - DNA, 30 bp, Artificial Sequence
  Synthetic oligonucleotide
ccagcagaagagcgcgtgtgccacaaatcc

SEQ ID NO: 63901 - DNA, 30 bp, Artificial Sequence
  Synthetic oligonucleotide
taagtaatcgaaactagcatagcccaatcc

SEQ ID NO: 63902 - DNA, 30 bp, Artificial Sequence
  Synthetic oligonucleotide
ctacgcgaagtgactgatcagagccaatcc

SEQ ID NO: 63903 - DNA, 30 bp, Artificial Sequence
  Synthetic oligonucleotide
cggtatccgagtagtaaagagatcgaatcc

SEQ ID NO: 63904 - DNA, 30 bp, Artificial Sequence
  Synthetic oligonucleotide
gtagcgataagaacatgctcccgcgcatcc

SEQ ID NO: 63905 - DNA, 30 bp, Artificial Sequence
  Synthetic oligonucleotide
acgagagacaaaccatggcgcagaagatcc

SEQ ID NO: 63906 - DNA, 30 bp, Artificial Sequence
  Synthetic oligonucleotide
taacgtgagtaagggccatctgtgcgatcc

SEQ ID NO: 63907 - DNA, 30 bp, Artificial Sequence
  Synthetic oligonucleotide
gaggggcgaaactgcaatgaggacggatcc

SEQ ID NO: 63908 - DNA, 30 bp, Artificial Sequence
  Synthetic oligonucleotide
cgacatgggtgtatgagtgcaccctgatcc

SEQ ID NO: 63909 - DNA, 30 bp, Artificial Sequence
  Synthetic oligonucleotide
tcgtaatgatcaactaactcgcgaccctcc

SEQ ID NO: 63910 - DNA, 30 bp, Artificial Sequence
  Synthetic oligonucleotide
gaccgatgtgtcgccgaagggataccctcc

SEQ ID NO: 63911 - DNA, 30 bp, Artificial Sequence
  Synthetic oligonucleotide
acgaaggaagggtaatccgtagtcgcctcc

SEQ ID NO: 63912 - DNA, 30 bp, Artificial Sequence
  Synthetic oligonucleotide
agcggcgctatgtcgactaacttctcctcc

SEQ ID NO: 63913 - DNA, 31 bp, Artificial Sequence
  Synthetic oligonucleotide
tagcgaagtgcggcctagagaaagcagctcc

SEQ ID NO: 63914 - DNA, 30 bp, Artificial Sequence
  Synthetic oligonucleotide
atcttagtagactcagagtccggcagctcc

SEQ ID NO: 63915 - DNA, 30 bp, Artificial Sequence
  Synthetic oligonucleotide
gtgcgtatcaaacaacacatgcgatgctcc

SEQ ID NO: 63916 - DNA, 30 bp, Artificial Sequence
  Synthetic oligonucleotide
gtatcaagcacaatcaccacttactgctcc

SEQ ID NO: 63917 - DNA, 30 bp, Artificial Sequence
  Synthetic oligonucleotide
aacgtcttagagtagaaagtgatgtgctcc

SEQ ID NO: 63918 - DNA, 30 bp, Artificial Sequence
  Synthetic oligonucleotide
tacgcgtccgaaaagaaacggctgctctcc

SEQ ID NO: 63919 - DNA, 30 bp, Artificial Sequence
  Synthetic oligonucleotide
gtccgaactgtagatacacttccaaagtcc

SEQ ID NO: 63920 - DNA, 30 bp, Artificial Sequence
  Synthetic oligonucleotide
agagcacgagatgttgacgcatacaagtcc

SEQ ID NO: 63921 - DNA, 30 bp, Artificial Sequence
  Synthetic oligonucleotide
gggcacacttcagaacggcgacccaagtcc

SEQ ID NO: 63922 - DNA, 30 bp, Artificial Sequence
  Synthetic oligonucleotide
tgcgggccgaaatagtgcgtggtcaagtcc

SEQ ID NO: 63923 - DNA, 30 bp, Artificial Sequence
  Synthetic oligonucleotide
gtgggtcgtccggacaaatatcagaagtcc

SEQ ID NO: 63924 - DNA, 30 bp, Artificial Sequence
  Synthetic oligonucleotide
aagatgtacgtgaccccggtcgagcagtcc

SEQ ID NO: 63925 - DNA, 30 bp, Artificial Sequence
  Synthetic oligonucleotide
ccctgaaacgggaataccaacccaccgtcc

SEQ ID NO: 63926 - DNA, 30 bp, Artificial Sequence
  Synthetic oligonucleotide
tcacgtacagtgagttcgtggcccccgtcc

SEQ ID NO: 63927 - DNA, 30 bp, Artificial Sequence
  Synthetic oligonucleotide
aagtaaacagcagctgatgtgatagcgtcc

SEQ ID NO: 63928 - DNA, 30 bp, Artificial Sequence
  Synthetic oligonucleotide
tcacggggggaaaataaattggtcgcgtcc

SEQ ID NO: 63929 - DNA, 30 bp, Artificial Sequence
  Synthetic oligonucleotide
acctaccagcatcaaaaaacctaggcgtcc

SEQ ID NO: 63930 - DNA, 30 bp, Artificial Sequence
  Synthetic oligonucleotide
cctcacatcgcacgagataagcatgggtcc

SEQ ID NO: 63931 - DNA, 30 bp, Artificial Sequence
  Synthetic oligonucleotide
tggaacagggatgtaagaccggatgggtcc

SEQ ID NO: 63932 - DNA, 30 bp, Artificial Sequence
  Synthetic oligonucleotide
agcaacatctagccaaacccagagtggtcc

SEQ ID NO: 63933 - DNA, 30 bp, Artificial Sequence
  Synthetic oligonucleotide
ctgcatactatgattcaagtgtcgtggtcc

SEQ ID NO: 63934 - DNA, 30 bp, Artificial Sequence
  Synthetic oligonucleotide
catgaaacgacaacaaatctgggattgtcc

SEQ ID NO: 63935 - DNA, 30 bp, Artificial Sequence
  Synthetic oligonucleotide
cggagctacctggctggaaggcatgcttcc

SEQ ID NO: 63936 - DNA, 30 bp, Artificial Sequence
  Synthetic oligonucleotide
ccacgtccacgctacaaagggggtggttcc

SEQ ID NO: 63937 - DNA, 30 bp, Artificial Sequence
  Synthetic oligonucleotide
tcggcgatagcgtgtagcggtgggtgttcc

SEQ ID NO: 63938 - DNA, 30 bp, Artificial Sequence
  Synthetic oligonucleotide
caaaagagcactctgatcaccggaaaaagc

SEQ ID NO: 63939 - DNA, 30 bp, Artificial Sequence
  Synthetic oligonucleotide
gcttagttagcacgctcgtccaccaaaagc

SEQ ID NO: 63940 - DNA, 30 bp, Artificial Sequence
  Synthetic oligonucleotide
agagaatccaaatcgctctgtgcacaaagc

SEQ ID NO: 63941 - DNA, 30 bp, Artificial Sequence
  Synthetic oligonucleotide
gacttagcatcccaaggagtattacaaagc

SEQ ID NO: 63942 - DNA, 30 bp, Artificial Sequence
  Synthetic oligonucleotide
tttaaccagcctgagagcaaggtagaaagc

SEQ ID NO: 63943 - DNA, 30 bp, Artificial Sequence
  Synthetic oligonucleotide
tacgttgggggcccaatcaagacggaaagc

SEQ ID NO: 63944 - DNA, 30 bp, Artificial Sequence
  Synthetic oligonucleotide
cccgcgagaagaatagcttctgcctaaagc

SEQ ID NO: 63945 - DNA, 30 bp, Artificial Sequence
  Synthetic oligonucleotide
gatagctcgtccatcaaggtgaagtaaagc

SEQ ID NO: 63946 - DNA, 30 bp, Artificial Sequence
  Synthetic oligonucleotide
gagcaactacgaaatccacagcctacaagc

SEQ ID NO: 63947 - DNA, 30 bp, Artificial Sequence
  Synthetic oligonucleotide
cccaacgcatccgaccagatgggtacaagc

SEQ ID NO: 63948 - DNA, 30 bp, Artificial Sequence
  Synthetic oligonucleotide
atcacgtgcgggtcgggatgtcttacaagc

SEQ ID NO: 63949 - DNA, 30 bp, Artificial Sequence
  Synthetic oligonucleotide
ggatggacgagggcgtaagtagcgagaagc

SEQ ID NO: 63950 - DNA, 30 bp, Artificial Sequence
  Synthetic oligonucleotide
gaatggatctatcaggagacaatgagaagc

SEQ ID NO: 63951 - DNA, 30 bp, Artificial Sequence
  Synthetic oligonucleotide
gaggtcccgtggagccaacgaaatagaagc

SEQ ID NO: 63952 - DNA, 30 bp, Artificial Sequence
  Synthetic oligonucleotide
acagccggaatcggtactgttcgacgaagc

SEQ ID NO: 63953 - DNA, 30 bp, Artificial Sequence
  Synthetic oligonucleotide
gggtagtattaagcgggtgtcagtcgaagc

SEQ ID NO: 63954 - DNA, 30 bp, Artificial Sequence
  Synthetic oligonucleotide
cgaatggggattgcaagatacgttggaagc

SEQ ID NO: 63955 - DNA, 30 bp, Artificial Sequence
  Synthetic oligonucleotide
gggcgatttcgacaagcttaggttggaagc

SEQ ID NO: 63956 - DNA, 30 bp, Artificial Sequence
  Synthetic oligonucleotide
acgatgagcgatgaaaagcggtcctgaagc

SEQ ID NO: 63957 - DNA, 30 bp, Artificial Sequence
  Synthetic oligonucleotide
acgtggcctatataacgatcttcaataagc

SEQ ID NO: 63958 - DNA, 30 bp, Artificial Sequence
  Synthetic oligonucleotide
ctcgagtcgaggttgcgtcgggggataagc

SEQ ID NO: 63959 - DNA, 30 bp, Artificial Sequence
  Synthetic oligonucleotide
ttagaggacgtggaccctatagatataagc

SEQ ID NO: 63960 - DNA, 30 bp, Artificial Sequence
  Synthetic oligonucleotide
tcggaagtataaatccggacgccagtaagc

SEQ ID NO: 63961 - DNA, 30 bp, Artificial Sequence
  Synthetic oligonucleotide
cgagtctatatagaaacctcgaccgtaagc

SEQ ID NO: 63962 - DNA, 30 bp, Artificial Sequence
  Synthetic oligonucleotide
tggataccattctccagtaagtgattaagc

SEQ ID NO: 63963 - DNA, 30 bp, Artificial Sequence
  Synthetic oligonucleotide
atcgaggttaggagccgcaaaaggttaagc

SEQ ID NO: 63964 - DNA, 30 bp, Artificial Sequence
  Synthetic oligonucleotide
taggagttgggaccgtgcgcgctaaacagc

SEQ ID NO: 63965 - DNA, 30 bp, Artificial Sequence
  Synthetic oligonucleotide
ggaaaacaccgtgtgaagatctgcaacagc

SEQ ID NO: 63966 - DNA, 30 bp, Artificial Sequence
  Synthetic oligonucleotide
agaacttagcaagccagggattagcacagc

SEQ ID NO: 63967 - DNA, 30 bp, Artificial Sequence
  Synthetic oligonucleotide
atcgacacgacacgatacaggtcgtacagc

SEQ ID NO: 63968 - DNA, 30 bp, Artificial Sequence
  Synthetic oligonucleotide
atggagcgcatttgtgaccacaaccccagc

SEQ ID NO: 63969 - DNA, 30 bp, Artificial Sequence
  Synthetic oligonucleotide
ccatgcttcttcacggcatcaagggccagc

SEQ ID NO: 63970 - DNA, 30 bp, Artificial Sequence
  Synthetic oligonucleotide
acttgcgagtctaatacgtaagtccgcagc

SEQ ID NO: 63971 - DNA, 30 bp, Artificial Sequence
  Synthetic oligonucleotide
ctacgtatcatgacagtaccaactcgcagc

SEQ ID NO: 63972 - DNA, 30 bp, Artificial Sequence
  Synthetic oligonucleotide
gaatgtacttaaggcccgaaatttcgcagc

SEQ ID NO: 63973 - DNA, 30 bp, Artificial Sequence
  Synthetic oligonucleotide
ctgtaaatcagccctctggtaacatgcagc

SEQ ID NO: 63974 - DNA, 30 bp, Artificial Sequence
  Synthetic oligonucleotide
gggggtgaagtcgacaacagactatgcagc

SEQ ID NO: 63975 - DNA, 30 bp, Artificial Sequence
  Synthetic oligonucleotide
ttatgcggaccggtcgtggagaagatcagc

SEQ ID NO: 63976 - DNA, 30 bp, Artificial Sequence
  Synthetic oligonucleotide
aggaaaatctccgcgtcgggctggatcagc

SEQ ID NO: 63977 - DNA, 30 bp, Artificial Sequence
  Synthetic oligonucleotide
cgtcgcatattcccacgttgcgatatcagc

SEQ ID NO: 63978 - DNA, 30 bp, Artificial Sequence
  Synthetic oligonucleotide
cctgcgcgaataaacgtaagcgtggtcagc

SEQ ID NO: 63979 - DNA, 30 bp, Artificial Sequence
  Synthetic oligonucleotide
agagtgtaacggctagaggtccgattcagc

SEQ ID NO: 63980 - DNA, 30 bp, Artificial Sequence
  Synthetic oligonucleotide
agtcaaccggaatccaggcccctgttcagc

SEQ ID NO: 63981 - DNA, 30 bp, Artificial Sequence
  Synthetic oligonucleotide
acgctacataagttataaggaggtttcagc

SEQ ID NO: 63982 - DNA, 31 bp, Artificial Sequence
  Synthetic oligonucleotide
tgcggacaagacaggtgtttgcgagaagagc

SEQ ID NO: 63983 - DNA, 30 bp, Artificial Sequence
  Synthetic oligonucleotide
gggcacttgctggctcagatgtgacagagc

SEQ ID NO: 63984 - DNA, 30 bp, Artificial Sequence
  Synthetic oligonucleotide
ccgtatgcgcgtcaaaatcctcaggagagc

SEQ ID NO: 63985 - DNA, 30 bp, Artificial Sequence
  Synthetic oligonucleotide
cgggtagattcgtcggtgtaatcggagagc

SEQ ID NO: 63986 - DNA, 30 bp, Artificial Sequence
  Synthetic oligonucleotide
aggatagcttaaccgccatacctggagagc

SEQ ID NO: 63987 - DNA, 30 bp, Artificial Sequence
  Synthetic oligonucleotide
tcaatgaatagacttcttcctcaaacgagc

SEQ ID NO: 63988 - DNA, 30 bp, Artificial Sequence
  Synthetic oligonucleotide
ctccagatatcgtactacaacgatccgagc

SEQ ID NO: 63989 - DNA, 30 bp, Artificial Sequence
  Synthetic oligonucleotide
gggaccatctccaaccagggaccgtcgagc

SEQ ID NO: 63990 - DNA, 30 bp, Artificial Sequence
  Synthetic oligonucleotide
cggaactacaaacccggaatagaccggagc

SEQ ID NO: 63991 - DNA, 30 bp, Artificial Sequence
  Synthetic oligonucleotide
atagctaaaccacaatacgggtagcggagc

SEQ ID NO: 63992 - DNA, 30 bp, Artificial Sequence
  Synthetic oligonucleotide
gcattacgttgcgaaagcaccagagggagc

SEQ ID NO: 63993 - DNA, 30 bp, Artificial Sequence
  Synthetic oligonucleotide
tgcatacagtgcggttgagatgacgggagc

SEQ ID NO: 63994 - DNA, 30 bp, Artificial Sequence
  Synthetic oligonucleotide
cgggaggtcaagggctcattttgctggagc

SEQ ID NO: 63995 - DNA, 30 bp, Artificial Sequence
  Synthetic oligonucleotide
gcgacactactcccaagggtgtgcctgagc

SEQ ID NO: 63996 - DNA, 30 bp, Artificial Sequence
  Synthetic oligonucleotide
tagtgggccagtacaggagctgtaaatagc

SEQ ID NO: 63997 - DNA, 30 bp, Artificial Sequence
  Synthetic oligonucleotide
ggtctcaaacacatttcttaacataatagc

SEQ ID NO: 63998 - DNA, 30 bp, Artificial Sequence
  Synthetic oligonucleotide
tagtaccaggaaatagggcattcccatagc

SEQ ID NO: 63999 - DNA, 30 bp, Artificial Sequence
  Synthetic oligonucleotide
ctgcgaggtgagcttgcaccggaatatagc

SEQ ID NO: 64000 - DNA, 30 bp, Artificial Sequence
  Synthetic oligonucleotide
cgtggctagcccactggtgcgtccactagc

SEQ ID NO: 64001 - DNA, 30 bp, Artificial Sequence
  Synthetic oligonucleotide
tgtaacatagcatgagttactcagactagc

SEQ ID NO: 64002 - DNA, 30 bp, Artificial Sequence
  Synthetic oligonucleotide
aacacaaccaggggaaaaaacaatgctagc

SEQ ID NO: 64003 - DNA, 30 bp, Artificial Sequence
  Synthetic oligonucleotide
cacaaagaacacaggacgcctcattctagc

SEQ ID NO: 64004 - DNA, 29 bp, Artificial Sequence
  Synthetic oligonucleotide
acacaagcatttggtatctgaaaagtagc

SEQ ID NO: 64005 - DNA, 30 bp, Artificial Sequence
  Synthetic oligonucleotide
ggaccagggatttacaatagcgtaagtagc

SEQ ID NO: 64006 - DNA, 30 bp, Artificial Sequence
  Synthetic oligonucleotide
actcaaatcacttgaggctacgagagtagc

SEQ ID NO: 64007 - DNA, 30 bp, Artificial Sequence
  Synthetic oligonucleotide
gctggaaggatagctctgtgtcggagtagc

SEQ ID NO: 64008 - DNA, 30 bp, Artificial Sequence
  Synthetic oligonucleotide
tgtgaagtgcgtgcccagaagcaacgtagc

SEQ ID NO: 64009 - DNA, 30 bp, Artificial Sequence
  Synthetic oligonucleotide
tcgaatgcaaccgaagcatagtcgcgtagc

SEQ ID NO: 64010 - DNA, 30 bp, Artificial Sequence
  Synthetic oligonucleotide
acgtggaaaaagtctcatctttgtcgtagc

SEQ ID NO: 64011 - DNA, 30 bp, Artificial Sequence
  Synthetic oligonucleotide
ggggtaaaaaacgccaatccattaggtagc

SEQ ID NO: 64012 - DNA, 30 bp, Artificial Sequence
  Synthetic oligonucleotide
acactaggcgtgccgggttccactggtagc

SEQ ID NO: 64013 - DNA, 30 bp, Artificial Sequence
  Synthetic oligonucleotide
tgcaaaaggttcgtcatgcatcggattagc

SEQ ID NO: 64014 - DNA, 30 bp, Artificial Sequence
  Synthetic oligonucleotide
gccaccaatacatcgggaacggaagttagc

SEQ ID NO: 64015 - DNA, 30 bp, Artificial Sequence
  Synthetic oligonucleotide
gcggagctagcagcaaatagatagaaacgc

SEQ ID NO: 64016 - DNA, 31 bp, Artificial Sequence
  Synthetic oligonucleotide
aagggtcgatgtcgtatgggcgaccgcacgc

SEQ ID NO: 64017 - DNA, 30 bp, Artificial Sequence
  Synthetic oligonucleotide
agggcaaaaccggtaacaggatcggcacgc

SEQ ID NO: 64018 - DNA, 30 bp, Artificial Sequence
  Synthetic oligonucleotide
cgggcatatataccacgtaagggtgcacgc

SEQ ID NO: 64019 - DNA, 30 bp, Artificial Sequence
  Synthetic oligonucleotide
caaggcacagggctttgaataattatacgc

SEQ ID NO: 64020 - DNA, 30 bp, Artificial Sequence
  Synthetic oligonucleotide
aaggttgaacgacaaaaagacacactacgc

SEQ ID NO: 64021 - DNA, 30 bp, Artificial Sequence
  Synthetic oligonucleotide
cagggcgcaatacgtcaactaacaacccgc

SEQ ID NO: 64022 - DNA, 30 bp, Artificial Sequence
  Synthetic oligonucleotide
acgcacatcgccctacttaaagatacccgc

SEQ ID NO: 64023 - DNA, 30 bp, Artificial Sequence
  Synthetic oligonucleotide
cgaactgagtgataaatatttttagcccgc

SEQ ID NO: 64024 - DNA, 30 bp, Artificial Sequence
  Synthetic oligonucleotide
gtaccgcaatcgcacatattaagcgcccgc

SEQ ID NO: 64025 - DNA, 30 bp, Artificial Sequence
  Synthetic oligonucleotide
tcccatgaatcatgaaaaagaagtgcccgc

SEQ ID NO: 64026 - DNA, 30 bp, Artificial Sequence
  Synthetic oligonucleotide
gaacacgggcgaagaggtcacacgtcccgc

SEQ ID NO: 64027 - DNA, 30 bp, Artificial Sequence
  Synthetic oligonucleotide
acatatttgctatttcaatcacggtcccgc

SEQ ID NO: 64028 - DNA, 30 bp, Artificial Sequence
  Synthetic oligonucleotide
cccgagctagctccgtcagccgagggccgc

SEQ ID NO: 64029 - DNA, 30 bp, Artificial Sequence
  Synthetic oligonucleotide
acgttcgagttgtgtcagctttgcatccgc

SEQ ID NO: 64030 - DNA, 30 bp, Artificial Sequence
  Synthetic oligonucleotide
cgacggaccagtaagaggttaacgatccgc

SEQ ID NO: 64031 - DNA, 30 bp, Artificial Sequence
  Synthetic oligonucleotide
tgagggcgctggtattaaaccgaattccgc

SEQ ID NO: 64032 - DNA, 30 bp, Artificial Sequence
  Synthetic oligonucleotide
ttagtgcgtcacgggagaactcgattccgc

SEQ ID NO: 64033 - DNA, 30 bp, Artificial Sequence
  Synthetic oligonucleotide
agcctacaacgatcgcgaccgcctttccgc

SEQ ID NO: 64034 - DNA, 30 bp, Artificial Sequence
  Synthetic oligonucleotide
gcggctcgaacatcgagtgaaacccagcgc

SEQ ID NO: 64035 - DNA, 30 bp, Artificial Sequence
  Synthetic oligonucleotide
aagtcgagttatacttggaaccgaacgcgc

SEQ ID NO: 64036 - DNA, 30 bp, Artificial Sequence
  Synthetic oligonucleotide
atgccaaagtaagactagaacgtatcgcgc

SEQ ID NO: 64037 - DNA, 30 bp, Artificial Sequence
  Synthetic oligonucleotide
gaacggaacgtggggaatgttcaaaggcgc

SEQ ID NO: 64038 - DNA, 30 bp, Artificial Sequence
  Synthetic oligonucleotide
gctactaaggcaaaacgattcacaaggcgc

SEQ ID NO: 64039 - DNA, 30 bp, Artificial Sequence
  Synthetic oligonucleotide
cccttcaagatacccacaagatcgaggcgc

SEQ ID NO: 64040 - DNA, 30 bp, Artificial Sequence
  Synthetic oligonucleotide
aaggcagtatataacggaaaaacgatgcgc

SEQ ID NO: 64041 - DNA, 30 bp, Artificial Sequence
  Synthetic oligonucleotide
ggcacaacgaaatgttacaggggaaatcgc

SEQ ID NO: 64042 - DNA, 30 bp, Artificial Sequence
  Synthetic oligonucleotide
tgtaagatacgccaaaggtggcagcatcgc

SEQ ID NO: 64043 - DNA, 30 bp, Artificial Sequence
  Synthetic oligonucleotide
taaggtggcgcggtattatatgacgatcgc

SEQ ID NO: 64044 - DNA, 30 bp, Artificial Sequence
  Synthetic oligonucleotide
tcttaatacggggaagcctcggcggatcgc

SEQ ID NO: 64045 - DNA, 30 bp, Artificial Sequence
  Synthetic oligonucleotide
gtgtggtagggcccgtcacgtagggatcgc

SEQ ID NO: 64046 - DNA, 30 bp, Artificial Sequence
  Synthetic oligonucleotide
gcgcgcaaacgcttaaagggggaatatcgc

SEQ ID NO: 64047 - DNA, 30 bp, Artificial Sequence
  Synthetic oligonucleotide
tagaacaatggataggatgacttatatcgc

SEQ ID NO: 64048 - DNA, 30 bp, Artificial Sequence
  Synthetic oligonucleotide
aggcaatgagcgacccttcaagaaactcgc

SEQ ID NO: 64049 - DNA, 30 bp, Artificial Sequence
  Synthetic oligonucleotide
ctaatgtgaatggcagacacgatcactcgc

SEQ ID NO: 64050 - DNA, 30 bp, Artificial Sequence
  Synthetic oligonucleotide
gtgatggctgcaagacaaaaaacgcgtcgc

SEQ ID NO: 64051 - DNA, 30 bp, Artificial Sequence
  Synthetic oligonucleotide
tgctcccggagcgattgagacgactgtcgc

SEQ ID NO: 64052 - DNA, 30 bp, Artificial Sequence
  Synthetic oligonucleotide
tgagtcgagtcccaaggctacacgtgtcgc

SEQ ID NO: 64053 - DNA, 30 bp, Artificial Sequence
  Synthetic oligonucleotide
gggagtgggaaagcggctggcagttgtcgc

SEQ ID NO: 64054 - DNA, 30 bp, Artificial Sequence
  Synthetic oligonucleotide
taaaggatatacagttatccatgccttcgc

SEQ ID NO: 64055 - DNA, 30 bp, Artificial Sequence
  Synthetic oligonucleotide
aacttggaatggtgtgtggagtagcttcgc

SEQ ID NO: 64056 - DNA, 30 bp, Artificial Sequence
  Synthetic oligonucleotide
agggacatcgattcctaaaagaaggttcgc

SEQ ID NO: 64057 - DNA, 30 bp, Artificial Sequence
  Synthetic oligonucleotide
ggacataaccagggagtcagaagttttcgc

SEQ ID NO: 64058 - DNA, 30 bp, Artificial Sequence
  Synthetic oligonucleotide
cctcttgggcccagtcacatcaagaaaggc

SEQ ID NO: 64059 - DNA, 30 bp, Artificial Sequence
  Synthetic oligonucleotide
acaaagcattgcgaatcggggcgacaaggc

SEQ ID NO: 64060 - DNA, 30 bp, Artificial Sequence
  Synthetic oligonucleotide
tgggaatgactaagtgctactcggcaaggc

SEQ ID NO: 64061 - DNA, 30 bp, Artificial Sequence
  Synthetic oligonucleotide
acactatctgcagataggaactggcaaggc

SEQ ID NO: 64062 - DNA, 30 bp, Artificial Sequence
  Synthetic oligonucleotide
atcaggcaatcccagcgtcgagcaacaggc

SEQ ID NO: 64063 - DNA, 30 bp, Artificial Sequence
  Synthetic oligonucleotide
cggcaacgccatatcgcgacgtcaccaggc

SEQ ID NO: 64064 - DNA, 30 bp, Artificial Sequence
  Synthetic oligonucleotide
agattcagggtgcacgggaactgcccaggc

SEQ ID NO: 64065 - DNA, 30 bp, Artificial Sequence
  Synthetic oligonucleotide
tgcaacagagcccggaaaaagcatagaggc

SEQ ID NO: 64066 - DNA, 30 bp, Artificial Sequence
  Synthetic oligonucleotide
gtgaacatcagagggcgcgagtgcggaggc

SEQ ID NO: 64067 - DNA, 30 bp, Artificial Sequence
  Synthetic oligonucleotide
aagggggtggacactatttaactcggaggc

SEQ ID NO: 64068 - DNA, 31 bp, Artificial Sequence
  Synthetic oligonucleotide
cacgattcaacagcttcggccacctataggc

SEQ ID NO: 64069 - DNA, 30 bp, Artificial Sequence
  Synthetic oligonucleotide
gttcgaagattgacatcattatagctaggc

SEQ ID NO: 64070 - DNA, 31 bp, Artificial Sequence
  Synthetic oligonucleotide
ggggcaaacctgaaacatagtagcattaggc

SEQ ID NO: 64071 - DNA, 30 bp, Artificial Sequence
  Synthetic oligonucleotide
tcatgagggttgttcaacgcgaagttaggc

SEQ ID NO: 64072 - DNA, 30 bp, Artificial Sequence
  Synthetic oligonucleotide
ggtgagaatgtaggttaattgtcgttaggc

SEQ ID NO: 64073 - DNA, 30 bp, Artificial Sequence
  Synthetic oligonucleotide
acgcggtgagtcatccatggaaggttaggc

SEQ ID NO: 64074 - DNA, 30 bp, Artificial Sequence
  Synthetic oligonucleotide
cagcatactgaagatcagaagccacacggc

SEQ ID NO: 64075 - DNA, 30 bp, Artificial Sequence
  Synthetic oligonucleotide
gatgatggtcggtggatatccacgcacggc

SEQ ID NO: 64076 - DNA, 30 bp, Artificial Sequence
  Synthetic oligonucleotide
cgggcgggattcataactgtaactcacggc

SEQ ID NO: 64077 - DNA, 31 bp, Artificial Sequence
  Synthetic oligonucleotide
gctcatgcaaaaaaaaccactaagctccggc

SEQ ID NO: 64078 - DNA, 30 bp, Artificial Sequence
  Synthetic oligonucleotide
gtcggattgccgaggcataagaagtccggc

SEQ ID NO: 64079 - DNA, 30 bp, Artificial Sequence
  Synthetic oligonucleotide
tctaaagacaaaaacacgaaccgtagcggc

SEQ ID NO: 64080 - DNA, 30 bp, Artificial Sequence
  Synthetic oligonucleotide
cacgttgatagcgtcggtacaattagcggc

SEQ ID NO: 64081 - DNA, 29 bp, Artificial Sequence
  Synthetic oligonucleotide
actacacgacgagagttgagagttgcggc

SEQ ID NO: 64082 - DNA, 30 bp, Artificial Sequence
  Synthetic oligonucleotide
cactgcggacagcagtctagacggatcggc

SEQ ID NO: 64083 - DNA, 30 bp, Artificial Sequence
  Synthetic oligonucleotide
ggatgccggtgttatctagtcaaattcggc

SEQ ID NO: 64084 - DNA, 31 bp, Artificial Sequence
  Synthetic oligonucleotide
ggaccgttgacgttcaaaaaaatgattcggc

SEQ ID NO: 64085 - DNA, 30 bp, Artificial Sequence
  Synthetic oligonucleotide
tcaccgagaggaattgaatcacttttcggc

SEQ ID NO: 64086 - DNA, 31 bp, Artificial Sequence
  Synthetic oligonucleotide
atcagaaagccacgatctacggcggcagggc

SEQ ID NO: 64087 - DNA, 30 bp, Artificial Sequence
  Synthetic oligonucleotide
aggggacatccttaggttgcaagatagggc

SEQ ID NO: 64088 - DNA, 30 bp, Artificial Sequence
  Synthetic oligonucleotide
gggcaaccgagagcggattctagcacgggc

SEQ ID NO: 64089 - DNA, 30 bp, Artificial Sequence
  Synthetic oligonucleotide
cgaagaagaggttccagcagtagagcgggc

SEQ ID NO: 64090 - DNA, 30 bp, Artificial Sequence
  Synthetic oligonucleotide
acgaaaataacaaagggcccttggaggggc

SEQ ID NO: 64091 - DNA, 30 bp, Artificial Sequence
  Synthetic oligonucleotide
cgacagacgagggttggagtgtttctgggc

SEQ ID NO: 64092 - DNA, 30 bp, Artificial Sequence
  Synthetic oligonucleotide
acgacctagttatcaactcagcacgtgggc

SEQ ID NO: 64093 - DNA, 31 bp, Artificial Sequence
  Synthetic oligonucleotide
ttaaacaatcagagaagagtgtaataatggc

SEQ ID NO: 64094 - DNA, 30 bp, Artificial Sequence
  Synthetic oligonucleotide
cgagggttaagcgccgagggccaccatggc

SEQ ID NO: 64095 - DNA, 30 bp, Artificial Sequence
  Synthetic oligonucleotide
tgaacagcaaaatagctcacgacagatggc

SEQ ID NO: 64096 - DNA, 30 bp, Artificial Sequence
  Synthetic oligonucleotide
tccgacgatgattggaaaagctgtgatggc

SEQ ID NO: 64097 - DNA, 30 bp, Artificial Sequence
  Synthetic oligonucleotide
tctgtagaccgaagggcatggatttatggc

SEQ ID NO: 64098 - DNA, 30 bp, Artificial Sequence
  Synthetic oligonucleotide
ccagagttccgcatagcctaactgactggc

SEQ ID NO: 64099 - DNA, 30 bp, Artificial Sequence
  Synthetic oligonucleotide
gcgtcacgtggcgggacatctacccctggc

SEQ ID NO: 64100 - DNA, 30 bp, Artificial Sequence
  Synthetic oligonucleotide
tgcgcgatcgcataggaggtttcgtctggc

SEQ ID NO: 64101 - DNA, 30 bp, Artificial Sequence
  Synthetic oligonucleotide
gaactgtgcgtcatagtaagagggaaatgc

SEQ ID NO: 64102 - DNA, 31 bp, Artificial Sequence
  Synthetic oligonucleotide
cctcctggggtctagaactgcaccacaatgc

SEQ ID NO: 64103 - DNA, 30 bp, Artificial Sequence
  Synthetic oligonucleotide
gggaagcgtggcgactcaagagttcaatgc

SEQ ID NO: 64104 - DNA, 30 bp, Artificial Sequence
  Synthetic oligonucleotide
ggctggattggagatatgactatagaatgc

SEQ ID NO: 64105 - DNA, 30 bp, Artificial Sequence
  Synthetic oligonucleotide
tcgattacaaccttagaacggcgcgaatgc

SEQ ID NO: 64106 - DNA, 30 bp, Artificial Sequence
  Synthetic oligonucleotide
cgcacaacagtgcgtacaagccagtaatgc

SEQ ID NO: 64107 - DNA, 30 bp, Artificial Sequence
  Synthetic oligonucleotide
ccgcgcgaacgacataacctaaccccatgc

SEQ ID NO: 64108 - DNA, 30 bp, Artificial Sequence
  Synthetic oligonucleotide
cacgtgatgtctgaggatgtaattccatgc

SEQ ID NO: 64109 - DNA, 30 bp, Artificial Sequence
  Synthetic oligonucleotide
gttaagggcaacgtcgtactgcaagcatgc

SEQ ID NO: 64110 - DNA, 30 bp, Artificial Sequence
  Synthetic oligonucleotide
gtggagcgaatacccaatattctcgcatgc

SEQ ID NO: 64111 - DNA, 30 bp, Artificial Sequence
  Synthetic oligonucleotide
agcaggtaccgcccggtaacgacaagatgc

SEQ ID NO: 64112 - DNA, 30 bp, Artificial Sequence
  Synthetic oligonucleotide
gcacctcgaggaattgcgataagacgatgc

SEQ ID NO: 64113 - DNA, 30 bp, Artificial Sequence
  Synthetic oligonucleotide
aggtaccctgaagtaaccggtcggcgatgc

SEQ ID NO: 64114 - DNA, 30 bp, Artificial Sequence
  Synthetic oligonucleotide
caagaccgcaataacttagtcgagtgatgc

SEQ ID NO: 64115 - DNA, 30 bp, Artificial Sequence
  Synthetic oligonucleotide
agaacatcaatagcgtctgcattgtgatgc

SEQ ID NO: 64116 - DNA, 30 bp, Artificial Sequence
  Synthetic oligonucleotide
ccgcgtgaatatccttcaaagccactatgc

SEQ ID NO: 64117 - DNA, 30 bp, Artificial Sequence
  Synthetic oligonucleotide
cggtctttagggctacaaattagagtatgc

SEQ ID NO: 64118 - DNA, 30 bp, Artificial Sequence
  Synthetic oligonucleotide
gacgaactctgactacaaagtcccaactgc

SEQ ID NO: 64119 - DNA, 30 bp, Artificial Sequence
  Synthetic oligonucleotide
gacgacaccaggcacgtcggagcacactgc

SEQ ID NO: 64120 - DNA, 30 bp, Artificial Sequence
  Synthetic oligonucleotide
aggttagccagaagttgccacagctactgc

SEQ ID NO: 64121 - DNA, 30 bp, Artificial Sequence
  Synthetic oligonucleotide
gatcacatcccttgcctgaaatcgacctgc

SEQ ID NO: 64122 - DNA, 30 bp, Artificial Sequence
  Synthetic oligonucleotide
cagattgataggatccaataaccgtcctgc

SEQ ID NO: 64123 - DNA, 30 bp, Artificial Sequence
  Synthetic oligonucleotide
gggacactggactagtgttatgaaagctgc

SEQ ID NO: 64124 - DNA, 28 bp, Artificial Sequence
  Synthetic oligonucleotide
agcggcggagcgaacctagagaggctgc

SEQ ID NO: 64125 - DNA, 30 bp, Artificial Sequence
  Synthetic oligonucleotide
ggcttaccaagacatcaatgataaaagtgc

SEQ ID NO: 64126 - DNA, 30 bp, Artificial Sequence
  Synthetic oligonucleotide
ccgattgaaggtctagacgtgataaagtgc

SEQ ID NO: 64127 - DNA, 30 bp, Artificial Sequence
  Synthetic oligonucleotide
ggccgtttagggctgaagagtcataagtgc

SEQ ID NO: 64128 - DNA, 30 bp, Artificial Sequence
  Synthetic oligonucleotide
tagggaaattaagatccgccaatgcagtgc

SEQ ID NO: 64129 - DNA, 30 bp, Artificial Sequence
  Synthetic oligonucleotide
ggtcaccccatatcagcagcggtagagtgc

SEQ ID NO: 64130 - DNA, 30 bp, Artificial Sequence
  Synthetic oligonucleotide
cctggcttcaactacaaccgtgcggagtgc

SEQ ID NO: 64131 - DNA, 30 bp, Artificial Sequence
  Synthetic oligonucleotide
ccaatggtaccgtggatgtaggtttagtgc

SEQ ID NO: 64132 - DNA, 30 bp, Artificial Sequence
  Synthetic oligonucleotide
caaatacatcggtctgcgtagtgaacgtgc

SEQ ID NO: 64133 - DNA, 30 bp, Artificial Sequence
  Synthetic oligonucleotide
atatcgccgaaggggaatcaatgaccgtgc

SEQ ID NO: 64134 - DNA, 30 bp, Artificial Sequence
  Synthetic oligonucleotide
gttgtcgaagagatagtccacatggcgtgc

SEQ ID NO: 64135 - DNA, 30 bp, Artificial Sequence
  Synthetic oligonucleotide
tgacactcagagggtcctaatgctgcgtgc

SEQ ID NO: 64136 - DNA, 30 bp, Artificial Sequence
  Synthetic oligonucleotide
tggatgcgaagcacactaggactatcgtgc

SEQ ID NO: 64137 - DNA, 30 bp, Artificial Sequence
  Synthetic oligonucleotide
cacagaggcttaacgggagggtcaaggtgc

SEQ ID NO: 64138 - DNA, 30 bp, Artificial Sequence
  Synthetic oligonucleotide
tccgcaagatccctgccaatggataggtgc

SEQ ID NO: 64139 - DNA, 30 bp, Artificial Sequence
  Synthetic oligonucleotide
ataagtatgaagccgacgaagtataggtgc

SEQ ID NO: 64140 - DNA, 30 bp, Artificial Sequence
  Synthetic oligonucleotide
acaagcaacagagtaatagcctctaggtgc

SEQ ID NO: 64141 - DNA, 30 bp, Artificial Sequence
  Synthetic oligonucleotide
gggcaggtcagagacagaccacagcggtgc

SEQ ID NO: 64142 - DNA, 30 bp, Artificial Sequence
  Synthetic oligonucleotide
cctagtaaaggcgagcattttagagggtgc

SEQ ID NO: 64143 - DNA, 30 bp, Artificial Sequence
  Synthetic oligonucleotide
gcgtgcaatcctgaattggtcgaatggtgc

SEQ ID NO: 64144 - DNA, 30 bp, Artificial Sequence
  Synthetic oligonucleotide
tcggtgacatacctatccatcccatggtgc

SEQ ID NO: 64145 - DNA, 30 bp, Artificial Sequence
  Synthetic oligonucleotide
cttaagaagctaggggtcaatagcgtgtgc

SEQ ID NO: 64146 - DNA, 30 bp, Artificial Sequence
  Synthetic oligonucleotide
actacttgcggaacaaatgtgcgcgtgtgc

SEQ ID NO: 64147 - DNA, 30 bp, Artificial Sequence
  Synthetic oligonucleotide
agccttaaaaacgaataccgcctattgtgc

SEQ ID NO: 64148 - DNA, 30 bp, Artificial Sequence
  Synthetic oligonucleotide
aaggacatagttgttgaccgtattttgtgc

SEQ ID NO: 64149 - DNA, 30 bp, Artificial Sequence
  Synthetic oligonucleotide
gaaatgtcagcaagggtgcggaagaattgc

SEQ ID NO: 64150 - DNA, 30 bp, Artificial Sequence
  Synthetic oligonucleotide
cggcgatctatcgctggcccgaaccattgc

SEQ ID NO: 64151 - DNA, 30 bp, Artificial Sequence
  Synthetic oligonucleotide
atatggcggaaacactagcactttcattgc

SEQ ID NO: 64152 - DNA, 30 bp, Artificial Sequence
  Synthetic oligonucleotide
tatcataccaacatcacagtgatagattgc

SEQ ID NO: 64153 - DNA, 30 bp, Artificial Sequence
  Synthetic oligonucleotide
agcgaaaaatgttaggtatctccgtattgc

SEQ ID NO: 64154 - DNA, 30 bp, Artificial Sequence
  Synthetic oligonucleotide
gatatagcgaaggcgcctgaaagagcttgc

SEQ ID NO: 64155 - DNA, 30 bp, Artificial Sequence
  Synthetic oligonucleotide
taacgtaacgaattggaatggccttcttgc

SEQ ID NO: 64156 - DNA, 30 bp, Artificial Sequence
  Synthetic oligonucleotide
ccccgaataccgaccgaatctcatcgttgc

SEQ ID NO: 64157 - DNA, 30 bp, Artificial Sequence
  Synthetic oligonucleotide
caacgccgattaaggtgcccacgaggttgc

SEQ ID NO: 64158 - DNA, 30 bp, Artificial Sequence
  Synthetic oligonucleotide
gcacttggctgcgaccatgcaaaatgttgc

SEQ ID NO: 64159 - DNA, 30 bp, Artificial Sequence
  Synthetic oligonucleotide
tagaccacataatctgccacataatgttgc

SEQ ID NO: 64160 - DNA, 30 bp, Artificial Sequence
  Synthetic oligonucleotide
atggaccggacccgtgcgagaacgtgttgc

SEQ ID NO: 64161 - DNA, 30 bp, Artificial Sequence
  Synthetic oligonucleotide
ccgaactgagggtgtaccgcccatctttgc

SEQ ID NO: 64162 - DNA, 30 bp, Artificial Sequence
  Synthetic oligonucleotide
caacggagtataaggcaagttgcaaaaatc

SEQ ID NO: 64163 - DNA, 30 bp, Artificial Sequence
  Synthetic oligonucleotide
actaggacccaccaaaaaccggggacaatc

SEQ ID NO: 64164 - DNA, 30 bp, Artificial Sequence
  Synthetic oligonucleotide
tcgaggggctgatccgaggggcctccaatc

SEQ ID NO: 64165 - DNA, 30 bp, Artificial Sequence
  Synthetic oligonucleotide
accgccggccaccgagccttatgagcaatc

SEQ ID NO: 64166 - DNA, 30 bp, Artificial Sequence
  Synthetic oligonucleotide
ttaggcgaagctcatggacgccctgcaatc

SEQ ID NO: 64167 - DNA, 30 bp, Artificial Sequence
  Synthetic oligonucleotide
cccaatgaaatgtaggacgataactcaatc

SEQ ID NO: 64168 - DNA, 30 bp, Artificial Sequence
  Synthetic oligonucleotide
caacccgtcaagggggcttgggttcgaatc

SEQ ID NO: 64169 - DNA, 30 bp, Artificial Sequence
  Synthetic oligonucleotide
catgaaagtccacagggccctctgggaatc

SEQ ID NO: 64170 - DNA, 30 bp, Artificial Sequence
  Synthetic oligonucleotide
cagtaagagctacttaacaacgtatgaatc

SEQ ID NO: 64171 - DNA, 30 bp, Artificial Sequence
  Synthetic oligonucleotide
agaacgcgagtaggttcaggccgaataatc

SEQ ID NO: 64172 - DNA, 30 bp, Artificial Sequence
  Synthetic oligonucleotide
cataacgggaccatgaaatacactataatc

SEQ ID NO: 64173 - DNA, 30 bp, Artificial Sequence
  Synthetic oligonucleotide
ccatacagccattcaacaagcgcagtaatc

SEQ ID NO: 64174 - DNA, 30 bp, Artificial Sequence
  Synthetic oligonucleotide
tctgtaagcatggcattaagtgcggtaatc

SEQ ID NO: 64175 - DNA, 30 bp, Artificial Sequence
  Synthetic oligonucleotide
agggaatataacagtgttctagaaaacatc

SEQ ID NO: 64176 - DNA, 30 bp, Artificial Sequence
  Synthetic oligonucleotide
acaactgttgcgtaagactgacaaaccatc

SEQ ID NO: 64177 - DNA, 30 bp, Artificial Sequence
  Synthetic oligonucleotide
acagcgacgaattctgaaccaagcaccatc

SEQ ID NO: 64178 - DNA, 30 bp, Artificial Sequence
  Synthetic oligonucleotide
ggacccatagcaccagaaggacaagccatc

SEQ ID NO: 64179 - DNA, 30 bp, Artificial Sequence
  Synthetic oligonucleotide
ctcaaccctcgatctcgggacagcgccatc

SEQ ID NO: 64180 - DNA, 30 bp, Artificial Sequence
  Synthetic oligonucleotide
atagggccggaagcgttccgtgaaagcatc

SEQ ID NO: 64181 - DNA, 30 bp, Artificial Sequence
  Synthetic oligonucleotide
tccacctctaacccaaaaagatcaagcatc

SEQ ID NO: 64182 - DNA, 30 bp, Artificial Sequence
  Synthetic oligonucleotide
aggaagagttttcggcccagtcccagcatc

SEQ ID NO: 64183 - DNA, 30 bp, Artificial Sequence
  Synthetic oligonucleotide
gcaggagggacataagtttatctgagcatc

SEQ ID NO: 64184 - DNA, 30 bp, Artificial Sequence
  Synthetic oligonucleotide
acttggcggaaggcgaggaaatcacgcatc

SEQ ID NO: 64185 - DNA, 30 bp, Artificial Sequence
  Synthetic oligonucleotide
atggacagttgcgactggatcctccgcatc

SEQ ID NO: 64186 - DNA, 30 bp, Artificial Sequence
  Synthetic oligonucleotide
caaaggaagcaaacgttgtcaaactgcatc

SEQ ID NO: 64187 - DNA, 30 bp, Artificial Sequence
  Synthetic oligonucleotide
acacacgagaaaagctatgtgaaaatcatc

SEQ ID NO: 64188 - DNA, 31 bp, Artificial Sequence
  Synthetic oligonucleotide
cacgggcgagcccatttccattacagtcatc

SEQ ID NO: 64189 - DNA, 30 bp, Artificial Sequence
  Synthetic oligonucleotide
gcgaaagataatctaggaaccagcgtcatc

SEQ ID NO: 64190 - DNA, 30 bp, Artificial Sequence
  Synthetic oligonucleotide
gacagaaaggatcggagaggaggcgtcatc

SEQ ID NO: 64191 - DNA, 30 bp, Artificial Sequence
  Synthetic oligonucleotide
aggagctgaatccaagacttccagaagatc

SEQ ID NO: 64192 - DNA, 30 bp, Artificial Sequence
  Synthetic oligonucleotide
acaaggagggtatcgtacgcaacggagatc

SEQ ID NO: 64193 - DNA, 30 bp, Artificial Sequence
  Synthetic oligonucleotide
gtcgaatgtaaacctgactaaagttcgatc

SEQ ID NO: 64194 - DNA, 30 bp, Artificial Sequence
  Synthetic oligonucleotide
gctagcaacaaaatattggctatagtgatc

SEQ ID NO: 64195 - DNA, 30 bp, Artificial Sequence
  Synthetic oligonucleotide
gcggacgggcgacgagcaagccacttgatc

SEQ ID NO: 64196 - DNA, 30 bp, Artificial Sequence
  Synthetic oligonucleotide
cgaagagtcaaggggatataggcaaatatc

SEQ ID NO: 64197 - DNA, 30 bp, Artificial Sequence
  Synthetic oligonucleotide
tgcgaagcatggcaatatatccaacatatc

SEQ ID NO: 64198 - DNA, 30 bp, Artificial Sequence
  Synthetic oligonucleotide
aacccaagaaagagacaaaactgtcatatc

SEQ ID NO: 64199 - DNA, 30 bp, Artificial Sequence
  Synthetic oligonucleotide
cttggagtggcaatacacctcgaaactatc

SEQ ID NO: 64200 - DNA, 30 bp, Artificial Sequence
  Synthetic oligonucleotide
acaggctttacggtcgtaataaacactatc

SEQ ID NO: 64201 - DNA, 30 bp, Artificial Sequence
  Synthetic oligonucleotide
agcaaggcggtccacagcttccgatctatc

SEQ ID NO: 64202 - DNA, 30 bp, Artificial Sequence
  Synthetic oligonucleotide
gcaagcgccaatgggtacaatccgtctatc

SEQ ID NO: 64203 - DNA, 30 bp, Artificial Sequence
  Synthetic oligonucleotide
aggggtaagcaatgttcgactgagcgtatc

SEQ ID NO: 64204 - DNA, 30 bp, Artificial Sequence
  Synthetic oligonucleotide
cagtagagctgcagggtgggctggcttatc

SEQ ID NO: 64205 - DNA, 30 bp, Artificial Sequence
  Synthetic oligonucleotide
gcggacgatacgccatctgtaggcaaactc

SEQ ID NO: 64206 - DNA, 30 bp, Artificial Sequence
  Synthetic oligonucleotide
cagggcggagcaacagaggcaataacactc

SEQ ID NO: 64207 - DNA, 30 bp, Artificial Sequence
  Synthetic oligonucleotide
cggcgcgcaaagccccttgtattatcactc

SEQ ID NO: 64208 - DNA, 30 bp, Artificial Sequence
  Synthetic oligonucleotide
gtctacgtacaagcaaatatggagagactc

SEQ ID NO: 64209 - DNA, 30 bp, Artificial Sequence
  Synthetic oligonucleotide
acgcaaaaaagcgacaccatgatacgactc

SEQ ID NO: 64210 - DNA, 30 bp, Artificial Sequence
  Synthetic oligonucleotide
aagtgaagaggcgttaaaccagtaatactc

SEQ ID NO: 64211 - DNA, 30 bp, Artificial Sequence
  Synthetic oligonucleotide
cactaagtaaggaagaaagccaccatactc

SEQ ID NO: 64212 - DNA, 30 bp, Artificial Sequence
  Synthetic oligonucleotide
tgatgcccaattgtgcgtacacggatactc

SEQ ID NO: 64213 - DNA, 30 bp, Artificial Sequence
  Synthetic oligonucleotide
agggatctatcagcggtcgaacggctactc

SEQ ID NO: 64214 - DNA, 30 bp, Artificial Sequence
  Synthetic oligonucleotide
tgatctacaacgaaggtctgcggtctactc

SEQ ID NO: 64215 - DNA, 30 bp, Artificial Sequence
  Synthetic oligonucleotide
gcaaaaaaagaacaggggtagtaggtactc

SEQ ID NO: 64216 - DNA, 30 bp, Artificial Sequence
  Synthetic oligonucleotide
caattaataagaaacatgagtgttgtactc

SEQ ID NO: 64217 - DNA, 30 bp, Artificial Sequence
  Synthetic oligonucleotide
acaacaaatcaaaggtgtcatcaattactc

SEQ ID NO: 64218 - DNA, 30 bp, Artificial Sequence
  Synthetic oligonucleotide
ggggatcgggtatccctgcgagtgcacctc

SEQ ID NO: 64219 - DNA, 30 bp, Artificial Sequence
  Synthetic oligonucleotide
taagggggcactaatagatcagaaaccctc

SEQ ID NO: 64220 - DNA, 30 bp, Artificial Sequence
  Synthetic oligonucleotide
tccacgtgatctggacattgactaagcctc

SEQ ID NO: 64221 - DNA, 30 bp, Artificial Sequence
  Synthetic oligonucleotide
gcagtcacagatgtgtgaacgactagcctc

SEQ ID NO: 64222 - DNA, 30 bp, Artificial Sequence
  Synthetic oligonucleotide
cgggatcacagccgattcaatagccgcctc

SEQ ID NO: 64223 - DNA, 30 bp, Artificial Sequence
  Synthetic oligonucleotide
atcgtaaaaattgaagagatggaaggcctc

SEQ ID NO: 64224 - DNA, 30 bp, Artificial Sequence
  Synthetic oligonucleotide
cgtccctctcttacacaagggctaggcctc

SEQ ID NO: 64225 - DNA, 30 bp, Artificial Sequence
  Synthetic oligonucleotide
gagataagaggggtggcaacggaatgcctc

SEQ ID NO: 64226 - DNA, 30 bp, Artificial Sequence
  Synthetic oligonucleotide
acagaattaccaggtggggaagccctcctc

SEQ ID NO: 64227 - DNA, 30 bp, Artificial Sequence
  Synthetic oligonucleotide
cgttcggtaaacgttagaaattttcagctc

SEQ ID NO: 64228 - DNA, 30 bp, Artificial Sequence
  Synthetic oligonucleotide
cggataccaagggattagatggcagagctc

SEQ ID NO: 64229 - DNA, 30 bp, Artificial Sequence
  Synthetic oligonucleotide
gacctagagtgcggacaatagggagagctc

SEQ ID NO: 64230 - DNA, 30 bp, Artificial Sequence
  Synthetic oligonucleotide
taataggaacctacattgaggagtgagctc

SEQ ID NO: 64231 - DNA, 30 bp, Artificial Sequence
  Synthetic oligonucleotide
gtcgattggacaataggagcccgaacgctc

SEQ ID NO: 64232 - DNA, 30 bp, Artificial Sequence
  Synthetic oligonucleotide
tccaaggggagattgatacgagtaacgctc

SEQ ID NO: 64233 - DNA, 30 bp, Artificial Sequence
  Synthetic oligonucleotide
cgacgaaaacactccggaacgaactcgctc

SEQ ID NO: 64234 - DNA, 30 bp, Artificial Sequence
  Synthetic oligonucleotide
tgtatgagtaaccggagtatcgataggctc

SEQ ID NO: 64235 - DNA, 30 bp, Artificial Sequence
  Synthetic oligonucleotide
caaaatcccagcgaaatcattaatgggctc

SEQ ID NO: 64236 - DNA, 30 bp, Artificial Sequence
  Synthetic oligonucleotide
aaatgacaaaggccgaagagtgacatgctc

SEQ ID NO: 64237 - DNA, 30 bp, Artificial Sequence
  Synthetic oligonucleotide
ggatcgtcgataaccccaagcttcatgctc

SEQ ID NO: 64238 - DNA, 30 bp, Artificial Sequence
  Synthetic oligonucleotide
acgcaaacttggcatggatataggctgctc

SEQ ID NO: 64239 - DNA, 30 bp, Artificial Sequence
  Synthetic oligonucleotide
acggtgggacgaagaacgatcttgttgctc

SEQ ID NO: 64240 - DNA, 30 bp, Artificial Sequence
  Synthetic oligonucleotide
agggcagaggccgaatgtaccgatttgctc

SEQ ID NO: 64241 - DNA, 30 bp, Artificial Sequence
  Synthetic oligonucleotide
cgcactggactaccggaggaggcgaatctc

SEQ ID NO: 64242 - DNA, 30 bp, Artificial Sequence
  Synthetic oligonucleotide
cggcaacagtgtgaaacgagttatcatctc

SEQ ID NO: 64243 - DNA, 30 bp, Artificial Sequence
  Synthetic oligonucleotide
agggtttcaggcaaagggatcagtcatctc

SEQ ID NO: 64244 - DNA, 30 bp, Artificial Sequence
  Synthetic oligonucleotide
agaagccacgcgtctgcagtacacgatctc

SEQ ID NO: 64245 - DNA, 30 bp, Artificial Sequence
  Synthetic oligonucleotide
gtagagtgaggagattagggagccgatctc

SEQ ID NO: 64246 - DNA, 30 bp, Artificial Sequence
  Synthetic oligonucleotide
ccacatcgtgtgtgtaaggactgggatctc

SEQ ID NO: 64247 - DNA, 30 bp, Artificial Sequence
  Synthetic oligonucleotide
gggaacaaaaggttgtcaaggaatgctctc

SEQ ID NO: 64248 - DNA, 30 bp, Artificial Sequence
  Synthetic oligonucleotide
tcgcctgaagcctaaagggtaccatctctc

SEQ ID NO: 64249 - DNA, 30 bp, Artificial Sequence
  Synthetic oligonucleotide
tgctgaataggagagatgggtccaggtctc

SEQ ID NO: 64250 - DNA, 30 bp, Artificial Sequence
  Synthetic oligonucleotide
tgaaccgagacggtttggacgctaggtctc

SEQ ID NO: 64251 - DNA, 30 bp, Artificial Sequence
  Synthetic oligonucleotide
ccgcggaactgaaaatacaagaagattctc

SEQ ID NO: 64252 - DNA, 30 bp, Artificial Sequence
  Synthetic oligonucleotide
cgagacagcgttttgggcggtagtgttctc

SEQ ID NO: 64253 - DNA, 30 bp, Artificial Sequence
  Synthetic oligonucleotide
aacgggccacaatgcgtgtgaacgtttctc

SEQ ID NO: 64254 - DNA, 29 bp, Artificial Sequence
  Synthetic oligonucleotide
atggtcccgaaacggaaagttggtttctc

SEQ ID NO: 64255 - DNA, 30 bp, Artificial Sequence
  Synthetic oligonucleotide
tcgatggcgaaagatagcgcaagtaaagtc

SEQ ID NO: 64256 - DNA, 30 bp, Artificial Sequence
  Synthetic oligonucleotide
acgcaatagagcgcacagggcgtacaagtc

SEQ ID NO: 64257 - DNA, 30 bp, Artificial Sequence
  Synthetic oligonucleotide
caggtcatctagcgggaaacagcccaagtc

SEQ ID NO: 64258 - DNA, 30 bp, Artificial Sequence
  Synthetic oligonucleotide
ctcaacagtcacgattagtcccgccaagtc

SEQ ID NO: 64259 - DNA, 30 bp, Artificial Sequence
  Synthetic oligonucleotide
atagaatagaaagaacgcaacatcgaagtc

SEQ ID NO: 64260 - DNA, 30 bp, Artificial Sequence
  Synthetic oligonucleotide
agaaaggcaacctactaacggaagtaagtc

SEQ ID NO: 64261 - DNA, 30 bp, Artificial Sequence
  Synthetic oligonucleotide
gggagtgattaaatgcgtagccttacagtc

SEQ ID NO: 64262 - DNA, 30 bp, Artificial Sequence
  Synthetic oligonucleotide
acaacagtggtggctggattcaactcagtc

SEQ ID NO: 64263 - DNA, 30 bp, Artificial Sequence
  Synthetic oligonucleotide
caacttataaacttaacaggggtaagagtc

SEQ ID NO: 64264 - DNA, 30 bp, Artificial Sequence
  Synthetic oligonucleotide
cataactagccaaggggatcgctcagagtc

SEQ ID NO: 64265 - DNA, 30 bp, Artificial Sequence
  Synthetic oligonucleotide
ttacgtaatatgataatgtcactgagagtc

SEQ ID NO: 64266 - DNA, 30 bp, Artificial Sequence
  Synthetic oligonucleotide
tggaaaaagcaaacacgccttcgcggagtc

SEQ ID NO: 64267 - DNA, 30 bp, Artificial Sequence
  Synthetic oligonucleotide
aacaaagcgcttaggtcacatgcgggagtc

SEQ ID NO: 64268 - DNA, 30 bp, Artificial Sequence
  Synthetic oligonucleotide
ccggcccggactaacagcaaatgatgagtc

SEQ ID NO: 64269 - DNA, 30 bp, Artificial Sequence
  Synthetic oligonucleotide
ccgctatgtaggacaagcgtgaagtgagtc

SEQ ID NO: 64270 - DNA, 30 bp, Artificial Sequence
  Synthetic oligonucleotide
cgtatcaagtacgctatttaggattgagtc

SEQ ID NO: 64271 - DNA, 30 bp, Artificial Sequence
  Synthetic oligonucleotide
gctactaaccagagcagatgccagatagtc

SEQ ID NO: 64272 - DNA, 30 bp, Artificial Sequence
  Synthetic oligonucleotide
gcggagcctgtaatactgagagatctagtc

SEQ ID NO: 64273 - DNA, 30 bp, Artificial Sequence
  Synthetic oligonucleotide
tcgccggggtagtgtcccgagaacgtagtc

SEQ ID NO: 64274 - DNA, 30 bp, Artificial Sequence
  Synthetic oligonucleotide
aatgcggcttctggatactagagtgtagtc

SEQ ID NO: 64275 - DNA, 30 bp, Artificial Sequence
  Synthetic oligonucleotide
acgttagcccctagcgtcgactcgttagtc

SEQ ID NO: 64276 - DNA, 30 bp, Artificial Sequence
  Synthetic oligonucleotide
cgggaatcgcctcgaggaaatgttttagtc

SEQ ID NO: 64277 - DNA, 30 bp, Artificial Sequence
  Synthetic oligonucleotide
acacaggtcaagatggaggtgggacacgtc

SEQ ID NO: 64278 - DNA, 30 bp, Artificial Sequence
  Synthetic oligonucleotide
aggtaacatataaagttggacgagcacgtc

SEQ ID NO: 64279 - DNA, 31 bp, Artificial Sequence
  Synthetic oligonucleotide
ggagaccagaggccctaggtttcagaccgtc

SEQ ID NO: 64280 - DNA, 30 bp, Artificial Sequence
  Synthetic oligonucleotide
cggggctagggtgcgagccaaaaacccgtc

SEQ ID NO: 64281 - DNA, 30 bp, Artificial Sequence
  Synthetic oligonucleotide
gggcgggggtatgctgtgacaccagccgtc

SEQ ID NO: 64282 - DNA, 30 bp, Artificial Sequence
  Synthetic oligonucleotide
ccacgtcttcgagcgctagttaactgcgtc

SEQ ID NO: 64283 - DNA, 30 bp, Artificial Sequence
  Synthetic oligonucleotide
ggcgctgactgtggaagatgaatgtgcgtc

SEQ ID NO: 64284 - DNA, 30 bp, Artificial Sequence
  Synthetic oligonucleotide
gacaggcaggttaaggaatgtagtatcgtc

SEQ ID NO: 64285 - DNA, 30 bp, Artificial Sequence
  Synthetic oligonucleotide
ttgtaggacactgtctgtccgcgtctcgtc

SEQ ID NO: 64286 - DNA, 30 bp, Artificial Sequence
  Synthetic oligonucleotide
agaacagcaaattctctgctagccgtcgtc

SEQ ID NO: 64287 - DNA, 30 bp, Artificial Sequence
  Synthetic oligonucleotide
ccaagaccatcgagcgtcaccaagttcgtc

SEQ ID NO: 64288 - DNA, 30 bp, Artificial Sequence
  Synthetic oligonucleotide
cggccgagcgaaagtctgagccggaaggtc

SEQ ID NO: 64289 - DNA, 30 bp, Artificial Sequence
  Synthetic oligonucleotide
gggtacgatcaagccgagcaacgtaaggtc

SEQ ID NO: 64290 - DNA, 30 bp, Artificial Sequence
  Synthetic oligonucleotide
aggctcgacatggatgtaggtcaacaggtc

SEQ ID NO: 64291 - DNA, 30 bp, Artificial Sequence
  Synthetic oligonucleotide
tgatagacacgacttcgctagtcagaggtc

SEQ ID NO: 64292 - DNA, 30 bp, Artificial Sequence
  Synthetic oligonucleotide
cggacggctacaagctgttcacgtgaggtc

SEQ ID NO: 64293 - DNA, 30 bp, Artificial Sequence
  Synthetic oligonucleotide
atcgagcattttcagtgtaagggctaggtc

SEQ ID NO: 64294 - DNA, 30 bp, Artificial Sequence
  Synthetic oligonucleotide
ataaagcgtgcaggataaatggtcgcggtc

SEQ ID NO: 64295 - DNA, 30 bp, Artificial Sequence
  Synthetic oligonucleotide
tactaggcggatctatattagcgtgcggtc

SEQ ID NO: 64296 - DNA, 30 bp, Artificial Sequence
  Synthetic oligonucleotide
tacacttaatctcgtctctacctctcggtc

SEQ ID NO: 64297 - DNA, 30 bp, Artificial Sequence
  Synthetic oligonucleotide
aactaggtactagaacgaatatcgtcggtc

SEQ ID NO: 64298 - DNA, 30 bp, Artificial Sequence
  Synthetic oligonucleotide
tgaccagggacgtctgtagtagaaagggtc

SEQ ID NO: 64299 - DNA, 30 bp, Artificial Sequence
  Synthetic oligonucleotide
acggattgagcaacgttttcagcccgggtc

SEQ ID NO: 64300 - DNA, 30 bp, Artificial Sequence
  Synthetic oligonucleotide
aggagtgcgctcccacaatcatggggggtc

SEQ ID NO: 64301 - DNA, 30 bp, Artificial Sequence
  Synthetic oligonucleotide
gcaaatcgtcgcaagttatacggtggggtc

SEQ ID NO: 64302 - DNA, 30 bp, Artificial Sequence
  Synthetic oligonucleotide
gtacggaaattgagctaacggggttgggtc

SEQ ID NO: 64303 - DNA, 31 bp, Artificial Sequence
  Synthetic oligonucleotide
gggctcccccgtactaaagcacgccgtggtc

SEQ ID NO: 64304 - DNA, 30 bp, Artificial Sequence
  Synthetic oligonucleotide
ttacgattgcacgattcgcgatatgtggtc

SEQ ID NO: 64305 - DNA, 30 bp, Artificial Sequence
  Synthetic oligonucleotide
gtccagggggtgtacaaatacagcttggtc

SEQ ID NO: 64306 - DNA, 30 bp, Artificial Sequence
  Synthetic oligonucleotide
aaaacgatgagtgctagattagtcaatgtc

SEQ ID NO: 64307 - DNA, 30 bp, Artificial Sequence
  Synthetic oligonucleotide
agaggtaacgtaaaatccctctaggatgtc

SEQ ID NO: 64308 - DNA, 30 bp, Artificial Sequence
  Synthetic oligonucleotide
gagctaaagttggcgatatggccgtatgtc

SEQ ID NO: 64309 - DNA, 30 bp, Artificial Sequence
  Synthetic oligonucleotide
gagcaaattggaggggtcgcaaaaactgtc

SEQ ID NO: 64310 - DNA, 30 bp, Artificial Sequence
  Synthetic oligonucleotide
gcgggcatcgtgcacaacaatacaactgtc

SEQ ID NO: 64311 - DNA, 30 bp, Artificial Sequence
  Synthetic oligonucleotide
ctggctaccggtatatcacggctccctgtc

SEQ ID NO: 64312 - DNA, 30 bp, Artificial Sequence
  Synthetic oligonucleotide
tcctagtagtatccgtcttctgcgcctgtc

SEQ ID NO: 64313 - DNA, 30 bp, Artificial Sequence
  Synthetic oligonucleotide
cacaagaataaacggatcttaagtcctgtc

SEQ ID NO: 64314 - DNA, 30 bp, Artificial Sequence
  Synthetic oligonucleotide
taatacgatcttaaaccaaaccactctgtc

SEQ ID NO: 64315 - DNA, 30 bp, Artificial Sequence
  Synthetic oligonucleotide
ggagttagattgcgaccgtcgagaagtgtc

SEQ ID NO: 64316 - DNA, 30 bp, Artificial Sequence
  Synthetic oligonucleotide
acaaggacaagcagcatcaattgtagtgtc

SEQ ID NO: 64317 - DNA, 30 bp, Artificial Sequence
  Synthetic oligonucleotide
acagcgctgtacaagtagatttgccgtgtc

SEQ ID NO: 64318 - DNA, 31 bp, Artificial Sequence
  Synthetic oligonucleotide
agctgagagtccttcgtgaggatggggtgtc

SEQ ID NO: 64319 - DNA, 30 bp, Artificial Sequence
  Synthetic oligonucleotide
gctacaatatctgtgtaagccgcaattgtc

SEQ ID NO: 64320 - DNA, 30 bp, Artificial Sequence
  Synthetic oligonucleotide
cgagccaactgttacctgagggggattgtc

SEQ ID NO: 64321 - DNA, 30 bp, Artificial Sequence
  Synthetic oligonucleotide
tgaaaggcatgggtcgaagccatgattgtc

SEQ ID NO: 64322 - DNA, 30 bp, Artificial Sequence
  Synthetic oligonucleotide
gcgagtcgagttgccatgcaatctattgtc

SEQ ID NO: 64323 - DNA, 30 bp, Artificial Sequence
  Synthetic oligonucleotide
tcgtaataagggattgtgtttgctcttgtc

SEQ ID NO: 64324 - DNA, 30 bp, Artificial Sequence
  Synthetic oligonucleotide
aaagacagactcaagttgcgcattgttgtc

SEQ ID NO: 64325 - DNA, 30 bp, Artificial Sequence
  Synthetic oligonucleotide
gtgtggaaggcgcgtcgaggtggttttgtc

SEQ ID NO: 64326 - DNA, 30 bp, Artificial Sequence
  Synthetic oligonucleotide
attaggatagtaccacgtgtgcccaaattc

SEQ ID NO: 64327 - DNA, 30 bp, Artificial Sequence
  Synthetic oligonucleotide
tcagacgagaatacacaagatgaaacattc

SEQ ID NO: 64328 - DNA, 30 bp, Artificial Sequence
  Synthetic oligonucleotide
catagcgaggagcgaaagccacactcattc

SEQ ID NO: 64329 - DNA, 30 bp, Artificial Sequence
  Synthetic oligonucleotide
ccgtactagggggcgatcaaaacgtcattc

SEQ ID NO: 64330 - DNA, 30 bp, Artificial Sequence
  Synthetic oligonucleotide
cttaaaccattcattaatcgtacgcgattc

SEQ ID NO: 64331 - DNA, 30 bp, Artificial Sequence
  Synthetic oligonucleotide
tggagaaaggaccgcaccgaccatcgattc

SEQ ID NO: 64332 - DNA, 30 bp, Artificial Sequence
  Synthetic oligonucleotide
cgtgtaaagctcgtcacgccattaggattc

SEQ ID NO: 64333 - DNA, 30 bp, Artificial Sequence
  Synthetic oligonucleotide
tgacgtgagagtggtaaattgttcggattc

SEQ ID NO: 64334 - DNA, 30 bp, Artificial Sequence
  Synthetic oligonucleotide
ctatggcgcgaataaagcaagaacatattc

SEQ ID NO: 64335 - DNA, 30 bp, Artificial Sequence
  Synthetic oligonucleotide
gatcaaggtgaaaatacagacgacttattc

SEQ ID NO: 64336 - DNA, 30 bp, Artificial Sequence
  Synthetic oligonucleotide
agcgagtatagtaacagtaggatccacttc

SEQ ID NO: 64337 - DNA, 30 bp, Artificial Sequence
  Synthetic oligonucleotide
atcaggagatatcattaaggctgctacttc

SEQ ID NO: 64338 - DNA, 30 bp, Artificial Sequence
  Synthetic oligonucleotide
tgccgtatagcctaaccctgctcccccttc

SEQ ID NO: 64339 - DNA, 30 bp, Artificial Sequence
  Synthetic oligonucleotide
gaggggagggacatttgagttacgagcttc

SEQ ID NO: 64340 - DNA, 30 bp, Artificial Sequence
  Synthetic oligonucleotide
aggggagtgaacattggatacggacgcttc

SEQ ID NO: 64341 - DNA, 30 bp, Artificial Sequence
  Synthetic oligonucleotide
tggtttagaacactgtatgtgtcaggcttc

SEQ ID NO: 64342 - DNA, 30 bp, Artificial Sequence
  Synthetic oligonucleotide
ggatggatgtgaccggaggcgatgggcttc

SEQ ID NO: 64343 - DNA, 30 bp, Artificial Sequence
  Synthetic oligonucleotide
cgcgttgaggataggaaacgcattggcttc

SEQ ID NO: 64344 - DNA, 30 bp, Artificial Sequence
  Synthetic oligonucleotide
catagcgtaaccgaacctcagatgtgcttc

SEQ ID NO: 64345 - DNA, 30 bp, Artificial Sequence
  Synthetic oligonucleotide
caaaatgacgtgaagtcaactaccatcttc

SEQ ID NO: 64346 - DNA, 30 bp, Artificial Sequence
  Synthetic oligonucleotide
aagataggcctaattatgctgttgttcttc

SEQ ID NO: 64347 - DNA, 30 bp, Artificial Sequence
  Synthetic oligonucleotide
gggagacagacgccattgattgtaaagttc

SEQ ID NO: 64348 - DNA, 30 bp, Artificial Sequence
  Synthetic oligonucleotide
atggcaacatgggctatataattgcagttc

SEQ ID NO: 64349 - DNA, 30 bp, Artificial Sequence
  Synthetic oligonucleotide
cgagtgtagctacggtttaactacgagttc

SEQ ID NO: 64350 - DNA, 30 bp, Artificial Sequence
  Synthetic oligonucleotide
ggtgcggagagttaaaaagcaagcgagttc

SEQ ID NO: 64351 - DNA, 30 bp, Artificial Sequence
  Synthetic oligonucleotide
gggtacgtcgccaatcctgggtgatagttc

SEQ ID NO: 64352 - DNA, 30 bp, Artificial Sequence
  Synthetic oligonucleotide
cagatataaaaattaaaacatgtcacgttc

SEQ ID NO: 64353 - DNA, 30 bp, Artificial Sequence
  Synthetic oligonucleotide
agtcatggacgagtgtggaagagctcgttc

SEQ ID NO: 64354 - DNA, 30 bp, Artificial Sequence
  Synthetic oligonucleotide
gctaggccgaagtcagccccaagaaggttc

SEQ ID NO: 64355 - DNA, 30 bp, Artificial Sequence
  Synthetic oligonucleotide
acggagtgttcggacgcgctgattaggttc

SEQ ID NO: 64356 - DNA, 30 bp, Artificial Sequence
  Synthetic oligonucleotide
ggcgtcaagcgcgatggaagaaaacggttc

SEQ ID NO: 64357 - DNA, 30 bp, Artificial Sequence
  Synthetic oligonucleotide
aagcgcgtggggcgaaatgatcgtcggttc

SEQ ID NO: 64358 - DNA, 30 bp, Artificial Sequence
  Synthetic oligonucleotide
cgtccaatgggattagctggtagagggttc

SEQ ID NO: 64359 - DNA, 30 bp, Artificial Sequence
  Synthetic oligonucleotide
agagagtacactagaaaagttgtagggttc

SEQ ID NO: 64360 - DNA, 30 bp, Artificial Sequence
  Synthetic oligonucleotide
ctggggctgttggaaatataactgctgttc

SEQ ID NO: 64361 - DNA, 30 bp, Artificial Sequence
  Synthetic oligonucleotide
tggaagccaatgacggaaacggaagtgttc

SEQ ID NO: 64362 - DNA, 30 bp, Artificial Sequence
  Synthetic oligonucleotide
aaaggtagtgattcaagtggccccgtgttc

SEQ ID NO: 64363 - DNA, 30 bp, Artificial Sequence
  Synthetic oligonucleotide
ccaaggagctagagcgtcctacctagtttc

SEQ ID NO: 64364 - DNA, 30 bp, Artificial Sequence
  Synthetic oligonucleotide
ggatcgcactcgctccagtaggccaaaaag

SEQ ID NO: 64365 - DNA, 31 bp, Artificial Sequence
  Synthetic oligonucleotide
ttccctaatggagcgcggtttgaggaaaaag

SEQ ID NO: 64366 - DNA, 30 bp, Artificial Sequence
  Synthetic oligonucleotide
gtgagccactgtggaggccgacggaaaaag

SEQ ID NO: 64367 - DNA, 30 bp, Artificial Sequence
  Synthetic oligonucleotide
ggtgcaaccaaggcggatttaaagcaaaag

SEQ ID NO: 64368 - DNA, 30 bp, Artificial Sequence
  Synthetic oligonucleotide
acagcggttatgagcttagtatgtcaaaag

SEQ ID NO: 64369 - DNA, 30 bp, Artificial Sequence
  Synthetic oligonucleotide
tcggtcacgaatgagatcccccttcaaaag

SEQ ID NO: 64370 - DNA, 30 bp, Artificial Sequence
  Synthetic oligonucleotide
aggcttagtcgatgtgctgctatcgaaaag

SEQ ID NO: 64371 - DNA, 30 bp, Artificial Sequence
  Synthetic oligonucleotide
aatacggagggcaaacggtaagaataaaag

SEQ ID NO: 64372 - DNA, 30 bp, Artificial Sequence
  Synthetic oligonucleotide
aaaggtgatatgaccatttacttgtaaaag

SEQ ID NO: 64373 - DNA, 30 bp, Artificial Sequence
  Synthetic oligonucleotide
agccaaaatctgctatgcgtaagaacaaag

SEQ ID NO: 64374 - DNA, 30 bp, Artificial Sequence
  Synthetic oligonucleotide
tcaggtaacttcaggtagggtggaacaaag

SEQ ID NO: 64375 - DNA, 30 bp, Artificial Sequence
  Synthetic oligonucleotide
aacaagcccatgcggcgtggaccgacaaag

SEQ ID NO: 64376 - DNA, 30 bp, Artificial Sequence
  Synthetic oligonucleotide
ggccaatcgagtcggaaacttactccaaag

SEQ ID NO: 64377 - DNA, 30 bp, Artificial Sequence
  Synthetic oligonucleotide
gtgttaaagatggatgagcgaaaagcaaag

SEQ ID NO: 64378 - DNA, 30 bp, Artificial Sequence
  Synthetic oligonucleotide
atcaaggataggaactaagtacaagcaaag

SEQ ID NO: 64379 - DNA, 30 bp, Artificial Sequence
  Synthetic oligonucleotide
ggacgggagcgaaccaggcggcgcgcaaag

SEQ ID NO: 64380 - DNA, 30 bp, Artificial Sequence
  Synthetic oligonucleotide
tccgggatcggcagcaacggaaaatcaaag

SEQ ID NO: 64381 - DNA, 30 bp, Artificial Sequence
  Synthetic oligonucleotide
tatcgcaggtaccgtaatcatcattcaaag

SEQ ID NO: 64382 - DNA, 30 bp, Artificial Sequence
  Synthetic oligonucleotide
ctaggcggtcccaggagattagaaagaaag

SEQ ID NO: 64383 - DNA, 30 bp, Artificial Sequence
  Synthetic oligonucleotide
atatgcaatctatacggtgttcgaagaaag

SEQ ID NO: 64384 - DNA, 30 bp, Artificial Sequence
  Synthetic oligonucleotide
acggtcggtgttaacaatgcactcagaaag

SEQ ID NO: 64385 - DNA, 30 bp, Artificial Sequence
  Synthetic oligonucleotide
ctgaggacttggtgttcgagcaggagaaag

SEQ ID NO: 64386 - DNA, 30 bp, Artificial Sequence
  Synthetic oligonucleotide
atacgaaattgtagcactcatagtagaaag

SEQ ID NO: 64387 - DNA, 30 bp, Artificial Sequence
  Synthetic oligonucleotide
ggtcggccgcctcacatcatacgtagaaag

SEQ ID NO: 64388 - DNA, 30 bp, Artificial Sequence
  Synthetic oligonucleotide
cgactacgctctctaatcgaagtacgaaag

SEQ ID NO: 64389 - DNA, 30 bp, Artificial Sequence
  Synthetic oligonucleotide
taggagacggagacgtaagaaacaggaaag

SEQ ID NO: 64390 - DNA, 30 bp, Artificial Sequence
  Synthetic oligonucleotide
gctggaaagtcatctgaaagcttaggaaag

SEQ ID NO: 64391 - DNA, 30 bp, Artificial Sequence
  Synthetic oligonucleotide
catttggcaggttgacgatgggagggaaag

SEQ ID NO: 64392 - DNA, 30 bp, Artificial Sequence
  Synthetic oligonucleotide
gcgaggcctataatatggacacaatgaaag

SEQ ID NO: 64393 - DNA, 30 bp, Artificial Sequence
  Synthetic oligonucleotide
ggatgtcaaaccgtagattttgcgtgaaag

SEQ ID NO: 64394 - DNA, 30 bp, Artificial Sequence
  Synthetic oligonucleotide
taagggtcgtgaaaggtatcgaggtgaaag

SEQ ID NO: 64395 - DNA, 30 bp, Artificial Sequence
  Synthetic oligonucleotide
tacgttctatatggaataaagcgttgaaag

SEQ ID NO: 64396 - DNA, 30 bp, Artificial Sequence
  Synthetic oligonucleotide
aagaggtggggtggcacaccttgttgaaag

SEQ ID NO: 64397 - DNA, 30 bp, Artificial Sequence
  Synthetic oligonucleotide
caccgcactgtagaagaccccatttgaaag

SEQ ID NO: 64398 - DNA, 30 bp, Artificial Sequence
  Synthetic oligonucleotide
cgggagcaaaggtctgctaagtggataaag

SEQ ID NO: 64399 - DNA, 30 bp, Artificial Sequence
  Synthetic oligonucleotide
gataaagatagtcgcctgtagaaactaaag

SEQ ID NO: 64400 - DNA, 30 bp, Artificial Sequence
  Synthetic oligonucleotide
cctaatgaagacatcccatcagccctaaag

SEQ ID NO: 64401 - DNA, 30 bp, Artificial Sequence
  Synthetic oligonucleotide
atcgtatgtttctgcaagagcagggtaaag

SEQ ID NO: 64402 - DNA, 30 bp, Artificial Sequence
  Synthetic oligonucleotide
ggatcacagcttaggtgcattccattaaag

SEQ ID NO: 64403 - DNA, 30 bp, Artificial Sequence
  Synthetic oligonucleotide
agaaggggtatataatatcactagttaaag

SEQ ID NO: 64404 - DNA, 30 bp, Artificial Sequence
  Synthetic oligonucleotide
ttaacgaccgtgccgtaaattgcaaacaag

SEQ ID NO: 64405 - DNA, 30 bp, Artificial Sequence
  Synthetic oligonucleotide
cacgcgactttcataatccccggcaacaag

SEQ ID NO: 64406 - DNA, 30 bp, Artificial Sequence
  Synthetic oligonucleotide
acatgttgggtgcaggtacccaagaacaag

SEQ ID NO: 64407 - DNA, 30 bp, Artificial Sequence
  Synthetic oligonucleotide
ggaatccttcggggagtccgagggaacaag

SEQ ID NO: 64408 - DNA, 30 bp, Artificial Sequence
  Synthetic oligonucleotide
ggatccgcgttactaagcgttgggaacaag

SEQ ID NO: 64409 - DNA, 30 bp, Artificial Sequence
  Synthetic oligonucleotide
tcttgtcacataagtagcaacctacacaag

SEQ ID NO: 64410 - DNA, 30 bp, Artificial Sequence
  Synthetic oligonucleotide
gtagcgcaccccacagaccgatgccacaag

SEQ ID NO: 64411 - DNA, 30 bp, Artificial Sequence
  Synthetic oligonucleotide
gcctggcatcgaccaacactgctccacaag

SEQ ID NO: 64412 - DNA, 30 bp, Artificial Sequence
  Synthetic oligonucleotide
tcgaagtgtcagactgtcggtcgcgacaag

SEQ ID NO: 64413 - DNA, 30 bp, Artificial Sequence
  Synthetic oligonucleotide
tcctagattgaggtcttgataactgacaag

SEQ ID NO: 64414 - DNA, 30 bp, Artificial Sequence
  Synthetic oligonucleotide
gttggaggcccgagaagtgagcattacaag

SEQ ID NO: 64415 - DNA, 30 bp, Artificial Sequence
  Synthetic oligonucleotide
ggatgttgccgcttattcgattacaccaag

SEQ ID NO: 64416 - DNA, 30 bp, Artificial Sequence
  Synthetic oligonucleotide
gtccgaatcgcgtactgttctgcacccaag

SEQ ID NO: 64417 - DNA, 30 bp, Artificial Sequence
  Synthetic oligonucleotide
gaaagtgtctgagaacatgttgtcgccaag

SEQ ID NO: 64418 - DNA, 30 bp, Artificial Sequence
  Synthetic oligonucleotide
accgaaaaataggggagactgcggtccaag

SEQ ID NO: 64419 - DNA, 30 bp, Artificial Sequence
  Synthetic oligonucleotide
gaagaatccaatcgcctgaacacttccaag

SEQ ID NO: 64420 - DNA, 30 bp, Artificial Sequence
  Synthetic oligonucleotide
ggaggtagaaatttcttaccgatcagcaag

SEQ ID NO: 64421 - DNA, 30 bp, Artificial Sequence
  Synthetic oligonucleotide
ccatgccccaagtcattacatcaacgcaag

SEQ ID NO: 64422 - DNA, 30 bp, Artificial Sequence
  Synthetic oligonucleotide
gtacggcacagcatcaaaaaataacgcaag

SEQ ID NO: 64423 - DNA, 30 bp, Artificial Sequence
  Synthetic oligonucleotide
gccgtaacaagcacgacaaatgtgggcaag

SEQ ID NO: 64424 - DNA, 30 bp, Artificial Sequence
  Synthetic oligonucleotide
agaatgcgagcaaacaatatattgggcaag

SEQ ID NO: 64425 - DNA, 30 bp, Artificial Sequence
  Synthetic oligonucleotide
aggccagtccctgatgtcacgttgggcaag

SEQ ID NO: 64426 - DNA, 30 bp, Artificial Sequence
  Synthetic oligonucleotide
cagttccgcgaggtgatcgttgtaatcaag

SEQ ID NO: 64427 - DNA, 30 bp, Artificial Sequence
  Synthetic oligonucleotide
ccttcgactttaccaacaggaatactcaag

SEQ ID NO: 64428 - DNA, 30 bp, Artificial Sequence
  Synthetic oligonucleotide
actgcgccccccactcggtaagcgctcaag

SEQ ID NO: 64429 - DNA, 30 bp, Artificial Sequence
  Synthetic oligonucleotide
cctgttcgaggcaatttaatcatggtcaag

SEQ ID NO: 64430 - DNA, 30 bp, Artificial Sequence
  Synthetic oligonucleotide
ccatataattcgtgattttcacatgtcaag

SEQ ID NO: 64431 - DNA, 30 bp, Artificial Sequence
  Synthetic oligonucleotide
gcagtacccgataagggaggggcgttcaag

SEQ ID NO: 64432 - DNA, 30 bp, Artificial Sequence
  Synthetic oligonucleotide
atgaacccgtgaggtaccgcgaaaaagaag

SEQ ID NO: 64433 - DNA, 30 bp, Artificial Sequence
  Synthetic oligonucleotide
taaaagcaacgggtcttagagggaaagaag

SEQ ID NO: 64434 - DNA, 30 bp, Artificial Sequence
  Synthetic oligonucleotide
tagcgtgtgaatctccttaggaacaagaag

SEQ ID NO: 64435 - DNA, 30 bp, Artificial Sequence
  Synthetic oligonucleotide
aaaacgcgacgcgacttaaaaacgaagaag

SEQ ID NO: 64436 - DNA, 30 bp, Artificial Sequence
  Synthetic oligonucleotide
gacggagtcagggcttgacactcgcagaag

SEQ ID NO: 64437 - DNA, 30 bp, Artificial Sequence
  Synthetic oligonucleotide
ccggcgaatggacatcagacaaatcagaag

SEQ ID NO: 64438 - DNA, 30 bp, Artificial Sequence
  Synthetic oligonucleotide
gacaggccacataaaggaggacatcagaag

SEQ ID NO: 64439 - DNA, 30 bp, Artificial Sequence
  Synthetic oligonucleotide
ggcgagaactatgtctcggcatatcagaag

SEQ ID NO: 64440 - DNA, 30 bp, Artificial Sequence
  Synthetic oligonucleotide
gagagaaatcaacaagggtgcggagagaag

SEQ ID NO: 64441 - DNA, 30 bp, Artificial Sequence
  Synthetic oligonucleotide
taggacccgtaactacggtgtgtggagaag

SEQ ID NO: 64442 - DNA, 30 bp, Artificial Sequence
  Synthetic oligonucleotide
tatcgtggcgggtctgcgccgaatgagaag

SEQ ID NO: 64443 - DNA, 30 bp, Artificial Sequence
  Synthetic oligonucleotide
tgccaatctatcgtgacaagtgatgagaag

SEQ ID NO: 64444 - DNA, 30 bp, Artificial Sequence
  Synthetic oligonucleotide
cttcaaaggccgggagttggataaacgaag

SEQ ID NO: 64445 - DNA, 30 bp, Artificial Sequence
  Synthetic oligonucleotide
attgggggactgtgacacctgataacgaag

SEQ ID NO: 64446 - DNA, 30 bp, Artificial Sequence
  Synthetic oligonucleotide
cgaggttgcggaataggtagcgagccgaag

SEQ ID NO: 64447 - DNA, 30 bp, Artificial Sequence
  Synthetic oligonucleotide
aacaaatttcgcagggaatgaaaggcgaag

SEQ ID NO: 64448 - DNA, 30 bp, Artificial Sequence
  Synthetic oligonucleotide
ggataaaataatcaagtagtccgggcgaag

SEQ ID NO: 64449 - DNA, 30 bp, Artificial Sequence
  Synthetic oligonucleotide
agaaatgattatagcaacaaacctgcgaag

SEQ ID NO: 64450 - DNA, 30 bp, Artificial Sequence
  Synthetic oligonucleotide
caagacgccaaggctgctgacgtgaggaag

SEQ ID NO: 64451 - DNA, 30 bp, Artificial Sequence
  Synthetic oligonucleotide
tctggcggttacgtccaggacgtacggaag

SEQ ID NO: 64452 - DNA, 30 bp, Artificial Sequence
  Synthetic oligonucleotide
accggaatcggcttcttcatccgccggaag

SEQ ID NO: 64453 - DNA, 30 bp, Artificial Sequence
  Synthetic oligonucleotide
gcaattgaagatcgaaacctgtctgggaag

SEQ ID NO: 64454 - DNA, 30 bp, Artificial Sequence
  Synthetic oligonucleotide
cgtctggtacggataatcccttgttggaag

SEQ ID NO: 64455 - DNA, 30 bp, Artificial Sequence
  Synthetic oligonucleotide
ggccgtacgggttgtgagatataaatgaag

SEQ ID NO: 64456 - DNA, 30 bp, Artificial Sequence
  Synthetic oligonucleotide
atcattcagaccccgagcgagcccatgaag

SEQ ID NO: 64457 - DNA, 30 bp, Artificial Sequence
  Synthetic oligonucleotide
acgatcttaggagtgcataggacactgaag

SEQ ID NO: 64458 - DNA, 30 bp, Artificial Sequence
  Synthetic oligonucleotide
cataaagaagtctgacctaggcgcctgaag

SEQ ID NO: 64459 - DNA, 30 bp, Artificial Sequence
  Synthetic oligonucleotide
ggggaggtgtttgtgcttcggtgcctgaag

SEQ ID NO: 64460 - DNA, 30 bp, Artificial Sequence
  Synthetic oligonucleotide
acaaacggcgtagcgtagatagctctgaag

SEQ ID NO: 64461 - DNA, 30 bp, Artificial Sequence
  Synthetic oligonucleotide
gtgcagtcagcatcgtaacgtgaagtgaag

SEQ ID NO: 64462 - DNA, 30 bp, Artificial Sequence
  Synthetic oligonucleotide
ggtactggatgggaatgccgtctggtgaag

SEQ ID NO: 64463 - DNA, 30 bp, Artificial Sequence
  Synthetic oligonucleotide
tgcccgggtaagagtagactgggtgtgaag

SEQ ID NO: 64464 - DNA, 30 bp, Artificial Sequence
  Synthetic oligonucleotide
atgtgagaggctatagttagaggattgaag

SEQ ID NO: 64465 - DNA, 30 bp, Artificial Sequence
  Synthetic oligonucleotide
gcgttgaggagggcagagagttgattgaag

SEQ ID NO: 64466 - DNA, 30 bp, Artificial Sequence
  Synthetic oligonucleotide
agtaggaacgatgatgccagttacttgaag

SEQ ID NO: 64467 - DNA, 30 bp, Artificial Sequence
  Synthetic oligonucleotide
tgaaaagtgcgcatcattgacatcttgaag

SEQ ID NO: 64468 - DNA, 30 bp, Artificial Sequence
  Synthetic oligonucleotide
tataaaaagttcgaatctgaccgaaataag

SEQ ID NO: 64469 - DNA, 30 bp, Artificial Sequence
  Synthetic oligonucleotide
gttgacatgcaattgaaacccaggaataag

SEQ ID NO: 64470 - DNA, 30 bp, Artificial Sequence
  Synthetic oligonucleotide
agtgggtgagcttgcatctaatctcataag

SEQ ID NO: 64471 - DNA, 30 bp, Artificial Sequence
  Synthetic oligonucleotide
tccgggaacgtcttgccaatgcaatataag

SEQ ID NO: 64472 - DNA, 30 bp, Artificial Sequence
  Synthetic oligonucleotide
gtgctctcgggtaagtaggggatatataag

SEQ ID NO: 64473 - DNA, 30 bp, Artificial Sequence
  Synthetic oligonucleotide
gtagtgccgaatgtagtgaattcctataag

SEQ ID NO: 64474 - DNA, 30 bp, Artificial Sequence
  Synthetic oligonucleotide
actataagccaaacatgacatgggtataag

SEQ ID NO: 64475 - DNA, 30 bp, Artificial Sequence
  Synthetic oligonucleotide
tactcccacagatcgtaaaagtaggctaag

SEQ ID NO: 64476 - DNA, 30 bp, Artificial Sequence
  Synthetic oligonucleotide
aatgcgaaatcattgggtttacggtctaag

SEQ ID NO: 64477 - DNA, 30 bp, Artificial Sequence
  Synthetic oligonucleotide
cggtcggtgttagtaacacgtccaagtaag

SEQ ID NO: 64478 - DNA, 30 bp, Artificial Sequence
  Synthetic oligonucleotide
agaagtatcgagccattgcagtggagtaag

SEQ ID NO: 64479 - DNA, 30 bp, Artificial Sequence
  Synthetic oligonucleotide
tgcatcactggggacttctaacatagtaag

SEQ ID NO: 64480 - DNA, 30 bp, Artificial Sequence
  Synthetic oligonucleotide
tagtgtatcgtgaactttggagctagtaag

SEQ ID NO: 64481 - DNA, 30 bp, Artificial Sequence
  Synthetic oligonucleotide
taagttggcgtacgagcgagcggacgtaag

SEQ ID NO: 64482 - DNA, 30 bp, Artificial Sequence
  Synthetic oligonucleotide
agcgggcacaggctaatttagcaccgtaag

SEQ ID NO: 64483 - DNA, 30 bp, Artificial Sequence
  Synthetic oligonucleotide
agtacatgtgatggaccgtgaactcgtaag

SEQ ID NO: 64484 - DNA, 30 bp, Artificial Sequence
  Synthetic oligonucleotide
cacatgggagcaccaggtcgcccgggtaag

SEQ ID NO: 64485 - DNA, 30 bp, Artificial Sequence
  Synthetic oligonucleotide
acgacaaccttaaagacgtcaactggtaag

SEQ ID NO: 64486 - DNA, 30 bp, Artificial Sequence
  Synthetic oligonucleotide
aaggatcaaggttcatagctttactgtaag

SEQ ID NO: 64487 - DNA, 30 bp, Artificial Sequence
  Synthetic oligonucleotide
ttcgacaaatgggagtgctgcacctgtaag

SEQ ID NO: 64488 - DNA, 30 bp, Artificial Sequence
  Synthetic oligonucleotide
aggtgcgctagcaatactgcccagtgtaag

SEQ ID NO: 64489 - DNA, 30 bp, Artificial Sequence
  Synthetic oligonucleotide
taagatgccctaatatcatgaacgtgtaag

SEQ ID NO: 64490 - DNA, 30 bp, Artificial Sequence
  Synthetic oligonucleotide
agcaacgcggaaaaatgcgcgaaaattaag

SEQ ID NO: 64491 - DNA, 30 bp, Artificial Sequence
  Synthetic oligonucleotide
tcgggtgcagattgaactgacattattaag

SEQ ID NO: 64492 - DNA, 30 bp, Artificial Sequence
  Synthetic oligonucleotide
caacaagggatatttccagctcgccttaag

SEQ ID NO: 64493 - DNA, 30 bp, Artificial Sequence
  Synthetic oligonucleotide
atgcaccaacacaaataagacttgcttaag

SEQ ID NO: 64494 - DNA, 30 bp, Artificial Sequence
  Synthetic oligonucleotide
acggttaatgcgacgcgacataaggttaag

SEQ ID NO: 64495 - DNA, 30 bp, Artificial Sequence
  Synthetic oligonucleotide
acgctgtttaaagccagtatgccatttaag

SEQ ID NO: 64496 - DNA, 30 bp, Artificial Sequence
  Synthetic oligonucleotide
atcagataatggacgaggtttcagtttaag

SEQ ID NO: 64497 - DNA, 30 bp, Artificial Sequence
  Synthetic oligonucleotide
agcgtgagggttaagcatatacacaaacag

SEQ ID NO: 64498 - DNA, 30 bp, Artificial Sequence
  Synthetic oligonucleotide
aggcgtggttgtcggtagtaccagaaacag

SEQ ID NO: 64499 - DNA, 30 bp, Artificial Sequence
  Synthetic oligonucleotide
ggaaatcgaaacttacaaaattgtcaacag

SEQ ID NO: 64500 - DNA, 30 bp, Artificial Sequence
  Synthetic oligonucleotide
cgatagaagcagggttccacccgcgaacag

SEQ ID NO: 64501 - DNA, 30 bp, Artificial Sequence
  Synthetic oligonucleotide
tcgatttgcccttctataaggggcacacag

SEQ ID NO: 64502 - DNA, 30 bp, Artificial Sequence
  Synthetic oligonucleotide
ctaggccattacacttctgcaacgccacag

SEQ ID NO: 64503 - DNA, 30 bp, Artificial Sequence
  Synthetic oligonucleotide
caaaacctctccgcaatactcaatccacag

SEQ ID NO: 64504 - DNA, 30 bp, Artificial Sequence
  Synthetic oligonucleotide
gcactaaaccaactacaataccgtgcacag

SEQ ID NO: 64505 - DNA, 30 bp, Artificial Sequence
  Synthetic oligonucleotide
ggtgggtggcgcatggagggaggctcacag

SEQ ID NO: 64506 - DNA, 30 bp, Artificial Sequence
  Synthetic oligonucleotide
tcactctgtggtgggccactaagaagacag

SEQ ID NO: 64507 - DNA, 30 bp, Artificial Sequence
  Synthetic oligonucleotide
taagatagcttatcgattagtcgtcgacag

SEQ ID NO: 64508 - DNA, 30 bp, Artificial Sequence
  Synthetic oligonucleotide
taacacccgatcgaaacactaagaggacag

SEQ ID NO: 64509 - DNA, 30 bp, Artificial Sequence
  Synthetic oligonucleotide
acggggcgacctcgatacctgataggacag

SEQ ID NO: 64510 - DNA, 30 bp, Artificial Sequence
  Synthetic oligonucleotide
tttgcgaattacatcacccgtgcgggacag

SEQ ID NO: 64511 - DNA, 30 bp, Artificial Sequence
  Synthetic oligonucleotide
ctcgtttaagcgagaaccgacaggggacag

SEQ ID NO: 64512 - DNA, 30 bp, Artificial Sequence
  Synthetic oligonucleotide
gtagaccgaatctctgaatggagatgacag

SEQ ID NO: 64513 - DNA, 30 bp, Artificial Sequence
  Synthetic oligonucleotide
gatactggggaatacgcctcaacctgacag

SEQ ID NO: 64514 - DNA, 30 bp, Artificial Sequence
  Synthetic oligonucleotide
gatgtggtttagatcatcgggccgatacag

SEQ ID NO: 64515 - DNA, 30 bp, Artificial Sequence
  Synthetic oligonucleotide
aggagtccgtagtcagaatcgaatatacag

SEQ ID NO: 64516 - DNA, 30 bp, Artificial Sequence
  Synthetic oligonucleotide
aggtgcgtagagaatgctaattgactacag

SEQ ID NO: 64517 - DNA, 30 bp, Artificial Sequence
  Synthetic oligonucleotide
gcgtgctgtgaagggtgtctgcacctacag

SEQ ID NO: 64518 - DNA, 30 bp, Artificial Sequence
  Synthetic oligonucleotide
acctcgattgtgaaaccagaaaggctacag

SEQ ID NO: 64519 - DNA, 27 bp, Artificial Sequence
  Synthetic oligonucleotide
cgccatgtggaatgtgatacagtacag

SEQ ID NO: 64520 - DNA, 30 bp, Artificial Sequence
  Synthetic oligonucleotide
aaaatgcgggtcatcgtgtgccatgtacag

SEQ ID NO: 64521 - DNA, 30 bp, Artificial Sequence
  Synthetic oligonucleotide
ggtcggggaccctacttcatatccaaccag

SEQ ID NO: 64522 - DNA, 30 bp, Artificial Sequence
  Synthetic oligonucleotide
ctgaggaggatggactttgtccgcaaccag

SEQ ID NO: 64523 - DNA, 30 bp, Artificial Sequence
  Synthetic oligonucleotide
catctcttaggtcgtgtgataggcaaccag

SEQ ID NO: 64524 - DNA, 30 bp, Artificial Sequence
  Synthetic oligonucleotide
acggtccatttattcctgcgagggaaccag

SEQ ID NO: 64525 - DNA, 30 bp, Artificial Sequence
  Synthetic oligonucleotide
gaacaacatgaagtataattggttcaccag

SEQ ID NO: 64526 - DNA, 30 bp, Artificial Sequence
  Synthetic oligonucleotide
ccctcagcttggaagggtccacacgaccag

SEQ ID NO: 64527 - DNA, 30 bp, Artificial Sequence
  Synthetic oligonucleotide
attcagctaaggtggccaattggcgaccag

SEQ ID NO: 64528 - DNA, 30 bp, Artificial Sequence
  Synthetic oligonucleotide
gcgaggaggatttttcacgaaaaggaccag

SEQ ID NO: 64529 - DNA, 30 bp, Artificial Sequence
  Synthetic oligonucleotide
cagacggttaagtcgacaagcacggaccag

SEQ ID NO: 64530 - DNA, 30 bp, Artificial Sequence
  Synthetic oligonucleotide
ttacctagaatggcgaaatgaagggaccag

SEQ ID NO: 64531 - DNA, 30 bp, Artificial Sequence
  Synthetic oligonucleotide
gaacaggctccattcgcaagcgtataccag

SEQ ID NO: 64532 - DNA, 30 bp, Artificial Sequence
  Synthetic oligonucleotide
tacgaagtaagaaggtcgggatcaacccag

SEQ ID NO: 64533 - DNA, 30 bp, Artificial Sequence
  Synthetic oligonucleotide
acttccatacacgggcacacgttgacccag

SEQ ID NO: 64534 - DNA, 30 bp, Artificial Sequence
  Synthetic oligonucleotide
cgatctaagaagcggacgtcggtaccccag

SEQ ID NO: 64535 - DNA, 30 bp, Artificial Sequence
  Synthetic oligonucleotide
tgcggaaatcggtatggacatattccccag

SEQ ID NO: 64536 - DNA, 30 bp, Artificial Sequence
  Synthetic oligonucleotide
agtgtcaagccgttaataacttctgcccag

SEQ ID NO: 64537 - DNA, 30 bp, Artificial Sequence
  Synthetic oligonucleotide
actgcacaaggcaagcagatgtgaagccag

SEQ ID NO: 64538 - DNA, 30 bp, Artificial Sequence
  Synthetic oligonucleotide
taggaggtggccccaaacatagccagccag

SEQ ID NO: 64539 - DNA, 30 bp, Artificial Sequence
  Synthetic oligonucleotide
gaccacagtatagttccgggccctagccag

SEQ ID NO: 64540 - DNA, 30 bp, Artificial Sequence
  Synthetic oligonucleotide
cgttaagtggatctgtcagatgttagccag

SEQ ID NO: 64541 - DNA, 30 bp, Artificial Sequence
  Synthetic oligonucleotide
ggagtaggcttgcataaacaggtacgccag

SEQ ID NO: 64542 - DNA, 30 bp, Artificial Sequence
  Synthetic oligonucleotide
gtcggactaacggcaagacacccctgccag

SEQ ID NO: 64543 - DNA, 30 bp, Artificial Sequence
  Synthetic oligonucleotide
gaggtaagacaatgggctaaatgttgccag

SEQ ID NO: 64544 - DNA, 30 bp, Artificial Sequence
  Synthetic oligonucleotide
aaacacaattgtcgaacatggaggatccag

SEQ ID NO: 64545 - DNA, 30 bp, Artificial Sequence
  Synthetic oligonucleotide
cacgtgctgattgcgttctgactgatccag

SEQ ID NO: 64546 - DNA, 30 bp, Artificial Sequence
  Synthetic oligonucleotide
acaaagtgtggcctgtatgtcaaattccag

SEQ ID NO: 64547 - DNA, 30 bp, Artificial Sequence
  Synthetic oligonucleotide
agacgactgatttcgagggaatttaagcag

SEQ ID NO: 64548 - DNA, 30 bp, Artificial Sequence
  Synthetic oligonucleotide
catattccactagcgcatacgtgcgagcag

SEQ ID NO: 64549 - DNA, 30 bp, Artificial Sequence
  Synthetic oligonucleotide
acaatcgttcactctcagtccgaatagcag

SEQ ID NO: 64550 - DNA, 30 bp, Artificial Sequence
  Synthetic oligonucleotide
gacgaaacatggaaaagttggaaaacgcag

SEQ ID NO: 64551 - DNA, 30 bp, Artificial Sequence
  Synthetic oligonucleotide
gccaaacaaaggtcttaagcggtaacgcag

SEQ ID NO: 64552 - DNA, 30 bp, Artificial Sequence
  Synthetic oligonucleotide
agcaaagcctgattcgtggtgcaaccgcag

SEQ ID NO: 64553 - DNA, 30 bp, Artificial Sequence
  Synthetic oligonucleotide
aagagagttgttattggcgtcctaccgcag

SEQ ID NO: 64554 - DNA, 30 bp, Artificial Sequence
  Synthetic oligonucleotide
ttcaacgggtcgatcaggtcaagctcgcag

SEQ ID NO: 64555 - DNA, 30 bp, Artificial Sequence
  Synthetic oligonucleotide
caaaacacgacttggaactcaggctcgcag

SEQ ID NO: 64556 - DNA, 30 bp, Artificial Sequence
  Synthetic oligonucleotide
tcctacaagtagatctccgtaacaaggcag

SEQ ID NO: 64557 - DNA, 30 bp, Artificial Sequence
  Synthetic oligonucleotide
ttgctacaacgaaattaaaagaggaggcag

SEQ ID NO: 64558 - DNA, 30 bp, Artificial Sequence
  Synthetic oligonucleotide
ttaacagagctagtgccggccagacggcag

SEQ ID NO: 64559 - DNA, 30 bp, Artificial Sequence
  Synthetic oligonucleotide
tcgattgggaccattcaacgttggcggcag

SEQ ID NO: 64560 - DNA, 30 bp, Artificial Sequence
  Synthetic oligonucleotide
aataaggtaatggatcgtttgtaagggcag

SEQ ID NO: 64561 - DNA, 30 bp, Artificial Sequence
  Synthetic oligonucleotide
agcttgagcaactttgagttacgggggcag

SEQ ID NO: 64562 - DNA, 30 bp, Artificial Sequence
  Synthetic oligonucleotide
agtgcgtataatacaacttggtaatggcag

SEQ ID NO: 64563 - DNA, 30 bp, Artificial Sequence
  Synthetic oligonucleotide
aacgcactgaccgataaatgagactggcag

SEQ ID NO: 64564 - DNA, 30 bp, Artificial Sequence
  Synthetic oligonucleotide
acacgacggacgtgcggttgccgaatgcag

SEQ ID NO: 64565 - DNA, 30 bp, Artificial Sequence
  Synthetic oligonucleotide
cagtaatggtggaaccttaatggcatgcag

SEQ ID NO: 64566 - DNA, 30 bp, Artificial Sequence
  Synthetic oligonucleotide
gccaggtgttacaggaaaggttgcatgcag

SEQ ID NO: 64567 - DNA, 30 bp, Artificial Sequence
  Synthetic oligonucleotide
ggtcaaagaataacggagtcctagatgcag

SEQ ID NO: 64568 - DNA, 30 bp, Artificial Sequence
  Synthetic oligonucleotide
tagaacagccgtacccctaatattatgcag

SEQ ID NO: 64569 - DNA, 30 bp, Artificial Sequence
  Synthetic oligonucleotide
cgggggaataacaggggcgtagaagtgcag

SEQ ID NO: 64570 - DNA, 30 bp, Artificial Sequence
  Synthetic oligonucleotide
agacataatcgtgcgtaatacttagtgcag

SEQ ID NO: 64571 - DNA, 30 bp, Artificial Sequence
  Synthetic oligonucleotide
tccgtccaaatagtcgtaacccctgtgcag

SEQ ID NO: 64572 - DNA, 30 bp, Artificial Sequence
  Synthetic oligonucleotide
gttgagatcctccttgaacgagggttgcag

SEQ ID NO: 64573 - DNA, 30 bp, Artificial Sequence
  Synthetic oligonucleotide
atcacttagaagtgtgacttggatttgcag

SEQ ID NO: 64574 - DNA, 30 bp, Artificial Sequence
  Synthetic oligonucleotide
cgtggagcgcattggtcgcgtctaaatcag

SEQ ID NO: 64575 - DNA, 30 bp, Artificial Sequence
  Synthetic oligonucleotide
agggagaaccgcagggccagccccaatcag

SEQ ID NO: 64576 - DNA, 30 bp, Artificial Sequence
  Synthetic oligonucleotide
tatggagaatttcactaacgacgacatcag

SEQ ID NO: 64577 - DNA, 30 bp, Artificial Sequence
  Synthetic oligonucleotide
ccatgtacctgcggccgtaatctacatcag

SEQ ID NO: 64578 - DNA, 30 bp, Artificial Sequence
  Synthetic oligonucleotide
aggggtcaagcatttgtaggcacccatcag

SEQ ID NO: 64579 - DNA, 30 bp, Artificial Sequence
  Synthetic oligonucleotide
agttgaggtcgaggctggtcaaagcatcag

SEQ ID NO: 64580 - DNA, 30 bp, Artificial Sequence
  Synthetic oligonucleotide
tgccaattgcacgtgccacgtatcgatcag

SEQ ID NO: 64581 - DNA, 30 bp, Artificial Sequence
  Synthetic oligonucleotide
gtatcgccggaggcaaaattctgctatcag

SEQ ID NO: 64582 - DNA, 30 bp, Artificial Sequence
  Synthetic oligonucleotide
cctttcaaaggctgactagcatgttatcag

SEQ ID NO: 64583 - DNA, 30 bp, Artificial Sequence
  Synthetic oligonucleotide
tgtcgccgtgatccatgcaatttaactcag

SEQ ID NO: 64584 - DNA, 30 bp, Artificial Sequence
  Synthetic oligonucleotide
aggctaacgcacccgcgtattactactcag

SEQ ID NO: 64585 - DNA, 30 bp, Artificial Sequence
  Synthetic oligonucleotide
ttgtggaacggtagagcgtcgtttactcag

SEQ ID NO: 64586 - DNA, 30 bp, Artificial Sequence
  Synthetic oligonucleotide
atagggatcgtcaaatgactcctacctcag

SEQ ID NO: 64587 - DNA, 30 bp, Artificial Sequence
  Synthetic oligonucleotide
acaagcccacgacaagttcaccatcctcag

SEQ ID NO: 64588 - DNA, 30 bp, Artificial Sequence
  Synthetic oligonucleotide
tagctgggataatcttagcgttcagctcag

SEQ ID NO: 64589 - DNA, 30 bp, Artificial Sequence
  Synthetic oligonucleotide
tggaagcctacggaatcggcttaggctcag

SEQ ID NO: 64590 - DNA, 30 bp, Artificial Sequence
  Synthetic oligonucleotide
atcgtaagttggcagtatctttaggctcag

SEQ ID NO: 64591 - DNA, 30 bp, Artificial Sequence
  Synthetic oligonucleotide
ggctgtgacagcttgaaggtctagtctcag

SEQ ID NO: 64592 - DNA, 30 bp, Artificial Sequence
  Synthetic oligonucleotide
gacgttacaaggtcaaagagggcacgtcag

SEQ ID NO: 64593 - DNA, 30 bp, Artificial Sequence
  Synthetic oligonucleotide
ggtgatctaagcaggttccccgctcgtcag

SEQ ID NO: 64594 - DNA, 30 bp, Artificial Sequence
  Synthetic oligonucleotide
cattataaagatagcagcgacaacggtcag

SEQ ID NO: 64595 - DNA, 30 bp, Artificial Sequence
  Synthetic oligonucleotide
ccgcaaaaaagttgatacgttcgcggtcag

SEQ ID NO: 64596 - DNA, 30 bp, Artificial Sequence
  Synthetic oligonucleotide
ccgcgtgcgtccaagcggcacaatggtcag

SEQ ID NO: 64597 - DNA, 30 bp, Artificial Sequence
  Synthetic oligonucleotide
aggtacaacaatctcactatttggtgtcag

SEQ ID NO: 64598 - DNA, 30 bp, Artificial Sequence
  Synthetic oligonucleotide
catgcctcggcgggctcggttacaattcag

SEQ ID NO: 64599 - DNA, 30 bp, Artificial Sequence
  Synthetic oligonucleotide
aggcttcggcacccacagagggtgattcag

SEQ ID NO: 64600 - DNA, 30 bp, Artificial Sequence
  Synthetic oligonucleotide
ggctcgactgtatccacgaattaccttcag

SEQ ID NO: 64601 - DNA, 30 bp, Artificial Sequence
  Synthetic oligonucleotide
aggggatcgagaccgctctgccctgttcag

SEQ ID NO: 64602 - DNA, 30 bp, Artificial Sequence
  Synthetic oligonucleotide
ccgggatgtaggtgatagaagggtgttcag

SEQ ID NO: 64603 - DNA, 30 bp, Artificial Sequence
  Synthetic oligonucleotide
agggagcaacctcggcccacccgctttcag

SEQ ID NO: 64604 - DNA, 30 bp, Artificial Sequence
  Synthetic oligonucleotide
aacggcgttggaagaccaatgaggtttcag

SEQ ID NO: 64605 - DNA, 30 bp, Artificial Sequence
  Synthetic oligonucleotide
aacgtttatctggttacggccacaaaagag

SEQ ID NO: 64606 - DNA, 30 bp, Artificial Sequence
  Synthetic oligonucleotide
aagcgatgacggaagacattcaacaaagag

SEQ ID NO: 64607 - DNA, 30 bp, Artificial Sequence
  Synthetic oligonucleotide
attaaatgctccccgctctcacaacaagag

SEQ ID NO: 64608 - DNA, 30 bp, Artificial Sequence
  Synthetic oligonucleotide
atctggaggtaattgcgagcacaccaagag

SEQ ID NO: 64609 - DNA, 30 bp, Artificial Sequence
  Synthetic oligonucleotide
aggacaagcatctggcatacttagcaagag

SEQ ID NO: 64610 - DNA, 30 bp, Artificial Sequence
  Synthetic oligonucleotide
atgcgcgaaaggttaacaactgtctaagag

SEQ ID NO: 64611 - DNA, 30 bp, Artificial Sequence
  Synthetic oligonucleotide
cccgggcattaaggggcgaagccgtaagag

SEQ ID NO: 64612 - DNA, 30 bp, Artificial Sequence
  Synthetic oligonucleotide
tgattatcagggaaacatcggctgtaagag

SEQ ID NO: 64613 - DNA, 30 bp, Artificial Sequence
  Synthetic oligonucleotide
gcgagtgcagcttatcacttaccttaagag

SEQ ID NO: 64614 - DNA, 30 bp, Artificial Sequence
  Synthetic oligonucleotide
aggcacgacgcgagtagtttcagaacagag

SEQ ID NO: 64615 - DNA, 30 bp, Artificial Sequence
  Synthetic oligonucleotide
agtaccagtaccgaggggtcgtcgacagag

SEQ ID NO: 64616 - DNA, 30 bp, Artificial Sequence
  Synthetic oligonucleotide
cggccttcacgaattggttacagtacagag

SEQ ID NO: 64617 - DNA, 30 bp, Artificial Sequence
  Synthetic oligonucleotide
cgacaggcgctgatgcacatctcagcagag

SEQ ID NO: 64618 - DNA, 30 bp, Artificial Sequence
  Synthetic oligonucleotide
cgcccataattacggacgttgaagtcagag

SEQ ID NO: 64619 - DNA, 30 bp, Artificial Sequence
  Synthetic oligonucleotide
attgagaaaaacagtggtcaaaaaagagag

SEQ ID NO: 64620 - DNA, 30 bp, Artificial Sequence
  Synthetic oligonucleotide
aagggttaagtcgctggattaaaaagagag

SEQ ID NO: 64621 - DNA, 30 bp, Artificial Sequence
  Synthetic oligonucleotide
tgctcgatacatacgttgggattgagagag

SEQ ID NO: 64622 - DNA, 30 bp, Artificial Sequence
  Synthetic oligonucleotide
gcacctaattacaacctagacaagcgagag

SEQ ID NO: 64623 - DNA, 30 bp, Artificial Sequence
  Synthetic oligonucleotide
acaaggatatttgccgtaatgagtcgagag

SEQ ID NO: 64624 - DNA, 30 bp, Artificial Sequence
  Synthetic oligonucleotide
atgttcgatgaactctcatcggaaggagag

SEQ ID NO: 64625 - DNA, 30 bp, Artificial Sequence
  Synthetic oligonucleotide
tgagtttaaagtctaaaccatagcggagag

SEQ ID NO: 64626 - DNA, 30 bp, Artificial Sequence
  Synthetic oligonucleotide
cgccgggagacggttaaccacttatgagag

SEQ ID NO: 64627 - DNA, 30 bp, Artificial Sequence
  Synthetic oligonucleotide
tctcaaaacgttatcgggattctgtgagag

SEQ ID NO: 64628 - DNA, 30 bp, Artificial Sequence
  Synthetic oligonucleotide
ttcatttgaactttaaaatgggattgagag

SEQ ID NO: 64629 - DNA, 30 bp, Artificial Sequence
  Synthetic oligonucleotide
gccctatgggcacaagacggacaaatagag

SEQ ID NO: 64630 - DNA, 30 bp, Artificial Sequence
  Synthetic oligonucleotide
tacgctccgtactgaacagaactaatagag

SEQ ID NO: 64631 - DNA, 30 bp, Artificial Sequence
  Synthetic oligonucleotide
tcctgacacaataactcgcaggccatagag

SEQ ID NO: 64632 - DNA, 30 bp, Artificial Sequence
  Synthetic oligonucleotide
aacgtttaagaaagtggtgaagaactagag

SEQ ID NO: 64633 - DNA, 30 bp, Artificial Sequence
  Synthetic oligonucleotide
ttgatagttcgcgtcccgataccactagag

SEQ ID NO: 64634 - DNA, 30 bp, Artificial Sequence
  Synthetic oligonucleotide
tacataggcggctggaaggatgttctagag

SEQ ID NO: 64635 - DNA, 30 bp, Artificial Sequence
  Synthetic oligonucleotide
gtacgtaattaaaacatgcgggaagtagag

SEQ ID NO: 64636 - DNA, 30 bp, Artificial Sequence
  Synthetic oligonucleotide
tgcagcaaagtgggtaaatagacagtagag

SEQ ID NO: 64637 - DNA, 30 bp, Artificial Sequence
  Synthetic oligonucleotide
tagttgcggcgcatggcggatgccgtagag

SEQ ID NO: 64638 - DNA, 30 bp, Artificial Sequence
  Synthetic oligonucleotide
gtcgcacagacttgacaacatcaggtagag

SEQ ID NO: 64639 - DNA, 30 bp, Artificial Sequence
  Synthetic oligonucleotide
aggacaatgaacggagcggtaggattagag

SEQ ID NO: 64640 - DNA, 30 bp, Artificial Sequence
  Synthetic oligonucleotide
agtagttacatcgacgtctcatacttagag

SEQ ID NO: 64641 - DNA, 30 bp, Artificial Sequence
  Synthetic oligonucleotide
gccaagtcccgctagatacatagcttagag

SEQ ID NO: 64642 - DNA, 30 bp, Artificial Sequence
  Synthetic oligonucleotide
tcaatacaccgaacgaagcgatagttagag

SEQ ID NO: 64643 - DNA, 30 bp, Artificial Sequence
  Synthetic oligonucleotide
caagtcaacatatgttttcagaggttagag

SEQ ID NO: 64644 - DNA, 30 bp, Artificial Sequence
  Synthetic oligonucleotide
aagttacgagcagaacggtgaggtttagag

SEQ ID NO: 64645 - DNA, 30 bp, Artificial Sequence
  Synthetic oligonucleotide
gttgctgagaaaaggggaaagattttagag

SEQ ID NO: 64646 - DNA, 30 bp, Artificial Sequence
  Synthetic oligonucleotide
ggtgctaaatgtaggcattttagaaacgag

SEQ ID NO: 64647 - DNA, 30 bp, Artificial Sequence
  Synthetic oligonucleotide
cgatacctgacgataatattagtaaacgag

SEQ ID NO: 64648 - DNA, 30 bp, Artificial Sequence
  Synthetic oligonucleotide
cagcggggaggataaggtcatgtaaacgag

SEQ ID NO: 64649 - DNA, 30 bp, Artificial Sequence
  Synthetic oligonucleotide
aacgctcagtatagatttatccacaacgag

SEQ ID NO: 64650 - DNA, 30 bp, Artificial Sequence
  Synthetic oligonucleotide
cgaatatgactcgtctactggggtaacgag

SEQ ID NO: 64651 - DNA, 30 bp, Artificial Sequence
  Synthetic oligonucleotide
atgtaaaaaggcagctcaatctgcgacgag

SEQ ID NO: 64652 - DNA, 30 bp, Artificial Sequence
  Synthetic oligonucleotide
tgattccatactccaactgccgtcgacgag

SEQ ID NO: 64653 - DNA, 30 bp, Artificial Sequence
  Synthetic oligonucleotide
tcgtgtgtctacctataattgttggacgag

SEQ ID NO: 64654 - DNA, 30 bp, Artificial Sequence
  Synthetic oligonucleotide
cgggtttaagggaactctgtttttgacgag

SEQ ID NO: 64655 - DNA, 30 bp, Artificial Sequence
  Synthetic oligonucleotide
cgtcacgagatttaccccatgtcatacgag

SEQ ID NO: 64656 - DNA, 30 bp, Artificial Sequence
  Synthetic oligonucleotide
gtcaacagataagacggatataggtacgag

SEQ ID NO: 64657 - DNA, 30 bp, Artificial Sequence
  Synthetic oligonucleotide
agcgtaatcaacataacagctttgtacgag

SEQ ID NO: 64658 - DNA, 30 bp, Artificial Sequence
  Synthetic oligonucleotide
aggcactacgctttgctgttaatttacgag

SEQ ID NO: 64659 - DNA, 30 bp, Artificial Sequence
  Synthetic oligonucleotide
tacattcgggcctcgcaggtccaaaccgag

SEQ ID NO: 64660 - DNA, 30 bp, Artificial Sequence
  Synthetic oligonucleotide
cgattcaggtcctccttattagggaccgag

SEQ ID NO: 64661 - DNA, 30 bp, Artificial Sequence
  Synthetic oligonucleotide
gggtagttcgtcctcttatagttgaccgag

SEQ ID NO: 64662 - DNA, 30 bp, Artificial Sequence
  Synthetic oligonucleotide
agagttagatgggttaggaaactacccgag

SEQ ID NO: 64663 - DNA, 30 bp, Artificial Sequence
  Synthetic oligonucleotide
gtctacgtatctcgtgtaacagagcccgag

SEQ ID NO: 64664 - DNA, 30 bp, Artificial Sequence
  Synthetic oligonucleotide
caactggatctcgtccggagttagcccgag

SEQ ID NO: 64665 - DNA, 30 bp, Artificial Sequence
  Synthetic oligonucleotide
ataaacatggttatcataggtacggccgag

SEQ ID NO: 64666 - DNA, 30 bp, Artificial Sequence
  Synthetic oligonucleotide
tggtcgcgaacacgctgctccctttccgag

SEQ ID NO: 64667 - DNA, 30 bp, Artificial Sequence
  Synthetic oligonucleotide
tgagtatgacgagaaccctggataagcgag

SEQ ID NO: 64668 - DNA, 30 bp, Artificial Sequence
  Synthetic oligonucleotide
ccaagactgccaagcggcagcttaagcgag

SEQ ID NO: 64669 - DNA, 30 bp, Artificial Sequence
  Synthetic oligonucleotide
tctgggacttaagtgtatgccatcagcgag

SEQ ID NO: 64670 - DNA, 30 bp, Artificial Sequence
  Synthetic oligonucleotide
atccagccgctggtgaggacgggtcgcgag

SEQ ID NO: 64671 - DNA, 30 bp, Artificial Sequence
  Synthetic oligonucleotide
ggaaccatatcgggcaatacggaaggcgag

SEQ ID NO: 64672 - DNA, 30 bp, Artificial Sequence
  Synthetic oligonucleotide
cgtggtgaagtggggcatattaggggcgag

SEQ ID NO: 64673 - DNA, 30 bp, Artificial Sequence
  Synthetic oligonucleotide
agaaaggccaccccgctctaagaatgcgag

SEQ ID NO: 64674 - DNA, 30 bp, Artificial Sequence
  Synthetic oligonucleotide
acttccaaatcacggtctgcggcatgcgag

SEQ ID NO: 64675 - DNA, 30 bp, Artificial Sequence
  Synthetic oligonucleotide
actgtgaggctatcaaactaccgttgcgag

SEQ ID NO: 64676 - DNA, 30 bp, Artificial Sequence
  Synthetic oligonucleotide
agctatggtgagtagttgttgggcatcgag

SEQ ID NO: 64677 - DNA, 30 bp, Artificial Sequence
  Synthetic oligonucleotide
gagtatggggttaagttcctatagctcgag

SEQ ID NO: 64678 - DNA, 30 bp, Artificial Sequence
  Synthetic oligonucleotide
aactagccggactgaaagcgtacgctcgag

SEQ ID NO: 64679 - DNA, 30 bp, Artificial Sequence
  Synthetic oligonucleotide
cgtccctcgagactgtaagtatcgctcgag

SEQ ID NO: 64680 - DNA, 30 bp, Artificial Sequence
  Synthetic oligonucleotide
gcaccggacatgatcagactaaacgtcgag

SEQ ID NO: 64681 - DNA, 30 bp, Artificial Sequence
  Synthetic oligonucleotide
atcgcacgaataagtttttgtatggtcgag

SEQ ID NO: 64682 - DNA, 30 bp, Artificial Sequence
  Synthetic oligonucleotide
agaagtacaaggtagggttaggatgtcgag

SEQ ID NO: 64683 - DNA, 30 bp, Artificial Sequence
  Synthetic oligonucleotide
ttaacataaatggggttagagcctgtcgag

SEQ ID NO: 64684 - DNA, 30 bp, Artificial Sequence
  Synthetic oligonucleotide
gctcggacggacagatgtcgtcgattcgag

SEQ ID NO: 64685 - DNA, 30 bp, Artificial Sequence
  Synthetic oligonucleotide
acaggtcttgcatgagacaatctattcgag

SEQ ID NO: 64686 - DNA, 30 bp, Artificial Sequence
  Synthetic oligonucleotide
gtcgtgctccgtaaacacatatccttcgag

SEQ ID NO: 64687 - DNA, 30 bp, Artificial Sequence
  Synthetic oligonucleotide
aagtgcctaggaattctctacatgttcgag

SEQ ID NO: 64688 - DNA, 30 bp, Artificial Sequence
  Synthetic oligonucleotide
catggtgatggcggattcatcagaaaggag

SEQ ID NO: 64689 - DNA, 30 bp, Artificial Sequence
  Synthetic oligonucleotide
agattggaacgttgtcaagcatggaaggag

SEQ ID NO: 64690 - DNA, 30 bp, Artificial Sequence
  Synthetic oligonucleotide
ctggccttactcggggatgccatgaaggag

SEQ ID NO: 64691 - DNA, 30 bp, Artificial Sequence
  Synthetic oligonucleotide
ggctcatccttagagtgccacctgaaggag

SEQ ID NO: 64692 - DNA, 30 bp, Artificial Sequence
  Synthetic oligonucleotide
tcatgccacgggcttcaccaagaagaggag

SEQ ID NO: 64693 - DNA, 30 bp, Artificial Sequence
  Synthetic oligonucleotide
agaccgtctccgcttaaaaccagtgaggag

SEQ ID NO: 64694 - DNA, 30 bp, Artificial Sequence
  Synthetic oligonucleotide
taatgggaattgatgccctatgaataggag

SEQ ID NO: 64695 - DNA, 30 bp, Artificial Sequence
  Synthetic oligonucleotide
caaaggggtttgggctaaaagaactaggag

SEQ ID NO: 64696 - DNA, 30 bp, Artificial Sequence
  Synthetic oligonucleotide
acatcgagggtctaattatctgagtaggag

SEQ ID NO: 64697 - DNA, 30 bp, Artificial Sequence
  Synthetic oligonucleotide
tacaccttgccccggacagagttgtaggag

SEQ ID NO: 64698 - DNA, 30 bp, Artificial Sequence
  Synthetic oligonucleotide
atgcgaagtgtaacccgctgcgcgacggag

SEQ ID NO: 64699 - DNA, 30 bp, Artificial Sequence
  Synthetic oligonucleotide
gcgccgttcagatctgtatgatgaccggag

SEQ ID NO: 64700 - DNA, 30 bp, Artificial Sequence
  Synthetic oligonucleotide
catggaaccccccttagattctgtccggag

SEQ ID NO: 64701 - DNA, 30 bp, Artificial Sequence
  Synthetic oligonucleotide
ccgcctaatggaccactccaaacaagggag

SEQ ID NO: 64702 - DNA, 30 bp, Artificial Sequence
  Synthetic oligonucleotide
taaggagatttgtcctgtatcgacagggag

SEQ ID NO: 64703 - DNA, 30 bp, Artificial Sequence
  Synthetic oligonucleotide
cgaagaatgagtaggttgttactccgggag

SEQ ID NO: 64704 - DNA, 30 bp, Artificial Sequence
  Synthetic oligonucleotide
tatgaacagggtgttcccaaattgcgggag

SEQ ID NO: 64705 - DNA, 30 bp, Artificial Sequence
  Synthetic oligonucleotide
aggatcatgccagattgtcctggaggggag

SEQ ID NO: 64706 - DNA, 30 bp, Artificial Sequence
  Synthetic oligonucleotide
tgttggactaaaggctggggcaacggggag

SEQ ID NO: 64707 - DNA, 30 bp, Artificial Sequence
  Synthetic oligonucleotide
tgtacggtaaacctaggagggcggggggag

SEQ ID NO: 64708 - DNA, 30 bp, Artificial Sequence
  Synthetic oligonucleotide
taacgattgcggaacctatcaatatgggag

SEQ ID NO: 64709 - DNA, 30 bp, Artificial Sequence
  Synthetic oligonucleotide
tctgtcgattcggtatgttgtcgctgggag

SEQ ID NO: 64710 - DNA, 30 bp, Artificial Sequence
  Synthetic oligonucleotide
ggcgtcatcatattgaaaatgaattgggag

SEQ ID NO: 64711 - DNA, 30 bp, Artificial Sequence
  Synthetic oligonucleotide
actgcatccgcgagtttacataggatggag

SEQ ID NO: 64712 - DNA, 30 bp, Artificial Sequence
  Synthetic oligonucleotide
aggtttgtcgtcggaaacttataagtggag

SEQ ID NO: 64713 - DNA, 30 bp, Artificial Sequence
  Synthetic oligonucleotide
ccatcgaacttagagtagactgcggtggag

SEQ ID NO: 64714 - DNA, 30 bp, Artificial Sequence
  Synthetic oligonucleotide
aactgaagacggaaattaacagtggtggag

SEQ ID NO: 64715 - DNA, 30 bp, Artificial Sequence
  Synthetic oligonucleotide
cttagcgaccggcacaaggaaggtgtggag

SEQ ID NO: 64716 - DNA, 30 bp, Artificial Sequence
  Synthetic oligonucleotide
gccgtcaaggcgtactatacaggtgtggag

SEQ ID NO: 64717 - DNA, 30 bp, Artificial Sequence
  Synthetic oligonucleotide
ggccgaggactatcgagccgttaattggag

SEQ ID NO: 64718 - DNA, 30 bp, Artificial Sequence
  Synthetic oligonucleotide
cagcggtttgatggaaggatacatttggag

SEQ ID NO: 64719 - DNA, 30 bp, Artificial Sequence
  Synthetic oligonucleotide
cttgtggggttgagcgaatttagtttggag

SEQ ID NO: 64720 - DNA, 30 bp, Artificial Sequence
  Synthetic oligonucleotide
aaggatcgcacggtaggatttctaaatgag

SEQ ID NO: 64721 - DNA, 30 bp, Artificial Sequence
  Synthetic oligonucleotide
cggggaggtagtgaatacctcgacaatgag

SEQ ID NO: 64722 - DNA, 30 bp, Artificial Sequence
  Synthetic oligonucleotide
gatagcgtggccggttagattatacatgag

SEQ ID NO: 64723 - DNA, 30 bp, Artificial Sequence
  Synthetic oligonucleotide
ggagtcaccgatgagggcgtccgccatgag

SEQ ID NO: 64724 - DNA, 30 bp, Artificial Sequence
  Synthetic oligonucleotide
catatcggggggaaaatgtttggccatgag

SEQ ID NO: 64725 - DNA, 30 bp, Artificial Sequence
  Synthetic oligonucleotide
gagttcaaacggggtaaacaggatcatgag

SEQ ID NO: 64726 - DNA, 30 bp, Artificial Sequence
  Synthetic oligonucleotide
ctacgatacctacaactgtttaacgatgag

SEQ ID NO: 64727 - DNA, 30 bp, Artificial Sequence
  Synthetic oligonucleotide
tacacgggcattataacgaagattgatgag

SEQ ID NO: 64728 - DNA, 30 bp, Artificial Sequence
  Synthetic oligonucleotide
tcctagcacattccgtccgcgggacctgag

SEQ ID NO: 64729 - DNA, 30 bp, Artificial Sequence
  Synthetic oligonucleotide
cgctttagtaattaggtatcatgccctgag

SEQ ID NO: 64730 - DNA, 30 bp, Artificial Sequence
  Synthetic oligonucleotide
tttacagataacacagctagaaagcctgag

SEQ ID NO: 64731 - DNA, 30 bp, Artificial Sequence
  Synthetic oligonucleotide
ctaagggtacgcaacccattttagcctgag

SEQ ID NO: 64732 - DNA, 30 bp, Artificial Sequence
  Synthetic oligonucleotide
ctgcgcagacatccataacgcacgcctgag

SEQ ID NO: 64733 - DNA, 30 bp, Artificial Sequence
  Synthetic oligonucleotide
gatgggatcggatgaacgttggtagctgag

SEQ ID NO: 64734 - DNA, 30 bp, Artificial Sequence
  Synthetic oligonucleotide
tcagcttttgggtcacatcgtgccgctgag

SEQ ID NO: 64735 - DNA, 30 bp, Artificial Sequence
  Synthetic oligonucleotide
ccgccgtattcggtgacccctcgggctgag

SEQ ID NO: 64736 - DNA, 30 bp, Artificial Sequence
  Synthetic oligonucleotide
tcacggtacggcggagctccacgtgctgag

SEQ ID NO: 64737 - DNA, 30 bp, Artificial Sequence
  Synthetic oligonucleotide
cagggtagggagttagaaggccgatctgag

SEQ ID NO: 64738 - DNA, 30 bp, Artificial Sequence
  Synthetic oligonucleotide
caataagccacaccgttagtccgatctgag

SEQ ID NO: 64739 - DNA, 30 bp, Artificial Sequence
  Synthetic oligonucleotide
tctagcgaacatatgcgtcatggctctgag

SEQ ID NO: 64740 - DNA, 30 bp, Artificial Sequence
  Synthetic oligonucleotide
ggagaagcaataaggccggcggggtctgag

SEQ ID NO: 64741 - DNA, 30 bp, Artificial Sequence
  Synthetic oligonucleotide
acaatagtgcagagcgagtaattgtctgag

SEQ ID NO: 64742 - DNA, 30 bp, Artificial Sequence
  Synthetic oligonucleotide
tgggccgatacttaggcagatcattctgag

SEQ ID NO: 64743 - DNA, 30 bp, Artificial Sequence
  Synthetic oligonucleotide
aggtctatagttgacccagcggaaagtgag

SEQ ID NO: 64744 - DNA, 30 bp, Artificial Sequence
  Synthetic oligonucleotide
tatcacttcgatgaacgtatagcaagtgag

SEQ ID NO: 64745 - DNA, 30 bp, Artificial Sequence
  Synthetic oligonucleotide
atagcgggggtaaggtctgataaccgtgag

SEQ ID NO: 64746 - DNA, 30 bp, Artificial Sequence
  Synthetic oligonucleotide
gggcttccatcggcaagattaggtggtgag

SEQ ID NO: 64747 - DNA, 30 bp, Artificial Sequence
  Synthetic oligonucleotide
ccatcaaaccaggggagatctcattgtgag

SEQ ID NO: 64748 - DNA, 30 bp, Artificial Sequence
  Synthetic oligonucleotide
caaatgcagggtgcggtacccacaattgag

SEQ ID NO: 64749 - DNA, 30 bp, Artificial Sequence
  Synthetic oligonucleotide
atccacactgtaaggcaggggttcattgag

SEQ ID NO: 64750 - DNA, 30 bp, Artificial Sequence
  Synthetic oligonucleotide
catttacgctatatcgcctggactattgag

SEQ ID NO: 64751 - DNA, 30 bp, Artificial Sequence
  Synthetic oligonucleotide
gtgcacgattccatatcagatacccttgag

SEQ ID NO: 64752 - DNA, 30 bp, Artificial Sequence
  Synthetic oligonucleotide
tcattagtccctatgtagaccctgcttgag

SEQ ID NO: 64753 - DNA, 30 bp, Artificial Sequence
  Synthetic oligonucleotide
tgttcaaaaaagattgggcacgtgcttgag

SEQ ID NO: 64754 - DNA, 30 bp, Artificial Sequence
  Synthetic oligonucleotide
acataaagagggaaagcgaatgtgcttgag

SEQ ID NO: 64755 - DNA, 30 bp, Artificial Sequence
  Synthetic oligonucleotide
taacggatgggcgagcaatataccgttgag

SEQ ID NO: 64756 - DNA, 30 bp, Artificial Sequence
  Synthetic oligonucleotide
tcacaacctagtgtcacctcaacatttgag

SEQ ID NO: 64757 - DNA, 30 bp, Artificial Sequence
  Synthetic oligonucleotide
ctgcatttggcaagtaactctgactttgag

SEQ ID NO: 64758 - DNA, 30 bp, Artificial Sequence
  Synthetic oligonucleotide
tcgggtacccatggctaagattgttttgag

SEQ ID NO: 64759 - DNA, 30 bp, Artificial Sequence
  Synthetic oligonucleotide
taaacatcgccgtagcttccgataaaatag

SEQ ID NO: 64760 - DNA, 30 bp, Artificial Sequence
  Synthetic oligonucleotide
ctgatgggtgaacataggtcgtcgaaatag

SEQ ID NO: 64761 - DNA, 30 bp, Artificial Sequence
  Synthetic oligonucleotide
gaagaaattaaaactcgattcaggcaatag

SEQ ID NO: 64762 - DNA, 30 bp, Artificial Sequence
  Synthetic oligonucleotide
gggagacaaccctcaggatagccctaatag

SEQ ID NO: 64763 - DNA, 30 bp, Artificial Sequence
  Synthetic oligonucleotide
aacagatgggagatggcagacgcgtaatag

SEQ ID NO: 64764 - DNA, 30 bp, Artificial Sequence
  Synthetic oligonucleotide
acgtaaggcgaggtcgtgcgggtgtaatag

SEQ ID NO: 64765 - DNA, 30 bp, Artificial Sequence
  Synthetic oligonucleotide
acagcccaacaatagaacggaaacacatag

SEQ ID NO: 64766 - DNA, 30 bp, Artificial Sequence
  Synthetic oligonucleotide
agcccccccttactcgaaatcatcacatag

SEQ ID NO: 64767 - DNA, 30 bp, Artificial Sequence
  Synthetic oligonucleotide
aaatggggcgtgtcaaagcaaacaccatag

SEQ ID NO: 64768 - DNA, 30 bp, Artificial Sequence
  Synthetic oligonucleotide
aggggtgcaagggacatagcggagccatag

SEQ ID NO: 64769 - DNA, 30 bp, Artificial Sequence
  Synthetic oligonucleotide
agatgcaattacggtttgattggtgcatag

SEQ ID NO: 64770 - DNA, 30 bp, Artificial Sequence
  Synthetic oligonucleotide
cggtccagtgttatggcccgagtgtcatag

SEQ ID NO: 64771 - DNA, 30 bp, Artificial Sequence
  Synthetic oligonucleotide
caacttaccatatcgtcaaattaaagatag

SEQ ID NO: 64772 - DNA, 30 bp, Artificial Sequence
  Synthetic oligonucleotide
gagacgaggtccgtttcacaccgtagatag

SEQ ID NO: 64773 - DNA, 30 bp, Artificial Sequence
  Synthetic oligonucleotide
cattcgccctcgcccttaaacatccgatag

SEQ ID NO: 64774 - DNA, 30 bp, Artificial Sequence
  Synthetic oligonucleotide
cacaggatgaattacctacaaacgcgatag

SEQ ID NO: 64775 - DNA, 30 bp, Artificial Sequence
  Synthetic oligonucleotide
ctagtagacggacagcaaggagcgggatag

SEQ ID NO: 64776 - DNA, 30 bp, Artificial Sequence
  Synthetic oligonucleotide
ggaaggttagccgggattgggatgggatag

SEQ ID NO: 64777 - DNA, 30 bp, Artificial Sequence
  Synthetic oligonucleotide
gcataagttaccaccgaggacgatggatag

SEQ ID NO: 64778 - DNA, 30 bp, Artificial Sequence
  Synthetic oligonucleotide
aatgctagggcgacgggtaaggttggatag

SEQ ID NO: 64779 - DNA, 30 bp, Artificial Sequence
  Synthetic oligonucleotide
cacaacacattgctgaacataaactgatag

SEQ ID NO: 64780 - DNA, 30 bp, Artificial Sequence
  Synthetic oligonucleotide
tcgcatcccgcaaagggggaccacatatag

SEQ ID NO: 64781 - DNA, 30 bp, Artificial Sequence
  Synthetic oligonucleotide
tgtgaaggatacctggaccgtgagatatag

SEQ ID NO: 64782 - DNA, 30 bp, Artificial Sequence
  Synthetic oligonucleotide
taatgtgggatacacggagagctgatatag

SEQ ID NO: 64783 - DNA, 30 bp, Artificial Sequence
  Synthetic oligonucleotide
ccgatcagggtctgtctcgtaacactatag

SEQ ID NO: 64784 - DNA, 30 bp, Artificial Sequence
  Synthetic oligonucleotide
acagggactagtgactgaccgttcctatag

SEQ ID NO: 64785 - DNA, 30 bp, Artificial Sequence
  Synthetic oligonucleotide
tcgggatgcggcccgtatcccagcgtatag

SEQ ID NO: 64786 - DNA, 30 bp, Artificial Sequence
  Synthetic oligonucleotide
acaaggtgggaggctaaggagttgaactag

SEQ ID NO: 64787 - DNA, 30 bp, Artificial Sequence
  Synthetic oligonucleotide
tgattagcgctcgtggttcaggcacactag

SEQ ID NO: 64788 - DNA, 30 bp, Artificial Sequence
  Synthetic oligonucleotide
cgcagtgtaccctcatttgatacagactag

SEQ ID NO: 64789 - DNA, 30 bp, Artificial Sequence
  Synthetic oligonucleotide
ggtaaaatcgaggatacaggttcagactag

SEQ ID NO: 64790 - DNA, 30 bp, Artificial Sequence
  Synthetic oligonucleotide
tcatggcgacatgtgatgtgtttatactag

SEQ ID NO: 64791 - DNA, 30 bp, Artificial Sequence
  Synthetic oligonucleotide
ttacacagctaataaggctggccgtactag

SEQ ID NO: 64792 - DNA, 30 bp, Artificial Sequence
  Synthetic oligonucleotide
cattacggattagatcgcaataacccctag

SEQ ID NO: 64793 - DNA, 30 bp, Artificial Sequence
  Synthetic oligonucleotide
ttacaatctagatcaacagcacccagctag

SEQ ID NO: 64794 - DNA, 30 bp, Artificial Sequence
  Synthetic oligonucleotide
gtgggacagccgtgtatagagggtagctag

SEQ ID NO: 64795 - DNA, 30 bp, Artificial Sequence
  Synthetic oligonucleotide
gtcatccgtaagacttgggtcctgcgctag

SEQ ID NO: 64796 - DNA, 30 bp, Artificial Sequence
  Synthetic oligonucleotide
taggaagtaatcagactcatgtgaggctag

SEQ ID NO: 64797 - DNA, 30 bp, Artificial Sequence
  Synthetic oligonucleotide
cgacccatcatacaagagctaacgctctag

SEQ ID NO: 64798 - DNA, 30 bp, Artificial Sequence
  Synthetic oligonucleotide
atacggcgtgttgacagcgtagggctctag

SEQ ID NO: 64799 - DNA, 30 bp, Artificial Sequence
  Synthetic oligonucleotide
tcgatggttaggtctgaacgggcggtctag

SEQ ID NO: 64800 - DNA, 30 bp, Artificial Sequence
  Synthetic oligonucleotide
agataacacttgaaaaggcagatgttctag

SEQ ID NO: 64801 - DNA, 30 bp, Artificial Sequence
  Synthetic oligonucleotide
gagcgcgaagacaaagatttttgtttctag

SEQ ID NO: 64802 - DNA, 30 bp, Artificial Sequence
  Synthetic oligonucleotide
cggcatggaagatacagcagatggaagtag

SEQ ID NO: 64803 - DNA, 30 bp, Artificial Sequence
  Synthetic oligonucleotide
tactcggtaggcggcctggtttaacagtag

SEQ ID NO: 64804 - DNA, 30 bp, Artificial Sequence
  Synthetic oligonucleotide
tcacggttaacatgatatgaagctgagtag

SEQ ID NO: 64805 - DNA, 30 bp, Artificial Sequence
  Synthetic oligonucleotide
caaggctcgtacgggatatacgcttagtag

SEQ ID NO: 64806 - DNA, 30 bp, Artificial Sequence
  Synthetic oligonucleotide
gcgcgccgttaacgcattaacaaaacgtag

SEQ ID NO: 64807 - DNA, 30 bp, Artificial Sequence
  Synthetic oligonucleotide
aacgcgattttgatcaccttgcctacgtag

SEQ ID NO: 64808 - DNA, 30 bp, Artificial Sequence
  Synthetic oligonucleotide
gtactaaacattggttagcaaagaccgtag

SEQ ID NO: 64809 - DNA, 30 bp, Artificial Sequence
  Synthetic oligonucleotide
agcgcggatcgtattattcttgtgccgtag

SEQ ID NO: 64810 - DNA, 30 bp, Artificial Sequence
  Synthetic oligonucleotide
aaggtagtacgagtttgctgttcagcgtag

SEQ ID NO: 64811 - DNA, 30 bp, Artificial Sequence
  Synthetic oligonucleotide
ggtacacatttgtacgtccaccgcgcgtag

SEQ ID NO: 64812 - DNA, 30 bp, Artificial Sequence
  Synthetic oligonucleotide
tcaaggcatttaaggtcactgattgcgtag

SEQ ID NO: 64813 - DNA, 30 bp, Artificial Sequence
  Synthetic oligonucleotide
cgtgggagacggggctatggctcaaggtag

SEQ ID NO: 64814 - DNA, 30 bp, Artificial Sequence
  Synthetic oligonucleotide
cagtaaaccagcaaagaggactagaggtag

SEQ ID NO: 64815 - DNA, 30 bp, Artificial Sequence
  Synthetic oligonucleotide
gccgaggtggtgacattcgttatgaggtag

SEQ ID NO: 64816 - DNA, 30 bp, Artificial Sequence
  Synthetic oligonucleotide
caaatacggattccacgggggtctaggtag

SEQ ID NO: 64817 - DNA, 30 bp, Artificial Sequence
  Synthetic oligonucleotide
ctacacaacgtatctgcagtatgagggtag

SEQ ID NO: 64818 - DNA, 30 bp, Artificial Sequence
  Synthetic oligonucleotide
tgaatagataaggcatgttgtcacgggtag

SEQ ID NO: 64819 - DNA, 30 bp, Artificial Sequence
  Synthetic oligonucleotide
aggtgtgcacgtgctcacagttacgggtag

SEQ ID NO: 64820 - DNA, 30 bp, Artificial Sequence
  Synthetic oligonucleotide
taaaagagttttggggaatgtccggggtag

SEQ ID NO: 64821 - DNA, 30 bp, Artificial Sequence
  Synthetic oligonucleotide
agggataagcatctgtaaccccatatgtag

SEQ ID NO: 64822 - DNA, 30 bp, Artificial Sequence
  Synthetic oligonucleotide
tcaggcatgcgaaggaaacgcttgctgtag

SEQ ID NO: 64823 - DNA, 30 bp, Artificial Sequence
  Synthetic oligonucleotide
catgatgtgctaatgtaccttggagtgtag

SEQ ID NO: 64824 - DNA, 30 bp, Artificial Sequence
  Synthetic oligonucleotide
caatgagcaagatccgcaacgaccgtgtag

SEQ ID NO: 64825 - DNA, 30 bp, Artificial Sequence
  Synthetic oligonucleotide
cggcgcagttaactgatagaacaggtgtag

SEQ ID NO: 64826 - DNA, 30 bp, Artificial Sequence
  Synthetic oligonucleotide
tcgaggctggtcagaattgcccctttgtag

SEQ ID NO: 64827 - DNA, 30 bp, Artificial Sequence
  Synthetic oligonucleotide
agcgggatggggtactcaaggaaacattag

SEQ ID NO: 64828 - DNA, 30 bp, Artificial Sequence
  Synthetic oligonucleotide
ggacatggtggtttcggctaagatcattag

SEQ ID NO: 64829 - DNA, 30 bp, Artificial Sequence
  Synthetic oligonucleotide
catgcaccagtgctgggggccagagattag

SEQ ID NO: 64830 - DNA, 30 bp, Artificial Sequence
  Synthetic oligonucleotide
agtgatggagataaaacgtgaatatattag

SEQ ID NO: 64831 - DNA, 30 bp, Artificial Sequence
  Synthetic oligonucleotide
aggggcgagtaccatgcactccaaacttag

SEQ ID NO: 64832 - DNA, 30 bp, Artificial Sequence
  Synthetic oligonucleotide
aaaccagtgctaggagggccctgaacttag

SEQ ID NO: 64833 - DNA, 30 bp, Artificial Sequence
  Synthetic oligonucleotide
agcgatagtaagaggcatttggcgacttag

SEQ ID NO: 64834 - DNA, 30 bp, Artificial Sequence
  Synthetic oligonucleotide
caaatgctaatttacgaacttgcgacttag

SEQ ID NO: 64835 - DNA, 30 bp, Artificial Sequence
  Synthetic oligonucleotide
atcgatgtcatcggaacaactggtccttag

SEQ ID NO: 64836 - DNA, 30 bp, Artificial Sequence
  Synthetic oligonucleotide
cacacccgttacagcaggtacctagcttag

SEQ ID NO: 64837 - DNA, 30 bp, Artificial Sequence
  Synthetic oligonucleotide
agcgatgactccacggttaaaaacagttag

SEQ ID NO: 64838 - DNA, 30 bp, Artificial Sequence
  Synthetic oligonucleotide
ttacgaaagtggaataggcgtgacagttag

SEQ ID NO: 64839 - DNA, 30 bp, Artificial Sequence
  Synthetic oligonucleotide
tccaagacagtagggaatactgctagttag

SEQ ID NO: 64840 - DNA, 29 bp, Artificial Sequence
  Synthetic oligonucleotide
tacggtgagctgatagcgtcatgcgttag

SEQ ID NO: 64841 - DNA, 30 bp, Artificial Sequence
  Synthetic oligonucleotide
atcgtttaggagatggcgggctcaggttag

SEQ ID NO: 64842 - DNA, 30 bp, Artificial Sequence
  Synthetic oligonucleotide
gggatgagttgaatgtgaccattaggttag

SEQ ID NO: 64843 - DNA, 30 bp, Artificial Sequence
  Synthetic oligonucleotide
ttgcgtacactcggggaagtgggcgtttag

SEQ ID NO: 64844 - DNA, 30 bp, Artificial Sequence
  Synthetic oligonucleotide
taaggagagccaaaccggcactgcttttag

SEQ ID NO: 64845 - DNA, 30 bp, Artificial Sequence
  Synthetic oligonucleotide
cggctcccaaggcaacaattgaagcaaacg

SEQ ID NO: 64846 - DNA, 30 bp, Artificial Sequence
  Synthetic oligonucleotide
tacactagcgggcgaacagagtggcaaacg

SEQ ID NO: 64847 - DNA, 30 bp, Artificial Sequence
  Synthetic oligonucleotide
cttgccagcttgatcacaccaaatcaaacg

SEQ ID NO: 64848 - DNA, 30 bp, Artificial Sequence
  Synthetic oligonucleotide
gcctgggagatgtgttcaaactgtcaaacg

SEQ ID NO: 64849 - DNA, 30 bp, Artificial Sequence
  Synthetic oligonucleotide
tacgggatggggggcatatggtgtgaaacg

SEQ ID NO: 64850 - DNA, 30 bp, Artificial Sequence
  Synthetic oligonucleotide
agggagaccttattcagcagggagtaaacg

SEQ ID NO: 64851 - DNA, 30 bp, Artificial Sequence
  Synthetic oligonucleotide
tgagtgtaagcggttagatcctcttaaacg

SEQ ID NO: 64852 - DNA, 30 bp, Artificial Sequence
  Synthetic oligonucleotide
agttggggtgagaggacaggagaaacaacg

SEQ ID NO: 64853 - DNA, 30 bp, Artificial Sequence
  Synthetic oligonucleotide
gatcggatggaatacacgagctgtgcaacg

SEQ ID NO: 64854 - DNA, 30 bp, Artificial Sequence
  Synthetic oligonucleotide
atgatatcttcaataggggtatggtcaacg

SEQ ID NO: 64855 - DNA, 30 bp, Artificial Sequence
  Synthetic oligonucleotide
gccaggtcgatcatagtcaagtggtcaacg

SEQ ID NO: 64856 - DNA, 30 bp, Artificial Sequence
  Synthetic oligonucleotide
cgtgggaagctggcgacaggttaaagaacg

SEQ ID NO: 64857 - DNA, 30 bp, Artificial Sequence
  Synthetic oligonucleotide
acggggggctccggcagtgatgcaagaacg

SEQ ID NO: 64858 - DNA, 30 bp, Artificial Sequence
  Synthetic oligonucleotide
cgttcaagggtcgaaaataaattaagaacg

SEQ ID NO: 64859 - DNA, 30 bp, Artificial Sequence
  Synthetic oligonucleotide
accacgtagtatggtaggtggcttcgaacg

SEQ ID NO: 64860 - DNA, 30 bp, Artificial Sequence
  Synthetic oligonucleotide
gctgggggtgagttgctaaaacgcggaacg

SEQ ID NO: 64861 - DNA, 30 bp, Artificial Sequence
  Synthetic oligonucleotide
acatctcaacatatctcagacctcggaacg

SEQ ID NO: 64862 - DNA, 30 bp, Artificial Sequence
  Synthetic oligonucleotide
aacttggaaaaaggaagtaatgttggaacg

SEQ ID NO: 64863 - DNA, 30 bp, Artificial Sequence
  Synthetic oligonucleotide
gttaagctggagcaccccaatacgtgaacg

SEQ ID NO: 64864 - DNA, 30 bp, Artificial Sequence
  Synthetic oligonucleotide
tagtcgggggtcatcgtggtaggcataacg

SEQ ID NO: 64865 - DNA, 30 bp, Artificial Sequence
  Synthetic oligonucleotide
gaggcgaaatagaagggatagttcataacg

SEQ ID NO: 64866 - DNA, 30 bp, Artificial Sequence
  Synthetic oligonucleotide
acaaattgcgggtaggcgccaccagtaacg

SEQ ID NO: 64867 - DNA, 30 bp, Artificial Sequence
  Synthetic oligonucleotide
aagctgagggcaggggtagtctgagtaacg

SEQ ID NO: 64868 - DNA, 30 bp, Artificial Sequence
  Synthetic oligonucleotide
acacactttgcctgtgggtctccgaacacg

SEQ ID NO: 64869 - DNA, 30 bp, Artificial Sequence
  Synthetic oligonucleotide
gttgagagcctccttcggaccggtcacacg

SEQ ID NO: 64870 - DNA, 30 bp, Artificial Sequence
  Synthetic oligonucleotide
aacgtgggtgtatcaggcgatctcgacacg

SEQ ID NO: 64871 - DNA, 30 bp, Artificial Sequence
  Synthetic oligonucleotide
gtcgaaccaagagttctgacgacatccacg

SEQ ID NO: 64872 - DNA, 30 bp, Artificial Sequence
  Synthetic oligonucleotide
ttgccaagtagttcttccccgagttccacg

SEQ ID NO: 64873 - DNA, 30 bp, Artificial Sequence
  Synthetic oligonucleotide
agggtggagattctacgttgcggaagcacg

SEQ ID NO: 64874 - DNA, 30 bp, Artificial Sequence
  Synthetic oligonucleotide
ccacagagaaacggcctcccccaccgcacg

SEQ ID NO: 64875 - DNA, 30 bp, Artificial Sequence
  Synthetic oligonucleotide
gccattgatagagattcaggcaagcgcacg

SEQ ID NO: 64876 - DNA, 30 bp, Artificial Sequence
  Synthetic oligonucleotide
atctgtggccggcgtggaaacctatgcacg

SEQ ID NO: 64877 - DNA, 29 bp, Artificial Sequence
  Synthetic oligonucleotide
aggaatattggttagcgtagaaaatcacg

SEQ ID NO: 64878 - DNA, 30 bp, Artificial Sequence
  Synthetic oligonucleotide
cgccatctaggaaccacacctgaaatcacg

SEQ ID NO: 64879 - DNA, 30 bp, Artificial Sequence
  Synthetic oligonucleotide
acacatgtacattagcggcgtcccctcacg

SEQ ID NO: 64880 - DNA, 30 bp, Artificial Sequence
  Synthetic oligonucleotide
gggtcttgggttgattggaatgaagtcacg

SEQ ID NO: 64881 - DNA, 30 bp, Artificial Sequence
  Synthetic oligonucleotide
tctcccgtgaaacggtgaataatcaagacg

SEQ ID NO: 64882 - DNA, 30 bp, Artificial Sequence
  Synthetic oligonucleotide
ccacagacttcaatccagaagcgtaagacg

SEQ ID NO: 64883 - DNA, 30 bp, Artificial Sequence
  Synthetic oligonucleotide
gacaaagccggatccaattctagccagacg

SEQ ID NO: 64884 - DNA, 30 bp, Artificial Sequence
  Synthetic oligonucleotide
gcatgtggaagtcctgactaggagcagacg

SEQ ID NO: 64885 - DNA, 30 bp, Artificial Sequence
  Synthetic oligonucleotide
accagagccagatgagagttgaatgagacg

SEQ ID NO: 64886 - DNA, 31 bp, Artificial Sequence
  Synthetic oligonucleotide
ccacgttgtaatccacaaaagagatgagacg

SEQ ID NO: 64887 - DNA, 30 bp, Artificial Sequence
  Synthetic oligonucleotide
cggtagacaggtatcttaggatggtagacg

SEQ ID NO: 64888 - DNA, 30 bp, Artificial Sequence
  Synthetic oligonucleotide
tgccggacgggggagggcgaactttagacg

SEQ ID NO: 64889 - DNA, 30 bp, Artificial Sequence
  Synthetic oligonucleotide
cttagacttagggcatcgccaacaccgacg

SEQ ID NO: 64890 - DNA, 30 bp, Artificial Sequence
  Synthetic oligonucleotide
cgattgctttgcaaacggataaggtcgacg

SEQ ID NO: 64891 - DNA, 30 bp, Artificial Sequence
  Synthetic oligonucleotide
taggcccgggatggcatcagtcagaggacg

SEQ ID NO: 64892 - DNA, 30 bp, Artificial Sequence
  Synthetic oligonucleotide
gtcgacgaacggctgaagagggtacggacg

SEQ ID NO: 64893 - DNA, 30 bp, Artificial Sequence
  Synthetic oligonucleotide
accatccggtcgcggcggataaaccggacg

SEQ ID NO: 64894 - DNA, 30 bp, Artificial Sequence
  Synthetic oligonucleotide
ctggcgcatctcgcgatggattttgggacg

SEQ ID NO: 64895 - DNA, 30 bp, Artificial Sequence
  Synthetic oligonucleotide
cgaatcaaagagggtgacccaggatggacg

SEQ ID NO: 64896 - DNA, 30 bp, Artificial Sequence
  Synthetic oligonucleotide
cgttcccgacgttgactggggggatggacg

SEQ ID NO: 64897 - DNA, 30 bp, Artificial Sequence
  Synthetic oligonucleotide
gcttaggagagcaacatatagcattggacg

SEQ ID NO: 64898 - DNA, 30 bp, Artificial Sequence
  Synthetic oligonucleotide
aggcacaagcgtgaggtatgctaagtgacg

SEQ ID NO: 64899 - DNA, 30 bp, Artificial Sequence
  Synthetic oligonucleotide
acggaagtgtaatccgatatagtgttgacg

SEQ ID NO: 64900 - DNA, 30 bp, Artificial Sequence
  Synthetic oligonucleotide
aacgtaagcgagatacgactgaaaaatacg

SEQ ID NO: 64901 - DNA, 30 bp, Artificial Sequence
  Synthetic oligonucleotide
ccgcctcgggagagccttcgtgtaaatacg

SEQ ID NO: 64902 - DNA, 30 bp, Artificial Sequence
  Synthetic oligonucleotide
accatggggttggctgataaaaacaatacg

SEQ ID NO: 64903 - DNA, 30 bp, Artificial Sequence
  Synthetic oligonucleotide
cttgaggagtcgggcataacgatgcatacg

SEQ ID NO: 64904 - DNA, 30 bp, Artificial Sequence
  Synthetic oligonucleotide
gtggaaaccatgtttcaacgtagggatacg

SEQ ID NO: 64905 - DNA, 30 bp, Artificial Sequence
  Synthetic oligonucleotide
ggtcaagtgaatgaagtaaggcgttatacg

SEQ ID NO: 64906 - DNA, 30 bp, Artificial Sequence
  Synthetic oligonucleotide
gcgggcttcgattggatgcgtgagactacg

SEQ ID NO: 64907 - DNA, 30 bp, Artificial Sequence
  Synthetic oligonucleotide
ccaaacatgtatctgcgcgaacaccctacg

SEQ ID NO: 64908 - DNA, 30 bp, Artificial Sequence
  Synthetic oligonucleotide
aagagtagccgtcatttgcgcaaagctacg

SEQ ID NO: 64909 - DNA, 30 bp, Artificial Sequence
  Synthetic oligonucleotide
tgaaggctgacgactaccggtgtagctacg

SEQ ID NO: 64910 - DNA, 30 bp, Artificial Sequence
  Synthetic oligonucleotide
tcacgggatcactactaagcacccgctacg

SEQ ID NO: 64911 - DNA, 30 bp, Artificial Sequence
  Synthetic oligonucleotide
agggccgggaaaatataggcacatgctacg

SEQ ID NO: 64912 - DNA, 30 bp, Artificial Sequence
  Synthetic oligonucleotide
tgagaaaccttggacatgagtggtgctacg

SEQ ID NO: 64913 - DNA, 30 bp, Artificial Sequence
  Synthetic oligonucleotide
aaaggagctaaaaggttgatatagtctacg

SEQ ID NO: 64914 - DNA, 30 bp, Artificial Sequence
  Synthetic oligonucleotide
catagggagcaaagcgcagaaatcagtacg

SEQ ID NO: 64915 - DNA, 30 bp, Artificial Sequence
  Synthetic oligonucleotide
cgtcgaaacacagcaggctgtaatagtacg

SEQ ID NO: 64916 - DNA, 30 bp, Artificial Sequence
  Synthetic oligonucleotide
ggtgggttatagtgtgacaacaagcgtacg

SEQ ID NO: 64917 - DNA, 30 bp, Artificial Sequence
  Synthetic oligonucleotide
ccgactggtctgacgatggattggcgtacg

SEQ ID NO: 64918 - DNA, 30 bp, Artificial Sequence
  Synthetic oligonucleotide
ctacatcaccgagtaggatgtgacggtacg

SEQ ID NO: 64919 - DNA, 30 bp, Artificial Sequence
  Synthetic oligonucleotide
agatattgcaatcagcacataaagggtacg

SEQ ID NO: 64920 - DNA, 30 bp, Artificial Sequence
  Synthetic oligonucleotide
tagccagaggactaacaagggaagggtacg

SEQ ID NO: 64921 - DNA, 30 bp, Artificial Sequence
  Synthetic oligonucleotide
gggatcagaaggaaaaaccggccttgtacg

SEQ ID NO: 64922 - DNA, 30 bp, Artificial Sequence
  Synthetic oligonucleotide
tgagacgtcggggggacagctccttgtacg

SEQ ID NO: 64923 - DNA, 30 bp, Artificial Sequence
  Synthetic oligonucleotide
catagagttgacagccaatacatttgtacg

SEQ ID NO: 64924 - DNA, 30 bp, Artificial Sequence
  Synthetic oligonucleotide
agaatgagtatgcggaagtacggaattacg

SEQ ID NO: 64925 - DNA, 30 bp, Artificial Sequence
  Synthetic oligonucleotide
tggccggcaagtgaagtggacatcattacg

SEQ ID NO: 64926 - DNA, 30 bp, Artificial Sequence
  Synthetic oligonucleotide
tcatgtagaccacaacacactattgaaccg

SEQ ID NO: 64927 - DNA, 30 bp, Artificial Sequence
  Synthetic oligonucleotide
ttaagagtgagacatgggaaagtataaccg

SEQ ID NO: 64928 - DNA, 30 bp, Artificial Sequence
  Synthetic oligonucleotide
tcggaacagttgtaaagggtggtataaccg

SEQ ID NO: 64929 - DNA, 30 bp, Artificial Sequence
  Synthetic oligonucleotide
agaccggagatgttgaaaagacacccaccg

SEQ ID NO: 64930 - DNA, 30 bp, Artificial Sequence
  Synthetic oligonucleotide
agaacgttaccttggtaaattaccccaccg

SEQ ID NO: 64931 - DNA, 30 bp, Artificial Sequence
  Synthetic oligonucleotide
cgacgataactacgatagaggagtgcaccg

SEQ ID NO: 64932 - DNA, 30 bp, Artificial Sequence
  Synthetic oligonucleotide
ggggaaccactaaatacagtgacatcaccg

SEQ ID NO: 64933 - DNA, 30 bp, Artificial Sequence
  Synthetic oligonucleotide
tgagtgagaatatccagaatagcttcaccg

SEQ ID NO: 64934 - DNA, 30 bp, Artificial Sequence
  Synthetic oligonucleotide
ggtggaagatggtgcctaaaggcttcaccg

SEQ ID NO: 64935 - DNA, 30 bp, Artificial Sequence
  Synthetic oligonucleotide
cgccacggaatttaacgaaaaagaagaccg

SEQ ID NO: 64936 - DNA, 30 bp, Artificial Sequence
  Synthetic oligonucleotide
gtaagttaccaaagtgctcctaacagaccg

SEQ ID NO: 64937 - DNA, 30 bp, Artificial Sequence
  Synthetic oligonucleotide
tccgtcatgaacatcaggaaccctcgaccg

SEQ ID NO: 64938 - DNA, 30 bp, Artificial Sequence
  Synthetic oligonucleotide
ccttccgaagggaggcactatagaggaccg

SEQ ID NO: 64939 - DNA, 30 bp, Artificial Sequence
  Synthetic oligonucleotide
cgggttaataacgatctcccgggaggaccg

SEQ ID NO: 64940 - DNA, 30 bp, Artificial Sequence
  Synthetic oligonucleotide
aggctcacaaccaagataaacgaatgaccg

SEQ ID NO: 64941 - DNA, 30 bp, Artificial Sequence
  Synthetic oligonucleotide
agcgagtacggaccgctatactggataccg

SEQ ID NO: 64942 - DNA, 30 bp, Artificial Sequence
  Synthetic oligonucleotide
gaatagaagtaggaataaccagcgctaccg

SEQ ID NO: 64943 - DNA, 30 bp, Artificial Sequence
  Synthetic oligonucleotide
cacgatgttgggaattatgggcacttaccg

SEQ ID NO: 64944 - DNA, 30 bp, Artificial Sequence
  Synthetic oligonucleotide
ctgagacctttgtacagggtatgcttaccg

SEQ ID NO: 64945 - DNA, 30 bp, Artificial Sequence
  Synthetic oligonucleotide
tcatccgttggtcgttagagagatttaccg

SEQ ID NO: 64946 - DNA, 30 bp, Artificial Sequence
  Synthetic oligonucleotide
ccggaggttacataataatgaaaaaacccg

SEQ ID NO: 64947 - DNA, 30 bp, Artificial Sequence
  Synthetic oligonucleotide
agcaaaatctgcttcgtatagacagacccg

SEQ ID NO: 64948 - DNA, 30 bp, Artificial Sequence
  Synthetic oligonucleotide
acgggcgacggtcgctatcgccagtacccg

SEQ ID NO: 64949 - DNA, 30 bp, Artificial Sequence
  Synthetic oligonucleotide
ctgaaagtgacagagctcgagtagaccccg

SEQ ID NO: 64950 - DNA, 30 bp, Artificial Sequence
  Synthetic oligonucleotide
ccaataacgagtccagttaaaccacccccg

SEQ ID NO: 64951 - DNA, 30 bp, Artificial Sequence
  Synthetic oligonucleotide
agggcctatagagtagtcgcacgggccccg

SEQ ID NO: 64952 - DNA, 30 bp, Artificial Sequence
  Synthetic oligonucleotide
gcgtagccacacccttcttaacaaagcccg

SEQ ID NO: 64953 - DNA, 30 bp, Artificial Sequence
  Synthetic oligonucleotide
atcattgacagtgttaaagaattgagcccg

SEQ ID NO: 64954 - DNA, 30 bp, Artificial Sequence
  Synthetic oligonucleotide
aggcggcaggagttaaaatgcaaacgcccg

SEQ ID NO: 64955 - DNA, 30 bp, Artificial Sequence
  Synthetic oligonucleotide
attgaaaggagtagccgctctttgcgcccg

SEQ ID NO: 64956 - DNA, 30 bp, Artificial Sequence
  Synthetic oligonucleotide
gtccttactgcagaaaattccccgatcccg

SEQ ID NO: 64957 - DNA, 30 bp, Artificial Sequence
  Synthetic oligonucleotide
ttacgactaccccggggcatcgcgatcccg

SEQ ID NO: 64958 - DNA, 30 bp, Artificial Sequence
  Synthetic oligonucleotide
tcgtcaacctatggtatatgggtccagccg

SEQ ID NO: 64959 - DNA, 30 bp, Artificial Sequence
  Synthetic oligonucleotide
gtaccgtgatcgtattaacaataagagccg

SEQ ID NO: 64960 - DNA, 30 bp, Artificial Sequence
  Synthetic oligonucleotide
tgggaagtaaggataacctttgcatagccg

SEQ ID NO: 64961 - DNA, 30 bp, Artificial Sequence
  Synthetic oligonucleotide
ttgtacaaggggacctacttcccgccgccg

SEQ ID NO: 64962 - DNA, 30 bp, Artificial Sequence
  Synthetic oligonucleotide
catgagggcgatctggagagatgatcgccg

SEQ ID NO: 64963 - DNA, 30 bp, Artificial Sequence
  Synthetic oligonucleotide
ctgagcctaccaatagcaagattgaggccg

SEQ ID NO: 64964 - DNA, 30 bp, Artificial Sequence
  Synthetic oligonucleotide
cagagagttcgatttgcaacataacggccg

SEQ ID NO: 64965 - DNA, 30 bp, Artificial Sequence
  Synthetic oligonucleotide
cagcagctatacctgcgagtgcaccggccg

SEQ ID NO: 64966 - DNA, 30 bp, Artificial Sequence
  Synthetic oligonucleotide
tgcttgcctggtccaaagcatagtcggccg

SEQ ID NO: 64967 - DNA, 30 bp, Artificial Sequence
  Synthetic oligonucleotide
actctaacaacaaggtcctaaacctggccg

SEQ ID NO: 64968 - DNA, 30 bp, Artificial Sequence
  Synthetic oligonucleotide
taaaaactcaccgagagtggtatttggccg

SEQ ID NO: 64969 - DNA, 30 bp, Artificial Sequence
  Synthetic oligonucleotide
atcaggcgtgcccatataaatagaatgccg

SEQ ID NO: 64970 - DNA, 28 bp, Artificial Sequence
  Synthetic oligonucleotide
tgcccgtataagaaggatagatatgccg

SEQ ID NO: 64971 - DNA, 30 bp, Artificial Sequence
  Synthetic oligonucleotide
caagaatgtaatacgtctagggctatgccg

SEQ ID NO: 64972 - DNA, 30 bp, Artificial Sequence
  Synthetic oligonucleotide
aacaggtccttaaggcactctcaactgccg

SEQ ID NO: 64973 - DNA, 30 bp, Artificial Sequence
  Synthetic oligonucleotide
atgtgcaaataattggaatcaactctgccg

SEQ ID NO: 64974 - DNA, 30 bp, Artificial Sequence
  Synthetic oligonucleotide
atgggatccggtccagatgagatagtgccg

SEQ ID NO: 64975 - DNA, 30 bp, Artificial Sequence
  Synthetic oligonucleotide
cccattgatgattgtgcgaataatgtgccg

SEQ ID NO: 64976 - DNA, 30 bp, Artificial Sequence
  Synthetic oligonucleotide
cagatggcggtacagccgagtgaattgccg

SEQ ID NO: 64977 - DNA, 30 bp, Artificial Sequence
  Synthetic oligonucleotide
catttgtgaatctccatgaaattcttgccg

SEQ ID NO: 64978 - DNA, 30 bp, Artificial Sequence
  Synthetic oligonucleotide
aaagcgtgatttgagaacccatcgttgccg

SEQ ID NO: 64979 - DNA, 30 bp, Artificial Sequence
  Synthetic oligonucleotide
taagaagcttaaggcttaggcgtacatccg

SEQ ID NO: 64980 - DNA, 30 bp, Artificial Sequence
  Synthetic oligonucleotide
aggagtttcgcgaggatcagttagcatccg

SEQ ID NO: 64981 - DNA, 30 bp, Artificial Sequence
  Synthetic oligonucleotide
agtggaagtttaggggcgtgataggatccg

SEQ ID NO: 64982 - DNA, 30 bp, Artificial Sequence
  Synthetic oligonucleotide
gtgaatatagattgatacctcgactatccg

SEQ ID NO: 64983 - DNA, 30 bp, Artificial Sequence
  Synthetic oligonucleotide
cagagtacagtggaagggggatagtatccg

SEQ ID NO: 64984 - DNA, 31 bp, Artificial Sequence
  Synthetic oligonucleotide
ggcaatgactctcgaactggacatttatccg

SEQ ID NO: 64985 - DNA, 30 bp, Artificial Sequence
  Synthetic oligonucleotide
caacgtgctgatctctgaaggatacctccg

SEQ ID NO: 64986 - DNA, 30 bp, Artificial Sequence
  Synthetic oligonucleotide
cgtgtcaagccttgcctgggtagggctccg

SEQ ID NO: 64987 - DNA, 30 bp, Artificial Sequence
  Synthetic oligonucleotide
acctgtggaagggacttactgccatctccg

SEQ ID NO: 64988 - DNA, 30 bp, Artificial Sequence
  Synthetic oligonucleotide
ggtcactgggtagcgagcttattttctccg

SEQ ID NO: 64989 - DNA, 30 bp, Artificial Sequence
  Synthetic oligonucleotide
tggcaacaaaaccgcgtaagcactagtccg

SEQ ID NO: 64990 - DNA, 30 bp, Artificial Sequence
  Synthetic oligonucleotide
ggctgctatgggtacgtacatcaaggtccg

SEQ ID NO: 64991 - DNA, 30 bp, Artificial Sequence
  Synthetic oligonucleotide
cagcgccaagcatcaaggcttagatgtccg

SEQ ID NO: 64992 - DNA, 30 bp, Artificial Sequence
  Synthetic oligonucleotide
cagtgtaaagctgaatgcatcagctgtccg

SEQ ID NO: 64993 - DNA, 30 bp, Artificial Sequence
  Synthetic oligonucleotide
gtgtagaaacgcatgttccgtaggtgtccg

SEQ ID NO: 64994 - DNA, 30 bp, Artificial Sequence
  Synthetic oligonucleotide
gaacggctaagggattggacgtacattccg

SEQ ID NO: 64995 - DNA, 30 bp, Artificial Sequence
  Synthetic oligonucleotide
ctggagacaaattgacagaacgaccttccg

SEQ ID NO: 64996 - DNA, 30 bp, Artificial Sequence
  Synthetic oligonucleotide
atgattacatttccgagttcaagagttccg

SEQ ID NO: 64997 - DNA, 30 bp, Artificial Sequence
  Synthetic oligonucleotide
tggacttttatagaatgcgagaagtttccg

SEQ ID NO: 64998 - DNA, 30 bp, Artificial Sequence
  Synthetic oligonucleotide
agttcgctaaccgagtcggccaccaaagcg

SEQ ID NO: 64999 - DNA, 30 bp, Artificial Sequence
  Synthetic oligonucleotide
caggtaggacggacaccgggaaaagaagcg

SEQ ID NO: 65000 - DNA, 30 bp, Artificial Sequence
  Synthetic oligonucleotide
gcacaggttatggccattggaatctaagcg

SEQ ID NO: 65001 - DNA, 30 bp, Artificial Sequence
  Synthetic oligonucleotide
tacaagccaaaagaggtggcaataacagcg

SEQ ID NO: 65002 - DNA, 30 bp, Artificial Sequence
  Synthetic oligonucleotide
cctcatattagcctcgccagcctaacagcg

SEQ ID NO: 65003 - DNA, 30 bp, Artificial Sequence
  Synthetic oligonucleotide
aaacctaatcgatgtggataagccacagcg

SEQ ID NO: 65004 - DNA, 30 bp, Artificial Sequence
  Synthetic oligonucleotide
cgtaggcggacatcgagtgaatagacagcg

SEQ ID NO: 65005 - DNA, 30 bp, Artificial Sequence
  Synthetic oligonucleotide
atgtcgagcagggacagcggttggacagcg

SEQ ID NO: 65006 - DNA, 30 bp, Artificial Sequence
  Synthetic oligonucleotide
aacgtcgcgaataagggaatttacccagcg

SEQ ID NO: 65007 - DNA, 30 bp, Artificial Sequence
  Synthetic oligonucleotide
gccagcggacttgattgataaattccagcg

SEQ ID NO: 65008 - DNA, 30 bp, Artificial Sequence
  Synthetic oligonucleotide
tgttccgccgatagtcggtctagtgcagcg

SEQ ID NO: 65009 - DNA, 30 bp, Artificial Sequence
  Synthetic oligonucleotide
gggaccttattaggtaacttagtatcagcg

SEQ ID NO: 65010 - DNA, 30 bp, Artificial Sequence
  Synthetic oligonucleotide
cgcgcatggttgtacccatacccttcagcg

SEQ ID NO: 65011 - DNA, 30 bp, Artificial Sequence
  Synthetic oligonucleotide
caattgaggataataagaatcaaaagagcg

SEQ ID NO: 65012 - DNA, 30 bp, Artificial Sequence
  Synthetic oligonucleotide
agtgcaacttcaaaattgattccgagagcg

SEQ ID NO: 65013 - DNA, 30 bp, Artificial Sequence
  Synthetic oligonucleotide
acgtgtttcagtacctgcaaggatagagcg

SEQ ID NO: 65014 - DNA, 30 bp, Artificial Sequence
  Synthetic oligonucleotide
cagcgcatttcaactttgcgaactagagcg

SEQ ID NO: 65015 - DNA, 30 bp, Artificial Sequence
  Synthetic oligonucleotide
cggttacaaagatcaacttagaaacgagcg

SEQ ID NO: 65016 - DNA, 30 bp, Artificial Sequence
  Synthetic oligonucleotide
acaggtagcgaataagggggcggccgagcg

SEQ ID NO: 65017 - DNA, 30 bp, Artificial Sequence
  Synthetic oligonucleotide
aaggatacatccgagtgcaccaagcgagcg

SEQ ID NO: 65018 - DNA, 30 bp, Artificial Sequence
  Synthetic oligonucleotide
gcgcaaattgtctgatgtaaatagtgagcg

SEQ ID NO: 65019 - DNA, 30 bp, Artificial Sequence
  Synthetic oligonucleotide
gcgtgcccggaatacttttataggtgagcg

SEQ ID NO: 65020 - DNA, 30 bp, Artificial Sequence
  Synthetic oligonucleotide
ttgcataaccgctgcagtaaggggtgagcg

SEQ ID NO: 65021 - DNA, 30 bp, Artificial Sequence
  Synthetic oligonucleotide
attacatgtcaagctggaaatggaatagcg

SEQ ID NO: 65022 - DNA, 30 bp, Artificial Sequence
  Synthetic oligonucleotide
tcatgcctgccgggacagccccacatagcg

SEQ ID NO: 65023 - DNA, 30 bp, Artificial Sequence
  Synthetic oligonucleotide
gaaataccgcgaggtggcggctgagtagcg

SEQ ID NO: 65024 - DNA, 30 bp, Artificial Sequence
  Synthetic oligonucleotide
ggcgagtatgtcgccgggatacacgtagcg

SEQ ID NO: 65025 - DNA, 30 bp, Artificial Sequence
  Synthetic oligonucleotide
acttatcaggctcagatccatagcttagcg

SEQ ID NO: 65026 - DNA, 30 bp, Artificial Sequence
  Synthetic oligonucleotide
tcgggcaggatctaagttcgcgtgaacgcg

SEQ ID NO: 65027 - DNA, 30 bp, Artificial Sequence
  Synthetic oligonucleotide
gtcgatcaaagagaaatttacgaccacgcg

SEQ ID NO: 65028 - DNA, 30 bp, Artificial Sequence
  Synthetic oligonucleotide
acagcataagttgacagagatgcggacgcg

SEQ ID NO: 65029 - DNA, 30 bp, Artificial Sequence
  Synthetic oligonucleotide
gagatactagcgtgagcgtaagagtacgcg

SEQ ID NO: 65030 - DNA, 30 bp, Artificial Sequence
  Synthetic oligonucleotide
aagtctgaagtttcagccgagagtaccgcg

SEQ ID NO: 65031 - DNA, 30 bp, Artificial Sequence
  Synthetic oligonucleotide
tacagcaaagacttaagtcataaccccgcg

SEQ ID NO: 65032 - DNA, 30 bp, Artificial Sequence
  Synthetic oligonucleotide
gcatgggcacacaacgcgttgaatcccgcg

SEQ ID NO: 65033 - DNA, 30 bp, Artificial Sequence
  Synthetic oligonucleotide
aacagattcgacctatcgcgaaccgccgcg

SEQ ID NO: 65034 - DNA, 30 bp, Artificial Sequence
  Synthetic oligonucleotide
caggcagcgacaagtcgagggcgatccgcg

SEQ ID NO: 65035 - DNA, 30 bp, Artificial Sequence
  Synthetic oligonucleotide
ggtgcgaagttcaacttaagatggtccgcg

SEQ ID NO: 65036 - DNA, 30 bp, Artificial Sequence
  Synthetic oligonucleotide
cgagtaactgaccacttgactatcagcgcg

SEQ ID NO: 65037 - DNA, 30 bp, Artificial Sequence
  Synthetic oligonucleotide
gtcacccacaaagcgatacaattgagcgcg

SEQ ID NO: 65038 - DNA, 30 bp, Artificial Sequence
  Synthetic oligonucleotide
catatgttagtttcgatccagcgtagcgcg

SEQ ID NO: 65039 - DNA, 30 bp, Artificial Sequence
  Synthetic oligonucleotide
ggggcatgggggtttaaggatcatcgcgcg

SEQ ID NO: 65040 - DNA, 30 bp, Artificial Sequence
  Synthetic oligonucleotide
acgatacccgtatatctcctccgtggcgcg

SEQ ID NO: 65041 - DNA, 30 bp, Artificial Sequence
  Synthetic oligonucleotide
gggacatccggtcttagaacaatgtgcgcg

SEQ ID NO: 65042 - DNA, 30 bp, Artificial Sequence
  Synthetic oligonucleotide
actcagataaagacgatttcacattgcgcg

SEQ ID NO: 65043 - DNA, 30 bp, Artificial Sequence
  Synthetic oligonucleotide
taaatcactgcgagaaagtgcccttgcgcg

SEQ ID NO: 65044 - DNA, 30 bp, Artificial Sequence
  Synthetic oligonucleotide
aaacggtattagaggatcaccataatcgcg

SEQ ID NO: 65045 - DNA, 30 bp, Artificial Sequence
  Synthetic oligonucleotide
aaaaggactcgacgagttaccaacatcgcg

SEQ ID NO: 65046 - DNA, 30 bp, Artificial Sequence
  Synthetic oligonucleotide
aagaatcgggagcaggaatgctcattcgcg

SEQ ID NO: 65047 - DNA, 30 bp, Artificial Sequence
  Synthetic oligonucleotide
tggctccaggtgaaatgatctcggttcgcg

SEQ ID NO: 65048 - DNA, 30 bp, Artificial Sequence
  Synthetic oligonucleotide
tcatgacgtataacctacaagggaaaggcg

SEQ ID NO: 65049 - DNA, 30 bp, Artificial Sequence
  Synthetic oligonucleotide
tagggcaggatacgtttctaggacaaggcg

SEQ ID NO: 65050 - DNA, 30 bp, Artificial Sequence
  Synthetic oligonucleotide
ctggtatggtgttcgacatacttgaaggcg

SEQ ID NO: 65051 - DNA, 30 bp, Artificial Sequence
  Synthetic oligonucleotide
ctacgggattacgtcgaaaaaggacaggcg

SEQ ID NO: 65052 - DNA, 30 bp, Artificial Sequence
  Synthetic oligonucleotide
gttgtggtgttgctggacttggtacaggcg

SEQ ID NO: 65053 - DNA, 30 bp, Artificial Sequence
  Synthetic oligonucleotide
gtaaagttaggcgggggacagggccaggcg

SEQ ID NO: 65054 - DNA, 30 bp, Artificial Sequence
  Synthetic oligonucleotide
cgagcatgatatacggtcgccaaagaggcg

SEQ ID NO: 65055 - DNA, 30 bp, Artificial Sequence
  Synthetic oligonucleotide
gtggtagggtgttattgcggcaagtaggcg

SEQ ID NO: 65056 - DNA, 30 bp, Artificial Sequence
  Synthetic oligonucleotide
tagtcgctgcccgaataagacacaacggcg

SEQ ID NO: 65057 - DNA, 30 bp, Artificial Sequence
  Synthetic oligonucleotide
tctggccaaagtccattacggggaacggcg

SEQ ID NO: 65058 - DNA, 30 bp, Artificial Sequence
  Synthetic oligonucleotide
tgaaaccctgttacgcgtagtgaaccggcg

SEQ ID NO: 65059 - DNA, 30 bp, Artificial Sequence
  Synthetic oligonucleotide
agagctcgactgttcttcaatcgcccggcg

SEQ ID NO: 65060 - DNA, 30 bp, Artificial Sequence
  Synthetic oligonucleotide
agacgattcgagaaggaaaaagctccggcg

SEQ ID NO: 65061 - DNA, 30 bp, Artificial Sequence
  Synthetic oligonucleotide
ctaggtcatggtacgattcgtgttccggcg

SEQ ID NO: 65062 - DNA, 30 bp, Artificial Sequence
  Synthetic oligonucleotide
atggcccttcggaatcgatgtcaagcggcg

SEQ ID NO: 65063 - DNA, 30 bp, Artificial Sequence
  Synthetic oligonucleotide
ccatgttcagagttagcccgggcttcggcg

SEQ ID NO: 65064 - DNA, 30 bp, Artificial Sequence
  Synthetic oligonucleotide
aatagagtagtggggagccatataagggcg

SEQ ID NO: 65065 - DNA, 30 bp, Artificial Sequence
  Synthetic oligonucleotide
tgacgaaacccattaaggatttcaggggcg

SEQ ID NO: 65066 - DNA, 30 bp, Artificial Sequence
  Synthetic oligonucleotide
ccgaatactatagatcacgataggggggcg

SEQ ID NO: 65067 - DNA, 30 bp, Artificial Sequence
  Synthetic oligonucleotide
atgggttagatgaatgatgcaactggggcg

SEQ ID NO: 65068 - DNA, 30 bp, Artificial Sequence
  Synthetic oligonucleotide
aaggcaagtaccttgaactggacaatggcg

SEQ ID NO: 65069 - DNA, 30 bp, Artificial Sequence
  Synthetic oligonucleotide
ctggtctccaaattattagaaagaatggcg

SEQ ID NO: 65070 - DNA, 30 bp, Artificial Sequence
  Synthetic oligonucleotide
cgccagactataaagcgtgcggacatggcg

SEQ ID NO: 65071 - DNA, 30 bp, Artificial Sequence
  Synthetic oligonucleotide
tgagcctactttatagcccagagtatggcg

SEQ ID NO: 65072 - DNA, 30 bp, Artificial Sequence
  Synthetic oligonucleotide
cgtgctgaagcgacatacgtaattatggcg

SEQ ID NO: 65073 - DNA, 30 bp, Artificial Sequence
  Synthetic oligonucleotide
tgtctcacctcaaatagagagtacctggcg

SEQ ID NO: 65074 - DNA, 30 bp, Artificial Sequence
  Synthetic oligonucleotide
cggaggatgtcgttcaaactcgtgctggcg

SEQ ID NO: 65075 - DNA, 30 bp, Artificial Sequence
  Synthetic oligonucleotide
catcacggactgtgatatcggaacttggcg

SEQ ID NO: 65076 - DNA, 30 bp, Artificial Sequence
  Synthetic oligonucleotide
agtccagattgacccttacttagaaatgcg

SEQ ID NO: 65077 - DNA, 30 bp, Artificial Sequence
  Synthetic oligonucleotide
gccgaagtacagggtggtaagggaaatgcg

SEQ ID NO: 65078 - DNA, 30 bp, Artificial Sequence
  Synthetic oligonucleotide
tgatagattaaaagacccggaataaatgcg

SEQ ID NO: 65079 - DNA, 30 bp, Artificial Sequence
  Synthetic oligonucleotide
tataagcgtgtggcatgaacgtcgaatgcg

SEQ ID NO: 65080 - DNA, 30 bp, Artificial Sequence
  Synthetic oligonucleotide
agtggccctagtagtatcgcacggaatgcg

SEQ ID NO: 65081 - DNA, 30 bp, Artificial Sequence
  Synthetic oligonucleotide
attgcggttgagacaggttgagaggatgcg

SEQ ID NO: 65082 - DNA, 30 bp, Artificial Sequence
  Synthetic oligonucleotide
gaagggaatttttaagggaaacagtatgcg

SEQ ID NO: 65083 - DNA, 30 bp, Artificial Sequence
  Synthetic oligonucleotide
acgggtaggttggtagaaatgtcgactgcg

SEQ ID NO: 65084 - DNA, 30 bp, Artificial Sequence
  Synthetic oligonucleotide
cctgaatgctcatgatctactacttctgcg

SEQ ID NO: 65085 - DNA, 30 bp, Artificial Sequence
  Synthetic oligonucleotide
gaacaggcagaaacaacgagaagcagtgcg

SEQ ID NO: 65086 - DNA, 30 bp, Artificial Sequence
  Synthetic oligonucleotide
agaatttctagcgaaagcaggggcagtgcg

SEQ ID NO: 65087 - DNA, 30 bp, Artificial Sequence
  Synthetic oligonucleotide
caataggggacctgctagacatatcgtgcg

SEQ ID NO: 65088 - DNA, 30 bp, Artificial Sequence
  Synthetic oligonucleotide
accggagatgttgcttggatcagaggtgcg

SEQ ID NO: 65089 - DNA, 30 bp, Artificial Sequence
  Synthetic oligonucleotide
caaggtctcgcaatcatcatactaggtgcg

SEQ ID NO: 65090 - DNA, 30 bp, Artificial Sequence
  Synthetic oligonucleotide
aaacgcgtcgagtaggtcttcagtggtgcg

SEQ ID NO: 65091 - DNA, 30 bp, Artificial Sequence
  Synthetic oligonucleotide
gtagacaatgggtgcgttggctggtgtgcg

SEQ ID NO: 65092 - DNA, 30 bp, Artificial Sequence
  Synthetic oligonucleotide
ttaatgccgccaacatgaagtaaaattgcg

SEQ ID NO: 65093 - DNA, 30 bp, Artificial Sequence
  Synthetic oligonucleotide
ggacgatcgattacccgattcataaaatcg

SEQ ID NO: 65094 - DNA, 30 bp, Artificial Sequence
  Synthetic oligonucleotide
gtcaaacaaacaagatatctgattaaatcg

SEQ ID NO: 65095 - DNA, 30 bp, Artificial Sequence
  Synthetic oligonucleotide
ctctgaagcactcagtcaagcttacaatcg

SEQ ID NO: 65096 - DNA, 30 bp, Artificial Sequence
  Synthetic oligonucleotide
tgacgagaaaggtggaacgctaaccaatcg

SEQ ID NO: 65097 - DNA, 30 bp, Artificial Sequence
  Synthetic oligonucleotide
atcggccccaagggtcgatgccatcaatcg

SEQ ID NO: 65098 - DNA, 30 bp, Artificial Sequence
  Synthetic oligonucleotide
tgggaatgggagtctgccatgcttcaatcg

SEQ ID NO: 65099 - DNA, 30 bp, Artificial Sequence
  Synthetic oligonucleotide
ggacggcaggaactgccatttacagaatcg

SEQ ID NO: 65100 - DNA, 30 bp, Artificial Sequence
  Synthetic oligonucleotide
caggcttcgcaatcccaaaagagttaatcg

SEQ ID NO: 65101 - DNA, 30 bp, Artificial Sequence
  Synthetic oligonucleotide
aggatataatgagacacacacttgacatcg

SEQ ID NO: 65102 - DNA, 30 bp, Artificial Sequence
  Synthetic oligonucleotide
gcattcaggtcgttcgttgaaagtacatcg

SEQ ID NO: 65103 - DNA, 30 bp, Artificial Sequence
  Synthetic oligonucleotide
gtcaaagtaacgatgcgaagcattacatcg

SEQ ID NO: 65104 - DNA, 30 bp, Artificial Sequence
  Synthetic oligonucleotide
tcaatttcgaaggggaacgttactgcatcg

SEQ ID NO: 65105 - DNA, 30 bp, Artificial Sequence
  Synthetic oligonucleotide
gggaatgggtcggcaacgccgcctgcatcg

SEQ ID NO: 65106 - DNA, 31 bp, Artificial Sequence
  Synthetic oligonucleotide
ccatatcaacccagattttggtggtgcatcg

SEQ ID NO: 65107 - DNA, 30 bp, Artificial Sequence
  Synthetic oligonucleotide
agggcactccataggccacgagcgtcatcg

SEQ ID NO: 65108 - DNA, 30 bp, Artificial Sequence
  Synthetic oligonucleotide
agagggcatgtaagtaaagatttgtcatcg

SEQ ID NO: 65109 - DNA, 30 bp, Artificial Sequence
  Synthetic oligonucleotide
ccgatctttggttcaagagagcgcagatcg

SEQ ID NO: 65110 - DNA, 30 bp, Artificial Sequence
  Synthetic oligonucleotide
gcaaagtttgggtccggagaccagagatcg

SEQ ID NO: 65111 - DNA, 30 bp, Artificial Sequence
  Synthetic oligonucleotide
acgccgaacgaagagtgcgtctcgagatcg

SEQ ID NO: 65112 - DNA, 30 bp, Artificial Sequence
  Synthetic oligonucleotide
cttgagtcaggccgaagatctgtgcgatcg

SEQ ID NO: 65113 - DNA, 30 bp, Artificial Sequence
  Synthetic oligonucleotide
agtagcatcgtctcgggtgatgtaggatcg

SEQ ID NO: 65114 - DNA, 30 bp, Artificial Sequence
  Synthetic oligonucleotide
cgggatacatatggaatgggccgtggatcg

SEQ ID NO: 65115 - DNA, 30 bp, Artificial Sequence
  Synthetic oligonucleotide
gaacatcaatatcagtagggacaatgatcg

SEQ ID NO: 65116 - DNA, 30 bp, Artificial Sequence
  Synthetic oligonucleotide
ctcgtacgagcgagtaccttcctgtgatcg

SEQ ID NO: 65117 - DNA, 30 bp, Artificial Sequence
  Synthetic oligonucleotide
aaaccggataacggaacggtgatttgatcg

SEQ ID NO: 65118 - DNA, 30 bp, Artificial Sequence
  Synthetic oligonucleotide
gtcggtctgaaaatacagcagcagctatcg

SEQ ID NO: 65119 - DNA, 30 bp, Artificial Sequence
  Synthetic oligonucleotide
ttgtaactaggccggctaggggcagtatcg

SEQ ID NO: 65120 - DNA, 30 bp, Artificial Sequence
  Synthetic oligonucleotide
tgtccgtagagggcacctagtgaggtatcg

SEQ ID NO: 65121 - DNA, 30 bp, Artificial Sequence
  Synthetic oligonucleotide
agttagaaaggttaaaggctttaaaactcg

SEQ ID NO: 65122 - DNA, 30 bp, Artificial Sequence
  Synthetic oligonucleotide
agacacttttatcttccttaaggaaactcg

SEQ ID NO: 65123 - DNA, 30 bp, Artificial Sequence
  Synthetic oligonucleotide
cgcatgatgaacccaagtctggaacactcg

SEQ ID NO: 65124 - DNA, 30 bp, Artificial Sequence
  Synthetic oligonucleotide
cgatagttcacacaagaacccgtagactcg

SEQ ID NO: 65125 - DNA, 30 bp, Artificial Sequence
  Synthetic oligonucleotide
acattacatgattgttctaagcccgactcg

SEQ ID NO: 65126 - DNA, 29 bp, Artificial Sequence
  Synthetic oligonucleotide
ctatggagaactaatcattgggggactcg

SEQ ID NO: 65127 - DNA, 30 bp, Artificial Sequence
  Synthetic oligonucleotide
gggagaatcgtgaggagctgcagatactcg

SEQ ID NO: 65128 - DNA, 30 bp, Artificial Sequence
  Synthetic oligonucleotide
gcatcataggcgattttgccaagttactcg

SEQ ID NO: 65129 - DNA, 30 bp, Artificial Sequence
  Synthetic oligonucleotide
tcgccgcgactttggagcgatgtttactcg

SEQ ID NO: 65130 - DNA, 30 bp, Artificial Sequence
  Synthetic oligonucleotide
agaggcgaaagacagaggcaggccacctcg

SEQ ID NO: 65131 - DNA, 30 bp, Artificial Sequence
  Synthetic oligonucleotide
acgtctagcacaagcgaccgttcgacctcg

SEQ ID NO: 65132 - DNA, 30 bp, Artificial Sequence
  Synthetic oligonucleotide
ggtaaactcgtgcagctttattgggcctcg

SEQ ID NO: 65133 - DNA, 30 bp, Artificial Sequence
  Synthetic oligonucleotide
ggatttctaaaaatgggcgtaccacgctcg

SEQ ID NO: 65134 - DNA, 30 bp, Artificial Sequence
  Synthetic oligonucleotide
tgaggcagaggatcacgccttccccgctcg

SEQ ID NO: 65135 - DNA, 30 bp, Artificial Sequence
  Synthetic oligonucleotide
ggctcagaggtggcttggcaatctcgctcg

SEQ ID NO: 65136 - DNA, 30 bp, Artificial Sequence
  Synthetic oligonucleotide
tagagggtcgatgaaacccataaaggctcg

SEQ ID NO: 65137 - DNA, 30 bp, Artificial Sequence
  Synthetic oligonucleotide
cattcataagagagtgtggacgagtgctcg

SEQ ID NO: 65138 - DNA, 30 bp, Artificial Sequence
  Synthetic oligonucleotide
tccattaattatgtgattctctagatctcg

SEQ ID NO: 65139 - DNA, 30 bp, Artificial Sequence
  Synthetic oligonucleotide
gaacactatagggacgtggtgtacgtctcg

SEQ ID NO: 65140 - DNA, 30 bp, Artificial Sequence
  Synthetic oligonucleotide
ggcgtgaatagttgctttattctcgtctcg

SEQ ID NO: 65141 - DNA, 30 bp, Artificial Sequence
  Synthetic oligonucleotide
ttcattcgaccaggaacacaaatgttctcg

SEQ ID NO: 65142 - DNA, 30 bp, Artificial Sequence
  Synthetic oligonucleotide
tgaagcgcgcaataattcaggtctaagtcg

SEQ ID NO: 65143 - DNA, 30 bp, Artificial Sequence
  Synthetic oligonucleotide
ggtcgttcaagcatgcgttggggacagtcg

SEQ ID NO: 65144 - DNA, 30 bp, Artificial Sequence
  Synthetic oligonucleotide
ccccgcgcttgtgacatgaatgaggagtcg

SEQ ID NO: 65145 - DNA, 30 bp, Artificial Sequence
  Synthetic oligonucleotide
aagtgagtcatacgttgatttgtgtagtcg

SEQ ID NO: 65146 - DNA, 30 bp, Artificial Sequence
  Synthetic oligonucleotide
cagaattatgaaggtatgccacattagtcg

SEQ ID NO: 65147 - DNA, 30 bp, Artificial Sequence
  Synthetic oligonucleotide
gctataatgagccgatccaagcgcacgtcg

SEQ ID NO: 65148 - DNA, 30 bp, Artificial Sequence
  Synthetic oligonucleotide
aggtaacgagcagagtaacgggtgtcgtcg

SEQ ID NO: 65149 - DNA, 30 bp, Artificial Sequence
  Synthetic oligonucleotide
atgtagatcccaaggcaaacgcgttcgtcg

SEQ ID NO: 65150 - DNA, 30 bp, Artificial Sequence
  Synthetic oligonucleotide
ttctaaaactacagaggtaaaaggaggtcg

SEQ ID NO: 65151 - DNA, 30 bp, Artificial Sequence
  Synthetic oligonucleotide
tcgggtaactgctggcttgtcaagcggtcg

SEQ ID NO: 65152 - DNA, 30 bp, Artificial Sequence
  Synthetic oligonucleotide
tcgcgagcttacattatagggcaagggtcg

SEQ ID NO: 65153 - DNA, 30 bp, Artificial Sequence
  Synthetic oligonucleotide
gcaggagaatgaacccccaagctcgggtcg

SEQ ID NO: 65154 - DNA, 30 bp, Artificial Sequence
  Synthetic oligonucleotide
tgtaggttttaccgtatgtggacggggtcg

SEQ ID NO: 65155 - DNA, 30 bp, Artificial Sequence
  Synthetic oligonucleotide
tacgagccaaaaggtgaaagttcggggtcg

SEQ ID NO: 65156 - DNA, 30 bp, Artificial Sequence
  Synthetic oligonucleotide
cgcactctcgaattatcagtcaggtggtcg

SEQ ID NO: 65157 - DNA, 30 bp, Artificial Sequence
  Synthetic oligonucleotide
tcaggtgtctacagattataataaatgtcg

SEQ ID NO: 65158 - DNA, 30 bp, Artificial Sequence
  Synthetic oligonucleotide
agtgtatatggaaagatcccgtgcctgtcg

SEQ ID NO: 65159 - DNA, 30 bp, Artificial Sequence
  Synthetic oligonucleotide
agatagttcagtccaggtcgtaagctgtcg

SEQ ID NO: 65160 - DNA, 30 bp, Artificial Sequence
  Synthetic oligonucleotide
gcgaatagacgaaaccccccttagctgtcg

SEQ ID NO: 65161 - DNA, 30 bp, Artificial Sequence
  Synthetic oligonucleotide
taagagtagccacattcgtggatcgtgtcg

SEQ ID NO: 65162 - DNA, 30 bp, Artificial Sequence
  Synthetic oligonucleotide
agggcacctctgccgagggtcatgttgtcg

SEQ ID NO: 65163 - DNA, 30 bp, Artificial Sequence
  Synthetic oligonucleotide
cgagggtgatttagcaacaccgtaaattcg

SEQ ID NO: 65164 - DNA, 30 bp, Artificial Sequence
  Synthetic oligonucleotide
gtaagctgaacgtagtgggaagaccattcg

SEQ ID NO: 65165 - DNA, 30 bp, Artificial Sequence
  Synthetic oligonucleotide
atcttaaacggaatggcggaaaccgattcg

SEQ ID NO: 65166 - DNA, 30 bp, Artificial Sequence
  Synthetic oligonucleotide
gacgggtctgcaattgaaaatgcggattcg

SEQ ID NO: 65167 - DNA, 30 bp, Artificial Sequence
  Synthetic oligonucleotide
tcatactccagcagtctgctcagatattcg

SEQ ID NO: 65168 - DNA, 30 bp, Artificial Sequence
  Synthetic oligonucleotide
ttggggaacggtagagaccgcctctattcg

SEQ ID NO: 65169 - DNA, 30 bp, Artificial Sequence
  Synthetic oligonucleotide
aatgaggagggccaacaacgactttattcg

SEQ ID NO: 65170 - DNA, 30 bp, Artificial Sequence
  Synthetic oligonucleotide
aggaacacctggcgatgtccctaaacttcg

SEQ ID NO: 65171 - DNA, 30 bp, Artificial Sequence
  Synthetic oligonucleotide
ggcaaagggagatagcataatgtcacttcg

SEQ ID NO: 65172 - DNA, 30 bp, Artificial Sequence
  Synthetic oligonucleotide
agcatctatataagtcgaataaaaagttcg

SEQ ID NO: 65173 - DNA, 30 bp, Artificial Sequence
  Synthetic oligonucleotide
tactgcactctattgcggaagccgggttcg

SEQ ID NO: 65174 - DNA, 30 bp, Artificial Sequence
  Synthetic oligonucleotide
gtgaagagaccatcaaagtacgagatttcg

SEQ ID NO: 65175 - DNA, 30 bp, Artificial Sequence
  Synthetic oligonucleotide
acctcggaactgcgtcgcaacaaaaaaagg

SEQ ID NO: 65176 - DNA, 30 bp, Artificial Sequence
  Synthetic oligonucleotide
ataagggggtgacaacattacaagaaaagg

SEQ ID NO: 65177 - DNA, 30 bp, Artificial Sequence
  Synthetic oligonucleotide
gttgaggtcagtggtgcagaaatgtaaagg

SEQ ID NO: 65178 - DNA, 30 bp, Artificial Sequence
  Synthetic oligonucleotide
actgcagagaaccattgagcagtttaaagg

SEQ ID NO: 65179 - DNA, 30 bp, Artificial Sequence
  Synthetic oligonucleotide
gtcagaagtgacaactataggggaacaagg

SEQ ID NO: 65180 - DNA, 30 bp, Artificial Sequence
  Synthetic oligonucleotide
tagaaagcctgggctagaccccctacaagg

SEQ ID NO: 65181 - DNA, 30 bp, Artificial Sequence
  Synthetic oligonucleotide
cagtgagttgaatcggcagacgttccaagg

SEQ ID NO: 65182 - DNA, 30 bp, Artificial Sequence
  Synthetic oligonucleotide
gaagatgcgaagcttaccagaggagcaagg

SEQ ID NO: 65183 - DNA, 30 bp, Artificial Sequence
  Synthetic oligonucleotide
cgcaagacgtaaaaaacgtccatagcaagg

SEQ ID NO: 65184 - DNA, 30 bp, Artificial Sequence
  Synthetic oligonucleotide
tagtatgcaagctgatgaacccacgcaagg

SEQ ID NO: 65185 - DNA, 30 bp, Artificial Sequence
  Synthetic oligonucleotide
acaagacaaaagggctgctcgctcgcaagg

SEQ ID NO: 65186 - DNA, 30 bp, Artificial Sequence
  Synthetic oligonucleotide
tagcaaagattgaggtccaatatttcaagg

SEQ ID NO: 65187 - DNA, 30 bp, Artificial Sequence
  Synthetic oligonucleotide
gtccataactatcttaggcggacaagaagg

SEQ ID NO: 65188 - DNA, 30 bp, Artificial Sequence
  Synthetic oligonucleotide
ccccacgggcaccgtgaaatgatcagaagg

SEQ ID NO: 65189 - DNA, 30 bp, Artificial Sequence
  Synthetic oligonucleotide
ggatgagctacgtttaaggataatcgaagg

SEQ ID NO: 65190 - DNA, 30 bp, Artificial Sequence
  Synthetic oligonucleotide
acctgaataaccgactagctggcaggaagg

SEQ ID NO: 65191 - DNA, 30 bp, Artificial Sequence
  Synthetic oligonucleotide
tggtacagaatcgccttcggtaatggaagg

SEQ ID NO: 65192 - DNA, 30 bp, Artificial Sequence
  Synthetic oligonucleotide
cagaccaaatgtaacccgtgctgctgaagg

SEQ ID NO: 65193 - DNA, 30 bp, Artificial Sequence
  Synthetic oligonucleotide
ggatgatgcgacccgaaacgggcaataagg

SEQ ID NO: 65194 - DNA, 30 bp, Artificial Sequence
  Synthetic oligonucleotide
gtggtcgtgctgtggggtcccccgataagg

SEQ ID NO: 65195 - DNA, 30 bp, Artificial Sequence
  Synthetic oligonucleotide
acaaggaaaaacccccggaattggataagg

SEQ ID NO: 65196 - DNA, 30 bp, Artificial Sequence
  Synthetic oligonucleotide
attctcaacaacagagcgatgggactaagg

SEQ ID NO: 65197 - DNA, 30 bp, Artificial Sequence
  Synthetic oligonucleotide
gagcccggggcattcgcaactagggtaagg

SEQ ID NO: 65198 - DNA, 30 bp, Artificial Sequence
  Synthetic oligonucleotide
gcaacagattggctgcttaggtgggtaagg

SEQ ID NO: 65199 - DNA, 30 bp, Artificial Sequence
  Synthetic oligonucleotide
acagcagttaccgcactgacgatcttaagg

SEQ ID NO: 65200 - DNA, 30 bp, Artificial Sequence
  Synthetic oligonucleotide
acgcccattcattagttgatgtcgaacagg

SEQ ID NO: 65201 - DNA, 30 bp, Artificial Sequence
  Synthetic oligonucleotide
aggctagatgcagtcgatatgtgtcacagg

SEQ ID NO: 65202 - DNA, 30 bp, Artificial Sequence
  Synthetic oligonucleotide
agaccgggaaatactatggatggagacagg

SEQ ID NO: 65203 - DNA, 30 bp, Artificial Sequence
  Synthetic oligonucleotide
caggtctcttgcgtaggtataccatacagg

SEQ ID NO: 65204 - DNA, 30 bp, Artificial Sequence
  Synthetic oligonucleotide
gaacgaacccaactatctgtctcccccagg

SEQ ID NO: 65205 - DNA, 28 bp, Artificial Sequence
  Synthetic oligonucleotide
ttcgatgccgagaaatcatacagccagg

SEQ ID NO: 65206 - DNA, 30 bp, Artificial Sequence
  Synthetic oligonucleotide
tgagcggaaatataagcttcggcagccagg

SEQ ID NO: 65207 - DNA, 30 bp, Artificial Sequence
  Synthetic oligonucleotide
ttgcgattatcgatccggtgagtatccagg

SEQ ID NO: 65208 - DNA, 30 bp, Artificial Sequence
  Synthetic oligonucleotide
ccggaagatctcatcgcaagggcgtccagg

SEQ ID NO: 65209 - DNA, 30 bp, Artificial Sequence
  Synthetic oligonucleotide
gcagatgcgtgagttggagtaacttccagg

SEQ ID NO: 65210 - DNA, 30 bp, Artificial Sequence
  Synthetic oligonucleotide
cgagaattaactttggttgccagttccagg

SEQ ID NO: 65211 - DNA, 30 bp, Artificial Sequence
  Synthetic oligonucleotide
gccgggtgaacacttacggtaatgagcagg

SEQ ID NO: 65212 - DNA, 30 bp, Artificial Sequence
  Synthetic oligonucleotide
ataggcaacgatgatagataaaatagcagg

SEQ ID NO: 65213 - DNA, 30 bp, Artificial Sequence
  Synthetic oligonucleotide
cgtgaaggcattgtggtggggaggggcagg

SEQ ID NO: 65214 - DNA, 30 bp, Artificial Sequence
  Synthetic oligonucleotide
caccatcagagcgtatcttcggagtgcagg

SEQ ID NO: 65215 - DNA, 30 bp, Artificial Sequence
  Synthetic oligonucleotide
acggaagtttacgaaccatatcgtatcagg

SEQ ID NO: 65216 - DNA, 30 bp, Artificial Sequence
  Synthetic oligonucleotide
cgagcatgaccaggcggtggagagctcagg

SEQ ID NO: 65217 - DNA, 30 bp, Artificial Sequence
  Synthetic oligonucleotide
aggcgggatggagaggtgcctcatctcagg

SEQ ID NO: 65218 - DNA, 30 bp, Artificial Sequence
  Synthetic oligonucleotide
gtgggaccgtcctattacggaaaagtcagg

SEQ ID NO: 65219 - DNA, 30 bp, Artificial Sequence
  Synthetic oligonucleotide
gtgactctaaaggaaagctctaaggtcagg

SEQ ID NO: 65220 - DNA, 30 bp, Artificial Sequence
  Synthetic oligonucleotide
gagggtgcaatgtgctaattaggtgtcagg

SEQ ID NO: 65221 - DNA, 30 bp, Artificial Sequence
  Synthetic oligonucleotide
gttccaaggactttaaatgggttattcagg

SEQ ID NO: 65222 - DNA, 30 bp, Artificial Sequence
  Synthetic oligonucleotide
ccatcgtgtgcaacccgtctcacgttcagg

SEQ ID NO: 65223 - DNA, 30 bp, Artificial Sequence
  Synthetic oligonucleotide
agattgcgccaattcgggtgggacaagagg

SEQ ID NO: 65224 - DNA, 30 bp, Artificial Sequence
  Synthetic oligonucleotide
tacagaagcctagacaaattcggtgagagg

SEQ ID NO: 65225 - DNA, 30 bp, Artificial Sequence
  Synthetic oligonucleotide
gacaggaccgagacaactactaattagagg

SEQ ID NO: 65226 - DNA, 30 bp, Artificial Sequence
  Synthetic oligonucleotide
caaatgaatccaatatcagaagggacgagg

SEQ ID NO: 65227 - DNA, 30 bp, Artificial Sequence
  Synthetic oligonucleotide
caatcattactcgagaaatccgaaccgagg

SEQ ID NO: 65228 - DNA, 30 bp, Artificial Sequence
  Synthetic oligonucleotide
gcgtgcctgagggtgtcgagcatgccgagg

SEQ ID NO: 65229 - DNA, 30 bp, Artificial Sequence
  Synthetic oligonucleotide
tataaatggacattgagcgcaacggcgagg

SEQ ID NO: 65230 - DNA, 30 bp, Artificial Sequence
  Synthetic oligonucleotide
gtcgaatgggtgaccaggaagagggcgagg

SEQ ID NO: 65231 - DNA, 30 bp, Artificial Sequence
  Synthetic oligonucleotide
aagcaatgttccgcgaaggtcaagtcgagg

SEQ ID NO: 65232 - DNA, 30 bp, Artificial Sequence
  Synthetic oligonucleotide
aacaaggcaccccaacaataggcgtcgagg

SEQ ID NO: 65233 - DNA, 30 bp, Artificial Sequence
  Synthetic oligonucleotide
gcctcctaataggggttaggagcttcgagg

SEQ ID NO: 65234 - DNA, 30 bp, Artificial Sequence
  Synthetic oligonucleotide
aagagctacctatgtatgaatgataggagg

SEQ ID NO: 65235 - DNA, 30 bp, Artificial Sequence
  Synthetic oligonucleotide
tgtaaggaagcgcgtggggggaaggggagg

SEQ ID NO: 65236 - DNA, 30 bp, Artificial Sequence
  Synthetic oligonucleotide
gaggagtacctagttgtcaagccctggagg

SEQ ID NO: 65237 - DNA, 30 bp, Artificial Sequence
  Synthetic oligonucleotide
agggcgacatggcaagcagttactatgagg

SEQ ID NO: 65238 - DNA, 30 bp, Artificial Sequence
  Synthetic oligonucleotide
gcagggctataaagggtacacggactgagg

SEQ ID NO: 65239 - DNA, 30 bp, Artificial Sequence
  Synthetic oligonucleotide
tgatccaaagattcggttagcccgctgagg

SEQ ID NO: 65240 - DNA, 30 bp, Artificial Sequence
  Synthetic oligonucleotide
atagaaggcggtcgcaggatagtgctgagg

SEQ ID NO: 65241 - DNA, 30 bp, Artificial Sequence
  Synthetic oligonucleotide
gttacggagagaagtggaggagtagtgagg

SEQ ID NO: 65242 - DNA, 30 bp, Artificial Sequence
  Synthetic oligonucleotide
agacagtagcgctgtaatgcgagcttgagg

SEQ ID NO: 65243 - DNA, 31 bp, Artificial Sequence
  Synthetic oligonucleotide
agcgatcgataagagttgaagcgaaaatagg

SEQ ID NO: 65244 - DNA, 30 bp, Artificial Sequence
  Synthetic oligonucleotide
tgtggaggcacgggccaaatcagaaatagg

SEQ ID NO: 65245 - DNA, 30 bp, Artificial Sequence
  Synthetic oligonucleotide
tacaaaaggattctagaacgcattaatagg

SEQ ID NO: 65246 - DNA, 30 bp, Artificial Sequence
  Synthetic oligonucleotide
ccacccgaaggtttacggctcgaacatagg

SEQ ID NO: 65247 - DNA, 30 bp, Artificial Sequence
  Synthetic oligonucleotide
aactagatgagaccatccaatagacatagg

SEQ ID NO: 65248 - DNA, 30 bp, Artificial Sequence
  Synthetic oligonucleotide
agtcatcggatgagcgtaccagcatatagg

SEQ ID NO: 65249 - DNA, 30 bp, Artificial Sequence
  Synthetic oligonucleotide
accaaggttgggacggtaagtcgatatagg

SEQ ID NO: 65250 - DNA, 30 bp, Artificial Sequence
  Synthetic oligonucleotide
gcatagtacaagcctgagtatgtatatagg

SEQ ID NO: 65251 - DNA, 30 bp, Artificial Sequence
  Synthetic oligonucleotide
ccgaaaggctgtgtaaaaacaggctatagg

SEQ ID NO: 65252 - DNA, 30 bp, Artificial Sequence
  Synthetic oligonucleotide
gctagcaatgtatgtaccggggattatagg

SEQ ID NO: 65253 - DNA, 30 bp, Artificial Sequence
  Synthetic oligonucleotide
ggggggtttatccgatagggagtttatagg

SEQ ID NO: 65254 - DNA, 30 bp, Artificial Sequence
  Synthetic oligonucleotide
aggactggtctgatggacgcgacaactagg

SEQ ID NO: 65255 - DNA, 30 bp, Artificial Sequence
  Synthetic oligonucleotide
tcctcatcaggaatcttaaaccgcactagg

SEQ ID NO: 65256 - DNA, 30 bp, Artificial Sequence
  Synthetic oligonucleotide
cgtagctacgaccggtataacaaccctagg

SEQ ID NO: 65257 - DNA, 30 bp, Artificial Sequence
  Synthetic oligonucleotide
taagcgataggacgaactggctcccctagg

SEQ ID NO: 65258 - DNA, 30 bp, Artificial Sequence
  Synthetic oligonucleotide
tggagaggcgacgagacatggacgcctagg

SEQ ID NO: 65259 - DNA, 30 bp, Artificial Sequence
  Synthetic oligonucleotide
aggtgcccgttagaagaaatttacgctagg

SEQ ID NO: 65260 - DNA, 30 bp, Artificial Sequence
  Synthetic oligonucleotide
taataaaaagaacctcttcccagcgctagg

SEQ ID NO: 65261 - DNA, 30 bp, Artificial Sequence
  Synthetic oligonucleotide
acgtaacatcatatcgaacggttgagtagg

SEQ ID NO: 65262 - DNA, 30 bp, Artificial Sequence
  Synthetic oligonucleotide
caccagatgaagaatggtagaaagcgtagg

SEQ ID NO: 65263 - DNA, 30 bp, Artificial Sequence
  Synthetic oligonucleotide
aaaagactcctcgagtacaacggtcgtagg

SEQ ID NO: 65264 - DNA, 30 bp, Artificial Sequence
  Synthetic oligonucleotide
aaacaacaggaacagtacagcttgggtagg

SEQ ID NO: 65265 - DNA, 30 bp, Artificial Sequence
  Synthetic oligonucleotide
gatccacttgatcaccgagtagctggtagg

SEQ ID NO: 65266 - DNA, 30 bp, Artificial Sequence
  Synthetic oligonucleotide
taacagagtatgtagtagcgggtctgtagg

SEQ ID NO: 65267 - DNA, 30 bp, Artificial Sequence
  Synthetic oligonucleotide
gcgtattgagtgttacgggtatgcattagg

SEQ ID NO: 65268 - DNA, 30 bp, Artificial Sequence
  Synthetic oligonucleotide
ccagtaagttcgaacggtggtcagattagg

SEQ ID NO: 65269 - DNA, 30 bp, Artificial Sequence
  Synthetic oligonucleotide
ctgagacattatccacgtgtgcgatttagg

SEQ ID NO: 65270 - DNA, 30 bp, Artificial Sequence
  Synthetic oligonucleotide
aagagaaccaatttaaaagacaacaaacgg

SEQ ID NO: 65271 - DNA, 30 bp, Artificial Sequence
  Synthetic oligonucleotide
gacgggacagaccattaagatccgcaacgg

SEQ ID NO: 65272 - DNA, 30 bp, Artificial Sequence
  Synthetic oligonucleotide
ctcgaaggcctagcatatgaacgagaacgg

SEQ ID NO: 65273 - DNA, 30 bp, Artificial Sequence
  Synthetic oligonucleotide
gaagagggctctgagtacgcacaggaacgg

SEQ ID NO: 65274 - DNA, 30 bp, Artificial Sequence
  Synthetic oligonucleotide
aacaaagattaaacctacaaatggtaacgg

SEQ ID NO: 65275 - DNA, 30 bp, Artificial Sequence
  Synthetic oligonucleotide
ctgtacgaggggttattacgatatacacgg

SEQ ID NO: 65276 - DNA, 30 bp, Artificial Sequence
  Synthetic oligonucleotide
agcgtgaatacgagaggtcatgctagacgg

SEQ ID NO: 65277 - DNA, 30 bp, Artificial Sequence
  Synthetic oligonucleotide
gaaagtagcacgattacacagggtcgacgg

SEQ ID NO: 65278 - DNA, 31 bp, Artificial Sequence
  Synthetic oligonucleotide
aagagaggcaccaatatggaagagttgacgg

SEQ ID NO: 65279 - DNA, 30 bp, Artificial Sequence
  Synthetic oligonucleotide
gtgggatcataggacatgaaggggctacgg

SEQ ID NO: 65280 - DNA, 30 bp, Artificial Sequence
  Synthetic oligonucleotide
ctaaattcgagccacgtatgaaatgtacgg

SEQ ID NO: 65281 - DNA, 30 bp, Artificial Sequence
  Synthetic oligonucleotide
gcatcgacatgcccaggatgcgagttacgg

SEQ ID NO: 65282 - DNA, 30 bp, Artificial Sequence
  Synthetic oligonucleotide
cggcgggaagatactgcccctgagtaccgg

SEQ ID NO: 65283 - DNA, 30 bp, Artificial Sequence
  Synthetic oligonucleotide
acaattcgcggcaagctcaccagcacccgg

SEQ ID NO: 65284 - DNA, 30 bp, Artificial Sequence
  Synthetic oligonucleotide
aggttccaatatagctgtggcaaaccccgg

SEQ ID NO: 65285 - DNA, 30 bp, Artificial Sequence
  Synthetic oligonucleotide
agttgccgccttaggcacatacgcccccgg

SEQ ID NO: 65286 - DNA, 30 bp, Artificial Sequence
  Synthetic oligonucleotide
tagaatagcgaattcaattaggttgcccgg

SEQ ID NO: 65287 - DNA, 30 bp, Artificial Sequence
  Synthetic oligonucleotide
aataggtaacagatagaggagatctcccgg

SEQ ID NO: 65288 - DNA, 30 bp, Artificial Sequence
  Synthetic oligonucleotide
tgggtaacggatgcataacaatcgtcccgg

SEQ ID NO: 65289 - DNA, 30 bp, Artificial Sequence
  Synthetic oligonucleotide
agagccttatgctttccataaaacagccgg

SEQ ID NO: 65290 - DNA, 30 bp, Artificial Sequence
  Synthetic oligonucleotide
ggaaagatcggaataagcttgacgagccgg

SEQ ID NO: 65291 - DNA, 30 bp, Artificial Sequence
  Synthetic oligonucleotide
ccgtacacaatcattgtgggcagatgccgg

SEQ ID NO: 65292 - DNA, 30 bp, Artificial Sequence
  Synthetic oligonucleotide
atgagaaatacattcagaacctactgccgg

SEQ ID NO: 65293 - DNA, 30 bp, Artificial Sequence
  Synthetic oligonucleotide
atgacaagcgtgcgctgtagagattgccgg

SEQ ID NO: 65294 - DNA, 30 bp, Artificial Sequence
  Synthetic oligonucleotide
acctagatctagcatctggaagccctccgg

SEQ ID NO: 65295 - DNA, 30 bp, Artificial Sequence
  Synthetic oligonucleotide
tacctacgtatgagctaaacctgcctccgg

SEQ ID NO: 65296 - DNA, 30 bp, Artificial Sequence
  Synthetic oligonucleotide
acgggtaaactgcggtacgtggagctccgg

SEQ ID NO: 65297 - DNA, 30 bp, Artificial Sequence
  Synthetic oligonucleotide
cgcgaaaaaggtttaaggactatagtccgg

SEQ ID NO: 65298 - DNA, 30 bp, Artificial Sequence
  Synthetic oligonucleotide
ccgagggagtggaacgtccttacattccgg

SEQ ID NO: 65299 - DNA, 30 bp, Artificial Sequence
  Synthetic oligonucleotide
agtgagccgtctaggaagctggtattccgg

SEQ ID NO: 65300 - DNA, 30 bp, Artificial Sequence
  Synthetic oligonucleotide
taacaaacatcgtcccggctaagaaagcgg

SEQ ID NO: 65301 - DNA, 30 bp, Artificial Sequence
  Synthetic oligonucleotide
ctggccgataaactgcgatagtcagagcgg

SEQ ID NO: 65302 - DNA, 30 bp, Artificial Sequence
  Synthetic oligonucleotide
tcgccaggggtagtcgggatagcctagcgg

SEQ ID NO: 65303 - DNA, 30 bp, Artificial Sequence
  Synthetic oligonucleotide
caaagcgtgttgtcgtcgtggagctagcgg

SEQ ID NO: 65304 - DNA, 30 bp, Artificial Sequence
  Synthetic oligonucleotide
ggtcggatacgatgataggcgtcttagcgg

SEQ ID NO: 65305 - DNA, 30 bp, Artificial Sequence
  Synthetic oligonucleotide
ctgaaacaaccaaaaccgcgaaggacgcgg

SEQ ID NO: 65306 - DNA, 30 bp, Artificial Sequence
  Synthetic oligonucleotide
atgtttggcgaaagtggcggctctacgcgg

SEQ ID NO: 65307 - DNA, 30 bp, Artificial Sequence
  Synthetic oligonucleotide
ggtcaacaccgaaagtcagtgggctcgcgg

SEQ ID NO: 65308 - DNA, 30 bp, Artificial Sequence
  Synthetic oligonucleotide
gacgacatgataatgtagatactgtcgcgg

SEQ ID NO: 65309 - DNA, 30 bp, Artificial Sequence
  Synthetic oligonucleotide
aggtccgtaaagtctcggataaagaggcgg

SEQ ID NO: 65310 - DNA, 30 bp, Artificial Sequence
  Synthetic oligonucleotide
aagagccactcgctacggacaggggggcgg

SEQ ID NO: 65311 - DNA, 30 bp, Artificial Sequence
  Synthetic oligonucleotide
taacaggcctaaagaaatgctggatggcgg

SEQ ID NO: 65312 - DNA, 30 bp, Artificial Sequence
  Synthetic oligonucleotide
cccaaaacaactcgaaggaactaagtgcgg

SEQ ID NO: 65313 - DNA, 30 bp, Artificial Sequence
  Synthetic oligonucleotide
aggtcatctgtgtcgtgcacggatttgcgg

SEQ ID NO: 65314 - DNA, 30 bp, Artificial Sequence
  Synthetic oligonucleotide
gaaaaggactcaagaaacggtaaaaatcgg

SEQ ID NO: 65315 - DNA, 30 bp, Artificial Sequence
  Synthetic oligonucleotide
actgggtactagctgtgtgcggccaatcgg

SEQ ID NO: 65316 - DNA, 30 bp, Artificial Sequence
  Synthetic oligonucleotide
ccgcgacaaaccgcgtattcgtctaatcgg

SEQ ID NO: 65317 - DNA, 30 bp, Artificial Sequence
  Synthetic oligonucleotide
cctggtcgagtcgaagttccacgccatcgg

SEQ ID NO: 65318 - DNA, 30 bp, Artificial Sequence
  Synthetic oligonucleotide
atgtgggtagcgcggttggataattatcgg

SEQ ID NO: 65319 - DNA, 30 bp, Artificial Sequence
  Synthetic oligonucleotide
tgcaaactatgctccaaatgaagttatcgg

SEQ ID NO: 65320 - DNA, 30 bp, Artificial Sequence
  Synthetic oligonucleotide
catcaaagtacgtgtgctcggacacctcgg

SEQ ID NO: 65321 - DNA, 30 bp, Artificial Sequence
  Synthetic oligonucleotide
ggatacaagcttgttttagtcagagctcgg

SEQ ID NO: 65322 - DNA, 30 bp, Artificial Sequence
  Synthetic oligonucleotide
cgtcaaccggcttggcagagacattctcgg

SEQ ID NO: 65323 - DNA, 30 bp, Artificial Sequence
  Synthetic oligonucleotide
gtgagtgttgttcagctgcgttaaagtcgg

SEQ ID NO: 65324 - DNA, 30 bp, Artificial Sequence
  Synthetic oligonucleotide
gtctgaacatatacgccataagtcagtcgg

SEQ ID NO: 65325 - DNA, 30 bp, Artificial Sequence
  Synthetic oligonucleotide
acgcggtacaccaggacataatcgcgtcgg

SEQ ID NO: 65326 - DNA, 30 bp, Artificial Sequence
  Synthetic oligonucleotide
tattgcgtgttgtggctcagaaggcgtcgg

SEQ ID NO: 65327 - DNA, 30 bp, Artificial Sequence
  Synthetic oligonucleotide
aggtacgctgtgtcgtggactgctcgtcgg

SEQ ID NO: 65328 - DNA, 30 bp, Artificial Sequence
  Synthetic oligonucleotide
tgtgagtaagatctaatgctcccgggtcgg

SEQ ID NO: 65329 - DNA, 30 bp, Artificial Sequence
  Synthetic oligonucleotide
cgtatccaacgggtcaaagatgtgggtcgg

SEQ ID NO: 65330 - DNA, 30 bp, Artificial Sequence
  Synthetic oligonucleotide
ttaggtcattaggataacgcaatctgtcgg

SEQ ID NO: 65331 - DNA, 30 bp, Artificial Sequence
  Synthetic oligonucleotide
tcggccaagtgaagtctggcttattgtcgg

SEQ ID NO: 65332 - DNA, 30 bp, Artificial Sequence
  Synthetic oligonucleotide
aagagactatccgatctgcagctcgttcgg

SEQ ID NO: 65333 - DNA, 30 bp, Artificial Sequence
  Synthetic oligonucleotide
ggtcgtagggtgtgcgaatgtgtatttcgg

SEQ ID NO: 65334 - DNA, 30 bp, Artificial Sequence
  Synthetic oligonucleotide
cgtgacaacgttagtgtgcgatgctttcgg

SEQ ID NO: 65335 - DNA, 30 bp, Artificial Sequence
  Synthetic oligonucleotide
tacgcatacaactagatccaatattttcgg

SEQ ID NO: 65336 - DNA, 30 bp, Artificial Sequence
  Synthetic oligonucleotide
ctatgaatgctaatgggaaagttaaaaggg

SEQ ID NO: 65337 - DNA, 30 bp, Artificial Sequence
  Synthetic oligonucleotide
tattggcgtcatcgattcaacgcgaaaggg

SEQ ID NO: 65338 - DNA, 30 bp, Artificial Sequence
  Synthetic oligonucleotide
gaatgcctcggcggcaaggttcaacaaggg

SEQ ID NO: 65339 - DNA, 30 bp, Artificial Sequence
  Synthetic oligonucleotide
acaccaatgcgtacataagatgtacaaggg

SEQ ID NO: 65340 - DNA, 30 bp, Artificial Sequence
  Synthetic oligonucleotide
agaaagatagtcgtcaggagtccggaaggg

SEQ ID NO: 65341 - DNA, 30 bp, Artificial Sequence
  Synthetic oligonucleotide
gtagtccgtttgcaagggtacagtgaaggg

SEQ ID NO: 65342 - DNA, 30 bp, Artificial Sequence
  Synthetic oligonucleotide
atgtggataaaggagacgagctttgaaggg

SEQ ID NO: 65343 - DNA, 30 bp, Artificial Sequence
  Synthetic oligonucleotide
tagggttctgagaatgtagcgcattaaggg

SEQ ID NO: 65344 - DNA, 30 bp, Artificial Sequence
  Synthetic oligonucleotide
atacactcgacaggcgataagccaacaggg

SEQ ID NO: 65345 - DNA, 30 bp, Artificial Sequence
  Synthetic oligonucleotide
gataactgggccctagtttgccgaacaggg

SEQ ID NO: 65346 - DNA, 30 bp, Artificial Sequence
  Synthetic oligonucleotide
aggaccaagtgtgcggttgtcctaacaggg

SEQ ID NO: 65347 - DNA, 30 bp, Artificial Sequence
  Synthetic oligonucleotide
gatggacgtgttatgctaggcgctacaggg

SEQ ID NO: 65348 - DNA, 30 bp, Artificial Sequence
  Synthetic oligonucleotide
actagtgccagtgcttcggttagaccaggg

SEQ ID NO: 65349 - DNA, 30 bp, Artificial Sequence
  Synthetic oligonucleotide
gagtatttaaataggaatcatcagccaggg

SEQ ID NO: 65350 - DNA, 30 bp, Artificial Sequence
  Synthetic oligonucleotide
agaaacagtctgatgcgtgacaacgcaggg

SEQ ID NO: 65351 - DNA, 30 bp, Artificial Sequence
  Synthetic oligonucleotide
ggccaagttgagtaagacaccagcagaggg

SEQ ID NO: 65352 - DNA, 30 bp, Artificial Sequence
  Synthetic oligonucleotide
agcaatagtgcactcgtatcttccggaggg

SEQ ID NO: 65353 - DNA, 30 bp, Artificial Sequence
  Synthetic oligonucleotide
accgagactttataagttgccaatggaggg

SEQ ID NO: 65354 - DNA, 30 bp, Artificial Sequence
  Synthetic oligonucleotide
ttactagggtgactacgaagagcttgaggg

SEQ ID NO: 65355 - DNA, 30 bp, Artificial Sequence
  Synthetic oligonucleotide
tgtcacgtggtaactgtttcatcactaggg

SEQ ID NO: 65356 - DNA, 30 bp, Artificial Sequence
  Synthetic oligonucleotide
tcgtttccagtgggagctagaacgctaggg

SEQ ID NO: 65357 - DNA, 30 bp, Artificial Sequence
  Synthetic oligonucleotide
gccggcatagagatagttgtacggctaggg

SEQ ID NO: 65358 - DNA, 30 bp, Artificial Sequence
  Synthetic oligonucleotide
ggagacacgagaatggccactacagtaggg

SEQ ID NO: 65359 - DNA, 30 bp, Artificial Sequence
  Synthetic oligonucleotide
gtaaacgagtgtgggtagctgagagtaggg

SEQ ID NO: 65360 - DNA, 30 bp, Artificial Sequence
  Synthetic oligonucleotide
atgatagacaaggtattaaaacccgtaggg

SEQ ID NO: 65361 - DNA, 30 bp, Artificial Sequence
  Synthetic oligonucleotide
tggtcatttagttcagacaaattcgtaggg

SEQ ID NO: 65362 - DNA, 30 bp, Artificial Sequence
  Synthetic oligonucleotide
gcattagagcgggatggatggagtgtaggg

SEQ ID NO: 65363 - DNA, 30 bp, Artificial Sequence
  Synthetic oligonucleotide
gcgcggcgtacgacgaaatgccatttaggg

SEQ ID NO: 65364 - DNA, 30 bp, Artificial Sequence
  Synthetic oligonucleotide
cacgaagattaatgcacatcttgtgacggg

SEQ ID NO: 65365 - DNA, 30 bp, Artificial Sequence
  Synthetic oligonucleotide
agtgaacgcgacttaatgtttccccccggg

SEQ ID NO: 65366 - DNA, 30 bp, Artificial Sequence
  Synthetic oligonucleotide
ataagcctagggggcaacacgccagccggg

SEQ ID NO: 65367 - DNA, 30 bp, Artificial Sequence
  Synthetic oligonucleotide
tctacagtcggaaggctcattgccagcggg

SEQ ID NO: 65368 - DNA, 30 bp, Artificial Sequence
  Synthetic oligonucleotide
gttatcaagggagcaatctatcagagcggg

SEQ ID NO: 65369 - DNA, 30 bp, Artificial Sequence
  Synthetic oligonucleotide
gcgtccacgacggtacgaattcaaggcggg

SEQ ID NO: 65370 - DNA, 30 bp, Artificial Sequence
  Synthetic oligonucleotide
tcctaactgtgagttggggcgataggcggg

SEQ ID NO: 65371 - DNA, 30 bp, Artificial Sequence
  Synthetic oligonucleotide
gaatacgtcgaatctaaccagggcggcggg

SEQ ID NO: 65372 - DNA, 30 bp, Artificial Sequence
  Synthetic oligonucleotide
atgcatcatacggattaaggttttatcggg

SEQ ID NO: 65373 - DNA, 30 bp, Artificial Sequence
  Synthetic oligonucleotide
tagtataagtacgcttctaacgggctcggg

SEQ ID NO: 65374 - DNA, 30 bp, Artificial Sequence
  Synthetic oligonucleotide
accgactgatgggggagagttaatgtcggg

SEQ ID NO: 65375 - DNA, 30 bp, Artificial Sequence
  Synthetic oligonucleotide
gatataagattgaacgtaatagaaaagggg

SEQ ID NO: 65376 - DNA, 30 bp, Artificial Sequence
  Synthetic oligonucleotide
aggttgcgtaaattaggccccgagaagggg

SEQ ID NO: 65377 - DNA, 30 bp, Artificial Sequence
  Synthetic oligonucleotide
ctcgcatgaaaagtagcataactgaagggg

SEQ ID NO: 65378 - DNA, 30 bp, Artificial Sequence
  Synthetic oligonucleotide
acgaagccaaccgtcaactacgttaagggg

SEQ ID NO: 65379 - DNA, 30 bp, Artificial Sequence
  Synthetic oligonucleotide
tcctggtgtagttgaatcttatctcagggg

SEQ ID NO: 65380 - DNA, 30 bp, Artificial Sequence
  Synthetic oligonucleotide
gtggccactaagatggggaacagagagggg

SEQ ID NO: 65381 - DNA, 30 bp, Artificial Sequence
  Synthetic oligonucleotide
aaggcactgcgaaaagctgggcatgagggg

SEQ ID NO: 65382 - DNA, 30 bp, Artificial Sequence
  Synthetic oligonucleotide
gacagcggccttagaaccgaacaatagggg

SEQ ID NO: 65383 - DNA, 30 bp, Artificial Sequence
  Synthetic oligonucleotide
cgaagtttcggagcgaatgatagctagggg

SEQ ID NO: 65384 - DNA, 30 bp, Artificial Sequence
  Synthetic oligonucleotide
ataaaaccggaaatatctcatcacacgggg

SEQ ID NO: 65385 - DNA, 30 bp, Artificial Sequence
  Synthetic oligonucleotide
actaggagtaccgtgaaatgtcgtccgggg

SEQ ID NO: 65386 - DNA, 30 bp, Artificial Sequence
  Synthetic oligonucleotide
ctcagacccggaaaataattaaggaggggg

SEQ ID NO: 65387 - DNA, 28 bp, Artificial Sequence
  Synthetic oligonucleotide
cgcctcacatgaagtccgaactaggggg

SEQ ID NO: 65388 - DNA, 30 bp, Artificial Sequence
  Synthetic oligonucleotide
atgcaagcggatccatagcaggtacggggg

SEQ ID NO: 65389 - DNA, 30 bp, Artificial Sequence
  Synthetic oligonucleotide
aatggaacagcggaagcccatgcgcggggg

SEQ ID NO: 65390 - DNA, 30 bp, Artificial Sequence
  Synthetic oligonucleotide
ccgggtcaacgtttggatccacaagggggg

SEQ ID NO: 65391 - DNA, 31 bp, Artificial Sequence
  Synthetic oligonucleotide
tgcaggaaaggaataccggtggaccgggggg

SEQ ID NO: 65392 - DNA, 30 bp, Artificial Sequence
  Synthetic oligonucleotide
ctcggtactgcgactgaactctgtgggggg

SEQ ID NO: 65393 - DNA, 30 bp, Artificial Sequence
  Synthetic oligonucleotide
gtgctgtacgaagcgaggtggtccgtgggg

SEQ ID NO: 65394 - DNA, 27 bp, Artificial Sequence
  Synthetic oligonucleotide
cgtggtattcaaacaacgctcaatggg

SEQ ID NO: 65395 - DNA, 30 bp, Artificial Sequence
  Synthetic oligonucleotide
tattggctcgcgagaaaaaaggagaatggg

SEQ ID NO: 65396 - DNA, 30 bp, Artificial Sequence
  Synthetic oligonucleotide
tagccctagaagcaattatatgttaatggg

SEQ ID NO: 65397 - DNA, 30 bp, Artificial Sequence
  Synthetic oligonucleotide
tactcctcgcacaattcatccggacatggg

SEQ ID NO: 65398 - DNA, 30 bp, Artificial Sequence
  Synthetic oligonucleotide
acaagaaacctgtcgggttcggggcatggg

SEQ ID NO: 65399 - DNA, 30 bp, Artificial Sequence
  Synthetic oligonucleotide
atcagggggtccgaagatacgactcatggg

SEQ ID NO: 65400 - DNA, 30 bp, Artificial Sequence
  Synthetic oligonucleotide
gccagattacattggcgaaatcgtcatggg

SEQ ID NO: 65401 - DNA, 30 bp, Artificial Sequence
  Synthetic oligonucleotide
gaaaacgggatactgtttgatcaggatggg

SEQ ID NO: 65402 - DNA, 30 bp, Artificial Sequence
  Synthetic oligonucleotide
gtccggcggtgtccccctgcaatggatggg

SEQ ID NO: 65403 - DNA, 30 bp, Artificial Sequence
  Synthetic oligonucleotide
aaggtacaacccctcctggcgaactatggg

SEQ ID NO: 65404 - DNA, 30 bp, Artificial Sequence
  Synthetic oligonucleotide
ctcggaccgccgaacgagctagacactggg

SEQ ID NO: 65405 - DNA, 30 bp, Artificial Sequence
  Synthetic oligonucleotide
aatggagttatgagtagcggacccactggg

SEQ ID NO: 65406 - DNA, 30 bp, Artificial Sequence
  Synthetic oligonucleotide
catacgggatgtggaacctacatcactggg

SEQ ID NO: 65407 - DNA, 30 bp, Artificial Sequence
  Synthetic oligonucleotide
gtagcgggggggtaaaataccaaatctggg

SEQ ID NO: 65408 - DNA, 30 bp, Artificial Sequence
  Synthetic oligonucleotide
ccaatgccatgccaaggttagttgagtggg

SEQ ID NO: 65409 - DNA, 30 bp, Artificial Sequence
  Synthetic oligonucleotide
cgtcgtaactgagtaggtcactgtagtggg

SEQ ID NO: 65410 - DNA, 30 bp, Artificial Sequence
  Synthetic oligonucleotide
cgtggttcgagctattggcggcaacgtggg

SEQ ID NO: 65411 - DNA, 30 bp, Artificial Sequence
  Synthetic oligonucleotide
gtgggggaatatcgagtgagaacgggtggg

SEQ ID NO: 65412 - DNA, 30 bp, Artificial Sequence
  Synthetic oligonucleotide
tcgttgtcggtcggcggaaatctgggtggg

SEQ ID NO: 65413 - DNA, 30 bp, Artificial Sequence
  Synthetic oligonucleotide
ctcagttggcctaagagaagtattggtggg

SEQ ID NO: 65414 - DNA, 30 bp, Artificial Sequence
  Synthetic oligonucleotide
gagcacggctgcggagtgcattttggtggg

SEQ ID NO: 65415 - DNA, 30 bp, Artificial Sequence
  Synthetic oligonucleotide
cgaaaagagcatgcagtccattgtattggg

SEQ ID NO: 65416 - DNA, 30 bp, Artificial Sequence
  Synthetic oligonucleotide
cgtagctgattgacgtttagaaatcttggg

SEQ ID NO: 65417 - DNA, 30 bp, Artificial Sequence
  Synthetic oligonucleotide
tcatcggcacagtactaacgaatagttggg

SEQ ID NO: 65418 - DNA, 30 bp, Artificial Sequence
  Synthetic oligonucleotide
tacaaggccaaacccgcaccccaggttggg

SEQ ID NO: 65419 - DNA, 30 bp, Artificial Sequence
  Synthetic oligonucleotide
gtagggcatatgtggattgcatcggttggg

SEQ ID NO: 65420 - DNA, 30 bp, Artificial Sequence
  Synthetic oligonucleotide
cggagttaactattagatgcgcggtttggg

SEQ ID NO: 65421 - DNA, 30 bp, Artificial Sequence
  Synthetic oligonucleotide
cagtgtatagagcattgatgaccttttggg

SEQ ID NO: 65422 - DNA, 30 bp, Artificial Sequence
  Synthetic oligonucleotide
tgacacgtcgggaagcacatatcaaaatgg

SEQ ID NO: 65423 - DNA, 30 bp, Artificial Sequence
  Synthetic oligonucleotide
caaacaatcgatattggaagtactaaatgg

SEQ ID NO: 65424 - DNA, 30 bp, Artificial Sequence
  Synthetic oligonucleotide
aggcccagatgtaagctaccgaaacaatgg

SEQ ID NO: 65425 - DNA, 30 bp, Artificial Sequence
  Synthetic oligonucleotide
cgtctcgcctacataaaaccgtgacaatgg

SEQ ID NO: 65426 - DNA, 30 bp, Artificial Sequence
  Synthetic oligonucleotide
agtgcatcaccgtcaggggatatggaatgg

SEQ ID NO: 65427 - DNA, 30 bp, Artificial Sequence
  Synthetic oligonucleotide
ggggaaaggaatgtataacaacgttaatgg

SEQ ID NO: 65428 - DNA, 30 bp, Artificial Sequence
  Synthetic oligonucleotide
tggtacggggatggcgtagtcagaacatgg

SEQ ID NO: 65429 - DNA, 30 bp, Artificial Sequence
  Synthetic oligonucleotide
cgaaaaggtacgactcccagatagacatgg

SEQ ID NO: 65430 - DNA, 30 bp, Artificial Sequence
  Synthetic oligonucleotide
gagctcgctgtaagatattagccgacatgg

SEQ ID NO: 65431 - DNA, 30 bp, Artificial Sequence
  Synthetic oligonucleotide
tagacgatgaaaaacatgcaccggacatgg

SEQ ID NO: 65432 - DNA, 29 bp, Artificial Sequence
  Synthetic oligonucleotide
acctgctgaggtatacggtacgtacatgg

SEQ ID NO: 65433 - DNA, 30 bp, Artificial Sequence
  Synthetic oligonucleotide
atacacaagttcttaatatgcgagccatgg

SEQ ID NO: 65434 - DNA, 30 bp, Artificial Sequence
  Synthetic oligonucleotide
atcgtggcctattgtgtaaccgcgtcatgg

SEQ ID NO: 65435 - DNA, 30 bp, Artificial Sequence
  Synthetic oligonucleotide
ttaacaggccgacttacgaatctaagatgg

SEQ ID NO: 65436 - DNA, 30 bp, Artificial Sequence
  Synthetic oligonucleotide
agaaattaaagagaatcccacagtggatgg

SEQ ID NO: 65437 - DNA, 30 bp, Artificial Sequence
  Synthetic oligonucleotide
aaggtcagaagatgaggaaaggttggatgg

SEQ ID NO: 65438 - DNA, 30 bp, Artificial Sequence
  Synthetic oligonucleotide
ggggtgaacccaaaacgaagatactgatgg

SEQ ID NO: 65439 - DNA, 30 bp, Artificial Sequence
  Synthetic oligonucleotide
acacctgatttaacgcgacagcggtgatgg

SEQ ID NO: 65440 - DNA, 30 bp, Artificial Sequence
  Synthetic oligonucleotide
aaacgggtccaagtaagtataaagatatgg

SEQ ID NO: 65441 - DNA, 30 bp, Artificial Sequence
  Synthetic oligonucleotide
ctgcaccaagaggacgtgggcacgatatgg

SEQ ID NO: 65442 - DNA, 30 bp, Artificial Sequence
  Synthetic oligonucleotide
gctgatgacagatggaccttatgtatatgg

SEQ ID NO: 65443 - DNA, 30 bp, Artificial Sequence
  Synthetic oligonucleotide
ccggcacgtagaaaagcctaagtgaactgg

SEQ ID NO: 65444 - DNA, 30 bp, Artificial Sequence
  Synthetic oligonucleotide
cttggatatcttagatcggtcggagactgg

SEQ ID NO: 65445 - DNA, 30 bp, Artificial Sequence
  Synthetic oligonucleotide
ccatataaaaagggatcactaatagactgg

SEQ ID NO: 65446 - DNA, 30 bp, Artificial Sequence
  Synthetic oligonucleotide
cccagcataaatgctgtacgagatgactgg

SEQ ID NO: 65447 - DNA, 30 bp, Artificial Sequence
  Synthetic oligonucleotide
ggtcgaatatttccttgctgacttgactgg

SEQ ID NO: 65448 - DNA, 30 bp, Artificial Sequence
  Synthetic oligonucleotide
tcaactcagtaaaacgtattgaggacctgg

SEQ ID NO: 65449 - DNA, 29 bp, Artificial Sequence
  Synthetic oligonucleotide
cagacagaaagtgttatatcatggcctgg

SEQ ID NO: 65450 - DNA, 30 bp, Artificial Sequence
  Synthetic oligonucleotide
agcggacattaaatatgggagctggcctgg

SEQ ID NO: 65451 - DNA, 30 bp, Artificial Sequence
  Synthetic oligonucleotide
ctagacatttaaaagccaatgtgtagctgg

SEQ ID NO: 65452 - DNA, 30 bp, Artificial Sequence
  Synthetic oligonucleotide
acgacgggaactgtctagtacgggtgctgg

SEQ ID NO: 65453 - DNA, 30 bp, Artificial Sequence
  Synthetic oligonucleotide
agctatagtcaactcaccacaaccctctgg

SEQ ID NO: 65454 - DNA, 30 bp, Artificial Sequence
  Synthetic oligonucleotide
caatacttgtgggttcagttcaagctctgg

SEQ ID NO: 65455 - DNA, 30 bp, Artificial Sequence
  Synthetic oligonucleotide
acttatgtaaaatctgattaggaagtctgg

SEQ ID NO: 65456 - DNA, 30 bp, Artificial Sequence
  Synthetic oligonucleotide
agtgtatctggcccaaaaggatgtgtctgg

SEQ ID NO: 65457 - DNA, 30 bp, Artificial Sequence
  Synthetic oligonucleotide
tctaacaaccagtgtccgaagggaaagtgg

SEQ ID NO: 65458 - DNA, 30 bp, Artificial Sequence
  Synthetic oligonucleotide
ggagaaccaacccggaacggtacagagtgg

SEQ ID NO: 65459 - DNA, 30 bp, Artificial Sequence
  Synthetic oligonucleotide
tccgtacgttacgacgttgtgatcgagtgg

SEQ ID NO: 65460 - DNA, 30 bp, Artificial Sequence
  Synthetic oligonucleotide
tcattctaagtcaacagacatgcggagtgg

SEQ ID NO: 65461 - DNA, 30 bp, Artificial Sequence
  Synthetic oligonucleotide
ccaaataaccagtaaacaggcaatacgtgg

SEQ ID NO: 65462 - DNA, 30 bp, Artificial Sequence
  Synthetic oligonucleotide
cgatctagtgaggtcgcttagtctacgtgg

SEQ ID NO: 65463 - DNA, 30 bp, Artificial Sequence
  Synthetic oligonucleotide
gtcatggcacatctggtaggttacccgtgg

SEQ ID NO: 65464 - DNA, 30 bp, Artificial Sequence
  Synthetic oligonucleotide
cgaatagtgattactggataggtcgcgtgg

SEQ ID NO: 65465 - DNA, 30 bp, Artificial Sequence
  Synthetic oligonucleotide
gcagtcaggagcagggcctactgatcgtgg

SEQ ID NO: 65466 - DNA, 30 bp, Artificial Sequence
  Synthetic oligonucleotide
caaaaagcccagttacgtccccactcgtgg

SEQ ID NO: 65467 - DNA, 30 bp, Artificial Sequence
  Synthetic oligonucleotide
gaatgaaccgatctcccgtcgtgaaggtgg

SEQ ID NO: 65468 - DNA, 30 bp, Artificial Sequence
  Synthetic oligonucleotide
atgtcagtggaagtgaagagaaacaggtgg

SEQ ID NO: 65469 - DNA, 30 bp, Artificial Sequence
  Synthetic oligonucleotide
ggtagcggtgcgagagctaacgtcaggtgg

SEQ ID NO: 65470 - DNA, 30 bp, Artificial Sequence
  Synthetic oligonucleotide
ccgggcggcggtcgcgtcaggaagaggtgg

SEQ ID NO: 65471 - DNA, 30 bp, Artificial Sequence
  Synthetic oligonucleotide
aagggaattgggattggaccaagtaggtgg

SEQ ID NO: 65472 - DNA, 29 bp, Artificial Sequence
  Synthetic oligonucleotide
tcagagcaattagctagaggatgcggtgg

SEQ ID NO: 65473 - DNA, 30 bp, Artificial Sequence
  Synthetic oligonucleotide
tggaacttagcgtgatactcgaatcggtgg

SEQ ID NO: 65474 - DNA, 30 bp, Artificial Sequence
  Synthetic oligonucleotide
aatgctcgcccacagaattaaccagggtgg

SEQ ID NO: 65475 - DNA, 30 bp, Artificial Sequence
  Synthetic oligonucleotide
ggcataaggtgtgggtaatacactgggtgg

SEQ ID NO: 65476 - DNA, 30 bp, Artificial Sequence
  Synthetic oligonucleotide
atggatcgtttaaatcaggctcaatggtgg

SEQ ID NO: 65477 - DNA, 30 bp, Artificial Sequence
  Synthetic oligonucleotide
aacaacaaccaaatcacagtctagtggtgg

SEQ ID NO: 65478 - DNA, 30 bp, Artificial Sequence
  Synthetic oligonucleotide
tgcagggatgtggatcgtctgtaactgtgg

SEQ ID NO: 65479 - DNA, 30 bp, Artificial Sequence
  Synthetic oligonucleotide
ttcttgggatcgacagtagagaggctgtgg

SEQ ID NO: 65480 - DNA, 30 bp, Artificial Sequence
  Synthetic oligonucleotide
ttattgatccaggtaaaagacagtctgtgg

SEQ ID NO: 65481 - DNA, 30 bp, Artificial Sequence
  Synthetic oligonucleotide
gaggtctaaatgcttatgtccacgaattgg

SEQ ID NO: 65482 - DNA, 30 bp, Artificial Sequence
  Synthetic oligonucleotide
actgggaaagtggttagcggttcgaattgg

SEQ ID NO: 65483 - DNA, 30 bp, Artificial Sequence
  Synthetic oligonucleotide
ggggaaaaagaagtacgatggtttaattgg

SEQ ID NO: 65484 - DNA, 30 bp, Artificial Sequence
  Synthetic oligonucleotide
gcgataatcatttccgaaaacagtcattgg

SEQ ID NO: 65485 - DNA, 30 bp, Artificial Sequence
  Synthetic oligonucleotide
gcggcgaaagttgagctggggcgagattgg

SEQ ID NO: 65486 - DNA, 30 bp, Artificial Sequence
  Synthetic oligonucleotide
tcgctagtattggatggattacccgattgg

SEQ ID NO: 65487 - DNA, 30 bp, Artificial Sequence
  Synthetic oligonucleotide
ttgaggggttccaaagactgtcctgattgg

SEQ ID NO: 65488 - DNA, 30 bp, Artificial Sequence
  Synthetic oligonucleotide
agtcatttggtaacctgcgaggaatattgg

SEQ ID NO: 65489 - DNA, 30 bp, Artificial Sequence
  Synthetic oligonucleotide
cagtgtcttcaagatacgtaaagatattgg

SEQ ID NO: 65490 - DNA, 30 bp, Artificial Sequence
  Synthetic oligonucleotide
agagccatgtcgtggtgcagtagggcttgg

SEQ ID NO: 65491 - DNA, 30 bp, Artificial Sequence
  Synthetic oligonucleotide
tgagcccgtaattgaagtttttgtgcttgg

SEQ ID NO: 65492 - DNA, 30 bp, Artificial Sequence
  Synthetic oligonucleotide
cgcggttacggtcttcgccttcaaagttgg

SEQ ID NO: 65493 - DNA, 30 bp, Artificial Sequence
  Synthetic oligonucleotide
ttggtcagcgtagataagtgtaacagttgg

SEQ ID NO: 65494 - DNA, 30 bp, Artificial Sequence
  Synthetic oligonucleotide
tgatcatcagcgtgacggtccgacagttgg

SEQ ID NO: 65495 - DNA, 30 bp, Artificial Sequence
  Synthetic oligonucleotide
gggagtgagagtacgaggtgttgtggttgg

SEQ ID NO: 65496 - DNA, 30 bp, Artificial Sequence
  Synthetic oligonucleotide
acgaatcacttagacttgtcgcaaatttgg

SEQ ID NO: 65497 - DNA, 30 bp, Artificial Sequence
  Synthetic oligonucleotide
caaagtcacgggatgatgtattggatttgg

SEQ ID NO: 65498 - DNA, 30 bp, Artificial Sequence
  Synthetic oligonucleotide
acgaggtacaataaagagcaagcactttgg

SEQ ID NO: 65499 - DNA, 30 bp, Artificial Sequence
  Synthetic oligonucleotide
cgagctaatcatgcccggctggacctttgg

SEQ ID NO: 65500 - DNA, 30 bp, Artificial Sequence
  Synthetic oligonucleotide
aagaagacggacaatgattgggaggtttgg

SEQ ID NO: 65501 - DNA, 30 bp, Artificial Sequence
  Synthetic oligonucleotide
tacgtagtcgagcgcacgagcttggtttgg

SEQ ID NO: 65502 - DNA, 30 bp, Artificial Sequence
  Synthetic oligonucleotide
ccgaccaaggaaggacatcgccttgtttgg

SEQ ID NO: 65503 - DNA, 30 bp, Artificial Sequence
  Synthetic oligonucleotide
gggtcgcggactataaccatataaaaaatg

SEQ ID NO: 65504 - DNA, 30 bp, Artificial Sequence
  Synthetic oligonucleotide
cgagctgtagcacaaagagttatcaaaatg

SEQ ID NO: 65505 - DNA, 30 bp, Artificial Sequence
  Synthetic oligonucleotide
agtgggacgggggcttgctaacagcaaatg

SEQ ID NO: 65506 - DNA, 30 bp, Artificial Sequence
  Synthetic oligonucleotide
ggtgttcaggaatggggcaaagtgcaaatg

SEQ ID NO: 65507 - DNA, 30 bp, Artificial Sequence
  Synthetic oligonucleotide
aaccccgaagcaactcacccgcccgaaatg

SEQ ID NO: 65508 - DNA, 30 bp, Artificial Sequence
  Synthetic oligonucleotide
agatcgaacggtgatcgaaagggggaaatg

SEQ ID NO: 65509 - DNA, 30 bp, Artificial Sequence
  Synthetic oligonucleotide
tcaacgaatggcacgaacattaaataaatg

SEQ ID NO: 65510 - DNA, 30 bp, Artificial Sequence
  Synthetic oligonucleotide
taggttaggcactgggacaggatgtaaatg

SEQ ID NO: 65511 - DNA, 30 bp, Artificial Sequence
  Synthetic oligonucleotide
ccgcccatacgtaccgatttattgccaatg

SEQ ID NO: 65512 - DNA, 30 bp, Artificial Sequence
  Synthetic oligonucleotide
ggcatagaagttgaaggttgcggtccaatg

SEQ ID NO: 65513 - DNA, 30 bp, Artificial Sequence
  Synthetic oligonucleotide
taactcgtgaccgaaccccttcctgcaatg

SEQ ID NO: 65514 - DNA, 30 bp, Artificial Sequence
  Synthetic oligonucleotide
ataccattcaacgaagggtagagctcaatg

SEQ ID NO: 65515 - DNA, 30 bp, Artificial Sequence
  Synthetic oligonucleotide
gcggtagacgaatatggcggttgttcaatg

SEQ ID NO: 65516 - DNA, 30 bp, Artificial Sequence
  Synthetic oligonucleotide
aacgtctattcaaacgtgtataaaagaatg

SEQ ID NO: 65517 - DNA, 30 bp, Artificial Sequence
  Synthetic oligonucleotide
cagtagagttgcagtagtcatacaagaatg

SEQ ID NO: 65518 - DNA, 30 bp, Artificial Sequence
  Synthetic oligonucleotide
aaacgccattcgaattgacagcgaagaatg

SEQ ID NO: 65519 - DNA, 30 bp, Artificial Sequence
  Synthetic oligonucleotide
gcgacatttccagtaatggacggaagaatg

SEQ ID NO: 65520 - DNA, 30 bp, Artificial Sequence
  Synthetic oligonucleotide
tgcgggcggcctatcgtaggtaagagaatg

SEQ ID NO: 65521 - DNA, 30 bp, Artificial Sequence
  Synthetic oligonucleotide
tacatagttaatagaactagcctgcgaatg

SEQ ID NO: 65522 - DNA, 30 bp, Artificial Sequence
  Synthetic oligonucleotide
ggcgacagaataatccgttcctgtcgaatg

SEQ ID NO: 65523 - DNA, 30 bp, Artificial Sequence
  Synthetic oligonucleotide
ctgtgtggcggatgacggcggtacggaatg

SEQ ID NO: 65524 - DNA, 30 bp, Artificial Sequence
  Synthetic oligonucleotide
gactacccgtaaacaagggtactctgaatg

SEQ ID NO: 65525 - DNA, 30 bp, Artificial Sequence
  Synthetic oligonucleotide
acccccgtaaaacaattgaaggcgtgaatg

SEQ ID NO: 65526 - DNA, 30 bp, Artificial Sequence
  Synthetic oligonucleotide
taggacgacgaggattccccgatcataatg

SEQ ID NO: 65527 - DNA, 31 bp, Artificial Sequence
  Synthetic oligonucleotide
ataagtggatataacggataaggacaacatg

SEQ ID NO: 65528 - DNA, 30 bp, Artificial Sequence
  Synthetic oligonucleotide
gggcatcatggtgaataaataaagaacatg

SEQ ID NO: 65529 - DNA, 30 bp, Artificial Sequence
  Synthetic oligonucleotide
aaatgcgtgaggtatgccgcgcagaacatg

SEQ ID NO: 65530 - DNA, 30 bp, Artificial Sequence
  Synthetic oligonucleotide
ctgcccgacacgtaaaggatttaagacatg

SEQ ID NO: 65531 - DNA, 30 bp, Artificial Sequence
  Synthetic oligonucleotide
gcacacactttacgaaattgagtcgacatg

SEQ ID NO: 65532 - DNA, 30 bp, Artificial Sequence
  Synthetic oligonucleotide
gttgccagggggctagtcatcagctacatg

SEQ ID NO: 65533 - DNA, 30 bp, Artificial Sequence
  Synthetic oligonucleotide
gtatgcgggaagaaaacgtgaaataccatg

SEQ ID NO: 65534 - DNA, 30 bp, Artificial Sequence
  Synthetic oligonucleotide
tatgagcgaatctgtcctagaacacccatg

SEQ ID NO: 65535 - DNA, 30 bp, Artificial Sequence
  Synthetic oligonucleotide
tcaggcagcagagggaaaatccagcccatg

SEQ ID NO: 65536 - DNA, 30 bp, Artificial Sequence
  Synthetic oligonucleotide
aatggatatcgaaaaataggctagcccatg

SEQ ID NO: 65537 - DNA, 30 bp, Artificial Sequence
  Synthetic oligonucleotide
cccaacctaagactacggaaaacaagcatg

SEQ ID NO: 65538 - DNA, 30 bp, Artificial Sequence
  Synthetic oligonucleotide
ccagagcacgtaaccattaaaagtagcatg

SEQ ID NO: 65539 - DNA, 30 bp, Artificial Sequence
  Synthetic oligonucleotide
tttgggcagacaaatgattccaaacgcatg

SEQ ID NO: 65540 - DNA, 30 bp, Artificial Sequence
  Synthetic oligonucleotide
caggcgcttagcagtccgaaatatcgcatg

SEQ ID NO: 65541 - DNA, 30 bp, Artificial Sequence
  Synthetic oligonucleotide
gagagctaaatccctctgactctaggcatg

SEQ ID NO: 65542 - DNA, 30 bp, Artificial Sequence
  Synthetic oligonucleotide
aggtgaacgttcaagggttggatgggcatg

SEQ ID NO: 65543 - DNA, 30 bp, Artificial Sequence
  Synthetic oligonucleotide
gggcgccgttcagtggctacagctggcatg

SEQ ID NO: 65544 - DNA, 30 bp, Artificial Sequence
  Synthetic oligonucleotide
gcttcacgttggtgttcaatagcaatcatg

SEQ ID NO: 65545 - DNA, 30 bp, Artificial Sequence
  Synthetic oligonucleotide
aaagacaataaagaaggcgatagcatcatg

SEQ ID NO: 65546 - DNA, 30 bp, Artificial Sequence
  Synthetic oligonucleotide
tagctgacgtcataagaaaagtctatcatg

SEQ ID NO: 65547 - DNA, 30 bp, Artificial Sequence
  Synthetic oligonucleotide
gaaccgtaaaatatggccaaggtactcatg

SEQ ID NO: 65548 - DNA, 30 bp, Artificial Sequence
  Synthetic oligonucleotide
actcccacgagtcaacttgccaagctcatg

SEQ ID NO: 65549 - DNA, 30 bp, Artificial Sequence
  Synthetic oligonucleotide
gcggaggtatcgagataacggcgtgtcatg

SEQ ID NO: 65550 - DNA, 30 bp, Artificial Sequence
  Synthetic oligonucleotide
aaaggatctcgtgtgtctgtactattcatg

SEQ ID NO: 65551 - DNA, 30 bp, Artificial Sequence
  Synthetic oligonucleotide
ggcatataacccagtaaaaccgccttcatg

SEQ ID NO: 65552 - DNA, 30 bp, Artificial Sequence
  Synthetic oligonucleotide
tttagagtaaagtaggacacagataagatg

SEQ ID NO: 65553 - DNA, 30 bp, Artificial Sequence
  Synthetic oligonucleotide
gcggtttccgagctttccgatgctaagatg

SEQ ID NO: 65554 - DNA, 30 bp, Artificial Sequence
  Synthetic oligonucleotide
tccccagtgtatcactacactaaccagatg

SEQ ID NO: 65555 - DNA, 30 bp, Artificial Sequence
  Synthetic oligonucleotide
cgattagtggtttagtggaattaccagatg

SEQ ID NO: 65556 - DNA, 30 bp, Artificial Sequence
  Synthetic oligonucleotide
aaccattatgcctcaaaaatccgccagatg

SEQ ID NO: 65557 - DNA, 30 bp, Artificial Sequence
  Synthetic oligonucleotide
caaagctagtcggggcaagctcgccagatg

SEQ ID NO: 65558 - DNA, 30 bp, Artificial Sequence
  Synthetic oligonucleotide
tataacacccggcaacttgtaagggagatg

SEQ ID NO: 65559 - DNA, 30 bp, Artificial Sequence
  Synthetic oligonucleotide
ctcggacaatagggtgaaggttatgagatg

SEQ ID NO: 65560 - DNA, 30 bp, Artificial Sequence
  Synthetic oligonucleotide
cgtaagttgagtttccatagtaagtagatg

SEQ ID NO: 65561 - DNA, 30 bp, Artificial Sequence
  Synthetic oligonucleotide
ttgtgagatcgacggcctgtcatgtagatg

SEQ ID NO: 65562 - DNA, 30 bp, Artificial Sequence
  Synthetic oligonucleotide
cgatgtagtcagttctaatgtcatccgatg

SEQ ID NO: 65563 - DNA, 30 bp, Artificial Sequence
  Synthetic oligonucleotide
caccgagagttcgtaactcgccgcgcgatg

SEQ ID NO: 65564 - DNA, 30 bp, Artificial Sequence
  Synthetic oligonucleotide
agggctgaagccaatgggataactgcgatg

SEQ ID NO: 65565 - DNA, 30 bp, Artificial Sequence
  Synthetic oligonucleotide
ccctcattcattatagtggttaggaggatg

SEQ ID NO: 65566 - DNA, 30 bp, Artificial Sequence
  Synthetic oligonucleotide
acacgaaaggcacaaattttggttcggatg

SEQ ID NO: 65567 - DNA, 30 bp, Artificial Sequence
  Synthetic oligonucleotide
taaggccgtggatgacgagtttccgggatg

SEQ ID NO: 65568 - DNA, 30 bp, Artificial Sequence
  Synthetic oligonucleotide
cgttcgctaatatgcctgatagtatggatg

SEQ ID NO: 65569 - DNA, 30 bp, Artificial Sequence
  Synthetic oligonucleotide
gtgtgcagttaggggagagcatactggatg

SEQ ID NO: 65570 - DNA, 30 bp, Artificial Sequence
  Synthetic oligonucleotide
gagccgaaatgaccgagtaaggcctggatg

SEQ ID NO: 65571 - DNA, 30 bp, Artificial Sequence
  Synthetic oligonucleotide
cgggtacagcttaactctaaactctggatg

SEQ ID NO: 65572 - DNA, 30 bp, Artificial Sequence
  Synthetic oligonucleotide
cacgcctaattggggctactgaccatgatg

SEQ ID NO: 65573 - DNA, 30 bp, Artificial Sequence
  Synthetic oligonucleotide
tgtaacggggttggcgtagtgaccatgatg

SEQ ID NO: 65574 - DNA, 30 bp, Artificial Sequence
  Synthetic oligonucleotide
acaactgcacggtagcgaaccactatgatg

SEQ ID NO: 65575 - DNA, 30 bp, Artificial Sequence
  Synthetic oligonucleotide
agcgtcgcgcccggggcgtaagtggtgatg

SEQ ID NO: 65576 - DNA, 30 bp, Artificial Sequence
  Synthetic oligonucleotide
cgggcctgtataaacaggaagtgtgtgatg

SEQ ID NO: 65577 - DNA, 30 bp, Artificial Sequence
  Synthetic oligonucleotide
aagtgtgaaagtgcggaaattgaaaatatg

SEQ ID NO: 65578 - DNA, 30 bp, Artificial Sequence
  Synthetic oligonucleotide
cgttgcgcatgcatgaactggtataatatg

SEQ ID NO: 65579 - DNA, 30 bp, Artificial Sequence
  Synthetic oligonucleotide
cgtggaatgtacagcattccccttcatatg

SEQ ID NO: 65580 - DNA, 30 bp, Artificial Sequence
  Synthetic oligonucleotide
ggcgaacggcacacgcctaccaaagatatg

SEQ ID NO: 65581 - DNA, 30 bp, Artificial Sequence
  Synthetic oligonucleotide
taaaaccccgcagtagatgaaggagatatg

SEQ ID NO: 65582 - DNA, 30 bp, Artificial Sequence
  Synthetic oligonucleotide
taagaagcgggtccgaggtaattagatatg

SEQ ID NO: 65583 - DNA, 30 bp, Artificial Sequence
  Synthetic oligonucleotide
ataagacagcaaccacgcagaatggatatg

SEQ ID NO: 65584 - DNA, 30 bp, Artificial Sequence
  Synthetic oligonucleotide
cgtgaagactgaactggtctaggctatatg

SEQ ID NO: 65585 - DNA, 30 bp, Artificial Sequence
  Synthetic oligonucleotide
cggtgtgggaatactggcatcgtacctatg

SEQ ID NO: 65586 - DNA, 30 bp, Artificial Sequence
  Synthetic oligonucleotide
gtgccaatcatggcacactaaggtgctatg

SEQ ID NO: 65587 - DNA, 30 bp, Artificial Sequence
  Synthetic oligonucleotide
caaccactgctcggatataacaaatctatg

SEQ ID NO: 65588 - DNA, 30 bp, Artificial Sequence
  Synthetic oligonucleotide
agaagggcaggcggagttgtgccatctatg

SEQ ID NO: 65589 - DNA, 30 bp, Artificial Sequence
  Synthetic oligonucleotide
cgggcctagaaggaaacttagtcatctatg

SEQ ID NO: 65590 - DNA, 30 bp, Artificial Sequence
  Synthetic oligonucleotide
gctaggtggtactggtacataatcagtatg

SEQ ID NO: 65591 - DNA, 30 bp, Artificial Sequence
  Synthetic oligonucleotide
ctggcccgaacagggattcagcggcgtatg

SEQ ID NO: 65592 - DNA, 30 bp, Artificial Sequence
  Synthetic oligonucleotide
taagaactaacactccccgttaatcgtatg

SEQ ID NO: 65593 - DNA, 30 bp, Artificial Sequence
  Synthetic oligonucleotide
gcgctaaaaggcgttgtggtcggaggtatg

SEQ ID NO: 65594 - DNA, 30 bp, Artificial Sequence
  Synthetic oligonucleotide
caatgttaactgaggtctgatggaggtatg

SEQ ID NO: 65595 - DNA, 30 bp, Artificial Sequence
  Synthetic oligonucleotide
gcgccgggtgctgaacatcaaacatgtatg

SEQ ID NO: 65596 - DNA, 30 bp, Artificial Sequence
  Synthetic oligonucleotide
tactgcaacaagcccgaggatctagttatg

SEQ ID NO: 65597 - DNA, 30 bp, Artificial Sequence
  Synthetic oligonucleotide
cggtcgttgtaattagctaaagccgttatg

SEQ ID NO: 65598 - DNA, 30 bp, Artificial Sequence
  Synthetic oligonucleotide
actaacccagaaaagtacacagactttatg

SEQ ID NO: 65599 - DNA, 30 bp, Artificial Sequence
  Synthetic oligonucleotide
agacgggtggaggggatacaccagtttatg

SEQ ID NO: 65600 - DNA, 30 bp, Artificial Sequence
  Synthetic oligonucleotide
aaagaagcgcataaatatttggagaaactg

SEQ ID NO: 65601 - DNA, 30 bp, Artificial Sequence
  Synthetic oligonucleotide
gagaaaatatataaaggtctgattaaactg

SEQ ID NO: 65602 - DNA, 30 bp, Artificial Sequence
  Synthetic oligonucleotide
cacggcgttttgaagtagtggctccaactg

SEQ ID NO: 65603 - DNA, 30 bp, Artificial Sequence
  Synthetic oligonucleotide
ctggaataagtaaacccggcgaagcaactg

SEQ ID NO: 65604 - DNA, 30 bp, Artificial Sequence
  Synthetic oligonucleotide
tgaaatggctagcgagtgggctagcaactg

SEQ ID NO: 65605 - DNA, 30 bp, Artificial Sequence
  Synthetic oligonucleotide
gcaaaaagatgggtttgagcggcgtaactg

SEQ ID NO: 65606 - DNA, 30 bp, Artificial Sequence
  Synthetic oligonucleotide
tgtggaggaaagggacactgatggtaactg

SEQ ID NO: 65607 - DNA, 30 bp, Artificial Sequence
  Synthetic oligonucleotide
tcgcatcgcgtaaataatcaagtgtaactg

SEQ ID NO: 65608 - DNA, 30 bp, Artificial Sequence
  Synthetic oligonucleotide
actcggcagtcgggtgtaaaggcttaactg

SEQ ID NO: 65609 - DNA, 31 bp, Artificial Sequence
  Synthetic oligonucleotide
agtttgcaggaaatggaaccgtgcaacactg

SEQ ID NO: 65610 - DNA, 30 bp, Artificial Sequence
  Synthetic oligonucleotide
aaagctgatgttgcgaccggaagaacactg

SEQ ID NO: 65611 - DNA, 30 bp, Artificial Sequence
  Synthetic oligonucleotide
gagcccagaaaatggctgaatgtcacactg

SEQ ID NO: 65612 - DNA, 29 bp, Artificial Sequence
  Synthetic oligonucleotide
tcatcaacccagtggtgtgggctacactg

SEQ ID NO: 65613 - DNA, 30 bp, Artificial Sequence
  Synthetic oligonucleotide
gcagggcggcaaacaacatctcgtacactg

SEQ ID NO: 65614 - DNA, 30 bp, Artificial Sequence
  Synthetic oligonucleotide
cgtgaggcaagtggattaaatcaggcactg

SEQ ID NO: 65615 - DNA, 30 bp, Artificial Sequence
  Synthetic oligonucleotide
tggagggctacaattccgtcggggtcactg

SEQ ID NO: 65616 - DNA, 30 bp, Artificial Sequence
  Synthetic oligonucleotide
tctcgtgcacgaggttaaaagtaaagactg

SEQ ID NO: 65617 - DNA, 30 bp, Artificial Sequence
  Synthetic oligonucleotide
gtccagggttgcctaacgggaagccgactg

SEQ ID NO: 65618 - DNA, 30 bp, Artificial Sequence
  Synthetic oligonucleotide
ctgagggaagacgtctaccgttcgcgactg

SEQ ID NO: 65619 - DNA, 30 bp, Artificial Sequence
  Synthetic oligonucleotide
gtccggatagctgaatccgagggtggactg

SEQ ID NO: 65620 - DNA, 30 bp, Artificial Sequence
  Synthetic oligonucleotide
gaacgagataccagcgattcatgatgactg

SEQ ID NO: 65621 - DNA, 30 bp, Artificial Sequence
  Synthetic oligonucleotide
acgattcactcgcctgttgagccctgactg

SEQ ID NO: 65622 - DNA, 30 bp, Artificial Sequence
  Synthetic oligonucleotide
gacttacggtagagaggggacgagtgactg

SEQ ID NO: 65623 - DNA, 30 bp, Artificial Sequence
  Synthetic oligonucleotide
ctcctcggagagagggcgatcgtgtgactg

SEQ ID NO: 65624 - DNA, 30 bp, Artificial Sequence
  Synthetic oligonucleotide
cccgaagagcggttagttcgggtaatactg

SEQ ID NO: 65625 - DNA, 30 bp, Artificial Sequence
  Synthetic oligonucleotide
gagccaaccgtggcaccgacaaaagtactg

SEQ ID NO: 65626 - DNA, 30 bp, Artificial Sequence
  Synthetic oligonucleotide
aaagaagggttacgaatggcatccgtactg

SEQ ID NO: 65627 - DNA, 30 bp, Artificial Sequence
  Synthetic oligonucleotide
agacaattcatctaacaaatattcttactg

SEQ ID NO: 65628 - DNA, 30 bp, Artificial Sequence
  Synthetic oligonucleotide
ctagactatgcggtgggaagaaatttactg

SEQ ID NO: 65629 - DNA, 30 bp, Artificial Sequence
  Synthetic oligonucleotide
gacgtcattgatagcgctacatgtttactg

SEQ ID NO: 65630 - DNA, 30 bp, Artificial Sequence
  Synthetic oligonucleotide
ctcaagccgactacaaacaaacagaacctg

SEQ ID NO: 65631 - DNA, 30 bp, Artificial Sequence
  Synthetic oligonucleotide
tcgaaggtgtgagatcggaacggtaacctg

SEQ ID NO: 65632 - DNA, 30 bp, Artificial Sequence
  Synthetic oligonucleotide
cagcggacagtaaaacgccatacacacctg

SEQ ID NO: 65633 - DNA, 30 bp, Artificial Sequence
  Synthetic oligonucleotide
cgattagatgtagggagttgaaaccacctg

SEQ ID NO: 65634 - DNA, 30 bp, Artificial Sequence
  Synthetic oligonucleotide
agggtgctccatggtgaatagctgcacctg

SEQ ID NO: 65635 - DNA, 30 bp, Artificial Sequence
  Synthetic oligonucleotide
cgtagagggaggcgtttcccggggtacctg

SEQ ID NO: 65636 - DNA, 30 bp, Artificial Sequence
  Synthetic oligonucleotide
caacgacgcatgatgaatctaactaccctg

SEQ ID NO: 65637 - DNA, 30 bp, Artificial Sequence
  Synthetic oligonucleotide
agcatccatgactcgctcatgacaggcctg

SEQ ID NO: 65638 - DNA, 30 bp, Artificial Sequence
  Synthetic oligonucleotide
gtgagattacggacagacttgcgcatcctg

SEQ ID NO: 65639 - DNA, 30 bp, Artificial Sequence
  Synthetic oligonucleotide
taccgcgtcaattgaggacgggcgatcctg

SEQ ID NO: 65640 - DNA, 30 bp, Artificial Sequence
  Synthetic oligonucleotide
gatcgggggacacgcgcgtaagccttcctg

SEQ ID NO: 65641 - DNA, 30 bp, Artificial Sequence
  Synthetic oligonucleotide
agatcaatacaagggaccaccactgagctg

SEQ ID NO: 65642 - DNA, 30 bp, Artificial Sequence
  Synthetic oligonucleotide
ccgatgactacccacatatcagctccgctg

SEQ ID NO: 65643 - DNA, 30 bp, Artificial Sequence
  Synthetic oligonucleotide
tggagcagaggagccctgaggagagcgctg

SEQ ID NO: 65644 - DNA, 30 bp, Artificial Sequence
  Synthetic oligonucleotide
ggccggcacctatgagcccgattagcgctg

SEQ ID NO: 65645 - DNA, 30 bp, Artificial Sequence
  Synthetic oligonucleotide
gacaccaacaagaaggtggcggtatcgctg

SEQ ID NO: 65646 - DNA, 30 bp, Artificial Sequence
  Synthetic oligonucleotide
gtgtacactgccgttgtcgagaagtcgctg

SEQ ID NO: 65647 - DNA, 30 bp, Artificial Sequence
  Synthetic oligonucleotide
tgagggtaagttgcggttgccaaccggctg

SEQ ID NO: 65648 - DNA, 30 bp, Artificial Sequence
  Synthetic oligonucleotide
aggatcagagcggatgcttgctcagggctg

SEQ ID NO: 65649 - DNA, 30 bp, Artificial Sequence
  Synthetic oligonucleotide
cctgcaaaggggagaatcacgttcgggctg

SEQ ID NO: 65650 - DNA, 30 bp, Artificial Sequence
  Synthetic oligonucleotide
aggaacgatcatcagaagaataatgggctg

SEQ ID NO: 65651 - DNA, 30 bp, Artificial Sequence
  Synthetic oligonucleotide
gatcagttcctagataaatgggatgggctg

SEQ ID NO: 65652 - DNA, 30 bp, Artificial Sequence
  Synthetic oligonucleotide
cgttaaaccgtcgtgtacaagatatggctg

SEQ ID NO: 65653 - DNA, 30 bp, Artificial Sequence
  Synthetic oligonucleotide
acataccatggcgtaggtaatgtatggctg

SEQ ID NO: 65654 - DNA, 30 bp, Artificial Sequence
  Synthetic oligonucleotide
tcgcttagacccatcagactcaccttgctg

SEQ ID NO: 65655 - DNA, 30 bp, Artificial Sequence
  Synthetic oligonucleotide
acaggcattcctataaaatacaagcatctg

SEQ ID NO: 65656 - DNA, 30 bp, Artificial Sequence
  Synthetic oligonucleotide
ggttggcgtcacatcgtcactagtcatctg

SEQ ID NO: 65657 - DNA, 30 bp, Artificial Sequence
  Synthetic oligonucleotide
acggttcgtagcgcttaagatagcgatctg

SEQ ID NO: 65658 - DNA, 30 bp, Artificial Sequence
  Synthetic oligonucleotide
gcggaggacaacgggaaataatagactctg

SEQ ID NO: 65659 - DNA, 30 bp, Artificial Sequence
  Synthetic oligonucleotide
atagtacgaaacgaatgttatgcacctctg

SEQ ID NO: 65660 - DNA, 30 bp, Artificial Sequence
  Synthetic oligonucleotide
acatagaaataacgtcacggactccctctg

SEQ ID NO: 65661 - DNA, 30 bp, Artificial Sequence
  Synthetic oligonucleotide
cggatcgagccataagcccgccgctctctg

SEQ ID NO: 65662 - DNA, 30 bp, Artificial Sequence
  Synthetic oligonucleotide
cagtaggtgaatacgcatggatcttctctg

SEQ ID NO: 65663 - DNA, 30 bp, Artificial Sequence
  Synthetic oligonucleotide
attgcgactaaactgaagcattagagtctg

SEQ ID NO: 65664 - DNA, 30 bp, Artificial Sequence
  Synthetic oligonucleotide
ttaaacacgggtatgtcaacaggtagtctg

SEQ ID NO: 65665 - DNA, 30 bp, Artificial Sequence
  Synthetic oligonucleotide
cacgctatggtgacagattcctgccgtctg

SEQ ID NO: 65666 - DNA, 31 bp, Artificial Sequence
  Synthetic oligonucleotide
gaaaccacgaaataattagaactatcgtctg

SEQ ID NO: 65667 - DNA, 30 bp, Artificial Sequence
  Synthetic oligonucleotide
ggtgaacctgttgtgtaaaagccatgtctg

SEQ ID NO: 65668 - DNA, 30 bp, Artificial Sequence
  Synthetic oligonucleotide
gatcgacgggtggtaaggcctatgtgtctg

SEQ ID NO: 65669 - DNA, 30 bp, Artificial Sequence
  Synthetic oligonucleotide
tggggatagataggacatgcgcgtcttctg

SEQ ID NO: 65670 - DNA, 30 bp, Artificial Sequence
  Synthetic oligonucleotide
ccatgagtataagaaccgggaagaaaagtg

SEQ ID NO: 65671 - DNA, 30 bp, Artificial Sequence
  Synthetic oligonucleotide
agttaagccgtgcgactcaggtgaaaagtg

SEQ ID NO: 65672 - DNA, 30 bp, Artificial Sequence
  Synthetic oligonucleotide
gttgagttcagtccatccggtatgaaagtg

SEQ ID NO: 65673 - DNA, 30 bp, Artificial Sequence
  Synthetic oligonucleotide
tatgaactggggataggtgtttagcaagtg

SEQ ID NO: 65674 - DNA, 30 bp, Artificial Sequence
  Synthetic oligonucleotide
agaaacaatatgagtcgtccatttcaagtg

SEQ ID NO: 65675 - DNA, 30 bp, Artificial Sequence
  Synthetic oligonucleotide
agctagtggcggtccgcctgtaccgaagtg

SEQ ID NO: 65676 - DNA, 30 bp, Artificial Sequence
  Synthetic oligonucleotide
attcacggaatagagcaattatatgaagtg

SEQ ID NO: 65677 - DNA, 30 bp, Artificial Sequence
  Synthetic oligonucleotide
tgtcttgttcgcaaatccgactttgaagtg

SEQ ID NO: 65678 - DNA, 30 bp, Artificial Sequence
  Synthetic oligonucleotide
tcgtctggaagacatattagtaaataagtg

SEQ ID NO: 65679 - DNA, 30 bp, Artificial Sequence
  Synthetic oligonucleotide
tttgacacccggaaactccaacgataagtg

SEQ ID NO: 65680 - DNA, 30 bp, Artificial Sequence
  Synthetic oligonucleotide
acggaatccaggggtggcaatggataagtg

SEQ ID NO: 65681 - DNA, 30 bp, Artificial Sequence
  Synthetic oligonucleotide
caaagagcggagattgcttgtacttaagtg

SEQ ID NO: 65682 - DNA, 30 bp, Artificial Sequence
  Synthetic oligonucleotide
acggcacggcggagtgtccttcggacagtg

SEQ ID NO: 65683 - DNA, 30 bp, Artificial Sequence
  Synthetic oligonucleotide
acagaggaacagcttccagagtcaccagtg

SEQ ID NO: 65684 - DNA, 30 bp, Artificial Sequence
  Synthetic oligonucleotide
gatgcctagagtactacttttttaccagtg

SEQ ID NO: 65685 - DNA, 30 bp, Artificial Sequence
  Synthetic oligonucleotide
acaagaaacctgtgcgtaagacagccagtg

SEQ ID NO: 65686 - DNA, 30 bp, Artificial Sequence
  Synthetic oligonucleotide
ctcacgttggtctaaccggggaatccagtg

SEQ ID NO: 65687 - DNA, 30 bp, Artificial Sequence
  Synthetic oligonucleotide
cagctgatcggcacagtgacgattccagtg

SEQ ID NO: 65688 - DNA, 30 bp, Artificial Sequence
  Synthetic oligonucleotide
gattagtgcccgacatgggaatcttcagtg

SEQ ID NO: 65689 - DNA, 30 bp, Artificial Sequence
  Synthetic oligonucleotide
cggaattggtcgtgggccctcacaagagtg

SEQ ID NO: 65690 - DNA, 30 bp, Artificial Sequence
  Synthetic oligonucleotide
tcctttaacaatggcccttacaaacgagtg

SEQ ID NO: 65691 - DNA, 30 bp, Artificial Sequence
  Synthetic oligonucleotide
cagatattaaagacctatacttgtcgagtg

SEQ ID NO: 65692 - DNA, 30 bp, Artificial Sequence
  Synthetic oligonucleotide
tgccgggatacagaaaatcagatgggagtg

SEQ ID NO: 65693 - DNA, 30 bp, Artificial Sequence
  Synthetic oligonucleotide
cacaggtcgggtagagtgctagggtgagtg

SEQ ID NO: 65694 - DNA, 35 bp, Artificial Sequence
  Synthetic oligonucleotide
gcgccgtgccagcgtacgagaacggcgggtgagtg

SEQ ID NO: 65695 - DNA, 30 bp, Artificial Sequence
  Synthetic oligonucleotide
cgtctaagcggtgatatgtagccttgagtg

SEQ ID NO: 65696 - DNA, 30 bp, Artificial Sequence
  Synthetic oligonucleotide
tgctagtgagagttcgctaagcacatagtg

SEQ ID NO: 65697 - DNA, 30 bp, Artificial Sequence
  Synthetic oligonucleotide
agcgacgcctgaatgcttggccagatagtg

SEQ ID NO: 65698 - DNA, 30 bp, Artificial Sequence
  Synthetic oligonucleotide
caaacatacaaaaaacgtacgtccctagtg

SEQ ID NO: 65699 - DNA, 30 bp, Artificial Sequence
  Synthetic oligonucleotide
tggagtgccttaccagggagttatctagtg

SEQ ID NO: 65700 - DNA, 30 bp, Artificial Sequence
  Synthetic oligonucleotide
cgtgccaaaaactagtcacatggattagtg

SEQ ID NO: 65701 - DNA, 30 bp, Artificial Sequence
  Synthetic oligonucleotide
caggtacgatgtcagattcgccccttagtg

SEQ ID NO: 65702 - DNA, 30 bp, Artificial Sequence
  Synthetic oligonucleotide
agcctattacatcggaaaagtgtaaacgtg

SEQ ID NO: 65703 - DNA, 30 bp, Artificial Sequence
  Synthetic oligonucleotide
tcttaatttggaagggttcaggggaacgtg

SEQ ID NO: 65704 - DNA, 30 bp, Artificial Sequence
  Synthetic oligonucleotide
tgcaatggtgtttaagaagactgacacgtg

SEQ ID NO: 65705 - DNA, 30 bp, Artificial Sequence
  Synthetic oligonucleotide
cgacgatctcaggaccagcgaatgcacgtg

SEQ ID NO: 65706 - DNA, 30 bp, Artificial Sequence
  Synthetic oligonucleotide
gaccatctcggggcggagccgatgcacgtg

SEQ ID NO: 65707 - DNA, 30 bp, Artificial Sequence
  Synthetic oligonucleotide
tcgtgtggctaatactccataactcacgtg

SEQ ID NO: 65708 - DNA, 30 bp, Artificial Sequence
  Synthetic oligonucleotide
gggagggaggccgtgttgtaccgatacgtg

SEQ ID NO: 65709 - DNA, 30 bp, Artificial Sequence
  Synthetic oligonucleotide
tacgtataaatgatcgcgacctgctacgtg

SEQ ID NO: 65710 - DNA, 30 bp, Artificial Sequence
  Synthetic oligonucleotide
aaagtcggacatgcagtccagaagtacgtg

SEQ ID NO: 65711 - DNA, 30 bp, Artificial Sequence
  Synthetic oligonucleotide
cgacttctaaagcatcattaaagcgccgtg

SEQ ID NO: 65712 - DNA, 30 bp, Artificial Sequence
  Synthetic oligonucleotide
catgcgtggaatttacattgactatccgtg

SEQ ID NO: 65713 - DNA, 30 bp, Artificial Sequence
  Synthetic oligonucleotide
attcgcaggggtagagactaaacctccgtg

SEQ ID NO: 65714 - DNA, 30 bp, Artificial Sequence
  Synthetic oligonucleotide
atcaccatgcacacaattaagccaagcgtg

SEQ ID NO: 65715 - DNA, 30 bp, Artificial Sequence
  Synthetic oligonucleotide
tcaagtaataggtaaatcaatttgagcgtg

SEQ ID NO: 65716 - DNA, 30 bp, Artificial Sequence
  Synthetic oligonucleotide
tggcgtgtcacataagagaagtttagcgtg

SEQ ID NO: 65717 - DNA, 30 bp, Artificial Sequence
  Synthetic oligonucleotide
gatcgcaattagctgcaagtatatcgcgtg

SEQ ID NO: 65718 - DNA, 30 bp, Artificial Sequence
  Synthetic oligonucleotide
agtcgtcaccactgtccctaggttcgcgtg

SEQ ID NO: 65719 - DNA, 30 bp, Artificial Sequence
  Synthetic oligonucleotide
cagtcaaggtgatgatcttaccccggcgtg

SEQ ID NO: 65720 - DNA, 30 bp, Artificial Sequence
  Synthetic oligonucleotide
cgtaattgtgcagatgtgtggcgatgcgtg

SEQ ID NO: 65721 - DNA, 30 bp, Artificial Sequence
  Synthetic oligonucleotide
ccgccggcctcgtcattgtgagaaatcgtg

SEQ ID NO: 65722 - DNA, 30 bp, Artificial Sequence
  Synthetic oligonucleotide
cggtcgagtgtactggcgtaggttatcgtg

SEQ ID NO: 65723 - DNA, 30 bp, Artificial Sequence
  Synthetic oligonucleotide
tgacccaaagttaccccgggagatctcgtg

SEQ ID NO: 65724 - DNA, 30 bp, Artificial Sequence
  Synthetic oligonucleotide
tgggtagctagaaacgctacgattctcgtg

SEQ ID NO: 65725 - DNA, 30 bp, Artificial Sequence
  Synthetic oligonucleotide
agcgggcatgggactccgtgggtattcgtg

SEQ ID NO: 65726 - DNA, 30 bp, Artificial Sequence
  Synthetic oligonucleotide
accgcgcctgcaacggcaacagtcttcgtg

SEQ ID NO: 65727 - DNA, 30 bp, Artificial Sequence
  Synthetic oligonucleotide
tgttggtcgatgagcattgtgtatttcgtg

SEQ ID NO: 65728 - DNA, 30 bp, Artificial Sequence
  Synthetic oligonucleotide
acaagagggtgtcgggtcgtacgcaaggtg

SEQ ID NO: 65729 - DNA, 30 bp, Artificial Sequence
  Synthetic oligonucleotide
ggaaagagaaccagctaaccatcgtaggtg

SEQ ID NO: 65730 - DNA, 30 bp, Artificial Sequence
  Synthetic oligonucleotide
ggccgggatatatcgacaagggggtaggtg

SEQ ID NO: 65731 - DNA, 30 bp, Artificial Sequence
  Synthetic oligonucleotide
taacaggtgattggattctgctggtaggtg

SEQ ID NO: 65732 - DNA, 30 bp, Artificial Sequence
  Synthetic oligonucleotide
cagagggggtataatcttcgtgtttaggtg

SEQ ID NO: 65733 - DNA, 30 bp, Artificial Sequence
  Synthetic oligonucleotide
gaaaggcgatcgttttaagaggggacggtg

SEQ ID NO: 65734 - DNA, 30 bp, Artificial Sequence
  Synthetic oligonucleotide
tgcgaaagagtgtgtgtccatctcccggtg

SEQ ID NO: 65735 - DNA, 30 bp, Artificial Sequence
  Synthetic oligonucleotide
cacaacatagcgtgaacgcaccaacgggtg

SEQ ID NO: 65736 - DNA, 30 bp, Artificial Sequence
  Synthetic oligonucleotide
acacaaggggtgtgcggcataagaggggtg

SEQ ID NO: 65737 - DNA, 30 bp, Artificial Sequence
  Synthetic oligonucleotide
taaggggggtttaaacagagcgttggggtg

SEQ ID NO: 65738 - DNA, 30 bp, Artificial Sequence
  Synthetic oligonucleotide
gcgaccaaggatgatagcttgcagctggtg

SEQ ID NO: 65739 - DNA, 30 bp, Artificial Sequence
  Synthetic oligonucleotide
gtaggaggggggttgtcgcctagtgtggtg

SEQ ID NO: 65740 - DNA, 30 bp, Artificial Sequence
  Synthetic oligonucleotide
tacttcgcgagagaacttattgacttggtg

SEQ ID NO: 65741 - DNA, 30 bp, Artificial Sequence
  Synthetic oligonucleotide
acttgctggtggattcggcttagaaatgtg

SEQ ID NO: 65742 - DNA, 30 bp, Artificial Sequence
  Synthetic oligonucleotide
caaaagggtgaaagaggcgcggtcaatgtg

SEQ ID NO: 65743 - DNA, 30 bp, Artificial Sequence
  Synthetic oligonucleotide
ggacaaaaacgatagcataacactcatgtg

SEQ ID NO: 65744 - DNA, 30 bp, Artificial Sequence
  Synthetic oligonucleotide
cgatactgtacttgcctaaattgagatgtg

SEQ ID NO: 65745 - DNA, 30 bp, Artificial Sequence
  Synthetic oligonucleotide
atactcaaacacacgtgaccataggatgtg

SEQ ID NO: 65746 - DNA, 30 bp, Artificial Sequence
  Synthetic oligonucleotide
gtgccaggtgaacggagaagaactgatgtg

SEQ ID NO: 65747 - DNA, 30 bp, Artificial Sequence
  Synthetic oligonucleotide
tatcaataatgctcatcgtctaactatgtg

SEQ ID NO: 65748 - DNA, 30 bp, Artificial Sequence
  Synthetic oligonucleotide
tccggcaggtgccgacacaacggctatgtg

SEQ ID NO: 65749 - DNA, 30 bp, Artificial Sequence
  Synthetic oligonucleotide
acgttaggacgggggtggtatctctatgtg

SEQ ID NO: 65750 - DNA, 30 bp, Artificial Sequence
  Synthetic oligonucleotide
tcgcgtgctgaaattccttcaaggtatgtg

SEQ ID NO: 65751 - DNA, 30 bp, Artificial Sequence
  Synthetic oligonucleotide
cgcatataagggactccgggactgtatgtg

SEQ ID NO: 65752 - DNA, 30 bp, Artificial Sequence
  Synthetic oligonucleotide
tatcaagtgggacaaacatctcgaactgtg

SEQ ID NO: 65753 - DNA, 30 bp, Artificial Sequence
  Synthetic oligonucleotide
tgggatctcaacaggaagattcacactgtg

SEQ ID NO: 65754 - DNA, 30 bp, Artificial Sequence
  Synthetic oligonucleotide
ggcgaagattacaattagacccccactgtg

SEQ ID NO: 65755 - DNA, 30 bp, Artificial Sequence
  Synthetic oligonucleotide
gccggacggagggctgtgagttggagtgtg

SEQ ID NO: 65756 - DNA, 30 bp, Artificial Sequence
  Synthetic oligonucleotide
taagcgtatgcgagtggaggcttgagtgtg

SEQ ID NO: 65757 - DNA, 30 bp, Artificial Sequence
  Synthetic oligonucleotide
tcggttaggaaccagatagggatgcgtgtg

SEQ ID NO: 65758 - DNA, 30 bp, Artificial Sequence
  Synthetic oligonucleotide
gaggatgggcagtaggtagaggatcgtgtg

SEQ ID NO: 65759 - DNA, 30 bp, Artificial Sequence
  Synthetic oligonucleotide
gagatccactcacaagaccataaaggtgtg

SEQ ID NO: 65760 - DNA, 30 bp, Artificial Sequence
  Synthetic oligonucleotide
taacgaaaggggactgcaattttcggtgtg

SEQ ID NO: 65761 - DNA, 30 bp, Artificial Sequence
  Synthetic oligonucleotide
aagcggaaaactggtacctatgagggtgtg

SEQ ID NO: 65762 - DNA, 30 bp, Artificial Sequence
  Synthetic oligonucleotide
tggtagcgtgtcatcgggagtacatgtgtg

SEQ ID NO: 65763 - DNA, 30 bp, Artificial Sequence
  Synthetic oligonucleotide
gcgttagtgcgaactgctcgagcaattgtg

SEQ ID NO: 65764 - DNA, 30 bp, Artificial Sequence
  Synthetic oligonucleotide
agtggcaaagaaaaatcgagaccgattgtg

SEQ ID NO: 65765 - DNA, 30 bp, Artificial Sequence
  Synthetic oligonucleotide
gtgcaaaatcgaagatttgctgtgcttgtg

SEQ ID NO: 65766 - DNA, 30 bp, Artificial Sequence
  Synthetic oligonucleotide
taataacgactctagttatagccagttgtg

SEQ ID NO: 65767 - DNA, 30 bp, Artificial Sequence
  Synthetic oligonucleotide
ggaggttgagttctaggagggaacaaattg

SEQ ID NO: 65768 - DNA, 30 bp, Artificial Sequence
  Synthetic oligonucleotide
agatagttactggcaaaatgccacaaattg

SEQ ID NO: 65769 - DNA, 30 bp, Artificial Sequence
  Synthetic oligonucleotide
gtctggcaatcataaaggggaggtaaattg

SEQ ID NO: 65770 - DNA, 30 bp, Artificial Sequence
  Synthetic oligonucleotide
aggggcttaagccagtaaaagggtaaattg

SEQ ID NO: 65771 - DNA, 30 bp, Artificial Sequence
  Synthetic oligonucleotide
ttagccataacggatgtacggggtaaattg

SEQ ID NO: 65772 - DNA, 30 bp, Artificial Sequence
  Synthetic oligonucleotide
gtagcaacactatattcacgaaagcaattg

SEQ ID NO: 65773 - DNA, 30 bp, Artificial Sequence
  Synthetic oligonucleotide
gctcacctggggtgtcaaatactgcaattg

SEQ ID NO: 65774 - DNA, 30 bp, Artificial Sequence
  Synthetic oligonucleotide
agcagtctagtactacgtgcgtcagaattg

SEQ ID NO: 65775 - DNA, 30 bp, Artificial Sequence
  Synthetic oligonucleotide
tctaactggctatgatatacaatagaattg

SEQ ID NO: 65776 - DNA, 30 bp, Artificial Sequence
  Synthetic oligonucleotide
caagatcgagaaagagtctggagtgaattg

SEQ ID NO: 65777 - DNA, 30 bp, Artificial Sequence
  Synthetic oligonucleotide
tgaagtggagagctacgtgagaaataattg

SEQ ID NO: 65778 - DNA, 30 bp, Artificial Sequence
  Synthetic oligonucleotide
ctcgagaaaagtttggattatggataattg

SEQ ID NO: 65779 - DNA, 30 bp, Artificial Sequence
  Synthetic oligonucleotide
gatccaagcgaagaactgtcggtcccattg

SEQ ID NO: 65780 - DNA, 30 bp, Artificial Sequence
  Synthetic oligonucleotide
cggcgtggtctgataaaacttgttccattg

SEQ ID NO: 65781 - DNA, 30 bp, Artificial Sequence
  Synthetic oligonucleotide
accagctagacatagataacgaggtcattg

SEQ ID NO: 65782 - DNA, 30 bp, Artificial Sequence
  Synthetic oligonucleotide
gccttaccggacagccgttaagatagattg

SEQ ID NO: 65783 - DNA, 30 bp, Artificial Sequence
  Synthetic oligonucleotide
tagcaaacgggacatagtgttatacgattg

SEQ ID NO: 65784 - DNA, 30 bp, Artificial Sequence
  Synthetic oligonucleotide
ctgtaaccaccgagttagaaatggcgattg

SEQ ID NO: 65785 - DNA, 30 bp, Artificial Sequence
  Synthetic oligonucleotide
ggtgagttatatcgcgaagattctcgattg

SEQ ID NO: 65786 - DNA, 30 bp, Artificial Sequence
  Synthetic oligonucleotide
ctacgtgttagaaacggaccgtcgggattg

SEQ ID NO: 65787 - DNA, 30 bp, Artificial Sequence
  Synthetic oligonucleotide
tgatcaacaggaaattcttgtttctgattg

SEQ ID NO: 65788 - DNA, 30 bp, Artificial Sequence
  Synthetic oligonucleotide
caggagacagttagtactatgcccgtattg

SEQ ID NO: 65789 - DNA, 30 bp, Artificial Sequence
  Synthetic oligonucleotide
tgtactataaagagggcaggaagtgtattg

SEQ ID NO: 65790 - DNA, 30 bp, Artificial Sequence
  Synthetic oligonucleotide
taggtgggcggatatcttacacgtgtattg

SEQ ID NO: 65791 - DNA, 30 bp, Artificial Sequence
  Synthetic oligonucleotide
aggcgcgttaacgatggagtaaaagacttg

SEQ ID NO: 65792 - DNA, 30 bp, Artificial Sequence
  Synthetic oligonucleotide
tcgagggactagctactatcctgcgacttg

SEQ ID NO: 65793 - DNA, 30 bp, Artificial Sequence
  Synthetic oligonucleotide
gaggtgctcgagtttaggctatatcccttg

SEQ ID NO: 65794 - DNA, 30 bp, Artificial Sequence
  Synthetic oligonucleotide
ttagtggcatggcacaggcagaagagcttg

SEQ ID NO: 65795 - DNA, 30 bp, Artificial Sequence
  Synthetic oligonucleotide
gacggcccgcgaaacgggaaagaacgcttg

SEQ ID NO: 65796 - DNA, 30 bp, Artificial Sequence
  Synthetic oligonucleotide
aaactcaggattgtatcgaacattcgcttg

SEQ ID NO: 65797 - DNA, 30 bp, Artificial Sequence
  Synthetic oligonucleotide
cggtaccttgggatggatcgaaggtgcttg

SEQ ID NO: 65798 - DNA, 30 bp, Artificial Sequence
  Synthetic oligonucleotide
aagcggaagacagatttgagcccttgcttg

SEQ ID NO: 65799 - DNA, 30 bp, Artificial Sequence
  Synthetic oligonucleotide
tggacttcaggctgggccgacatactcttg

SEQ ID NO: 65800 - DNA, 30 bp, Artificial Sequence
  Synthetic oligonucleotide
tagtgcgagcaaacggaagcttacgtcttg

SEQ ID NO: 65801 - DNA, 30 bp, Artificial Sequence
  Synthetic oligonucleotide
agtattctgcctcacgagttagatgtcttg

SEQ ID NO: 65802 - DNA, 30 bp, Artificial Sequence
  Synthetic oligonucleotide
acaaggttatctttgctaacagggaagttg

SEQ ID NO: 65803 - DNA, 30 bp, Artificial Sequence
  Synthetic oligonucleotide
agcatatgacataaccgagcgtataagttg

SEQ ID NO: 65804 - DNA, 30 bp, Artificial Sequence
  Synthetic oligonucleotide
tggaatggaggaggagattcgtctaagttg

SEQ ID NO: 65805 - DNA, 30 bp, Artificial Sequence
  Synthetic oligonucleotide
agctcgccatgatccggcgtataccagttg

SEQ ID NO: 65806 - DNA, 30 bp, Artificial Sequence
  Synthetic oligonucleotide
gcgcggtcaggtcaactcgggggccagttg

SEQ ID NO: 65807 - DNA, 30 bp, Artificial Sequence
  Synthetic oligonucleotide
tactgcaccgggtaacgggtgcgtcagttg

SEQ ID NO: 65808 - DNA, 30 bp, Artificial Sequence
  Synthetic oligonucleotide
ctttgggtaaaaactacaagagacgagttg

SEQ ID NO: 65809 - DNA, 30 bp, Artificial Sequence
  Synthetic oligonucleotide
actcactaccaccaaataaattctgagttg

SEQ ID NO: 65810 - DNA, 30 bp, Artificial Sequence
  Synthetic oligonucleotide
agagcggcatggctacgattgtgtgagttg

SEQ ID NO: 65811 - DNA, 30 bp, Artificial Sequence
  Synthetic oligonucleotide
acaagacgaatagttccccagatatagttg

SEQ ID NO: 65812 - DNA, 30 bp, Artificial Sequence
  Synthetic oligonucleotide
tgacgtaccggggatccctgattctagttg

SEQ ID NO: 65813 - DNA, 30 bp, Artificial Sequence
  Synthetic oligonucleotide
catagggaggttgtggaccgaacgccgttg

SEQ ID NO: 65814 - DNA, 30 bp, Artificial Sequence
  Synthetic oligonucleotide
cggagggtcgggatgtatgcggaagcgttg

SEQ ID NO: 65815 - DNA, 30 bp, Artificial Sequence
  Synthetic oligonucleotide
cagacattccgggacgaaacagtcgcgttg

SEQ ID NO: 65816 - DNA, 30 bp, Artificial Sequence
  Synthetic oligonucleotide
gctagtggacccttcagggccagggcgttg

SEQ ID NO: 65817 - DNA, 30 bp, Artificial Sequence
  Synthetic oligonucleotide
attggatactacatcaccaaatctgcgttg

SEQ ID NO: 65818 - DNA, 30 bp, Artificial Sequence
  Synthetic oligonucleotide
catgataccccccttgatagtgttgcgttg

SEQ ID NO: 65819 - DNA, 31 bp, Artificial Sequence
  Synthetic oligonucleotide
taaacgttgcgggggaggggaaggcaggttg

SEQ ID NO: 65820 - DNA, 30 bp, Artificial Sequence
  Synthetic oligonucleotide
gcggcggtagcaaaaaagtgtggccggttg

SEQ ID NO: 65821 - DNA, 30 bp, Artificial Sequence
  Synthetic oligonucleotide
cgcacagggggtaggcggggttgagggttg

SEQ ID NO: 65822 - DNA, 30 bp, Artificial Sequence
  Synthetic oligonucleotide
gtcacaaggcaactgtcgtaatcatggttg

SEQ ID NO: 65823 - DNA, 30 bp, Artificial Sequence
  Synthetic oligonucleotide
tcacgtatgcgagttgcgaaacgcatgttg

SEQ ID NO: 65824 - DNA, 30 bp, Artificial Sequence
  Synthetic oligonucleotide
agcagagctcgtccatagaagttattgttg

SEQ ID NO: 65825 - DNA, 30 bp, Artificial Sequence
  Synthetic oligonucleotide
agcgagttatgaaaccggtttgccaatttg

SEQ ID NO: 65826 - DNA, 30 bp, Artificial Sequence
  Synthetic oligonucleotide
tggaggtcggcaaggcattcagaacatttg

SEQ ID NO: 65827 - DNA, 30 bp, Artificial Sequence
  Synthetic oligonucleotide
ggatgacgaaaaggatgtttaccacatttg

SEQ ID NO: 65828 - DNA, 30 bp, Artificial Sequence
  Synthetic oligonucleotide
ttcgtaatcacgaaccatatcgtacatttg

SEQ ID NO: 65829 - DNA, 30 bp, Artificial Sequence
  Synthetic oligonucleotide
ggcatgacaaataaatataagcgccatttg

SEQ ID NO: 65830 - DNA, 30 bp, Artificial Sequence
  Synthetic oligonucleotide
atggaagctcagcattgtcgtatccatttg

SEQ ID NO: 65831 - DNA, 30 bp, Artificial Sequence
  Synthetic oligonucleotide
cacgaaatcagtcacatcggttctcatttg

SEQ ID NO: 65832 - DNA, 30 bp, Artificial Sequence
  Synthetic oligonucleotide
tgactgctggcgaggattcgcacgtatttg

SEQ ID NO: 65833 - DNA, 30 bp, Artificial Sequence
  Synthetic oligonucleotide
cgggcttatagaaccgaacatgcatctttg

SEQ ID NO: 65834 - DNA, 30 bp, Artificial Sequence
  Synthetic oligonucleotide
cgcggctgaatagagccgtcccaccgtttg

SEQ ID NO: 65835 - DNA, 31 bp, Artificial Sequence
  Synthetic oligonucleotide
caccacgagaagtcagtatattcgccgtttg

SEQ ID NO: 65836 - DNA, 30 bp, Artificial Sequence
  Synthetic oligonucleotide
cctcatagagatcacatcagggtccgtttg

SEQ ID NO: 65837 - DNA, 30 bp, Artificial Sequence
  Synthetic oligonucleotide
tgaaaatcctagtctaatagcacgcgtttg

SEQ ID NO: 65838 - DNA, 30 bp, Artificial Sequence
  Synthetic oligonucleotide
ggagagaacataattatttaaatttgtttg

SEQ ID NO: 65839 - DNA, 30 bp, Artificial Sequence
  Synthetic oligonucleotide
ctgggaagaactgggttataacaaattttg

SEQ ID NO: 65840 - DNA, 30 bp, Artificial Sequence
  Synthetic oligonucleotide
cggcaggcaggggcgtgtgagagcattttg

SEQ ID NO: 65841 - DNA, 30 bp, Artificial Sequence
  Synthetic oligonucleotide
gactcggcgaccaattaaagcatccttttg

SEQ ID NO: 65842 - DNA, 30 bp, Artificial Sequence
  Synthetic oligonucleotide
gaaggcgtaagctcagctagaacctttttg

SEQ ID NO: 65843 - DNA, 30 bp, Artificial Sequence
  Synthetic oligonucleotide
tcgcgagtccttaaggctagaaaaaaaaat

SEQ ID NO: 65844 - DNA, 30 bp, Artificial Sequence
  Synthetic oligonucleotide
gtaaagatcggaggtacaactgcggaaaat

SEQ ID NO: 65845 - DNA, 30 bp, Artificial Sequence
  Synthetic oligonucleotide
aaggaaggggaaggcttactgcgggaaaat

SEQ ID NO: 65846 - DNA, 30 bp, Artificial Sequence
  Synthetic oligonucleotide
tcacatacaacgtccagagaaccgtaaaat

SEQ ID NO: 65847 - DNA, 31 bp, Artificial Sequence
  Synthetic oligonucleotide
tcataagacaccagtgtggtctatgtaaaat

SEQ ID NO: 65848 - DNA, 30 bp, Artificial Sequence
  Synthetic oligonucleotide
catcgagcagaaaatggatggggttaaaat

SEQ ID NO: 65849 - DNA, 30 bp, Artificial Sequence
  Synthetic oligonucleotide
gtcaagccaggtgataactcagtcacaaat

SEQ ID NO: 65850 - DNA, 30 bp, Artificial Sequence
  Synthetic oligonucleotide
tacagcgtagccatccaagcagagacaaat

SEQ ID NO: 65851 - DNA, 30 bp, Artificial Sequence
  Synthetic oligonucleotide
gcccaaaagtcaatgtaacttgcagcaaat

SEQ ID NO: 65852 - DNA, 30 bp, Artificial Sequence
  Synthetic oligonucleotide
cgcggatagcgagcagctcgattagcaaat

SEQ ID NO: 65853 - DNA, 30 bp, Artificial Sequence
  Synthetic oligonucleotide
ctggtactgacaatggaaacaataggaaat

SEQ ID NO: 65854 - DNA, 30 bp, Artificial Sequence
  Synthetic oligonucleotide
agaaggtccaccaactccctgaggggaaat

SEQ ID NO: 65855 - DNA, 30 bp, Artificial Sequence
  Synthetic oligonucleotide
atggaagtggtagtgatggtggatggaaat

SEQ ID NO: 65856 - DNA, 30 bp, Artificial Sequence
  Synthetic oligonucleotide
ataaactgaggacgtgcaaagcgtggaaat

SEQ ID NO: 65857 - DNA, 30 bp, Artificial Sequence
  Synthetic oligonucleotide
gcgactagggggcggagtaacaattgaaat

SEQ ID NO: 65858 - DNA, 30 bp, Artificial Sequence
  Synthetic oligonucleotide
gacacgtaaacatacaagattactataaat

SEQ ID NO: 65859 - DNA, 30 bp, Artificial Sequence
  Synthetic oligonucleotide
ttggcgggtataaataactaagggctaaat

SEQ ID NO: 65860 - DNA, 30 bp, Artificial Sequence
  Synthetic oligonucleotide
ccaacgcacgtagtcctagaagcattaaat

SEQ ID NO: 65861 - DNA, 30 bp, Artificial Sequence
  Synthetic oligonucleotide
acgagtaacgttgtaacaccatacaacaat

SEQ ID NO: 65862 - DNA, 30 bp, Artificial Sequence
  Synthetic oligonucleotide
tgggatgagcgaccacgccagaagaacaat

SEQ ID NO: 65863 - DNA, 30 bp, Artificial Sequence
  Synthetic oligonucleotide
tgattgccaccgaggggtaacctgaacaat

SEQ ID NO: 65864 - DNA, 30 bp, Artificial Sequence
  Synthetic oligonucleotide
ggaatggccaaattagccaggaaacacaat

SEQ ID NO: 65865 - DNA, 30 bp, Artificial Sequence
  Synthetic oligonucleotide
acgtcttcaggactccagttattacacaat

SEQ ID NO: 65866 - DNA, 30 bp, Artificial Sequence
  Synthetic oligonucleotide
agacgaggtggtatccttgcatgccccaat

SEQ ID NO: 65867 - DNA, 30 bp, Artificial Sequence
  Synthetic oligonucleotide
tcccgaacatacggaacgagccaatccaat

SEQ ID NO: 65868 - DNA, 30 bp, Artificial Sequence
  Synthetic oligonucleotide
ggcctatcaggcaggttaaaacagcgcaat

SEQ ID NO: 65869 - DNA, 30 bp, Artificial Sequence
  Synthetic oligonucleotide
cgtatgagggatgaggtacgcacgatcaat

SEQ ID NO: 65870 - DNA, 30 bp, Artificial Sequence
  Synthetic oligonucleotide
tatgaactgttgagggcgctggctatcaat

SEQ ID NO: 65871 - DNA, 30 bp, Artificial Sequence
  Synthetic oligonucleotide
cgagcgagatcccaggggcgcatactcaat

SEQ ID NO: 65872 - DNA, 30 bp, Artificial Sequence
  Synthetic oligonucleotide
gagccaacttagcgtcaccaactactcaat

SEQ ID NO: 65873 - DNA, 30 bp, Artificial Sequence
  Synthetic oligonucleotide
agcacagcggacgagtgcagaggcctcaat

SEQ ID NO: 65874 - DNA, 30 bp, Artificial Sequence
  Synthetic oligonucleotide
aacgaaaaaattaatggtgctgtcaagaat

SEQ ID NO: 65875 - DNA, 30 bp, Artificial Sequence
  Synthetic oligonucleotide
gcaggggacacatgtactctagaacagaat

SEQ ID NO: 65876 - DNA, 30 bp, Artificial Sequence
  Synthetic oligonucleotide
cacaaagcccgatataagcagtccgagaat

SEQ ID NO: 65877 - DNA, 30 bp, Artificial Sequence
  Synthetic oligonucleotide
agcgcaacaagctcacaacaggactagaat

SEQ ID NO: 65878 - DNA, 30 bp, Artificial Sequence
  Synthetic oligonucleotide
tgttgccaagcaacgatgctctctccgaat

SEQ ID NO: 65879 - DNA, 30 bp, Artificial Sequence
  Synthetic oligonucleotide
cggaacggccagtgaacgtagcatgcgaat

SEQ ID NO: 65880 - DNA, 30 bp, Artificial Sequence
  Synthetic oligonucleotide
gaagaacaggaaaataaatgcggaaggaat

SEQ ID NO: 65881 - DNA, 30 bp, Artificial Sequence
  Synthetic oligonucleotide
tcagtaaccggctacacacttatgaggaat

SEQ ID NO: 65882 - DNA, 30 bp, Artificial Sequence
  Synthetic oligonucleotide
catccatacggaggtgagtcgaatcggaat

SEQ ID NO: 65883 - DNA, 30 bp, Artificial Sequence
  Synthetic oligonucleotide
gtagatcgagtaaggttctaataggggaat

SEQ ID NO: 65884 - DNA, 30 bp, Artificial Sequence
  Synthetic oligonucleotide
taaagggctgtaccgaattggtcgtggaat

SEQ ID NO: 65885 - DNA, 30 bp, Artificial Sequence
  Synthetic oligonucleotide
agtcgtgtctcgtccaggaccaaaatgaat

SEQ ID NO: 65886 - DNA, 30 bp, Artificial Sequence
  Synthetic oligonucleotide
tgtgattaaagtgaaggtgatcttctgaat

SEQ ID NO: 65887 - DNA, 30 bp, Artificial Sequence
  Synthetic oligonucleotide
tacaataacacatgtagtgggaaagtgaat

SEQ ID NO: 65888 - DNA, 30 bp, Artificial Sequence
  Synthetic oligonucleotide
acaagatgctaaagcgatagaggcgtgaat

SEQ ID NO: 65889 - DNA, 30 bp, Artificial Sequence
  Synthetic oligonucleotide
cttcgtatcaaccgaattggcggggtgaat

SEQ ID NO: 65890 - DNA, 30 bp, Artificial Sequence
  Synthetic oligonucleotide
gacgacctagtactgaacatgcaacataat

SEQ ID NO: 65891 - DNA, 30 bp, Artificial Sequence
  Synthetic oligonucleotide
cttgatcagcctgtacagctaaaggataat

SEQ ID NO: 65892 - DNA, 30 bp, Artificial Sequence
  Synthetic oligonucleotide
ggggagagcgagaggagcgttcgagctaat

SEQ ID NO: 65893 - DNA, 30 bp, Artificial Sequence
  Synthetic oligonucleotide
atcgagtgaagttccatgcccaatgctaat

SEQ ID NO: 65894 - DNA, 30 bp, Artificial Sequence
  Synthetic oligonucleotide
cgcctgggccgacgaaagactagttctaat

SEQ ID NO: 65895 - DNA, 30 bp, Artificial Sequence
  Synthetic oligonucleotide
tcgggaacatagaaagtggcaaacagtaat

SEQ ID NO: 65896 - DNA, 30 bp, Artificial Sequence
  Synthetic oligonucleotide
aacgtaaaaaacggcacgaatgccagtaat

SEQ ID NO: 65897 - DNA, 30 bp, Artificial Sequence
  Synthetic oligonucleotide
gaagggggttcgttagaagtgacacgtaat

SEQ ID NO: 65898 - DNA, 30 bp, Artificial Sequence
  Synthetic oligonucleotide
cgaacactagggagaggaggagagggtaat

SEQ ID NO: 65899 - DNA, 30 bp, Artificial Sequence
  Synthetic oligonucleotide
tgtgactgtagcatggcgttggtatgtaat

SEQ ID NO: 65900 - DNA, 30 bp, Artificial Sequence
  Synthetic oligonucleotide
cacaagatcgggctactaaagttatgtaat

SEQ ID NO: 65901 - DNA, 30 bp, Artificial Sequence
  Synthetic oligonucleotide
gaggctgagggtcgtcatgggttatgtaat

SEQ ID NO: 65902 - DNA, 30 bp, Artificial Sequence
  Synthetic oligonucleotide
tgcttaggttcaaaaaataagagttgtaat

SEQ ID NO: 65903 - DNA, 30 bp, Artificial Sequence
  Synthetic oligonucleotide
tcatagaactgcacccttggtcgacttaat

SEQ ID NO: 65904 - DNA, 30 bp, Artificial Sequence
  Synthetic oligonucleotide
tctcgaagctcgagcacgtatggtgttaat

SEQ ID NO: 65905 - DNA, 30 bp, Artificial Sequence
  Synthetic oligonucleotide
aaggacggcctccagtgataagagcaacat

SEQ ID NO: 65906 - DNA, 30 bp, Artificial Sequence
  Synthetic oligonucleotide
ccaatctctacatagggaccagttcaacat

SEQ ID NO: 65907 - DNA, 30 bp, Artificial Sequence
  Synthetic oligonucleotide
tctcgaacgtcgcctttgaatagagaacat

SEQ ID NO: 65908 - DNA, 25 bp, Artificial Sequence
  Synthetic oligonucleotide
gatgaagacataaggaagggaacat

SEQ ID NO: 65909 - DNA, 30 bp, Artificial Sequence
  Synthetic oligonucleotide
cgagaccatgtcagacttagtctctaacat

SEQ ID NO: 65910 - DNA, 30 bp, Artificial Sequence
  Synthetic oligonucleotide
gtaagggaaaacaaacgaggagctgcacat

SEQ ID NO: 65911 - DNA, 30 bp, Artificial Sequence
  Synthetic oligonucleotide
ggccactcaggagggaagcctgtctcacat

SEQ ID NO: 65912 - DNA, 30 bp, Artificial Sequence
  Synthetic oligonucleotide
agccaggatggtgagcgatgaaagtcacat

SEQ ID NO: 65913 - DNA, 30 bp, Artificial Sequence
  Synthetic oligonucleotide
atctaggtccaaattaagtgagcgagacat

SEQ ID NO: 65914 - DNA, 30 bp, Artificial Sequence
  Synthetic oligonucleotide
gaccactggatggctaaatacgatagacat

SEQ ID NO: 65915 - DNA, 30 bp, Artificial Sequence
  Synthetic oligonucleotide
gagacactgtaagaaaaacggcaccgacat

SEQ ID NO: 65916 - DNA, 30 bp, Artificial Sequence
  Synthetic oligonucleotide
tcgaggcgcgatacttggatgttcggacat

SEQ ID NO: 65917 - DNA, 30 bp, Artificial Sequence
  Synthetic oligonucleotide
gcgaaggctccgacataccctatgggacat

SEQ ID NO: 65918 - DNA, 30 bp, Artificial Sequence
  Synthetic oligonucleotide
gggcaaatgacatttgtaagtattggacat

SEQ ID NO: 65919 - DNA, 30 bp, Artificial Sequence
  Synthetic oligonucleotide
atgggtcaacggaccagtgcccactgacat

SEQ ID NO: 65920 - DNA, 30 bp, Artificial Sequence
  Synthetic oligonucleotide
gctaccacgccggtcggcgctacgtgacat

SEQ ID NO: 65921 - DNA, 30 bp, Artificial Sequence
  Synthetic oligonucleotide
acagaccaaaattaaggcgacaacaaccat

SEQ ID NO: 65922 - DNA, 30 bp, Artificial Sequence
  Synthetic oligonucleotide
tctggctcatgcaagaaggagtaccaccat

SEQ ID NO: 65923 - DNA, 30 bp, Artificial Sequence
  Synthetic oligonucleotide
ttaagcgtgtcgaaacgtaacccagaccat

SEQ ID NO: 65924 - DNA, 31 bp, Artificial Sequence
  Synthetic oligonucleotide
tgggtgtgcatagtatccagagtccgaccat

SEQ ID NO: 65925 - DNA, 30 bp, Artificial Sequence
  Synthetic oligonucleotide
agttgtacagtcaaatctcaagcctaccat

SEQ ID NO: 65926 - DNA, 30 bp, Artificial Sequence
  Synthetic oligonucleotide
agactactggtaagaatcgggtgaacccat

SEQ ID NO: 65927 - DNA, 30 bp, Artificial Sequence
  Synthetic oligonucleotide
atagggagcacaactgtcaagggaccccat

SEQ ID NO: 65928 - DNA, 30 bp, Artificial Sequence
  Synthetic oligonucleotide
cgaggcgttctgtctcgctttatatgccat

SEQ ID NO: 65929 - DNA, 30 bp, Artificial Sequence
  Synthetic oligonucleotide
cgtcccgacccaaaagcgttattaatccat

SEQ ID NO: 65930 - DNA, 30 bp, Artificial Sequence
  Synthetic oligonucleotide
gtcgtcatcggcgggtccatatacatccat

SEQ ID NO: 65931 - DNA, 30 bp, Artificial Sequence
  Synthetic oligonucleotide
aggaacgacgattgatatgagaggctccat

SEQ ID NO: 65932 - DNA, 30 bp, Artificial Sequence
  Synthetic oligonucleotide
cattgcggcgaatctccgaccgttttccat

SEQ ID NO: 65933 - DNA, 30 bp, Artificial Sequence
  Synthetic oligonucleotide
gcgataacatacagttaccgattaaagcat

SEQ ID NO: 65934 - DNA, 30 bp, Artificial Sequence
  Synthetic oligonucleotide
cacaagggaacagagttgttcgtgaagcat

SEQ ID NO: 65935 - DNA, 30 bp, Artificial Sequence
  Synthetic oligonucleotide
gagatcataaacaaggaagcatataagcat

SEQ ID NO: 65936 - DNA, 30 bp, Artificial Sequence
  Synthetic oligonucleotide
gggagttaggtaccaggataacgtcagcat

SEQ ID NO: 65937 - DNA, 30 bp, Artificial Sequence
  Synthetic oligonucleotide
ctgagctacacggtaacttgaccagagcat

SEQ ID NO: 65938 - DNA, 30 bp, Artificial Sequence
  Synthetic oligonucleotide
ggaggagactgtaattgtagtgcctagcat

SEQ ID NO: 65939 - DNA, 30 bp, Artificial Sequence
  Synthetic oligonucleotide
ttcacgcacaacccggtgtgccgaacgcat

SEQ ID NO: 65940 - DNA, 30 bp, Artificial Sequence
  Synthetic oligonucleotide
tgggaatgtaatatgcggatcctgccgcat

SEQ ID NO: 65941 - DNA, 30 bp, Artificial Sequence
  Synthetic oligonucleotide
ccggagtggtcagggcgtcaatatcggcat

SEQ ID NO: 65942 - DNA, 30 bp, Artificial Sequence
  Synthetic oligonucleotide
cgtaaatggaatgaggctcagatagggcat

SEQ ID NO: 65943 - DNA, 30 bp, Artificial Sequence
  Synthetic oligonucleotide
aaggagttcggtttgtagagtagggggcat

SEQ ID NO: 65944 - DNA, 30 bp, Artificial Sequence
  Synthetic oligonucleotide
tgtatgagtcacgatgtggagaaatggcat

SEQ ID NO: 65945 - DNA, 30 bp, Artificial Sequence
  Synthetic oligonucleotide
tgtcgaaatcggacggggtaaccactgcat

SEQ ID NO: 65946 - DNA, 30 bp, Artificial Sequence
  Synthetic oligonucleotide
aaacgaaaggggtacgaactggtactgcat

SEQ ID NO: 65947 - DNA, 30 bp, Artificial Sequence
  Synthetic oligonucleotide
cgatcgaatcttgacaaggtaaaggtgcat

SEQ ID NO: 65948 - DNA, 30 bp, Artificial Sequence
  Synthetic oligonucleotide
aataataaacgagcagtcacaaaaaatcat

SEQ ID NO: 65949 - DNA, 30 bp, Artificial Sequence
  Synthetic oligonucleotide
tgggcaaaacaaaggccatggccgcatcat

SEQ ID NO: 65950 - DNA, 30 bp, Artificial Sequence
  Synthetic oligonucleotide
taaagtagggtggtaatacgatctgatcat

SEQ ID NO: 65951 - DNA, 30 bp, Artificial Sequence
  Synthetic oligonucleotide
agatggcgtcgaggaaaggtagtaactcat

SEQ ID NO: 65952 - DNA, 30 bp, Artificial Sequence
  Synthetic oligonucleotide
gacgatctgaagattcggaataacactcat

SEQ ID NO: 65953 - DNA, 30 bp, Artificial Sequence
  Synthetic oligonucleotide
agagggattcagtttactgtgggcactcat

SEQ ID NO: 65954 - DNA, 30 bp, Artificial Sequence
  Synthetic oligonucleotide
cactagagggagtccatagtcaatactcat

SEQ ID NO: 65955 - DNA, 30 bp, Artificial Sequence
  Synthetic oligonucleotide
cccagaggaccacaactgacgtaacctcat

SEQ ID NO: 65956 - DNA, 30 bp, Artificial Sequence
  Synthetic oligonucleotide
gcgtaacgcaactctgtcagaacacctcat

SEQ ID NO: 65957 - DNA, 30 bp, Artificial Sequence
  Synthetic oligonucleotide
cgattgaatcccacaagaaaaaagcctcat

SEQ ID NO: 65958 - DNA, 30 bp, Artificial Sequence
  Synthetic oligonucleotide
taaattcgacatggagtggtccaagctcat

SEQ ID NO: 65959 - DNA, 30 bp, Artificial Sequence
  Synthetic oligonucleotide
agtcgcgaaagaacgtgcagccgaagtcat

SEQ ID NO: 65960 - DNA, 30 bp, Artificial Sequence
  Synthetic oligonucleotide
cgggcccagggtgatggttgcataagtcat

SEQ ID NO: 65961 - DNA, 30 bp, Artificial Sequence
  Synthetic oligonucleotide
gtgccgaaacggttaatcgatccgagtcat

SEQ ID NO: 65962 - DNA, 30 bp, Artificial Sequence
  Synthetic oligonucleotide
aggttcgaagacgaggtgaccgacattcat

SEQ ID NO: 65963 - DNA, 30 bp, Artificial Sequence
  Synthetic oligonucleotide
cgggaattgagtcaaaaagcataggttcat

SEQ ID NO: 65964 - DNA, 30 bp, Artificial Sequence
  Synthetic oligonucleotide
cggtacatagttaaaataggctgtgttcat

SEQ ID NO: 65965 - DNA, 30 bp, Artificial Sequence
  Synthetic oligonucleotide
cagggctcgatctcgttatggacatttcat

SEQ ID NO: 65966 - DNA, 30 bp, Artificial Sequence
  Synthetic oligonucleotide
tgcaaagggaagttgagttagtcatttcat

SEQ ID NO: 65967 - DNA, 30 bp, Artificial Sequence
  Synthetic oligonucleotide
gctagctgttacaaggacctgttcaaagat

SEQ ID NO: 65968 - DNA, 30 bp, Artificial Sequence
  Synthetic oligonucleotide
cggaaacataaggtttacgctgaccaagat

SEQ ID NO: 65969 - DNA, 30 bp, Artificial Sequence
  Synthetic oligonucleotide
ctcggattgcaaataacactcccccaagat

SEQ ID NO: 65970 - DNA, 30 bp, Artificial Sequence
  Synthetic oligonucleotide
aaacacacgggatggctcaattggcaagat

SEQ ID NO: 65971 - DNA, 30 bp, Artificial Sequence
  Synthetic oligonucleotide
ttaagggcacgggatccaatgatcgaagat

SEQ ID NO: 65972 - DNA, 30 bp, Artificial Sequence
  Synthetic oligonucleotide
ccacgctggaaagacacttgtcaggaagat

SEQ ID NO: 65973 - DNA, 31 bp, Artificial Sequence
  Synthetic oligonucleotide
agccagtgcaggacgtgggaatgggtaagat

SEQ ID NO: 65974 - DNA, 30 bp, Artificial Sequence
  Synthetic oligonucleotide
caagagaggaggcctgggttggaaacagat

SEQ ID NO: 65975 - DNA, 30 bp, Artificial Sequence
  Synthetic oligonucleotide
aaagtataaccagttaatagaggaacagat

SEQ ID NO: 65976 - DNA, 30 bp, Artificial Sequence
  Synthetic oligonucleotide
gtagcgtagagcgatacgaggactacagat

SEQ ID NO: 65977 - DNA, 30 bp, Artificial Sequence
  Synthetic oligonucleotide
gatacacgcgcacgaattctacaaccagat

SEQ ID NO: 65978 - DNA, 30 bp, Artificial Sequence
  Synthetic oligonucleotide
tgtgctccggagcgaagacaagtgccagat

SEQ ID NO: 65979 - DNA, 30 bp, Artificial Sequence
  Synthetic oligonucleotide
aggaggcgttaaggacggtgggtgtcagat

SEQ ID NO: 65980 - DNA, 30 bp, Artificial Sequence
  Synthetic oligonucleotide
ttcgcacccacaataggctaagtaagagat

SEQ ID NO: 65981 - DNA, 30 bp, Artificial Sequence
  Synthetic oligonucleotide
tcgaacgcgcgcgacgcgtacgggagagat

SEQ ID NO: 65982 - DNA, 30 bp, Artificial Sequence
  Synthetic oligonucleotide
cagacgaccatacattaataaactagagat

SEQ ID NO: 65983 - DNA, 30 bp, Artificial Sequence
  Synthetic oligonucleotide
ctgcgacgtcggacacaccttggtagagat

SEQ ID NO: 65984 - DNA, 30 bp, Artificial Sequence
  Synthetic oligonucleotide
aacggcgttacaggatccggtgaaggagat

SEQ ID NO: 65985 - DNA, 30 bp, Artificial Sequence
  Synthetic oligonucleotide
cggtacagacgagaccttccgcgcggagat

SEQ ID NO: 65986 - DNA, 30 bp, Artificial Sequence
  Synthetic oligonucleotide
acagggtggcaactggattacatcggagat

SEQ ID NO: 65987 - DNA, 30 bp, Artificial Sequence
  Synthetic oligonucleotide
ccgaggtctgatccctgccttaagggagat

SEQ ID NO: 65988 - DNA, 30 bp, Artificial Sequence
  Synthetic oligonucleotide
ctcgaattgaatccactagagatgggagat

SEQ ID NO: 65989 - DNA, 30 bp, Artificial Sequence
  Synthetic oligonucleotide
ggatacaaaacagtgtgggcgacatgagat

SEQ ID NO: 65990 - DNA, 30 bp, Artificial Sequence
  Synthetic oligonucleotide
ttagctggggtccagggcgtctgctgagat

SEQ ID NO: 65991 - DNA, 30 bp, Artificial Sequence
  Synthetic oligonucleotide
acattgaattacggttgatctacttgagat

SEQ ID NO: 65992 - DNA, 30 bp, Artificial Sequence
  Synthetic oligonucleotide
ggcgacgggagcaatggaatacaagtagat

SEQ ID NO: 65993 - DNA, 30 bp, Artificial Sequence
  Synthetic oligonucleotide
aggtagcgtaaacacactaggagaaacgat

SEQ ID NO: 65994 - DNA, 30 bp, Artificial Sequence
  Synthetic oligonucleotide
tacgtgaggtggcgggaggttttaaacgat

SEQ ID NO: 65995 - DNA, 30 bp, Artificial Sequence
  Synthetic oligonucleotide
cgcggtggagttcttctaagacagcacgat

SEQ ID NO: 65996 - DNA, 30 bp, Artificial Sequence
  Synthetic oligonucleotide
tcgaacaggtatcacgtctgaggatacgat

SEQ ID NO: 65997 - DNA, 31 bp, Artificial Sequence
  Synthetic oligonucleotide
gtggtcaacaaatgatcatggaggcaccgat

SEQ ID NO: 65998 - DNA, 30 bp, Artificial Sequence
  Synthetic oligonucleotide
cggctgataacaggacgtcaacaaagcgat

SEQ ID NO: 65999 - DNA, 30 bp, Artificial Sequence
  Synthetic oligonucleotide
atctattaaagtaatgtccggaaacgcgat

SEQ ID NO: 66000 - DNA, 30 bp, Artificial Sequence
  Synthetic oligonucleotide
acaggcatatcgggtttcgggctccgcgat

SEQ ID NO: 66001 - DNA, 30 bp, Artificial Sequence
  Synthetic oligonucleotide
tctaagcggggacatgttggaagaggcgat

SEQ ID NO: 66002 - DNA, 30 bp, Artificial Sequence
  Synthetic oligonucleotide
caaggacccaatcagtcattcaccggcgat

SEQ ID NO: 66003 - DNA, 30 bp, Artificial Sequence
  Synthetic oligonucleotide
gggcgaatgaagcgtagggttaacatcgat

SEQ ID NO: 66004 - DNA, 30 bp, Artificial Sequence
  Synthetic oligonucleotide
accccagggaaaagggaccaggggatcgat

SEQ ID NO: 66005 - DNA, 30 bp, Artificial Sequence
  Synthetic oligonucleotide
acagcatgctgaaggcacgcgacactcgat

SEQ ID NO: 66006 - DNA, 30 bp, Artificial Sequence
  Synthetic oligonucleotide
cgggagatggtcatcttctcgctactcgat

SEQ ID NO: 66007 - DNA, 30 bp, Artificial Sequence
  Synthetic oligonucleotide
aggatcgatcacagtgtgctgactttcgat

SEQ ID NO: 66008 - DNA, 30 bp, Artificial Sequence
  Synthetic oligonucleotide
cgccaagcgtgcgcatgcgggacaaaggat

SEQ ID NO: 66009 - DNA, 30 bp, Artificial Sequence
  Synthetic oligonucleotide
cggacggacttaggatgtgtaaggaaggat

SEQ ID NO: 66010 - DNA, 30 bp, Artificial Sequence
  Synthetic oligonucleotide
agacgtcacttgaacaagaaatcacaggat

SEQ ID NO: 66011 - DNA, 30 bp, Artificial Sequence
  Synthetic oligonucleotide
agaactaaagggttggatgaaatgccggat

SEQ ID NO: 66012 - DNA, 30 bp, Artificial Sequence
  Synthetic oligonucleotide
ctaagaggagagtaagccactctagcggat

SEQ ID NO: 66013 - DNA, 30 bp, Artificial Sequence
  Synthetic oligonucleotide
gataggacggcttgcttaccaacggcggat

SEQ ID NO: 66014 - DNA, 30 bp, Artificial Sequence
  Synthetic oligonucleotide
agctgaagagtctatgtcagaaagtcggat

SEQ ID NO: 66015 - DNA, 30 bp, Artificial Sequence
  Synthetic oligonucleotide
tctgccaacttagggccagctgtcagggat

SEQ ID NO: 66016 - DNA, 30 bp, Artificial Sequence
  Synthetic oligonucleotide
cgactcttaggcaatgtcagggtttgggat

SEQ ID NO: 66017 - DNA, 30 bp, Artificial Sequence
  Synthetic oligonucleotide
acggacatcccgatcgaaagataaatggat

SEQ ID NO: 66018 - DNA, 30 bp, Artificial Sequence
  Synthetic oligonucleotide
acgaaatctgtagagagcaatctaatggat

SEQ ID NO: 66019 - DNA, 30 bp, Artificial Sequence
  Synthetic oligonucleotide
ttcgggatagcgaacatcatcagtatggat

SEQ ID NO: 66020 - DNA, 30 bp, Artificial Sequence
  Synthetic oligonucleotide
acaacgccggttagggggctcagtatggat

SEQ ID NO: 66021 - DNA, 30 bp, Artificial Sequence
  Synthetic oligonucleotide
gtccggggggagagagcatcgatcctggat

SEQ ID NO: 66022 - DNA, 30 bp, Artificial Sequence
  Synthetic oligonucleotide
ggcacaaatattcggggggaacaagtggat

SEQ ID NO: 66023 - DNA, 30 bp, Artificial Sequence
  Synthetic oligonucleotide
atcattggaatgaaggctaacagcttggat

SEQ ID NO: 66024 - DNA, 30 bp, Artificial Sequence
  Synthetic oligonucleotide
tttggaacgaggatgaaactagagttggat

SEQ ID NO: 66025 - DNA, 30 bp, Artificial Sequence
  Synthetic oligonucleotide
ctacgcacaacggagaaaggtgagaatgat

SEQ ID NO: 66026 - DNA, 30 bp, Artificial Sequence
  Synthetic oligonucleotide
acatcagaggagtagaagtggcacgatgat

SEQ ID NO: 66027 - DNA, 30 bp, Artificial Sequence
  Synthetic oligonucleotide
cggaaaagtcatccggcgccggattatgat

SEQ ID NO: 66028 - DNA, 30 bp, Artificial Sequence
  Synthetic oligonucleotide
caatataggaggaggggaatcggtcctgat

SEQ ID NO: 66029 - DNA, 30 bp, Artificial Sequence
  Synthetic oligonucleotide
gcacctgcattcgaagtgacacaagctgat

SEQ ID NO: 66030 - DNA, 30 bp, Artificial Sequence
  Synthetic oligonucleotide
agtcaaattggctacgactagcaggctgat

SEQ ID NO: 66031 - DNA, 30 bp, Artificial Sequence
  Synthetic oligonucleotide
gggagagcaccgtaccattaacaaagtgat

SEQ ID NO: 66032 - DNA, 30 bp, Artificial Sequence
  Synthetic oligonucleotide
aagaaaaatctcaatcatgggctcagtgat

SEQ ID NO: 66033 - DNA, 30 bp, Artificial Sequence
  Synthetic oligonucleotide
ctccaaaactctatgaaaaaggagcgtgat

SEQ ID NO: 66034 - DNA, 30 bp, Artificial Sequence
  Synthetic oligonucleotide
acgatatgatcatcacggaaactgattgat

SEQ ID NO: 66035 - DNA, 30 bp, Artificial Sequence
  Synthetic oligonucleotide
ccgcgtaacgcgaaacctctcagccaatat

SEQ ID NO: 66036 - DNA, 30 bp, Artificial Sequence
  Synthetic oligonucleotide
gcgtttgaacaaggatagaatgctcaatat

SEQ ID NO: 66037 - DNA, 30 bp, Artificial Sequence
  Synthetic oligonucleotide
cgtcccgcacgatttgcaacgaggacatat

SEQ ID NO: 66038 - DNA, 30 bp, Artificial Sequence
  Synthetic oligonucleotide
atattgagggtgagactagcatggacatat

SEQ ID NO: 66039 - DNA, 30 bp, Artificial Sequence
  Synthetic oligonucleotide
gacgtgtctagcacgctgtatgttacatat

SEQ ID NO: 66040 - DNA, 30 bp, Artificial Sequence
  Synthetic oligonucleotide
agacgcctgaggttagcaggatcagcatat

SEQ ID NO: 66041 - DNA, 30 bp, Artificial Sequence
  Synthetic oligonucleotide
agtcacgggggactcaccatgagagcatat

SEQ ID NO: 66042 - DNA, 30 bp, Artificial Sequence
  Synthetic oligonucleotide
agggagaccatcatgctcgtcttaagatat

SEQ ID NO: 66043 - DNA, 30 bp, Artificial Sequence
  Synthetic oligonucleotide
gggtcgaatcagattgagtctggcagatat

SEQ ID NO: 66044 - DNA, 30 bp, Artificial Sequence
  Synthetic oligonucleotide
caaccgtggcactaccaatcgagtcgatat

SEQ ID NO: 66045 - DNA, 30 bp, Artificial Sequence
  Synthetic oligonucleotide
ggcaataagacaaatttagagttctgatat

SEQ ID NO: 66046 - DNA, 30 bp, Artificial Sequence
  Synthetic oligonucleotide
cgggagggtttacaataaagggtgtgatat

SEQ ID NO: 66047 - DNA, 30 bp, Artificial Sequence
  Synthetic oligonucleotide
agcgtgggggactggtgtcgacagatatat

SEQ ID NO: 66048 - DNA, 30 bp, Artificial Sequence
  Synthetic oligonucleotide
ccattgggattatataaaaacgagatatat

SEQ ID NO: 66049 - DNA, 30 bp, Artificial Sequence
  Synthetic oligonucleotide
aacgtgacggaagactggtaggtactatat

SEQ ID NO: 66050 - DNA, 30 bp, Artificial Sequence
  Synthetic oligonucleotide
gcgtggtcaaagcatgagatcgatctatat

SEQ ID NO: 66051 - DNA, 30 bp, Artificial Sequence
  Synthetic oligonucleotide
cattgaatagtggccagagcatgtgtatat

SEQ ID NO: 66052 - DNA, 30 bp, Artificial Sequence
  Synthetic oligonucleotide
tcgacacaagtttacatacgagttgtatat

SEQ ID NO: 66053 - DNA, 30 bp, Artificial Sequence
  Synthetic oligonucleotide
aaggatgcgaaatcgatagcgacgttatat

SEQ ID NO: 66054 - DNA, 30 bp, Artificial Sequence
  Synthetic oligonucleotide
tggcgaccagagcactgataagaaaactat

SEQ ID NO: 66055 - DNA, 30 bp, Artificial Sequence
  Synthetic oligonucleotide
gtcgtaggaggtaaactgactggaaactat

SEQ ID NO: 66056 - DNA, 30 bp, Artificial Sequence
  Synthetic oligonucleotide
tacgagcaaccggccgaccatttaaactat

SEQ ID NO: 66057 - DNA, 30 bp, Artificial Sequence
  Synthetic oligonucleotide
cgattcagagatctaactttgctcgactat

SEQ ID NO: 66058 - DNA, 30 bp, Artificial Sequence
  Synthetic oligonucleotide
taagagcatggacctgttaatttagcctat

SEQ ID NO: 66059 - DNA, 30 bp, Artificial Sequence
  Synthetic oligonucleotide
cggtctgggtcagtggcacatcgttgctat

SEQ ID NO: 66060 - DNA, 30 bp, Artificial Sequence
  Synthetic oligonucleotide
ggatacggtctgtgttgagcaaaagtctat

SEQ ID NO: 66061 - DNA, 30 bp, Artificial Sequence
  Synthetic oligonucleotide
gagcgaagaacacgatagagtcaggtctat

SEQ ID NO: 66062 - DNA, 30 bp, Artificial Sequence
  Synthetic oligonucleotide
cgactacctgggtatatctgcgacaagtat

SEQ ID NO: 66063 - DNA, 30 bp, Artificial Sequence
  Synthetic oligonucleotide
acaagcacaaacctgcactacgtcaagtat

SEQ ID NO: 66064 - DNA, 30 bp, Artificial Sequence
  Synthetic oligonucleotide
gtgtactagcaggatttgtaggagaagtat

SEQ ID NO: 66065 - DNA, 30 bp, Artificial Sequence
  Synthetic oligonucleotide
gcggtctagctggtcgacgccaaagagtat

SEQ ID NO: 66066 - DNA, 30 bp, Artificial Sequence
  Synthetic oligonucleotide
tgcagttcatgcgcgggagggagagagtat

SEQ ID NO: 66067 - DNA, 30 bp, Artificial Sequence
  Synthetic oligonucleotide
aagagaaactagacctgataaatatagtat

SEQ ID NO: 66068 - DNA, 30 bp, Artificial Sequence
  Synthetic oligonucleotide
acctccaaggctagtggtcagaggtagtat

SEQ ID NO: 66069 - DNA, 30 bp, Artificial Sequence
  Synthetic oligonucleotide
tccattgtagaagattgtaaaataacgtat

SEQ ID NO: 66070 - DNA, 30 bp, Artificial Sequence
  Synthetic oligonucleotide
ggtatataagttaagaaagtagcggcgtat

SEQ ID NO: 66071 - DNA, 30 bp, Artificial Sequence
  Synthetic oligonucleotide
acagaagtagaacgtaatgctttaaggtat

SEQ ID NO: 66072 - DNA, 30 bp, Artificial Sequence
  Synthetic oligonucleotide
acgaggtcgcaaggccctttcatatggtat

SEQ ID NO: 66073 - DNA, 30 bp, Artificial Sequence
  Synthetic oligonucleotide
gcgtgacaagttcaccgagaagtttggtat

SEQ ID NO: 66074 - DNA, 30 bp, Artificial Sequence
  Synthetic oligonucleotide
cgactaaatgaaagccttggaaacctgtat

SEQ ID NO: 66075 - DNA, 30 bp, Artificial Sequence
  Synthetic oligonucleotide
acatagcgaaaaatccgacatcgcctgtat

SEQ ID NO: 66076 - DNA, 30 bp, Artificial Sequence
  Synthetic oligonucleotide
gggctgcacagggtttcaggtgcgctgtat

SEQ ID NO: 66077 - DNA, 30 bp, Artificial Sequence
  Synthetic oligonucleotide
ctcactaagtggatcatgtaaacaaattat

SEQ ID NO: 66078 - DNA, 30 bp, Artificial Sequence
  Synthetic oligonucleotide
cgaggtcttaggctgaggtatggtcattat

SEQ ID NO: 66079 - DNA, 30 bp, Artificial Sequence
  Synthetic oligonucleotide
cacagtcaagtgtacgttagccgagattat

SEQ ID NO: 66080 - DNA, 30 bp, Artificial Sequence
  Synthetic oligonucleotide
agatactcgggtagaaggacagggtcttat

SEQ ID NO: 66081 - DNA, 30 bp, Artificial Sequence
  Synthetic oligonucleotide
cctgaatagaaaatatctataagccgttat

SEQ ID NO: 66082 - DNA, 30 bp, Artificial Sequence
  Synthetic oligonucleotide
ggtcggcgaacggcatctagtaagggttat

SEQ ID NO: 66083 - DNA, 30 bp, Artificial Sequence
  Synthetic oligonucleotide
tcctaagcttacgaacactacatatgttat

SEQ ID NO: 66084 - DNA, 30 bp, Artificial Sequence
  Synthetic oligonucleotide
acaggctcgacgtataaacaagggtgttat

SEQ ID NO: 66085 - DNA, 30 bp, Artificial Sequence
  Synthetic oligonucleotide
tacgacgtaggagtgcttaatgggatttat

SEQ ID NO: 66086 - DNA, 30 bp, Artificial Sequence
  Synthetic oligonucleotide
tgcgtgaacagggtccatcagtgaaaaact

SEQ ID NO: 66087 - DNA, 30 bp, Artificial Sequence
  Synthetic oligonucleotide
caaatcagggagcaggggcaaagcaaaact

SEQ ID NO: 66088 - DNA, 30 bp, Artificial Sequence
  Synthetic oligonucleotide
tattggtcaacgggtaagcaggcgaaaact

SEQ ID NO: 66089 - DNA, 30 bp, Artificial Sequence
  Synthetic oligonucleotide
tgtacgggaaggctgccggcgaagcaaact

SEQ ID NO: 66090 - DNA, 30 bp, Artificial Sequence
  Synthetic oligonucleotide
tgggattggaagagttagcggtcataaact

SEQ ID NO: 66091 - DNA, 30 bp, Artificial Sequence
  Synthetic oligonucleotide
aagggcggcgtatgaataatgcgataaact

SEQ ID NO: 66092 - DNA, 30 bp, Artificial Sequence
  Synthetic oligonucleotide
cgagctccggggaatgggaggcgttaaact

SEQ ID NO: 66093 - DNA, 30 bp, Artificial Sequence
  Synthetic oligonucleotide
tgccgttttgtgtgagcggtacaaccaact

SEQ ID NO: 66094 - DNA, 30 bp, Artificial Sequence
  Synthetic oligonucleotide
gtgacatgctgacatattaagtaagcaact

SEQ ID NO: 66095 - DNA, 30 bp, Artificial Sequence
  Synthetic oligonucleotide
agacgggtacggaagcgagccatcgcaact

SEQ ID NO: 66096 - DNA, 30 bp, Artificial Sequence
  Synthetic oligonucleotide
tgcacggggaggctatcgatctttagaact

SEQ ID NO: 66097 - DNA, 30 bp, Artificial Sequence
  Synthetic oligonucleotide
ccgagaacattaaagaagtccaacggaact

SEQ ID NO: 66098 - DNA, 30 bp, Artificial Sequence
  Synthetic oligonucleotide
aacactagctggtgacataggccgtgaact

SEQ ID NO: 66099 - DNA, 30 bp, Artificial Sequence
  Synthetic oligonucleotide
tgagtcggaggaaatctcgagcagctaact

SEQ ID NO: 66100 - DNA, 30 bp, Artificial Sequence
  Synthetic oligonucleotide
aggaaatacggagttacaaagaaagtaact

SEQ ID NO: 66101 - DNA, 30 bp, Artificial Sequence
  Synthetic oligonucleotide
cgatacgagtcgtacacggaagaagtaact

SEQ ID NO: 66102 - DNA, 30 bp, Artificial Sequence
  Synthetic oligonucleotide
acgagggtagcctctgacatagacgtaact

SEQ ID NO: 66103 - DNA, 30 bp, Artificial Sequence
  Synthetic oligonucleotide
ggctaaacggttcaaaagacgcgattaact

SEQ ID NO: 66104 - DNA, 30 bp, Artificial Sequence
  Synthetic oligonucleotide
ggtatcagaactgatacggctccccacact

SEQ ID NO: 66105 - DNA, 30 bp, Artificial Sequence
  Synthetic oligonucleotide
agagcagaaatcgcctctttgcaagacact

SEQ ID NO: 66106 - DNA, 30 bp, Artificial Sequence
  Synthetic oligonucleotide
gcatatggaagcgccttacacggtgacact

SEQ ID NO: 66107 - DNA, 30 bp, Artificial Sequence
  Synthetic oligonucleotide
tgacaggacagccatattccgatctacact

SEQ ID NO: 66108 - DNA, 30 bp, Artificial Sequence
  Synthetic oligonucleotide
tgatgtaagaacgctcattccgaccccact

SEQ ID NO: 66109 - DNA, 30 bp, Artificial Sequence
  Synthetic oligonucleotide
cattaaggagatacgccaccgcctagcact

SEQ ID NO: 66110 - DNA, 30 bp, Artificial Sequence
  Synthetic oligonucleotide
gacgactatagggagccatctactcgcact

SEQ ID NO: 66111 - DNA, 30 bp, Artificial Sequence
  Synthetic oligonucleotide
gcgacaagtacgcggtaaaaacgaatcact

SEQ ID NO: 66112 - DNA, 30 bp, Artificial Sequence
  Synthetic oligonucleotide
cgatccaggtgccggtggccaacactcact

SEQ ID NO: 66113 - DNA, 30 bp, Artificial Sequence
  Synthetic oligonucleotide
tgggcattgtgaaaagggtggaatctcact

SEQ ID NO: 66114 - DNA, 37 bp, Artificial Sequence
  Synthetic oligonucleotide
ttgttcaatatgtttagaatgattaactagcaagact

SEQ ID NO: 66115 - DNA, 30 bp, Artificial Sequence
  Synthetic oligonucleotide
cacatatatgggacaagacataatcagact

SEQ ID NO: 66116 - DNA, 30 bp, Artificial Sequence
  Synthetic oligonucleotide
cgggtacagtgaagtagggtaaatgagact

SEQ ID NO: 66117 - DNA, 30 bp, Artificial Sequence
  Synthetic oligonucleotide
cgcgtgtctgcgcatgcaaccaatgagact

SEQ ID NO: 66118 - DNA, 30 bp, Artificial Sequence
  Synthetic oligonucleotide
gacgctaaacctaaataggcaaaatagact

SEQ ID NO: 66119 - DNA, 30 bp, Artificial Sequence
  Synthetic oligonucleotide
agggtgcattgtgtcggtaaagtttagact

SEQ ID NO: 66120 - DNA, 30 bp, Artificial Sequence
  Synthetic oligonucleotide
tctaaaccataaggatttgtgtgcacgact

SEQ ID NO: 66121 - DNA, 30 bp, Artificial Sequence
  Synthetic oligonucleotide
atgtgaagagtctgcaatctcgtgacgact

SEQ ID NO: 66122 - DNA, 30 bp, Artificial Sequence
  Synthetic oligonucleotide
accgcggacttaaaggtcaattgcccgact

SEQ ID NO: 66123 - DNA, 30 bp, Artificial Sequence
  Synthetic oligonucleotide
aggacttccaacagtggatagtgtgggact

SEQ ID NO: 66124 - DNA, 30 bp, Artificial Sequence
  Synthetic oligonucleotide
cacttaatccctatcggaaacaccatgact

SEQ ID NO: 66125 - DNA, 30 bp, Artificial Sequence
  Synthetic oligonucleotide
tacgcaacgggcaggtgggaatccatgact

SEQ ID NO: 66126 - DNA, 30 bp, Artificial Sequence
  Synthetic oligonucleotide
gccgcatagggtgataggtaatccgtgact

SEQ ID NO: 66127 - DNA, 30 bp, Artificial Sequence
  Synthetic oligonucleotide
agcacgacgccctcgaacgacataactact

SEQ ID NO: 66128 - DNA, 30 bp, Artificial Sequence
  Synthetic oligonucleotide
acaacaaggagggaccccacgcgagctact

SEQ ID NO: 66129 - DNA, 30 bp, Artificial Sequence
  Synthetic oligonucleotide
cgcaactgtgactaaaaatgggcgcgtact

SEQ ID NO: 66130 - DNA, 31 bp, Artificial Sequence
  Synthetic oligonucleotide
agaccggtaaaccggagtgactcagtgtact

SEQ ID NO: 66131 - DNA, 30 bp, Artificial Sequence
  Synthetic oligonucleotide
cctagtcggaggataaaccgcgtaattact

SEQ ID NO: 66132 - DNA, 30 bp, Artificial Sequence
  Synthetic oligonucleotide
cgttacaactgaatccaacccttaattact

SEQ ID NO: 66133 - DNA, 30 bp, Artificial Sequence
  Synthetic oligonucleotide
gtgaggggagcgacatcgtaaaaggttact

SEQ ID NO: 66134 - DNA, 30 bp, Artificial Sequence
  Synthetic oligonucleotide
gaaggctggctattgcattcgaattaacct

SEQ ID NO: 66135 - DNA, 30 bp, Artificial Sequence
  Synthetic oligonucleotide
ggatcaggagatggtaatgtggtagcacct

SEQ ID NO: 66136 - DNA, 30 bp, Artificial Sequence
  Synthetic oligonucleotide
tagcgacattattagacgagtcgcgcacct

SEQ ID NO: 66137 - DNA, 30 bp, Artificial Sequence
  Synthetic oligonucleotide
tggttggaatagtaagtgcaagcgagacct

SEQ ID NO: 66138 - DNA, 30 bp, Artificial Sequence
  Synthetic oligonucleotide
ttgcgacagctcaactctcagggaggacct

SEQ ID NO: 66139 - DNA, 30 bp, Artificial Sequence
  Synthetic oligonucleotide
ctcagtgtcaaaccacggagaataggacct

SEQ ID NO: 66140 - DNA, 30 bp, Artificial Sequence
  Synthetic oligonucleotide
tgtgcgaagaacccgcgatctataggacct

SEQ ID NO: 66141 - DNA, 30 bp, Artificial Sequence
  Synthetic oligonucleotide
cactcattgtgagccaaaacccgtggacct

SEQ ID NO: 66142 - DNA, 30 bp, Artificial Sequence
  Synthetic oligonucleotide
aacagatacacgacgagtggaactttacct

SEQ ID NO: 66143 - DNA, 30 bp, Artificial Sequence
  Synthetic oligonucleotide
cacgagacgttttatggggcgccgaaccct

SEQ ID NO: 66144 - DNA, 30 bp, Artificial Sequence
  Synthetic oligonucleotide
ccgaaggaggccactagcctagctaaccct

SEQ ID NO: 66145 - DNA, 30 bp, Artificial Sequence
  Synthetic oligonucleotide
gcttagtctgctaaaaaaaatttacaccct

SEQ ID NO: 66146 - DNA, 30 bp, Artificial Sequence
  Synthetic oligonucleotide
acgtcgatatgcttcgtaaggctccaccct

SEQ ID NO: 66147 - DNA, 30 bp, Artificial Sequence
  Synthetic oligonucleotide
accggcagtatatggtagcagactgaccct

SEQ ID NO: 66148 - DNA, 29 bp, Artificial Sequence
  Synthetic oligonucleotide
tccatgcaactgcgctactacagtaccct

SEQ ID NO: 66149 - DNA, 30 bp, Artificial Sequence
  Synthetic oligonucleotide
caggtaaataatcgcataatggagagccct

SEQ ID NO: 66150 - DNA, 30 bp, Artificial Sequence
  Synthetic oligonucleotide
ccctcatagataacacgctcaaaccgccct

SEQ ID NO: 66151 - DNA, 30 bp, Artificial Sequence
  Synthetic oligonucleotide
acatacgggaaaaatccgtcaatgatccct

SEQ ID NO: 66152 - DNA, 30 bp, Artificial Sequence
  Synthetic oligonucleotide
ccttccaggaatacaatgcgggcaaagcct

SEQ ID NO: 66153 - DNA, 30 bp, Artificial Sequence
  Synthetic oligonucleotide
tgataaaaaccagaacatctcctcaagcct

SEQ ID NO: 66154 - DNA, 30 bp, Artificial Sequence
  Synthetic oligonucleotide
cgaccacatcagtcatcttcagttaagcct

SEQ ID NO: 66155 - DNA, 30 bp, Artificial Sequence
  Synthetic oligonucleotide
acatgcggcaacatacacacaagacagcct

SEQ ID NO: 66156 - DNA, 30 bp, Artificial Sequence
  Synthetic oligonucleotide
gtagcacagtgtaacaacgaagatcagcct

SEQ ID NO: 66157 - DNA, 30 bp, Artificial Sequence
  Synthetic oligonucleotide
aaaaagactcgtgaggtactcaaaacgcct

SEQ ID NO: 66158 - DNA, 30 bp, Artificial Sequence
  Synthetic oligonucleotide
agggagcgtgtatcgaaactcagtacgcct

SEQ ID NO: 66159 - DNA, 30 bp, Artificial Sequence
  Synthetic oligonucleotide
ggaatgagcctatagaaagcataaccgcct

SEQ ID NO: 66160 - DNA, 30 bp, Artificial Sequence
  Synthetic oligonucleotide
tcacacaaggaatcaaggaatccgaggcct

SEQ ID NO: 66161 - DNA, 30 bp, Artificial Sequence
  Synthetic oligonucleotide
tacgccggagacagaccagcacgttggcct

SEQ ID NO: 66162 - DNA, 30 bp, Artificial Sequence
  Synthetic oligonucleotide
ggtcagatttaatccgttagaacagtgcct

SEQ ID NO: 66163 - DNA, 29 bp, Artificial Sequence
  Synthetic oligonucleotide
aacgttgcctaacttcatgcggagtgcct

SEQ ID NO: 66164 - DNA, 30 bp, Artificial Sequence
  Synthetic oligonucleotide
atacaagcatcacatgatgaattagtgcct

SEQ ID NO: 66165 - DNA, 30 bp, Artificial Sequence
  Synthetic oligonucleotide
tgacaagcggaaagatcaagttgtgtgcct

SEQ ID NO: 66166 - DNA, 30 bp, Artificial Sequence
  Synthetic oligonucleotide
cctgcggcgaaatagagaggggatcatcct

SEQ ID NO: 66167 - DNA, 30 bp, Artificial Sequence
  Synthetic oligonucleotide
aggcttagcacgagagatatgttacctcct

SEQ ID NO: 66168 - DNA, 30 bp, Artificial Sequence
  Synthetic oligonucleotide
agatgtagtaatataagtcgtgtgcctcct

SEQ ID NO: 66169 - DNA, 30 bp, Artificial Sequence
  Synthetic oligonucleotide
gtggcattgacatggtggatacaggctcct

SEQ ID NO: 66170 - DNA, 30 bp, Artificial Sequence
  Synthetic oligonucleotide
gtgagaattcaggtaaaaatgcgtcgtcct

SEQ ID NO: 66171 - DNA, 30 bp, Artificial Sequence
  Synthetic oligonucleotide
cggcgtgagctgttgacttgatcatgtcct

SEQ ID NO: 66172 - DNA, 30 bp, Artificial Sequence
  Synthetic oligonucleotide
aggggaatcaaatggtcctcggactgtcct

SEQ ID NO: 66173 - DNA, 31 bp, Artificial Sequence
  Synthetic oligonucleotide
gggggcacagcgacattgattaaatattcct

SEQ ID NO: 66174 - DNA, 30 bp, Artificial Sequence
  Synthetic oligonucleotide
ggagcatgttcgatactcaacagctttcct

SEQ ID NO: 66175 - DNA, 30 bp, Artificial Sequence
  Synthetic oligonucleotide
aggacataatgcgcaacgcaactccaagct

SEQ ID NO: 66176 - DNA, 30 bp, Artificial Sequence
  Synthetic oligonucleotide
tgtcatcgggcatcgatagcaatgcaagct

SEQ ID NO: 66177 - DNA, 30 bp, Artificial Sequence
  Synthetic oligonucleotide
acacgatagacaagacccacgactcaagct

SEQ ID NO: 66178 - DNA, 30 bp, Artificial Sequence
  Synthetic oligonucleotide
agttgtataaggaaaacggggcgataagct

SEQ ID NO: 66179 - DNA, 30 bp, Artificial Sequence
  Synthetic oligonucleotide
cattgcggaagtgtacgcgaaggataagct

SEQ ID NO: 66180 - DNA, 30 bp, Artificial Sequence
  Synthetic oligonucleotide
gaagatcctacagtgaaaggtgtgtaagct

SEQ ID NO: 66181 - DNA, 30 bp, Artificial Sequence
  Synthetic oligonucleotide
tgcgacgtgagtttagcgttaacgccagct

SEQ ID NO: 66182 - DNA, 30 bp, Artificial Sequence
  Synthetic oligonucleotide
tctcacggggatattggatgacatccagct

SEQ ID NO: 66183 - DNA, 30 bp, Artificial Sequence
  Synthetic oligonucleotide
tgagcgcagggggagggtaaaagaagagct

SEQ ID NO: 66184 - DNA, 30 bp, Artificial Sequence
  Synthetic oligonucleotide
tacacggccatatggcagtagaacagagct

SEQ ID NO: 66185 - DNA, 30 bp, Artificial Sequence
  Synthetic oligonucleotide
tgacgtaaaaatgaacgattagagagagct

SEQ ID NO: 66186 - DNA, 30 bp, Artificial Sequence
  Synthetic oligonucleotide
gcatagatcaaacggatacgatcacgagct

SEQ ID NO: 66187 - DNA, 30 bp, Artificial Sequence
  Synthetic oligonucleotide
attcgtcaagtcggaggggaaatacgagct

SEQ ID NO: 66188 - DNA, 30 bp, Artificial Sequence
  Synthetic oligonucleotide
gctcgagggtgatatacgattagccgagct

SEQ ID NO: 66189 - DNA, 30 bp, Artificial Sequence
  Synthetic oligonucleotide
cacgtccatctggacatcgtcttcggagct

SEQ ID NO: 66190 - DNA, 30 bp, Artificial Sequence
  Synthetic oligonucleotide
ggcgccaatataaattattcccttggagct

SEQ ID NO: 66191 - DNA, 30 bp, Artificial Sequence
  Synthetic oligonucleotide
accaaagagttaatggagcatcaatgagct

SEQ ID NO: 66192 - DNA, 30 bp, Artificial Sequence
  Synthetic oligonucleotide
cgtggctgggcttcagtacagtaaatagct

SEQ ID NO: 66193 - DNA, 30 bp, Artificial Sequence
  Synthetic oligonucleotide
aacaagaaggatataggcctgtgtatagct

SEQ ID NO: 66194 - DNA, 30 bp, Artificial Sequence
  Synthetic oligonucleotide
cgtggctgcgatatagcccttcgtctagct

SEQ ID NO: 66195 - DNA, 30 bp, Artificial Sequence
  Synthetic oligonucleotide
taatgtcagcgaaggcagaccaacgtagct

SEQ ID NO: 66196 - DNA, 30 bp, Artificial Sequence
  Synthetic oligonucleotide
atgaggataactacgcacgattactacgct

SEQ ID NO: 66197 - DNA, 30 bp, Artificial Sequence
  Synthetic oligonucleotide
acgagaccccaaggggggaaaccctacgct

SEQ ID NO: 66198 - DNA, 30 bp, Artificial Sequence
  Synthetic oligonucleotide
ctgcttaaccggcgaaaggactacagcgct

SEQ ID NO: 66199 - DNA, 30 bp, Artificial Sequence
  Synthetic oligonucleotide
tcgggctttaccaaaagcacgaaccgcgct

SEQ ID NO: 66200 - DNA, 30 bp, Artificial Sequence
  Synthetic oligonucleotide
gtggtcgaaagacagcgaaactagcgcgct

SEQ ID NO: 66201 - DNA, 30 bp, Artificial Sequence
  Synthetic oligonucleotide
cggcagtcattaaggaaaaggtggatcgct

SEQ ID NO: 66202 - DNA, 30 bp, Artificial Sequence
  Synthetic oligonucleotide
gctaacgacgagcgacggcggaaactcgct

SEQ ID NO: 66203 - DNA, 30 bp, Artificial Sequence
  Synthetic oligonucleotide
gaacgggataaactaggaatgtgactcgct

SEQ ID NO: 66204 - DNA, 30 bp, Artificial Sequence
  Synthetic oligonucleotide
atcgtcgaatgttagtgtaaacccgtcgct

SEQ ID NO: 66205 - DNA, 30 bp, Artificial Sequence
  Synthetic oligonucleotide
cgaccctgacctcgtcggccgggattcgct

SEQ ID NO: 66206 - DNA, 30 bp, Artificial Sequence
  Synthetic oligonucleotide
tgtggcgctggggtcgattgcagaaaggct

SEQ ID NO: 66207 - DNA, 30 bp, Artificial Sequence
  Synthetic oligonucleotide
taggtcaccggattaacacgactgaaggct

SEQ ID NO: 66208 - DNA, 30 bp, Artificial Sequence
  Synthetic oligonucleotide
atcgtagagcggagtcaggcggtgaaggct

SEQ ID NO: 66209 - DNA, 30 bp, Artificial Sequence
  Synthetic oligonucleotide
gtgaatgctagaggacgtagatactaggct

SEQ ID NO: 66210 - DNA, 30 bp, Artificial Sequence
  Synthetic oligonucleotide
ccgatgtctcacatgacgaggtgaacggct

SEQ ID NO: 66211 - DNA, 30 bp, Artificial Sequence
  Synthetic oligonucleotide
cgaacacctccccacggcgtggtaacggct

SEQ ID NO: 66212 - DNA, 30 bp, Artificial Sequence
  Synthetic oligonucleotide
ggtagagtgccctctaaggaatccacggct

SEQ ID NO: 66213 - DNA, 30 bp, Artificial Sequence
  Synthetic oligonucleotide
tgggacatcagctacccaagacacccggct

SEQ ID NO: 66214 - DNA, 30 bp, Artificial Sequence
  Synthetic oligonucleotide
ttaagttcagtcagcaaacgggactcggct

SEQ ID NO: 66215 - DNA, 30 bp, Artificial Sequence
  Synthetic oligonucleotide
aggcctaaggatgcttaacttttgagggct

SEQ ID NO: 66216 - DNA, 30 bp, Artificial Sequence
  Synthetic oligonucleotide
tgagaaaggctgatggggtaaaggcgggct

SEQ ID NO: 66217 - DNA, 30 bp, Artificial Sequence
  Synthetic oligonucleotide
tgatctcgggctactgtgcatgatatggct

SEQ ID NO: 66218 - DNA, 30 bp, Artificial Sequence
  Synthetic oligonucleotide
cagcaacgcatgtaacggccttaagtggct

SEQ ID NO: 66219 - DNA, 30 bp, Artificial Sequence
  Synthetic oligonucleotide
ccgatgggtatatccaaagaaatagtggct

SEQ ID NO: 66220 - DNA, 30 bp, Artificial Sequence
  Synthetic oligonucleotide
gacacagtcgataccataagtgaattggct

SEQ ID NO: 66221 - DNA, 30 bp, Artificial Sequence
  Synthetic oligonucleotide
caatcagcggattgagcgcttctgttggct

SEQ ID NO: 66222 - DNA, 30 bp, Artificial Sequence
  Synthetic oligonucleotide
ggtaacacatcatcccccagagaccatgct

SEQ ID NO: 66223 - DNA, 30 bp, Artificial Sequence
  Synthetic oligonucleotide
acagcttgggaacgatcagcgaattatgct

SEQ ID NO: 66224 - DNA, 30 bp, Artificial Sequence
  Synthetic oligonucleotide
taaatcatccggctgagaactaattatgct

SEQ ID NO: 66225 - DNA, 30 bp, Artificial Sequence
  Synthetic oligonucleotide
acgtgtattctgatgtatctacagactgct

SEQ ID NO: 66226 - DNA, 30 bp, Artificial Sequence
  Synthetic oligonucleotide
cactccgagaggcgtacagataatagtgct

SEQ ID NO: 66227 - DNA, 30 bp, Artificial Sequence
  Synthetic oligonucleotide
gaacagactaacgggcatgaatatcgtgct

SEQ ID NO: 66228 - DNA, 30 bp, Artificial Sequence
  Synthetic oligonucleotide
ggtgtagaaaatgtattaacaggtcgtgct

SEQ ID NO: 66229 - DNA, 30 bp, Artificial Sequence
  Synthetic oligonucleotide
ccaaacaacattcgagagcgaacttgtgct

SEQ ID NO: 66230 - DNA, 30 bp, Artificial Sequence
  Synthetic oligonucleotide
aaggacatttccgctgattaacaacttgct

SEQ ID NO: 66231 - DNA, 30 bp, Artificial Sequence
  Synthetic oligonucleotide
agtgtagtccagtacaaccagggttttgct

SEQ ID NO: 66232 - DNA, 30 bp, Artificial Sequence
  Synthetic oligonucleotide
cgatgtgcgatttactttacgaacaaatct

SEQ ID NO: 66233 - DNA, 30 bp, Artificial Sequence
  Synthetic oligonucleotide
gagagcggggaatatgagcggaataaatct

SEQ ID NO: 66234 - DNA, 30 bp, Artificial Sequence
  Synthetic oligonucleotide
gacgttgcatcaaagggacgtcggcaatct

SEQ ID NO: 66235 - DNA, 30 bp, Artificial Sequence
  Synthetic oligonucleotide
tgcgcgcagacttgcggggggtggacatct

SEQ ID NO: 66236 - DNA, 30 bp, Artificial Sequence
  Synthetic oligonucleotide
cgtccgacaaaaaatacatatttggcatct

SEQ ID NO: 66237 - DNA, 30 bp, Artificial Sequence
  Synthetic oligonucleotide
catggggtactagccgaaacgcatgcatct

SEQ ID NO: 66238 - DNA, 30 bp, Artificial Sequence
  Synthetic oligonucleotide
gggttcggaggcagagacggacttgcatct

SEQ ID NO: 66239 - DNA, 30 bp, Artificial Sequence
  Synthetic oligonucleotide
gtcaccgtagtgggtcggatttgctcatct

SEQ ID NO: 66240 - DNA, 30 bp, Artificial Sequence
  Synthetic oligonucleotide
agtcagcaggcgtaggggtggaaaagatct

SEQ ID NO: 66241 - DNA, 30 bp, Artificial Sequence
  Synthetic oligonucleotide
atcaggtctccccgccattgagtgcgatct

SEQ ID NO: 66242 - DNA, 30 bp, Artificial Sequence
  Synthetic oligonucleotide
gatgcttataggagtggagcggtaatatct

SEQ ID NO: 66243 - DNA, 30 bp, Artificial Sequence
  Synthetic oligonucleotide
tgctgggtggcattaacgagtagcctatct

SEQ ID NO: 66244 - DNA, 30 bp, Artificial Sequence
  Synthetic oligonucleotide
aaaggtagccgaacttcatcaagtctatct

SEQ ID NO: 66245 - DNA, 30 bp, Artificial Sequence
  Synthetic oligonucleotide
actggaaagcgtaaggcgctaaatgtatct

SEQ ID NO: 66246 - DNA, 30 bp, Artificial Sequence
  Synthetic oligonucleotide
ggaccaagatcgctacaaacgtgagactct

SEQ ID NO: 66247 - DNA, 30 bp, Artificial Sequence
  Synthetic oligonucleotide
cgcgccagccgggttacaaatggggactct

SEQ ID NO: 66248 - DNA, 30 bp, Artificial Sequence
  Synthetic oligonucleotide
aaggcgaacgagaacattcacttggactct

SEQ ID NO: 66249 - DNA, 30 bp, Artificial Sequence
  Synthetic oligonucleotide
cgtcccgccgaagggatagtgtgctactct

SEQ ID NO: 66250 - DNA, 30 bp, Artificial Sequence
  Synthetic oligonucleotide
aaaggccacagagagaacgttacaacctct

SEQ ID NO: 66251 - DNA, 31 bp, Artificial Sequence
  Synthetic oligonucleotide
gcggggggcaggataccagggaagaccctct

SEQ ID NO: 66252 - DNA, 30 bp, Artificial Sequence
  Synthetic oligonucleotide
taacatggcagatggttggaattcagctct

SEQ ID NO: 66253 - DNA, 30 bp, Artificial Sequence
  Synthetic oligonucleotide
taggttgcaaacagtgtgacgtagatctct

SEQ ID NO: 66254 - DNA, 30 bp, Artificial Sequence
  Synthetic oligonucleotide
cgacatggaattccgaatcgtcagttctct

SEQ ID NO: 66255 - DNA, 30 bp, Artificial Sequence
  Synthetic oligonucleotide
cagccgattacggtagtgacgacaaagtct

SEQ ID NO: 66256 - DNA, 30 bp, Artificial Sequence
  Synthetic oligonucleotide
acgacaaaatgcttggctactgttaagtct

SEQ ID NO: 66257 - DNA, 30 bp, Artificial Sequence
  Synthetic oligonucleotide
ctcgtgagcattatggagtccgcacagtct

SEQ ID NO: 66258 - DNA, 30 bp, Artificial Sequence
  Synthetic oligonucleotide
atcagcaaaatcgaagacgaataccagtct

SEQ ID NO: 66259 - DNA, 30 bp, Artificial Sequence
  Synthetic oligonucleotide
tcgcctatgcatcgtgcgatcacctagtct

SEQ ID NO: 66260 - DNA, 30 bp, Artificial Sequence
  Synthetic oligonucleotide
aggccacccgggagtctacaaatgacgtct

SEQ ID NO: 66261 - DNA, 30 bp, Artificial Sequence
  Synthetic oligonucleotide
gctaaaaaaaagtttgagtgctagccgtct

SEQ ID NO: 66262 - DNA, 30 bp, Artificial Sequence
  Synthetic oligonucleotide
tggaccggcgcgagaaaagaatgtgcgtct

SEQ ID NO: 66263 - DNA, 30 bp, Artificial Sequence
  Synthetic oligonucleotide
cgacagtgactaactagccgactatcgtct

SEQ ID NO: 66264 - DNA, 30 bp, Artificial Sequence
  Synthetic oligonucleotide
ctgaaaccagggcacagctgcgctgggtct

SEQ ID NO: 66265 - DNA, 30 bp, Artificial Sequence
  Synthetic oligonucleotide
aacgaaagagacaggaaaccttcaatgtct

SEQ ID NO: 66266 - DNA, 30 bp, Artificial Sequence
  Synthetic oligonucleotide
cgttcacaggattccaactacagagtgtct

SEQ ID NO: 66267 - DNA, 30 bp, Artificial Sequence
  Synthetic oligonucleotide
aacagtgcgacctcgccgaggaccgtgtct

SEQ ID NO: 66268 - DNA, 30 bp, Artificial Sequence
  Synthetic oligonucleotide
acagattacggcttagaagaaggtttgtct

SEQ ID NO: 66269 - DNA, 30 bp, Artificial Sequence
  Synthetic oligonucleotide
tagagtgcactcgcgagaagaaagaattct

SEQ ID NO: 66270 - DNA, 30 bp, Artificial Sequence
  Synthetic oligonucleotide
gggagggcccgtaagcggaatcaccattct

SEQ ID NO: 66271 - DNA, 30 bp, Artificial Sequence
  Synthetic oligonucleotide
tgcggaaagcatctctcacatgcccattct

SEQ ID NO: 66272 - DNA, 30 bp, Artificial Sequence
  Synthetic oligonucleotide
ctgatgtgggggtaggtcgtaagttattct

SEQ ID NO: 66273 - DNA, 30 bp, Artificial Sequence
  Synthetic oligonucleotide
ccactggacagcgaagtaatcgaatcttct

SEQ ID NO: 66274 - DNA, 30 bp, Artificial Sequence
  Synthetic oligonucleotide
aggggatgctaaatttggacgacaagttct

SEQ ID NO: 66275 - DNA, 30 bp, Artificial Sequence
  Synthetic oligonucleotide
gaagtggaggaggaataggttgtgctttct

SEQ ID NO: 66276 - DNA, 30 bp, Artificial Sequence
  Synthetic oligonucleotide
aaggactaatcttgtagatggcagaaaagt

SEQ ID NO: 66277 - DNA, 30 bp, Artificial Sequence
  Synthetic oligonucleotide
gggaatcaatagcgaaatacagagaaaagt

SEQ ID NO: 66278 - DNA, 30 bp, Artificial Sequence
  Synthetic oligonucleotide
agatcgtaacaggctacaggtctccaaagt

SEQ ID NO: 66279 - DNA, 30 bp, Artificial Sequence
  Synthetic oligonucleotide
cacggcgatgccaagcattatacgcaaagt

SEQ ID NO: 66280 - DNA, 30 bp, Artificial Sequence
  Synthetic oligonucleotide
cgcgttaccgactaatcacgcccgcaaagt

SEQ ID NO: 66281 - DNA, 30 bp, Artificial Sequence
  Synthetic oligonucleotide
cgaaatgctgcgaaggtacgaaatcaaagt

SEQ ID NO: 66282 - DNA, 30 bp, Artificial Sequence
  Synthetic oligonucleotide
cacacatggagggtcacattaagagaaagt

SEQ ID NO: 66283 - DNA, 30 bp, Artificial Sequence
  Synthetic oligonucleotide
caaattaggaacggctacccaaaggaaagt

SEQ ID NO: 66284 - DNA, 30 bp, Artificial Sequence
  Synthetic oligonucleotide
tgacaacacctccacactctaagataaagt

SEQ ID NO: 66285 - DNA, 30 bp, Artificial Sequence
  Synthetic oligonucleotide
aggttgtcaaaattagcgaaaccctaaagt

SEQ ID NO: 66286 - DNA, 30 bp, Artificial Sequence
  Synthetic oligonucleotide
ggggtgggggttatatgtgcgtcctaaagt

SEQ ID NO: 66287 - DNA, 30 bp, Artificial Sequence
  Synthetic oligonucleotide
ctggacggtcgacacactgttcgtacaagt

SEQ ID NO: 66288 - DNA, 30 bp, Artificial Sequence
  Synthetic oligonucleotide
tagtacgtaacgaaagcatgagaaccaagt

SEQ ID NO: 66289 - DNA, 30 bp, Artificial Sequence
  Synthetic oligonucleotide
ggtagggggacggtaagtatcctgccaagt

SEQ ID NO: 66290 - DNA, 30 bp, Artificial Sequence
  Synthetic oligonucleotide
tatatgcgtaaagtggatttcaaagcaagt

SEQ ID NO: 66291 - DNA, 30 bp, Artificial Sequence
  Synthetic oligonucleotide
ttgttgtcaccgggggtatgaagggcaagt

SEQ ID NO: 66292 - DNA, 30 bp, Artificial Sequence
  Synthetic oligonucleotide
aggggcaatttaccagagttacgatcaagt

SEQ ID NO: 66293 - DNA, 30 bp, Artificial Sequence
  Synthetic oligonucleotide
aggcggagggtgccagaaatacggagaagt

SEQ ID NO: 66294 - DNA, 30 bp, Artificial Sequence
  Synthetic oligonucleotide
accgaaggggtgattggctgttctagaagt

SEQ ID NO: 66295 - DNA, 30 bp, Artificial Sequence
  Synthetic oligonucleotide
atggcaggcccggtgagttttgcgcgaagt

SEQ ID NO: 66296 - DNA, 30 bp, Artificial Sequence
  Synthetic oligonucleotide
agtgcaaggtggcactgcgccaggcgaagt

SEQ ID NO: 66297 - DNA, 32 bp, Artificial Sequence
  Synthetic oligonucleotide
attgtgataacaagaaataaaactaaggaagt

SEQ ID NO: 66298 - DNA, 30 bp, Artificial Sequence
  Synthetic oligonucleotide
ggtacaaacaaagttatctttttaggaagt

SEQ ID NO: 66299 - DNA, 30 bp, Artificial Sequence
  Synthetic oligonucleotide
tgggtagacgctaaggttatgtatggaagt

SEQ ID NO: 66300 - DNA, 30 bp, Artificial Sequence
  Synthetic oligonucleotide
ccgcagagaggctaaaatttgtgtggaagt

SEQ ID NO: 66301 - DNA, 31 bp, Artificial Sequence
  Synthetic oligonucleotide
gcgtcctgcgcgaaatgaagagtcatgaagt

SEQ ID NO: 66302 - DNA, 30 bp, Artificial Sequence
  Synthetic oligonucleotide
cggtagccctatgaagctcgaggaataagt

SEQ ID NO: 66303 - DNA, 30 bp, Artificial Sequence
  Synthetic oligonucleotide
cattggagggaaccgagggagctcataagt

SEQ ID NO: 66304 - DNA, 30 bp, Artificial Sequence
  Synthetic oligonucleotide
gtccacaagagtagaatatgcaagctaagt

SEQ ID NO: 66305 - DNA, 30 bp, Artificial Sequence
  Synthetic oligonucleotide
ggatatatgagggaataccgtcgggtaagt

SEQ ID NO: 66306 - DNA, 30 bp, Artificial Sequence
  Synthetic oligonucleotide
taaggggacgggaagagtgtggcattaagt

SEQ ID NO: 66307 - DNA, 30 bp, Artificial Sequence
  Synthetic oligonucleotide
tagtaaggggcgcagtgttgagaggacagt

SEQ ID NO: 66308 - DNA, 30 bp, Artificial Sequence
  Synthetic oligonucleotide
actggccaaagccaaaccgaaattaccagt

SEQ ID NO: 66309 - DNA, 30 bp, Artificial Sequence
  Synthetic oligonucleotide
gtggcgtatcgatctaaaatagcagccagt

SEQ ID NO: 66310 - DNA, 30 bp, Artificial Sequence
  Synthetic oligonucleotide
tgcgtatgagatacatttgccaagtccagt

SEQ ID NO: 66311 - DNA, 30 bp, Artificial Sequence
  Synthetic oligonucleotide
cacggaatataatttaatgggctaagcagt

SEQ ID NO: 66312 - DNA, 30 bp, Artificial Sequence
  Synthetic oligonucleotide
tcagaagagagaaaaataatgaagcgcagt

SEQ ID NO: 66313 - DNA, 30 bp, Artificial Sequence
  Synthetic oligonucleotide
aagaggatgatagaatcaagaaatcgcagt

SEQ ID NO: 66314 - DNA, 30 bp, Artificial Sequence
  Synthetic oligonucleotide
gtcagtgcgaggccgtcggatcgattcagt

SEQ ID NO: 66315 - DNA, 30 bp, Artificial Sequence
  Synthetic oligonucleotide
agggctggatacatgataccaaggttcagt

SEQ ID NO: 66316 - DNA, 30 bp, Artificial Sequence
  Synthetic oligonucleotide
ttgacagcatcgtataagttacgaaagagt

SEQ ID NO: 66317 - DNA, 30 bp, Artificial Sequence
  Synthetic oligonucleotide
atgcatgacgatcagttcggggtaaagagt

SEQ ID NO: 66318 - DNA, 30 bp, Artificial Sequence
  Synthetic oligonucleotide
gcctagggactagagcgagtattaaagagt

SEQ ID NO: 66319 - DNA, 30 bp, Artificial Sequence
  Synthetic oligonucleotide
gactgggtgaagacaaggttaaacaagagt

SEQ ID NO: 66320 - DNA, 31 bp, Artificial Sequence
  Synthetic oligonucleotide
ctaactctcagagtaaaaatagcatcagagt

SEQ ID NO: 66321 - DNA, 30 bp, Artificial Sequence
  Synthetic oligonucleotide
cgcccggtggtcggcaatagagtagagagt

SEQ ID NO: 66322 - DNA, 30 bp, Artificial Sequence
  Synthetic oligonucleotide
ccggcagccgtcgcatagggtagggagagt

SEQ ID NO: 66323 - DNA, 30 bp, Artificial Sequence
  Synthetic oligonucleotide
cgttcgagagtggctgaagcgggatagagt

SEQ ID NO: 66324 - DNA, 30 bp, Artificial Sequence
  Synthetic oligonucleotide
cacattagacatcagagtgaagggtagagt

SEQ ID NO: 66325 - DNA, 30 bp, Artificial Sequence
  Synthetic oligonucleotide
ggtcggataataaggagtggaccttagagt

SEQ ID NO: 66326 - DNA, 30 bp, Artificial Sequence
  Synthetic oligonucleotide
aggctatatcacgggtgaaggccaccgagt

SEQ ID NO: 66327 - DNA, 30 bp, Artificial Sequence
  Synthetic oligonucleotide
atgtcttagggactgcggttgaaatcgagt

SEQ ID NO: 66328 - DNA, 30 bp, Artificial Sequence
  Synthetic oligonucleotide
agtataagtggaataacttcacagaggagt

SEQ ID NO: 66329 - DNA, 30 bp, Artificial Sequence
  Synthetic oligonucleotide
gtcgagtgggcaggattaaatattcggagt

SEQ ID NO: 66330 - DNA, 30 bp, Artificial Sequence
  Synthetic oligonucleotide
ggtgaccacgcttcaaggaggttggggagt

SEQ ID NO: 66331 - DNA, 30 bp, Artificial Sequence
  Synthetic oligonucleotide
aagtacggtaacagtatgaaccatgggagt

SEQ ID NO: 66332 - DNA, 30 bp, Artificial Sequence
  Synthetic oligonucleotide
ggactagtaaacgtattaatgcatgggagt

SEQ ID NO: 66333 - DNA, 30 bp, Artificial Sequence
  Synthetic oligonucleotide
atgtacacacgcgccaaaatggggtggagt

SEQ ID NO: 66334 - DNA, 30 bp, Artificial Sequence
  Synthetic oligonucleotide
caacatgggatgatccacgacgattggagt

SEQ ID NO: 66335 - DNA, 30 bp, Artificial Sequence
  Synthetic oligonucleotide
agtgtcggcccagatcgaccttattggagt

SEQ ID NO: 66336 - DNA, 30 bp, Artificial Sequence
  Synthetic oligonucleotide
atcacaaacaggcgtgtagacctttggagt

SEQ ID NO: 66337 - DNA, 30 bp, Artificial Sequence
  Synthetic oligonucleotide
gcctacattcgggcgtatgtacggatgagt

SEQ ID NO: 66338 - DNA, 30 bp, Artificial Sequence
  Synthetic oligonucleotide
ggacattaaaggtcttttagcaatctgagt

SEQ ID NO: 66339 - DNA, 30 bp, Artificial Sequence
  Synthetic oligonucleotide
gttacaactggtgcgacctcccatctgagt

SEQ ID NO: 66340 - DNA, 30 bp, Artificial Sequence
  Synthetic oligonucleotide
cagtcgaggaatcgatgtagtaaagtgagt

SEQ ID NO: 66341 - DNA, 30 bp, Artificial Sequence
  Synthetic oligonucleotide
ggctttccactaacacccaaagcagtgagt

SEQ ID NO: 66342 - DNA, 30 bp, Artificial Sequence
  Synthetic oligonucleotide
gtggacatgacagttgttgtggcagtgagt

SEQ ID NO: 66343 - DNA, 30 bp, Artificial Sequence
  Synthetic oligonucleotide
gatccacagagattgctttgagtagtgagt

SEQ ID NO: 66344 - DNA, 30 bp, Artificial Sequence
  Synthetic oligonucleotide
cggaaggtggttgtatagtaacccttgagt

SEQ ID NO: 66345 - DNA, 30 bp, Artificial Sequence
  Synthetic oligonucleotide
aggtcatgtctgagacttcgattgttgagt

SEQ ID NO: 66346 - DNA, 30 bp, Artificial Sequence
  Synthetic oligonucleotide
gacgcggtacgaatcagaaatacaaatagt

SEQ ID NO: 66347 - DNA, 30 bp, Artificial Sequence
  Synthetic oligonucleotide
ctggctgcgtgggcgagacgtacgaatagt

SEQ ID NO: 66348 - DNA, 30 bp, Artificial Sequence
  Synthetic oligonucleotide
acaaacgagtgtattgctaaaagccatagt

SEQ ID NO: 66349 - DNA, 30 bp, Artificial Sequence
  Synthetic oligonucleotide
ctggcatagttagggaagccgggagatagt

SEQ ID NO: 66350 - DNA, 30 bp, Artificial Sequence
  Synthetic oligonucleotide
accatggccggcccgaacgacgtgtatagt

SEQ ID NO: 66351 - DNA, 30 bp, Artificial Sequence
  Synthetic oligonucleotide
ccacaccgtataagtttccaagcgactagt

SEQ ID NO: 66352 - DNA, 30 bp, Artificial Sequence
  Synthetic oligonucleotide
gctggtactgtgtgcacaggagcggctagt

SEQ ID NO: 66353 - DNA, 30 bp, Artificial Sequence
  Synthetic oligonucleotide
ccaagaatgacgggatagaattggtctagt

SEQ ID NO: 66354 - DNA, 30 bp, Artificial Sequence
  Synthetic oligonucleotide
gcgatattagcgtcggtgcgtggaagtagt

SEQ ID NO: 66355 - DNA, 30 bp, Artificial Sequence
  Synthetic oligonucleotide
tgctaagatcgacattgcgccgtaagtagt

SEQ ID NO: 66356 - DNA, 30 bp, Artificial Sequence
  Synthetic oligonucleotide
ggcagaaatgacccagagtgttgaggtagt

SEQ ID NO: 66357 - DNA, 30 bp, Artificial Sequence
  Synthetic oligonucleotide
tcactgtataaataatggagtgagggtagt

SEQ ID NO: 66358 - DNA, 30 bp, Artificial Sequence
  Synthetic oligonucleotide
acggcaggttggcctgtgcgtacgtgtagt

SEQ ID NO: 66359 - DNA, 30 bp, Artificial Sequence
  Synthetic oligonucleotide
ctgacaagtggcgcgtgtaaatcaattagt

SEQ ID NO: 66360 - DNA, 30 bp, Artificial Sequence
  Synthetic oligonucleotide
agtgagccgacttacgctgaggtgattagt

SEQ ID NO: 66361 - DNA, 30 bp, Artificial Sequence
  Synthetic oligonucleotide
tgcagggtgtgctgtacagcttagcttagt

SEQ ID NO: 66362 - DNA, 30 bp, Artificial Sequence
  Synthetic oligonucleotide
gagaaatcgcaattgatggtataggttagt

SEQ ID NO: 66363 - DNA, 30 bp, Artificial Sequence
  Synthetic oligonucleotide
atggacaggcgggccaaataagtaaaacgt

SEQ ID NO: 66364 - DNA, 30 bp, Artificial Sequence
  Synthetic oligonucleotide
aagatcacggcccttgcgggaccacaacgt

SEQ ID NO: 66365 - DNA, 30 bp, Artificial Sequence
  Synthetic oligonucleotide
gtcgtggctggtacttgtgcgatggaacgt

SEQ ID NO: 66366 - DNA, 30 bp, Artificial Sequence
  Synthetic oligonucleotide
agtcaagcggactgctggctggtaacacgt

SEQ ID NO: 66367 - DNA, 30 bp, Artificial Sequence
  Synthetic oligonucleotide
cacggcctgtcgagctccacaccaccacgt

SEQ ID NO: 66368 - DNA, 30 bp, Artificial Sequence
  Synthetic oligonucleotide
ggcatagccatgacatttcagacagcacgt

SEQ ID NO: 66369 - DNA, 30 bp, Artificial Sequence
  Synthetic oligonucleotide
cgacacagttaagccacgataccatcacgt

SEQ ID NO: 66370 - DNA, 30 bp, Artificial Sequence
  Synthetic oligonucleotide
cagggcagaaggtgtgtgtggccatcacgt

SEQ ID NO: 66371 - DNA, 30 bp, Artificial Sequence
  Synthetic oligonucleotide
cgagggccgataaaccgtgcggtgtcacgt

SEQ ID NO: 66372 - DNA, 30 bp, Artificial Sequence
  Synthetic oligonucleotide
gtcgggaaatgtatcccttattatcgacgt

SEQ ID NO: 66373 - DNA, 30 bp, Artificial Sequence
  Synthetic oligonucleotide
agactagcaatgggatccgaaagtcgacgt

SEQ ID NO: 66374 - DNA, 30 bp, Artificial Sequence
  Synthetic oligonucleotide
catgagtaaccgacagctgactcgtgacgt

SEQ ID NO: 66375 - DNA, 30 bp, Artificial Sequence
  Synthetic oligonucleotide
aggaaagtcatagctatcaaacattgacgt

SEQ ID NO: 66376 - DNA, 31 bp, Artificial Sequence
  Synthetic oligonucleotide
atagagaaggagcgtaggtgggcccgtacgt

SEQ ID NO: 66377 - DNA, 30 bp, Artificial Sequence
  Synthetic oligonucleotide
cgaggcagatacagggatgatgaaaaccgt

SEQ ID NO: 66378 - DNA, 30 bp, Artificial Sequence
  Synthetic oligonucleotide
caattataggcacagaagaaatacgaccgt

SEQ ID NO: 66379 - DNA, 30 bp, Artificial Sequence
  Synthetic oligonucleotide
accgtcaaaagggacgcgtacaggacccgt

SEQ ID NO: 66380 - DNA, 30 bp, Artificial Sequence
  Synthetic oligonucleotide
aggcgtgaccgaatgagctttcgagcccgt

SEQ ID NO: 66381 - DNA, 30 bp, Artificial Sequence
  Synthetic oligonucleotide
acaagaagcgtaatggatgttattcgccgt

SEQ ID NO: 66382 - DNA, 30 bp, Artificial Sequence
  Synthetic oligonucleotide
tgttgtagtgtatgaaacgtgagcggccgt

SEQ ID NO: 66383 - DNA, 30 bp, Artificial Sequence
  Synthetic oligonucleotide
tcgggcgatgggcagtgcggtatgtgccgt

SEQ ID NO: 66384 - DNA, 30 bp, Artificial Sequence
  Synthetic oligonucleotide
ggctagtcaataggtatcaaagtactccgt

SEQ ID NO: 66385 - DNA, 30 bp, Artificial Sequence
  Synthetic oligonucleotide
cgggcatgctagccgtcgcatagggtccgt

SEQ ID NO: 66386 - DNA, 30 bp, Artificial Sequence
  Synthetic oligonucleotide
ataacagaaacggggaacattataaagcgt

SEQ ID NO: 66387 - DNA, 30 bp, Artificial Sequence
  Synthetic oligonucleotide
tccataatgataaactaacgggagaagcgt

SEQ ID NO: 66388 - DNA, 30 bp, Artificial Sequence
  Synthetic oligonucleotide
gtgttgggagcctcaaggagaggggagcgt

SEQ ID NO: 66389 - DNA, 30 bp, Artificial Sequence
  Synthetic oligonucleotide
agaggaaaacagctctttcacgtttagcgt

SEQ ID NO: 66390 - DNA, 30 bp, Artificial Sequence
  Synthetic oligonucleotide
ggacaacgtaggggtatcgtatagaggcgt

SEQ ID NO: 66391 - DNA, 30 bp, Artificial Sequence
  Synthetic oligonucleotide
gtcaagacaatataaaatctgttgtggcgt

SEQ ID NO: 66392 - DNA, 30 bp, Artificial Sequence
  Synthetic oligonucleotide
ggcggtgcggagcgcgtgtgtctttggcgt

SEQ ID NO: 66393 - DNA, 30 bp, Artificial Sequence
  Synthetic oligonucleotide
tgagtcaggatggcctagctttaactgcgt

SEQ ID NO: 66394 - DNA, 30 bp, Artificial Sequence
  Synthetic oligonucleotide
accgatggagaggtaaggacctataatcgt

SEQ ID NO: 66395 - DNA, 30 bp, Artificial Sequence
  Synthetic oligonucleotide
gcctgggatcgaacggcgcgaatggatcgt

SEQ ID NO: 66396 - DNA, 30 bp, Artificial Sequence
  Synthetic oligonucleotide
acgggggtcgccaggactagtatggatcgt

SEQ ID NO: 66397 - DNA, 30 bp, Artificial Sequence
  Synthetic oligonucleotide
ggatggcgggtgactgagttggatgatcgt

SEQ ID NO: 66398 - DNA, 30 bp, Artificial Sequence
  Synthetic oligonucleotide
cgcgatcttgtcaattcggcaacatatcgt

SEQ ID NO: 66399 - DNA, 30 bp, Artificial Sequence
  Synthetic oligonucleotide
acctagacaatactgaggagtacgtatcgt

SEQ ID NO: 66400 - DNA, 29 bp, Artificial Sequence
  Synthetic oligonucleotide
cggggcgccagcacgaaacccgcactcgt

SEQ ID NO: 66401 - DNA, 30 bp, Artificial Sequence
  Synthetic oligonucleotide
catcgcctggaacacaccaagctacctcgt

SEQ ID NO: 66402 - DNA, 30 bp, Artificial Sequence
  Synthetic oligonucleotide
gaactggacgagaagaccatatacagtcgt

SEQ ID NO: 66403 - DNA, 30 bp, Artificial Sequence
  Synthetic oligonucleotide
cagaaaaggtaagaagccgggactagtcgt

SEQ ID NO: 66404 - DNA, 30 bp, Artificial Sequence
  Synthetic oligonucleotide
agctcgaccggatcaaggagatgtcgtcgt

SEQ ID NO: 66405 - DNA, 30 bp, Artificial Sequence
  Synthetic oligonucleotide
acggataggggcgatgcactggagggtcgt

SEQ ID NO: 66406 - DNA, 30 bp, Artificial Sequence
  Synthetic oligonucleotide
agaggcatgtgacgtataacgtaacttcgt

SEQ ID NO: 66407 - DNA, 30 bp, Artificial Sequence
  Synthetic oligonucleotide
cgttgtctccgactcgtcccccaccttcgt

SEQ ID NO: 66408 - DNA, 30 bp, Artificial Sequence
  Synthetic oligonucleotide
aacaagcacgtgtagattcggaatcaaggt

SEQ ID NO: 66409 - DNA, 30 bp, Artificial Sequence
  Synthetic oligonucleotide
acaggtgcaacagaactctgatgtacaggt

SEQ ID NO: 66410 - DNA, 30 bp, Artificial Sequence
  Synthetic oligonucleotide
cagaagtcggcgacccgggaataggcaggt

SEQ ID NO: 66411 - DNA, 30 bp, Artificial Sequence
  Synthetic oligonucleotide
ccgtgttgatagtaccaggtaggtgcaggt

SEQ ID NO: 66412 - DNA, 30 bp, Artificial Sequence
  Synthetic oligonucleotide
aggtgtaaaaatactggaaaaaaaagaggt

SEQ ID NO: 66413 - DNA, 30 bp, Artificial Sequence
  Synthetic oligonucleotide
catataaccgcgagggacggggatagaggt

SEQ ID NO: 66414 - DNA, 30 bp, Artificial Sequence
  Synthetic oligonucleotide
cttccgggataagttgcagaagggcgaggt

SEQ ID NO: 66415 - DNA, 30 bp, Artificial Sequence
  Synthetic oligonucleotide
ggtaagtacagttgcgtcgccaatcgaggt

SEQ ID NO: 66416 - DNA, 30 bp, Artificial Sequence
  Synthetic oligonucleotide
cggtaggaaacagacttgagatacggaggt

SEQ ID NO: 66417 - DNA, 29 bp, Artificial Sequence
  Synthetic oligonucleotide
agcaagaatgattaagagcatcgggaggt

SEQ ID NO: 66418 - DNA, 30 bp, Artificial Sequence
  Synthetic oligonucleotide
tcgagcagggcattcgacttgtaaataggt

SEQ ID NO: 66419 - DNA, 30 bp, Artificial Sequence
  Synthetic oligonucleotide
tggctcattccaagtacgaagagtataggt

SEQ ID NO: 66420 - DNA, 30 bp, Artificial Sequence
  Synthetic oligonucleotide
agtgcagctggaacggcgagtggggtaggt

SEQ ID NO: 66421 - DNA, 30 bp, Artificial Sequence
  Synthetic oligonucleotide
tcgagaaatagagattaagtacggaacggt

SEQ ID NO: 66422 - DNA, 30 bp, Artificial Sequence
  Synthetic oligonucleotide
acgggaaagggagtgagattcgaacacggt

SEQ ID NO: 66423 - DNA, 30 bp, Artificial Sequence
  Synthetic oligonucleotide
gtggacattagatcgatgctaggggacggt

SEQ ID NO: 66424 - DNA, 30 bp, Artificial Sequence
  Synthetic oligonucleotide
aaaggtggtacgtaatgctggaagaccggt

SEQ ID NO: 66425 - DNA, 31 bp, Artificial Sequence
  Synthetic oligonucleotide
gtcatcagggaaataaaattagaaatccggt

SEQ ID NO: 66426 - DNA, 30 bp, Artificial Sequence
  Synthetic oligonucleotide
cttcggtaaggacatctcaagtgcatcggt

SEQ ID NO: 66427 - DNA, 30 bp, Artificial Sequence
  Synthetic oligonucleotide
cgtccttataagcagcatagcatgatcggt

SEQ ID NO: 66428 - DNA, 30 bp, Artificial Sequence
  Synthetic oligonucleotide
aaaaagggagcaagtcattatcaggtcggt

SEQ ID NO: 66429 - DNA, 30 bp, Artificial Sequence
  Synthetic oligonucleotide
ccacacggaagatccacgagttcacagggt

SEQ ID NO: 66430 - DNA, 30 bp, Artificial Sequence
  Synthetic oligonucleotide
tgattcgcgcgcgaacgagataaagagggt

SEQ ID NO: 66431 - DNA, 30 bp, Artificial Sequence
  Synthetic oligonucleotide
caacacacactgccgacagagcgagagggt

SEQ ID NO: 66432 - DNA, 30 bp, Artificial Sequence
  Synthetic oligonucleotide
cctcagtgaagtattgggctaggaccgggt

SEQ ID NO: 66433 - DNA, 30 bp, Artificial Sequence
  Synthetic oligonucleotide
gttcaaggaggggagatacacagtaggggt

SEQ ID NO: 66434 - DNA, 30 bp, Artificial Sequence
  Synthetic oligonucleotide
cacacgaaacgggttcgatcgggccggggt

SEQ ID NO: 66435 - DNA, 30 bp, Artificial Sequence
  Synthetic oligonucleotide
aggagagtgtcttgacaccttaggcggggt

SEQ ID NO: 66436 - DNA, 30 bp, Artificial Sequence
  Synthetic oligonucleotide
aggaggggcctgtacgtgttctctcggggt

SEQ ID NO: 66437 - DNA, 30 bp, Artificial Sequence
  Synthetic oligonucleotide
agcaagaggtcagtagtcatatctgggggt

SEQ ID NO: 66438 - DNA, 30 bp, Artificial Sequence
  Synthetic oligonucleotide
cgggatatattagagcacgctatggtgggt

SEQ ID NO: 66439 - DNA, 30 bp, Artificial Sequence
  Synthetic oligonucleotide
tggcaaacctggtgctccagaaacttgggt

SEQ ID NO: 66440 - DNA, 30 bp, Artificial Sequence
  Synthetic oligonucleotide
gcgccaataggctcctaaggaaagttgggt

SEQ ID NO: 66441 - DNA, 39 bp, Artificial Sequence
  Synthetic oligonucleotide
cgatgaaagttcgcgcagggtggtgtaattactaatggt

SEQ ID NO: 66442 - DNA, 30 bp, Artificial Sequence
  Synthetic oligonucleotide
cgcatattagaacggtgacctcgccatggt

SEQ ID NO: 66443 - DNA, 30 bp, Artificial Sequence
  Synthetic oligonucleotide
aaaaagatgaagagagggcgcacagatggt

SEQ ID NO: 66444 - DNA, 30 bp, Artificial Sequence
  Synthetic oligonucleotide
ggtgtgatcatggtgtgcaggaccgatggt

SEQ ID NO: 66445 - DNA, 30 bp, Artificial Sequence
  Synthetic oligonucleotide
tagcatgcggcagagaaattgctcgatggt

SEQ ID NO: 66446 - DNA, 30 bp, Artificial Sequence
  Synthetic oligonucleotide
agggtaggtcatatgttgagaacgactggt

SEQ ID NO: 66447 - DNA, 30 bp, Artificial Sequence
  Synthetic oligonucleotide
acaagaagtctggaaccgactactactggt

SEQ ID NO: 66448 - DNA, 30 bp, Artificial Sequence
  Synthetic oligonucleotide
gccgtgtcggacgtaaggtggtcagctggt

SEQ ID NO: 66449 - DNA, 30 bp, Artificial Sequence
  Synthetic oligonucleotide
tgggagagaccataaaaccgcagagctggt

SEQ ID NO: 66450 - DNA, 29 bp, Artificial Sequence
  Synthetic oligonucleotide
agagccgaaggatcaatcgtagacgtggt

SEQ ID NO: 66451 - DNA, 30 bp, Artificial Sequence
  Synthetic oligonucleotide
ctgtcaaatacatcaagatgcatccgtggt

SEQ ID NO: 66452 - DNA, 30 bp, Artificial Sequence
  Synthetic oligonucleotide
cggctgcgtattccatctaagacctgtggt

SEQ ID NO: 66453 - DNA, 30 bp, Artificial Sequence
  Synthetic oligonucleotide
aggggccaagatgacagggctgaaattggt

SEQ ID NO: 66454 - DNA, 30 bp, Artificial Sequence
  Synthetic oligonucleotide
ggttaagaaaaatggaatcgagcaattggt

SEQ ID NO: 66455 - DNA, 30 bp, Artificial Sequence
  Synthetic oligonucleotide
acattccagatacgccagtcaaagcttggt

SEQ ID NO: 66456 - DNA, 30 bp, Artificial Sequence
  Synthetic oligonucleotide
tagcgaagttggacgatcagcgattttggt

SEQ ID NO: 66457 - DNA, 30 bp, Artificial Sequence
  Synthetic oligonucleotide
cgctgctcaagctgaacaaaccccacatgt

SEQ ID NO: 66458 - DNA, 30 bp, Artificial Sequence
  Synthetic oligonucleotide
gaaaggacgagaaggtaataacgcgcatgt

SEQ ID NO: 66459 - DNA, 30 bp, Artificial Sequence
  Synthetic oligonucleotide
tacggaactgggctatattcgtttgcatgt

SEQ ID NO: 66460 - DNA, 30 bp, Artificial Sequence
  Synthetic oligonucleotide
agacaaggctgcggatcgttgagcagatgt

SEQ ID NO: 66461 - DNA, 30 bp, Artificial Sequence
  Synthetic oligonucleotide
gcgctagtgtggcgagaaatattgagatgt

SEQ ID NO: 66462 - DNA, 30 bp, Artificial Sequence
  Synthetic oligonucleotide
gttaggatagaggacacgatcgatagatgt

SEQ ID NO: 66463 - DNA, 30 bp, Artificial Sequence
  Synthetic oligonucleotide
acggccttagatcggcaccggggaggatgt

SEQ ID NO: 66464 - DNA, 30 bp, Artificial Sequence
  Synthetic oligonucleotide
aaggacagaccaagttgtgctgagttatgt

SEQ ID NO: 66465 - DNA, 30 bp, Artificial Sequence
  Synthetic oligonucleotide
tgttacgtgagcgtagaaaaaagtaactgt

SEQ ID NO: 66466 - DNA, 30 bp, Artificial Sequence
  Synthetic oligonucleotide
accgtggtgggtcttactggaatggactgt

SEQ ID NO: 66467 - DNA, 30 bp, Artificial Sequence
  Synthetic oligonucleotide
gcgcaactaaccattagtgagcttgactgt

SEQ ID NO: 66468 - DNA, 30 bp, Artificial Sequence
  Synthetic oligonucleotide
tacggtgaggcgcgtgtagaaagtccctgt

SEQ ID NO: 66469 - DNA, 30 bp, Artificial Sequence
  Synthetic oligonucleotide
ggtacggtaccattcgatcagcgagcctgt

SEQ ID NO: 66470 - DNA, 30 bp, Artificial Sequence
  Synthetic oligonucleotide
gagtagggagtcaagagtatgctagcctgt

SEQ ID NO: 66471 - DNA, 30 bp, Artificial Sequence
  Synthetic oligonucleotide
aggctaggagagattactgctgaaagctgt

SEQ ID NO: 66472 - DNA, 30 bp, Artificial Sequence
  Synthetic oligonucleotide
gaaagttgccgaacgacggatgcgcgctgt

SEQ ID NO: 66473 - DNA, 30 bp, Artificial Sequence
  Synthetic oligonucleotide
ggggcctgccattcatacatagctcgctgt

SEQ ID NO: 66474 - DNA, 30 bp, Artificial Sequence
  Synthetic oligonucleotide
cgcgtgaggattgaatcgcgccttcgctgt

SEQ ID NO: 66475 - DNA, 30 bp, Artificial Sequence
  Synthetic oligonucleotide
acagagggggccatcaattaatgaggctgt

SEQ ID NO: 66476 - DNA, 30 bp, Artificial Sequence
  Synthetic oligonucleotide
cccgataaagaagtgtatacatgttgctgt

SEQ ID NO: 66477 - DNA, 30 bp, Artificial Sequence
  Synthetic oligonucleotide
agttataaaaaggattaaaaagtcatctgt

SEQ ID NO: 66478 - DNA, 30 bp, Artificial Sequence
  Synthetic oligonucleotide
cattgagtagctcgacggccaatacagtgt

SEQ ID NO: 66479 - DNA, 30 bp, Artificial Sequence
  Synthetic oligonucleotide
ggaatcattgtacaagacgtcccccagtgt

SEQ ID NO: 66480 - DNA, 30 bp, Artificial Sequence
  Synthetic oligonucleotide
agacctcaaactagactaacgctccagtgt

SEQ ID NO: 66481 - DNA, 30 bp, Artificial Sequence
  Synthetic oligonucleotide
agagtgtaacgcttataactgagtcagtgt

SEQ ID NO: 66482 - DNA, 30 bp, Artificial Sequence
  Synthetic oligonucleotide
cgtacgtatttttcccaccagaaggagtgt

SEQ ID NO: 66483 - DNA, 30 bp, Artificial Sequence
  Synthetic oligonucleotide
ggccaggggcaagcaatgtccactgagtgt

SEQ ID NO: 66484 - DNA, 30 bp, Artificial Sequence
  Synthetic oligonucleotide
acctagggccgtgatcccgatgtatagtgt

SEQ ID NO: 66485 - DNA, 31 bp, Artificial Sequence
  Synthetic oligonucleotide
agaagatcgtgatttgaggtcgaagacgtgt

SEQ ID NO: 66486 - DNA, 30 bp, Artificial Sequence
  Synthetic oligonucleotide
aacgtccctcatacgaacggttgcgcgtgt

SEQ ID NO: 66487 - DNA, 30 bp, Artificial Sequence
  Synthetic oligonucleotide
tcattcgggaccagatagtgcaaatcgtgt

SEQ ID NO: 66488 - DNA, 30 bp, Artificial Sequence
  Synthetic oligonucleotide
agcagacatgagcaataaacggtatcgtgt

SEQ ID NO: 66489 - DNA, 30 bp, Artificial Sequence
  Synthetic oligonucleotide
tcgaaggcataccattatcaaaggtcgtgt

SEQ ID NO: 66490 - DNA, 30 bp, Artificial Sequence
  Synthetic oligonucleotide
gcagactgattgatgagttaaataaggtgt

SEQ ID NO: 66491 - DNA, 30 bp, Artificial Sequence
  Synthetic oligonucleotide
atggttaccgacaataggctcaagaggtgt

SEQ ID NO: 66492 - DNA, 30 bp, Artificial Sequence
  Synthetic oligonucleotide
gcaaatacagcagctagacgtaagaggtgt

SEQ ID NO: 66493 - DNA, 30 bp, Artificial Sequence
  Synthetic oligonucleotide
tgcggtcgggggtcaccagcgcgacggtgt

SEQ ID NO: 66494 - DNA, 30 bp, Artificial Sequence
  Synthetic oligonucleotide
cctcagttttactatatcagagagcggtgt

SEQ ID NO: 66495 - DNA, 30 bp, Artificial Sequence
  Synthetic oligonucleotide
atgtagcctggaccagctagaactcggtgt

SEQ ID NO: 66496 - DNA, 30 bp, Artificial Sequence
  Synthetic oligonucleotide
gcggccatcttgaatcaacctgggtggtgt

SEQ ID NO: 66497 - DNA, 30 bp, Artificial Sequence
  Synthetic oligonucleotide
cggagcacggttgaagacgcgaatatgtgt

SEQ ID NO: 66498 - DNA, 30 bp, Artificial Sequence
  Synthetic oligonucleotide
gaacgtagagaagagacgtacgatatgtgt

SEQ ID NO: 66499 - DNA, 30 bp, Artificial Sequence
  Synthetic oligonucleotide
atgcgaagaccgtatcagaactcactgtgt

SEQ ID NO: 66500 - DNA, 30 bp, Artificial Sequence
  Synthetic oligonucleotide
gcacgaggactgggattgatatggctgtgt

SEQ ID NO: 66501 - DNA, 30 bp, Artificial Sequence
  Synthetic oligonucleotide
gccagaccgattgagaaaagataattgtgt

SEQ ID NO: 66502 - DNA, 30 bp, Artificial Sequence
  Synthetic oligonucleotide
atgggaaactggacactatgacagaattgt

SEQ ID NO: 66503 - DNA, 30 bp, Artificial Sequence
  Synthetic oligonucleotide
tctggaggggtattgagcaaattgcattgt

SEQ ID NO: 66504 - DNA, 30 bp, Artificial Sequence
  Synthetic oligonucleotide
acgatccgacctataagatgcggggattgt

SEQ ID NO: 66505 - DNA, 30 bp, Artificial Sequence
  Synthetic oligonucleotide
gcactgggagatatctgagatggtgattgt

SEQ ID NO: 66506 - DNA, 30 bp, Artificial Sequence
  Synthetic oligonucleotide
gcaagcgccaagtcgagatgaaattattgt

SEQ ID NO: 66507 - DNA, 30 bp, Artificial Sequence
  Synthetic oligonucleotide
ctgtacggcgcttggtaagggggaagttgt

SEQ ID NO: 66508 - DNA, 30 bp, Artificial Sequence
  Synthetic oligonucleotide
tggaagataaaaaatagtcatcaccgttgt

SEQ ID NO: 66509 - DNA, 30 bp, Artificial Sequence
  Synthetic oligonucleotide
gcatcggcagactgcaataggtgcggttgt

SEQ ID NO: 66510 - DNA, 30 bp, Artificial Sequence
  Synthetic oligonucleotide
tcgggatgccatggcgtatgcaagtgttgt

SEQ ID NO: 66511 - DNA, 30 bp, Artificial Sequence
  Synthetic oligonucleotide
gggctcgaagtaagccgataacaactttgt

SEQ ID NO: 66512 - DNA, 30 bp, Artificial Sequence
  Synthetic oligonucleotide
ctgtgcggaacacgagtgcgtgatgtttgt

SEQ ID NO: 66513 - DNA, 30 bp, Artificial Sequence
  Synthetic oligonucleotide
gcgtagtgagattgccattctctacaaatt

SEQ ID NO: 66514 - DNA, 30 bp, Artificial Sequence
  Synthetic oligonucleotide
gaacaagtgccagaacggcatgagcaaatt

SEQ ID NO: 66515 - DNA, 30 bp, Artificial Sequence
  Synthetic oligonucleotide
cgcgaaaaaatttatgttgtggcgcaaatt

SEQ ID NO: 66516 - DNA, 30 bp, Artificial Sequence
  Synthetic oligonucleotide
ggacgtctgattagtcgtaatacagaaatt

SEQ ID NO: 66517 - DNA, 30 bp, Artificial Sequence
  Synthetic oligonucleotide
gcgccgtggacgactctagtgttagaaatt

SEQ ID NO: 66518 - DNA, 30 bp, Artificial Sequence
  Synthetic oligonucleotide
gacacggaacagccctaggtctacgaaatt

SEQ ID NO: 66519 - DNA, 30 bp, Artificial Sequence
  Synthetic oligonucleotide
cgtacaagtgcagacctcaacctggaaatt

SEQ ID NO: 66520 - DNA, 30 bp, Artificial Sequence
  Synthetic oligonucleotide
tatgaacgacaacggacatcgccaccaatt

SEQ ID NO: 66521 - DNA, 30 bp, Artificial Sequence
  Synthetic oligonucleotide
gggataaataatgccaaaagtgcgccaatt

SEQ ID NO: 66522 - DNA, 30 bp, Artificial Sequence
  Synthetic oligonucleotide
aagagggataggatgttgattcgagcaatt

SEQ ID NO: 66523 - DNA, 30 bp, Artificial Sequence
  Synthetic oligonucleotide
tgctaggaaggtgatacgatggggagaatt

SEQ ID NO: 66524 - DNA, 30 bp, Artificial Sequence
  Synthetic oligonucleotide
ggctcagcggagcgtccagctaagcgaatt

SEQ ID NO: 66525 - DNA, 30 bp, Artificial Sequence
  Synthetic oligonucleotide
tgagcgtgaccatttacaaggcggcgaatt

SEQ ID NO: 66526 - DNA, 30 bp, Artificial Sequence
  Synthetic oligonucleotide
ttgccatcaactaatgacagattgcgaatt

SEQ ID NO: 66527 - DNA, 30 bp, Artificial Sequence
  Synthetic oligonucleotide
gtcgtccgaaactctcaaaggaatcgaatt

SEQ ID NO: 66528 - DNA, 30 bp, Artificial Sequence
  Synthetic oligonucleotide
tgccaggggaccggtacgtaacatcgaatt

SEQ ID NO: 66529 - DNA, 30 bp, Artificial Sequence
  Synthetic oligonucleotide
aagagatcctaggcaggttagcccggaatt

SEQ ID NO: 66530 - DNA, 30 bp, Artificial Sequence
  Synthetic oligonucleotide
gagcccagatggatgtgagcggagggaatt

SEQ ID NO: 66531 - DNA, 30 bp, Artificial Sequence
  Synthetic oligonucleotide
acggcatccggggcggagagggaaataatt

SEQ ID NO: 66532 - DNA, 30 bp, Artificial Sequence
  Synthetic oligonucleotide
cgccccaatgagcccaaacaagtgataatt

SEQ ID NO: 66533 - DNA, 30 bp, Artificial Sequence
  Synthetic oligonucleotide
atcgaatcgaaactagaagcaagcctaatt

SEQ ID NO: 66534 - DNA, 30 bp, Artificial Sequence
  Synthetic oligonucleotide
cgtatctcaactacacacacagagctaatt

SEQ ID NO: 66535 - DNA, 30 bp, Artificial Sequence
  Synthetic oligonucleotide
cgataaaaaagtgatgtgagaaaagacatt

SEQ ID NO: 66536 - DNA, 30 bp, Artificial Sequence
  Synthetic oligonucleotide
ttcggaacgactagcggcggcccgtacatt

SEQ ID NO: 66537 - DNA, 30 bp, Artificial Sequence
  Synthetic oligonucleotide
tgccagccagatgaacggctatacaccatt

SEQ ID NO: 66538 - DNA, 30 bp, Artificial Sequence
  Synthetic oligonucleotide
acgcaacgagcgaagaaatcaaggaccatt

SEQ ID NO: 66539 - DNA, 30 bp, Artificial Sequence
  Synthetic oligonucleotide
aagagcacgtggaggatgtgtaggaccatt

SEQ ID NO: 66540 - DNA, 30 bp, Artificial Sequence
  Synthetic oligonucleotide
tcaagcgaatacttcagggaaagagccatt

SEQ ID NO: 66541 - DNA, 30 bp, Artificial Sequence
  Synthetic oligonucleotide
ggcacgtgtgaaatatgggagaacgccatt

SEQ ID NO: 66542 - DNA, 30 bp, Artificial Sequence
  Synthetic oligonucleotide
ggacaggcttccgtgtaattcattagcatt

SEQ ID NO: 66543 - DNA, 30 bp, Artificial Sequence
  Synthetic oligonucleotide
agatataacgagatttcatgggacggcatt

SEQ ID NO: 66544 - DNA, 30 bp, Artificial Sequence
  Synthetic oligonucleotide
aggccaatggaaacactgtgtagactcatt

SEQ ID NO: 66545 - DNA, 30 bp, Artificial Sequence
  Synthetic oligonucleotide
cgtgcatgtcaccaagggatctggcagatt

SEQ ID NO: 66546 - DNA, 30 bp, Artificial Sequence
  Synthetic oligonucleotide
aggtgcaactggcgaaaagctaccgagatt

SEQ ID NO: 66547 - DNA, 30 bp, Artificial Sequence
  Synthetic oligonucleotide
cacttaaggcagaaattgcataagccgatt

SEQ ID NO: 66548 - DNA, 30 bp, Artificial Sequence
  Synthetic oligonucleotide
cacttgataaactgtcagacgatgccgatt

SEQ ID NO: 66549 - DNA, 30 bp, Artificial Sequence
  Synthetic oligonucleotide
gggggataatagaactatctcagagcgatt

SEQ ID NO: 66550 - DNA, 30 bp, Artificial Sequence
  Synthetic oligonucleotide
ctgtcacgggattaaggacggccatcgatt

SEQ ID NO: 66551 - DNA, 30 bp, Artificial Sequence
  Synthetic oligonucleotide
gtgacagtgggtaagatcggtagcaggatt

SEQ ID NO: 66552 - DNA, 30 bp, Artificial Sequence
  Synthetic oligonucleotide
tgtaaacgttgctcaagctgcatacggatt

SEQ ID NO: 66553 - DNA, 30 bp, Artificial Sequence
  Synthetic oligonucleotide
agcctagagaattagatcggcgaagggatt

SEQ ID NO: 66554 - DNA, 30 bp, Artificial Sequence
  Synthetic oligonucleotide
cgggcagtgcgatctaggagcaaggggatt

SEQ ID NO: 66555 - DNA, 30 bp, Artificial Sequence
  Synthetic oligonucleotide
gggacgcgcaagtaggaaagttactggatt

SEQ ID NO: 66556 - DNA, 30 bp, Artificial Sequence
  Synthetic oligonucleotide
gtgagggtctacagaagtgacggggtgatt

SEQ ID NO: 66557 - DNA, 30 bp, Artificial Sequence
  Synthetic oligonucleotide
cggcaagggcgacccccattttcgttgatt

SEQ ID NO: 66558 - DNA, 30 bp, Artificial Sequence
  Synthetic oligonucleotide
catggcggtacacgggacattttagatatt

SEQ ID NO: 66559 - DNA, 30 bp, Artificial Sequence
  Synthetic oligonucleotide
tccagagctgatgtgcgaagacagtatatt

SEQ ID NO: 66560 - DNA, 30 bp, Artificial Sequence
  Synthetic oligonucleotide
atcgttgcgatgaggaccgggccccctatt

SEQ ID NO: 66561 - DNA, 30 bp, Artificial Sequence
  Synthetic oligonucleotide
ttagggcacatagaagccaatcgtcctatt

SEQ ID NO: 66562 - DNA, 30 bp, Artificial Sequence
  Synthetic oligonucleotide
aggtgttaaaatctctcattcactgctatt

SEQ ID NO: 66563 - DNA, 30 bp, Artificial Sequence
  Synthetic oligonucleotide
catgacgtactaggcacagatcatagtatt

SEQ ID NO: 66564 - DNA, 30 bp, Artificial Sequence
  Synthetic oligonucleotide
cgagagggagaatgactgcgggatcgtatt

SEQ ID NO: 66565 - DNA, 30 bp, Artificial Sequence
  Synthetic oligonucleotide
ctgcaattaataggcatgagtaacggtatt

SEQ ID NO: 66566 - DNA, 31 bp, Artificial Sequence
  Synthetic oligonucleotide
ccgaaaagaatctatgccagtggtgattatt

SEQ ID NO: 66567 - DNA, 30 bp, Artificial Sequence
  Synthetic oligonucleotide
ttggagaacaggtgtagcgggacacttatt

SEQ ID NO: 66568 - DNA, 30 bp, Artificial Sequence
  Synthetic oligonucleotide
gtacaccaccatatcagctgcacatttatt

SEQ ID NO: 66569 - DNA, 30 bp, Artificial Sequence
  Synthetic oligonucleotide
ggtaagtataggccgggacattactttatt

SEQ ID NO: 66570 - DNA, 30 bp, Artificial Sequence
  Synthetic oligonucleotide
acggacaactgcgaggaatattccgaactt

SEQ ID NO: 66571 - DNA, 30 bp, Artificial Sequence
  Synthetic oligonucleotide
accctaaaggcggtaatgcgagggccactt

SEQ ID NO: 66572 - DNA, 30 bp, Artificial Sequence
  Synthetic oligonucleotide
gcatactaacaaacagtagccgatagactt

SEQ ID NO: 66573 - DNA, 30 bp, Artificial Sequence
  Synthetic oligonucleotide
atgcgccaattgaggagatactcgtgactt

SEQ ID NO: 66574 - DNA, 30 bp, Artificial Sequence
  Synthetic oligonucleotide
gtaaggacgcccatgagacgagagatactt

SEQ ID NO: 66575 - DNA, 30 bp, Artificial Sequence
  Synthetic oligonucleotide
ccaataaaacagttgttaagcaaactactt

SEQ ID NO: 66576 - DNA, 30 bp, Artificial Sequence
  Synthetic oligonucleotide
tcggatgctgtgaagggacgggccctactt

SEQ ID NO: 66577 - DNA, 30 bp, Artificial Sequence
  Synthetic oligonucleotide
ccagggatgaaggaccgtttggcgctactt

SEQ ID NO: 66578 - DNA, 30 bp, Artificial Sequence
  Synthetic oligonucleotide
gcctgaagaagagttaaggcgctgaacctt

SEQ ID NO: 66579 - DNA, 30 bp, Artificial Sequence
  Synthetic oligonucleotide
gcagggccgtgccggcgaaagagtaacctt

SEQ ID NO: 66580 - DNA, 30 bp, Artificial Sequence
  Synthetic oligonucleotide
agatgtcatgagcaggagtccgcatacctt

SEQ ID NO: 66581 - DNA, 30 bp, Artificial Sequence
  Synthetic oligonucleotide
gccgaacagtaagtatagagatccaccctt

SEQ ID NO: 66582 - DNA, 30 bp, Artificial Sequence
  Synthetic oligonucleotide
agacgcttgtcgccgactacgatgatcctt

SEQ ID NO: 66583 - DNA, 30 bp, Artificial Sequence
  Synthetic oligonucleotide
caacgtcctatcaatgctactttactcctt

SEQ ID NO: 66584 - DNA, 30 bp, Artificial Sequence
  Synthetic oligonucleotide
cgtcatcgacattaagataagcggttcctt

SEQ ID NO: 66585 - DNA, 30 bp, Artificial Sequence
  Synthetic oligonucleotide
agtcggtaataaagacctatatcagagctt

SEQ ID NO: 66586 - DNA, 30 bp, Artificial Sequence
  Synthetic oligonucleotide
cctgatagagggcctctaaggagtgagctt

SEQ ID NO: 66587 - DNA, 30 bp, Artificial Sequence
  Synthetic oligonucleotide
cgtcagctggacattaatttgtagtagctt

SEQ ID NO: 66588 - DNA, 30 bp, Artificial Sequence
  Synthetic oligonucleotide
tatcaagtgtagacggctgtcgggtagctt

SEQ ID NO: 66589 - DNA, 30 bp, Artificial Sequence
  Synthetic oligonucleotide
aggcaggctggcttcaatgagatttagctt

SEQ ID NO: 66590 - DNA, 30 bp, Artificial Sequence
  Synthetic oligonucleotide
cggtcacctcccaagaacagtttcaggctt

SEQ ID NO: 66591 - DNA, 30 bp, Artificial Sequence
  Synthetic oligonucleotide
tacctgaaactgaaagtggctgcacggctt

SEQ ID NO: 66592 - DNA, 30 bp, Artificial Sequence
  Synthetic oligonucleotide
gtccaggcaagtagaggagtaggagggctt

SEQ ID NO: 66593 - DNA, 30 bp, Artificial Sequence
  Synthetic oligonucleotide
atagacaccggccatcttaggggcatgctt

SEQ ID NO: 66594 - DNA, 30 bp, Artificial Sequence
  Synthetic oligonucleotide
ataggcgacatcaagggttagagcctgctt

SEQ ID NO: 66595 - DNA, 30 bp, Artificial Sequence
  Synthetic oligonucleotide
gtacaagggcacccaaaatgcgacgtgctt

SEQ ID NO: 66596 - DNA, 30 bp, Artificial Sequence
  Synthetic oligonucleotide
acgcgttccatgtgagggcatcctgtgctt

SEQ ID NO: 66597 - DNA, 30 bp, Artificial Sequence
  Synthetic oligonucleotide
ccaaactacgggactgatgatgggaatctt

SEQ ID NO: 66598 - DNA, 30 bp, Artificial Sequence
  Synthetic oligonucleotide
cgacacggaagttatatcgagggatatctt

SEQ ID NO: 66599 - DNA, 30 bp, Artificial Sequence
  Synthetic oligonucleotide
ggactggcggtgtggtaatagcgtgctctt

SEQ ID NO: 66600 - DNA, 30 bp, Artificial Sequence
  Synthetic oligonucleotide
cgggggttgaatctacatcgtgacaaagtt

SEQ ID NO: 66601 - DNA, 30 bp, Artificial Sequence
  Synthetic oligonucleotide
tgtcacatcgaggtggccgcactgaaagtt

SEQ ID NO: 66602 - DNA, 30 bp, Artificial Sequence
  Synthetic oligonucleotide
tcactaccgtgtatgaggacgatataagtt

SEQ ID NO: 66603 - DNA, 30 bp, Artificial Sequence
  Synthetic oligonucleotide
aggttccacggacttcagcgtgctagagtt

SEQ ID NO: 66604 - DNA, 30 bp, Artificial Sequence
  Synthetic oligonucleotide
atgccaaggctgtgggcttagattcgagtt

SEQ ID NO: 66605 - DNA, 30 bp, Artificial Sequence
  Synthetic oligonucleotide
aggcatcacggtctgggaacacgcggagtt

SEQ ID NO: 66606 - DNA, 30 bp, Artificial Sequence
  Synthetic oligonucleotide
tggaagaatgctgttcgggattatggagtt

SEQ ID NO: 66607 - DNA, 30 bp, Artificial Sequence
  Synthetic oligonucleotide
ggaggaaaatggcagttggaggagtgagtt

SEQ ID NO: 66608 - DNA, 30 bp, Artificial Sequence
  Synthetic oligonucleotide
ggcgagtcgcgcgctgaagtgcgggtagtt

SEQ ID NO: 66609 - DNA, 30 bp, Artificial Sequence
  Synthetic oligonucleotide
agggagctgaggtttttagacaccttagtt

SEQ ID NO: 66610 - DNA, 30 bp, Artificial Sequence
  Synthetic oligonucleotide
cggcgagccggcattgtaaaggaacacgtt

SEQ ID NO: 66611 - DNA, 30 bp, Artificial Sequence
  Synthetic oligonucleotide
tcgggctagtagagaccagtcatagacgtt

SEQ ID NO: 66612 - DNA, 30 bp, Artificial Sequence
  Synthetic oligonucleotide
cctagacataacggtgaggatgtagacgtt

SEQ ID NO: 66613 - DNA, 30 bp, Artificial Sequence
  Synthetic oligonucleotide
gcgggaaagatctactacactgacgacgtt

SEQ ID NO: 66614 - DNA, 30 bp, Artificial Sequence
  Synthetic oligonucleotide
agccgttaatcgatgactactaaatacgtt

SEQ ID NO: 66615 - DNA, 30 bp, Artificial Sequence
  Synthetic oligonucleotide
tacgctgcgagggagtggtggcgggccgtt

SEQ ID NO: 66616 - DNA, 30 bp, Artificial Sequence
  Synthetic oligonucleotide
cgcgggactctaaactaacttccatccgtt

SEQ ID NO: 66617 - DNA, 30 bp, Artificial Sequence
  Synthetic oligonucleotide
atacattcaacacacgactaattcagcgtt

SEQ ID NO: 66618 - DNA, 30 bp, Artificial Sequence
  Synthetic oligonucleotide
gcctagttaatatagagggtgcggatcgtt

SEQ ID NO: 66619 - DNA, 30 bp, Artificial Sequence
  Synthetic oligonucleotide
gggcattatggatccgtcagaacactcgtt

SEQ ID NO: 66620 - DNA, 30 bp, Artificial Sequence
  Synthetic oligonucleotide
gtcttacaggcatagtgtacgctactcgtt

SEQ ID NO: 66621 - DNA, 30 bp, Artificial Sequence
  Synthetic oligonucleotide
cgtatggtctggcatataccaagcgtcgtt

SEQ ID NO: 66622 - DNA, 30 bp, Artificial Sequence
  Synthetic oligonucleotide
accacagagctcgcgatgcaggacaaggtt

SEQ ID NO: 66623 - DNA, 30 bp, Artificial Sequence
  Synthetic oligonucleotide
cgcgtgacacacatcggaggcgagaaggtt

SEQ ID NO: 66624 - DNA, 30 bp, Artificial Sequence
  Synthetic oligonucleotide
gccaggcgcaggaggatcgtatgagaggtt

SEQ ID NO: 66625 - DNA, 30 bp, Artificial Sequence
  Synthetic oligonucleotide
ggtggaaaaccaatgatatttgaggaggtt

SEQ ID NO: 66626 - DNA, 30 bp, Artificial Sequence
  Synthetic oligonucleotide
acagcgtccgtattcgggaaagactaggtt

SEQ ID NO: 66627 - DNA, 30 bp, Artificial Sequence
  Synthetic oligonucleotide
ccaaggcagaatcggagcctacagacggtt

SEQ ID NO: 66628 - DNA, 30 bp, Artificial Sequence
  Synthetic oligonucleotide
tacaagtggacaagtgcgagataaagggtt

SEQ ID NO: 66629 - DNA, 30 bp, Artificial Sequence
  Synthetic oligonucleotide
agcgtgatcagcattctgccggaaggggtt

SEQ ID NO: 66630 - DNA, 30 bp, Artificial Sequence
  Synthetic oligonucleotide
gggattccataaccacgaccagagctggtt

SEQ ID NO: 66631 - DNA, 30 bp, Artificial Sequence
  Synthetic oligonucleotide
gggggaaaccggaagtaaactaccaatgtt

SEQ ID NO: 66632 - DNA, 30 bp, Artificial Sequence
  Synthetic oligonucleotide
cggtctgtcatgtcttagagagtgaatgtt

SEQ ID NO: 66633 - DNA, 30 bp, Artificial Sequence
  Synthetic oligonucleotide
agcggggttaggagtcgaatagtacatgtt

SEQ ID NO: 66634 - DNA, 30 bp, Artificial Sequence
  Synthetic oligonucleotide
ggtgaggtataccggaaccactgtcatgtt

SEQ ID NO: 66635 - DNA, 30 bp, Artificial Sequence
  Synthetic oligonucleotide
aagaaacaggattgggtactgaggactgtt

SEQ ID NO: 66636 - DNA, 30 bp, Artificial Sequence
  Synthetic oligonucleotide
gtcgaagacgattggccgaaaaaccctgtt

SEQ ID NO: 66637 - DNA, 30 bp, Artificial Sequence
  Synthetic oligonucleotide
ccaagagcgcaaccataaaagtgccctgtt

SEQ ID NO: 66638 - DNA, 30 bp, Artificial Sequence
  Synthetic oligonucleotide
atgccaggtaagtagattagtaagagtgtt

SEQ ID NO: 66639 - DNA, 30 bp, Artificial Sequence
  Synthetic oligonucleotide
tccagtaaaataggaaacgtcaggggtgtt

SEQ ID NO: 66640 - DNA, 30 bp, Artificial Sequence
  Synthetic oligonucleotide
acgtaatagggttagctagtactaattgtt

SEQ ID NO: 66641 - DNA, 30 bp, Artificial Sequence
  Synthetic oligonucleotide
acgaggaagcgtggggtcttaatggttgtt

SEQ ID NO: 66642 - DNA, 30 bp, Artificial Sequence
  Synthetic oligonucleotide
aaactcgccgggggtgacaatgaggaattt

SEQ ID NO: 66643 - DNA, 30 bp, Artificial Sequence
  Synthetic oligonucleotide
ctacgtgtagagggtgacaataacacattt

SEQ ID NO: 66644 - DNA, 30 bp, Artificial Sequence
  Synthetic oligonucleotide
aaagcaacacgactgcgtggacccacattt

SEQ ID NO: 66645 - DNA, 30 bp, Artificial Sequence
  Synthetic oligonucleotide
ggagaattaataacaaactccggtccattt

SEQ ID NO: 66646 - DNA, 30 bp, Artificial Sequence
  Synthetic oligonucleotide
acgctatactgactgatgttcctacgattt

SEQ ID NO: 66647 - DNA, 30 bp, Artificial Sequence
  Synthetic oligonucleotide
ctgcggtcatagaaagaacatgagtgattt

SEQ ID NO: 66648 - DNA, 30 bp, Artificial Sequence
  Synthetic oligonucleotide
agatcatcgaacatgaaaatcacagtattt

SEQ ID NO: 66649 - DNA, 30 bp, Artificial Sequence
  Synthetic oligonucleotide
cgagtatcgctctggaaacttaggaacttt

SEQ ID NO: 66650 - DNA, 30 bp, Artificial Sequence
  Synthetic oligonucleotide
cgaatccgatcgggattaacgtattacttt

SEQ ID NO: 66651 - DNA, 30 bp, Artificial Sequence
  Synthetic oligonucleotide
aggagagaggcatgggggggagagcccttt

SEQ ID NO: 66652 - DNA, 30 bp, Artificial Sequence
  Synthetic oligonucleotide
cgcttgagaagattacgtgactcaggcttt

SEQ ID NO: 66653 - DNA, 30 bp, Artificial Sequence
  Synthetic oligonucleotide
cggcattcagtgatagagtcggcagtcttt

SEQ ID NO: 66654 - DNA, 30 bp, Artificial Sequence
  Synthetic oligonucleotide
taataagcaattcaatcgcgaggacagttt

SEQ ID NO: 66655 - DNA, 30 bp, Artificial Sequence
  Synthetic oligonucleotide
ggcaccaatgatgagtgtatgtggcggttt

SEQ ID NO: 66656 - DNA, 30 bp, Artificial Sequence
  Synthetic oligonucleotide
cttgtgaggatacccgataaagagtggttt

SEQ ID NO: 66657 - DNA, 30 bp, Artificial Sequence
  Synthetic oligonucleotide
gcgtcttcaagtaaggtacagcgagtgttt

SEQ ID NO: 66658 - DNA, 30 bp, Artificial Sequence
  Synthetic oligonucleotide
cgcattgtggggactacagacggacatttt

SEQ ID NO: 66659 - DNA, 30 bp, Artificial Sequence
  Synthetic oligonucleotide
ccaagggggtgtcggttagggcaatgtttt

SEQ ID NO: 66660 - DNA, 30 bp, Artificial Sequence
  Synthetic oligonucleotide
aaaccaaacataaagcctgatccctgtttt

SEQ ID NO: 66661 - DNA, 30 bp, Artificial Sequence
  Synthetic oligonucleotide
tgaggatctatcacgcatcgaactaaaaaa

SEQ ID NO: 66662 - DNA, 30 bp, Artificial Sequence
  Synthetic oligonucleotide
atagtgagacacgtcaaggatcgacaaaaa

SEQ ID NO: 66663 - DNA, 30 bp, Artificial Sequence
  Synthetic oligonucleotide
tctcatagaacgatacagacacgccaaaaa

SEQ ID NO: 66664 - DNA, 30 bp, Artificial Sequence
  Synthetic oligonucleotide
gactagcgcctgccttatgcgtgggaaaaa

SEQ ID NO: 66665 - DNA, 30 bp, Artificial Sequence
  Synthetic oligonucleotide
ctggtagattgactccctgggcgtgaaaaa

SEQ ID NO: 66666 - DNA, 30 bp, Artificial Sequence
  Synthetic oligonucleotide
accctggtgaggaagaaagatgagtaaaaa

SEQ ID NO: 66667 - DNA, 30 bp, Artificial Sequence
  Synthetic oligonucleotide
ggaacaatcagaaggctagggacagcaaaa

SEQ ID NO: 66668 - DNA, 30 bp, Artificial Sequence
  Synthetic oligonucleotide
atgcagggaacagagcacggatatgcaaaa

SEQ ID NO: 66669 - DNA, 30 bp, Artificial Sequence
  Synthetic oligonucleotide
cggagagaatacgtgacgacatcatcaaaa

SEQ ID NO: 66670 - DNA, 30 bp, Artificial Sequence
  Synthetic oligonucleotide
cgcccctgggcatgcaaaaatgcgtcaaaa

SEQ ID NO: 66671 - DNA, 30 bp, Artificial Sequence
  Synthetic oligonucleotide
caccgaagacattagtctaccgaaagaaaa

SEQ ID NO: 66672 - DNA, 30 bp, Artificial Sequence
  Synthetic oligonucleotide
cgagtgttgagatgaacacctcggagaaaa

SEQ ID NO: 66673 - DNA, 30 bp, Artificial Sequence
  Synthetic oligonucleotide
gcgttacagagcgacagagatgggagaaaa

SEQ ID NO: 66674 - DNA, 30 bp, Artificial Sequence
  Synthetic oligonucleotide
taatgagggggacgagttatgccaggaaaa

SEQ ID NO: 66675 - DNA, 30 bp, Artificial Sequence
  Synthetic oligonucleotide
ccgtacttgcacgataggtaacacggaaaa

SEQ ID NO: 66676 - DNA, 30 bp, Artificial Sequence
  Synthetic oligonucleotide
tcactgggaaaaacgagtagcaccggaaaa

SEQ ID NO: 66677 - DNA, 30 bp, Artificial Sequence
  Synthetic oligonucleotide
gcgtgtagacagtagaaattagtcggaaaa

SEQ ID NO: 66678 - DNA, 30 bp, Artificial Sequence
  Synthetic oligonucleotide
tcggtacaatagggtgtgaattcgggaaaa

SEQ ID NO: 66679 - DNA, 30 bp, Artificial Sequence
  Synthetic oligonucleotide
cggggatactggaagttgaaactgggaaaa

SEQ ID NO: 66680 - DNA, 30 bp, Artificial Sequence
  Synthetic oligonucleotide
aaccacacctctagatcgggacgatgaaaa

SEQ ID NO: 66681 - DNA, 30 bp, Artificial Sequence
  Synthetic oligonucleotide
cggaggaaatgagcaagccatgtaataaaa

SEQ ID NO: 66682 - DNA, 30 bp, Artificial Sequence
  Synthetic oligonucleotide
ctgacatgacacattaagacatgcataaaa

SEQ ID NO: 66683 - DNA, 30 bp, Artificial Sequence
  Synthetic oligonucleotide
accgtcagatcatctagatcggggataaaa

SEQ ID NO: 66684 - DNA, 30 bp, Artificial Sequence
  Synthetic oligonucleotide
ggatcgaaaatacatcgtgctaatctaaaa

SEQ ID NO: 66685 - DNA, 30 bp, Artificial Sequence
  Synthetic oligonucleotide
tacggcaggacacgccattgttacgtaaaa

SEQ ID NO: 66686 - DNA, 30 bp, Artificial Sequence
  Synthetic oligonucleotide
cagtgactactaggcgatgttagtgtaaaa

SEQ ID NO: 66687 - DNA, 30 bp, Artificial Sequence
  Synthetic oligonucleotide
caccgaatcaggcatgtatcgaagttaaaa

SEQ ID NO: 66688 - DNA, 30 bp, Artificial Sequence
  Synthetic oligonucleotide
gtacggacacgcgagagttcgtaccacaaa

SEQ ID NO: 66689 - DNA, 30 bp, Artificial Sequence
  Synthetic oligonucleotide
tggaggtcacgagttgccgactgcgacaaa

SEQ ID NO: 66690 - DNA, 30 bp, Artificial Sequence
  Synthetic oligonucleotide
ggtagcagctaattcgattaaagggacaaa

SEQ ID NO: 66691 - DNA, 30 bp, Artificial Sequence
  Synthetic oligonucleotide
acggaaaaagcggtccgcatgggggacaaa

SEQ ID NO: 66692 - DNA, 30 bp, Artificial Sequence
  Synthetic oligonucleotide
cagaaagtcagccctacatgcctggacaaa

SEQ ID NO: 66693 - DNA, 30 bp, Artificial Sequence
  Synthetic oligonucleotide
tacagggagtggtaagatcattcgtacaaa

SEQ ID NO: 66694 - DNA, 30 bp, Artificial Sequence
  Synthetic oligonucleotide
gatatgcgaagagcatgaaaattgtacaaa

SEQ ID NO: 66695 - DNA, 30 bp, Artificial Sequence
  Synthetic oligonucleotide
gcttaactgccgataccattagccaccaaa

SEQ ID NO: 66696 - DNA, 30 bp, Artificial Sequence
  Synthetic oligonucleotide
tgctcggcaacgaagataccagataccaaa

SEQ ID NO: 66697 - DNA, 30 bp, Artificial Sequence
  Synthetic oligonucleotide
acagggggcggattacatgttagacccaaa

SEQ ID NO: 66698 - DNA, 30 bp, Artificial Sequence
  Synthetic oligonucleotide
ttacgggttcggatagcagcgcaaagcaaa

SEQ ID NO: 66699 - DNA, 30 bp, Artificial Sequence
  Synthetic oligonucleotide
acccgagtgtggagagtgtcgcgaagcaaa

SEQ ID NO: 66700 - DNA, 30 bp, Artificial Sequence
  Synthetic oligonucleotide
gccgaaaaagcaaactgcttctttagcaaa

SEQ ID NO: 66701 - DNA, 30 bp, Artificial Sequence
  Synthetic oligonucleotide
cgcaaaccagaagtgaaataaacaggcaaa

SEQ ID NO: 66702 - DNA, 30 bp, Artificial Sequence
  Synthetic oligonucleotide
cggctgaaggagatgtggatcgcaggcaaa

SEQ ID NO: 66703 - DNA, 30 bp, Artificial Sequence
  Synthetic oligonucleotide
attcgaaataaaaaattcctgtgcggcaaa

SEQ ID NO: 66704 - DNA, 30 bp, Artificial Sequence
  Synthetic oligonucleotide
ttacaaccaaagatagggatcttctgcaaa

SEQ ID NO: 66705 - DNA, 30 bp, Artificial Sequence
  Synthetic oligonucleotide
aggaccatctgacggaagaatgggtgcaaa

SEQ ID NO: 66706 - DNA, 30 bp, Artificial Sequence
  Synthetic oligonucleotide
gataagagataccaacagcgctcttgcaaa

SEQ ID NO: 66707 - DNA, 30 bp, Artificial Sequence
  Synthetic oligonucleotide
acagcgatttacagcctggggaatatcaaa

SEQ ID NO: 66708 - DNA, 30 bp, Artificial Sequence
  Synthetic oligonucleotide
agctacgtgaggaacggggtgaatatcaaa

SEQ ID NO: 66709 - DNA, 30 bp, Artificial Sequence
  Synthetic oligonucleotide
tgagggggtccaaagggcattatactcaaa

SEQ ID NO: 66710 - DNA, 30 bp, Artificial Sequence
  Synthetic oligonucleotide
tgaataacggatgacataacgtacctcaaa

SEQ ID NO: 66711 - DNA, 30 bp, Artificial Sequence
  Synthetic oligonucleotide
cacattgcctcagacttaatctagctcaaa

SEQ ID NO: 66712 - DNA, 30 bp, Artificial Sequence
  Synthetic oligonucleotide
tccggatgaccaatctattacagagtcaaa

SEQ ID NO: 66713 - DNA, 30 bp, Artificial Sequence
  Synthetic oligonucleotide
taggaactggtaaattcgggaaggttcaaa

SEQ ID NO: 66714 - DNA, 30 bp, Artificial Sequence
  Synthetic oligonucleotide
agcaacggctaaggcgtggagtatttcaaa

SEQ ID NO: 66715 - DNA, 30 bp, Artificial Sequence
  Synthetic oligonucleotide
acacccattgcccagagcataacgaagaaa

SEQ ID NO: 66716 - DNA, 30 bp, Artificial Sequence
  Synthetic oligonucleotide
gcaaaacgttacagaaacggcgaagagaaa

SEQ ID NO: 66717 - DNA, 30 bp, Artificial Sequence
  Synthetic oligonucleotide
aggctctgcgcgtaaaggtattaagagaaa

SEQ ID NO: 66718 - DNA, 30 bp, Artificial Sequence
  Synthetic oligonucleotide
aattatcctcacgaaggtggagcagagaaa

SEQ ID NO: 66719 - DNA, 30 bp, Artificial Sequence
  Synthetic oligonucleotide
tagagaatgcaccattagaagccggagaaa

SEQ ID NO: 66720 - DNA, 30 bp, Artificial Sequence
  Synthetic oligonucleotide
caagaagcgtgacctcacagtgtggagaaa

SEQ ID NO: 66721 - DNA, 30 bp, Artificial Sequence
  Synthetic oligonucleotide
gcgcatatctaggataacgatgagacgaaa

SEQ ID NO: 66722 - DNA, 30 bp, Artificial Sequence
  Synthetic oligonucleotide
tgcctcattccaaagagttatgctacgaaa

SEQ ID NO: 66723 - DNA, 30 bp, Artificial Sequence
  Synthetic oligonucleotide
cgaattggcaaggagctttgcggaccgaaa

SEQ ID NO: 66724 - DNA, 30 bp, Artificial Sequence
  Synthetic oligonucleotide
aggagccggaggctgtggatcgagccgaaa

SEQ ID NO: 66725 - DNA, 30 bp, Artificial Sequence
  Synthetic oligonucleotide
ctcgggaaaacttaactcaataatccgaaa

SEQ ID NO: 66726 - DNA, 30 bp, Artificial Sequence
  Synthetic oligonucleotide
aaatcacggccactctaagtgtaagcgaaa

SEQ ID NO: 66727 - DNA, 30 bp, Artificial Sequence
  Synthetic oligonucleotide
gtcgaaagggctactccacgaatctcgaaa

SEQ ID NO: 66728 - DNA, 30 bp, Artificial Sequence
  Synthetic oligonucleotide
cggttcgtacaggactggcaagtgtcgaaa

SEQ ID NO: 66729 - DNA, 30 bp, Artificial Sequence
  Synthetic oligonucleotide
tgggcataggaggcagggctagtttcgaaa

SEQ ID NO: 66730 - DNA, 30 bp, Artificial Sequence
  Synthetic oligonucleotide
acatgtagcttgagtgcgctggataggaaa

SEQ ID NO: 66731 - DNA, 30 bp, Artificial Sequence
  Synthetic oligonucleotide
tgacctccaaatctcaggcaaaaacggaaa

SEQ ID NO: 66732 - DNA, 30 bp, Artificial Sequence
  Synthetic oligonucleotide
ccctaagccaattggtgtgcgctacggaaa

SEQ ID NO: 66733 - DNA, 30 bp, Artificial Sequence
  Synthetic oligonucleotide
aacagtgcaatgtaggacatccatcggaaa

SEQ ID NO: 66734 - DNA, 30 bp, Artificial Sequence
  Synthetic oligonucleotide
cgaggagttcagctctagagtggagggaaa

SEQ ID NO: 66735 - DNA, 30 bp, Artificial Sequence
  Synthetic oligonucleotide
gaggggctggagtacttaaaaaacgggaaa

SEQ ID NO: 66736 - DNA, 30 bp, Artificial Sequence
  Synthetic oligonucleotide
cggacaggtgggtgcagtgttccggggaaa

SEQ ID NO: 66737 - DNA, 30 bp, Artificial Sequence
  Synthetic oligonucleotide
tcacatgcgactcgggtacattatgggaaa

SEQ ID NO: 66738 - DNA, 30 bp, Artificial Sequence
  Synthetic oligonucleotide
gaaatgtggccgataaagagtccatggaaa

SEQ ID NO: 66739 - DNA, 30 bp, Artificial Sequence
  Synthetic oligonucleotide
tcaattaacgggcatgggaaggcgtggaaa

SEQ ID NO: 66740 - DNA, 30 bp, Artificial Sequence
  Synthetic oligonucleotide
ggtcgtgcagtttgaacagcggcgtggaaa

SEQ ID NO: 66741 - DNA, 30 bp, Artificial Sequence
  Synthetic oligonucleotide
caaataaaatcaatatcgggaagcatgaaa

SEQ ID NO: 66742 - DNA, 30 bp, Artificial Sequence
  Synthetic oligonucleotide
cttcagggcatgaataaagcgagcatgaaa

SEQ ID NO: 66743 - DNA, 30 bp, Artificial Sequence
  Synthetic oligonucleotide
tatagggaacaacggtcgtgtcctatgaaa

SEQ ID NO: 66744 - DNA, 30 bp, Artificial Sequence
  Synthetic oligonucleotide
ctagtacggttaagagcgcgatttatgaaa

SEQ ID NO: 66745 - DNA, 30 bp, Artificial Sequence
  Synthetic oligonucleotide
cgaatcaatatctgaagagcacaagtgaaa

SEQ ID NO: 66746 - DNA, 30 bp, Artificial Sequence
  Synthetic oligonucleotide
gtaaggcacttcaaaacggtcctagtgaaa

SEQ ID NO: 66747 - DNA, 30 bp, Artificial Sequence
  Synthetic oligonucleotide
caccgttcgcgagacgacaaattagtgaaa

SEQ ID NO: 66748 - DNA, 30 bp, Artificial Sequence
  Synthetic oligonucleotide
ccgggtaagtatagtcagcagcgcgtgaaa

SEQ ID NO: 66749 - DNA, 30 bp, Artificial Sequence
  Synthetic oligonucleotide
gtataacagggcgggtaagggagcttgaaa

SEQ ID NO: 66750 - DNA, 30 bp, Artificial Sequence
  Synthetic oligonucleotide
atggaactgtacaggatatgggggaataaa

SEQ ID NO: 66751 - DNA, 30 bp, Artificial Sequence
  Synthetic oligonucleotide
agaggttagtatcattcacaaatgaataaa

SEQ ID NO: 66752 - DNA, 30 bp, Artificial Sequence
  Synthetic oligonucleotide
atacgacacggggatcgaatggtacataaa

SEQ ID NO: 66753 - DNA, 30 bp, Artificial Sequence
  Synthetic oligonucleotide
tagggagcgcctaactccttccaccataaa

SEQ ID NO: 66754 - DNA, 30 bp, Artificial Sequence
  Synthetic oligonucleotide
aaaggggccaacttctcgtagctgcataaa

SEQ ID NO: 66755 - DNA, 30 bp, Artificial Sequence
  Synthetic oligonucleotide
tcaggcccgtatagtagagtaggagataaa

SEQ ID NO: 66756 - DNA, 30 bp, Artificial Sequence
  Synthetic oligonucleotide
gtgagtgattagacagaacacactgataaa

SEQ ID NO: 66757 - DNA, 30 bp, Artificial Sequence
  Synthetic oligonucleotide
gaccatgcttcaacgtagggtcactataaa

SEQ ID NO: 66758 - DNA, 30 bp, Artificial Sequence
  Synthetic oligonucleotide
tgcagggtgccaagttcaggaatctataaa

SEQ ID NO: 66759 - DNA, 30 bp, Artificial Sequence
  Synthetic oligonucleotide
agagttacgcctcaaactaagcattataaa

SEQ ID NO: 66760 - DNA, 30 bp, Artificial Sequence
  Synthetic oligonucleotide
cacatcggactcgtaacgaggtgttataaa

SEQ ID NO: 66761 - DNA, 30 bp, Artificial Sequence
  Synthetic oligonucleotide
tactcaagtcccgtcaagcgcccaactaaa

SEQ ID NO: 66762 - DNA, 30 bp, Artificial Sequence
  Synthetic oligonucleotide
aactaggtggaaacaaggaccctgactaaa

SEQ ID NO: 66763 - DNA, 30 bp, Artificial Sequence
  Synthetic oligonucleotide
tcaccaacgtattcaatacattaagctaaa

SEQ ID NO: 66764 - DNA, 30 bp, Artificial Sequence
  Synthetic oligonucleotide
cgatcggaaggtagcacgcgatgcgctaaa

SEQ ID NO: 66765 - DNA, 30 bp, Artificial Sequence
  Synthetic oligonucleotide
ctgggattagagtaaggccaagatgctaaa

SEQ ID NO: 66766 - DNA, 30 bp, Artificial Sequence
  Synthetic oligonucleotide
aatggcgaaggaaaaatatatagctctaaa

SEQ ID NO: 66767 - DNA, 30 bp, Artificial Sequence
  Synthetic oligonucleotide
ctgcgtgagacgtgaaaccaggggtctaaa

SEQ ID NO: 66768 - DNA, 30 bp, Artificial Sequence
  Synthetic oligonucleotide
gataccaggggacgcgagagtacacgtaaa

SEQ ID NO: 66769 - DNA, 31 bp, Artificial Sequence
  Synthetic oligonucleotide
gatctcaccaagcgttaaaaaagcacgtaaa

SEQ ID NO: 66770 - DNA, 30 bp, Artificial Sequence
  Synthetic oligonucleotide
cgaagaccgttttaactggtactacgtaaa

SEQ ID NO: 66771 - DNA, 30 bp, Artificial Sequence
  Synthetic oligonucleotide
cagggggatcaaactggacggccgcgtaaa

SEQ ID NO: 66772 - DNA, 30 bp, Artificial Sequence
  Synthetic oligonucleotide
tggtataagccactggccagaagtggtaaa

SEQ ID NO: 66773 - DNA, 30 bp, Artificial Sequence
  Synthetic oligonucleotide
aaagtcatatagaggggcgagagtattaaa

SEQ ID NO: 66774 - DNA, 30 bp, Artificial Sequence
  Synthetic oligonucleotide
tgaacctgtggtacgaaccgctgtaaacaa

SEQ ID NO: 66775 - DNA, 30 bp, Artificial Sequence
  Synthetic oligonucleotide
acagtctcacgtacagctcgtacacaacaa

SEQ ID NO: 66776 - DNA, 30 bp, Artificial Sequence
  Synthetic oligonucleotide
aggaagaaagacttttcgagttgacaacaa

SEQ ID NO: 66777 - DNA, 30 bp, Artificial Sequence
  Synthetic oligonucleotide
tgtggtcgtggaggtaaagggagccaacaa

SEQ ID NO: 66778 - DNA, 30 bp, Artificial Sequence
  Synthetic oligonucleotide
cacgcaagggagacaagtaaaatccaacaa

SEQ ID NO: 66779 - DNA, 30 bp, Artificial Sequence
  Synthetic oligonucleotide
caactaacggtattactcccaatccaacaa

SEQ ID NO: 66780 - DNA, 30 bp, Artificial Sequence
  Synthetic oligonucleotide
tatctgcctcgagaagcgaacgagcaacaa

SEQ ID NO: 66781 - DNA, 30 bp, Artificial Sequence
  Synthetic oligonucleotide
atggtgttgggtatggctgattggcaacaa

SEQ ID NO: 66782 - DNA, 30 bp, Artificial Sequence
  Synthetic oligonucleotide
agcatacaaaattgggacaatcctcaacaa

SEQ ID NO: 66783 - DNA, 30 bp, Artificial Sequence
  Synthetic oligonucleotide
aagtcggtatgatagtcatacgaagaacaa

SEQ ID NO: 66784 - DNA, 30 bp, Artificial Sequence
  Synthetic oligonucleotide
aaaacggacactcccagcgggggcgaacaa

SEQ ID NO: 66785 - DNA, 30 bp, Artificial Sequence
  Synthetic oligonucleotide
aacaacatggtaggtaatagaatggaacaa

SEQ ID NO: 66786 - DNA, 30 bp, Artificial Sequence
  Synthetic oligonucleotide
gttgggatctgggtatcacgattggaacaa

SEQ ID NO: 66787 - DNA, 30 bp, Artificial Sequence
  Synthetic oligonucleotide
ggctgtacattacaggcaatacgataacaa

SEQ ID NO: 66788 - DNA, 30 bp, Artificial Sequence
  Synthetic oligonucleotide
caaggggtaaccgctgacgagagctaacaa

SEQ ID NO: 66789 - DNA, 30 bp, Artificial Sequence
  Synthetic oligonucleotide
ctacggggacaaggccatgcattcccacaa

SEQ ID NO: 66790 - DNA, 30 bp, Artificial Sequence
  Synthetic oligonucleotide
tcccggtcacgggcgggtatatgcgcacaa

SEQ ID NO: 66791 - DNA, 30 bp, Artificial Sequence
  Synthetic oligonucleotide
ttttgagagaaataaaagcacagggcacaa

SEQ ID NO: 66792 - DNA, 30 bp, Artificial Sequence
  Synthetic oligonucleotide
gtagaggccggacccagacctgtatcacaa

SEQ ID NO: 66793 - DNA, 30 bp, Artificial Sequence
  Synthetic oligonucleotide
caatgacaaggcaagtgcccgaggtcacaa

SEQ ID NO: 66794 - DNA, 30 bp, Artificial Sequence
  Synthetic oligonucleotide
tgactggtcatccagactgaactgtcacaa

SEQ ID NO: 66795 - DNA, 30 bp, Artificial Sequence
  Synthetic oligonucleotide
gggtctgatacggcgatcagaagtagacaa

SEQ ID NO: 66796 - DNA, 30 bp, Artificial Sequence
  Synthetic oligonucleotide
agtaggatactgtagtgggtcctaggacaa

SEQ ID NO: 66797 - DNA, 30 bp, Artificial Sequence
  Synthetic oligonucleotide
gatgcggaaggttagatgtagcgcggacaa

SEQ ID NO: 66798 - DNA, 30 bp, Artificial Sequence
  Synthetic oligonucleotide
cgttccaagccacatctttgtgagggacaa

SEQ ID NO: 66799 - DNA, 30 bp, Artificial Sequence
  Synthetic oligonucleotide
ggtgagtgtacgataaattgcccgggacaa

SEQ ID NO: 66800 - DNA, 30 bp, Artificial Sequence
  Synthetic oligonucleotide
attgccgggtcgggagctacggcatgacaa

SEQ ID NO: 66801 - DNA, 30 bp, Artificial Sequence
  Synthetic oligonucleotide
ggcgagacttcgcatgtggctagcatacaa

SEQ ID NO: 66802 - DNA, 30 bp, Artificial Sequence
  Synthetic oligonucleotide
agcaggaccctcaacgtaatacgtatacaa

SEQ ID NO: 66803 - DNA, 30 bp, Artificial Sequence
  Synthetic oligonucleotide
gagcaagccagggtggcaaccatactacaa

SEQ ID NO: 66804 - DNA, 30 bp, Artificial Sequence
  Synthetic oligonucleotide
actgattccgatactctaaaccacctacaa

SEQ ID NO: 66805 - DNA, 30 bp, Artificial Sequence
  Synthetic oligonucleotide
ttgaggcagaatggcgacaggtccgtacaa

SEQ ID NO: 66806 - DNA, 30 bp, Artificial Sequence
  Synthetic oligonucleotide
ggaaggtctctggaacgacacatattacaa

SEQ ID NO: 66807 - DNA, 30 bp, Artificial Sequence
  Synthetic oligonucleotide
ctaaaaatcaaagtacaaggacccaaccaa

SEQ ID NO: 66808 - DNA, 30 bp, Artificial Sequence
  Synthetic oligonucleotide
atccggaaagtatgagcaatgatccaccaa

SEQ ID NO: 66809 - DNA, 30 bp, Artificial Sequence
  Synthetic oligonucleotide
atgcgcagttacacggccgtatctcaccaa

SEQ ID NO: 66810 - DNA, 31 bp, Artificial Sequence
  Synthetic oligonucleotide
acctatagaaagtgctgtttagtgagaccaa

SEQ ID NO: 66811 - DNA, 30 bp, Artificial Sequence
  Synthetic oligonucleotide
aggttggaatattagaacaagcattaccaa

SEQ ID NO: 66812 - DNA, 30 bp, Artificial Sequence
  Synthetic oligonucleotide
atgagcgggcctaacaatccacgaccccaa

SEQ ID NO: 66813 - DNA, 30 bp, Artificial Sequence
  Synthetic oligonucleotide
aggttcggaacgctcgatcacgatccccaa

SEQ ID NO: 66814 - DNA, 30 bp, Artificial Sequence
  Synthetic oligonucleotide
taagattgggtagaacgactgccggcccaa

SEQ ID NO: 66815 - DNA, 30 bp, Artificial Sequence
  Synthetic oligonucleotide
atataggagaatggatctcgtgactcccaa

SEQ ID NO: 66816 - DNA, 30 bp, Artificial Sequence
  Synthetic oligonucleotide
agtaagtacatttagaaatgggaaagccaa

SEQ ID NO: 66817 - DNA, 30 bp, Artificial Sequence
  Synthetic oligonucleotide
tggactggaaaaagactctcccacagccaa

SEQ ID NO: 66818 - DNA, 30 bp, Artificial Sequence
  Synthetic oligonucleotide
cgggcagtccaacataatagccatagccaa

SEQ ID NO: 66819 - DNA, 30 bp, Artificial Sequence
  Synthetic oligonucleotide
caaaatactaatactaacacaatacgccaa

SEQ ID NO: 66820 - DNA, 30 bp, Artificial Sequence
  Synthetic oligonucleotide
gctcatcgaacagaagagctgaaccgccaa

SEQ ID NO: 66821 - DNA, 30 bp, Artificial Sequence
  Synthetic oligonucleotide
cctaccgcatggtgcggggtcgtatgccaa

SEQ ID NO: 66822 - DNA, 30 bp, Artificial Sequence
  Synthetic oligonucleotide
ggttcgtttcgtaactggagtagctgccaa

SEQ ID NO: 66823 - DNA, 30 bp, Artificial Sequence
  Synthetic oligonucleotide
gcagaaggatgtgttgggtgggtctgccaa

SEQ ID NO: 66824 - DNA, 30 bp, Artificial Sequence
  Synthetic oligonucleotide
cgataactggtacgattgtaacatctccaa

SEQ ID NO: 66825 - DNA, 30 bp, Artificial Sequence
  Synthetic oligonucleotide
aggccatagcgtcctatagtgcgcgtccaa

SEQ ID NO: 66826 - DNA, 30 bp, Artificial Sequence
  Synthetic oligonucleotide
catcaaatggcggtctcggtttaggtccaa

SEQ ID NO: 66827 - DNA, 30 bp, Artificial Sequence
  Synthetic oligonucleotide
gtccgctggcgatcccagtcgagaaagcaa

SEQ ID NO: 66828 - DNA, 30 bp, Artificial Sequence
  Synthetic oligonucleotide
gtgttcggcaacaaaattatgcgaaagcaa

SEQ ID NO: 66829 - DNA, 30 bp, Artificial Sequence
  Synthetic oligonucleotide
aatcgaattaacgtaagtcatttaaagcaa

SEQ ID NO: 66830 - DNA, 30 bp, Artificial Sequence
  Synthetic oligonucleotide
tcgaacagcagggcgcaataggccaagcaa

SEQ ID NO: 66831 - DNA, 30 bp, Artificial Sequence
  Synthetic oligonucleotide
aaaaccgacagataccgttcgcttaagcaa

SEQ ID NO: 66832 - DNA, 30 bp, Artificial Sequence
  Synthetic oligonucleotide
tggagttaaaggataaccgagaagcagcaa

SEQ ID NO: 66833 - DNA, 30 bp, Artificial Sequence
  Synthetic oligonucleotide
ggaggtgaggtagggtcagcatttgagcaa

SEQ ID NO: 66834 - DNA, 30 bp, Artificial Sequence
  Synthetic oligonucleotide
tccggatgtggcactagacgtgtatagcaa

SEQ ID NO: 66835 - DNA, 30 bp, Artificial Sequence
  Synthetic oligonucleotide
aagatacgatgatgctcgagggcttagcaa

SEQ ID NO: 66836 - DNA, 30 bp, Artificial Sequence
  Synthetic oligonucleotide
aacgcaacgctgaagatgaagtactcgcaa

SEQ ID NO: 66837 - DNA, 31 bp, Artificial Sequence
  Synthetic oligonucleotide
gcggaattaagtggtgaagcctacgtcgcaa

SEQ ID NO: 66838 - DNA, 30 bp, Artificial Sequence
  Synthetic oligonucleotide
agacacctacagtctaccgacaattcgcaa

SEQ ID NO: 66839 - DNA, 30 bp, Artificial Sequence
  Synthetic oligonucleotide
cgaggatgggcgactgtgttgtaaaggcaa

SEQ ID NO: 66840 - DNA, 30 bp, Artificial Sequence
  Synthetic oligonucleotide
ccagggctaacggagacgatttggaggcaa

SEQ ID NO: 66841 - DNA, 30 bp, Artificial Sequence
  Synthetic oligonucleotide
attcgagacatgctggcggaattacggcaa

SEQ ID NO: 66842 - DNA, 30 bp, Artificial Sequence
  Synthetic oligonucleotide
aggctgttggtggcgtttaatctccggcaa

SEQ ID NO: 66843 - DNA, 30 bp, Artificial Sequence
  Synthetic oligonucleotide
ctggcacgaagaacctcaacgttgcggcaa

SEQ ID NO: 66844 - DNA, 30 bp, Artificial Sequence
  Synthetic oligonucleotide
cctaggaatgaacgtttttgtgaagggcaa

SEQ ID NO: 66845 - DNA, 30 bp, Artificial Sequence
  Synthetic oligonucleotide
aacatgtcggcagacacaaacacggggcaa

SEQ ID NO: 66846 - DNA, 30 bp, Artificial Sequence
  Synthetic oligonucleotide
gcgacgtacggacatgtctgtaagtggcaa

SEQ ID NO: 66847 - DNA, 30 bp, Artificial Sequence
  Synthetic oligonucleotide
tgtgcagatatagatccatcaacgtggcaa

SEQ ID NO: 66848 - DNA, 30 bp, Artificial Sequence
  Synthetic oligonucleotide
agacccaatcagaaggatgcgcaaatgcaa

SEQ ID NO: 66849 - DNA, 30 bp, Artificial Sequence
  Synthetic oligonucleotide
ggtacaaagattggtgacctatctatgcaa

SEQ ID NO: 66850 - DNA, 30 bp, Artificial Sequence
  Synthetic oligonucleotide
accaacggagaagcttcccaacgcctgcaa

SEQ ID NO: 66851 - DNA, 30 bp, Artificial Sequence
  Synthetic oligonucleotide
atacgagatggcggtgctgattagctgcaa

SEQ ID NO: 66852 - DNA, 30 bp, Artificial Sequence
  Synthetic oligonucleotide
tcatctgcatgcattgggcaactggtgcaa

SEQ ID NO: 66853 - DNA, 30 bp, Artificial Sequence
  Synthetic oligonucleotide
aggggcaaagcaacgggtcggctggtgcaa

SEQ ID NO: 66854 - DNA, 30 bp, Artificial Sequence
  Synthetic oligonucleotide
gtgatggcacaacagggaagggctgtgcaa

SEQ ID NO: 66855 - DNA, 30 bp, Artificial Sequence
  Synthetic oligonucleotide
gaacaagcgtgggagggtagttccttgcaa

SEQ ID NO: 66856 - DNA, 30 bp, Artificial Sequence
  Synthetic oligonucleotide
atcgaagtaaatcgtgaagatcgtttgcaa

SEQ ID NO: 66857 - DNA, 30 bp, Artificial Sequence
  Synthetic oligonucleotide
ccacaaacaataataaggtatattcatcaa

SEQ ID NO: 66858 - DNA, 30 bp, Artificial Sequence
  Synthetic oligonucleotide
cgcctaccgaaggcgcccatctttcatcaa

SEQ ID NO: 66859 - DNA, 30 bp, Artificial Sequence
  Synthetic oligonucleotide
ctcgtcaaatcggaacgtctgaccgatcaa

SEQ ID NO: 66860 - DNA, 30 bp, Artificial Sequence
  Synthetic oligonucleotide
gatgcgaatggggacacaggcgttgatcaa

SEQ ID NO: 66861 - DNA, 30 bp, Artificial Sequence
  Synthetic oligonucleotide
actgagttaccacatacaccccgatatcaa

SEQ ID NO: 66862 - DNA, 30 bp, Artificial Sequence
  Synthetic oligonucleotide
gcgaatataatctgcagagtccgatatcaa

SEQ ID NO: 66863 - DNA, 30 bp, Artificial Sequence
  Synthetic oligonucleotide
gacggtgagcagatacacgatcactatcaa

SEQ ID NO: 66864 - DNA, 30 bp, Artificial Sequence
  Synthetic oligonucleotide
ccggaattcgattgttgataaccgtatcaa

SEQ ID NO: 66865 - DNA, 30 bp, Artificial Sequence
  Synthetic oligonucleotide
ggtcactgcacgacggacgacgtttatcaa

SEQ ID NO: 66866 - DNA, 30 bp, Artificial Sequence
  Synthetic oligonucleotide
ggtagaccggataacccgagggagactcaa

SEQ ID NO: 66867 - DNA, 30 bp, Artificial Sequence
  Synthetic oligonucleotide
cggagcccagtgaccagaaaccctcctcaa

SEQ ID NO: 66868 - DNA, 30 bp, Artificial Sequence
  Synthetic oligonucleotide
ttctaacaaggaggaaagcgtgttagtcaa

SEQ ID NO: 66869 - DNA, 30 bp, Artificial Sequence
  Synthetic oligonucleotide
ggccaaaatgtggagtgcccctttagtcaa

SEQ ID NO: 66870 - DNA, 30 bp, Artificial Sequence
  Synthetic oligonucleotide
tggggagaccgcattgatgtagaccgtcaa

SEQ ID NO: 66871 - DNA, 30 bp, Artificial Sequence
  Synthetic oligonucleotide
tggtcggatcggaactgggtccatcgtcaa

SEQ ID NO: 66872 - DNA, 30 bp, Artificial Sequence
  Synthetic oligonucleotide
ccttgggaagggacctagttcgccggtcaa

SEQ ID NO: 66873 - DNA, 30 bp, Artificial Sequence
  Synthetic oligonucleotide
tctgcagggtcaagcttcaggtggggtcaa

SEQ ID NO: 66874 - DNA, 30 bp, Artificial Sequence
  Synthetic oligonucleotide
gaccgcaagtagaacagtaaggtgtgtcaa

SEQ ID NO: 66875 - DNA, 30 bp, Artificial Sequence
  Synthetic oligonucleotide
agtgatccggccaagtgacacatcattcaa

SEQ ID NO: 66876 - DNA, 30 bp, Artificial Sequence
  Synthetic oligonucleotide
ataacctgacgtgaaacgccaatagttcaa

SEQ ID NO: 66877 - DNA, 30 bp, Artificial Sequence
  Synthetic oligonucleotide
acgccatatcaaaaggatttcaccgttcaa

SEQ ID NO: 66878 - DNA, 30 bp, Artificial Sequence
  Synthetic oligonucleotide
ctaaacagccacgaaacactccgttttcaa

SEQ ID NO: 66879 - DNA, 30 bp, Artificial Sequence
  Synthetic oligonucleotide
ctgaaacagtggttgtgatttccaaaagaa

SEQ ID NO: 66880 - DNA, 30 bp, Artificial Sequence
  Synthetic oligonucleotide
cacgaaacgccagtatcttcgggacaagaa

SEQ ID NO: 66881 - DNA, 30 bp, Artificial Sequence
  Synthetic oligonucleotide
aatgctgtttcgatggctaggggacaagaa

SEQ ID NO: 66882 - DNA, 30 bp, Artificial Sequence
  Synthetic oligonucleotide
gccccaaagaggtcgcaaatgttacaagaa

SEQ ID NO: 66883 - DNA, 30 bp, Artificial Sequence
  Synthetic oligonucleotide
agaaacgaagaggctttaatccgccaagaa

SEQ ID NO: 66884 - DNA, 30 bp, Artificial Sequence
  Synthetic oligonucleotide
gcctggacttcgatcggcttgcaggaagaa

SEQ ID NO: 66885 - DNA, 30 bp, Artificial Sequence
  Synthetic oligonucleotide
atggatagcggaccacggtcaaattaagaa

SEQ ID NO: 66886 - DNA, 30 bp, Artificial Sequence
  Synthetic oligonucleotide
gaggttcgacagatcgcgaaccattaagaa

SEQ ID NO: 66887 - DNA, 30 bp, Artificial Sequence
  Synthetic oligonucleotide
aagtgaacatacaggtccagaaaaacagaa

SEQ ID NO: 66888 - DNA, 30 bp, Artificial Sequence
  Synthetic oligonucleotide
gggagcgctgatttatcaaaacaaacagaa

SEQ ID NO: 66889 - DNA, 30 bp, Artificial Sequence
  Synthetic oligonucleotide
gtctagcgacatttaaagaagataacagaa

SEQ ID NO: 66890 - DNA, 30 bp, Artificial Sequence
  Synthetic oligonucleotide
gggtcacgaggggaatagaacctcacagaa

SEQ ID NO: 66891 - DNA, 30 bp, Artificial Sequence
  Synthetic oligonucleotide
ataggagtgttagggggccacatgacagaa

SEQ ID NO: 66892 - DNA, 30 bp, Artificial Sequence
  Synthetic oligonucleotide
aaggagggcggagcagggtcctatacagaa

SEQ ID NO: 66893 - DNA, 30 bp, Artificial Sequence
  Synthetic oligonucleotide
gtccgtgttacggttggagaagttacagaa

SEQ ID NO: 66894 - DNA, 30 bp, Artificial Sequence
  Synthetic oligonucleotide
cttctgaggaacctacatagtgaagcagaa

SEQ ID NO: 66895 - DNA, 30 bp, Artificial Sequence
  Synthetic oligonucleotide
tgcgaggcgtattagttcggatcggcagaa

SEQ ID NO: 66896 - DNA, 30 bp, Artificial Sequence
  Synthetic oligonucleotide
tcctacgggtatacggaaaacccgagagaa

SEQ ID NO: 66897 - DNA, 30 bp, Artificial Sequence
  Synthetic oligonucleotide
aagcagtcggtaggtataagctctagagaa

SEQ ID NO: 66898 - DNA, 30 bp, Artificial Sequence
  Synthetic oligonucleotide
taacgatttggggaagccaaggatcgagaa

SEQ ID NO: 66899 - DNA, 30 bp, Artificial Sequence
  Synthetic oligonucleotide
ctcggagcaaaggccatcaactatcgagaa

SEQ ID NO: 66900 - DNA, 30 bp, Artificial Sequence
  Synthetic oligonucleotide
ccacaaacgctacacaggttcctcggagaa

SEQ ID NO: 66901 - DNA, 30 bp, Artificial Sequence
  Synthetic oligonucleotide
aacggcaactaggaagacatgtcatgagaa

SEQ ID NO: 66902 - DNA, 30 bp, Artificial Sequence
  Synthetic oligonucleotide
ccagcagaaaatcaggcctatatgtgagaa

SEQ ID NO: 66903 - DNA, 30 bp, Artificial Sequence
  Synthetic oligonucleotide
ggacgaaaacaacgtaagggcgcaatagaa

SEQ ID NO: 66904 - DNA, 30 bp, Artificial Sequence
  Synthetic oligonucleotide
gtaatttggcgggtaggcttgcgcatagaa

SEQ ID NO: 66905 - DNA, 30 bp, Artificial Sequence
  Synthetic oligonucleotide
tctcaaaggtgcgcgctaactttcatagaa

SEQ ID NO: 66906 - DNA, 30 bp, Artificial Sequence
  Synthetic oligonucleotide
atacccaaggcataagaccttccgatagaa

SEQ ID NO: 66907 - DNA, 30 bp, Artificial Sequence
  Synthetic oligonucleotide
acgaattaattccgaaaagacaggatagaa

SEQ ID NO: 66908 - DNA, 30 bp, Artificial Sequence
  Synthetic oligonucleotide
actgggggatgctgggcggagccagtagaa

SEQ ID NO: 66909 - DNA, 30 bp, Artificial Sequence
  Synthetic oligonucleotide
tacaggagacatggatagagtagtgtagaa

SEQ ID NO: 66910 - DNA, 30 bp, Artificial Sequence
  Synthetic oligonucleotide
atgatagatgtgtcacacgacctattagaa

SEQ ID NO: 66911 - DNA, 30 bp, Artificial Sequence
  Synthetic oligonucleotide
agtggcttggttttaccgacaaacttagaa

SEQ ID NO: 66912 - DNA, 30 bp, Artificial Sequence
  Synthetic oligonucleotide
atcggtcgaatctcgccgccgtccttagaa

SEQ ID NO: 66913 - DNA, 30 bp, Artificial Sequence
  Synthetic oligonucleotide
ggggccgaatacgggcaataccgcttagaa

SEQ ID NO: 66914 - DNA, 30 bp, Artificial Sequence
  Synthetic oligonucleotide
ttaccagccagtacagggacacgaaacgaa

SEQ ID NO: 66915 - DNA, 30 bp, Artificial Sequence
  Synthetic oligonucleotide
tccatccccagatatagaacgaagaacgaa

SEQ ID NO: 66916 - DNA, 30 bp, Artificial Sequence
  Synthetic oligonucleotide
gcgagtacgagaaaaatagggtggaacgaa

SEQ ID NO: 66917 - DNA, 30 bp, Artificial Sequence
  Synthetic oligonucleotide
tgggaatacagccacaaaaaacaccacgaa

SEQ ID NO: 66918 - DNA, 30 bp, Artificial Sequence
  Synthetic oligonucleotide
cgatcgcatgaattgatggactgccacgaa

SEQ ID NO: 66919 - DNA, 30 bp, Artificial Sequence
  Synthetic oligonucleotide
cgagagattgcgtaaatcctcctcgacgaa

SEQ ID NO: 66920 - DNA, 30 bp, Artificial Sequence
  Synthetic oligonucleotide
tcggttttaagagtttcagcttgtgacgaa

SEQ ID NO: 66921 - DNA, 30 bp, Artificial Sequence
  Synthetic oligonucleotide
ccattcgtagagagactacataattacgaa

SEQ ID NO: 66922 - DNA, 30 bp, Artificial Sequence
  Synthetic oligonucleotide
cacaggtatcatggcggactggctcccgaa

SEQ ID NO: 66923 - DNA, 30 bp, Artificial Sequence
  Synthetic oligonucleotide
cgcgtcaataatgcggaccggcacgccgaa

SEQ ID NO: 66924 - DNA, 30 bp, Artificial Sequence
  Synthetic oligonucleotide
tactatggttctaacagaattgctgccgaa

SEQ ID NO: 66925 - DNA, 30 bp, Artificial Sequence
  Synthetic oligonucleotide
tcctgcacccgtaaactaaggctgtccgaa

SEQ ID NO: 66926 - DNA, 30 bp, Artificial Sequence
  Synthetic oligonucleotide
tcgggaggggaatccagtttatagagcgaa

SEQ ID NO: 66927 - DNA, 30 bp, Artificial Sequence
  Synthetic oligonucleotide
gcgcaccggagggaagaggttgggagcgaa

SEQ ID NO: 66928 - DNA, 30 bp, Artificial Sequence
  Synthetic oligonucleotide
agagatataacctcctggatatagcgcgaa

SEQ ID NO: 66929 - DNA, 30 bp, Artificial Sequence
  Synthetic oligonucleotide
gggtaatgttaaacgtacgcggatggcgaa

SEQ ID NO: 66930 - DNA, 30 bp, Artificial Sequence
  Synthetic oligonucleotide
catgctacgaatctggcaatatatggcgaa

SEQ ID NO: 66931 - DNA, 30 bp, Artificial Sequence
  Synthetic oligonucleotide
cacctcaaatgtagtggtcatcttggcgaa

SEQ ID NO: 66932 - DNA, 30 bp, Artificial Sequence
  Synthetic oligonucleotide
cgtcacgggaggaagcgaatcgtgtgcgaa

SEQ ID NO: 66933 - DNA, 30 bp, Artificial Sequence
  Synthetic oligonucleotide
cggaattgcaacttgcagcacagttgcgaa

SEQ ID NO: 66934 - DNA, 30 bp, Artificial Sequence
  Synthetic oligonucleotide
atatcgcctggcaggcagttgtggatcgaa

SEQ ID NO: 66935 - DNA, 29 bp, Artificial Sequence
  Synthetic oligonucleotide
cctcgaggctgcaacaaccgatactcgaa

SEQ ID NO: 66936 - DNA, 30 bp, Artificial Sequence
  Synthetic oligonucleotide
aacatcaaggttaattcgcccttcctcgaa

SEQ ID NO: 66937 - DNA, 29 bp, Artificial Sequence
  Synthetic oligonucleotide
aaatgagggtatagggtgccactctcgaa

SEQ ID NO: 66938 - DNA, 31 bp, Artificial Sequence
  Synthetic oligonucleotide
gtgccgagtgctaggcgaagattttctcgaa

SEQ ID NO: 66939 - DNA, 30 bp, Artificial Sequence
  Synthetic oligonucleotide
tcgtcaaattaaataaagaccagagtcgaa

SEQ ID NO: 66940 - DNA, 30 bp, Artificial Sequence
  Synthetic oligonucleotide
acgtttaagctcaagcccgttccattcgaa

SEQ ID NO: 66941 - DNA, 30 bp, Artificial Sequence
  Synthetic oligonucleotide
ccgaattaaaacttctgtgaggagttcgaa

SEQ ID NO: 66942 - DNA, 30 bp, Artificial Sequence
  Synthetic oligonucleotide
gcgggcaaataacggaaaggtactttcgaa

SEQ ID NO: 66943 - DNA, 30 bp, Artificial Sequence
  Synthetic oligonucleotide
cagccggggatctctggtaaagcaaaggaa

SEQ ID NO: 66944 - DNA, 30 bp, Artificial Sequence
  Synthetic oligonucleotide
cggagatgagcctgtttcagggttaaggaa

SEQ ID NO: 66945 - DNA, 30 bp, Artificial Sequence
  Synthetic oligonucleotide
agataaggtggagttacggactaccaggaa

SEQ ID NO: 66946 - DNA, 30 bp, Artificial Sequence
  Synthetic oligonucleotide
gcgtgcctggtatgatcagtggtgcaggaa

SEQ ID NO: 66947 - DNA, 30 bp, Artificial Sequence
  Synthetic oligonucleotide
cgcgaagtttgggtcggttattttcaggaa

SEQ ID NO: 66948 - DNA, 30 bp, Artificial Sequence
  Synthetic oligonucleotide
cgaattccagagtgccatgctctagaggaa

SEQ ID NO: 66949 - DNA, 30 bp, Artificial Sequence
  Synthetic oligonucleotide
gtcgtcaacagtctgatcgtatatgaggaa

SEQ ID NO: 66950 - DNA, 30 bp, Artificial Sequence
  Synthetic oligonucleotide
acatgtaaatcataatcacattatgaggaa

SEQ ID NO: 66951 - DNA, 30 bp, Artificial Sequence
  Synthetic oligonucleotide
tcggcgtcccatgaggcgcttgctgaggaa

SEQ ID NO: 66952 - DNA, 30 bp, Artificial Sequence
  Synthetic oligonucleotide
aatgggcctggaaattaacgatctgaggaa

SEQ ID NO: 66953 - DNA, 30 bp, Artificial Sequence
  Synthetic oligonucleotide
cggatctgatctatctgcggaatgtaggaa

SEQ ID NO: 66954 - DNA, 30 bp, Artificial Sequence
  Synthetic oligonucleotide
cacgaacggcactgctccacgcattaggaa

SEQ ID NO: 66955 - DNA, 30 bp, Artificial Sequence
  Synthetic oligonucleotide
cgctacaatagatagagataagtaccggaa

SEQ ID NO: 66956 - DNA, 30 bp, Artificial Sequence
  Synthetic oligonucleotide
tatcaggcaaaattcatagataagccggaa

SEQ ID NO: 66957 - DNA, 30 bp, Artificial Sequence
  Synthetic oligonucleotide
ggtagcgatatacagcacaccgcgccggaa

SEQ ID NO: 66958 - DNA, 30 bp, Artificial Sequence
  Synthetic oligonucleotide
caacccattgaatcaaaaagttcggcggaa

SEQ ID NO: 66959 - DNA, 30 bp, Artificial Sequence
  Synthetic oligonucleotide
cgccagtcatgtaattgatgaggtgcggaa

SEQ ID NO: 66960 - DNA, 30 bp, Artificial Sequence
  Synthetic oligonucleotide
tataatatcgttatgtggaccaacagggaa

SEQ ID NO: 66961 - DNA, 30 bp, Artificial Sequence
  Synthetic oligonucleotide
gcatgaatcctggttcagggacatagggaa

SEQ ID NO: 66962 - DNA, 30 bp, Artificial Sequence
  Synthetic oligonucleotide
tactgtatcagtgataagcaacagcgggaa

SEQ ID NO: 66963 - DNA, 30 bp, Artificial Sequence
  Synthetic oligonucleotide
agggataccgtgcgtctacttcctcgggaa

SEQ ID NO: 66964 - DNA, 30 bp, Artificial Sequence
  Synthetic oligonucleotide
caaggactcggcaaactccagtttcgggaa

SEQ ID NO: 66965 - DNA, 30 bp, Artificial Sequence
  Synthetic oligonucleotide
aagcacctactgaatacggttagcggggaa

SEQ ID NO: 66966 - DNA, 30 bp, Artificial Sequence
  Synthetic oligonucleotide
tgtactcatggggccggttagacgggggaa

SEQ ID NO: 66967 - DNA, 30 bp, Artificial Sequence
  Synthetic oligonucleotide
cagattacttgcgggacaatctggggggaa

SEQ ID NO: 66968 - DNA, 30 bp, Artificial Sequence
  Synthetic oligonucleotide
caaaaacagcaatctaaaatcagatgggaa

SEQ ID NO: 66969 - DNA, 30 bp, Artificial Sequence
  Synthetic oligonucleotide
cggtgatctccgagcgaaggcgggctggaa

SEQ ID NO: 66970 - DNA, 30 bp, Artificial Sequence
  Synthetic oligonucleotide
ccagaaaagtgtggaaatatctgattggaa

SEQ ID NO: 66971 - DNA, 30 bp, Artificial Sequence
  Synthetic oligonucleotide
gcgcccagtagcttcttgccaatgaatgaa

SEQ ID NO: 66972 - DNA, 30 bp, Artificial Sequence
  Synthetic oligonucleotide
agagagttagggtgtcgttgagttaatgaa

SEQ ID NO: 66973 - DNA, 30 bp, Artificial Sequence
  Synthetic oligonucleotide
gcgtgaagcagaggcggacaagaagatgaa

SEQ ID NO: 66974 - DNA, 30 bp, Artificial Sequence
  Synthetic oligonucleotide
acgcaattacgaaaactcatgcaggatgaa

SEQ ID NO: 66975 - DNA, 30 bp, Artificial Sequence
  Synthetic oligonucleotide
agggagtgaagttcgcctattcttgatgaa

SEQ ID NO: 66976 - DNA, 30 bp, Artificial Sequence
  Synthetic oligonucleotide
aggtagtgaaaatttgatgcgcgttatgaa

SEQ ID NO: 66977 - DNA, 30 bp, Artificial Sequence
  Synthetic oligonucleotide
gggtttaacaggaactaacactcgactgaa

SEQ ID NO: 66978 - DNA, 30 bp, Artificial Sequence
  Synthetic oligonucleotide
agggacctggtcagcgcaaaggatactgaa

SEQ ID NO: 66979 - DNA, 30 bp, Artificial Sequence
  Synthetic oligonucleotide
gaggcacaactcgagcatctcatcgctgaa

SEQ ID NO: 66980 - DNA, 30 bp, Artificial Sequence
  Synthetic oligonucleotide
gtacgcacgcggatggagaacgactctgaa

SEQ ID NO: 66981 - DNA, 29 bp, Artificial Sequence
  Synthetic oligonucleotide
gggacagggcagtacggatgcgaagtgaa

SEQ ID NO: 66982 - DNA, 30 bp, Artificial Sequence
  Synthetic oligonucleotide
tatgtaaggaggcgtcgagactgcagtgaa

SEQ ID NO: 66983 - DNA, 30 bp, Artificial Sequence
  Synthetic oligonucleotide
aggcgtaggggttggtcctgtcttagtgaa

SEQ ID NO: 66984 - DNA, 30 bp, Artificial Sequence
  Synthetic oligonucleotide
cagattatctgccaccatgagctaggtgaa

SEQ ID NO: 66985 - DNA, 30 bp, Artificial Sequence
  Synthetic oligonucleotide
cttcaattacgagaacaaaaagtctgtgaa

SEQ ID NO: 66986 - DNA, 30 bp, Artificial Sequence
  Synthetic oligonucleotide
tgaccgacagttagagacatcggttgtgaa

SEQ ID NO: 66987 - DNA, 30 bp, Artificial Sequence
  Synthetic oligonucleotide
gcttaggggtatcggtccataatttgtgaa

SEQ ID NO: 66988 - DNA, 30 bp, Artificial Sequence
  Synthetic oligonucleotide
acgtcataatacacaatacccgtaattgaa

SEQ ID NO: 66989 - DNA, 30 bp, Artificial Sequence
  Synthetic oligonucleotide
gatcgggaggggccaagtactcggattgaa

SEQ ID NO: 66990 - DNA, 30 bp, Artificial Sequence
  Synthetic oligonucleotide
caatgcggtatttagcgtgggctagttgaa

SEQ ID NO: 66991 - DNA, 30 bp, Artificial Sequence
  Synthetic oligonucleotide
ggcgccaaatagagtacacggaaaaaataa

SEQ ID NO: 66992 - DNA, 30 bp, Artificial Sequence
  Synthetic oligonucleotide
gataggtaccgaaagactatagccaaataa

SEQ ID NO: 66993 - DNA, 30 bp, Artificial Sequence
  Synthetic oligonucleotide
gggaattcggcaattcaggtagtccaataa

SEQ ID NO: 66994 - DNA, 30 bp, Artificial Sequence
  Synthetic oligonucleotide
gactgatcagaggagtcgagggacgaataa

SEQ ID NO: 66995 - DNA, 30 bp, Artificial Sequence
  Synthetic oligonucleotide
tcacttcccacataaaccggagaggaataa

SEQ ID NO: 66996 - DNA, 30 bp, Artificial Sequence
  Synthetic oligonucleotide
ctggggtactcgagagcggagtgataataa

SEQ ID NO: 66997 - DNA, 30 bp, Artificial Sequence
  Synthetic oligonucleotide
gaaggacggagaacttgagccgtgtaataa

SEQ ID NO: 66998 - DNA, 30 bp, Artificial Sequence
  Synthetic oligonucleotide
acgagttcagacaaatcgacccgtacataa

SEQ ID NO: 66999 - DNA, 30 bp, Artificial Sequence
  Synthetic oligonucleotide
acatcgaatatacacggatggtcaccataa

SEQ ID NO: 67000 - DNA, 30 bp, Artificial Sequence
  Synthetic oligonucleotide
caggcaatcccggcaaacaagaaagcataa

SEQ ID NO: 67001 - DNA, 30 bp, Artificial Sequence
  Synthetic oligonucleotide
ggcgaaagggtattgcgggacttagcataa

SEQ ID NO: 67002 - DNA, 30 bp, Artificial Sequence
  Synthetic oligonucleotide
ttgaatgatcagagtcctccagatgcataa

SEQ ID NO: 67003 - DNA, 30 bp, Artificial Sequence
  Synthetic oligonucleotide
gctaattagtgagctaaatgaactgcataa

SEQ ID NO: 67004 - DNA, 30 bp, Artificial Sequence
  Synthetic oligonucleotide
gagcgaggtgggacataagagataagataa

SEQ ID NO: 67005 - DNA, 30 bp, Artificial Sequence
  Synthetic oligonucleotide
gcgacagcaaggttagataagctaagataa

SEQ ID NO: 67006 - DNA, 30 bp, Artificial Sequence
  Synthetic oligonucleotide
ctggcgggggcataacggcaggccagataa

SEQ ID NO: 67007 - DNA, 30 bp, Artificial Sequence
  Synthetic oligonucleotide
ataagcggccttggagtcgacctgagataa

SEQ ID NO: 67008 - DNA, 30 bp, Artificial Sequence
  Synthetic oligonucleotide
cacttgatcatttaatagtatgagcgataa

SEQ ID NO: 67009 - DNA, 30 bp, Artificial Sequence
  Synthetic oligonucleotide
atcagcgaaggtgagcatcagaaaggataa

SEQ ID NO: 67010 - DNA, 30 bp, Artificial Sequence
  Synthetic oligonucleotide
cacagaccagaactaaacattttaggataa

SEQ ID NO: 67011 - DNA, 30 bp, Artificial Sequence
  Synthetic oligonucleotide
aaagcgcatgctcgctagtcagctggataa

SEQ ID NO: 67012 - DNA, 30 bp, Artificial Sequence
  Synthetic oligonucleotide
cagtctgtactggaaaccgggccctgataa

SEQ ID NO: 67013 - DNA, 30 bp, Artificial Sequence
  Synthetic oligonucleotide
aagcacgaaagtagaccgaggggaatataa

SEQ ID NO: 67014 - DNA, 30 bp, Artificial Sequence
  Synthetic oligonucleotide
ttggagagcatctcagacggatgaatataa

SEQ ID NO: 67015 - DNA, 30 bp, Artificial Sequence
  Synthetic oligonucleotide
tgacatctcgtcatatggagtgtggtataa

SEQ ID NO: 67016 - DNA, 30 bp, Artificial Sequence
  Synthetic oligonucleotide
aggcccgtccttctgagaaaacgattataa

SEQ ID NO: 67017 - DNA, 30 bp, Artificial Sequence
  Synthetic oligonucleotide
atcgaaaaggtcagtctaaccaacttataa

SEQ ID NO: 67018 - DNA, 30 bp, Artificial Sequence
  Synthetic oligonucleotide
gggagggcctaactaaacaacacgttataa

SEQ ID NO: 67019 - DNA, 30 bp, Artificial Sequence
  Synthetic oligonucleotide
tccaaagtttatgaatcgtccgcgaactaa

SEQ ID NO: 67020 - DNA, 30 bp, Artificial Sequence
  Synthetic oligonucleotide
gatagctctagggcagtcgggtggaactaa

SEQ ID NO: 67021 - DNA, 30 bp, Artificial Sequence
  Synthetic oligonucleotide
cacgggatgtgaggagggtaggcggactaa

SEQ ID NO: 67022 - DNA, 30 bp, Artificial Sequence
  Synthetic oligonucleotide
ctaaaattggagatattcgacatctactaa

SEQ ID NO: 67023 - DNA, 30 bp, Artificial Sequence
  Synthetic oligonucleotide
ataacatgatgtgcggagatatcgtactaa

SEQ ID NO: 67024 - DNA, 30 bp, Artificial Sequence
  Synthetic oligonucleotide
gacgaccgagtcacgtagaagtgttactaa

SEQ ID NO: 67025 - DNA, 30 bp, Artificial Sequence
  Synthetic oligonucleotide
ggggatcccagaatagttgtggatacctaa

SEQ ID NO: 67026 - DNA, 30 bp, Artificial Sequence
  Synthetic oligonucleotide
caaccgagagtcctcccgcacggatcctaa

SEQ ID NO: 67027 - DNA, 30 bp, Artificial Sequence
  Synthetic oligonucleotide
gggcaaggttagtccgccgaggagtcctaa

SEQ ID NO: 67028 - DNA, 30 bp, Artificial Sequence
  Synthetic oligonucleotide
cgcgtagttcggcaggtgtggacgagctaa

SEQ ID NO: 67029 - DNA, 30 bp, Artificial Sequence
  Synthetic oligonucleotide
gagaggctgtccggactcacagtacgctaa

SEQ ID NO: 67030 - DNA, 30 bp, Artificial Sequence
  Synthetic oligonucleotide
gcctgcaattcctgatcaaagtggggctaa

SEQ ID NO: 67031 - DNA, 30 bp, Artificial Sequence
  Synthetic oligonucleotide
ttcaccgattcgaaacaatacggatgctaa

SEQ ID NO: 67032 - DNA, 30 bp, Artificial Sequence
  Synthetic oligonucleotide
agaaaacgagtcacagagcggacctgctaa

SEQ ID NO: 67033 - DNA, 30 bp, Artificial Sequence
  Synthetic oligonucleotide
tggtaaggtaggaatgtctgtacgatctaa

SEQ ID NO: 67034 - DNA, 30 bp, Artificial Sequence
  Synthetic oligonucleotide
aaagcgcagtgggtgcaggcagtgaagtaa

SEQ ID NO: 67035 - DNA, 30 bp, Artificial Sequence
  Synthetic oligonucleotide
gggggtcagagaggtgatggcggtaagtaa

SEQ ID NO: 67036 - DNA, 30 bp, Artificial Sequence
  Synthetic oligonucleotide
aggtatattgctcgtactaatcaagagtaa

SEQ ID NO: 67037 - DNA, 30 bp, Artificial Sequence
  Synthetic oligonucleotide
caacggtccaatcgcgctgagcatgagtaa

SEQ ID NO: 67038 - DNA, 30 bp, Artificial Sequence
  Synthetic oligonucleotide
aaactcagtgcaagaggacacgagtagtaa

SEQ ID NO: 67039 - DNA, 30 bp, Artificial Sequence
  Synthetic oligonucleotide
cgcatttgaccagcccgcaaaggaccgtaa

SEQ ID NO: 67040 - DNA, 30 bp, Artificial Sequence
  Synthetic oligonucleotide
accgtgcgtacatagtaggtaagtccgtaa

SEQ ID NO: 67041 - DNA, 30 bp, Artificial Sequence
  Synthetic oligonucleotide
gtaaagacgggtaagtgggccctagcgtaa

SEQ ID NO: 67042 - DNA, 30 bp, Artificial Sequence
  Synthetic oligonucleotide
gaggaaaaccgatggagaactcgcgcgtaa

SEQ ID NO: 67043 - DNA, 30 bp, Artificial Sequence
  Synthetic oligonucleotide
atccttcgggcacgaccaactagggcgtaa

SEQ ID NO: 67044 - DNA, 30 bp, Artificial Sequence
  Synthetic oligonucleotide
caggagagccctgggattagtattgcgtaa

SEQ ID NO: 67045 - DNA, 30 bp, Artificial Sequence
  Synthetic oligonucleotide
accgcgggtagatatcgtgtcagaaggtaa

SEQ ID NO: 67046 - DNA, 30 bp, Artificial Sequence
  Synthetic oligonucleotide
gtgtggagaccgcaaggtgagttcaggtaa

SEQ ID NO: 67047 - DNA, 30 bp, Artificial Sequence
  Synthetic oligonucleotide
ccgtaaagtggccgtcccaacgagaggtaa

SEQ ID NO: 67048 - DNA, 31 bp, Artificial Sequence
  Synthetic oligonucleotide
gtgagatactagaaggatacccaaacggtaa

SEQ ID NO: 67049 - DNA, 30 bp, Artificial Sequence
  Synthetic oligonucleotide
ggcaggagtgaggtatcggatgtacggtaa

SEQ ID NO: 67050 - DNA, 30 bp, Artificial Sequence
  Synthetic oligonucleotide
gacgccggagtaaactcagaagtccggtaa

SEQ ID NO: 67051 - DNA, 30 bp, Artificial Sequence
  Synthetic oligonucleotide
gggtaacacaaaccctgtgattacatgtaa

SEQ ID NO: 67052 - DNA, 30 bp, Artificial Sequence
  Synthetic oligonucleotide
gctaggggcgctggggagcagttcatgtaa

SEQ ID NO: 67053 - DNA, 30 bp, Artificial Sequence
  Synthetic oligonucleotide
acgttcatgagcacgctcctgattatgtaa

SEQ ID NO: 67054 - DNA, 30 bp, Artificial Sequence
  Synthetic oligonucleotide
acacagatcaaatctattataaaggtgtaa

SEQ ID NO: 67055 - DNA, 30 bp, Artificial Sequence
  Synthetic oligonucleotide
cgttcgggatagttccagcgaaaacattaa

SEQ ID NO: 67056 - DNA, 30 bp, Artificial Sequence
  Synthetic oligonucleotide
cgaaaagttcgcgatatcggtcgacattaa

SEQ ID NO: 67057 - DNA, 30 bp, Artificial Sequence
  Synthetic oligonucleotide
agatgtcgatatctcacatcaatacattaa

SEQ ID NO: 67058 - DNA, 30 bp, Artificial Sequence
  Synthetic oligonucleotide
gagcgtgatggggttcagtgtggccattaa

SEQ ID NO: 67059 - DNA, 30 bp, Artificial Sequence
  Synthetic oligonucleotide
tcgctgtgcctcccttacccacttgattaa

SEQ ID NO: 67060 - DNA, 30 bp, Artificial Sequence
  Synthetic oligonucleotide
gggaagactagaaggcgacgatcgacttaa

SEQ ID NO: 67061 - DNA, 30 bp, Artificial Sequence
  Synthetic oligonucleotide
gggtgcgagcgaatagattgccgtgcttaa

SEQ ID NO: 67062 - DNA, 30 bp, Artificial Sequence
  Synthetic oligonucleotide
gacgattgagaccgagctttgaccagttaa

SEQ ID NO: 67063 - DNA, 30 bp, Artificial Sequence
  Synthetic oligonucleotide
acgatacctaatctatagattcaccgttaa

SEQ ID NO: 67064 - DNA, 30 bp, Artificial Sequence
  Synthetic oligonucleotide
cgtttccctaatgtgaaaatcggatgttaa

SEQ ID NO: 67065 - DNA, 30 bp, Artificial Sequence
  Synthetic oligonucleotide
atccagtaagagtgaacgcacccaatttaa

SEQ ID NO: 67066 - DNA, 30 bp, Artificial Sequence
  Synthetic oligonucleotide
tccctcatcccaccaaacatctgactttaa

SEQ ID NO: 67067 - DNA, 30 bp, Artificial Sequence
  Synthetic oligonucleotide
caagggaccaaaaatagcgagcccgtttaa

SEQ ID NO: 67068 - DNA, 30 bp, Artificial Sequence
  Synthetic oligonucleotide
tcgggcgtagtgtggacttacggggtttaa

SEQ ID NO: 67069 - DNA, 30 bp, Artificial Sequence
  Synthetic oligonucleotide
tcatggaagggcaactggagatttgtttaa

SEQ ID NO: 67070 - DNA, 30 bp, Artificial Sequence
  Synthetic oligonucleotide
ctaaacgcgataggcagagtcccgaaaaca

SEQ ID NO: 67071 - DNA, 30 bp, Artificial Sequence
  Synthetic oligonucleotide
agagcaagtatgcagggtgggaggaaaaca

SEQ ID NO: 67072 - DNA, 30 bp, Artificial Sequence
  Synthetic oligonucleotide
gagtgcacaaagagtagggcaaataaaaca

SEQ ID NO: 67073 - DNA, 30 bp, Artificial Sequence
  Synthetic oligonucleotide
caaaggcactggaaacgacatcctaaaaca

SEQ ID NO: 67074 - DNA, 30 bp, Artificial Sequence
  Synthetic oligonucleotide
ccgacacgggaggggacccccagcgaaaca

SEQ ID NO: 67075 - DNA, 29 bp, Artificial Sequence
  Synthetic oligonucleotide
tcgttgggcaacgttgacacatcgaaaca

SEQ ID NO: 67076 - DNA, 30 bp, Artificial Sequence
  Synthetic oligonucleotide
tacggagtaggagctagtcacggtgaaaca

SEQ ID NO: 67077 - DNA, 30 bp, Artificial Sequence
  Synthetic oligonucleotide
gtcggcagacaagtcctaccgattgaaaca

SEQ ID NO: 67078 - DNA, 30 bp, Artificial Sequence
  Synthetic oligonucleotide
acaatagacggatttaccgccacataaaca

SEQ ID NO: 67079 - DNA, 30 bp, Artificial Sequence
  Synthetic oligonucleotide
ggtaaaggaacgtttgtaatcgtgtaaaca

SEQ ID NO: 67080 - DNA, 30 bp, Artificial Sequence
  Synthetic oligonucleotide
cgtagtactagataccccgttgaaacaaca

SEQ ID NO: 67081 - DNA, 30 bp, Artificial Sequence
  Synthetic oligonucleotide
gcgtatagatcggtggtttgtgcaacaaca

SEQ ID NO: 67082 - DNA, 30 bp, Artificial Sequence
  Synthetic oligonucleotide
tcatctcattatgaattctgcgctacaaca

SEQ ID NO: 67083 - DNA, 30 bp, Artificial Sequence
  Synthetic oligonucleotide
actaatcgtcggccaaggatcggtacaaca

SEQ ID NO: 67084 - DNA, 30 bp, Artificial Sequence
  Synthetic oligonucleotide
gtatggagcgtaaagcaagatgttacaaca

SEQ ID NO: 67085 - DNA, 30 bp, Artificial Sequence
  Synthetic oligonucleotide
tcaggagatggaatcctaggaacgccaaca

SEQ ID NO: 67086 - DNA, 30 bp, Artificial Sequence
  Synthetic oligonucleotide
acgagtatctttggtaagcaaaaagcaaca

SEQ ID NO: 67087 - DNA, 30 bp, Artificial Sequence
  Synthetic oligonucleotide
gtcaactcatgatgacagaaccccgcaaca

SEQ ID NO: 67088 - DNA, 30 bp, Artificial Sequence
  Synthetic oligonucleotide
tgcttaagtaaggatgtgaaggcctcaaca

SEQ ID NO: 67089 - DNA, 30 bp, Artificial Sequence
  Synthetic oligonucleotide
ggtcaacagagaccatacttgacaagaaca

SEQ ID NO: 67090 - DNA, 30 bp, Artificial Sequence
  Synthetic oligonucleotide
cctacgaatgggatgggtgcaagcagaaca

SEQ ID NO: 67091 - DNA, 30 bp, Artificial Sequence
  Synthetic oligonucleotide
cagttaaaccacgagtaaccgagcagaaca

SEQ ID NO: 67092 - DNA, 30 bp, Artificial Sequence
  Synthetic oligonucleotide
aaaagacgagccctggcactgaaccgaaca

SEQ ID NO: 67093 - DNA, 30 bp, Artificial Sequence
  Synthetic oligonucleotide
ggatacgtcggcaaaagctctataggaaca

SEQ ID NO: 67094 - DNA, 30 bp, Artificial Sequence
  Synthetic oligonucleotide
aaataataccaggtcagtacgatgggaaca

SEQ ID NO: 67095 - DNA, 30 bp, Artificial Sequence
  Synthetic oligonucleotide
atgagtctaacctggggggggtgtggaaca

SEQ ID NO: 67096 - DNA, 30 bp, Artificial Sequence
  Synthetic oligonucleotide
gtgattagcgtacaggtgaacgtctgaaca

SEQ ID NO: 67097 - DNA, 30 bp, Artificial Sequence
  Synthetic oligonucleotide
aacaggcttgacagaatgagccccataaca

SEQ ID NO: 67098 - DNA, 30 bp, Artificial Sequence
  Synthetic oligonucleotide
atagacccgaacagggaatagtccataaca

SEQ ID NO: 67099 - DNA, 30 bp, Artificial Sequence
  Synthetic oligonucleotide
aaggaaaagccagtaaacccatcgctaaca

SEQ ID NO: 67100 - DNA, 30 bp, Artificial Sequence
  Synthetic oligonucleotide
tcgccaatcggcacgacaatgatgctaaca

SEQ ID NO: 67101 - DNA, 30 bp, Artificial Sequence
  Synthetic oligonucleotide
gtaccatcagtggtatatctggctcacaca

SEQ ID NO: 67102 - DNA, 30 bp, Artificial Sequence
  Synthetic oligonucleotide
aagcggttgaggggattggcaatcgacaca

SEQ ID NO: 67103 - DNA, 30 bp, Artificial Sequence
  Synthetic oligonucleotide
gccatcaccagtgaagtcgggtaatacaca

SEQ ID NO: 67104 - DNA, 30 bp, Artificial Sequence
  Synthetic oligonucleotide
atatagatattcaaaggaatcaaaaccaca

SEQ ID NO: 67105 - DNA, 30 bp, Artificial Sequence
  Synthetic oligonucleotide
tacgtaatgattcggaaagcttcaaccaca

SEQ ID NO: 67106 - DNA, 30 bp, Artificial Sequence
  Synthetic oligonucleotide
tacgatacgacacaacgtacatagaccaca

SEQ ID NO: 67107 - DNA, 30 bp, Artificial Sequence
  Synthetic oligonucleotide
taacgaaatggttcgcataagttccccaca

SEQ ID NO: 67108 - DNA, 30 bp, Artificial Sequence
  Synthetic oligonucleotide
acggtggattacagtgaaacctgggccaca

SEQ ID NO: 67109 - DNA, 30 bp, Artificial Sequence
  Synthetic oligonucleotide
gaacaagccgagcatcaaagacctagcaca

SEQ ID NO: 67110 - DNA, 30 bp, Artificial Sequence
  Synthetic oligonucleotide
agcccaggcctaagactacatcctggcaca

SEQ ID NO: 67111 - DNA, 30 bp, Artificial Sequence
  Synthetic oligonucleotide
ccgtgcacacacagaaaatccatgtgcaca

SEQ ID NO: 67112 - DNA, 30 bp, Artificial Sequence
  Synthetic oligonucleotide
cgcaccgctaaggggctgtggttactcaca

SEQ ID NO: 67113 - DNA, 30 bp, Artificial Sequence
  Synthetic oligonucleotide
gcattacaacagcgccatgggtctctcaca

SEQ ID NO: 67114 - DNA, 30 bp, Artificial Sequence
  Synthetic oligonucleotide
tcacgcctgggcggtgacaagagtgtcaca

SEQ ID NO: 67115 - DNA, 30 bp, Artificial Sequence
  Synthetic oligonucleotide
agtcgaaaatgctgggtgggcaccaagaca

SEQ ID NO: 67116 - DNA, 30 bp, Artificial Sequence
  Synthetic oligonucleotide
tgtgtgcacgagtcgtataactggaagaca

SEQ ID NO: 67117 - DNA, 30 bp, Artificial Sequence
  Synthetic oligonucleotide
tcgtcctatccataaaaagagattaagaca

SEQ ID NO: 67118 - DNA, 30 bp, Artificial Sequence
  Synthetic oligonucleotide
tgttagaaacagtagtgtcagaccgagaca

SEQ ID NO: 67119 - DNA, 30 bp, Artificial Sequence
  Synthetic oligonucleotide
tcgccaacgcagggcagaattgatgagaca

SEQ ID NO: 67120 - DNA, 30 bp, Artificial Sequence
  Synthetic oligonucleotide
acactacggtgaaactgtacgcaatagaca

SEQ ID NO: 67121 - DNA, 30 bp, Artificial Sequence
  Synthetic oligonucleotide
cgtcacggccgacattattgtgactagaca

SEQ ID NO: 67122 - DNA, 30 bp, Artificial Sequence
  Synthetic oligonucleotide
taaacctaaggaaccgctgcgcagtagaca

SEQ ID NO: 67123 - DNA, 30 bp, Artificial Sequence
  Synthetic oligonucleotide
tcgaaggtacgtgaatagtaggtttagaca

SEQ ID NO: 67124 - DNA, 30 bp, Artificial Sequence
  Synthetic oligonucleotide
agcatcctggggtcataactctcaacgaca

SEQ ID NO: 67125 - DNA, 30 bp, Artificial Sequence
  Synthetic oligonucleotide
cctcgtctatagtatccaagggtgccgaca

SEQ ID NO: 67126 - DNA, 30 bp, Artificial Sequence
  Synthetic oligonucleotide
gtggtttattcaacgagacactctccgaca

SEQ ID NO: 67127 - DNA, 30 bp, Artificial Sequence
  Synthetic oligonucleotide
atcgtgatctctagaactactgtcgcgaca

SEQ ID NO: 67128 - DNA, 30 bp, Artificial Sequence
  Synthetic oligonucleotide
agagcgcctttgataatgagtcgtgcgaca

SEQ ID NO: 67129 - DNA, 30 bp, Artificial Sequence
  Synthetic oligonucleotide
tcaataaagttatgttcaacctttgcgaca

SEQ ID NO: 67130 - DNA, 30 bp, Artificial Sequence
  Synthetic oligonucleotide
gtagcacatagtgttctagctcaaaggaca

SEQ ID NO: 67131 - DNA, 30 bp, Artificial Sequence
  Synthetic oligonucleotide
agactttgcaatcttagttggaacaggaca

SEQ ID NO: 67132 - DNA, 30 bp, Artificial Sequence
  Synthetic oligonucleotide
taccagcagcctgcgtgcatcaagaggaca

SEQ ID NO: 67133 - DNA, 30 bp, Artificial Sequence
  Synthetic oligonucleotide
agcgcatacatcgtagttacggcgaggaca

SEQ ID NO: 67134 - DNA, 30 bp, Artificial Sequence
  Synthetic oligonucleotide
gggtgctggtcgttatgaactatagggaca

SEQ ID NO: 67135 - DNA, 30 bp, Artificial Sequence
  Synthetic oligonucleotide
cgcgatctagagtggatacgcctagggaca

SEQ ID NO: 67136 - DNA, 30 bp, Artificial Sequence
  Synthetic oligonucleotide
ttacggatcgaccacgaatgagattggaca

SEQ ID NO: 67137 - DNA, 30 bp, Artificial Sequence
  Synthetic oligonucleotide
acaatcgaatgtgaccgagaatacatgaca

SEQ ID NO: 67138 - DNA, 30 bp, Artificial Sequence
  Synthetic oligonucleotide
gacagacccggtaactgacgaaccctgaca

SEQ ID NO: 67139 - DNA, 30 bp, Artificial Sequence
  Synthetic oligonucleotide
gatggtcaagggccaatcgggatgctgaca

SEQ ID NO: 67140 - DNA, 30 bp, Artificial Sequence
  Synthetic oligonucleotide
catgagggggtcaacgctctcgctgtgaca

SEQ ID NO: 67141 - DNA, 30 bp, Artificial Sequence
  Synthetic oligonucleotide
gtgtcggttagatcctactcagaattgaca

SEQ ID NO: 67142 - DNA, 30 bp, Artificial Sequence
  Synthetic oligonucleotide
gagcgcggactgcatagaaaccctcataca

SEQ ID NO: 67143 - DNA, 30 bp, Artificial Sequence
  Synthetic oligonucleotide
ctgaataactccaaaatgtaggcagataca

SEQ ID NO: 67144 - DNA, 30 bp, Artificial Sequence
  Synthetic oligonucleotide
tgggcgtggacttacgtaaggactactaca

SEQ ID NO: 67145 - DNA, 30 bp, Artificial Sequence
  Synthetic oligonucleotide
tgggcagacattccggaagggtcagctaca

SEQ ID NO: 67146 - DNA, 30 bp, Artificial Sequence
  Synthetic oligonucleotide
ggcggacggcggaggccccgatacgctaca

SEQ ID NO: 67147 - DNA, 30 bp, Artificial Sequence
  Synthetic oligonucleotide
tgagccgctctctaggaggagtacgctaca

SEQ ID NO: 67148 - DNA, 30 bp, Artificial Sequence
  Synthetic oligonucleotide
cgcacaaggctattcaaactaggtgctaca

SEQ ID NO: 67149 - DNA, 30 bp, Artificial Sequence
  Synthetic oligonucleotide
gtgacaactccccgctgaaaaaggcgtaca

SEQ ID NO: 67150 - DNA, 30 bp, Artificial Sequence
  Synthetic oligonucleotide
gaatgagcgggactgatgtcaaattgtaca

SEQ ID NO: 67151 - DNA, 30 bp, Artificial Sequence
  Synthetic oligonucleotide
ccgagattgataatcccgcacccttgtaca

SEQ ID NO: 67152 - DNA, 30 bp, Artificial Sequence
  Synthetic oligonucleotide
tccgggcagaaggggacagtgtatgttaca

SEQ ID NO: 67153 - DNA, 30 bp, Artificial Sequence
  Synthetic oligonucleotide
gtgtgaaatcgctgtacctaatacaaacca

SEQ ID NO: 67154 - DNA, 30 bp, Artificial Sequence
  Synthetic oligonucleotide
caacgaactcccagcgggaaaatgaaacca

SEQ ID NO: 67155 - DNA, 30 bp, Artificial Sequence
  Synthetic oligonucleotide
agtgacacataagatccaccttccgaacca

SEQ ID NO: 67156 - DNA, 31 bp, Artificial Sequence
  Synthetic oligonucleotide
cggggtattgactcaggcctaggcataacca

SEQ ID NO: 67157 - DNA, 30 bp, Artificial Sequence
  Synthetic oligonucleotide
ggcagagacagcccgctggtacactaacca

SEQ ID NO: 67158 - DNA, 30 bp, Artificial Sequence
  Synthetic oligonucleotide
aaggtacttactgggaaaagaacgtaacca

SEQ ID NO: 67159 - DNA, 30 bp, Artificial Sequence
  Synthetic oligonucleotide
tcgaccggacgtatgaccatccatccacca

SEQ ID NO: 67160 - DNA, 30 bp, Artificial Sequence
  Synthetic oligonucleotide
tgagaaaatgtgcaagaactcgcagcacca

SEQ ID NO: 67161 - DNA, 30 bp, Artificial Sequence
  Synthetic oligonucleotide
gcttcaaggatgaatattttttcagcacca

SEQ ID NO: 67162 - DNA, 30 bp, Artificial Sequence
  Synthetic oligonucleotide
cctgacacaacgaatgctgagagttcacca

SEQ ID NO: 67163 - DNA, 30 bp, Artificial Sequence
  Synthetic oligonucleotide
gggcagaagagcttcgtatcactcggacca

SEQ ID NO: 67164 - DNA, 30 bp, Artificial Sequence
  Synthetic oligonucleotide
cgttctagggtaccggaagtacatggacca

SEQ ID NO: 67165 - DNA, 30 bp, Artificial Sequence
  Synthetic oligonucleotide
catgataattcatgggcaaaatttggacca

SEQ ID NO: 67166 - DNA, 30 bp, Artificial Sequence
  Synthetic oligonucleotide
gagaatatacgctgtgtaacgttgtgacca

SEQ ID NO: 67167 - DNA, 30 bp, Artificial Sequence
  Synthetic oligonucleotide
gagaaagggcgggttatgagatgcatacca

SEQ ID NO: 67168 - DNA, 30 bp, Artificial Sequence
  Synthetic oligonucleotide
agcggttaagagggggcacagatgatacca

SEQ ID NO: 67169 - DNA, 30 bp, Artificial Sequence
  Synthetic oligonucleotide
agcgagaaccaagtacacataaccctacca

SEQ ID NO: 67170 - DNA, 30 bp, Artificial Sequence
  Synthetic oligonucleotide
cctcctatgaagggaagccgaactctacca

SEQ ID NO: 67171 - DNA, 30 bp, Artificial Sequence
  Synthetic oligonucleotide
ctaacgagtgagttaacaatggacttacca

SEQ ID NO: 67172 - DNA, 30 bp, Artificial Sequence
  Synthetic oligonucleotide
cagaggcgatcgggtcgtgggcatcaccca

SEQ ID NO: 67173 - DNA, 30 bp, Artificial Sequence
  Synthetic oligonucleotide
aacgaaatatgctgaacctaaaccgaccca

SEQ ID NO: 67174 - DNA, 30 bp, Artificial Sequence
  Synthetic oligonucleotide
cgtcagattacccagatgaagcgcgcccca

SEQ ID NO: 67175 - DNA, 30 bp, Artificial Sequence
  Synthetic oligonucleotide
tgaggatgaggatattctgtttatgcccca

SEQ ID NO: 67176 - DNA, 30 bp, Artificial Sequence
  Synthetic oligonucleotide
ctacgggaaacacaaatgtgaacctcccca

SEQ ID NO: 67177 - DNA, 30 bp, Artificial Sequence
  Synthetic oligonucleotide
agatacgctgagtcaatcatagtccgccca

SEQ ID NO: 67178 - DNA, 30 bp, Artificial Sequence
  Synthetic oligonucleotide
tctgggtacgaatgtgacagtgtaggccca

SEQ ID NO: 67179 - DNA, 30 bp, Artificial Sequence
  Synthetic oligonucleotide
cggttatatgcgtcgatctaagtgtgccca

SEQ ID NO: 67180 - DNA, 30 bp, Artificial Sequence
  Synthetic oligonucleotide
cactactgactctggtcagaaaacctccca

SEQ ID NO: 67181 - DNA, 30 bp, Artificial Sequence
  Synthetic oligonucleotide
tggggtcaacgggcgaagtcaacacagcca

SEQ ID NO: 67182 - DNA, 30 bp, Artificial Sequence
  Synthetic oligonucleotide
ggaaaaacaaattgacagaacagacagcca

SEQ ID NO: 67183 - DNA, 30 bp, Artificial Sequence
  Synthetic oligonucleotide
acgactcgacttcagcagcctcatcagcca

SEQ ID NO: 67184 - DNA, 30 bp, Artificial Sequence
  Synthetic oligonucleotide
tctagtctagcaatgtgtagggctcagcca

SEQ ID NO: 67185 - DNA, 30 bp, Artificial Sequence
  Synthetic oligonucleotide
tcttacctcagcggatctaccatcgagcca

SEQ ID NO: 67186 - DNA, 30 bp, Artificial Sequence
  Synthetic oligonucleotide
cagcaattaagtcaccagggggcgtagcca

SEQ ID NO: 67187 - DNA, 30 bp, Artificial Sequence
  Synthetic oligonucleotide
tcaatacaatgatatatcacgatttagcca

SEQ ID NO: 67188 - DNA, 30 bp, Artificial Sequence
  Synthetic oligonucleotide
agttcaggtgtggccggtctaagttcgcca

SEQ ID NO: 67189 - DNA, 29 bp, Artificial Sequence
  Synthetic oligonucleotide
cccgaaataggaaggaagacacgaggcca

SEQ ID NO: 67190 - DNA, 30 bp, Artificial Sequence
  Synthetic oligonucleotide
caagtagaagccccacatactctagggcca

SEQ ID NO: 67191 - DNA, 30 bp, Artificial Sequence
  Synthetic oligonucleotide
atagcaggaaacagccacacaggcgggcca

SEQ ID NO: 67192 - DNA, 30 bp, Artificial Sequence
  Synthetic oligonucleotide
tagaacgcgtgcggtgttcaaagcatgcca

SEQ ID NO: 67193 - DNA, 30 bp, Artificial Sequence
  Synthetic oligonucleotide
atgattcacagaggacacataagagtgcca

SEQ ID NO: 67194 - DNA, 30 bp, Artificial Sequence
  Synthetic oligonucleotide
ctcacgggatcaggccaagatttcaatcca

SEQ ID NO: 67195 - DNA, 30 bp, Artificial Sequence
  Synthetic oligonucleotide
aacataaaggatgagaaagaggcacatcca

SEQ ID NO: 67196 - DNA, 30 bp, Artificial Sequence
  Synthetic oligonucleotide
taggacaaagaatatgccggtctacatcca

SEQ ID NO: 67197 - DNA, 30 bp, Artificial Sequence
  Synthetic oligonucleotide
acaatccaggtacaggctagcaggcatcca

SEQ ID NO: 67198 - DNA, 30 bp, Artificial Sequence
  Synthetic oligonucleotide
acaagggataacaaggtatctacctatcca

SEQ ID NO: 67199 - DNA, 30 bp, Artificial Sequence
  Synthetic oligonucleotide
tagcaacggtagaatgagcattggactcca

SEQ ID NO: 67200 - DNA, 30 bp, Artificial Sequence
  Synthetic oligonucleotide
tcggatcctcaacattgctcacgagctcca

SEQ ID NO: 67201 - DNA, 30 bp, Artificial Sequence
  Synthetic oligonucleotide
ccaacggcaaagcttaactaaactgctcca

SEQ ID NO: 67202 - DNA, 30 bp, Artificial Sequence
  Synthetic oligonucleotide
acaagtctgtatcaaacatcgggcagtcca

SEQ ID NO: 67203 - DNA, 30 bp, Artificial Sequence
  Synthetic oligonucleotide
aggaataattccccagttgagccaggtcca

SEQ ID NO: 67204 - DNA, 30 bp, Artificial Sequence
  Synthetic oligonucleotide
agtgaactgtacaacacaggagaatgtcca

SEQ ID NO: 67205 - DNA, 30 bp, Artificial Sequence
  Synthetic oligonucleotide
tggatggcgtgactgccaacgagatgtcca

SEQ ID NO: 67206 - DNA, 30 bp, Artificial Sequence
  Synthetic oligonucleotide
ggcatgtgatcctaaggtagaatacttcca

SEQ ID NO: 67207 - DNA, 30 bp, Artificial Sequence
  Synthetic oligonucleotide
cggaggcgtacagctgataaccaatttcca

SEQ ID NO: 67208 - DNA, 30 bp, Artificial Sequence
  Synthetic oligonucleotide
gggttgcaacactgacattgaacaaaagca

SEQ ID NO: 67209 - DNA, 30 bp, Artificial Sequence
  Synthetic oligonucleotide
aggttaggtgcgagttcacaactaaaagca

SEQ ID NO: 67210 - DNA, 30 bp, Artificial Sequence
  Synthetic oligonucleotide
accgtactacgggatgacgtccgccaagca

SEQ ID NO: 67211 - DNA, 30 bp, Artificial Sequence
  Synthetic oligonucleotide
gttagaatccacgaaaggagaatccaagca

SEQ ID NO: 67212 - DNA, 30 bp, Artificial Sequence
  Synthetic oligonucleotide
aaagtggaattgaagtaggcgtaagaagca

SEQ ID NO: 67213 - DNA, 30 bp, Artificial Sequence
  Synthetic oligonucleotide
catttaattctaaggagaatgaaataagca

SEQ ID NO: 67214 - DNA, 30 bp, Artificial Sequence
  Synthetic oligonucleotide
gacgttaaccagattacgaaggactaagca

SEQ ID NO: 67215 - DNA, 30 bp, Artificial Sequence
  Synthetic oligonucleotide
atggtttcaccgtgacggtaaatctaagca

SEQ ID NO: 67216 - DNA, 30 bp, Artificial Sequence
  Synthetic oligonucleotide
gcattacagacttcataacgattgtaagca

SEQ ID NO: 67217 - DNA, 30 bp, Artificial Sequence
  Synthetic oligonucleotide
acgggatccggcaagtctagtgcttaagca

SEQ ID NO: 67218 - DNA, 30 bp, Artificial Sequence
  Synthetic oligonucleotide
tacaggaacatgataaggagccgttaagca

SEQ ID NO: 67219 - DNA, 30 bp, Artificial Sequence
  Synthetic oligonucleotide
cagcgaagcgactatatttatacggcagca

SEQ ID NO: 67220 - DNA, 30 bp, Artificial Sequence
  Synthetic oligonucleotide
ggtctctctgacagagtacaaaaaagagca

SEQ ID NO: 67221 - DNA, 30 bp, Artificial Sequence
  Synthetic oligonucleotide
gccttttctagaggataaacacagcgagca

SEQ ID NO: 67222 - DNA, 30 bp, Artificial Sequence
  Synthetic oligonucleotide
ctgatgtaaggtctacgtcggtgcggagca

SEQ ID NO: 67223 - DNA, 30 bp, Artificial Sequence
  Synthetic oligonucleotide
ctacgaccagatgtctggaccgtgggagca

SEQ ID NO: 67224 - DNA, 30 bp, Artificial Sequence
  Synthetic oligonucleotide
acgcgcaccgtcggaacttgtcactgagca

SEQ ID NO: 67225 - DNA, 30 bp, Artificial Sequence
  Synthetic oligonucleotide
tcatataagcactgggactcggactgagca

SEQ ID NO: 67226 - DNA, 30 bp, Artificial Sequence
  Synthetic oligonucleotide
cagaggtgaactaacaggcaagcgtgagca

SEQ ID NO: 67227 - DNA, 30 bp, Artificial Sequence
  Synthetic oligonucleotide
catgcgtcgatgtccgcgctttcaatagca

SEQ ID NO: 67228 - DNA, 30 bp, Artificial Sequence
  Synthetic oligonucleotide
gtcttacaacgagggtcacaccccatagca

SEQ ID NO: 67229 - DNA, 30 bp, Artificial Sequence
  Synthetic oligonucleotide
gtgttaatcatttagaactcgcgcctagca

SEQ ID NO: 67230 - DNA, 30 bp, Artificial Sequence
  Synthetic oligonucleotide
ggacaaaccggaatcctgctagctttagca

SEQ ID NO: 67231 - DNA, 30 bp, Artificial Sequence
  Synthetic oligonucleotide
cggaacatcggtgcgacaatgcggaacgca

SEQ ID NO: 67232 - DNA, 30 bp, Artificial Sequence
  Synthetic oligonucleotide
taacgatagggataaacgggcgtacacgca

SEQ ID NO: 67233 - DNA, 30 bp, Artificial Sequence
  Synthetic oligonucleotide
ataaatcaagtaccacctcaaagccacgca

SEQ ID NO: 67234 - DNA, 30 bp, Artificial Sequence
  Synthetic oligonucleotide
cgattacatcttgacctcaagactcacgca

SEQ ID NO: 67235 - DNA, 30 bp, Artificial Sequence
  Synthetic oligonucleotide
cgaataatatcgagatctaggaactacgca

SEQ ID NO: 67236 - DNA, 30 bp, Artificial Sequence
  Synthetic oligonucleotide
ggatgatactgcgagcatcacttcaccgca

SEQ ID NO: 67237 - DNA, 30 bp, Artificial Sequence
  Synthetic oligonucleotide
cagacttgggacgcgtgaaatatgaccgca

SEQ ID NO: 67238 - DNA, 29 bp, Artificial Sequence
  Synthetic oligonucleotide
ggacgtcacaggaaatatctccgcccgca

SEQ ID NO: 67239 - DNA, 30 bp, Artificial Sequence
  Synthetic oligonucleotide
aagtgggaccggaatatactactatccgca

SEQ ID NO: 67240 - DNA, 30 bp, Artificial Sequence
  Synthetic oligonucleotide
atactgcgtcatgatctccacacctccgca

SEQ ID NO: 67241 - DNA, 30 bp, Artificial Sequence
  Synthetic oligonucleotide
tcaaatccagtatgagggcatgtgtccgca

SEQ ID NO: 67242 - DNA, 30 bp, Artificial Sequence
  Synthetic oligonucleotide
tagaccgcgcaggaacagtaggcaagcgca

SEQ ID NO: 67243 - DNA, 30 bp, Artificial Sequence
  Synthetic oligonucleotide
agttgtgacggggagagttgcaacagcgca

SEQ ID NO: 67244 - DNA, 30 bp, Artificial Sequence
  Synthetic oligonucleotide
tgcaaggggagttcctatagttggggcgca

SEQ ID NO: 67245 - DNA, 30 bp, Artificial Sequence
  Synthetic oligonucleotide
agagagcccagtgcttgtggtaactgcgca

SEQ ID NO: 67246 - DNA, 30 bp, Artificial Sequence
  Synthetic oligonucleotide
caagtcatatttcaacacatctcctgcgca

SEQ ID NO: 67247 - DNA, 30 bp, Artificial Sequence
  Synthetic oligonucleotide
caagttaaaacgggatacattaggtgcgca

SEQ ID NO: 67248 - DNA, 30 bp, Artificial Sequence
  Synthetic oligonucleotide
gcggtgtaaaacttcttaaccgattgcgca

SEQ ID NO: 67249 - DNA, 30 bp, Artificial Sequence
  Synthetic oligonucleotide
agccgggtacataaagttgtcgcttgcgca

SEQ ID NO: 67250 - DNA, 30 bp, Artificial Sequence
  Synthetic oligonucleotide
ttaagtgcgtgccgtcggaggggagtcgca

SEQ ID NO: 67251 - DNA, 30 bp, Artificial Sequence
  Synthetic oligonucleotide
gtagtatagactagtccagaagcaaaggca

SEQ ID NO: 67252 - DNA, 30 bp, Artificial Sequence
  Synthetic oligonucleotide
gtatgagtggacgcattgacagtaaaggca

SEQ ID NO: 67253 - DNA, 30 bp, Artificial Sequence
  Synthetic oligonucleotide
tgtaagggccagagacttatgtccaaggca

SEQ ID NO: 67254 - DNA, 30 bp, Artificial Sequence
  Synthetic oligonucleotide
gtaagcgcgtcgattgtcaatgtcaaggca

SEQ ID NO: 67255 - DNA, 30 bp, Artificial Sequence
  Synthetic oligonucleotide
tgttagtattgtgccaagcaggaagaggca

SEQ ID NO: 67256 - DNA, 30 bp, Artificial Sequence
  Synthetic oligonucleotide
catcgaggtattcaccgataatgttaggca

SEQ ID NO: 67257 - DNA, 30 bp, Artificial Sequence
  Synthetic oligonucleotide
tagcgtaccttgatataccgagaagcggca

SEQ ID NO: 67258 - DNA, 30 bp, Artificial Sequence
  Synthetic oligonucleotide
tggtattgtgacgttcttggatcagcggca

SEQ ID NO: 67259 - DNA, 30 bp, Artificial Sequence
  Synthetic oligonucleotide
agttgacacaaaaaaacgcgagcgagggca

SEQ ID NO: 67260 - DNA, 30 bp, Artificial Sequence
  Synthetic oligonucleotide
tcggcacacaggaccggaaacgcacgggca

SEQ ID NO: 67261 - DNA, 30 bp, Artificial Sequence
  Synthetic oligonucleotide
cgtaattcgcggcggttgtacactggggca

SEQ ID NO: 67262 - DNA, 30 bp, Artificial Sequence
  Synthetic oligonucleotide
tggtcacaagtacttagagctaagtgggca

SEQ ID NO: 67263 - DNA, 30 bp, Artificial Sequence
  Synthetic oligonucleotide
gtgtttagggtacctggccaagagtgggca

SEQ ID NO: 67264 - DNA, 30 bp, Artificial Sequence
  Synthetic oligonucleotide
cgctacacgactccacagacaacaatggca

SEQ ID NO: 67265 - DNA, 30 bp, Artificial Sequence
  Synthetic oligonucleotide
ggtaatgatgaatggcgattatgaatggca

SEQ ID NO: 67266 - DNA, 30 bp, Artificial Sequence
  Synthetic oligonucleotide
caggcatgtgatcagcgcagaactatggca

SEQ ID NO: 67267 - DNA, 31 bp, Artificial Sequence
  Synthetic oligonucleotide
gcgatgacgggtcggcacttgtattctggca

SEQ ID NO: 67268 - DNA, 31 bp, Artificial Sequence
  Synthetic oligonucleotide
ggcacaaggggagatgtgtgtttgagtggca

SEQ ID NO: 67269 - DNA, 30 bp, Artificial Sequence
  Synthetic oligonucleotide
atgaactccacagaaattacaagggtggca

SEQ ID NO: 67270 - DNA, 30 bp, Artificial Sequence
  Synthetic oligonucleotide
cgtcaaagttctcgtcgtaacagggtggca

SEQ ID NO: 67271 - DNA, 30 bp, Artificial Sequence
  Synthetic oligonucleotide
agacgatggtctggcgtaacaattgtggca

SEQ ID NO: 67272 - DNA, 30 bp, Artificial Sequence
  Synthetic oligonucleotide
ccggtacaagagcaggactctggattggca

SEQ ID NO: 67273 - DNA, 30 bp, Artificial Sequence
  Synthetic oligonucleotide
cttgggaggcgctgacaaaactcgttggca

SEQ ID NO: 67274 - DNA, 30 bp, Artificial Sequence
  Synthetic oligonucleotide
acgctaacttagcggggcttcaaccatgca

SEQ ID NO: 67275 - DNA, 30 bp, Artificial Sequence
  Synthetic oligonucleotide
atgaatggaatgtcgtggtgacaccatgca

SEQ ID NO: 67276 - DNA, 30 bp, Artificial Sequence
  Synthetic oligonucleotide
cgttgccatactcgcaatcttcaccatgca

SEQ ID NO: 67277 - DNA, 30 bp, Artificial Sequence
  Synthetic oligonucleotide
gaggcgtacgtgtgaagcactaatgatgca

SEQ ID NO: 67278 - DNA, 30 bp, Artificial Sequence
  Synthetic oligonucleotide
gggcgaaaggtaataggactttcgactgca

SEQ ID NO: 67279 - DNA, 30 bp, Artificial Sequence
  Synthetic oligonucleotide
gagaacggcgaacgataagttttacctgca

SEQ ID NO: 67280 - DNA, 30 bp, Artificial Sequence
  Synthetic oligonucleotide
gcgcgtttgccatcaaccacaccagctgca

SEQ ID NO: 67281 - DNA, 30 bp, Artificial Sequence
  Synthetic oligonucleotide
aggttaatgtgggaaagtattggggctgca

SEQ ID NO: 67282 - DNA, 30 bp, Artificial Sequence
  Synthetic oligonucleotide
ggggaacataggagatcgccaaatgctgca

SEQ ID NO: 67283 - DNA, 30 bp, Artificial Sequence
  Synthetic oligonucleotide
tcaataatcgcggtgagggcatcgtctgca

SEQ ID NO: 67284 - DNA, 30 bp, Artificial Sequence
  Synthetic oligonucleotide
gatccatggggcaaacattacgtgagtgca

SEQ ID NO: 67285 - DNA, 30 bp, Artificial Sequence
  Synthetic oligonucleotide
aggagggagtccataagtcaattgggtgca

SEQ ID NO: 67286 - DNA, 30 bp, Artificial Sequence
  Synthetic oligonucleotide
gcggtcccagagtatatgacccactgtgca

SEQ ID NO: 67287 - DNA, 30 bp, Artificial Sequence
  Synthetic oligonucleotide
agccaatagtggcattacttggggtgtgca

SEQ ID NO: 67288 - DNA, 30 bp, Artificial Sequence
  Synthetic oligonucleotide
acggaccccacgttttgataaataattgca

SEQ ID NO: 67289 - DNA, 30 bp, Artificial Sequence
  Synthetic oligonucleotide
tgggcggtacatcagccagatttaattgca

SEQ ID NO: 67290 - DNA, 30 bp, Artificial Sequence
  Synthetic oligonucleotide
ctcatggaaccaaagcaagtcgagattgca

SEQ ID NO: 67291 - DNA, 30 bp, Artificial Sequence
  Synthetic oligonucleotide
ctagaggggagatagtcagcaattattgca

SEQ ID NO: 67292 - DNA, 30 bp, Artificial Sequence
  Synthetic oligonucleotide
tgtcttgcgcaggggagtccagaagttgca

SEQ ID NO: 67293 - DNA, 30 bp, Artificial Sequence
  Synthetic oligonucleotide
acttggatgtagattaggcggggcgttgca

SEQ ID NO: 67294 - DNA, 30 bp, Artificial Sequence
  Synthetic oligonucleotide
tcacggctctgatcagtcacttcaaaatca

SEQ ID NO: 67295 - DNA, 30 bp, Artificial Sequence
  Synthetic oligonucleotide
ctgtatgcgcacagaaagaaagggaaatca

SEQ ID NO: 67296 - DNA, 30 bp, Artificial Sequence
  Synthetic oligonucleotide
ggatagctacgagaccggcgctctaaatca

SEQ ID NO: 67297 - DNA, 30 bp, Artificial Sequence
  Synthetic oligonucleotide
gtctgtcgtcaataagggaagccgcaatca

SEQ ID NO: 67298 - DNA, 30 bp, Artificial Sequence
  Synthetic oligonucleotide
caagttaagtaaaccaggccgtgcgaatca

SEQ ID NO: 67299 - DNA, 30 bp, Artificial Sequence
  Synthetic oligonucleotide
cctggctcgaggaggcaggaagacacatca

SEQ ID NO: 67300 - DNA, 30 bp, Artificial Sequence
  Synthetic oligonucleotide
caatgtgaaccgtcgaaatctcatccatca

SEQ ID NO: 67301 - DNA, 30 bp, Artificial Sequence
  Synthetic oligonucleotide
atagcaaggtgcattaacaaacaggcatca

SEQ ID NO: 67302 - DNA, 30 bp, Artificial Sequence
  Synthetic oligonucleotide
cacaaaggtctaatcgttcatactgcatca

SEQ ID NO: 67303 - DNA, 30 bp, Artificial Sequence
  Synthetic oligonucleotide
ttactacctatcacatgagatgaaagatca

SEQ ID NO: 67304 - DNA, 30 bp, Artificial Sequence
  Synthetic oligonucleotide
actacggaggccttgaggattgggagatca

SEQ ID NO: 67305 - DNA, 30 bp, Artificial Sequence
  Synthetic oligonucleotide
cggctctgtgtaccatctccgcaacgatca

SEQ ID NO: 67306 - DNA, 30 bp, Artificial Sequence
  Synthetic oligonucleotide
cgggtctaaactaccatgaattagcgatca

SEQ ID NO: 67307 - DNA, 30 bp, Artificial Sequence
  Synthetic oligonucleotide
agtcaagatttactgaatggatctcgatca

SEQ ID NO: 67308 - DNA, 30 bp, Artificial Sequence
  Synthetic oligonucleotide
ttggaattgtaaataagagataaaggatca

SEQ ID NO: 67309 - DNA, 30 bp, Artificial Sequence
  Synthetic oligonucleotide
gaggaagagatgtaccttgcaggctgatca

SEQ ID NO: 67310 - DNA, 30 bp, Artificial Sequence
  Synthetic oligonucleotide
cggtcacagacgaaaactggatattgatca

SEQ ID NO: 67311 - DNA, 30 bp, Artificial Sequence
  Synthetic oligonucleotide
gcagacaaagaaaaatggctaaccatatca

SEQ ID NO: 67312 - DNA, 30 bp, Artificial Sequence
  Synthetic oligonucleotide
acaacagaaagagttaagggtttgctatca

SEQ ID NO: 67313 - DNA, 30 bp, Artificial Sequence
  Synthetic oligonucleotide
aatgcccgagagagctgtcggcgcaactca

SEQ ID NO: 67314 - DNA, 30 bp, Artificial Sequence
  Synthetic oligonucleotide
ccatggtgggtagcgttctgtcggaactca

SEQ ID NO: 67315 - DNA, 30 bp, Artificial Sequence
  Synthetic oligonucleotide
aggtccagcccacgatcaaaataggactca

SEQ ID NO: 67316 - DNA, 30 bp, Artificial Sequence
  Synthetic oligonucleotide
aataacagcgagaccacgttaaggacctca

SEQ ID NO: 67317 - DNA, 30 bp, Artificial Sequence
  Synthetic oligonucleotide
tcaaggacaacagttcataccactacctca

SEQ ID NO: 67318 - DNA, 30 bp, Artificial Sequence
  Synthetic oligonucleotide
gtcaccgggagcaaacactaacgtacctca

SEQ ID NO: 67319 - DNA, 30 bp, Artificial Sequence
  Synthetic oligonucleotide
tccaagcgcgagctctcgacagccccctca

SEQ ID NO: 67320 - DNA, 30 bp, Artificial Sequence
  Synthetic oligonucleotide
gaaacaccgatggaaatcaacgctgcctca

SEQ ID NO: 67321 - DNA, 30 bp, Artificial Sequence
  Synthetic oligonucleotide
gtggtaatgtcgaagtggaaagaaggctca

SEQ ID NO: 67322 - DNA, 30 bp, Artificial Sequence
  Synthetic oligonucleotide
acgcgccccggataaacagtcctaggctca

SEQ ID NO: 67323 - DNA, 30 bp, Artificial Sequence
  Synthetic oligonucleotide
tgtgcaacagctgtgacgttaaatggctca

SEQ ID NO: 67324 - DNA, 30 bp, Artificial Sequence
  Synthetic oligonucleotide
aaatgcgtaataggaaagtgacatatctca

SEQ ID NO: 67325 - DNA, 30 bp, Artificial Sequence
  Synthetic oligonucleotide
aaccagcgtgacagatgctgcattttctca

SEQ ID NO: 67326 - DNA, 30 bp, Artificial Sequence
  Synthetic oligonucleotide
gaacgtagcccagctaggtgaggagagtca

SEQ ID NO: 67327 - DNA, 30 bp, Artificial Sequence
  Synthetic oligonucleotide
gtagttcagtcgtcgtaagtgatcgagtca

SEQ ID NO: 67328 - DNA, 30 bp, Artificial Sequence
  Synthetic oligonucleotide
gtgagtgtgaaaagcatcggatctgagtca

SEQ ID NO: 67329 - DNA, 30 bp, Artificial Sequence
  Synthetic oligonucleotide
agtcaaataatagaatgtgcttttgagtca

SEQ ID NO: 67330 - DNA, 30 bp, Artificial Sequence
  Synthetic oligonucleotide
tgtcccgtgatcggcatggactgctagtca

SEQ ID NO: 67331 - DNA, 30 bp, Artificial Sequence
  Synthetic oligonucleotide
cgaacatcgtagcgaaagtagttaacgtca

SEQ ID NO: 67332 - DNA, 30 bp, Artificial Sequence
  Synthetic oligonucleotide
gcaaagcaaacagtgcatattgtgacgtca

SEQ ID NO: 67333 - DNA, 30 bp, Artificial Sequence
  Synthetic oligonucleotide
gaaacagactcgtgatgaggcttgccgtca

SEQ ID NO: 67334 - DNA, 30 bp, Artificial Sequence
  Synthetic oligonucleotide
agtggtaaacggtacgtctcggatccgtca

SEQ ID NO: 67335 - DNA, 30 bp, Artificial Sequence
  Synthetic oligonucleotide
gacgactaaagaactcgtcgagcctcgtca

SEQ ID NO: 67336 - DNA, 30 bp, Artificial Sequence
  Synthetic oligonucleotide
ggtggggtctagtgagtgctccaaaggtca

SEQ ID NO: 67337 - DNA, 30 bp, Artificial Sequence
  Synthetic oligonucleotide
agctagctgtaagttccaaaaagaaggtca

SEQ ID NO: 67338 - DNA, 30 bp, Artificial Sequence
  Synthetic oligonucleotide
gggagtgagtgctcccagacgattaggtca

SEQ ID NO: 67339 - DNA, 30 bp, Artificial Sequence
  Synthetic oligonucleotide
aagaacctcaaaacggtaagtgaacggtca

SEQ ID NO: 67340 - DNA, 30 bp, Artificial Sequence
  Synthetic oligonucleotide
caggaccgatccaacgtgacttgacggtca

SEQ ID NO: 67341 - DNA, 30 bp, Artificial Sequence
  Synthetic oligonucleotide
tctgaccaaacagcagcatcataagggtca

SEQ ID NO: 67342 - DNA, 30 bp, Artificial Sequence
  Synthetic oligonucleotide
agtttcagctaacggccgaaaacgtggtca

SEQ ID NO: 67343 - DNA, 30 bp, Artificial Sequence
  Synthetic oligonucleotide
gtttgagcgaaactgatcttcgatatgtca

SEQ ID NO: 67344 - DNA, 30 bp, Artificial Sequence
  Synthetic oligonucleotide
gacaggacgaggtgataagttggactgtca

SEQ ID NO: 67345 - DNA, 30 bp, Artificial Sequence
  Synthetic oligonucleotide
gagcgatgccccgtaataacaaacctgtca

SEQ ID NO: 67346 - DNA, 30 bp, Artificial Sequence
  Synthetic oligonucleotide
tgcctcggccaaatggtgaaggtgctgtca

SEQ ID NO: 67347 - DNA, 30 bp, Artificial Sequence
  Synthetic oligonucleotide
tgcaagggcacatgccgcgtgaggcattca

SEQ ID NO: 67348 - DNA, 30 bp, Artificial Sequence
  Synthetic oligonucleotide
gtctacctgtgctcggtggaagggcattca

SEQ ID NO: 67349 - DNA, 30 bp, Artificial Sequence
  Synthetic oligonucleotide
ctgaggtacccatcgccaaccgctcattca

SEQ ID NO: 67350 - DNA, 30 bp, Artificial Sequence
  Synthetic oligonucleotide
ccagccgacatggtccagtacaaagattca

SEQ ID NO: 67351 - DNA, 30 bp, Artificial Sequence
  Synthetic oligonucleotide
gatgccgaaatacgcgagacaatctattca

SEQ ID NO: 67352 - DNA, 30 bp, Artificial Sequence
  Synthetic oligonucleotide
cgagctgcaaatgttgtccacagcacttca

SEQ ID NO: 67353 - DNA, 30 bp, Artificial Sequence
  Synthetic oligonucleotide
cgccaagtccactctggaccatgcacttca

SEQ ID NO: 67354 - DNA, 30 bp, Artificial Sequence
  Synthetic oligonucleotide
gacaaatacgtctgacggaataagacttca

SEQ ID NO: 67355 - DNA, 30 bp, Artificial Sequence
  Synthetic oligonucleotide
ggtacaggatgacacgtacgtagcccttca

SEQ ID NO: 67356 - DNA, 30 bp, Artificial Sequence
  Synthetic oligonucleotide
ggggtagcgacaaaaaccacggcgccttca

SEQ ID NO: 67357 - DNA, 30 bp, Artificial Sequence
  Synthetic oligonucleotide
actatggagggggaggcgtcttttgcttca

SEQ ID NO: 67358 - DNA, 30 bp, Artificial Sequence
  Synthetic oligonucleotide
cgagccgcacaagagtgtgctagatcttca

SEQ ID NO: 67359 - DNA, 30 bp, Artificial Sequence
  Synthetic oligonucleotide
cacgaataccttgggtgacccgtgcgttca

SEQ ID NO: 67360 - DNA, 30 bp, Artificial Sequence
  Synthetic oligonucleotide
actcaaaaaacatagaatcggcttggttca

SEQ ID NO: 67361 - DNA, 30 bp, Artificial Sequence
  Synthetic oligonucleotide
gttgggcaggaggtgggtactatatgttca

SEQ ID NO: 67362 - DNA, 30 bp, Artificial Sequence
  Synthetic oligonucleotide
catgggggattgggcagttcatggtgttca

SEQ ID NO: 67363 - DNA, 30 bp, Artificial Sequence
  Synthetic oligonucleotide
ctcattacagaaacctgagacgaaatttca

SEQ ID NO: 67364 - DNA, 30 bp, Artificial Sequence
  Synthetic oligonucleotide
aagtcagaaggtgcaaagatcaaactttca

SEQ ID NO: 67365 - DNA, 30 bp, Artificial Sequence
  Synthetic oligonucleotide
atgcaatccgtcgacttagccgtcaaaaga

SEQ ID NO: 67366 - DNA, 30 bp, Artificial Sequence
  Synthetic oligonucleotide
tagatatgggtgcggaaccgtctgaaaaga

SEQ ID NO: 67367 - DNA, 30 bp, Artificial Sequence
  Synthetic oligonucleotide
ccagctaacatctattcacccccagaaaga

SEQ ID NO: 67368 - DNA, 30 bp, Artificial Sequence
  Synthetic oligonucleotide
gtgattctggacatccaattaagggaaaga

SEQ ID NO: 67369 - DNA, 30 bp, Artificial Sequence
  Synthetic oligonucleotide
acgagctttggtcgggacgccaacacaaga

SEQ ID NO: 67370 - DNA, 30 bp, Artificial Sequence
  Synthetic oligonucleotide
ccccgaagagcaataaatatggttacaaga

SEQ ID NO: 67371 - DNA, 30 bp, Artificial Sequence
  Synthetic oligonucleotide
gaccgtttgcgcgttgtagaaacaccaaga

SEQ ID NO: 67372 - DNA, 30 bp, Artificial Sequence
  Synthetic oligonucleotide
gcgagacggtgtacgctcgacacaccaaga

SEQ ID NO: 67373 - DNA, 30 bp, Artificial Sequence
  Synthetic oligonucleotide
cgggttccgaatcggttcccttgaccaaga

SEQ ID NO: 67374 - DNA, 30 bp, Artificial Sequence
  Synthetic oligonucleotide
cgatcccattgcgcctaatcgcgcccaaga

SEQ ID NO: 67375 - DNA, 30 bp, Artificial Sequence
  Synthetic oligonucleotide
acttgacacgccggggctaagtcgccaaga

SEQ ID NO: 67376 - DNA, 30 bp, Artificial Sequence
  Synthetic oligonucleotide
acggattaagcaccgaccacttaagcaaga

SEQ ID NO: 67377 - DNA, 30 bp, Artificial Sequence
  Synthetic oligonucleotide
ctgagctgctcgttcaaagtgagagcaaga

SEQ ID NO: 67378 - DNA, 30 bp, Artificial Sequence
  Synthetic oligonucleotide
tcatgatcagcgacctccggcctagcaaga

SEQ ID NO: 67379 - DNA, 30 bp, Artificial Sequence
  Synthetic oligonucleotide
ggtgtcaatggttgatacggactgtcaaga

SEQ ID NO: 67380 - DNA, 30 bp, Artificial Sequence
  Synthetic oligonucleotide
gctttccaacgaaactgttctccaagaaga

SEQ ID NO: 67381 - DNA, 30 bp, Artificial Sequence
  Synthetic oligonucleotide
catctaactaaattcggaaacagaggaaga

SEQ ID NO: 67382 - DNA, 30 bp, Artificial Sequence
  Synthetic oligonucleotide
agcaaaagagacgtagggtgtaatggaaga

SEQ ID NO: 67383 - DNA, 30 bp, Artificial Sequence
  Synthetic oligonucleotide
ggaccgggatagatagaagataactgaaga

SEQ ID NO: 67384 - DNA, 30 bp, Artificial Sequence
  Synthetic oligonucleotide
tggatctggcttgcccacagcaccataaga

SEQ ID NO: 67385 - DNA, 30 bp, Artificial Sequence
  Synthetic oligonucleotide
atgctaagcgtcggttcagcgagcataaga

SEQ ID NO: 67386 - DNA, 30 bp, Artificial Sequence
  Synthetic oligonucleotide
taatggaaggagcctcccgctatgctaaga

SEQ ID NO: 67387 - DNA, 30 bp, Artificial Sequence
  Synthetic oligonucleotide
gtgcgatataaggctattaactacgtaaga

SEQ ID NO: 67388 - DNA, 30 bp, Artificial Sequence
  Synthetic oligonucleotide
ctgaaggctactgtcgtaataagggtaaga

SEQ ID NO: 67389 - DNA, 30 bp, Artificial Sequence
  Synthetic oligonucleotide
taccgcacgactctgtgtgcccaattaaga

SEQ ID NO: 67390 - DNA, 30 bp, Artificial Sequence
  Synthetic oligonucleotide
gcggcgatccggaaaccgcccttgttaaga

SEQ ID NO: 67391 - DNA, 30 bp, Artificial Sequence
  Synthetic oligonucleotide
ggagcgccgattggtcaacgtgctttaaga

SEQ ID NO: 67392 - DNA, 30 bp, Artificial Sequence
  Synthetic oligonucleotide
ggtaagtaaaccaacgaacagcttaacaga

SEQ ID NO: 67393 - DNA, 30 bp, Artificial Sequence
  Synthetic oligonucleotide
cctggcaatgcaattatccattctgacaga

SEQ ID NO: 67394 - DNA, 30 bp, Artificial Sequence
  Synthetic oligonucleotide
agtacgaggacagggaaattttgctacaga

SEQ ID NO: 67395 - DNA, 30 bp, Artificial Sequence
  Synthetic oligonucleotide
gcagtcaggattgaaacacacacgtacaga

SEQ ID NO: 67396 - DNA, 30 bp, Artificial Sequence
  Synthetic oligonucleotide
ttcacaaagaggttgacatacatgtacaga

SEQ ID NO: 67397 - DNA, 30 bp, Artificial Sequence
  Synthetic oligonucleotide
taggtcacgtgcacaaaatatccttacaga

SEQ ID NO: 67398 - DNA, 30 bp, Artificial Sequence
  Synthetic oligonucleotide
ggaaaccaaaaatgcctatagccaaccaga

SEQ ID NO: 67399 - DNA, 30 bp, Artificial Sequence
  Synthetic oligonucleotide
cacagacgaatactgcatggggttaccaga

SEQ ID NO: 67400 - DNA, 30 bp, Artificial Sequence
  Synthetic oligonucleotide
ttccaggcagcgaaattaatgtggcccaga

SEQ ID NO: 67401 - DNA, 30 bp, Artificial Sequence
  Synthetic oligonucleotide
agcagcacagttagtgattttctgcccaga

SEQ ID NO: 67402 - DNA, 30 bp, Artificial Sequence
  Synthetic oligonucleotide
tagcgtaagcctggtttgcacaatcccaga

SEQ ID NO: 67403 - DNA, 30 bp, Artificial Sequence
  Synthetic oligonucleotide
ctcagacggttaggcgcttaatatcccaga

SEQ ID NO: 67404 - DNA, 30 bp, Artificial Sequence
  Synthetic oligonucleotide
tcggaccctattacaaagggagcagccaga

SEQ ID NO: 67405 - DNA, 30 bp, Artificial Sequence
  Synthetic oligonucleotide
ccgaacatggtggcgccatagagagccaga

SEQ ID NO: 67406 - DNA, 30 bp, Artificial Sequence
  Synthetic oligonucleotide
cgtcagatccttgacccttagggtgccaga

SEQ ID NO: 67407 - DNA, 30 bp, Artificial Sequence
  Synthetic oligonucleotide
tggagctatttatagcaggaaaaatccaga

SEQ ID NO: 67408 - DNA, 30 bp, Artificial Sequence
  Synthetic oligonucleotide
cgcggtcatggcattgaagatatttccaga

SEQ ID NO: 67409 - DNA, 30 bp, Artificial Sequence
  Synthetic oligonucleotide
aggggagtacggtgcgatgcaataagcaga

SEQ ID NO: 67410 - DNA, 30 bp, Artificial Sequence
  Synthetic oligonucleotide
gctaggtttacactgggcgagaatagcaga

SEQ ID NO: 67411 - DNA, 30 bp, Artificial Sequence
  Synthetic oligonucleotide
agaggtagacgaaactcgggctaaggcaga

SEQ ID NO: 67412 - DNA, 30 bp, Artificial Sequence
  Synthetic oligonucleotide
attgggtattacatggtgagtgggggcaga

SEQ ID NO: 67413 - DNA, 30 bp, Artificial Sequence
  Synthetic oligonucleotide
cgtatgtctgaacgctataactatggcaga

SEQ ID NO: 67414 - DNA, 30 bp, Artificial Sequence
  Synthetic oligonucleotide
gcgaagaattttccaagttaaagtggcaga

SEQ ID NO: 67415 - DNA, 30 bp, Artificial Sequence
  Synthetic oligonucleotide
agacgaactgctaagagcgtcacttgcaga

SEQ ID NO: 67416 - DNA, 30 bp, Artificial Sequence
  Synthetic oligonucleotide
acgttaatatagaaagagatacgttgcaga

SEQ ID NO: 67417 - DNA, 30 bp, Artificial Sequence
  Synthetic oligonucleotide
acgtagttggcatggggactaatttgcaga

SEQ ID NO: 67418 - DNA, 30 bp, Artificial Sequence
  Synthetic oligonucleotide
tcgcattggtgttttcacgaaggcatcaga

SEQ ID NO: 67419 - DNA, 30 bp, Artificial Sequence
  Synthetic oligonucleotide
gaatcgttaaagcagtgaacaaatatcaga

SEQ ID NO: 67420 - DNA, 30 bp, Artificial Sequence
  Synthetic oligonucleotide
aattgggtaggtcacacgaactatatcaga

SEQ ID NO: 67421 - DNA, 30 bp, Artificial Sequence
  Synthetic oligonucleotide
ccgtcgaaacgtgcaacaattcttatcaga

SEQ ID NO: 67422 - DNA, 30 bp, Artificial Sequence
  Synthetic oligonucleotide
cgacatgcgattttttggcagtaagtcaga

SEQ ID NO: 67423 - DNA, 30 bp, Artificial Sequence
  Synthetic oligonucleotide
aagatacaccctacctattaacgcgtcaga

SEQ ID NO: 67424 - DNA, 30 bp, Artificial Sequence
  Synthetic oligonucleotide
gtgtgcattggcctgtcaaagcgggtcaga

SEQ ID NO: 67425 - DNA, 30 bp, Artificial Sequence
  Synthetic oligonucleotide
gagacattaaaaatccttaaagaattcaga

SEQ ID NO: 67426 - DNA, 30 bp, Artificial Sequence
  Synthetic oligonucleotide
cctgcgatctcacaccaggcgacattcaga

SEQ ID NO: 67427 - DNA, 30 bp, Artificial Sequence
  Synthetic oligonucleotide
ctacaaaaacaaacaggacgaagattcaga

SEQ ID NO: 67428 - DNA, 30 bp, Artificial Sequence
  Synthetic oligonucleotide
cctactgtatgggtagtgcgatagttcaga

SEQ ID NO: 67429 - DNA, 30 bp, Artificial Sequence
  Synthetic oligonucleotide
cggactgagaaagtagtggaattgttcaga

SEQ ID NO: 67430 - DNA, 30 bp, Artificial Sequence
  Synthetic oligonucleotide
ggtcataagcaaaggcagcggagcaagaga

SEQ ID NO: 67431 - DNA, 30 bp, Artificial Sequence
  Synthetic oligonucleotide
aggtcgggctagtcgcaaacatataagaga

SEQ ID NO: 67432 - DNA, 30 bp, Artificial Sequence
  Synthetic oligonucleotide
ctgcaccgtccaaaggttaaaccccagaga

SEQ ID NO: 67433 - DNA, 30 bp, Artificial Sequence
  Synthetic oligonucleotide
gccattgggtgggtgatcgggagccagaga

SEQ ID NO: 67434 - DNA, 30 bp, Artificial Sequence
  Synthetic oligonucleotide
aaaacgccaccgggtgtccttgatcagaga

SEQ ID NO: 67435 - DNA, 30 bp, Artificial Sequence
  Synthetic oligonucleotide
cgggtttatagcggatacgagaaagagaga

SEQ ID NO: 67436 - DNA, 30 bp, Artificial Sequence
  Synthetic oligonucleotide
caaggcagatgtcgttgctgacatgagaga

SEQ ID NO: 67437 - DNA, 30 bp, Artificial Sequence
  Synthetic oligonucleotide
tgaaaaatcgcgcccaatacctgatagaga

SEQ ID NO: 67438 - DNA, 30 bp, Artificial Sequence
  Synthetic oligonucleotide
tgttgccctgtaatacactaaacgtagaga

SEQ ID NO: 67439 - DNA, 30 bp, Artificial Sequence
  Synthetic oligonucleotide
cagtcagcgtcatgccgagagcgttagaga

SEQ ID NO: 67440 - DNA, 30 bp, Artificial Sequence
  Synthetic oligonucleotide
gcattagattaaaggggcgaatgtacgaga

SEQ ID NO: 67441 - DNA, 30 bp, Artificial Sequence
  Synthetic oligonucleotide
tgtgaacgaaccgaggaatgtggaccgaga

SEQ ID NO: 67442 - DNA, 30 bp, Artificial Sequence
  Synthetic oligonucleotide
gagatggcgacctaaaggagcaacccgaga

SEQ ID NO: 67443 - DNA, 30 bp, Artificial Sequence
  Synthetic oligonucleotide
ttctcctgaaaagggatcacagaagcgaga

SEQ ID NO: 67444 - DNA, 30 bp, Artificial Sequence
  Synthetic oligonucleotide
acggaatgaagagcggatatctttgcgaga

SEQ ID NO: 67445 - DNA, 30 bp, Artificial Sequence
  Synthetic oligonucleotide
accgtccccttcagcgtgggcaaatcgaga

SEQ ID NO: 67446 - DNA, 30 bp, Artificial Sequence
  Synthetic oligonucleotide
caagatattttgatgtaattcggctcgaga

SEQ ID NO: 67447 - DNA, 30 bp, Artificial Sequence
  Synthetic oligonucleotide
agtttaaaaacaaagttggatagaaggaga

SEQ ID NO: 67448 - DNA, 30 bp, Artificial Sequence
  Synthetic oligonucleotide
attatccaggcatctgggccgacgaggaga

SEQ ID NO: 67449 - DNA, 30 bp, Artificial Sequence
  Synthetic oligonucleotide
gtcgtctgaggctggagatagtgtaggaga

SEQ ID NO: 67450 - DNA, 30 bp, Artificial Sequence
  Synthetic oligonucleotide
gaaagggggtatcagtgatggcatcggaga

SEQ ID NO: 67451 - DNA, 30 bp, Artificial Sequence
  Synthetic oligonucleotide
atgggagccaatcaataacagttagggaga

SEQ ID NO: 67452 - DNA, 30 bp, Artificial Sequence
  Synthetic oligonucleotide
aggacaaagtctgtgagttaaagatggaga

SEQ ID NO: 67453 - DNA, 30 bp, Artificial Sequence
  Synthetic oligonucleotide
atgcagagtgagtaggactcgaactggaga

SEQ ID NO: 67454 - DNA, 30 bp, Artificial Sequence
  Synthetic oligonucleotide
caagccgaaatagattctatcgagtggaga

SEQ ID NO: 67455 - DNA, 30 bp, Artificial Sequence
  Synthetic oligonucleotide
agggactacttcgggagataaggttggaga

SEQ ID NO: 67456 - DNA, 30 bp, Artificial Sequence
  Synthetic oligonucleotide
tcggcgaccttccgcactatttcgatgaga

SEQ ID NO: 67457 - DNA, 30 bp, Artificial Sequence
  Synthetic oligonucleotide
acccagggcagaaagcccaagagtatgaga

SEQ ID NO: 67458 - DNA, 26 bp, Artificial Sequence
  Synthetic oligonucleotide
aacggagcttggaaaagattatgaga

SEQ ID NO: 67459 - DNA, 30 bp, Artificial Sequence
  Synthetic oligonucleotide
atgataagcatacaaagcccagccgtgaga

SEQ ID NO: 67460 - DNA, 30 bp, Artificial Sequence
  Synthetic oligonucleotide
tcgggtaaacacgattatacaaatgtgaga

SEQ ID NO: 67461 - DNA, 30 bp, Artificial Sequence
  Synthetic oligonucleotide
ccatagttccgaccaacagtgagtgtgaga

SEQ ID NO: 67462 - DNA, 30 bp, Artificial Sequence
  Synthetic oligonucleotide
acggtgctagatccatacggtggattgaga

SEQ ID NO: 67463 - DNA, 30 bp, Artificial Sequence
  Synthetic oligonucleotide
ccctcgcaataactaaataagcgtttgaga

SEQ ID NO: 67464 - DNA, 30 bp, Artificial Sequence
  Synthetic oligonucleotide
tgggcgtactgaggacgtctcgccaataga

SEQ ID NO: 67465 - DNA, 30 bp, Artificial Sequence
  Synthetic oligonucleotide
aaaaatcgagtggacggacccaatgataga

SEQ ID NO: 67466 - DNA, 30 bp, Artificial Sequence
  Synthetic oligonucleotide
tacgaaatcggtcattgccggcaatataga

SEQ ID NO: 67467 - DNA, 30 bp, Artificial Sequence
  Synthetic oligonucleotide
cagaaagcttgcaggctcagttgatataga

SEQ ID NO: 67468 - DNA, 30 bp, Artificial Sequence
  Synthetic oligonucleotide
caacacattggttaggagtgcgctactaga

SEQ ID NO: 67469 - DNA, 30 bp, Artificial Sequence
  Synthetic oligonucleotide
caaggattcatgaaatattgctgtactaga

SEQ ID NO: 67470 - DNA, 30 bp, Artificial Sequence
  Synthetic oligonucleotide
agcccgtatactcttgcaatcccgcctaga

SEQ ID NO: 67471 - DNA, 30 bp, Artificial Sequence
  Synthetic oligonucleotide
tgactggattcgctgtcggggatagctaga

SEQ ID NO: 67472 - DNA, 30 bp, Artificial Sequence
  Synthetic oligonucleotide
gctgccgatgaactgtcgcgattcgctaga

SEQ ID NO: 67473 - DNA, 30 bp, Artificial Sequence
  Synthetic oligonucleotide
atgactcaagagcgaaatgattcttctaga

SEQ ID NO: 67474 - DNA, 30 bp, Artificial Sequence
  Synthetic oligonucleotide
agactaactcggttgtacatattaggtaga

SEQ ID NO: 67475 - DNA, 30 bp, Artificial Sequence
  Synthetic oligonucleotide
caccaagcgttcggtgccgataattgtaga

SEQ ID NO: 67476 - DNA, 30 bp, Artificial Sequence
  Synthetic oligonucleotide
tcggtgcggggtaccgtgggatagattaga

SEQ ID NO: 67477 - DNA, 30 bp, Artificial Sequence
  Synthetic oligonucleotide
caaggaagatactaagcgtttaggattaga

SEQ ID NO: 67478 - DNA, 30 bp, Artificial Sequence
  Synthetic oligonucleotide
ctggggtcaaaggcacttcgctaacttaga

SEQ ID NO: 67479 - DNA, 30 bp, Artificial Sequence
  Synthetic oligonucleotide
ggcacaaagttttcatacaataagcttaga

SEQ ID NO: 67480 - DNA, 30 bp, Artificial Sequence
  Synthetic oligonucleotide
cacgctgtaggaacaattaagtacgttaga

SEQ ID NO: 67481 - DNA, 30 bp, Artificial Sequence
  Synthetic oligonucleotide
cacgtgcagtatccggaagtgatcaaacga

SEQ ID NO: 67482 - DNA, 30 bp, Artificial Sequence
  Synthetic oligonucleotide
aaaaggaacatactggtaatcgcgaaacga

SEQ ID NO: 67483 - DNA, 30 bp, Artificial Sequence
  Synthetic oligonucleotide
aagttacaataacacagtgaaggccaacga

SEQ ID NO: 67484 - DNA, 30 bp, Artificial Sequence
  Synthetic oligonucleotide
cagaaaaccagggatgcgtagtggcaacga

SEQ ID NO: 67485 - DNA, 30 bp, Artificial Sequence
  Synthetic oligonucleotide
tggtggttacatcgtgcaggaggcgaacga

SEQ ID NO: 67486 - DNA, 30 bp, Artificial Sequence
  Synthetic oligonucleotide
tgatctaaaggggggacaaagggcacacga

SEQ ID NO: 67487 - DNA, 30 bp, Artificial Sequence
  Synthetic oligonucleotide
ttagctgtcggatcggggtggagaccacga

SEQ ID NO: 67488 - DNA, 30 bp, Artificial Sequence
  Synthetic oligonucleotide
cgtgttcgttagccataataagcggcacga

SEQ ID NO: 67489 - DNA, 30 bp, Artificial Sequence
  Synthetic oligonucleotide
gagaagacgatcttccagcggcatgcacga

SEQ ID NO: 67490 - DNA, 30 bp, Artificial Sequence
  Synthetic oligonucleotide
aggtgaagcatgcgtaatcagggctcacga

SEQ ID NO: 67491 - DNA, 30 bp, Artificial Sequence
  Synthetic oligonucleotide
gccgataacaacaagcttaacaaaggacga

SEQ ID NO: 67492 - DNA, 30 bp, Artificial Sequence
  Synthetic oligonucleotide
ggacgggtgccacaggagggtaacggacga

SEQ ID NO: 67493 - DNA, 30 bp, Artificial Sequence
  Synthetic oligonucleotide
ggatggtaaggcgtactcaatcaatgacga

SEQ ID NO: 67494 - DNA, 30 bp, Artificial Sequence
  Synthetic oligonucleotide
agatgtggtcggccgaattgggcatgacga

SEQ ID NO: 67495 - DNA, 30 bp, Artificial Sequence
  Synthetic oligonucleotide
agctgggcatcctgaaggtaacgttgacga

SEQ ID NO: 67496 - DNA, 30 bp, Artificial Sequence
  Synthetic oligonucleotide
cggatcggaatcggcagagtaaacatacga

SEQ ID NO: 67497 - DNA, 30 bp, Artificial Sequence
  Synthetic oligonucleotide
atgtgggcctagtgtcagttagtgatacga

SEQ ID NO: 67498 - DNA, 30 bp, Artificial Sequence
  Synthetic oligonucleotide
caagtctacacagttaattgcgaactacga

SEQ ID NO: 67499 - DNA, 30 bp, Artificial Sequence
  Synthetic oligonucleotide
ccttcaagcctagacagaccgcttctacga

SEQ ID NO: 67500 - DNA, 30 bp, Artificial Sequence
  Synthetic oligonucleotide
gacaagtcggtctcttacaaccaaaaccga

SEQ ID NO: 67501 - DNA, 30 bp, Artificial Sequence
  Synthetic oligonucleotide
taagttcaacaagaatattcaagaaaccga

SEQ ID NO: 67502 - DNA, 30 bp, Artificial Sequence
  Synthetic oligonucleotide
agaataatggcccacttgtactcgcaccga

SEQ ID NO: 67503 - DNA, 30 bp, Artificial Sequence
  Synthetic oligonucleotide
acggtcccgaaaatatgccaaatcgaccga

SEQ ID NO: 67504 - DNA, 30 bp, Artificial Sequence
  Synthetic oligonucleotide
acatctccccgactgcaataaaaataccga

SEQ ID NO: 67505 - DNA, 30 bp, Artificial Sequence
  Synthetic oligonucleotide
tccttacggggttgctttacatggtaccga

SEQ ID NO: 67506 - DNA, 30 bp, Artificial Sequence
  Synthetic oligonucleotide
cgatgaggacgtattcatttcacttaccga

SEQ ID NO: 67507 - DNA, 30 bp, Artificial Sequence
  Synthetic oligonucleotide
cgagctgtgcactaatgtcctagaacccga

SEQ ID NO: 67508 - DNA, 30 bp, Artificial Sequence
  Synthetic oligonucleotide
agtgcagggggcatgtaacatatgacccga

SEQ ID NO: 67509 - DNA, 30 bp, Artificial Sequence
  Synthetic oligonucleotide
cctggtaaacatggcaaggagcgcgcccga

SEQ ID NO: 67510 - DNA, 30 bp, Artificial Sequence
  Synthetic oligonucleotide
gagctagtatatacagaaccatgtgcccga

SEQ ID NO: 67511 - DNA, 30 bp, Artificial Sequence
  Synthetic oligonucleotide
aatgggtcctaacggcaggttgaaagccga

SEQ ID NO: 67512 - DNA, 30 bp, Artificial Sequence
  Synthetic oligonucleotide
gcaccggaggagcgagttagaggacgccga

SEQ ID NO: 67513 - DNA, 30 bp, Artificial Sequence
  Synthetic oligonucleotide
cacgacctcctaaatctttcgtgcggccga

SEQ ID NO: 67514 - DNA, 30 bp, Artificial Sequence
  Synthetic oligonucleotide
tgcccaaatggtaatgtggcgaggatccga

SEQ ID NO: 67515 - DNA, 30 bp, Artificial Sequence
  Synthetic oligonucleotide
tggcgcgtgtactggcaaacgactatccga

SEQ ID NO: 67516 - DNA, 30 bp, Artificial Sequence
  Synthetic oligonucleotide
aataataagcggaaacaaaaaaacctccga

SEQ ID NO: 67517 - DNA, 30 bp, Artificial Sequence
  Synthetic oligonucleotide
gagaggtcaccgtacccataatcagtccga

SEQ ID NO: 67518 - DNA, 30 bp, Artificial Sequence
  Synthetic oligonucleotide
cagaggaagctgtgttgttccgtattccga

SEQ ID NO: 67519 - DNA, 30 bp, Artificial Sequence
  Synthetic oligonucleotide
aaacgaacatgtctcaagtgctaaaagcga

SEQ ID NO: 67520 - DNA, 30 bp, Artificial Sequence
  Synthetic oligonucleotide
gaggagaagtaagataggctgtaaaagcga

SEQ ID NO: 67521 - DNA, 30 bp, Artificial Sequence
  Synthetic oligonucleotide
gcggtacagtgcatctttacatacaagcga

SEQ ID NO: 67522 - DNA, 30 bp, Artificial Sequence
  Synthetic oligonucleotide
gaagggatgcagccggaaccacggaagcga

SEQ ID NO: 67523 - DNA, 30 bp, Artificial Sequence
  Synthetic oligonucleotide
ggggatcacataacatgtaatatgaagcga

SEQ ID NO: 67524 - DNA, 30 bp, Artificial Sequence
  Synthetic oligonucleotide
cactgggaggaagtaacagctccacagcga

SEQ ID NO: 67525 - DNA, 30 bp, Artificial Sequence
  Synthetic oligonucleotide
tcgggcgcaaccggcacagtcgcccagcga

SEQ ID NO: 67526 - DNA, 30 bp, Artificial Sequence
  Synthetic oligonucleotide
gtgtgagtgcgcaggacaggggcatagcga

SEQ ID NO: 67527 - DNA, 30 bp, Artificial Sequence
  Synthetic oligonucleotide
ggccactagaattgacaacatatatagcga

SEQ ID NO: 67528 - DNA, 30 bp, Artificial Sequence
  Synthetic oligonucleotide
ggttcaacttgggtcgtagtggagccgcga

SEQ ID NO: 67529 - DNA, 30 bp, Artificial Sequence
  Synthetic oligonucleotide
cgcggctcaaatacgatctactttccgcga

SEQ ID NO: 67530 - DNA, 30 bp, Artificial Sequence
  Synthetic oligonucleotide
ccgctgatgggaacacacagggcggcgcga

SEQ ID NO: 67531 - DNA, 30 bp, Artificial Sequence
  Synthetic oligonucleotide
aatccgaataccttgagggcgaagtcgcga

SEQ ID NO: 67532 - DNA, 30 bp, Artificial Sequence
  Synthetic oligonucleotide
gcagtcaccaagggagctccatgccggcga

SEQ ID NO: 67533 - DNA, 30 bp, Artificial Sequence
  Synthetic oligonucleotide
aagggaaggacccggtaatgaagggggcga

SEQ ID NO: 67534 - DNA, 30 bp, Artificial Sequence
  Synthetic oligonucleotide
ggcgaaattaattctgcgagcgtctggcga

SEQ ID NO: 67535 - DNA, 30 bp, Artificial Sequence
  Synthetic oligonucleotide
tgtacgcgtataggttcatgctcgtggcga

SEQ ID NO: 67536 - DNA, 30 bp, Artificial Sequence
  Synthetic oligonucleotide
gcatagaattatcgacaaaaactcttgcga

SEQ ID NO: 67537 - DNA, 30 bp, Artificial Sequence
  Synthetic oligonucleotide
gggtcgggcgattcgaacatatccaatcga

SEQ ID NO: 67538 - DNA, 30 bp, Artificial Sequence
  Synthetic oligonucleotide
cgagtaggccggacagcgtgtcaacatcga

SEQ ID NO: 67539 - DNA, 30 bp, Artificial Sequence
  Synthetic oligonucleotide
gagcagatcagtactggaccctcgcatcga

SEQ ID NO: 67540 - DNA, 30 bp, Artificial Sequence
  Synthetic oligonucleotide
aggtaagatgacatgatagttggtcatcga

SEQ ID NO: 67541 - DNA, 30 bp, Artificial Sequence
  Synthetic oligonucleotide
cggtcgacaatgcggtcggatactgatcga

SEQ ID NO: 67542 - DNA, 30 bp, Artificial Sequence
  Synthetic oligonucleotide
ttaagcagatagggaccacctgtacctcga

SEQ ID NO: 67543 - DNA, 30 bp, Artificial Sequence
  Synthetic oligonucleotide
accatgaacaaatagtattcgctttctcga

SEQ ID NO: 67544 - DNA, 30 bp, Artificial Sequence
  Synthetic oligonucleotide
cgtaccctataagctgattagtgaagtcga

SEQ ID NO: 67545 - DNA, 30 bp, Artificial Sequence
  Synthetic oligonucleotide
actaagacccccagctaaggagggagtcga

SEQ ID NO: 67546 - DNA, 30 bp, Artificial Sequence
  Synthetic oligonucleotide
cgagtgacttagggagaacaaaatagtcga

SEQ ID NO: 67547 - DNA, 30 bp, Artificial Sequence
  Synthetic oligonucleotide
tacatcggtgacctgtgctctactcgtcga

SEQ ID NO: 67548 - DNA, 30 bp, Artificial Sequence
  Synthetic oligonucleotide
aggatgcgcgtgggcaactctgcaggtcga

SEQ ID NO: 67549 - DNA, 30 bp, Artificial Sequence
  Synthetic oligonucleotide
tctgagcttacaaaacagcaatagtgtcga

SEQ ID NO: 67550 - DNA, 30 bp, Artificial Sequence
  Synthetic oligonucleotide
catcctacggacatcctaagtcggtgtcga

SEQ ID NO: 67551 - DNA, 30 bp, Artificial Sequence
  Synthetic oligonucleotide
gggtagcgtctcgccagagcagtcattcga

SEQ ID NO: 67552 - DNA, 30 bp, Artificial Sequence
  Synthetic oligonucleotide
gtgtggtgggaacatgactcgttacttcga

SEQ ID NO: 67553 - DNA, 30 bp, Artificial Sequence
  Synthetic oligonucleotide
gcggtaagcgccaacggcgtcatccttcga

SEQ ID NO: 67554 - DNA, 30 bp, Artificial Sequence
  Synthetic oligonucleotide
tcacatcgcgtaaggggcaactcagttcga

SEQ ID NO: 67555 - DNA, 30 bp, Artificial Sequence
  Synthetic oligonucleotide
gaggtgctaatttgctttgtgagaaaagga

SEQ ID NO: 67556 - DNA, 30 bp, Artificial Sequence
  Synthetic oligonucleotide
ccgaaggtggctgggttaggggccaaagga

SEQ ID NO: 67557 - DNA, 30 bp, Artificial Sequence
  Synthetic oligonucleotide
acggcgaccgtagaagttcagtcacaagga

SEQ ID NO: 67558 - DNA, 30 bp, Artificial Sequence
  Synthetic oligonucleotide
gattggttgaaatcataggaaatacaagga

SEQ ID NO: 67559 - DNA, 30 bp, Artificial Sequence
  Synthetic oligonucleotide
aggtccgacgggcgtgtttgtcatcaagga

SEQ ID NO: 67560 - DNA, 30 bp, Artificial Sequence
  Synthetic oligonucleotide
aagggtcaaaggaacagagctgtataagga

SEQ ID NO: 67561 - DNA, 30 bp, Artificial Sequence
  Synthetic oligonucleotide
ataacactgcgaggaggataatgttaagga

SEQ ID NO: 67562 - DNA, 30 bp, Artificial Sequence
  Synthetic oligonucleotide
tctgaggtacatacgcctaatatgacagga

SEQ ID NO: 67563 - DNA, 30 bp, Artificial Sequence
  Synthetic oligonucleotide
ggagatattgctgatatcacgggcccagga

SEQ ID NO: 67564 - DNA, 30 bp, Artificial Sequence
  Synthetic oligonucleotide
cgattgattcaataagacgttattccagga

SEQ ID NO: 67565 - DNA, 30 bp, Artificial Sequence
  Synthetic oligonucleotide
actcgtgcgattagcttagcgaaagcagga

SEQ ID NO: 67566 - DNA, 30 bp, Artificial Sequence
  Synthetic oligonucleotide
gggccacaggtttggtaagggaaagcagga

SEQ ID NO: 67567 - DNA, 30 bp, Artificial Sequence
  Synthetic oligonucleotide
cggaattaaagctcgacaaccggagcagga

SEQ ID NO: 67568 - DNA, 30 bp, Artificial Sequence
  Synthetic oligonucleotide
tcccataaaagacaacttcgtcaggcagga

SEQ ID NO: 67569 - DNA, 30 bp, Artificial Sequence
  Synthetic oligonucleotide
gcgataccagaggacggtaaactatcagga

SEQ ID NO: 67570 - DNA, 30 bp, Artificial Sequence
  Synthetic oligonucleotide
cacgtcccagggccggagtaaagttcagga

SEQ ID NO: 67571 - DNA, 30 bp, Artificial Sequence
  Synthetic oligonucleotide
tcgtactaagccctccagggcaacagagga

SEQ ID NO: 67572 - DNA, 30 bp, Artificial Sequence
  Synthetic oligonucleotide
cagagcgaatttcaggtaggctccagagga

SEQ ID NO: 67573 - DNA, 30 bp, Artificial Sequence
  Synthetic oligonucleotide
tagcgcggggcgacaggcaagcgcagagga

SEQ ID NO: 67574 - DNA, 30 bp, Artificial Sequence
  Synthetic oligonucleotide
atgtgcgccattctacggaagggcagagga

SEQ ID NO: 67575 - DNA, 31 bp, Artificial Sequence
  Synthetic oligonucleotide
gggttgcatagtgtatgaggcctaacgagga

SEQ ID NO: 67576 - DNA, 30 bp, Artificial Sequence
  Synthetic oligonucleotide
gacatccagagggctagagatgagcgagga

SEQ ID NO: 67577 - DNA, 30 bp, Artificial Sequence
  Synthetic oligonucleotide
atacaagtgggcgaagtattcgaatgagga

SEQ ID NO: 67578 - DNA, 30 bp, Artificial Sequence
  Synthetic oligonucleotide
cgccgtcggtaattgcagaactgctgagga

SEQ ID NO: 67579 - DNA, 30 bp, Artificial Sequence
  Synthetic oligonucleotide
gaagcgtcgccggagcgggcaatttgagga

SEQ ID NO: 67580 - DNA, 30 bp, Artificial Sequence
  Synthetic oligonucleotide
cgtaaataatgttccgaccgttcgatagga

SEQ ID NO: 67581 - DNA, 30 bp, Artificial Sequence
  Synthetic oligonucleotide
tgcgggatacaccatgggaaccggctagga

SEQ ID NO: 67582 - DNA, 30 bp, Artificial Sequence
  Synthetic oligonucleotide
tcgctttacgcgtggcaagagaatctagga

SEQ ID NO: 67583 - DNA, 30 bp, Artificial Sequence
  Synthetic oligonucleotide
aagacagtataaaacgcccattatctagga

SEQ ID NO: 67584 - DNA, 30 bp, Artificial Sequence
  Synthetic oligonucleotide
cggcgagttgccttgcgccggtatgtagga

SEQ ID NO: 67585 - DNA, 30 bp, Artificial Sequence
  Synthetic oligonucleotide
cgagtaccctactccagggaactattagga

SEQ ID NO: 67586 - DNA, 30 bp, Artificial Sequence
  Synthetic oligonucleotide
ggcgatatcgtgagaagtggctcacacgga

SEQ ID NO: 67587 - DNA, 30 bp, Artificial Sequence
  Synthetic oligonucleotide
gcaatctcaggaaaacggacgtaagacgga

SEQ ID NO: 67588 - DNA, 30 bp, Artificial Sequence
  Synthetic oligonucleotide
tgtgtaaagcatgtgttctctcgagacgga

SEQ ID NO: 67589 - DNA, 30 bp, Artificial Sequence
  Synthetic oligonucleotide
gctggtcgaagctaggggaccttatacgga

SEQ ID NO: 67590 - DNA, 30 bp, Artificial Sequence
  Synthetic oligonucleotide
ccatatacggcacgaccaggaacgaccgga

SEQ ID NO: 67591 - DNA, 30 bp, Artificial Sequence
  Synthetic oligonucleotide
cgcccatattaaaaacgaggggtacccgga

SEQ ID NO: 67592 - DNA, 30 bp, Artificial Sequence
  Synthetic oligonucleotide
agtgctacaggacgaaataagggccccgga

SEQ ID NO: 67593 - DNA, 30 bp, Artificial Sequence
  Synthetic oligonucleotide
taatgcacaaagccttggcaaagtcccgga

SEQ ID NO: 67594 - DNA, 30 bp, Artificial Sequence
  Synthetic oligonucleotide
gattgagagttcaaagcctgtacgtccgga

SEQ ID NO: 67595 - DNA, 30 bp, Artificial Sequence
  Synthetic oligonucleotide
cagatgcgaacaggcttaaactaacgcgga

SEQ ID NO: 67596 - DNA, 30 bp, Artificial Sequence
  Synthetic oligonucleotide
caggtgggctctcagaaattgctaggcgga

SEQ ID NO: 67597 - DNA, 30 bp, Artificial Sequence
  Synthetic oligonucleotide
agagctggggtgcgttaattttccggcgga

SEQ ID NO: 67598 - DNA, 30 bp, Artificial Sequence
  Synthetic oligonucleotide
ctagatggtgccggtcgacggtgcggcgga

SEQ ID NO: 67599 - DNA, 30 bp, Artificial Sequence
  Synthetic oligonucleotide
ctagcgcagagataagaagtaaacttcgga

SEQ ID NO: 67600 - DNA, 30 bp, Artificial Sequence
  Synthetic oligonucleotide
agacgagaagcgcgtaggtctgagttcgga

SEQ ID NO: 67601 - DNA, 30 bp, Artificial Sequence
  Synthetic oligonucleotide
ttgcgaggtgtagataaggcttgtttcgga

SEQ ID NO: 67602 - DNA, 30 bp, Artificial Sequence
  Synthetic oligonucleotide
accggccaaaaaggtggcaaacgcaaggga

SEQ ID NO: 67603 - DNA, 30 bp, Artificial Sequence
  Synthetic oligonucleotide
ggaagcacgtattccggtacaaggcaggga

SEQ ID NO: 67604 - DNA, 30 bp, Artificial Sequence
  Synthetic oligonucleotide
agtcctcagtggccaaagtgcggtcaggga

SEQ ID NO: 67605 - DNA, 30 bp, Artificial Sequence
  Synthetic oligonucleotide
attaggacataggacagaattgaagaggga

SEQ ID NO: 67606 - DNA, 30 bp, Artificial Sequence
  Synthetic oligonucleotide
ggagtaagttcgtcacctgtgttggaggga

SEQ ID NO: 67607 - DNA, 30 bp, Artificial Sequence
  Synthetic oligonucleotide
agccagtctcatggtccgggatgtgaggga

SEQ ID NO: 67608 - DNA, 30 bp, Artificial Sequence
  Synthetic oligonucleotide
agcgattacgtctcagacctaattgaggga

SEQ ID NO: 67609 - DNA, 30 bp, Artificial Sequence
  Synthetic oligonucleotide
tggcgcacggtcaacctgaaagtataggga

SEQ ID NO: 67610 - DNA, 30 bp, Artificial Sequence
  Synthetic oligonucleotide
gatcgaacgctcagataactagtgtaggga

SEQ ID NO: 67611 - DNA, 30 bp, Artificial Sequence
  Synthetic oligonucleotide
tcggttaaaagaagtgttcgttattaggga

SEQ ID NO: 67612 - DNA, 30 bp, Artificial Sequence
  Synthetic oligonucleotide
ctggctgcacaaaaacagtaagacacggga

SEQ ID NO: 67613 - DNA, 30 bp, Artificial Sequence
  Synthetic oligonucleotide
aggcaaggggaatacgccgcaacgacggga

SEQ ID NO: 67614 - DNA, 30 bp, Artificial Sequence
  Synthetic oligonucleotide
acaacggttatgacgagtagttatccggga

SEQ ID NO: 67615 - DNA, 30 bp, Artificial Sequence
  Synthetic oligonucleotide
aatcgtaggctaaccaactgaaaagcggga

SEQ ID NO: 67616 - DNA, 30 bp, Artificial Sequence
  Synthetic oligonucleotide
gataaaccttgtcgaccgacaatagcggga

SEQ ID NO: 67617 - DNA, 30 bp, Artificial Sequence
  Synthetic oligonucleotide
agagggcgtgccgttacgcggagtgcggga

SEQ ID NO: 67618 - DNA, 30 bp, Artificial Sequence
  Synthetic oligonucleotide
gtgtgatacgacttggtggttcaatcggga

SEQ ID NO: 67619 - DNA, 30 bp, Artificial Sequence
  Synthetic oligonucleotide
ccaggcaccctgcctcactgccgatcggga

SEQ ID NO: 67620 - DNA, 30 bp, Artificial Sequence
  Synthetic oligonucleotide
gtaagaaataacctgagactaggctcggga

SEQ ID NO: 67621 - DNA, 30 bp, Artificial Sequence
  Synthetic oligonucleotide
cgggtgcacaccgagagaggctgctcggga

SEQ ID NO: 67622 - DNA, 30 bp, Artificial Sequence
  Synthetic oligonucleotide
gcgatacactatcagtttaccctacgggga

SEQ ID NO: 67623 - DNA, 30 bp, Artificial Sequence
  Synthetic oligonucleotide
cgatattatcggacgtggtgataccgggga

SEQ ID NO: 67624 - DNA, 30 bp, Artificial Sequence
  Synthetic oligonucleotide
tcgctccaatatctgaggccagggcgggga

SEQ ID NO: 67625 - DNA, 40 bp, Artificial Sequence
  Synthetic oligonucleotide
aagataaaacattcatggtatggtcggggatcggggggga

SEQ ID NO: 67626 - DNA, 30 bp, Artificial Sequence
  Synthetic oligonucleotide
tccaagtgcattccaggaccttgtggggga

SEQ ID NO: 67627 - DNA, 30 bp, Artificial Sequence
  Synthetic oligonucleotide
cgggaagacgaaggggggcgccagtgggga

SEQ ID NO: 67628 - DNA, 30 bp, Artificial Sequence
  Synthetic oligonucleotide
ttcagacgaacgcgaaatccgttgtgggga

SEQ ID NO: 67629 - DNA, 30 bp, Artificial Sequence
  Synthetic oligonucleotide
caatagtcatgacctcatgacaagatggga

SEQ ID NO: 67630 - DNA, 30 bp, Artificial Sequence
  Synthetic oligonucleotide
gcaagtgggttggagtggaaggagatggga

SEQ ID NO: 67631 - DNA, 30 bp, Artificial Sequence
  Synthetic oligonucleotide
ttcgaggcgaaggtaacacagaggatggga

SEQ ID NO: 67632 - DNA, 30 bp, Artificial Sequence
  Synthetic oligonucleotide
tatcacagaaatcggaggcgaacactggga

SEQ ID NO: 67633 - DNA, 30 bp, Artificial Sequence
  Synthetic oligonucleotide
ggcaaaagcaggatattcagtatgttggga

SEQ ID NO: 67634 - DNA, 30 bp, Artificial Sequence
  Synthetic oligonucleotide
acctaagtagttgtaagctgcgtaaatgga

SEQ ID NO: 67635 - DNA, 30 bp, Artificial Sequence
  Synthetic oligonucleotide
aatcgaaagatccttagtagaatcaatgga

SEQ ID NO: 67636 - DNA, 30 bp, Artificial Sequence
  Synthetic oligonucleotide
gcctcaaatcctaggatccagcggaatgga

SEQ ID NO: 67637 - DNA, 30 bp, Artificial Sequence
  Synthetic oligonucleotide
tgggggcctgggtatgcagtcaataatgga

SEQ ID NO: 67638 - DNA, 30 bp, Artificial Sequence
  Synthetic oligonucleotide
gtctacgaaagggttaagggggaacatgga

SEQ ID NO: 67639 - DNA, 30 bp, Artificial Sequence
  Synthetic oligonucleotide
ccaaatgtaaacatagcatagggagatgga

SEQ ID NO: 67640 - DNA, 30 bp, Artificial Sequence
  Synthetic oligonucleotide
agaattaatacgcgaagacatcgtgatgga

SEQ ID NO: 67641 - DNA, 30 bp, Artificial Sequence
  Synthetic oligonucleotide
gaggctgggttgctaacttctgaatatgga

SEQ ID NO: 67642 - DNA, 30 bp, Artificial Sequence
  Synthetic oligonucleotide
ggaggcagagatctacacttttgcactgga

SEQ ID NO: 67643 - DNA, 30 bp, Artificial Sequence
  Synthetic oligonucleotide
tgacgatcaaaaataagagatcaagctgga

SEQ ID NO: 67644 - DNA, 30 bp, Artificial Sequence
  Synthetic oligonucleotide
actaacagagtgacattgtggtgggctgga

SEQ ID NO: 67645 - DNA, 30 bp, Artificial Sequence
  Synthetic oligonucleotide
gtcgagtgggacagcttactacaatctgga

SEQ ID NO: 67646 - DNA, 30 bp, Artificial Sequence
  Synthetic oligonucleotide
ccacgaaggccagcgcctgcaatctctgga

SEQ ID NO: 67647 - DNA, 30 bp, Artificial Sequence
  Synthetic oligonucleotide
cgacgtaatacatcggtggtcgggagtgga

SEQ ID NO: 67648 - DNA, 30 bp, Artificial Sequence
  Synthetic oligonucleotide
atatagcggaagaggacaacgataggtgga

SEQ ID NO: 67649 - DNA, 30 bp, Artificial Sequence
  Synthetic oligonucleotide
aggacgagtgtaatttccattacgggtgga

SEQ ID NO: 67650 - DNA, 30 bp, Artificial Sequence
  Synthetic oligonucleotide
cagctgatgtagggcagtattgtgggtgga

SEQ ID NO: 67651 - DNA, 30 bp, Artificial Sequence
  Synthetic oligonucleotide
agtactacaagaaaaagtactacgtgtgga

SEQ ID NO: 67652 - DNA, 31 bp, Artificial Sequence
  Synthetic oligonucleotide
ggatgagataagcccaccccacagtattgga

SEQ ID NO: 67653 - DNA, 30 bp, Artificial Sequence
  Synthetic oligonucleotide
ggcaagaggatcattcaatagtcatttgga

SEQ ID NO: 67654 - DNA, 30 bp, Artificial Sequence
  Synthetic oligonucleotide
accgaacagatcttcaccagctggaaatga

SEQ ID NO: 67655 - DNA, 30 bp, Artificial Sequence
  Synthetic oligonucleotide
acccgaacgacaacatttaaaagacaatga

SEQ ID NO: 67656 - DNA, 30 bp, Artificial Sequence
  Synthetic oligonucleotide
atgctgcggactacctacatgcattaatga

SEQ ID NO: 67657 - DNA, 30 bp, Artificial Sequence
  Synthetic oligonucleotide
ggtaggctgatctggggagtcacaacatga

SEQ ID NO: 67658 - DNA, 29 bp, Artificial Sequence
  Synthetic oligonucleotide
gaaaagagagttaacttaagctcacatga

SEQ ID NO: 67659 - DNA, 30 bp, Artificial Sequence
  Synthetic oligonucleotide
actggcgagaacgatcgtgcaagtccatga

SEQ ID NO: 67660 - DNA, 30 bp, Artificial Sequence
  Synthetic oligonucleotide
aatccacgcgaccgaattagagttccatga

SEQ ID NO: 67661 - DNA, 30 bp, Artificial Sequence
  Synthetic oligonucleotide
accggaggccgaaagtctaccgaggcatga

SEQ ID NO: 67662 - DNA, 30 bp, Artificial Sequence
  Synthetic oligonucleotide
cggacttgcagatgttggtgagaatcatga

SEQ ID NO: 67663 - DNA, 30 bp, Artificial Sequence
  Synthetic oligonucleotide
attgagatctgcctaatagatagatcatga

SEQ ID NO: 67664 - DNA, 30 bp, Artificial Sequence
  Synthetic oligonucleotide
ttctcgcaacggaggacagcgaggtcatga

SEQ ID NO: 67665 - DNA, 30 bp, Artificial Sequence
  Synthetic oligonucleotide
aaatccggaaaaagggcacgtatgcgatga

SEQ ID NO: 67666 - DNA, 30 bp, Artificial Sequence
  Synthetic oligonucleotide
atgcgtaaatacaatgcggttgaaggatga

SEQ ID NO: 67667 - DNA, 30 bp, Artificial Sequence
  Synthetic oligonucleotide
acttgtggttgaagaggcgttaggggatga

SEQ ID NO: 67668 - DNA, 30 bp, Artificial Sequence
  Synthetic oligonucleotide
agccggtagtgtggagcgaattttggatga

SEQ ID NO: 67669 - DNA, 30 bp, Artificial Sequence
  Synthetic oligonucleotide
ctctaaaggaagaaagactatcggctatga

SEQ ID NO: 67670 - DNA, 30 bp, Artificial Sequence
  Synthetic oligonucleotide
ttaaagaacgtaaataagaaattggtatga

SEQ ID NO: 67671 - DNA, 30 bp, Artificial Sequence
  Synthetic oligonucleotide
ccagtccaagagtctaatcacgggaactga

SEQ ID NO: 67672 - DNA, 30 bp, Artificial Sequence
  Synthetic oligonucleotide
tagcaagcacgagctgaacatcgtaactga

SEQ ID NO: 67673 - DNA, 30 bp, Artificial Sequence
  Synthetic oligonucleotide
ggtggtcgttgagttaggtgcgagcactga

SEQ ID NO: 67674 - DNA, 30 bp, Artificial Sequence
  Synthetic oligonucleotide
ggcgatccgggatacccagaccaagactga

SEQ ID NO: 67675 - DNA, 30 bp, Artificial Sequence
  Synthetic oligonucleotide
acccggaacaagtcgagatctgcagactga

SEQ ID NO: 67676 - DNA, 30 bp, Artificial Sequence
  Synthetic oligonucleotide
atggcggatacggctcaagcaggagactga

SEQ ID NO: 67677 - DNA, 30 bp, Artificial Sequence
  Synthetic oligonucleotide
gggtaaacgcccggatgaggtaaagcctga

SEQ ID NO: 67678 - DNA, 30 bp, Artificial Sequence
  Synthetic oligonucleotide
cgtggaaaccacccttagtcaacctcctga

SEQ ID NO: 67679 - DNA, 30 bp, Artificial Sequence
  Synthetic oligonucleotide
agaagagactttgctaaactatccagctga

SEQ ID NO: 67680 - DNA, 30 bp, Artificial Sequence
  Synthetic oligonucleotide
aggagggctgtatttagcatatcgagctga

SEQ ID NO: 67681 - DNA, 30 bp, Artificial Sequence
  Synthetic oligonucleotide
acagttgcgggaaggggacgtctgagctga

SEQ ID NO: 67682 - DNA, 30 bp, Artificial Sequence
  Synthetic oligonucleotide
ccagaaccttagccgaaattcggaggctga

SEQ ID NO: 67683 - DNA, 30 bp, Artificial Sequence
  Synthetic oligonucleotide
gaagggggcactagctcgaaggacggctga

SEQ ID NO: 67684 - DNA, 30 bp, Artificial Sequence
  Synthetic oligonucleotide
tctgataataattggcgaatgatcggctga

SEQ ID NO: 67685 - DNA, 30 bp, Artificial Sequence
  Synthetic oligonucleotide
cgcaaaataactgatctaggggatggctga

SEQ ID NO: 67686 - DNA, 30 bp, Artificial Sequence
  Synthetic oligonucleotide
tgagaatctaaagaatcgatagtttgctga

SEQ ID NO: 67687 - DNA, 30 bp, Artificial Sequence
  Synthetic oligonucleotide
atgcaaccgagtgggtcactaaaaatctga

SEQ ID NO: 67688 - DNA, 30 bp, Artificial Sequence
  Synthetic oligonucleotide
aaagggctgaatctggatatgaaaatctga

SEQ ID NO: 67689 - DNA, 30 bp, Artificial Sequence
  Synthetic oligonucleotide
cggatcacatgtgctctagggcgattctga

SEQ ID NO: 67690 - DNA, 30 bp, Artificial Sequence
  Synthetic oligonucleotide
ggctagtggaattagctataggtgaagtga

SEQ ID NO: 67691 - DNA, 30 bp, Artificial Sequence
  Synthetic oligonucleotide
gagggaacctaaatgggctcccgtaagtga

SEQ ID NO: 67692 - DNA, 30 bp, Artificial Sequence
  Synthetic oligonucleotide
tatgggggctaacataaccggatacagtga

SEQ ID NO: 67693 - DNA, 30 bp, Artificial Sequence
  Synthetic oligonucleotide
ggctggtgggcttgcacgattcaagagtga

SEQ ID NO: 67694 - DNA, 30 bp, Artificial Sequence
  Synthetic oligonucleotide
aacatgagcggatcagagtcactagagtga

SEQ ID NO: 67695 - DNA, 30 bp, Artificial Sequence
  Synthetic oligonucleotide
ccggagatatggcttcgatgtacggagtga

SEQ ID NO: 67696 - DNA, 30 bp, Artificial Sequence
  Synthetic oligonucleotide
acaaagcgcgggcgccgagcgagggagtga

SEQ ID NO: 67697 - DNA, 30 bp, Artificial Sequence
  Synthetic oligonucleotide
acaacatggggatctacaatacttacgtga

SEQ ID NO: 67698 - DNA, 30 bp, Artificial Sequence
  Synthetic oligonucleotide
catgtgcacggcagtaaacttgaggcgtga

SEQ ID NO: 67699 - DNA, 30 bp, Artificial Sequence
  Synthetic oligonucleotide
atgcagacaggtcaggagtgcatatcgtga

SEQ ID NO: 67700 - DNA, 30 bp, Artificial Sequence
  Synthetic oligonucleotide
tgttaaactgcgcaagtgatggcgtcgtga

SEQ ID NO: 67701 - DNA, 30 bp, Artificial Sequence
  Synthetic oligonucleotide
taggcggctgacggagggtttgtaaggtga

SEQ ID NO: 67702 - DNA, 31 bp, Artificial Sequence
  Synthetic oligonucleotide
cgtaaagccggtcttctgtgttaacaggtga

SEQ ID NO: 67703 - DNA, 30 bp, Artificial Sequence
  Synthetic oligonucleotide
atcatctgcagtcaagacgggttagggtga

SEQ ID NO: 67704 - DNA, 30 bp, Artificial Sequence
  Synthetic oligonucleotide
gtgctgagcgtcctcttacacatcgggtga

SEQ ID NO: 67705 - DNA, 30 bp, Artificial Sequence
  Synthetic oligonucleotide
ctgggcaggtcgtcgtatggagaggggtga

SEQ ID NO: 67706 - DNA, 30 bp, Artificial Sequence
  Synthetic oligonucleotide
agagtaccggctataattagttagatgtga

SEQ ID NO: 67707 - DNA, 30 bp, Artificial Sequence
  Synthetic oligonucleotide
ccgatactgagacacaggaccggtatgtga

SEQ ID NO: 67708 - DNA, 30 bp, Artificial Sequence
  Synthetic oligonucleotide
agagagacttgcctcaactcaagcctgtga

SEQ ID NO: 67709 - DNA, 30 bp, Artificial Sequence
  Synthetic oligonucleotide
atgaaaacagcctgagcattgagagtgtga

SEQ ID NO: 67710 - DNA, 30 bp, Artificial Sequence
  Synthetic oligonucleotide
acaagaccataccgcaatatagtggtgtga

SEQ ID NO: 67711 - DNA, 30 bp, Artificial Sequence
  Synthetic oligonucleotide
ctaactgaacgaatccggggtggaaattga

SEQ ID NO: 67712 - DNA, 30 bp, Artificial Sequence
  Synthetic oligonucleotide
cgcactctaataagcttgaaagaagattga

SEQ ID NO: 67713 - DNA, 30 bp, Artificial Sequence
  Synthetic oligonucleotide
aggaggaagacagacggggtcgatagttga

SEQ ID NO: 67714 - DNA, 30 bp, Artificial Sequence
  Synthetic oligonucleotide
gcaccggaagacgaaaagatgtatagttga

SEQ ID NO: 67715 - DNA, 30 bp, Artificial Sequence
  Synthetic oligonucleotide
cgtcagcaaggcagccgtgcgatacgttga

SEQ ID NO: 67716 - DNA, 30 bp, Artificial Sequence
  Synthetic oligonucleotide
gcataggcggaacgacacagtcggcgttga

SEQ ID NO: 67717 - DNA, 30 bp, Artificial Sequence
  Synthetic oligonucleotide
cttccggaggatgcctaaacaagaggttga

SEQ ID NO: 67718 - DNA, 30 bp, Artificial Sequence
  Synthetic oligonucleotide
ggtgcaaagggacacccacatctcggttga

SEQ ID NO: 67719 - DNA, 30 bp, Artificial Sequence
  Synthetic oligonucleotide
acggaaattgtggctgtaaccgccatttga

SEQ ID NO: 67720 - DNA, 30 bp, Artificial Sequence
  Synthetic oligonucleotide
agagactgagtagagattccgtccatttga

SEQ ID NO: 67721 - DNA, 30 bp, Artificial Sequence
  Synthetic oligonucleotide
aacgcgaatcgaggcgatcgatgtatttga

SEQ ID NO: 67722 - DNA, 30 bp, Artificial Sequence
  Synthetic oligonucleotide
ttgagaagtggaatctagggggtgcaaata

SEQ ID NO: 67723 - DNA, 31 bp, Artificial Sequence
  Synthetic oligonucleotide
cagggcataggacttaatccggagggaaata

SEQ ID NO: 67724 - DNA, 30 bp, Artificial Sequence
  Synthetic oligonucleotide
cgccgcactctcgcggaactactggaaata

SEQ ID NO: 67725 - DNA, 30 bp, Artificial Sequence
  Synthetic oligonucleotide
cgtgcaagagtcgtgcgaaagtatgaaata

SEQ ID NO: 67726 - DNA, 30 bp, Artificial Sequence
  Synthetic oligonucleotide
gccgcggatgatggaaacccccgataaata

SEQ ID NO: 67727 - DNA, 30 bp, Artificial Sequence
  Synthetic oligonucleotide
aggcgcaacggatcgcagctgaagccaata

SEQ ID NO: 67728 - DNA, 30 bp, Artificial Sequence
  Synthetic oligonucleotide
ggggcagagatgcagtagatgaaagcaata

SEQ ID NO: 67729 - DNA, 30 bp, Artificial Sequence
  Synthetic oligonucleotide
cctaaaggggggcacaatcgaacgtcaata

SEQ ID NO: 67730 - DNA, 30 bp, Artificial Sequence
  Synthetic oligonucleotide
ttccggtagatctaaaggtagggaagaata

SEQ ID NO: 67731 - DNA, 31 bp, Artificial Sequence
  Synthetic oligonucleotide
cagatccgttgtccgggtagggcacagaata

SEQ ID NO: 67732 - DNA, 30 bp, Artificial Sequence
  Synthetic oligonucleotide
tgttcgccgggagaatagtaaacgagaata

SEQ ID NO: 67733 - DNA, 30 bp, Artificial Sequence
  Synthetic oligonucleotide
cttgcacccacggctgtatgaaaacgaata

SEQ ID NO: 67734 - DNA, 30 bp, Artificial Sequence
  Synthetic oligonucleotide
ccccgccaacaagaaaccaccgaacgaata

SEQ ID NO: 67735 - DNA, 30 bp, Artificial Sequence
  Synthetic oligonucleotide
tttcagctcataggtagagcagggcgaata

SEQ ID NO: 67736 - DNA, 30 bp, Artificial Sequence
  Synthetic oligonucleotide
actggtgaggtgaacttaatgacaggaata

SEQ ID NO: 67737 - DNA, 30 bp, Artificial Sequence
  Synthetic oligonucleotide
ccgcacacaattgctcaatacaatggaata

SEQ ID NO: 67738 - DNA, 30 bp, Artificial Sequence
  Synthetic oligonucleotide
taacaccctccgaggtatgtaactggaata

SEQ ID NO: 67739 - DNA, 30 bp, Artificial Sequence
  Synthetic oligonucleotide
gacactaaggcatcacattagcattgaata

SEQ ID NO: 67740 - DNA, 30 bp, Artificial Sequence
  Synthetic oligonucleotide
taagggacagaagtagatccctttataata

SEQ ID NO: 67741 - DNA, 30 bp, Artificial Sequence
  Synthetic oligonucleotide
cggcagagaactcataaggttcgtctaata

SEQ ID NO: 67742 - DNA, 30 bp, Artificial Sequence
  Synthetic oligonucleotide
ccacgaccctaagacgaagtcggtgtaata

SEQ ID NO: 67743 - DNA, 30 bp, Artificial Sequence
  Synthetic oligonucleotide
cgcaaggagaccaccagcagctggcacata

SEQ ID NO: 67744 - DNA, 30 bp, Artificial Sequence
  Synthetic oligonucleotide
cagaggccatgtaggcacgtttaagacata

SEQ ID NO: 67745 - DNA, 30 bp, Artificial Sequence
  Synthetic oligonucleotide
aaacaaaagcgacaacacccaggtgacata

SEQ ID NO: 67746 - DNA, 30 bp, Artificial Sequence
  Synthetic oligonucleotide
gcgggggatcagaatccggcgcggtacata

SEQ ID NO: 67747 - DNA, 30 bp, Artificial Sequence
  Synthetic oligonucleotide
agcaagtggcgaacccgcgcgtggtacata

SEQ ID NO: 67748 - DNA, 30 bp, Artificial Sequence
  Synthetic oligonucleotide
gcatcgtgtcgctggaacatatcttacata

SEQ ID NO: 67749 - DNA, 30 bp, Artificial Sequence
  Synthetic oligonucleotide
agggtaccttcccatctacaccaaaccata

SEQ ID NO: 67750 - DNA, 30 bp, Artificial Sequence
  Synthetic oligonucleotide
aacggagaggatttacgttcgagacccata

SEQ ID NO: 67751 - DNA, 30 bp, Artificial Sequence
  Synthetic oligonucleotide
tgggatagggagagacgaaagatccccata

SEQ ID NO: 67752 - DNA, 30 bp, Artificial Sequence
  Synthetic oligonucleotide
cggaggtggcgtcaagggtatgcgcccata

SEQ ID NO: 67753 - DNA, 30 bp, Artificial Sequence
  Synthetic oligonucleotide
gtatcgcggtaggcacttatgattcccata

SEQ ID NO: 67754 - DNA, 29 bp, Artificial Sequence
  Synthetic oligonucleotide
aaacgtcatagaccaagtgctgggccata

SEQ ID NO: 67755 - DNA, 30 bp, Artificial Sequence
  Synthetic oligonucleotide
gtcgctacagcggcgagggtgactgccata

SEQ ID NO: 67756 - DNA, 30 bp, Artificial Sequence
  Synthetic oligonucleotide
ctagcctggaagcaggcgagtgaaagcata

SEQ ID NO: 67757 - DNA, 30 bp, Artificial Sequence
  Synthetic oligonucleotide
ggtctaaagtcctgtccagaacgaagcata

SEQ ID NO: 67758 - DNA, 30 bp, Artificial Sequence
  Synthetic oligonucleotide
cgtggcctgaatatacacaatctctgcata

SEQ ID NO: 67759 - DNA, 30 bp, Artificial Sequence
  Synthetic oligonucleotide
atggagattgggtattaaaacgattgcata

SEQ ID NO: 67760 - DNA, 30 bp, Artificial Sequence
  Synthetic oligonucleotide
cacgcccaatgagaagagatcagaatcata

SEQ ID NO: 67761 - DNA, 30 bp, Artificial Sequence
  Synthetic oligonucleotide
acggcaaataattaaaggcgaaacatcata

SEQ ID NO: 67762 - DNA, 30 bp, Artificial Sequence
  Synthetic oligonucleotide
gttcgcgggacagctctaaggtagatcata

SEQ ID NO: 67763 - DNA, 30 bp, Artificial Sequence
  Synthetic oligonucleotide
ggcggtggagacgcctcaacatctatcata

SEQ ID NO: 67764 - DNA, 30 bp, Artificial Sequence
  Synthetic oligonucleotide
gccgtcgaatatcgatggcaatcactcata

SEQ ID NO: 67765 - DNA, 30 bp, Artificial Sequence
  Synthetic oligonucleotide
caaaaggtgggtgagacagggcgtgtcata

SEQ ID NO: 67766 - DNA, 30 bp, Artificial Sequence
  Synthetic oligonucleotide
cgaatataggactgttatcgtgttaagata

SEQ ID NO: 67767 - DNA, 30 bp, Artificial Sequence
  Synthetic oligonucleotide
gcatagagattaaacggcgtcctgcagata

SEQ ID NO: 67768 - DNA, 30 bp, Artificial Sequence
  Synthetic oligonucleotide
atcacacgcggggtgaccatccgcccgata

SEQ ID NO: 67769 - DNA, 30 bp, Artificial Sequence
  Synthetic oligonucleotide
aggagcgatgagtctgaagcccttccgata

SEQ ID NO: 67770 - DNA, 30 bp, Artificial Sequence
  Synthetic oligonucleotide
cggggggttaaacctttaacgggctcgata

SEQ ID NO: 67771 - DNA, 30 bp, Artificial Sequence
  Synthetic oligonucleotide
gtgaaggagaatagtgggatcgcgaggata

SEQ ID NO: 67772 - DNA, 30 bp, Artificial Sequence
  Synthetic oligonucleotide
ttaaaaggcatacgtccgtagactaggata

SEQ ID NO: 67773 - DNA, 30 bp, Artificial Sequence
  Synthetic oligonucleotide
gaaagacacagaataacaacacgacggata

SEQ ID NO: 67774 - DNA, 30 bp, Artificial Sequence
  Synthetic oligonucleotide
cgctagtcctgggatgtgagagtgcggata

SEQ ID NO: 67775 - DNA, 30 bp, Artificial Sequence
  Synthetic oligonucleotide
cgtcccgggaggtaagtcggatctcggata

SEQ ID NO: 67776 - DNA, 30 bp, Artificial Sequence
  Synthetic oligonucleotide
gcgacaaagtgatcgataattgtagggata

SEQ ID NO: 67777 - DNA, 30 bp, Artificial Sequence
  Synthetic oligonucleotide
gtatgtcaagatgttgaagagtccgggata

SEQ ID NO: 67778 - DNA, 30 bp, Artificial Sequence
  Synthetic oligonucleotide
tgaaacatgtgcactcgtaatggcatgata

SEQ ID NO: 67779 - DNA, 30 bp, Artificial Sequence
  Synthetic oligonucleotide
agccaggaccgctagagtgaacgtctgata

SEQ ID NO: 67780 - DNA, 30 bp, Artificial Sequence
  Synthetic oligonucleotide
atagcgtccaaatgaaatcgggcgttgata

SEQ ID NO: 67781 - DNA, 30 bp, Artificial Sequence
  Synthetic oligonucleotide
ccgctgctctggctggatgggaggaatata

SEQ ID NO: 67782 - DNA, 30 bp, Artificial Sequence
  Synthetic oligonucleotide
catggaacaatctaggtgggggagcatata

SEQ ID NO: 67783 - DNA, 30 bp, Artificial Sequence
  Synthetic oligonucleotide
atcggcatcgtgtgcgcgcgggcagatata

SEQ ID NO: 67784 - DNA, 30 bp, Artificial Sequence
  Synthetic oligonucleotide
caagaaccgggtcaattgtcgaacgatata

SEQ ID NO: 67785 - DNA, 30 bp, Artificial Sequence
  Synthetic oligonucleotide
aagggctatttagttagaaaaagggatata

SEQ ID NO: 67786 - DNA, 30 bp, Artificial Sequence
  Synthetic oligonucleotide
cgtatacaaataagtaaacccagggatata

SEQ ID NO: 67787 - DNA, 30 bp, Artificial Sequence
  Synthetic oligonucleotide
ccgggaaggcattctgcaccgcgggatata

SEQ ID NO: 67788 - DNA, 30 bp, Artificial Sequence
  Synthetic oligonucleotide
ccaatgcgaatcaagagggtggaacctata

SEQ ID NO: 67789 - DNA, 30 bp, Artificial Sequence
  Synthetic oligonucleotide
tcggcggcgatcactcgatcactgtctata

SEQ ID NO: 67790 - DNA, 30 bp, Artificial Sequence
  Synthetic oligonucleotide
ttgctcggggtggtggagagacatagtata

SEQ ID NO: 67791 - DNA, 30 bp, Artificial Sequence
  Synthetic oligonucleotide
gcggataacaagtcagtgcgccaacgtata

SEQ ID NO: 67792 - DNA, 30 bp, Artificial Sequence
  Synthetic oligonucleotide
ggtacaaggacgatcaccccatgccgtata

SEQ ID NO: 67793 - DNA, 30 bp, Artificial Sequence
  Synthetic oligonucleotide
tagagctaggccaaagccagggatcgtata

SEQ ID NO: 67794 - DNA, 30 bp, Artificial Sequence
  Synthetic oligonucleotide
gtgagtagcgtttcatgcaggaacggtata

SEQ ID NO: 67795 - DNA, 30 bp, Artificial Sequence
  Synthetic oligonucleotide
ctatcgtgacgacaccttcgggcatgtata

SEQ ID NO: 67796 - DNA, 30 bp, Artificial Sequence
  Synthetic oligonucleotide
ggacaagtccaaacccggagatgacttata

SEQ ID NO: 67797 - DNA, 30 bp, Artificial Sequence
  Synthetic oligonucleotide
gtggcgcgaaactctgtgtgcgaaaaacta

SEQ ID NO: 67798 - DNA, 30 bp, Artificial Sequence
  Synthetic oligonucleotide
cgggcaggcccctcgcggtttgcaaaacta

SEQ ID NO: 67799 - DNA, 30 bp, Artificial Sequence
  Synthetic oligonucleotide
aaagtgcgggtgtcgcgtctgtgaaaacta

SEQ ID NO: 67800 - DNA, 30 bp, Artificial Sequence
  Synthetic oligonucleotide
caatatcatggagtgggggctttaaaacta

SEQ ID NO: 67801 - DNA, 30 bp, Artificial Sequence
  Synthetic oligonucleotide
agctccagccacagtgtgggggacaaacta

SEQ ID NO: 67802 - DNA, 30 bp, Artificial Sequence
  Synthetic oligonucleotide
acgtgcattcttgacatcggcacgaaacta

SEQ ID NO: 67803 - DNA, 30 bp, Artificial Sequence
  Synthetic oligonucleotide
ggccagccttcgaaacatgtacataaacta

SEQ ID NO: 67804 - DNA, 30 bp, Artificial Sequence
  Synthetic oligonucleotide
gtggcgtacgtggactcgcgaattcaacta

SEQ ID NO: 67805 - DNA, 30 bp, Artificial Sequence
  Synthetic oligonucleotide
gacgcggatacaaattgacgctatgaacta

SEQ ID NO: 67806 - DNA, 30 bp, Artificial Sequence
  Synthetic oligonucleotide
aagcagggacaactggtcgagcattaacta

SEQ ID NO: 67807 - DNA, 30 bp, Artificial Sequence
  Synthetic oligonucleotide
cgtgtaagacaagatgcagaacgaacacta

SEQ ID NO: 67808 - DNA, 30 bp, Artificial Sequence
  Synthetic oligonucleotide
cgggacgttgagagggcatgttacacacta

SEQ ID NO: 67809 - DNA, 30 bp, Artificial Sequence
  Synthetic oligonucleotide
ttactaagctaataataatctctgacacta

SEQ ID NO: 67810 - DNA, 30 bp, Artificial Sequence
  Synthetic oligonucleotide
acggcgactggagttctgtgctagccacta

SEQ ID NO: 67811 - DNA, 30 bp, Artificial Sequence
  Synthetic oligonucleotide
aagagggcacagagttaatggggagcacta

SEQ ID NO: 67812 - DNA, 30 bp, Artificial Sequence
  Synthetic oligonucleotide
tgcctctcagagaagagatcaccggcacta

SEQ ID NO: 67813 - DNA, 30 bp, Artificial Sequence
  Synthetic oligonucleotide
agaggtccgaaaatagtcgatatggcacta

SEQ ID NO: 67814 - DNA, 30 bp, Artificial Sequence
  Synthetic oligonucleotide
gaatggagacgactgaaacagaactcacta

SEQ ID NO: 67815 - DNA, 30 bp, Artificial Sequence
  Synthetic oligonucleotide
ttcgactgctcacgacgaacacagagacta

SEQ ID NO: 67816 - DNA, 30 bp, Artificial Sequence
  Synthetic oligonucleotide
ggattcagaatgcttagtcagaaacgacta

SEQ ID NO: 67817 - DNA, 30 bp, Artificial Sequence
  Synthetic oligonucleotide
tattatacaaagaggtggtgcgaacgacta

SEQ ID NO: 67818 - DNA, 30 bp, Artificial Sequence
  Synthetic oligonucleotide
cgcggggaagactgggcagatctccgacta

SEQ ID NO: 67819 - DNA, 30 bp, Artificial Sequence
  Synthetic oligonucleotide
caaggacgttgcgggtgtgcgcctcgacta

SEQ ID NO: 67820 - DNA, 30 bp, Artificial Sequence
  Synthetic oligonucleotide
gcgaatggaactattacccgcaccatacta

SEQ ID NO: 67821 - DNA, 30 bp, Artificial Sequence
  Synthetic oligonucleotide
ccgcggaacgagttagacaaaagcatacta

SEQ ID NO: 67822 - DNA, 30 bp, Artificial Sequence
  Synthetic oligonucleotide
catcaaagcaatgagcgaacaccactacta

SEQ ID NO: 67823 - DNA, 30 bp, Artificial Sequence
  Synthetic oligonucleotide
accaacctgaacgggcactcaagagtacta

SEQ ID NO: 67824 - DNA, 30 bp, Artificial Sequence
  Synthetic oligonucleotide
cgacaaaattgtgcatacatgtctgtacta

SEQ ID NO: 67825 - DNA, 30 bp, Artificial Sequence
  Synthetic oligonucleotide
ttgcaagattcgaaaaaatgggtattacta

SEQ ID NO: 67826 - DNA, 30 bp, Artificial Sequence
  Synthetic oligonucleotide
aagaaatgggatacgatgtccagcttacta

SEQ ID NO: 67827 - DNA, 30 bp, Artificial Sequence
  Synthetic oligonucleotide
cgtcacgaagagtcaacatcaatcaaccta

SEQ ID NO: 67828 - DNA, 30 bp, Artificial Sequence
  Synthetic oligonucleotide
agagggacggagcaacgttacgggcaccta

SEQ ID NO: 67829 - DNA, 30 bp, Artificial Sequence
  Synthetic oligonucleotide
tctgacaaatcagctgaaaatcgtgaccta

SEQ ID NO: 67830 - DNA, 30 bp, Artificial Sequence
  Synthetic oligonucleotide
agttaaaatgaggaattatgagaataccta

SEQ ID NO: 67831 - DNA, 30 bp, Artificial Sequence
  Synthetic oligonucleotide
agtctagtgcatacacgaactcgctaccta

SEQ ID NO: 67832 - DNA, 30 bp, Artificial Sequence
  Synthetic oligonucleotide
taaggcgatgtcgtgaaaaagtgttaccta

SEQ ID NO: 67833 - DNA, 30 bp, Artificial Sequence
  Synthetic oligonucleotide
tggccgcttgaaataatagtcagcccccta

SEQ ID NO: 67834 - DNA, 30 bp, Artificial Sequence
  Synthetic oligonucleotide
gactaggccctaggcgtaacgaattcccta

SEQ ID NO: 67835 - DNA, 30 bp, Artificial Sequence
  Synthetic oligonucleotide
acgattttaaggctagggattttcagccta

SEQ ID NO: 67836 - DNA, 30 bp, Artificial Sequence
  Synthetic oligonucleotide
aaggtcgtggtgctttgaagtcagagccta

SEQ ID NO: 67837 - DNA, 30 bp, Artificial Sequence
  Synthetic oligonucleotide
cggaccgggatacgctgtctaattagccta

SEQ ID NO: 67838 - DNA, 30 bp, Artificial Sequence
  Synthetic oligonucleotide
gcgttaggacgaatttcacgctatggccta

SEQ ID NO: 67839 - DNA, 30 bp, Artificial Sequence
  Synthetic oligonucleotide
aacggacattaccgcgggtcgcgtggccta

SEQ ID NO: 67840 - DNA, 30 bp, Artificial Sequence
  Synthetic oligonucleotide
gcagagagataccacatgagaagctgccta

SEQ ID NO: 67841 - DNA, 30 bp, Artificial Sequence
  Synthetic oligonucleotide
ttacagaggcgcaagtcgtcgtcgatccta

SEQ ID NO: 67842 - DNA, 30 bp, Artificial Sequence
  Synthetic oligonucleotide
ggaggcctaatattggcaagtcatatccta

SEQ ID NO: 67843 - DNA, 30 bp, Artificial Sequence
  Synthetic oligonucleotide
cggttacaatatacgacaacacacctccta

SEQ ID NO: 67844 - DNA, 30 bp, Artificial Sequence
  Synthetic oligonucleotide
gggaaactctgctcataagagaagttccta

SEQ ID NO: 67845 - DNA, 30 bp, Artificial Sequence
  Synthetic oligonucleotide
cacgcaaggtaataacgcaaaaaaaagcta

SEQ ID NO: 67846 - DNA, 30 bp, Artificial Sequence
  Synthetic oligonucleotide
cgaaaagattgggattaggcttagaagcta

SEQ ID NO: 67847 - DNA, 30 bp, Artificial Sequence
  Synthetic oligonucleotide
aaggtacgaattgagaatatccatgagcta

SEQ ID NO: 67848 - DNA, 30 bp, Artificial Sequence
  Synthetic oligonucleotide
cgatgggtagtttttggtaagggtgagcta

SEQ ID NO: 67849 - DNA, 30 bp, Artificial Sequence
  Synthetic oligonucleotide
gccggatcgagatggtgggcctcgtagcta

SEQ ID NO: 67850 - DNA, 30 bp, Artificial Sequence
  Synthetic oligonucleotide
gcacggtacgtaagatctacggatccgcta

SEQ ID NO: 67851 - DNA, 30 bp, Artificial Sequence
  Synthetic oligonucleotide
actacatcgccggcggccacgactccgcta

SEQ ID NO: 67852 - DNA, 30 bp, Artificial Sequence
  Synthetic oligonucleotide
gtgtgtcggacaagggatgaggactcgcta

SEQ ID NO: 67853 - DNA, 30 bp, Artificial Sequence
  Synthetic oligonucleotide
tcagtacagggagaactttaatccaggcta

SEQ ID NO: 67854 - DNA, 30 bp, Artificial Sequence
  Synthetic oligonucleotide
cgaagagtcacaaggcacggccgtaggcta

SEQ ID NO: 67855 - DNA, 30 bp, Artificial Sequence
  Synthetic oligonucleotide
cgctcagaaattacaaactccactcggcta

SEQ ID NO: 67856 - DNA, 30 bp, Artificial Sequence
  Synthetic oligonucleotide
atgaattagttagcgtaagtgcccctgcta

SEQ ID NO: 67857 - DNA, 30 bp, Artificial Sequence
  Synthetic oligonucleotide
aagtgaaggcttagtagttcggacgtgcta

SEQ ID NO: 67858 - DNA, 30 bp, Artificial Sequence
  Synthetic oligonucleotide
ccaggcagactgatgggcatacggttgcta

SEQ ID NO: 67859 - DNA, 30 bp, Artificial Sequence
  Synthetic oligonucleotide
gggttgaaggccatcaaaactgggttgcta

SEQ ID NO: 67860 - DNA, 30 bp, Artificial Sequence
  Synthetic oligonucleotide
acaagagcgatttacatcatgaggaatcta

SEQ ID NO: 67861 - DNA, 30 bp, Artificial Sequence
  Synthetic oligonucleotide
cgcgcgtgtgtcgagcctatagataatcta

SEQ ID NO: 67862 - DNA, 30 bp, Artificial Sequence
  Synthetic oligonucleotide
agggctagctagttcaccacgtcccctcta

SEQ ID NO: 67863 - DNA, 30 bp, Artificial Sequence
  Synthetic oligonucleotide
cgacgtgaaggagtcggtgggagtcttcta

SEQ ID NO: 67864 - DNA, 30 bp, Artificial Sequence
  Synthetic oligonucleotide
ggggattctcctgcgccaaacgggaaagta

SEQ ID NO: 67865 - DNA, 30 bp, Artificial Sequence
  Synthetic oligonucleotide
ggttgccaagttgttctgaaccgacaagta

SEQ ID NO: 67866 - DNA, 30 bp, Artificial Sequence
  Synthetic oligonucleotide
cgtgtactccggttaatggcatctcaagta

SEQ ID NO: 67867 - DNA, 30 bp, Artificial Sequence
  Synthetic oligonucleotide
cgcgtgatagagactgtacctcgataagta

SEQ ID NO: 67868 - DNA, 30 bp, Artificial Sequence
  Synthetic oligonucleotide
acgcggggcgggtgttcttacttataagta

SEQ ID NO: 67869 - DNA, 30 bp, Artificial Sequence
  Synthetic oligonucleotide
agctcactaatcgtctaaccaggctaagta

SEQ ID NO: 67870 - DNA, 30 bp, Artificial Sequence
  Synthetic oligonucleotide
acatctaccaagcgcccaatactgtaagta

SEQ ID NO: 67871 - DNA, 30 bp, Artificial Sequence
  Synthetic oligonucleotide
ggtgaccattcagattctaagcgttaagta

SEQ ID NO: 67872 - DNA, 30 bp, Artificial Sequence
  Synthetic oligonucleotide
agtaccagggaagttagccacggttaagta

SEQ ID NO: 67873 - DNA, 30 bp, Artificial Sequence
  Synthetic oligonucleotide
ccgataccggaagggggggcttagacagta

SEQ ID NO: 67874 - DNA, 30 bp, Artificial Sequence
  Synthetic oligonucleotide
tcacccaatggatcgatcacatttacagta

SEQ ID NO: 67875 - DNA, 30 bp, Artificial Sequence
  Synthetic oligonucleotide
cgtatcatctccagcgaatcgcgaccagta

SEQ ID NO: 67876 - DNA, 30 bp, Artificial Sequence
  Synthetic oligonucleotide
gatgtgaatacaacaaagacactaccagta

SEQ ID NO: 67877 - DNA, 30 bp, Artificial Sequence
  Synthetic oligonucleotide
aaagtcaagactgtggatacagaggcagta

SEQ ID NO: 67878 - DNA, 30 bp, Artificial Sequence
  Synthetic oligonucleotide
cctagccgagcctagtgacggtaggcagta

SEQ ID NO: 67879 - DNA, 30 bp, Artificial Sequence
  Synthetic oligonucleotide
cagccggcaataagattctatacggcagta

SEQ ID NO: 67880 - DNA, 30 bp, Artificial Sequence
  Synthetic oligonucleotide
aaagctggtagtcaaggggatgaatcagta

SEQ ID NO: 67881 - DNA, 30 bp, Artificial Sequence
  Synthetic oligonucleotide
gatgtcctagctaaggtaaggtggtcagta

SEQ ID NO: 67882 - DNA, 30 bp, Artificial Sequence
  Synthetic oligonucleotide
catggcgcggatgcttattataaaagagta

SEQ ID NO: 67883 - DNA, 30 bp, Artificial Sequence
  Synthetic oligonucleotide
acggccgatatttgtgacatagcaagagta

SEQ ID NO: 67884 - DNA, 30 bp, Artificial Sequence
  Synthetic oligonucleotide
ataggatcgtcctgtagtcgggagcgagta

SEQ ID NO: 67885 - DNA, 30 bp, Artificial Sequence
  Synthetic oligonucleotide
gcaaaaacgaatcgccctgtttggggagta

SEQ ID NO: 67886 - DNA, 30 bp, Artificial Sequence
  Synthetic oligonucleotide
aatgggctcaactagctacgctatggagta

SEQ ID NO: 67887 - DNA, 30 bp, Artificial Sequence
  Synthetic oligonucleotide
caaaacctatcaaaggtcacaatgtgagta

SEQ ID NO: 67888 - DNA, 30 bp, Artificial Sequence
  Synthetic oligonucleotide
tcgaaagcgtcaccgtcatgttgttgagta

SEQ ID NO: 67889 - DNA, 30 bp, Artificial Sequence
  Synthetic oligonucleotide
acaaacagggagcgtccctagtcaatagta

SEQ ID NO: 67890 - DNA, 30 bp, Artificial Sequence
  Synthetic oligonucleotide
cgtgatgaaaacaattagatgtgtatagta

SEQ ID NO: 67891 - DNA, 30 bp, Artificial Sequence
  Synthetic oligonucleotide
cggtatgaggatattgcgtgttggctagta

SEQ ID NO: 67892 - DNA, 30 bp, Artificial Sequence
  Synthetic oligonucleotide
ttacggagctgtctcccgggaccagtagta

SEQ ID NO: 67893 - DNA, 30 bp, Artificial Sequence
  Synthetic oligonucleotide
catacacaatgcagatgaagctcagtagta

SEQ ID NO: 67894 - DNA, 30 bp, Artificial Sequence
  Synthetic oligonucleotide
cgggatagcgatgtttgtgagtacaacgta

SEQ ID NO: 67895 - DNA, 30 bp, Artificial Sequence
  Synthetic oligonucleotide
ggagaaatccagaaggttagaattaacgta

SEQ ID NO: 67896 - DNA, 30 bp, Artificial Sequence
  Synthetic oligonucleotide
ctaggaacgagcacctaaaacagtgacgta

SEQ ID NO: 67897 - DNA, 30 bp, Artificial Sequence
  Synthetic oligonucleotide
ggggttaagggagcaagccaaattgacgta

SEQ ID NO: 67898 - DNA, 30 bp, Artificial Sequence
  Synthetic oligonucleotide
gggagtctcagttcattcccagactacgta

SEQ ID NO: 67899 - DNA, 30 bp, Artificial Sequence
  Synthetic oligonucleotide
tgatcaaggcctacctgctatttcaccgta

SEQ ID NO: 67900 - DNA, 30 bp, Artificial Sequence
  Synthetic oligonucleotide
gatgcagtggcaaaatcgatatgacccgta

SEQ ID NO: 67901 - DNA, 30 bp, Artificial Sequence
  Synthetic oligonucleotide
aatggtccagccgaaatcgtcgaagccgta

SEQ ID NO: 67902 - DNA, 30 bp, Artificial Sequence
  Synthetic oligonucleotide
acatccatctccctgtatgatcgagccgta

SEQ ID NO: 67903 - DNA, 30 bp, Artificial Sequence
  Synthetic oligonucleotide
cggtaacatggagtctttaaaactgccgta

SEQ ID NO: 67904 - DNA, 30 bp, Artificial Sequence
  Synthetic oligonucleotide
taccagagtggcaggagaggtacgagcgta

SEQ ID NO: 67905 - DNA, 30 bp, Artificial Sequence
  Synthetic oligonucleotide
tgggcctaggtgaggtcgcaatggagcgta

SEQ ID NO: 67906 - DNA, 30 bp, Artificial Sequence
  Synthetic oligonucleotide
cttgatccctctgccagaagggtgcgcgta

SEQ ID NO: 67907 - DNA, 30 bp, Artificial Sequence
  Synthetic oligonucleotide
gaggggacaggggttaaggtggttcgcgta

SEQ ID NO: 67908 - DNA, 30 bp, Artificial Sequence
  Synthetic oligonucleotide
gctgggggtctatagaatgcaataggcgta

SEQ ID NO: 67909 - DNA, 30 bp, Artificial Sequence
  Synthetic oligonucleotide
catggccaggtccagtgcagatgatgcgta

SEQ ID NO: 67910 - DNA, 30 bp, Artificial Sequence
  Synthetic oligonucleotide
acaaccccatgtcgatagcgatgatgcgta

SEQ ID NO: 67911 - DNA, 30 bp, Artificial Sequence
  Synthetic oligonucleotide
tgatggaaagttaagactgatctatgcgta

SEQ ID NO: 67912 - DNA, 30 bp, Artificial Sequence
  Synthetic oligonucleotide
tcaagctcgtgccccatcgtaccgtgcgta

SEQ ID NO: 67913 - DNA, 30 bp, Artificial Sequence
  Synthetic oligonucleotide
tcgaccgcaaagggagccatcaaggtcgta

SEQ ID NO: 67914 - DNA, 30 bp, Artificial Sequence
  Synthetic oligonucleotide
tcccggtcgagaacccagtgatttgtcgta

SEQ ID NO: 67915 - DNA, 30 bp, Artificial Sequence
  Synthetic oligonucleotide
cgtggcgaattaacctcaaagagcttcgta

SEQ ID NO: 67916 - DNA, 30 bp, Artificial Sequence
  Synthetic oligonucleotide
tgggtataaaggcgaacgtgcatcttcgta

SEQ ID NO: 67917 - DNA, 30 bp, Artificial Sequence
  Synthetic oligonucleotide
catagtgactccgttagaagtgatttcgta

SEQ ID NO: 67918 - DNA, 30 bp, Artificial Sequence
  Synthetic oligonucleotide
tgtcaaggagttggggaattccacaaggta

SEQ ID NO: 67919 - DNA, 30 bp, Artificial Sequence
  Synthetic oligonucleotide
ccggccctctacagaagccgctcgaaggta

SEQ ID NO: 67920 - DNA, 30 bp, Artificial Sequence
  Synthetic oligonucleotide
aagaggatgtcggcagataaggcccaggta

SEQ ID NO: 67921 - DNA, 30 bp, Artificial Sequence
  Synthetic oligonucleotide
agcacataataggttagtggctggcaggta

SEQ ID NO: 67922 - DNA, 30 bp, Artificial Sequence
  Synthetic oligonucleotide
tttcaagaaagatagggacagcctcaggta

SEQ ID NO: 67923 - DNA, 30 bp, Artificial Sequence
  Synthetic oligonucleotide
caggggtcataatacatttaatcagaggta

SEQ ID NO: 67924 - DNA, 30 bp, Artificial Sequence
  Synthetic oligonucleotide
aagggttacaaagttaaactactcgaggta

SEQ ID NO: 67925 - DNA, 30 bp, Artificial Sequence
  Synthetic oligonucleotide
cgacagacggagacagcgatatcggaggta

SEQ ID NO: 67926 - DNA, 30 bp, Artificial Sequence
  Synthetic oligonucleotide
aaacggtaatgccgggtcactcttgaggta

SEQ ID NO: 67927 - DNA, 30 bp, Artificial Sequence
  Synthetic oligonucleotide
ctaggccaaaagtaagaaggagtttaggta

SEQ ID NO: 67928 - DNA, 30 bp, Artificial Sequence
  Synthetic oligonucleotide
agggacgatgatattctgttgcttacggta

SEQ ID NO: 67929 - DNA, 30 bp, Artificial Sequence
  Synthetic oligonucleotide
ccgagttatgggggcatgtgcaaaccggta

SEQ ID NO: 67930 - DNA, 30 bp, Artificial Sequence
  Synthetic oligonucleotide
atgtcaattggtcaaacagcgtaaccggta

SEQ ID NO: 67931 - DNA, 30 bp, Artificial Sequence
  Synthetic oligonucleotide
aaacgaaaagacggtttggcctatccggta

SEQ ID NO: 67932 - DNA, 30 bp, Artificial Sequence
  Synthetic oligonucleotide
ggtgacggtgtcaaaaggataccagcggta

SEQ ID NO: 67933 - DNA, 30 bp, Artificial Sequence
  Synthetic oligonucleotide
agtcgaccgaagggtaaaagcagcgcggta

SEQ ID NO: 67934 - DNA, 30 bp, Artificial Sequence
  Synthetic oligonucleotide
gcgggatagcgcaccgatagacgctcggta

SEQ ID NO: 67935 - DNA, 30 bp, Artificial Sequence
  Synthetic oligonucleotide
ggaacacgagttgtagcttataatagggta

SEQ ID NO: 67936 - DNA, 30 bp, Artificial Sequence
  Synthetic oligonucleotide
gctcaagcgaggaaaacgactgttcgggta

SEQ ID NO: 67937 - DNA, 30 bp, Artificial Sequence
  Synthetic oligonucleotide
ctggacttcggtacaaagactgttggggta

SEQ ID NO: 67938 - DNA, 30 bp, Artificial Sequence
  Synthetic oligonucleotide
tggatgataaattcgaatatgtttggggta

SEQ ID NO: 67939 - DNA, 30 bp, Artificial Sequence
  Synthetic oligonucleotide
ccgggcgtaagttgagaggacttgtgggta

SEQ ID NO: 67940 - DNA, 30 bp, Artificial Sequence
  Synthetic oligonucleotide
cggcgagaacgcacgggattatttatggta

SEQ ID NO: 67941 - DNA, 30 bp, Artificial Sequence
  Synthetic oligonucleotide
taccagaggactcacgtggtatcggtggta

SEQ ID NO: 67942 - DNA, 30 bp, Artificial Sequence
  Synthetic oligonucleotide
ccctaggtggtgtcaggtgtgatcttggta

SEQ ID NO: 67943 - DNA, 30 bp, Artificial Sequence
  Synthetic oligonucleotide
gcaaggatgtgatatcctatcagaaatgta

SEQ ID NO: 67944 - DNA, 30 bp, Artificial Sequence
  Synthetic oligonucleotide
tcggatcggcttggagggagttgccatgta

SEQ ID NO: 67945 - DNA, 30 bp, Artificial Sequence
  Synthetic oligonucleotide
cgtaggaatgggaaatattattggcatgta

SEQ ID NO: 67946 - DNA, 30 bp, Artificial Sequence
  Synthetic oligonucleotide
caaggcgttcctgattataggccatatgta

SEQ ID NO: 67947 - DNA, 30 bp, Artificial Sequence
  Synthetic oligonucleotide
agaaggagatcgggcttcaatgtatatgta

SEQ ID NO: 67948 - DNA, 30 bp, Artificial Sequence
  Synthetic oligonucleotide
agaaggatagaacggagcagagcgtatgta

SEQ ID NO: 67949 - DNA, 30 bp, Artificial Sequence
  Synthetic oligonucleotide
taggtctaaatttatggaagatgatctgta

SEQ ID NO: 67950 - DNA, 30 bp, Artificial Sequence
  Synthetic oligonucleotide
acgtatatcatgcacggtatcggaagtgta

SEQ ID NO: 67951 - DNA, 30 bp, Artificial Sequence
  Synthetic oligonucleotide
caagataaggaagttcagggacgtagtgta

SEQ ID NO: 67952 - DNA, 30 bp, Artificial Sequence
  Synthetic oligonucleotide
acagacagaccaatcgtaggcgttagtgta

SEQ ID NO: 67953 - DNA, 30 bp, Artificial Sequence
  Synthetic oligonucleotide
cgattgtggtcggtgttgccacgtggtgta

SEQ ID NO: 67954 - DNA, 30 bp, Artificial Sequence
  Synthetic oligonucleotide
gaagtcagttcaggaaatagtagctgtgta

SEQ ID NO: 67955 - DNA, 30 bp, Artificial Sequence
  Synthetic oligonucleotide
gtcgaaatacaactcacaaaaatctgtgta

SEQ ID NO: 67956 - DNA, 30 bp, Artificial Sequence
  Synthetic oligonucleotide
aaaggcatcacctcaggacacatctgtgta

SEQ ID NO: 67957 - DNA, 30 bp, Artificial Sequence
  Synthetic oligonucleotide
aaacacagatcgtgatgtgccacttgtgta

SEQ ID NO: 67958 - DNA, 30 bp, Artificial Sequence
  Synthetic oligonucleotide
gcagtaggccgcggatcgagccagattgta

SEQ ID NO: 67959 - DNA, 30 bp, Artificial Sequence
  Synthetic oligonucleotide
ttgtctaaaccaccctggggatcgattgta

SEQ ID NO: 67960 - DNA, 30 bp, Artificial Sequence
  Synthetic oligonucleotide
aggtatcgtgaaaaaccgcgcaaagttgta

SEQ ID NO: 67961 - DNA, 30 bp, Artificial Sequence
  Synthetic oligonucleotide
acgaggtccgtgctatagatcggcgttgta

SEQ ID NO: 67962 - DNA, 30 bp, Artificial Sequence
  Synthetic oligonucleotide
ctaagaagggagtaagtcaatcaggttgta

SEQ ID NO: 67963 - DNA, 30 bp, Artificial Sequence
  Synthetic oligonucleotide
ttaacgagatagcggtgcgcaataaaatta

SEQ ID NO: 67964 - DNA, 30 bp, Artificial Sequence
  Synthetic oligonucleotide
taaaaggccgaagcaagcgggcccaaatta

SEQ ID NO: 67965 - DNA, 30 bp, Artificial Sequence
  Synthetic oligonucleotide
tcacagttcgtgtgagcggatggtaaatta

SEQ ID NO: 67966 - DNA, 30 bp, Artificial Sequence
  Synthetic oligonucleotide
aggaagggggctaacattatagttaaatta

SEQ ID NO: 67967 - DNA, 30 bp, Artificial Sequence
  Synthetic oligonucleotide
aaagcagaggatcatgctgttacacaatta

SEQ ID NO: 67968 - DNA, 30 bp, Artificial Sequence
  Synthetic oligonucleotide
tggtgagaacgtgacaatcactcgcaatta

SEQ ID NO: 67969 - DNA, 30 bp, Artificial Sequence
  Synthetic oligonucleotide
agaccggatcgaggccaaatcccagaatta

SEQ ID NO: 67970 - DNA, 30 bp, Artificial Sequence
  Synthetic oligonucleotide
ggaggactttacggtccgccaaccgaatta

SEQ ID NO: 67971 - DNA, 30 bp, Artificial Sequence
  Synthetic oligonucleotide
gcaacagtagatctaactatatgggaatta

SEQ ID NO: 67972 - DNA, 30 bp, Artificial Sequence
  Synthetic oligonucleotide
aacactcggtattaacgaatgcttgaatta

SEQ ID NO: 67973 - DNA, 30 bp, Artificial Sequence
  Synthetic oligonucleotide
ggggcaatttgggcgagatagctaacatta

SEQ ID NO: 67974 - DNA, 30 bp, Artificial Sequence
  Synthetic oligonucleotide
agccacaacaatcctatagtaaaggcatta

SEQ ID NO: 67975 - DNA, 30 bp, Artificial Sequence
  Synthetic oligonucleotide
aacggggcggagttggagggccgttcatta

SEQ ID NO: 67976 - DNA, 30 bp, Artificial Sequence
  Synthetic oligonucleotide
atgggcaccattcacgttcacgatagatta

SEQ ID NO: 67977 - DNA, 30 bp, Artificial Sequence
  Synthetic oligonucleotide
gaatgcaggccaagagcggactgtcgatta

SEQ ID NO: 67978 - DNA, 30 bp, Artificial Sequence
  Synthetic oligonucleotide
ggatcacgcgtggcgacaggagaaggatta

SEQ ID NO: 67979 - DNA, 30 bp, Artificial Sequence
  Synthetic oligonucleotide
ctacgaggaccatactatgacaaacactta

SEQ ID NO: 67980 - DNA, 30 bp, Artificial Sequence
  Synthetic oligonucleotide
ggtggtatgtgagtcacccgaggacactta

SEQ ID NO: 67981 - DNA, 30 bp, Artificial Sequence
  Synthetic oligonucleotide
ccaatgggttcatgggggaatgacgactta

SEQ ID NO: 67982 - DNA, 30 bp, Artificial Sequence
  Synthetic oligonucleotide
agacaatcattcaagaggcgtggaagctta

SEQ ID NO: 67983 - DNA, 30 bp, Artificial Sequence
  Synthetic oligonucleotide
gaatcggcccaagatcgccacaaccgctta

SEQ ID NO: 67984 - DNA, 30 bp, Artificial Sequence
  Synthetic oligonucleotide
tcgagaagctagaacggtgtagtccgctta

SEQ ID NO: 67985 - DNA, 30 bp, Artificial Sequence
  Synthetic oligonucleotide
cagtagaatgggggcgtcaccaaatgctta

SEQ ID NO: 67986 - DNA, 30 bp, Artificial Sequence
  Synthetic oligonucleotide
accacgaactcaaaaaaagcctgagtctta

SEQ ID NO: 67987 - DNA, 30 bp, Artificial Sequence
  Synthetic oligonucleotide
tttaaatccatcgaaggcgaaattacgtta

SEQ ID NO: 67988 - DNA, 30 bp, Artificial Sequence
  Synthetic oligonucleotide
gtatcgtgctgagactgtagtatgccgtta

SEQ ID NO: 67989 - DNA, 30 bp, Artificial Sequence
  Synthetic oligonucleotide
gggattaggtgaaggtctcagataaggtta

SEQ ID NO: 67990 - DNA, 30 bp, Artificial Sequence
  Synthetic oligonucleotide
agtggggcaagacgacatcggagagggtta

SEQ ID NO: 67991 - DNA, 30 bp, Artificial Sequence
  Synthetic oligonucleotide
ccatcaaacacggaacgtgagccgatgtta

SEQ ID NO: 67992 - DNA, 30 bp, Artificial Sequence
  Synthetic oligonucleotide
aggatgatccagcccttgcatcatatgtta

SEQ ID NO: 67993 - DNA, 30 bp, Artificial Sequence
  Synthetic oligonucleotide
tgacgaagaggcgccagttagaaagtgtta

SEQ ID NO: 67994 - DNA, 30 bp, Artificial Sequence
  Synthetic oligonucleotide
gcggtcgaggcgacgacgttaaccgattta

SEQ ID NO: 67995 - DNA, 30 bp, Artificial Sequence
  Synthetic oligonucleotide
cgaagtaaccataagtgggggattaaaaac

SEQ ID NO: 67996 - DNA, 30 bp, Artificial Sequence
  Synthetic oligonucleotide
agcaaaaggggaaggacaaccaggcaaaac

SEQ ID NO: 67997 - DNA, 30 bp, Artificial Sequence
  Synthetic oligonucleotide
cgttggaatggtcagttgacagaggaaaac

SEQ ID NO: 67998 - DNA, 30 bp, Artificial Sequence
  Synthetic oligonucleotide
tgactgtgtagaagagaatcctatgaaaac

SEQ ID NO: 67999 - DNA, 30 bp, Artificial Sequence
  Synthetic oligonucleotide
gagagacctaaagcacagcgacaataaaac

SEQ ID NO: 68000 - DNA, 30 bp, Artificial Sequence
  Synthetic oligonucleotide
acatataaccatataggagagtcgtaaaac

SEQ ID NO: 68001 - DNA, 30 bp, Artificial Sequence
  Synthetic oligonucleotide
gggcgataatggcaagcaaaccggtaaaac

SEQ ID NO: 68002 - DNA, 30 bp, Artificial Sequence
  Synthetic oligonucleotide
cacggctaaggtcgggacatgcgaccaaac

SEQ ID NO: 68003 - DNA, 30 bp, Artificial Sequence
  Synthetic oligonucleotide
cgcacgtatttcgatagtgagcagccaaac

SEQ ID NO: 68004 - DNA, 30 bp, Artificial Sequence
  Synthetic oligonucleotide
taaaaagcaaagacgagatagtttccaaac

SEQ ID NO: 68005 - DNA, 30 bp, Artificial Sequence
  Synthetic oligonucleotide
catcggcagagatgagctgactcagcaaac

SEQ ID NO: 68006 - DNA, 30 bp, Artificial Sequence
  Synthetic oligonucleotide
gtacactctagggttacgggatatgcaaac

SEQ ID NO: 68007 - DNA, 30 bp, Artificial Sequence
  Synthetic oligonucleotide
ctgaaaggactagacgaaaagacatcaaac

SEQ ID NO: 68008 - DNA, 30 bp, Artificial Sequence
  Synthetic oligonucleotide
atagcggttaatggttaacagtactcaaac

SEQ ID NO: 68009 - DNA, 30 bp, Artificial Sequence
  Synthetic oligonucleotide
caaatgcggatacattgctctccttcaaac

SEQ ID NO: 68010 - DNA, 30 bp, Artificial Sequence
  Synthetic oligonucleotide
gcgtgcgtatccgaaccgatcctttcaaac

SEQ ID NO: 68011 - DNA, 30 bp, Artificial Sequence
  Synthetic oligonucleotide
ttagatgaggggtagcacagtcggagaaac

SEQ ID NO: 68012 - DNA, 30 bp, Artificial Sequence
  Synthetic oligonucleotide
gatcgttgcccacgtatgaaaaggcgaaac

SEQ ID NO: 68013 - DNA, 30 bp, Artificial Sequence
  Synthetic oligonucleotide
tggagacttacctgagggacgcgtcgaaac

SEQ ID NO: 68014 - DNA, 30 bp, Artificial Sequence
  Synthetic oligonucleotide
ggtgttagtgtaagatgggccagcggaaac

SEQ ID NO: 68015 - DNA, 30 bp, Artificial Sequence
  Synthetic oligonucleotide
taacacgtagattggaacccggagggaaac

SEQ ID NO: 68016 - DNA, 30 bp, Artificial Sequence
  Synthetic oligonucleotide
tctatagcgtccaaaccacatgcatgaaac

SEQ ID NO: 68017 - DNA, 30 bp, Artificial Sequence
  Synthetic oligonucleotide
agtacacacttgaatcgtcgcgtatgaaac

SEQ ID NO: 68018 - DNA, 30 bp, Artificial Sequence
  Synthetic oligonucleotide
tcgggtcggcctaacacattcgcctgaaac

SEQ ID NO: 68019 - DNA, 30 bp, Artificial Sequence
  Synthetic oligonucleotide
aaaaggagagtgggtgccgacacgtgaaac

SEQ ID NO: 68020 - DNA, 30 bp, Artificial Sequence
  Synthetic oligonucleotide
caatcggtcagatggccggcatgaataaac

SEQ ID NO: 68021 - DNA, 30 bp, Artificial Sequence
  Synthetic oligonucleotide
gtgaagaattagccatcgggaaggataaac

SEQ ID NO: 68022 - DNA, 30 bp, Artificial Sequence
  Synthetic oligonucleotide
ggggcgggcaagtacatggtaaataacaac

SEQ ID NO: 68023 - DNA, 30 bp, Artificial Sequence
  Synthetic oligonucleotide
ctaaggacaactaaagctgagggcgacaac

SEQ ID NO: 68024 - DNA, 30 bp, Artificial Sequence
  Synthetic oligonucleotide
atgccaagagattgttaatacgcggacaac

SEQ ID NO: 68025 - DNA, 30 bp, Artificial Sequence
  Synthetic oligonucleotide
ctttaaagctaggagtgacttgcggacaac

SEQ ID NO: 68026 - DNA, 30 bp, Artificial Sequence
  Synthetic oligonucleotide
cgacgtgcgcataatagcgtcacacccaac

SEQ ID NO: 68027 - DNA, 30 bp, Artificial Sequence
  Synthetic oligonucleotide
tagtcgacgaccatgacagccgcacccaac

SEQ ID NO: 68028 - DNA, 30 bp, Artificial Sequence
  Synthetic oligonucleotide
cgctccagagatttagttccttaagccaac

SEQ ID NO: 68029 - DNA, 30 bp, Artificial Sequence
  Synthetic oligonucleotide
tgaatggcgcgacagacgatgcactccaac

SEQ ID NO: 68030 - DNA, 30 bp, Artificial Sequence
  Synthetic oligonucleotide
gcggtcagatcaatcgtggaaagttccaac

SEQ ID NO: 68031 - DNA, 30 bp, Artificial Sequence
  Synthetic oligonucleotide
cgtccatatcgcgtcgttctaaagagcaac

SEQ ID NO: 68032 - DNA, 30 bp, Artificial Sequence
  Synthetic oligonucleotide
agatgggggtccgtgtcccgatagagcaac

SEQ ID NO: 68033 - DNA, 30 bp, Artificial Sequence
  Synthetic oligonucleotide
cggggaaatacagttagggctgtgagcaac

SEQ ID NO: 68034 - DNA, 30 bp, Artificial Sequence
  Synthetic oligonucleotide
cggctgcagacgggtagcaaccaacgcaac

SEQ ID NO: 68035 - DNA, 30 bp, Artificial Sequence
  Synthetic oligonucleotide
ctgattgaggcttcgtatcactatggcaac

SEQ ID NO: 68036 - DNA, 30 bp, Artificial Sequence
  Synthetic oligonucleotide
ggatcttagagactgacatctcgtggcaac

SEQ ID NO: 68037 - DNA, 30 bp, Artificial Sequence
  Synthetic oligonucleotide
aagtgtaggagactccagtccggatgcaac

SEQ ID NO: 68038 - DNA, 30 bp, Artificial Sequence
  Synthetic oligonucleotide
actaaagggccggttgcgatatcgtgcaac

SEQ ID NO: 68039 - DNA, 30 bp, Artificial Sequence
  Synthetic oligonucleotide
agcgcctcggcacgaaaggttgtgtgcaac

SEQ ID NO: 68040 - DNA, 30 bp, Artificial Sequence
  Synthetic oligonucleotide
gaaggtctgtcagtgcgagggcagatcaac

SEQ ID NO: 68041 - DNA, 30 bp, Artificial Sequence
  Synthetic oligonucleotide
gtaggcgataccgtggcccttgcgatcaac

SEQ ID NO: 68042 - DNA, 30 bp, Artificial Sequence
  Synthetic oligonucleotide
ggcaaggccgaatcggcgaacaagttcaac

SEQ ID NO: 68043 - DNA, 30 bp, Artificial Sequence
  Synthetic oligonucleotide
ataggcgtccgtgtggactggaagcagaac

SEQ ID NO: 68044 - DNA, 30 bp, Artificial Sequence
  Synthetic oligonucleotide
ttacaggaggatagccagtccgctcagaac

SEQ ID NO: 68045 - DNA, 30 bp, Artificial Sequence
  Synthetic oligonucleotide
ggaagacagagtccgacggggtctcagaac

SEQ ID NO: 68046 - DNA, 30 bp, Artificial Sequence
  Synthetic oligonucleotide
cctactgaggcacacccaagctccgagaac

SEQ ID NO: 68047 - DNA, 30 bp, Artificial Sequence
  Synthetic oligonucleotide
ggcgacggttaggaggcatcttaatagaac

SEQ ID NO: 68048 - DNA, 30 bp, Artificial Sequence
  Synthetic oligonucleotide
atgatttgcggtggtagaaattattagaac

SEQ ID NO: 68049 - DNA, 30 bp, Artificial Sequence
  Synthetic oligonucleotide
aacggtcgctcaccagactaaaaaacgaac

SEQ ID NO: 68050 - DNA, 30 bp, Artificial Sequence
  Synthetic oligonucleotide
gcataagaacctaaacccgagcaaacgaac

SEQ ID NO: 68051 - DNA, 30 bp, Artificial Sequence
  Synthetic oligonucleotide
tggcgcaaggggccgggggattaaacgaac

SEQ ID NO: 68052 - DNA, 30 bp, Artificial Sequence
  Synthetic oligonucleotide
gggttatagcagaccacagaaaccaggaac

SEQ ID NO: 68053 - DNA, 30 bp, Artificial Sequence
  Synthetic oligonucleotide
gactgagggtaaggtaaagcaagcgggaac

SEQ ID NO: 68054 - DNA, 30 bp, Artificial Sequence
  Synthetic oligonucleotide
ggaggtggtaaactttcaggccccatgaac

SEQ ID NO: 68055 - DNA, 30 bp, Artificial Sequence
  Synthetic oligonucleotide
ttacgtcctaagcagtcgatgtgcgtgaac

SEQ ID NO: 68056 - DNA, 30 bp, Artificial Sequence
  Synthetic oligonucleotide
cgtgttagctggtaaaactgcacggtgaac

SEQ ID NO: 68057 - DNA, 30 bp, Artificial Sequence
  Synthetic oligonucleotide
gacgcaacgtgacatcgataccttgtgaac

SEQ ID NO: 68058 - DNA, 30 bp, Artificial Sequence
  Synthetic oligonucleotide
ggtaccggggaaagggtctcgatattgaac

SEQ ID NO: 68059 - DNA, 30 bp, Artificial Sequence
  Synthetic oligonucleotide
gctcgaacctggtgggtaggccccttgaac

SEQ ID NO: 68060 - DNA, 30 bp, Artificial Sequence
  Synthetic oligonucleotide
aagcgcggaccatagtacaataacaataac

SEQ ID NO: 68061 - DNA, 30 bp, Artificial Sequence
  Synthetic oligonucleotide
ggctacggcgatcgtactcggggccataac

SEQ ID NO: 68062 - DNA, 30 bp, Artificial Sequence
  Synthetic oligonucleotide
gaggaatggttacctgaacgcggggataac

SEQ ID NO: 68063 - DNA, 30 bp, Artificial Sequence
  Synthetic oligonucleotide
ggtagaccaagatcagagcgacaggctaac

SEQ ID NO: 68064 - DNA, 30 bp, Artificial Sequence
  Synthetic oligonucleotide
tagaacgtgcgaataatggactaggctaac

SEQ ID NO: 68065 - DNA, 30 bp, Artificial Sequence
  Synthetic oligonucleotide
gagataaagggtggattgcacgtgtctaac

SEQ ID NO: 68066 - DNA, 30 bp, Artificial Sequence
  Synthetic oligonucleotide
gtgaaaatgggccggaaagcaagaagtaac

SEQ ID NO: 68067 - DNA, 30 bp, Artificial Sequence
  Synthetic oligonucleotide
gcgattcgatagtaatgaacttgaagtaac

SEQ ID NO: 68068 - DNA, 30 bp, Artificial Sequence
  Synthetic oligonucleotide
ccaaaggatcgcaattaaagctcatgtaac

SEQ ID NO: 68069 - DNA, 30 bp, Artificial Sequence
  Synthetic oligonucleotide
caaaacgtatacggttagccactaattaac

SEQ ID NO: 68070 - DNA, 30 bp, Artificial Sequence
  Synthetic oligonucleotide
ctcaagaaaacacgcttaagacatcttaac

SEQ ID NO: 68071 - DNA, 30 bp, Artificial Sequence
  Synthetic oligonucleotide
gcacgtaggcaaatctttccttgtcttaac

SEQ ID NO: 68072 - DNA, 30 bp, Artificial Sequence
  Synthetic oligonucleotide
tatattacctcaaggaaatgtgtcgttaac

SEQ ID NO: 68073 - DNA, 30 bp, Artificial Sequence
  Synthetic oligonucleotide
gtagcatggggaaagccaggctgggttaac

SEQ ID NO: 68074 - DNA, 30 bp, Artificial Sequence
  Synthetic oligonucleotide
ccttattcaaaaggcaagcgaaaaaaacac

SEQ ID NO: 68075 - DNA, 30 bp, Artificial Sequence
  Synthetic oligonucleotide
acggcgtcctggttatacatatagcaacac

SEQ ID NO: 68076 - DNA, 30 bp, Artificial Sequence
  Synthetic oligonucleotide
gaacaattggacctgggcgacagaccacac

SEQ ID NO: 68077 - DNA, 30 bp, Artificial Sequence
  Synthetic oligonucleotide
agtaggcatccgtactaccttctcccacac

SEQ ID NO: 68078 - DNA, 30 bp, Artificial Sequence
  Synthetic oligonucleotide
tcttgaatgtaaaatgcgaggcaatcacac

SEQ ID NO: 68079 - DNA, 30 bp, Artificial Sequence
  Synthetic oligonucleotide
cgactggtagtacaccagtaaggcagacac

SEQ ID NO: 68080 - DNA, 30 bp, Artificial Sequence
  Synthetic oligonucleotide
aggaattggaaaacgtaggtaactagacac

SEQ ID NO: 68081 - DNA, 30 bp, Artificial Sequence
  Synthetic oligonucleotide
cataatcttaaactactgcatcaacgacac

SEQ ID NO: 68082 - DNA, 30 bp, Artificial Sequence
  Synthetic oligonucleotide
tgtacggaacgatgatacccctaacgacac

SEQ ID NO: 68083 - DNA, 30 bp, Artificial Sequence
  Synthetic oligonucleotide
aacatacgtggccatgagggacagcgacac

SEQ ID NO: 68084 - DNA, 30 bp, Artificial Sequence
  Synthetic oligonucleotide
ggtacctggaaatcaatgtaccagtgacac

SEQ ID NO: 68085 - DNA, 30 bp, Artificial Sequence
  Synthetic oligonucleotide
taatgtgccggcgtagttatgtagtgacac

SEQ ID NO: 68086 - DNA, 30 bp, Artificial Sequence
  Synthetic oligonucleotide
aggatgcgcaagcggcggccggcgtgacac

SEQ ID NO: 68087 - DNA, 30 bp, Artificial Sequence
  Synthetic oligonucleotide
ttaatggactgaggactgcctgcgtgacac

SEQ ID NO: 68088 - DNA, 30 bp, Artificial Sequence
  Synthetic oligonucleotide
agtcgtggacccggccaagtcaagatacac

SEQ ID NO: 68089 - DNA, 30 bp, Artificial Sequence
  Synthetic oligonucleotide
acaaaggggaagaaaacaccagatttacac

SEQ ID NO: 68090 - DNA, 30 bp, Artificial Sequence
  Synthetic oligonucleotide
aaggagacacagttaatacaagttcaccac

SEQ ID NO: 68091 - DNA, 30 bp, Artificial Sequence
  Synthetic oligonucleotide
tcaacatagctctgctcaacttatacccac

SEQ ID NO: 68092 - DNA, 30 bp, Artificial Sequence
  Synthetic oligonucleotide
tgaaactaggtggtgtgttgaactgcccac

SEQ ID NO: 68093 - DNA, 30 bp, Artificial Sequence
  Synthetic oligonucleotide
acagagcttcgtagagataattaatcccac

SEQ ID NO: 68094 - DNA, 30 bp, Artificial Sequence
  Synthetic oligonucleotide
gtggatgcgtacagcagatataacagccac

SEQ ID NO: 68095 - DNA, 30 bp, Artificial Sequence
  Synthetic oligonucleotide
cctagtaggtgagaacctggggacagccac

SEQ ID NO: 68096 - DNA, 30 bp, Artificial Sequence
  Synthetic oligonucleotide
aatgaactgggggacaaatgagtcagccac

SEQ ID NO: 68097 - DNA, 30 bp, Artificial Sequence
  Synthetic oligonucleotide
agtgtacaacgaactacttactatcgccac

SEQ ID NO: 68098 - DNA, 30 bp, Artificial Sequence
  Synthetic oligonucleotide
tcggtgtccaccgggcattagtgaggccac

SEQ ID NO: 68099 - DNA, 30 bp, Artificial Sequence
  Synthetic oligonucleotide
ttagcttagttcatgggtgataggggccac

SEQ ID NO: 68100 - DNA, 30 bp, Artificial Sequence
  Synthetic oligonucleotide
ggtgagccggttaaataatcgcttggccac

SEQ ID NO: 68101 - DNA, 30 bp, Artificial Sequence
  Synthetic oligonucleotide
gtggtataaacgtaacgtgccgacatccac

SEQ ID NO: 68102 - DNA, 30 bp, Artificial Sequence
  Synthetic oligonucleotide
ctcgtaatgcacctaggctgcttgatccac

SEQ ID NO: 68103 - DNA, 30 bp, Artificial Sequence
  Synthetic oligonucleotide
caacaagtcgattagacatgacaggtccac

SEQ ID NO: 68104 - DNA, 30 bp, Artificial Sequence
  Synthetic oligonucleotide
ccgagcgcccacaacagcgaggggaagcac

SEQ ID NO: 68105 - DNA, 30 bp, Artificial Sequence
  Synthetic oligonucleotide
ggcacagtctatagcgccggctggaagcac

SEQ ID NO: 68106 - DNA, 30 bp, Artificial Sequence
  Synthetic oligonucleotide
tgcaccccgagctaaggccgcaaccagcac

SEQ ID NO: 68107 - DNA, 30 bp, Artificial Sequence
  Synthetic oligonucleotide
cggttgctataagtatagggaattgagcac

SEQ ID NO: 68108 - DNA, 30 bp, Artificial Sequence
  Synthetic oligonucleotide
catcccagaattggctggcttaagtagcac

SEQ ID NO: 68109 - DNA, 30 bp, Artificial Sequence
  Synthetic oligonucleotide
gtacgattaggtatagacatgggatcgcac

SEQ ID NO: 68110 - DNA, 30 bp, Artificial Sequence
  Synthetic oligonucleotide
attccaagttgcaaacaggagcactcgcac

SEQ ID NO: 68111 - DNA, 30 bp, Artificial Sequence
  Synthetic oligonucleotide
cgggggagtactattatgttgtcctcgcac

SEQ ID NO: 68112 - DNA, 30 bp, Artificial Sequence
  Synthetic oligonucleotide
taagagccacatgggtgaccgtattcgcac

SEQ ID NO: 68113 - DNA, 30 bp, Artificial Sequence
  Synthetic oligonucleotide
taccgtggggtcgagacaagagcaaggcac

SEQ ID NO: 68114 - DNA, 30 bp, Artificial Sequence
  Synthetic oligonucleotide
gcgagcttaaggtggcgtgatagaaggcac

SEQ ID NO: 68115 - DNA, 30 bp, Artificial Sequence
  Synthetic oligonucleotide
aacgcatcataggagtaggtgctcaggcac

SEQ ID NO: 68116 - DNA, 30 bp, Artificial Sequence
  Synthetic oligonucleotide
taagatagaggcgcaaaccagcataggcac

SEQ ID NO: 68117 - DNA, 30 bp, Artificial Sequence
  Synthetic oligonucleotide
taggtcccggacaacgcttcccaacggcac

SEQ ID NO: 68118 - DNA, 30 bp, Artificial Sequence
  Synthetic oligonucleotide
cgcaatccgtacacgtaaaacaagtggcac

SEQ ID NO: 68119 - DNA, 30 bp, Artificial Sequence
  Synthetic oligonucleotide
aagcccgacatgcctgagacctacctgcac

SEQ ID NO: 68120 - DNA, 30 bp, Artificial Sequence
  Synthetic oligonucleotide
agcgagttagcacactagtgtgcgctgcac

SEQ ID NO: 68121 - DNA, 30 bp, Artificial Sequence
  Synthetic oligonucleotide
acagcccgtagatatgactggagattgcac

SEQ ID NO: 68122 - DNA, 30 bp, Artificial Sequence
  Synthetic oligonucleotide
tgctcgagaactagcaaggagtctttgcac

SEQ ID NO: 68123 - DNA, 30 bp, Artificial Sequence
  Synthetic oligonucleotide
caagtaacagctggtgctacataaaatcac

SEQ ID NO: 68124 - DNA, 30 bp, Artificial Sequence
  Synthetic oligonucleotide
cacaaagctccttccccgggagtgaatcac

SEQ ID NO: 68125 - DNA, 30 bp, Artificial Sequence
  Synthetic oligonucleotide
acgtcgactgtccaagggtcgatgcgtcac

SEQ ID NO: 68126 - DNA, 30 bp, Artificial Sequence
  Synthetic oligonucleotide
gatgaagcgcgattatgtatagtgcgtcac

SEQ ID NO: 68127 - DNA, 30 bp, Artificial Sequence
  Synthetic oligonucleotide
gaaacgtccgaccatccgagcccgggtcac

SEQ ID NO: 68128 - DNA, 30 bp, Artificial Sequence
  Synthetic oligonucleotide
cggcacacagtcggtagcaattaatgtcac

SEQ ID NO: 68129 - DNA, 30 bp, Artificial Sequence
  Synthetic oligonucleotide
agcgagcgcgcgattgaggtccattgtcac

SEQ ID NO: 68130 - DNA, 30 bp, Artificial Sequence
  Synthetic oligonucleotide
gcaatgcacaaaccactcgcgaggattcac

SEQ ID NO: 68131 - DNA, 30 bp, Artificial Sequence
  Synthetic oligonucleotide
tcagcccaccctctccactacagccttcac

SEQ ID NO: 68132 - DNA, 30 bp, Artificial Sequence
  Synthetic oligonucleotide
catgatagagttaacaggggtatgcttcac

SEQ ID NO: 68133 - DNA, 30 bp, Artificial Sequence
  Synthetic oligonucleotide
ggagtacgatacatgaaaaaatatcttcac

SEQ ID NO: 68134 - DNA, 34 bp, Artificial Sequence
  Synthetic oligonucleotide
gataccagaccaccacgtgtccatcagaaaagac

SEQ ID NO: 68135 - DNA, 30 bp, Artificial Sequence
  Synthetic oligonucleotide
ccaataatcagattgtgacggcgacaagac

SEQ ID NO: 68136 - DNA, 30 bp, Artificial Sequence
  Synthetic oligonucleotide
agcatacgtgtagtgaatcctaatcaagac

SEQ ID NO: 68137 - DNA, 30 bp, Artificial Sequence
  Synthetic oligonucleotide
ctaaggccatccccgcgaacctatcaagac

SEQ ID NO: 68138 - DNA, 30 bp, Artificial Sequence
  Synthetic oligonucleotide
tcttaggacgaaaggggggtgtcgtaagac

SEQ ID NO: 68139 - DNA, 30 bp, Artificial Sequence
  Synthetic oligonucleotide
agggcaaatagagaccgggtcgctacagac

SEQ ID NO: 68140 - DNA, 30 bp, Artificial Sequence
  Synthetic oligonucleotide
gacgttatccaccggaggtacccaccagac

SEQ ID NO: 68141 - DNA, 30 bp, Artificial Sequence
  Synthetic oligonucleotide
gtatcacccctcatcctaattttgccagac

SEQ ID NO: 68142 - DNA, 30 bp, Artificial Sequence
  Synthetic oligonucleotide
cggaattaagcacagaacctatcagcagac

SEQ ID NO: 68143 - DNA, 30 bp, Artificial Sequence
  Synthetic oligonucleotide
gccggcagatgtggaaacgaaatatcagac

SEQ ID NO: 68144 - DNA, 30 bp, Artificial Sequence
  Synthetic oligonucleotide
ggcacgctagtggcgatcagaatgtcagac

SEQ ID NO: 68145 - DNA, 30 bp, Artificial Sequence
  Synthetic oligonucleotide
attctactgcggtggaaagaggtgcgagac

SEQ ID NO: 68146 - DNA, 30 bp, Artificial Sequence
  Synthetic oligonucleotide
tagccaacgctggccgagatagcaggagac

SEQ ID NO: 68147 - DNA, 30 bp, Artificial Sequence
  Synthetic oligonucleotide
ccctgtgcaagacgagagcactgctgagac

SEQ ID NO: 68148 - DNA, 30 bp, Artificial Sequence
  Synthetic oligonucleotide
cggagtaagaatagcaaatatcggtgagac

SEQ ID NO: 68149 - DNA, 30 bp, Artificial Sequence
  Synthetic oligonucleotide
ggaagacgcgaggttgactacggttgagac

SEQ ID NO: 68150 - DNA, 30 bp, Artificial Sequence
  Synthetic oligonucleotide
cgcctatgtgaaaagtggtcgtgactagac

SEQ ID NO: 68151 - DNA, 30 bp, Artificial Sequence
  Synthetic oligonucleotide
cgactaacatggtcccataccacgctagac

SEQ ID NO: 68152 - DNA, 30 bp, Artificial Sequence
  Synthetic oligonucleotide
cccggcgccaggaacgatcatatgctagac

SEQ ID NO: 68153 - DNA, 30 bp, Artificial Sequence
  Synthetic oligonucleotide
agtagagactaccttccatatactctagac

SEQ ID NO: 68154 - DNA, 30 bp, Artificial Sequence
  Synthetic oligonucleotide
cctacatgcctgaagagggctgaagtagac

SEQ ID NO: 68155 - DNA, 30 bp, Artificial Sequence
  Synthetic oligonucleotide
acatacaggtctaatcaatacacagtagac

SEQ ID NO: 68156 - DNA, 30 bp, Artificial Sequence
  Synthetic oligonucleotide
gtgcgtgtggttgcgagcatggaggtagac

SEQ ID NO: 68157 - DNA, 30 bp, Artificial Sequence
  Synthetic oligonucleotide
gcgcatatagaggaagaacaccttgtagac

SEQ ID NO: 68158 - DNA, 30 bp, Artificial Sequence
  Synthetic oligonucleotide
caggaccatctccatcagacacaaaacgac

SEQ ID NO: 68159 - DNA, 30 bp, Artificial Sequence
  Synthetic oligonucleotide
gcggcactaaaggaagagctggtaaacgac

SEQ ID NO: 68160 - DNA, 30 bp, Artificial Sequence
  Synthetic oligonucleotide
ggatagttggccaatatccgatacaacgac

SEQ ID NO: 68161 - DNA, 30 bp, Artificial Sequence
  Synthetic oligonucleotide
cacgtgttaacagccaggctgcgcaacgac

SEQ ID NO: 68162 - DNA, 30 bp, Artificial Sequence
  Synthetic oligonucleotide
gatcgggccgttgggagattcaaatacgac

SEQ ID NO: 68163 - DNA, 30 bp, Artificial Sequence
  Synthetic oligonucleotide
acagactatctccaatcagtcgaaaccgac

SEQ ID NO: 68164 - DNA, 30 bp, Artificial Sequence
  Synthetic oligonucleotide
ggaggatgttgtaggcaacgtcctaccgac

SEQ ID NO: 68165 - DNA, 30 bp, Artificial Sequence
  Synthetic oligonucleotide
aaggtgtgtctaatgccccagacccccgac

SEQ ID NO: 68166 - DNA, 30 bp, Artificial Sequence
  Synthetic oligonucleotide
acgtgatccggaataggcatcgagcccgac

SEQ ID NO: 68167 - DNA, 30 bp, Artificial Sequence
  Synthetic oligonucleotide
cgtgtccgtagtttcgaaagttagcccgac

SEQ ID NO: 68168 - DNA, 30 bp, Artificial Sequence
  Synthetic oligonucleotide
tgacagccagctgcagctaggcgagccgac

SEQ ID NO: 68169 - DNA, 30 bp, Artificial Sequence
  Synthetic oligonucleotide
gatgtagaatacgtatggcacgaggccgac

SEQ ID NO: 68170 - DNA, 30 bp, Artificial Sequence
  Synthetic oligonucleotide
cacgtattggtgcggtcagcgaggtccgac

SEQ ID NO: 68171 - DNA, 30 bp, Artificial Sequence
  Synthetic oligonucleotide
acacgtagacaagtggtctgtgcgagcgac

SEQ ID NO: 68172 - DNA, 30 bp, Artificial Sequence
  Synthetic oligonucleotide
gtaacgttcacagattagggaaaacgcgac

SEQ ID NO: 68173 - DNA, 30 bp, Artificial Sequence
  Synthetic oligonucleotide
caagctcgacgggcctgcccagctggcgac

SEQ ID NO: 68174 - DNA, 30 bp, Artificial Sequence
  Synthetic oligonucleotide
acaaaggaggcatattcatgaatgctcgac

SEQ ID NO: 68175 - DNA, 31 bp, Artificial Sequence
  Synthetic oligonucleotide
gaaacacactgtatgctatgttcgagtcgac

SEQ ID NO: 68176 - DNA, 30 bp, Artificial Sequence
  Synthetic oligonucleotide
tgctgaggcggatcgaggatcgtcgtcgac

SEQ ID NO: 68177 - DNA, 30 bp, Artificial Sequence
  Synthetic oligonucleotide
acgggcctgcccagtgtaacagctgtcgac

SEQ ID NO: 68178 - DNA, 30 bp, Artificial Sequence
  Synthetic oligonucleotide
caggaagttgcaaactcgaatagcttcgac

SEQ ID NO: 68179 - DNA, 30 bp, Artificial Sequence
  Synthetic oligonucleotide
aggaatccggtaactgggggtgggaaggac

SEQ ID NO: 68180 - DNA, 30 bp, Artificial Sequence
  Synthetic oligonucleotide
tacctagcttaacattccgtgagtaaggac

SEQ ID NO: 68181 - DNA, 30 bp, Artificial Sequence
  Synthetic oligonucleotide
agaaggtaacaacgttgtgtgtcacaggac

SEQ ID NO: 68182 - DNA, 30 bp, Artificial Sequence
  Synthetic oligonucleotide
attgcatgcacaatggcaatcggacaggac

SEQ ID NO: 68183 - DNA, 30 bp, Artificial Sequence
  Synthetic oligonucleotide
gatgcgcgcaagtgtgcgcgaagggaggac

SEQ ID NO: 68184 - DNA, 30 bp, Artificial Sequence
  Synthetic oligonucleotide
ggattggaccatctcgatgactgataggac

SEQ ID NO: 68185 - DNA, 30 bp, Artificial Sequence
  Synthetic oligonucleotide
ggacaataaatagatacattggagacggac

SEQ ID NO: 68186 - DNA, 30 bp, Artificial Sequence
  Synthetic oligonucleotide
cccacggggtccaattaagaggatccggac

SEQ ID NO: 68187 - DNA, 30 bp, Artificial Sequence
  Synthetic oligonucleotide
aaatggaagaatcgttacgaacgagcggac

SEQ ID NO: 68188 - DNA, 30 bp, Artificial Sequence
  Synthetic oligonucleotide
taacaggtccagataattggatcaagggac

SEQ ID NO: 68189 - DNA, 30 bp, Artificial Sequence
  Synthetic oligonucleotide
aagaaccggatacgctttcatgatagggac

SEQ ID NO: 68190 - DNA, 30 bp, Artificial Sequence
  Synthetic oligonucleotide
ggatgcggtgtagcgtggaggactagggac

SEQ ID NO: 68191 - DNA, 30 bp, Artificial Sequence
  Synthetic oligonucleotide
ggggtctgaccgacattatctccaggggac

SEQ ID NO: 68192 - DNA, 30 bp, Artificial Sequence
  Synthetic oligonucleotide
agcagataggtgttagtgaatgcgatggac

SEQ ID NO: 68193 - DNA, 30 bp, Artificial Sequence
  Synthetic oligonucleotide
tcgtgcagaatgttattagcaccgttggac

SEQ ID NO: 68194 - DNA, 30 bp, Artificial Sequence
  Synthetic oligonucleotide
cggctaacttggatagtacggacacatgac

SEQ ID NO: 68195 - DNA, 30 bp, Artificial Sequence
  Synthetic oligonucleotide
tcgacgaacacggggtaggcccgcgatgac

SEQ ID NO: 68196 - DNA, 30 bp, Artificial Sequence
  Synthetic oligonucleotide
atgggatcacgtttacaggtaaaggatgac

SEQ ID NO: 68197 - DNA, 30 bp, Artificial Sequence
  Synthetic oligonucleotide
caaccgcccatctgtagaccgacggatgac

SEQ ID NO: 68198 - DNA, 30 bp, Artificial Sequence
  Synthetic oligonucleotide
gtggaatcagccgcataaacgaatgatgac

SEQ ID NO: 68199 - DNA, 30 bp, Artificial Sequence
  Synthetic oligonucleotide
aacgaacagctggggcgtgcgatttatgac

SEQ ID NO: 68200 - DNA, 30 bp, Artificial Sequence
  Synthetic oligonucleotide
tcagataagctatgtaagatgagacctgac

SEQ ID NO: 68201 - DNA, 30 bp, Artificial Sequence
  Synthetic oligonucleotide
gccctgcatccgagtaaataaacagctgac

SEQ ID NO: 68202 - DNA, 30 bp, Artificial Sequence
  Synthetic oligonucleotide
cgcaccatgccagagccccgcccgagtgac

SEQ ID NO: 68203 - DNA, 30 bp, Artificial Sequence
  Synthetic oligonucleotide
cggagagcagcgtaataggaggtccgtgac

SEQ ID NO: 68204 - DNA, 30 bp, Artificial Sequence
  Synthetic oligonucleotide
cagcaattagctgtgaaattagagcgtgac

SEQ ID NO: 68205 - DNA, 30 bp, Artificial Sequence
  Synthetic oligonucleotide
acaaccgatcccagagcaaatcatcgtgac

SEQ ID NO: 68206 - DNA, 30 bp, Artificial Sequence
  Synthetic oligonucleotide
atcgcccctcgcacttgggaaactcgtgac

SEQ ID NO: 68207 - DNA, 30 bp, Artificial Sequence
  Synthetic oligonucleotide
actcgcccctagaacgaggaaaagggtgac

SEQ ID NO: 68208 - DNA, 30 bp, Artificial Sequence
  Synthetic oligonucleotide
taaggggcaggtctaaaacgaaggggtgac

SEQ ID NO: 68209 - DNA, 30 bp, Artificial Sequence
  Synthetic oligonucleotide
ccaaaaccgatgacgttttctattggtgac

SEQ ID NO: 68210 - DNA, 30 bp, Artificial Sequence
  Synthetic oligonucleotide
atggtgtgttacatggtctatggctgtgac

SEQ ID NO: 68211 - DNA, 30 bp, Artificial Sequence
  Synthetic oligonucleotide
ggagtaggctgtctttcctatacgtgtgac

SEQ ID NO: 68212 - DNA, 30 bp, Artificial Sequence
  Synthetic oligonucleotide
taaaactaaaaacgagaactacgttgtgac

SEQ ID NO: 68213 - DNA, 30 bp, Artificial Sequence
  Synthetic oligonucleotide
ggtcacgacaattataactcagtgattgac

SEQ ID NO: 68214 - DNA, 30 bp, Artificial Sequence
  Synthetic oligonucleotide
ttgggcggggcgatgatatcaacccttgac

SEQ ID NO: 68215 - DNA, 30 bp, Artificial Sequence
  Synthetic oligonucleotide
gtacaggtgaattcgagacacgcccttgac

SEQ ID NO: 68216 - DNA, 30 bp, Artificial Sequence
  Synthetic oligonucleotide
actgtcgggcacacgagatttccagttgac

SEQ ID NO: 68217 - DNA, 30 bp, Artificial Sequence
  Synthetic oligonucleotide
gaatggtatgcaagagtagtacgcgttgac

SEQ ID NO: 68218 - DNA, 30 bp, Artificial Sequence
  Synthetic oligonucleotide
actgctgccggcaaacctagggaaaaatac

SEQ ID NO: 68219 - DNA, 30 bp, Artificial Sequence
  Synthetic oligonucleotide
aggccaatgaaatgttcgcgaaacaaatac

SEQ ID NO: 68220 - DNA, 30 bp, Artificial Sequence
  Synthetic oligonucleotide
gatatcgtaagcgcgtggtgggggaaatac

SEQ ID NO: 68221 - DNA, 30 bp, Artificial Sequence
  Synthetic oligonucleotide
ggagatgatccacgagttcagttacaatac

SEQ ID NO: 68222 - DNA, 30 bp, Artificial Sequence
  Synthetic oligonucleotide
ccgggagaccggtcgaaacctcgagaatac

SEQ ID NO: 68223 - DNA, 30 bp, Artificial Sequence
  Synthetic oligonucleotide
gggaccagggtctagacctgataataatac

SEQ ID NO: 68224 - DNA, 30 bp, Artificial Sequence
  Synthetic oligonucleotide
aggggagctagagtgcttgggctataatac

SEQ ID NO: 68225 - DNA, 30 bp, Artificial Sequence
  Synthetic oligonucleotide
gctagaagagaaaccctcgccactacatac

SEQ ID NO: 68226 - DNA, 30 bp, Artificial Sequence
  Synthetic oligonucleotide
caatctaatgcaacgacactccccgcatac

SEQ ID NO: 68227 - DNA, 30 bp, Artificial Sequence
  Synthetic oligonucleotide
caaaaggagtccgacaagaaactcgcatac

SEQ ID NO: 68228 - DNA, 30 bp, Artificial Sequence
  Synthetic oligonucleotide
ggacaacggggtataaaaaaagattcatac

SEQ ID NO: 68229 - DNA, 30 bp, Artificial Sequence
  Synthetic oligonucleotide
gggggaattattggattaagcgtacgatac

SEQ ID NO: 68230 - DNA, 30 bp, Artificial Sequence
  Synthetic oligonucleotide
gggggattgctcccagagcgaaacggatac

SEQ ID NO: 68231 - DNA, 30 bp, Artificial Sequence
  Synthetic oligonucleotide
acacgacaagaagtacactatgtgggatac

SEQ ID NO: 68232 - DNA, 30 bp, Artificial Sequence
  Synthetic oligonucleotide
taactaagagtcggagtaacggggatatac

SEQ ID NO: 68233 - DNA, 30 bp, Artificial Sequence
  Synthetic oligonucleotide
gggaacagccatacgggcgtaggactatac

SEQ ID NO: 68234 - DNA, 30 bp, Artificial Sequence
  Synthetic oligonucleotide
acgacaatcaggcatgtacgttccctatac

SEQ ID NO: 68235 - DNA, 30 bp, Artificial Sequence
  Synthetic oligonucleotide
ccctccgcgccgaggggtgagctgctatac

SEQ ID NO: 68236 - DNA, 30 bp, Artificial Sequence
  Synthetic oligonucleotide
tctcacgtaggacagtggcgaagattatac

SEQ ID NO: 68237 - DNA, 30 bp, Artificial Sequence
  Synthetic oligonucleotide
agtgatcgacggtacccagggagaaactac

SEQ ID NO: 68238 - DNA, 30 bp, Artificial Sequence
  Synthetic oligonucleotide
tactgaatgaataaaaaagcatccaactac

SEQ ID NO: 68239 - DNA, 30 bp, Artificial Sequence
  Synthetic oligonucleotide
cggtctaaggagctaatcagcccacactac

SEQ ID NO: 68240 - DNA, 30 bp, Artificial Sequence
  Synthetic oligonucleotide
cgaatctgggaaacctcgcgggcacactac

SEQ ID NO: 68241 - DNA, 30 bp, Artificial Sequence
  Synthetic oligonucleotide
ctacggacaactgattgtgcaacccactac

SEQ ID NO: 68242 - DNA, 30 bp, Artificial Sequence
  Synthetic oligonucleotide
tggtggagaacttttcttagcatcgactac

SEQ ID NO: 68243 - DNA, 30 bp, Artificial Sequence
  Synthetic oligonucleotide
ctggaatacataagcagagggcgatcctac

SEQ ID NO: 68244 - DNA, 30 bp, Artificial Sequence
  Synthetic oligonucleotide
tcgggagcaaggcgtgggcgcaaccgctac

SEQ ID NO: 68245 - DNA, 30 bp, Artificial Sequence
  Synthetic oligonucleotide
cgtatcaaagggtggtgttattatggctac

SEQ ID NO: 68246 - DNA, 30 bp, Artificial Sequence
  Synthetic oligonucleotide
ataccagaaaatacggtgtgctgtggctac

SEQ ID NO: 68247 - DNA, 30 bp, Artificial Sequence
  Synthetic oligonucleotide
acaagcgagacccgtacgagacgatgctac

SEQ ID NO: 68248 - DNA, 30 bp, Artificial Sequence
  Synthetic oligonucleotide
aatagcaccactttagccgagctgctctac

SEQ ID NO: 68249 - DNA, 30 bp, Artificial Sequence
  Synthetic oligonucleotide
gaccgctcaggttgagtggccgaggtctac

SEQ ID NO: 68250 - DNA, 30 bp, Artificial Sequence
  Synthetic oligonucleotide
aaggggtgctaggtggagcggccaaagtac

SEQ ID NO: 68251 - DNA, 30 bp, Artificial Sequence
  Synthetic oligonucleotide
aacaaacatatgctcgcgagttagaagtac

SEQ ID NO: 68252 - DNA, 30 bp, Artificial Sequence
  Synthetic oligonucleotide
gcgggacacacgagtctctcctcgaagtac

SEQ ID NO: 68253 - DNA, 30 bp, Artificial Sequence
  Synthetic oligonucleotide
acgttaggagtcacgcatagaagtaagtac

SEQ ID NO: 68254 - DNA, 30 bp, Artificial Sequence
  Synthetic oligonucleotide
tgaccaagaaagggccaaccagctcagtac

SEQ ID NO: 68255 - DNA, 30 bp, Artificial Sequence
  Synthetic oligonucleotide
actacaccatgtctacttgggcgagagtac

SEQ ID NO: 68256 - DNA, 30 bp, Artificial Sequence
  Synthetic oligonucleotide
ctacggtaatcccgaataagctgggagtac

SEQ ID NO: 68257 - DNA, 30 bp, Artificial Sequence
  Synthetic oligonucleotide
agcgtaatctgcgggaataacaattagtac

SEQ ID NO: 68258 - DNA, 30 bp, Artificial Sequence
  Synthetic oligonucleotide
agatagatagaggtccatcagaacacgtac

SEQ ID NO: 68259 - DNA, 30 bp, Artificial Sequence
  Synthetic oligonucleotide
gacaagtctgacttcgaggcgagtacgtac

SEQ ID NO: 68260 - DNA, 30 bp, Artificial Sequence
  Synthetic oligonucleotide
gaaatggcatgaatggctacggcaccgtac

SEQ ID NO: 68261 - DNA, 30 bp, Artificial Sequence
  Synthetic oligonucleotide
caggaggctaaaagatacctctcagcgtac

SEQ ID NO: 68262 - DNA, 30 bp, Artificial Sequence
  Synthetic oligonucleotide
cgctacaatctgttacacgggaatgcgtac

SEQ ID NO: 68263 - DNA, 30 bp, Artificial Sequence
  Synthetic oligonucleotide
gtggcacgtgagtgtattcagttatcgtac

SEQ ID NO: 68264 - DNA, 30 bp, Artificial Sequence
  Synthetic oligonucleotide
ggcccgggggcataccagatgtcgaggtac

SEQ ID NO: 68265 - DNA, 30 bp, Artificial Sequence
  Synthetic oligonucleotide
cgtaacaacactctgcgtattacacggtac

SEQ ID NO: 68266 - DNA, 30 bp, Artificial Sequence
  Synthetic oligonucleotide
cgacgcccatgtggataatggtctcggtac

SEQ ID NO: 68267 - DNA, 30 bp, Artificial Sequence
  Synthetic oligonucleotide
cgactatggcccaatgttttcaaagggtac

SEQ ID NO: 68268 - DNA, 30 bp, Artificial Sequence
  Synthetic oligonucleotide
tcactccgcgtaaatagactcacgatgtac

SEQ ID NO: 68269 - DNA, 30 bp, Artificial Sequence
  Synthetic oligonucleotide
caacggacgtcatgcatgagtgttatgtac

SEQ ID NO: 68270 - DNA, 30 bp, Artificial Sequence
  Synthetic oligonucleotide
gacagcgtccaaaaggaaccgatactgtac

SEQ ID NO: 68271 - DNA, 30 bp, Artificial Sequence
  Synthetic oligonucleotide
cattctgctaaaagagagaggaacctgtac

SEQ ID NO: 68272 - DNA, 30 bp, Artificial Sequence
  Synthetic oligonucleotide
gtaggagagtgcgtgggggtcggggtgtac

SEQ ID NO: 68273 - DNA, 30 bp, Artificial Sequence
  Synthetic oligonucleotide
tcctagggggtttaatatagcgataattac

SEQ ID NO: 68274 - DNA, 30 bp, Artificial Sequence
  Synthetic oligonucleotide
attcgtcggagaggggtcacggcgtcttac

SEQ ID NO: 68275 - DNA, 30 bp, Artificial Sequence
  Synthetic oligonucleotide
aagcgaagatgccgagaacgcgtcagttac

SEQ ID NO: 68276 - DNA, 30 bp, Artificial Sequence
  Synthetic oligonucleotide
atcgtatccggttgctgcctcgagagttac

SEQ ID NO: 68277 - DNA, 30 bp, Artificial Sequence
  Synthetic oligonucleotide
gacgataaagtagaaggcgaggtagtttac

SEQ ID NO: 68278 - DNA, 30 bp, Artificial Sequence
  Synthetic oligonucleotide
agcaacgcaggtgcgcatggacgtgtttac

SEQ ID NO: 68279 - DNA, 30 bp, Artificial Sequence
  Synthetic oligonucleotide
tcgtaaaacggcgaatggactaccttttac

SEQ ID NO: 68280 - DNA, 30 bp, Artificial Sequence
  Synthetic oligonucleotide
gggccttagacctcatgaaaggcacaaacc

SEQ ID NO: 68281 - DNA, 30 bp, Artificial Sequence
  Synthetic oligonucleotide
cgatgatcttgccgtaaaagccgtgaaacc

SEQ ID NO: 68282 - DNA, 30 bp, Artificial Sequence
  Synthetic oligonucleotide
tagtacagatggagcgccgaatccccaacc

SEQ ID NO: 68283 - DNA, 30 bp, Artificial Sequence
  Synthetic oligonucleotide
aaatgaagtcttatgcaccaaaaaagaacc

SEQ ID NO: 68284 - DNA, 30 bp, Artificial Sequence
  Synthetic oligonucleotide
aggctcagtgtaattaagagaacgagaacc

SEQ ID NO: 68285 - DNA, 30 bp, Artificial Sequence
  Synthetic oligonucleotide
tgaaagacaccgaaaagccttgggagaacc

SEQ ID NO: 68286 - DNA, 30 bp, Artificial Sequence
  Synthetic oligonucleotide
aacgaattaagaaccaggaggacaggaacc

SEQ ID NO: 68287 - DNA, 30 bp, Artificial Sequence
  Synthetic oligonucleotide
atggcccgagaaataatagtccatgtaacc

SEQ ID NO: 68288 - DNA, 30 bp, Artificial Sequence
  Synthetic oligonucleotide
ctaataaacggagttaaccagtaagacacc

SEQ ID NO: 68289 - DNA, 30 bp, Artificial Sequence
  Synthetic oligonucleotide
gtcagatggaagtccagcggaggagacacc

SEQ ID NO: 68290 - DNA, 30 bp, Artificial Sequence
  Synthetic oligonucleotide
acggttgtcccggatatcgttagcgacacc

SEQ ID NO: 68291 - DNA, 30 bp, Artificial Sequence
  Synthetic oligonucleotide
atgcataatcgactgccgaattacaccacc

SEQ ID NO: 68292 - DNA, 30 bp, Artificial Sequence
  Synthetic oligonucleotide
tatgcggccaaacatggagtccgagccacc

SEQ ID NO: 68293 - DNA, 30 bp, Artificial Sequence
  Synthetic oligonucleotide
tcatccgaggagacatgtgcgacggccacc

SEQ ID NO: 68294 - DNA, 30 bp, Artificial Sequence
  Synthetic oligonucleotide
acgtactgcctagagctgccgtccctcacc

SEQ ID NO: 68295 - DNA, 30 bp, Artificial Sequence
  Synthetic oligonucleotide
agacatggttagaggtggagagcccagacc

SEQ ID NO: 68296 - DNA, 30 bp, Artificial Sequence
  Synthetic oligonucleotide
ggcccaccgcccagaatgattgtctagacc

SEQ ID NO: 68297 - DNA, 30 bp, Artificial Sequence
  Synthetic oligonucleotide
aggagtctggttaaaccggcgtacccgacc

SEQ ID NO: 68298 - DNA, 30 bp, Artificial Sequence
  Synthetic oligonucleotide
agacactatttgacgaatacgagagcgacc

SEQ ID NO: 68299 - DNA, 30 bp, Artificial Sequence
  Synthetic oligonucleotide
ttagcacagtaatgatcgagacacgcgacc

SEQ ID NO: 68300 - DNA, 30 bp, Artificial Sequence
  Synthetic oligonucleotide
atgcaatgcaaattggtgatggaatcgacc

SEQ ID NO: 68301 - DNA, 30 bp, Artificial Sequence
  Synthetic oligonucleotide
gtgcatagggaaatcgcaaacaacaggacc

SEQ ID NO: 68302 - DNA, 30 bp, Artificial Sequence
  Synthetic oligonucleotide
gaaggaaggagctcatagttccacaggacc

SEQ ID NO: 68303 - DNA, 30 bp, Artificial Sequence
  Synthetic oligonucleotide
gggcaccggtgccattggaacgatcggacc

SEQ ID NO: 68304 - DNA, 30 bp, Artificial Sequence
  Synthetic oligonucleotide
atgaatgaccaatttaatatggatgggacc

SEQ ID NO: 68305 - DNA, 30 bp, Artificial Sequence
  Synthetic oligonucleotide
caatcataggtctcgattacagcttggacc

SEQ ID NO: 68306 - DNA, 30 bp, Artificial Sequence
  Synthetic oligonucleotide
gcacggccagtggtagatcaccgagtgacc

SEQ ID NO: 68307 - DNA, 29 bp, Artificial Sequence
  Synthetic oligonucleotide
tcctggcagtaccagaggactaacatacc

SEQ ID NO: 68308 - DNA, 30 bp, Artificial Sequence
  Synthetic oligonucleotide
acaaaaggcggtccggggcgttaacatacc

SEQ ID NO: 68309 - DNA, 30 bp, Artificial Sequence
  Synthetic oligonucleotide
tgatagactgaaactaacatccgtcatacc

SEQ ID NO: 68310 - DNA, 30 bp, Artificial Sequence
  Synthetic oligonucleotide
cacacaataaccaggccatgctacgatacc

SEQ ID NO: 68311 - DNA, 30 bp, Artificial Sequence
  Synthetic oligonucleotide
tggtctcgtcggtcgcaccactacactacc

SEQ ID NO: 68312 - DNA, 30 bp, Artificial Sequence
  Synthetic oligonucleotide
ggagagacgttccaaacaccttggagtacc

SEQ ID NO: 68313 - DNA, 30 bp, Artificial Sequence
  Synthetic oligonucleotide
aaggacgaagagaattataatgttagtacc

SEQ ID NO: 68314 - DNA, 30 bp, Artificial Sequence
  Synthetic oligonucleotide
gtgacggcaatagaatccttcctgcgtacc

SEQ ID NO: 68315 - DNA, 30 bp, Artificial Sequence
  Synthetic oligonucleotide
gaaccggcaaatagggtgtaccagggtacc

SEQ ID NO: 68316 - DNA, 30 bp, Artificial Sequence
  Synthetic oligonucleotide
agccagcttacatttggcattgagtgtacc

SEQ ID NO: 68317 - DNA, 30 bp, Artificial Sequence
  Synthetic oligonucleotide
cgtgtaacaaaacggagagtggaaattacc

SEQ ID NO: 68318 - DNA, 30 bp, Artificial Sequence
  Synthetic oligonucleotide
atgcgtgggactcaacattactgcaaaccc

SEQ ID NO: 68319 - DNA, 30 bp, Artificial Sequence
  Synthetic oligonucleotide
cgagagcattggagatgagacaatgaaccc

SEQ ID NO: 68320 - DNA, 30 bp, Artificial Sequence
  Synthetic oligonucleotide
ctcatagctcagcctattaacacgccaccc

SEQ ID NO: 68321 - DNA, 30 bp, Artificial Sequence
  Synthetic oligonucleotide
agatcggggacggtaatgtatcctgcaccc

SEQ ID NO: 68322 - DNA, 30 bp, Artificial Sequence
  Synthetic oligonucleotide
aacggaagcgatacgtgcatggggtcaccc

SEQ ID NO: 68323 - DNA, 30 bp, Artificial Sequence
  Synthetic oligonucleotide
gggacagtcgaccacgaataacaaagaccc

SEQ ID NO: 68324 - DNA, 30 bp, Artificial Sequence
  Synthetic oligonucleotide
tcaaaacacagtacaagacagaagagaccc

SEQ ID NO: 68325 - DNA, 30 bp, Artificial Sequence
  Synthetic oligonucleotide
ggcgaatcacggcacgcccatcagagaccc

SEQ ID NO: 68326 - DNA, 30 bp, Artificial Sequence
  Synthetic oligonucleotide
cgtttgaccgtgggagaataaaaccgaccc

SEQ ID NO: 68327 - DNA, 30 bp, Artificial Sequence
  Synthetic oligonucleotide
ttccgtaaagaggggtgacctgaaggaccc

SEQ ID NO: 68328 - DNA, 30 bp, Artificial Sequence
  Synthetic oligonucleotide
agggatagacgatggagaataagaggaccc

SEQ ID NO: 68329 - DNA, 30 bp, Artificial Sequence
  Synthetic oligonucleotide
gcttggctggaagggagataggggtgaccc

SEQ ID NO: 68330 - DNA, 30 bp, Artificial Sequence
  Synthetic oligonucleotide
gcagtggaccagcgccaagaagagttaccc

SEQ ID NO: 68331 - DNA, 30 bp, Artificial Sequence
  Synthetic oligonucleotide
atgtcaccgaccactattcaactagacccc

SEQ ID NO: 68332 - DNA, 30 bp, Artificial Sequence
  Synthetic oligonucleotide
gacgagcaaaccagcgtcatgcgcgacccc

SEQ ID NO: 68333 - DNA, 30 bp, Artificial Sequence
  Synthetic oligonucleotide
ttaaagagtaacgagtatccccgacccccc

SEQ ID NO: 68334 - DNA, 30 bp, Artificial Sequence
  Synthetic oligonucleotide
acgacttgatgtttcgaactgccggccccc

SEQ ID NO: 68335 - DNA, 30 bp, Artificial Sequence
  Synthetic oligonucleotide
tgaagggcacaatgtacccagctatccccc

SEQ ID NO: 68336 - DNA, 30 bp, Artificial Sequence
  Synthetic oligonucleotide
aggccggatgacggttagatatgtcgcccc

SEQ ID NO: 68337 - DNA, 30 bp, Artificial Sequence
  Synthetic oligonucleotide
tgtgcccagaaatgcagcacgaagatcccc

SEQ ID NO: 68338 - DNA, 30 bp, Artificial Sequence
  Synthetic oligonucleotide
tcactaacacgcgttgaaactaaactcccc

SEQ ID NO: 68339 - DNA, 30 bp, Artificial Sequence
  Synthetic oligonucleotide
ccgggggaggattaccgaatctgggtcccc

SEQ ID NO: 68340 - DNA, 30 bp, Artificial Sequence
  Synthetic oligonucleotide
ttcgaagcacacaccctaagcatccagccc

SEQ ID NO: 68341 - DNA, 30 bp, Artificial Sequence
  Synthetic oligonucleotide
ggctgtaccgaaaagggggaccaggagccc

SEQ ID NO: 68342 - DNA, 30 bp, Artificial Sequence
  Synthetic oligonucleotide
gtgtatggataacatgcgataaatacgccc

SEQ ID NO: 68343 - DNA, 30 bp, Artificial Sequence
  Synthetic oligonucleotide
ctaaaaccgataggtcagcccgtcccgccc

SEQ ID NO: 68344 - DNA, 30 bp, Artificial Sequence
  Synthetic oligonucleotide
cttgttggtggagagaatatgatagcgccc

SEQ ID NO: 68345 - DNA, 30 bp, Artificial Sequence
  Synthetic oligonucleotide
actacatggtcacaggggtgcatatcgccc

SEQ ID NO: 68346 - DNA, 30 bp, Artificial Sequence
  Synthetic oligonucleotide
taggggcggacaagtggatatctatcgccc

SEQ ID NO: 68347 - DNA, 30 bp, Artificial Sequence
  Synthetic oligonucleotide
ggtagtggacattgggtacatcagtcgccc

SEQ ID NO: 68348 - DNA, 30 bp, Artificial Sequence
  Synthetic oligonucleotide
tgtctctggctcatcagatcggtgtcgccc

SEQ ID NO: 68349 - DNA, 30 bp, Artificial Sequence
  Synthetic oligonucleotide
gatagaaaacagtacagactaagagggccc

SEQ ID NO: 68350 - DNA, 30 bp, Artificial Sequence
  Synthetic oligonucleotide
ataacacaggcacgaaaattagaatggccc

SEQ ID NO: 68351 - DNA, 30 bp, Artificial Sequence
  Synthetic oligonucleotide
atgtcatgcaaaacagatgagttgtggccc

SEQ ID NO: 68352 - DNA, 30 bp, Artificial Sequence
  Synthetic oligonucleotide
agctcacttaagaaagcttgttgactgccc

SEQ ID NO: 68353 - DNA, 29 bp, Artificial Sequence
  Synthetic oligonucleotide
ccccgaacagtcaaggtaggcaagtgccc

SEQ ID NO: 68354 - DNA, 30 bp, Artificial Sequence
  Synthetic oligonucleotide
atagaaaggaccaagctactcgtggtgccc

SEQ ID NO: 68355 - DNA, 30 bp, Artificial Sequence
  Synthetic oligonucleotide
ccggtaacgacaatgctaagtagcaatccc

SEQ ID NO: 68356 - DNA, 30 bp, Artificial Sequence
  Synthetic oligonucleotide
acgcacgtctaatacatagcagcccatccc

SEQ ID NO: 68357 - DNA, 30 bp, Artificial Sequence
  Synthetic oligonucleotide
aagcagaggccgccacagcgagcagatccc

SEQ ID NO: 68358 - DNA, 30 bp, Artificial Sequence
  Synthetic oligonucleotide
ccggaaaacattaggcaggaactccctccc

SEQ ID NO: 68359 - DNA, 30 bp, Artificial Sequence
  Synthetic oligonucleotide
aggacggatagagtgctgtttttccctccc

SEQ ID NO: 68360 - DNA, 30 bp, Artificial Sequence
  Synthetic oligonucleotide
cgttaaggctcataaacgatgacgagtccc

SEQ ID NO: 68361 - DNA, 30 bp, Artificial Sequence
  Synthetic oligonucleotide
tggtgactgtatcaaggcaatgatcgtccc

SEQ ID NO: 68362 - DNA, 30 bp, Artificial Sequence
  Synthetic oligonucleotide
gatcgtgcgtcaatggaatggtatcgtccc

SEQ ID NO: 68363 - DNA, 30 bp, Artificial Sequence
  Synthetic oligonucleotide
acacgccatcgaatacccaaacagggtccc

SEQ ID NO: 68364 - DNA, 31 bp, Artificial Sequence
  Synthetic oligonucleotide
acgaccaccgacaggctgggtgaatcaagcc

SEQ ID NO: 68365 - DNA, 30 bp, Artificial Sequence
  Synthetic oligonucleotide
tcaataggaatgggcgtgggtgttcaagcc

SEQ ID NO: 68366 - DNA, 30 bp, Artificial Sequence
  Synthetic oligonucleotide
cagggtatgtgtatgaatcagaaataagcc

SEQ ID NO: 68367 - DNA, 30 bp, Artificial Sequence
  Synthetic oligonucleotide
actcatgaacaaggtccttatcagacagcc

SEQ ID NO: 68368 - DNA, 30 bp, Artificial Sequence
  Synthetic oligonucleotide
ctacgtaaaaaacatgaagcactgacagcc

SEQ ID NO: 68369 - DNA, 30 bp, Artificial Sequence
  Synthetic oligonucleotide
gggaaaaataaaaactcttatattacagcc

SEQ ID NO: 68370 - DNA, 31 bp, Artificial Sequence
  Synthetic oligonucleotide
agagaccatgtaactatggactaagtcagcc

SEQ ID NO: 68371 - DNA, 30 bp, Artificial Sequence
  Synthetic oligonucleotide
tgatgggtgctgtcgagttcaacccgagcc

SEQ ID NO: 68372 - DNA, 30 bp, Artificial Sequence
  Synthetic oligonucleotide
agacagtatgtagtctaagttcagcgagcc

SEQ ID NO: 68373 - DNA, 30 bp, Artificial Sequence
  Synthetic oligonucleotide
gtaagagggtcgggaagctaaaacggagcc

SEQ ID NO: 68374 - DNA, 30 bp, Artificial Sequence
  Synthetic oligonucleotide
aacggctggtccaacattcacacatgagcc

SEQ ID NO: 68375 - DNA, 30 bp, Artificial Sequence
  Synthetic oligonucleotide
cgtcccgctagaagtaaattagcgtgagcc

SEQ ID NO: 68376 - DNA, 30 bp, Artificial Sequence
  Synthetic oligonucleotide
cgaacttaaacccattgtgttagcatagcc

SEQ ID NO: 68377 - DNA, 30 bp, Artificial Sequence
  Synthetic oligonucleotide
gtcggaaaaggtgattagaaccacgtagcc

SEQ ID NO: 68378 - DNA, 31 bp, Artificial Sequence
  Synthetic oligonucleotide
cagaaaacaggaacggatagacaatgtagcc

SEQ ID NO: 68379 - DNA, 30 bp, Artificial Sequence
  Synthetic oligonucleotide
acgtagacggaggtgagatatggaaacgcc

SEQ ID NO: 68380 - DNA, 30 bp, Artificial Sequence
  Synthetic oligonucleotide
ttgcccaggggggatgacccgctaaacgcc

SEQ ID NO: 68381 - DNA, 30 bp, Artificial Sequence
  Synthetic oligonucleotide
gcggataaatgtcttgaacgatataacgcc

SEQ ID NO: 68382 - DNA, 30 bp, Artificial Sequence
  Synthetic oligonucleotide
caataacgctgaacctcccgaataaccgcc

SEQ ID NO: 68383 - DNA, 30 bp, Artificial Sequence
  Synthetic oligonucleotide
atacaaggtatctgaatctaccccaccgcc

SEQ ID NO: 68384 - DNA, 30 bp, Artificial Sequence
  Synthetic oligonucleotide
agagcccaggaaccaaatcagggacccgcc

SEQ ID NO: 68385 - DNA, 30 bp, Artificial Sequence
  Synthetic oligonucleotide
cactcgagactcgtagtggccctaggcgcc

SEQ ID NO: 68386 - DNA, 30 bp, Artificial Sequence
  Synthetic oligonucleotide
atgtcggaagcaaaagtgacccgctgcgcc

SEQ ID NO: 68387 - DNA, 30 bp, Artificial Sequence
  Synthetic oligonucleotide
actgaagccaactgtgaaacagagtgcgcc

SEQ ID NO: 68388 - DNA, 30 bp, Artificial Sequence
  Synthetic oligonucleotide
aatacattaactcgctaggaacggtgcgcc

SEQ ID NO: 68389 - DNA, 30 bp, Artificial Sequence
  Synthetic oligonucleotide
cgcagttatccctaagagacaataatcgcc

SEQ ID NO: 68390 - DNA, 30 bp, Artificial Sequence
  Synthetic oligonucleotide
tacgaaacctgggcatctttgaacatcgcc

SEQ ID NO: 68391 - DNA, 30 bp, Artificial Sequence
  Synthetic oligonucleotide
acattaatgggtgtgagaagccagctcgcc

SEQ ID NO: 68392 - DNA, 30 bp, Artificial Sequence
  Synthetic oligonucleotide
tccgtctcgaaggtggtagagtagctcgcc

SEQ ID NO: 68393 - DNA, 30 bp, Artificial Sequence
  Synthetic oligonucleotide
gggtaaatcagggatcctggcaatttcgcc

SEQ ID NO: 68394 - DNA, 30 bp, Artificial Sequence
  Synthetic oligonucleotide
aaaggtctcttgctgaaagctcgtttcgcc

SEQ ID NO: 68395 - DNA, 30 bp, Artificial Sequence
  Synthetic oligonucleotide
gacgagacttggttgcgaggcctcaaggcc

SEQ ID NO: 68396 - DNA, 30 bp, Artificial Sequence
  Synthetic oligonucleotide
ccctattgcaagtacttacgaaagaaggcc

SEQ ID NO: 68397 - DNA, 30 bp, Artificial Sequence
  Synthetic oligonucleotide
agtggagggattaggtaattaaggaaggcc

SEQ ID NO: 68398 - DNA, 30 bp, Artificial Sequence
  Synthetic oligonucleotide
agagatcgaatgagagcgagaagacaggcc

SEQ ID NO: 68399 - DNA, 30 bp, Artificial Sequence
  Synthetic oligonucleotide
aagtgcttgggctacccctggaagcaggcc

SEQ ID NO: 68400 - DNA, 30 bp, Artificial Sequence
  Synthetic oligonucleotide
cttcgtagtatcgatcaatgaatgtaggcc

SEQ ID NO: 68401 - DNA, 30 bp, Artificial Sequence
  Synthetic oligonucleotide
cggaacctacagcctgatactcaaacggcc

SEQ ID NO: 68402 - DNA, 30 bp, Artificial Sequence
  Synthetic oligonucleotide
gccgtgtctggagaagaacgggaaacggcc

SEQ ID NO: 68403 - DNA, 30 bp, Artificial Sequence
  Synthetic oligonucleotide
gacgactacgaatcgtcaagaccgccggcc

SEQ ID NO: 68404 - DNA, 30 bp, Artificial Sequence
  Synthetic oligonucleotide
tgcaagtcaatactagacatacaagcggcc

SEQ ID NO: 68405 - DNA, 30 bp, Artificial Sequence
  Synthetic oligonucleotide
agttctgtgtcaggatgagggatggcggcc

SEQ ID NO: 68406 - DNA, 30 bp, Artificial Sequence
  Synthetic oligonucleotide
gtggggcgattctcacgaaacactagggcc

SEQ ID NO: 68407 - DNA, 30 bp, Artificial Sequence
  Synthetic oligonucleotide
ctacgaagagatagctgtcagaaacgggcc

SEQ ID NO: 68408 - DNA, 30 bp, Artificial Sequence
  Synthetic oligonucleotide
tatgcgtcaaagcgggtcaacagccgggcc

SEQ ID NO: 68409 - DNA, 30 bp, Artificial Sequence
  Synthetic oligonucleotide
cgaaaggatggtcgtttcggtgcaatggcc

SEQ ID NO: 68410 - DNA, 30 bp, Artificial Sequence
  Synthetic oligonucleotide
cgaagcgttttccgagcacccatgatggcc

SEQ ID NO: 68411 - DNA, 30 bp, Artificial Sequence
  Synthetic oligonucleotide
acgttcgtactccataatccaggcgtggcc

SEQ ID NO: 68412 - DNA, 30 bp, Artificial Sequence
  Synthetic oligonucleotide
cgggcctcacagcgatacgactcaaatgcc

SEQ ID NO: 68413 - DNA, 30 bp, Artificial Sequence
  Synthetic oligonucleotide
tgtagaagtccaccgaatgagtcgaatgcc

SEQ ID NO: 68414 - DNA, 30 bp, Artificial Sequence
  Synthetic oligonucleotide
cggttgtcgagaggtagtccaagagatgcc

SEQ ID NO: 68415 - DNA, 30 bp, Artificial Sequence
  Synthetic oligonucleotide
cgtacgacccgattcccagcgatatatgcc

SEQ ID NO: 68416 - DNA, 30 bp, Artificial Sequence
  Synthetic oligonucleotide
aatgcgaaaggtatcgaggtattgactgcc

SEQ ID NO: 68417 - DNA, 30 bp, Artificial Sequence
  Synthetic oligonucleotide
ctagcggttatgtcgcttagatctgctgcc

SEQ ID NO: 68418 - DNA, 30 bp, Artificial Sequence
  Synthetic oligonucleotide
aaacagcctccaatcaggaaccgatctgcc

SEQ ID NO: 68419 - DNA, 30 bp, Artificial Sequence
  Synthetic oligonucleotide
atcattctagcgagaggcgctcgatctgcc

SEQ ID NO: 68420 - DNA, 30 bp, Artificial Sequence
  Synthetic oligonucleotide
ctctatagttaaagagggatgtagtctgcc

SEQ ID NO: 68421 - DNA, 30 bp, Artificial Sequence
  Synthetic oligonucleotide
aagggcctcctcttataaaaagtgagtgcc

SEQ ID NO: 68422 - DNA, 30 bp, Artificial Sequence
  Synthetic oligonucleotide
ctgtggtgcgggtatactgcgaaaggtgcc

SEQ ID NO: 68423 - DNA, 30 bp, Artificial Sequence
  Synthetic oligonucleotide
ggagtggacttcgtacgactaccctgtgcc

SEQ ID NO: 68424 - DNA, 30 bp, Artificial Sequence
  Synthetic oligonucleotide
agagacaattctgattgaatatcgtttgcc

SEQ ID NO: 68425 - DNA, 30 bp, Artificial Sequence
  Synthetic oligonucleotide
tgagttccagagtccagatgattggaatcc

SEQ ID NO: 68426 - DNA, 30 bp, Artificial Sequence
  Synthetic oligonucleotide
ctagaacgaaaaaagagggtattcccatcc

SEQ ID NO: 68427 - DNA, 30 bp, Artificial Sequence
  Synthetic oligonucleotide
ccaaaacgcgaaaatgctttgaggccatcc

SEQ ID NO: 68428 - DNA, 30 bp, Artificial Sequence
  Synthetic oligonucleotide
atgccccaaaaatgccggcttagatcatcc

SEQ ID NO: 68429 - DNA, 30 bp, Artificial Sequence
  Synthetic oligonucleotide
cgatcctagcctgcgagacacttatcatcc

SEQ ID NO: 68430 - DNA, 30 bp, Artificial Sequence
  Synthetic oligonucleotide
gggagttgaggcgagatgtcagtacgatcc

SEQ ID NO: 68431 - DNA, 30 bp, Artificial Sequence
  Synthetic oligonucleotide
aaggactggagaaatagcgtcaagtgatcc

SEQ ID NO: 68432 - DNA, 30 bp, Artificial Sequence
  Synthetic oligonucleotide
cccggattgccaaggaggtagagttgatcc

SEQ ID NO: 68433 - DNA, 30 bp, Artificial Sequence
  Synthetic oligonucleotide
aggaggcaaactcgaaacaggtgttgatcc

SEQ ID NO: 68434 - DNA, 30 bp, Artificial Sequence
  Synthetic oligonucleotide
cacgggcggtgaggttgtttaaactactcc

SEQ ID NO: 68435 - DNA, 30 bp, Artificial Sequence
  Synthetic oligonucleotide
caatgggaaccctcgcatttaaggtactcc

SEQ ID NO: 68436 - DNA, 30 bp, Artificial Sequence
  Synthetic oligonucleotide
acagcacgtgaatattgtaagtactcctcc

SEQ ID NO: 68437 - DNA, 30 bp, Artificial Sequence
  Synthetic oligonucleotide
ccgtgcttgtgggccatgaaaaatagctcc

SEQ ID NO: 68438 - DNA, 30 bp, Artificial Sequence
  Synthetic oligonucleotide
cgccccacgccatccgacaacttgcgctcc

SEQ ID NO: 68439 - DNA, 30 bp, Artificial Sequence
  Synthetic oligonucleotide
tcaggcactatcaggatattagcgtgctcc

SEQ ID NO: 68440 - DNA, 30 bp, Artificial Sequence
  Synthetic oligonucleotide
tgacacccagtacatagggcaagaatctcc

SEQ ID NO: 68441 - DNA, 30 bp, Artificial Sequence
  Synthetic oligonucleotide
tacggcgtgaactggaatggggagttctcc

SEQ ID NO: 68442 - DNA, 30 bp, Artificial Sequence
  Synthetic oligonucleotide
aataaaactcagagctgagcatcaaagtcc

SEQ ID NO: 68443 - DNA, 30 bp, Artificial Sequence
  Synthetic oligonucleotide
aagaaagctcaactcaacaagatagagtcc

SEQ ID NO: 68444 - DNA, 30 bp, Artificial Sequence
  Synthetic oligonucleotide
gatatagtaccaacagccacaaatccgtcc

SEQ ID NO: 68445 - DNA, 30 bp, Artificial Sequence
  Synthetic oligonucleotide
cgtccgggaaggagcatgcgaccatcgtcc

SEQ ID NO: 68446 - DNA, 30 bp, Artificial Sequence
  Synthetic oligonucleotide
ttcagcaagcgtaaaaaagctagcaggtcc

SEQ ID NO: 68447 - DNA, 30 bp, Artificial Sequence
  Synthetic oligonucleotide
gcacactagcagcaagacgtggaccggtcc

SEQ ID NO: 68448 - DNA, 30 bp, Artificial Sequence
  Synthetic oligonucleotide
accgagtatgcgactcaagtcatggggtcc

SEQ ID NO: 68449 - DNA, 30 bp, Artificial Sequence
  Synthetic oligonucleotide
tctcaactcctaaccagttcaggtatgtcc

SEQ ID NO: 68450 - DNA, 30 bp, Artificial Sequence
  Synthetic oligonucleotide
tcagataagggagcaagtgcgggtctgtcc

SEQ ID NO: 68451 - DNA, 30 bp, Artificial Sequence
  Synthetic oligonucleotide
ttaacagcgtgcctagattgtaaagtgtcc

SEQ ID NO: 68452 - DNA, 30 bp, Artificial Sequence
  Synthetic oligonucleotide
tctcaaggacagacctgtttatgagattcc

SEQ ID NO: 68453 - DNA, 30 bp, Artificial Sequence
  Synthetic oligonucleotide
agtatcaggtagtatcaaaaaaacgattcc

SEQ ID NO: 68454 - DNA, 30 bp, Artificial Sequence
  Synthetic oligonucleotide
aggtgcgctctagctaacgataaagcttcc

SEQ ID NO: 68455 - DNA, 30 bp, Artificial Sequence
  Synthetic oligonucleotide
gctgatcactaagcgggggagttagcttcc

SEQ ID NO: 68456 - DNA, 30 bp, Artificial Sequence
  Synthetic oligonucleotide
tggctactagtggcaaataagaagcgttcc

SEQ ID NO: 68457 - DNA, 30 bp, Artificial Sequence
  Synthetic oligonucleotide
atgcctaagggacaccctagatacggttcc

SEQ ID NO: 68458 - DNA, 30 bp, Artificial Sequence
  Synthetic oligonucleotide
tcatggaagataattaggggagggatttcc

SEQ ID NO: 68459 - DNA, 30 bp, Artificial Sequence
  Synthetic oligonucleotide
ctaaaacgccgaccggataatgaaaaaagc

SEQ ID NO: 68460 - DNA, 30 bp, Artificial Sequence
  Synthetic oligonucleotide
gaacttaacacttagctagggaagaaaagc

SEQ ID NO: 68461 - DNA, 30 bp, Artificial Sequence
  Synthetic oligonucleotide
attatacgcacacgagggctggggcaaagc

SEQ ID NO: 68462 - DNA, 29 bp, Artificial Sequence
  Synthetic oligonucleotide
gattaaacggatcggaggctgaagaaagc

SEQ ID NO: 68463 - DNA, 31 bp, Artificial Sequence
  Synthetic oligonucleotide
taacgagacccttatccatctcggagaaagc

SEQ ID NO: 68464 - DNA, 30 bp, Artificial Sequence
  Synthetic oligonucleotide
agcggacagtaatggattaatacggaaagc

SEQ ID NO: 68465 - DNA, 30 bp, Artificial Sequence
  Synthetic oligonucleotide
agacaagtagggtcgtggcaccatgaaagc

SEQ ID NO: 68466 - DNA, 30 bp, Artificial Sequence
  Synthetic oligonucleotide
aggccttttgggtatcatggttaaacaagc

SEQ ID NO: 68467 - DNA, 30 bp, Artificial Sequence
  Synthetic oligonucleotide
ggactatcaaaaatcaccctggcaacaagc

SEQ ID NO: 68468 - DNA, 30 bp, Artificial Sequence
  Synthetic oligonucleotide
gctatgcgtcagctccggtccagcacaagc

SEQ ID NO: 68469 - DNA, 30 bp, Artificial Sequence
  Synthetic oligonucleotide
gcggcatggaagagggtgagtcagacaagc

SEQ ID NO: 68470 - DNA, 30 bp, Artificial Sequence
  Synthetic oligonucleotide
cagtggatatcagttggagttaatacaagc

SEQ ID NO: 68471 - DNA, 30 bp, Artificial Sequence
  Synthetic oligonucleotide
agtctcccaaagtagtgcctcgctccaagc

SEQ ID NO: 68472 - DNA, 30 bp, Artificial Sequence
  Synthetic oligonucleotide
ttacggccgaagaaaaacggcattccaagc

SEQ ID NO: 68473 - DNA, 30 bp, Artificial Sequence
  Synthetic oligonucleotide
aggggaggcgatcaggtaactatatcaagc

SEQ ID NO: 68474 - DNA, 30 bp, Artificial Sequence
  Synthetic oligonucleotide
ctgaaaatatctggacctctggcaagaagc

SEQ ID NO: 68475 - DNA, 30 bp, Artificial Sequence
  Synthetic oligonucleotide
acctgtgaagaaagagttcaactttgaagc

SEQ ID NO: 68476 - DNA, 30 bp, Artificial Sequence
  Synthetic oligonucleotide
aacgggcaacggcgacaacagcccataagc

SEQ ID NO: 68477 - DNA, 30 bp, Artificial Sequence
  Synthetic oligonucleotide
acgttcgtgaagggggactacgaactaagc

SEQ ID NO: 68478 - DNA, 30 bp, Artificial Sequence
  Synthetic oligonucleotide
tgagctcatcacatcaggacagacctaagc

SEQ ID NO: 68479 - DNA, 30 bp, Artificial Sequence
  Synthetic oligonucleotide
aggaaacggttaggctgccaaatgctaagc

SEQ ID NO: 68480 - DNA, 30 bp, Artificial Sequence
  Synthetic oligonucleotide
cacccgcgcagtcggacagaacttctaagc

SEQ ID NO: 68481 - DNA, 30 bp, Artificial Sequence
  Synthetic oligonucleotide
cgcaccgggaaggccgttgttagtgtaagc

SEQ ID NO: 68482 - DNA, 30 bp, Artificial Sequence
  Synthetic oligonucleotide
gacggcacggaatgagactatattgtaagc

SEQ ID NO: 68483 - DNA, 30 bp, Artificial Sequence
  Synthetic oligonucleotide
cgtacttgtatagtgacacaacttaacagc

SEQ ID NO: 68484 - DNA, 30 bp, Artificial Sequence
  Synthetic oligonucleotide
ctatcggtgctccacgagaacccgaccagc

SEQ ID NO: 68485 - DNA, 30 bp, Artificial Sequence
  Synthetic oligonucleotide
ccgaaaccagctgacacttcacgtcccagc

SEQ ID NO: 68486 - DNA, 30 bp, Artificial Sequence
  Synthetic oligonucleotide
aggcgaagacatccgcacggatttcccagc

SEQ ID NO: 68487 - DNA, 30 bp, Artificial Sequence
  Synthetic oligonucleotide
catggttacatttcctacggtatggccagc

SEQ ID NO: 68488 - DNA, 30 bp, Artificial Sequence
  Synthetic oligonucleotide
tattggcaagagtgtaatgaagtctccagc

SEQ ID NO: 68489 - DNA, 30 bp, Artificial Sequence
  Synthetic oligonucleotide
gacagaagttcatggcaaatgtaaagcagc

SEQ ID NO: 68490 - DNA, 30 bp, Artificial Sequence
  Synthetic oligonucleotide
gtagtccgtcggagtggaaaacttagcagc

SEQ ID NO: 68491 - DNA, 30 bp, Artificial Sequence
  Synthetic oligonucleotide
catgtgtcaacagagaatgaagaaggcagc

SEQ ID NO: 68492 - DNA, 30 bp, Artificial Sequence
  Synthetic oligonucleotide
caatggaattgggctgtgccctacggcagc

SEQ ID NO: 68493 - DNA, 30 bp, Artificial Sequence
  Synthetic oligonucleotide
cctaagtcaatcgaaagtaaccctggcagc

SEQ ID NO: 68494 - DNA, 30 bp, Artificial Sequence
  Synthetic oligonucleotide
gaaacacgaaactgggagcatgcttgcagc

SEQ ID NO: 68495 - DNA, 30 bp, Artificial Sequence
  Synthetic oligonucleotide
cgtggggaaaactgtataacacgcatcagc

SEQ ID NO: 68496 - DNA, 30 bp, Artificial Sequence
  Synthetic oligonucleotide
ttgggggactaataatctttcacgctcagc

SEQ ID NO: 68497 - DNA, 30 bp, Artificial Sequence
  Synthetic oligonucleotide
agtgacacgaagagagatgtacaattcagc

SEQ ID NO: 68498 - DNA, 30 bp, Artificial Sequence
  Synthetic oligonucleotide
gcgggagtggtagtatgcctgtccttcagc

SEQ ID NO: 68499 - DNA, 30 bp, Artificial Sequence
  Synthetic oligonucleotide
ccagggccgagggtaaatcgccacaagagc

SEQ ID NO: 68500 - DNA, 30 bp, Artificial Sequence
  Synthetic oligonucleotide
ctagctcataggagggttagaccacagagc

SEQ ID NO: 68501 - DNA, 30 bp, Artificial Sequence
  Synthetic oligonucleotide
ccaggagtataagtatgaaggcactagagc

SEQ ID NO: 68502 - DNA, 30 bp, Artificial Sequence
  Synthetic oligonucleotide
gcgactgcgttaatagagaatgtctagagc

SEQ ID NO: 68503 - DNA, 30 bp, Artificial Sequence
  Synthetic oligonucleotide
agtagtgcccttcatagatggacttagagc

SEQ ID NO: 68504 - DNA, 30 bp, Artificial Sequence
  Synthetic oligonucleotide
tacaagccctcgcaaccacgtcgcccgagc

SEQ ID NO: 68505 - DNA, 30 bp, Artificial Sequence
  Synthetic oligonucleotide
actcaagcataggtactcgagatcgcgagc

SEQ ID NO: 68506 - DNA, 30 bp, Artificial Sequence
  Synthetic oligonucleotide
accgggttcatacacaggtccatggcgagc

SEQ ID NO: 68507 - DNA, 30 bp, Artificial Sequence
  Synthetic oligonucleotide
ctcttagggccagtcgtgcgtggcaggagc

SEQ ID NO: 68508 - DNA, 30 bp, Artificial Sequence
  Synthetic oligonucleotide
tagaaaccgaagtgcaaaagcctagggagc

SEQ ID NO: 68509 - DNA, 30 bp, Artificial Sequence
  Synthetic oligonucleotide
ctccgttaccgtaaaccgttaaaagtgagc

SEQ ID NO: 68510 - DNA, 30 bp, Artificial Sequence
  Synthetic oligonucleotide
caaaatgttgagcggaatgcccccgtgagc

SEQ ID NO: 68511 - DNA, 30 bp, Artificial Sequence
  Synthetic oligonucleotide
ttagaaaagggcgccacacgggccaatagc

SEQ ID NO: 68512 - DNA, 30 bp, Artificial Sequence
  Synthetic oligonucleotide
tcgcgttaaagtgcttaaaatgtgaatagc

SEQ ID NO: 68513 - DNA, 30 bp, Artificial Sequence
  Synthetic oligonucleotide
aggggatatattgatgattgtgtggatagc

SEQ ID NO: 68514 - DNA, 30 bp, Artificial Sequence
  Synthetic oligonucleotide
gttgtcagtgtcgatgaacaatggtatagc

SEQ ID NO: 68515 - DNA, 30 bp, Artificial Sequence
  Synthetic oligonucleotide
agaacattgtccctgcgatcatcgactagc

SEQ ID NO: 68516 - DNA, 30 bp, Artificial Sequence
  Synthetic oligonucleotide
ctggagaacagagttctatcagccgctagc

SEQ ID NO: 68517 - DNA, 30 bp, Artificial Sequence
  Synthetic oligonucleotide
gaatgaagcgtatagtggaaagattctagc

SEQ ID NO: 68518 - DNA, 30 bp, Artificial Sequence
  Synthetic oligonucleotide
cagccaggtcagccgtctattgaaagtagc

SEQ ID NO: 68519 - DNA, 30 bp, Artificial Sequence
  Synthetic oligonucleotide
aggatcgccaataccggagcacagagtagc

SEQ ID NO: 68520 - DNA, 30 bp, Artificial Sequence
  Synthetic oligonucleotide
gcctatgccgggcgaagccaaaactgtagc

SEQ ID NO: 68521 - DNA, 30 bp, Artificial Sequence
  Synthetic oligonucleotide
actgccgggaagtgagccggaatttgtagc

SEQ ID NO: 68522 - DNA, 30 bp, Artificial Sequence
  Synthetic oligonucleotide
ggaatcgcaaggaggattagacaaattagc

SEQ ID NO: 68523 - DNA, 30 bp, Artificial Sequence
  Synthetic oligonucleotide
aagcggataatcgacggtctcgccattagc

SEQ ID NO: 68524 - DNA, 30 bp, Artificial Sequence
  Synthetic oligonucleotide
cgccggttaggggacatccatgatattagc

SEQ ID NO: 68525 - DNA, 30 bp, Artificial Sequence
  Synthetic oligonucleotide
gatgaaggcccgctagaaaacgtatttagc

SEQ ID NO: 68526 - DNA, 30 bp, Artificial Sequence
  Synthetic oligonucleotide
atcggatcctaggtgggcggccgttttagc

SEQ ID NO: 68527 - DNA, 30 bp, Artificial Sequence
  Synthetic oligonucleotide
ccaggaaacactgttatcgcatacacacgc

SEQ ID NO: 68528 - DNA, 30 bp, Artificial Sequence
  Synthetic oligonucleotide
ctatgcgaagaggcgaagcaaaagccacgc

SEQ ID NO: 68529 - DNA, 30 bp, Artificial Sequence
  Synthetic oligonucleotide
aaccgggaatgtgaatcaaaccaggcacgc

SEQ ID NO: 68530 - DNA, 30 bp, Artificial Sequence
  Synthetic oligonucleotide
tgctccacactcgaataaccaacaatacgc

SEQ ID NO: 68531 - DNA, 30 bp, Artificial Sequence
  Synthetic oligonucleotide
ggggtatagtagacattgacagccctacgc

SEQ ID NO: 68532 - DNA, 30 bp, Artificial Sequence
  Synthetic oligonucleotide
ggaacgatctttcacctggatactctacgc

SEQ ID NO: 68533 - DNA, 30 bp, Artificial Sequence
  Synthetic oligonucleotide
gttgagggggtattacagagaattctacgc

SEQ ID NO: 68534 - DNA, 30 bp, Artificial Sequence
  Synthetic oligonucleotide
ctagaacagaagggaggtttacttctacgc

SEQ ID NO: 68535 - DNA, 30 bp, Artificial Sequence
  Synthetic oligonucleotide
aattgtacagatttaatgggaagagtacgc

SEQ ID NO: 68536 - DNA, 30 bp, Artificial Sequence
  Synthetic oligonucleotide
tccgtgaggggaggcgtaaaaaagaaccgc

SEQ ID NO: 68537 - DNA, 30 bp, Artificial Sequence
  Synthetic oligonucleotide
agacagccacattaagaaacacctaaccgc

SEQ ID NO: 68538 - DNA, 30 bp, Artificial Sequence
  Synthetic oligonucleotide
aaagggggcgtaaactgggagccacaccgc

SEQ ID NO: 68539 - DNA, 30 bp, Artificial Sequence
  Synthetic oligonucleotide
ggacgaatatggcgtcacgaaggccaccgc

SEQ ID NO: 68540 - DNA, 30 bp, Artificial Sequence
  Synthetic oligonucleotide
gcacataaatcggtgagggaacgagaccgc

SEQ ID NO: 68541 - DNA, 30 bp, Artificial Sequence
  Synthetic oligonucleotide
caaaccaacggcacgatctcgaacgaccgc

SEQ ID NO: 68542 - DNA, 30 bp, Artificial Sequence
  Synthetic oligonucleotide
aacgggagctaacgaatttgtgcggaccgc

SEQ ID NO: 68543 - DNA, 30 bp, Artificial Sequence
  Synthetic oligonucleotide
tgaggccggattattataataggcagccgc

SEQ ID NO: 68544 - DNA, 30 bp, Artificial Sequence
  Synthetic oligonucleotide
agaaccatcttgggccgcgataagcgccgc

SEQ ID NO: 68545 - DNA, 30 bp, Artificial Sequence
  Synthetic oligonucleotide
caaaccatgcataaccagatctaggtccgc

SEQ ID NO: 68546 - DNA, 30 bp, Artificial Sequence
  Synthetic oligonucleotide
acagaatatcgaatcgttgtctaatcgcgc

SEQ ID NO: 68547 - DNA, 30 bp, Artificial Sequence
  Synthetic oligonucleotide
aaaaggaaagaacaacagacagccaggcgc

SEQ ID NO: 68548 - DNA, 30 bp, Artificial Sequence
  Synthetic oligonucleotide
cacgtaagacacaagttagcctggcggcgc

SEQ ID NO: 68549 - DNA, 30 bp, Artificial Sequence
  Synthetic oligonucleotide
cagtagattgtgttcagacacagctggcgc

SEQ ID NO: 68550 - DNA, 30 bp, Artificial Sequence
  Synthetic oligonucleotide
gggtaacggggtagaggcctcaacatgcgc

SEQ ID NO: 68551 - DNA, 30 bp, Artificial Sequence
  Synthetic oligonucleotide
cgcactggccgatggacgagccgtatgcgc

SEQ ID NO: 68552 - DNA, 30 bp, Artificial Sequence
  Synthetic oligonucleotide
tgtcaatgtgcatacaaacctgcactgcgc

SEQ ID NO: 68553 - DNA, 30 bp, Artificial Sequence
  Synthetic oligonucleotide
tcatcgtctacaaccaagtcatccctgcgc

SEQ ID NO: 68554 - DNA, 30 bp, Artificial Sequence
  Synthetic oligonucleotide
cgggacattgggacatccgctttcctgcgc

SEQ ID NO: 68555 - DNA, 30 bp, Artificial Sequence
  Synthetic oligonucleotide
acttaggaatccggacaacgttctctgcgc

SEQ ID NO: 68556 - DNA, 30 bp, Artificial Sequence
  Synthetic oligonucleotide
cgcgctgagagttcaagtactgccgtgcgc

SEQ ID NO: 68557 - DNA, 30 bp, Artificial Sequence
  Synthetic oligonucleotide
tagttttaactaaggcttggacatgtgcgc

SEQ ID NO: 68558 - DNA, 30 bp, Artificial Sequence
  Synthetic oligonucleotide
agcatccttgctaagattcagagtgtgcgc

SEQ ID NO: 68559 - DNA, 30 bp, Artificial Sequence
  Synthetic oligonucleotide
gcccgcccctatatagaaaggatcaatcgc

SEQ ID NO: 68560 - DNA, 30 bp, Artificial Sequence
  Synthetic oligonucleotide
tacgtagcggagtgcccgcaccaagatcgc

SEQ ID NO: 68561 - DNA, 30 bp, Artificial Sequence
  Synthetic oligonucleotide
aaattaggatactcgtaacaagaagatcgc

SEQ ID NO: 68562 - DNA, 30 bp, Artificial Sequence
  Synthetic oligonucleotide
aaacatggggttataaagtgcggagatcgc

SEQ ID NO: 68563 - DNA, 30 bp, Artificial Sequence
  Synthetic oligonucleotide
tcatacagagtatagctaggatgttatcgc

SEQ ID NO: 68564 - DNA, 30 bp, Artificial Sequence
  Synthetic oligonucleotide
catgatacgttggtcgtcatcacgactcgc

SEQ ID NO: 68565 - DNA, 30 bp, Artificial Sequence
  Synthetic oligonucleotide
taccaaataacatgagaacggcggactcgc

SEQ ID NO: 68566 - DNA, 30 bp, Artificial Sequence
  Synthetic oligonucleotide
aaagaatggtcataagtagggggtactcgc

SEQ ID NO: 68567 - DNA, 30 bp, Artificial Sequence
  Synthetic oligonucleotide
ctagaagacggatattatgataagcctcgc

SEQ ID NO: 68568 - DNA, 30 bp, Artificial Sequence
  Synthetic oligonucleotide
gacacgcaagtcattttcacgcgggctcgc

SEQ ID NO: 68569 - DNA, 30 bp, Artificial Sequence
  Synthetic oligonucleotide
tagattcctccggagtacaagatgtgtcgc

SEQ ID NO: 68570 - DNA, 30 bp, Artificial Sequence
  Synthetic oligonucleotide
gggggcggctgctagcatatagtgtgtcgc

SEQ ID NO: 68571 - DNA, 30 bp, Artificial Sequence
  Synthetic oligonucleotide
cacgtgcagaggactatgatcaaccttcgc

SEQ ID NO: 68572 - DNA, 30 bp, Artificial Sequence
  Synthetic oligonucleotide
acacagcttgcaaaaatctcgggtcttcgc

SEQ ID NO: 68573 - DNA, 30 bp, Artificial Sequence
  Synthetic oligonucleotide
tagacctcgaacataaccatacacgttcgc

SEQ ID NO: 68574 - DNA, 30 bp, Artificial Sequence
  Synthetic oligonucleotide
taagaatgcgacggctatcggagcaaaggc

SEQ ID NO: 68575 - DNA, 30 bp, Artificial Sequence
  Synthetic oligonucleotide
ccatgtagatgaaaagcacggctggaaggc

SEQ ID NO: 68576 - DNA, 31 bp, Artificial Sequence
  Synthetic oligonucleotide
caggggggcgatcattccagaatatgaaggc

SEQ ID NO: 68577 - DNA, 30 bp, Artificial Sequence
  Synthetic oligonucleotide
tgccaatagcacagggcgattctgtaaggc

SEQ ID NO: 68578 - DNA, 30 bp, Artificial Sequence
  Synthetic oligonucleotide
gcgacccacctaaaacaaggattgtaaggc

SEQ ID NO: 68579 - DNA, 30 bp, Artificial Sequence
  Synthetic oligonucleotide
tgaaaacagaaaaagccaggggtttaaggc

SEQ ID NO: 68580 - DNA, 30 bp, Artificial Sequence
  Synthetic oligonucleotide
tagctaaggcaatcaaattctaacacaggc

SEQ ID NO: 68581 - DNA, 30 bp, Artificial Sequence
  Synthetic oligonucleotide
ctaatagctcaagaaagcgtatcaccaggc

SEQ ID NO: 68582 - DNA, 30 bp, Artificial Sequence
  Synthetic oligonucleotide
gggtttctaaaggacaatgactcgccaggc

SEQ ID NO: 68583 - DNA, 30 bp, Artificial Sequence
  Synthetic oligonucleotide
agtgcttgttgtagcaggagagtcgcaggc

SEQ ID NO: 68584 - DNA, 30 bp, Artificial Sequence
  Synthetic oligonucleotide
taagagtgcggagttttagcctcatcaggc

SEQ ID NO: 68585 - DNA, 30 bp, Artificial Sequence
  Synthetic oligonucleotide
atctccggaacttagtaagataactcaggc

SEQ ID NO: 68586 - DNA, 30 bp, Artificial Sequence
  Synthetic oligonucleotide
tctcgtcaggcaatcgccaaggcaagaggc

SEQ ID NO: 68587 - DNA, 30 bp, Artificial Sequence
  Synthetic oligonucleotide
cattgagttaacggatacaagtaaggaggc

SEQ ID NO: 68588 - DNA, 30 bp, Artificial Sequence
  Synthetic oligonucleotide
aatcgcgcgtgtgaaacgttgggcataggc

SEQ ID NO: 68589 - DNA, 30 bp, Artificial Sequence
  Synthetic oligonucleotide
cccgtgaacgagagaagattatcgataggc

SEQ ID NO: 68590 - DNA, 30 bp, Artificial Sequence
  Synthetic oligonucleotide
aagcgagtcgttatggcaccaagactaggc

SEQ ID NO: 68591 - DNA, 30 bp, Artificial Sequence
  Synthetic oligonucleotide
acgcggaaaaagaactgatgtaaagtaggc

SEQ ID NO: 68592 - DNA, 30 bp, Artificial Sequence
  Synthetic oligonucleotide
ctaggaaacgaaggtattcgaaggaacggc

SEQ ID NO: 68593 - DNA, 30 bp, Artificial Sequence
  Synthetic oligonucleotide
gagtcatacgatggttatagcgaggacggc

SEQ ID NO: 68594 - DNA, 30 bp, Artificial Sequence
  Synthetic oligonucleotide
caatcgtaaaagtatctttgcgaaaccggc

SEQ ID NO: 68595 - DNA, 30 bp, Artificial Sequence
  Synthetic oligonucleotide
ccgcgaggtgctcagtaattgggaaccggc

SEQ ID NO: 68596 - DNA, 30 bp, Artificial Sequence
  Synthetic oligonucleotide
acttaccgtgttagtatcgaggtgaccggc

SEQ ID NO: 68597 - DNA, 30 bp, Artificial Sequence
  Synthetic oligonucleotide
taatcggttggtgctcttcatctccccggc

SEQ ID NO: 68598 - DNA, 30 bp, Artificial Sequence
  Synthetic oligonucleotide
gcgagaagaacataggcgttagatcccggc

SEQ ID NO: 68599 - DNA, 30 bp, Artificial Sequence
  Synthetic oligonucleotide
aaaacatggagtgacaacgactttcccggc

SEQ ID NO: 68600 - DNA, 30 bp, Artificial Sequence
  Synthetic oligonucleotide
tagcgtcattccgatcgaaccccatccggc

SEQ ID NO: 68601 - DNA, 30 bp, Artificial Sequence
  Synthetic oligonucleotide
tgtacccacgggggaagcttcggctccggc

SEQ ID NO: 68602 - DNA, 30 bp, Artificial Sequence
  Synthetic oligonucleotide
tccacgggaaatggagaactcccgggcggc

SEQ ID NO: 68603 - DNA, 30 bp, Artificial Sequence
  Synthetic oligonucleotide
ggattagtagatgtcatggcgtagctcggc

SEQ ID NO: 68604 - DNA, 30 bp, Artificial Sequence
  Synthetic oligonucleotide
gttgcgggccggcataaacttccgctcggc

SEQ ID NO: 68605 - DNA, 30 bp, Artificial Sequence
  Synthetic oligonucleotide
ggcgctagctttaaatcatcatgggtcggc

SEQ ID NO: 68606 - DNA, 30 bp, Artificial Sequence
  Synthetic oligonucleotide
catgttgcgagaaggttccaccagttcggc

SEQ ID NO: 68607 - DNA, 30 bp, Artificial Sequence
  Synthetic oligonucleotide
gcgaagtattatgtatccattaatttcggc

SEQ ID NO: 68608 - DNA, 30 bp, Artificial Sequence
  Synthetic oligonucleotide
gcctctgcggagaatgataaaactaagggc

SEQ ID NO: 68609 - DNA, 30 bp, Artificial Sequence
  Synthetic oligonucleotide
cccacctcacggcaaataagcgcagagggc

SEQ ID NO: 68610 - DNA, 30 bp, Artificial Sequence
  Synthetic oligonucleotide
ggtgtaatgcaactggtaataaatgagggc

SEQ ID NO: 68611 - DNA, 30 bp, Artificial Sequence
  Synthetic oligonucleotide
cctttgtggcagaccaaatagcatgagggc

SEQ ID NO: 68612 - DNA, 30 bp, Artificial Sequence
  Synthetic oligonucleotide
ggtgttacgaggagatcgacctttgagggc

SEQ ID NO: 68613 - DNA, 30 bp, Artificial Sequence
  Synthetic oligonucleotide
ggcgcagccggataagggtcaatatagggc

SEQ ID NO: 68614 - DNA, 30 bp, Artificial Sequence
  Synthetic oligonucleotide
aacaaacctagcatggtctcaggaacgggc

SEQ ID NO: 68615 - DNA, 30 bp, Artificial Sequence
  Synthetic oligonucleotide
cgatattactaatgcactgtcactacgggc

SEQ ID NO: 68616 - DNA, 30 bp, Artificial Sequence
  Synthetic oligonucleotide
aatgaacaatgatgtgtggagcgtccgggc

SEQ ID NO: 68617 - DNA, 30 bp, Artificial Sequence
  Synthetic oligonucleotide
aggatcactggcgacgagctcgtggcgggc

SEQ ID NO: 68618 - DNA, 30 bp, Artificial Sequence
  Synthetic oligonucleotide
tcggcaggcaggtatgcagtgatctcgggc

SEQ ID NO: 68619 - DNA, 30 bp, Artificial Sequence
  Synthetic oligonucleotide
accggacaccacgatacacaagcaaggggc

SEQ ID NO: 68620 - DNA, 30 bp, Artificial Sequence
  Synthetic oligonucleotide
tgatcaaaagcttccgataggatgcggggc

SEQ ID NO: 68621 - DNA, 30 bp, Artificial Sequence
  Synthetic oligonucleotide
agggaaacaggcgaactacctgtcgggggc

SEQ ID NO: 68622 - DNA, 30 bp, Artificial Sequence
  Synthetic oligonucleotide
cgtcatttagtattaggatcgtgtgggggc

SEQ ID NO: 68623 - DNA, 30 bp, Artificial Sequence
  Synthetic oligonucleotide
ctgcgtcagtgttgccggggggtaatgggc

SEQ ID NO: 68624 - DNA, 30 bp, Artificial Sequence
  Synthetic oligonucleotide
gcatctcaaatggattccgatcaaaatggc

SEQ ID NO: 68625 - DNA, 30 bp, Artificial Sequence
  Synthetic oligonucleotide
gaagacctataacgcgaaagaatcaatggc

SEQ ID NO: 68626 - DNA, 30 bp, Artificial Sequence
  Synthetic oligonucleotide
gcttagtaattataggaatggaataatggc

SEQ ID NO: 68627 - DNA, 30 bp, Artificial Sequence
  Synthetic oligonucleotide
ccgaacgtcacggatgttagtcaacctggc

SEQ ID NO: 68628 - DNA, 30 bp, Artificial Sequence
  Synthetic oligonucleotide
aacaaatgtagcggataagacacccctggc

SEQ ID NO: 68629 - DNA, 30 bp, Artificial Sequence
  Synthetic oligonucleotide
cccatgtgaaccacacgatatcgagctggc

SEQ ID NO: 68630 - DNA, 30 bp, Artificial Sequence
  Synthetic oligonucleotide
tgtcggggaggactcaaaagttacgctggc

SEQ ID NO: 68631 - DNA, 30 bp, Artificial Sequence
  Synthetic oligonucleotide
cctagcgatcggaaaattggtctcagtggc

SEQ ID NO: 68632 - DNA, 30 bp, Artificial Sequence
  Synthetic oligonucleotide
tgctcgtgcagaaatacgtcatggggtggc

SEQ ID NO: 68633 - DNA, 30 bp, Artificial Sequence
  Synthetic oligonucleotide
gaacggaatcttaaacgttattggggtggc

SEQ ID NO: 68634 - DNA, 30 bp, Artificial Sequence
  Synthetic oligonucleotide
tgtaggatgcgggtgtcctggaaatgtggc

SEQ ID NO: 68635 - DNA, 30 bp, Artificial Sequence
  Synthetic oligonucleotide
cgctatatgcgctgcgtatatcagtgtggc

SEQ ID NO: 68636 - DNA, 30 bp, Artificial Sequence
  Synthetic oligonucleotide
gatggctctaagtagcacagagtcaaatgc

SEQ ID NO: 68637 - DNA, 30 bp, Artificial Sequence
  Synthetic oligonucleotide
ggtaagtcagaaggtaggatcgtcaaatgc

SEQ ID NO: 68638 - DNA, 30 bp, Artificial Sequence
  Synthetic oligonucleotide
gcgccatcacctaccacacacctacaatgc

SEQ ID NO: 68639 - DNA, 30 bp, Artificial Sequence
  Synthetic oligonucleotide
gcgctggtctgggctggggagaaagaatgc

SEQ ID NO: 68640 - DNA, 30 bp, Artificial Sequence
  Synthetic oligonucleotide
acgttacagacgtcatatacaggggaatgc

SEQ ID NO: 68641 - DNA, 30 bp, Artificial Sequence
  Synthetic oligonucleotide
gacacaatagcatagaatttacgtgaatgc

SEQ ID NO: 68642 - DNA, 30 bp, Artificial Sequence
  Synthetic oligonucleotide
cgcgtggattaaccactagtaatataatgc

SEQ ID NO: 68643 - DNA, 30 bp, Artificial Sequence
  Synthetic oligonucleotide
actgaggcttgtgttccgaagatataatgc

SEQ ID NO: 68644 - DNA, 30 bp, Artificial Sequence
  Synthetic oligonucleotide
agatatatcattaatactaccagcacatgc

SEQ ID NO: 68645 - DNA, 30 bp, Artificial Sequence
  Synthetic oligonucleotide
actcacacacaacgtcagcaaagggcatgc

SEQ ID NO: 68646 - DNA, 30 bp, Artificial Sequence
  Synthetic oligonucleotide
cgagtaccaaaatggtaagtgaatagatgc

SEQ ID NO: 68647 - DNA, 30 bp, Artificial Sequence
  Synthetic oligonucleotide
gggggcactaaaagcgaagaccggcgatgc

SEQ ID NO: 68648 - DNA, 30 bp, Artificial Sequence
  Synthetic oligonucleotide
ccaactgatcgtcgtcctaaggtaggatgc

SEQ ID NO: 68649 - DNA, 30 bp, Artificial Sequence
  Synthetic oligonucleotide
caagcacggttggtggtaaatccttgatgc

SEQ ID NO: 68650 - DNA, 30 bp, Artificial Sequence
  Synthetic oligonucleotide
tggggtaaatagaggctataaaacgactgc

SEQ ID NO: 68651 - DNA, 30 bp, Artificial Sequence
  Synthetic oligonucleotide
gcaggaagaggcatgccgtgagtatactgc

SEQ ID NO: 68652 - DNA, 30 bp, Artificial Sequence
  Synthetic oligonucleotide
agcgtaggcgtcaaccatacaacgtactgc

SEQ ID NO: 68653 - DNA, 31 bp, Artificial Sequence
  Synthetic oligonucleotide
gtaacatgcaccgagcacatgctgcgcctgc

SEQ ID NO: 68654 - DNA, 30 bp, Artificial Sequence
  Synthetic oligonucleotide
cgtgtgtagggcgtgtcggtcgtgtcctgc

SEQ ID NO: 68655 - DNA, 30 bp, Artificial Sequence
  Synthetic oligonucleotide
ctcgtaagtcttaacaggctagggatctgc

SEQ ID NO: 68656 - DNA, 30 bp, Artificial Sequence
  Synthetic oligonucleotide
cgatgtttaagtcggaattttctgctctgc

SEQ ID NO: 68657 - DNA, 30 bp, Artificial Sequence
  Synthetic oligonucleotide
cgtgtcggttgggttgactatgcggtctgc

SEQ ID NO: 68658 - DNA, 30 bp, Artificial Sequence
  Synthetic oligonucleotide
gaacgaaggagtagagaacctcgtgtctgc

SEQ ID NO: 68659 - DNA, 30 bp, Artificial Sequence
  Synthetic oligonucleotide
ccataccgttgtataataaaggagttctgc

SEQ ID NO: 68660 - DNA, 30 bp, Artificial Sequence
  Synthetic oligonucleotide
agcgcaaaaccatagcgaaggataaagtgc

SEQ ID NO: 68661 - DNA, 30 bp, Artificial Sequence
  Synthetic oligonucleotide
accaccacaacggcgatcccagacaagtgc

SEQ ID NO: 68662 - DNA, 30 bp, Artificial Sequence
  Synthetic oligonucleotide
taggttgaaacgggatgaagcgataagtgc

SEQ ID NO: 68663 - DNA, 30 bp, Artificial Sequence
  Synthetic oligonucleotide
gtcatgagcaaataaggtcctgctaagtgc

SEQ ID NO: 68664 - DNA, 30 bp, Artificial Sequence
  Synthetic oligonucleotide
gggtctagggtaagtcagctaactcagtgc

SEQ ID NO: 68665 - DNA, 30 bp, Artificial Sequence
  Synthetic oligonucleotide
acgaatcatcagtgagcagttaaggagtgc

SEQ ID NO: 68666 - DNA, 30 bp, Artificial Sequence
  Synthetic oligonucleotide
cgtaattcttgcgagtacagtcaggagtgc

SEQ ID NO: 68667 - DNA, 30 bp, Artificial Sequence
  Synthetic oligonucleotide
gatctagacccgaagtccgtttgtgagtgc

SEQ ID NO: 68668 - DNA, 30 bp, Artificial Sequence
  Synthetic oligonucleotide
cctagagaagagcaatggactgacacgtgc

SEQ ID NO: 68669 - DNA, 30 bp, Artificial Sequence
  Synthetic oligonucleotide
caagacagataaggctatcgatggacgtgc

SEQ ID NO: 68670 - DNA, 30 bp, Artificial Sequence
  Synthetic oligonucleotide
caagatcgaatatgagcttggcatacgtgc

SEQ ID NO: 68671 - DNA, 30 bp, Artificial Sequence
  Synthetic oligonucleotide
tggaatgctcagagtccaactgtcgcgtgc

SEQ ID NO: 68672 - DNA, 30 bp, Artificial Sequence
  Synthetic oligonucleotide
ctagaacgaagttacttatctacgtcgtgc

SEQ ID NO: 68673 - DNA, 30 bp, Artificial Sequence
  Synthetic oligonucleotide
caaccaagaccaattcggaccgtgaggtgc

SEQ ID NO: 68674 - DNA, 30 bp, Artificial Sequence
  Synthetic oligonucleotide
ggtagggactacgaatcatccgaggggtgc

SEQ ID NO: 68675 - DNA, 30 bp, Artificial Sequence
  Synthetic oligonucleotide
tgtggacatggagtaaatgaaggtgggtgc

SEQ ID NO: 68676 - DNA, 30 bp, Artificial Sequence
  Synthetic oligonucleotide
gcaccaacgtaacgtgtgcgtacaatgtgc

SEQ ID NO: 68677 - DNA, 30 bp, Artificial Sequence
  Synthetic oligonucleotide
gcaaggtatcacgtgatatatctaatgtgc

SEQ ID NO: 68678 - DNA, 30 bp, Artificial Sequence
  Synthetic oligonucleotide
cctggccttgtatctgtatgcctcgtgtgc

SEQ ID NO: 68679 - DNA, 30 bp, Artificial Sequence
  Synthetic oligonucleotide
cacgtccaagagcattgtaatgatgtgtgc

SEQ ID NO: 68680 - DNA, 31 bp, Artificial Sequence
  Synthetic oligonucleotide
aacgacaacaccactcttgcgggaagattgc

SEQ ID NO: 68681 - DNA, 30 bp, Artificial Sequence
  Synthetic oligonucleotide
cggtctcgagatcgttccaccgtagattgc

SEQ ID NO: 68682 - DNA, 30 bp, Artificial Sequence
  Synthetic oligonucleotide
ggaggtgtgtgaaggaaactcacgtattgc

SEQ ID NO: 68683 - DNA, 30 bp, Artificial Sequence
  Synthetic oligonucleotide
cagtgaaacgtagtagagaataaagcttgc

SEQ ID NO: 68684 - DNA, 30 bp, Artificial Sequence
  Synthetic oligonucleotide
cggcaaagcaccaaaaaagttatttcttgc

SEQ ID NO: 68685 - DNA, 30 bp, Artificial Sequence
  Synthetic oligonucleotide
cgtaggttcctaataacagaagcgagttgc

SEQ ID NO: 68686 - DNA, 30 bp, Artificial Sequence
  Synthetic oligonucleotide
agtggccaagattcgtaaggaggaggttgc

SEQ ID NO: 68687 - DNA, 30 bp, Artificial Sequence
  Synthetic oligonucleotide
gggggagacatgcgtaccacaacgggttgc

SEQ ID NO: 68688 - DNA, 30 bp, Artificial Sequence
  Synthetic oligonucleotide
atggaagtgcgagtgttctgcgcgggttgc

SEQ ID NO: 68689 - DNA, 30 bp, Artificial Sequence
  Synthetic oligonucleotide
aaggcaccaaggcaccgtggatacgtttgc

SEQ ID NO: 68690 - DNA, 30 bp, Artificial Sequence
  Synthetic oligonucleotide
gcgcgatgacaagttgaccctatcaaaatc

SEQ ID NO: 68691 - DNA, 30 bp, Artificial Sequence
  Synthetic oligonucleotide
aggagaagctctctgcaagagctccaaatc

SEQ ID NO: 68692 - DNA, 30 bp, Artificial Sequence
  Synthetic oligonucleotide
tgatcgacacgtatctgttactaggaaatc

SEQ ID NO: 68693 - DNA, 30 bp, Artificial Sequence
  Synthetic oligonucleotide
cagcttgtagagaatgtgggacggtaaatc

SEQ ID NO: 68694 - DNA, 30 bp, Artificial Sequence
  Synthetic oligonucleotide
tcatgcgaagtgagaatcttaaacacaatc

SEQ ID NO: 68695 - DNA, 30 bp, Artificial Sequence
  Synthetic oligonucleotide
ggaaaatccgaaggcgtgcacctcacaatc

SEQ ID NO: 68696 - DNA, 30 bp, Artificial Sequence
  Synthetic oligonucleotide
tgacaaacggccgacgtctcgactccaatc

SEQ ID NO: 68697 - DNA, 30 bp, Artificial Sequence
  Synthetic oligonucleotide
gggctcgcgttacaacccaaagtcgcaatc

SEQ ID NO: 68698 - DNA, 30 bp, Artificial Sequence
  Synthetic oligonucleotide
gtaagtaacacaggttaaacaacatcaatc

SEQ ID NO: 68699 - DNA, 30 bp, Artificial Sequence
  Synthetic oligonucleotide
ctgtcgactctgcggtaatacgactcaatc

SEQ ID NO: 68700 - DNA, 30 bp, Artificial Sequence
  Synthetic oligonucleotide
atggctacagggccgacagtattgcgaatc

SEQ ID NO: 68701 - DNA, 30 bp, Artificial Sequence
  Synthetic oligonucleotide
caaacacagcaagccaagcgcaaaggaatc

SEQ ID NO: 68702 - DNA, 30 bp, Artificial Sequence
  Synthetic oligonucleotide
ccgcaatgatttaatgaaatagagtgaatc

SEQ ID NO: 68703 - DNA, 30 bp, Artificial Sequence
  Synthetic oligonucleotide
tcggtgcacaggcacacacaaagaataatc

SEQ ID NO: 68704 - DNA, 30 bp, Artificial Sequence
  Synthetic oligonucleotide
tcgaagaccaagctgctcgtgtgtaacatc

SEQ ID NO: 68705 - DNA, 30 bp, Artificial Sequence
  Synthetic oligonucleotide
gagaggacatatcactaagagtaccacatc

SEQ ID NO: 68706 - DNA, 30 bp, Artificial Sequence
  Synthetic oligonucleotide
agggagggtgtttgggggaatgatcacatc

SEQ ID NO: 68707 - DNA, 30 bp, Artificial Sequence
  Synthetic oligonucleotide
acttacaggcgaagaaaggagactcacatc

SEQ ID NO: 68708 - DNA, 30 bp, Artificial Sequence
  Synthetic oligonucleotide
tgcaaaaagagcaccggacgactggacatc

SEQ ID NO: 68709 - DNA, 30 bp, Artificial Sequence
  Synthetic oligonucleotide
aggataggaatggtcatccgtctgcccatc

SEQ ID NO: 68710 - DNA, 30 bp, Artificial Sequence
  Synthetic oligonucleotide
tcgagctcgcaagtggcagccgcatgcatc

SEQ ID NO: 68711 - DNA, 30 bp, Artificial Sequence
  Synthetic oligonucleotide
cagcgcaaaattatgggcgtgcagtgcatc

SEQ ID NO: 68712 - DNA, 30 bp, Artificial Sequence
  Synthetic oligonucleotide
atcaacgaggttgtagggctaggcatcatc

SEQ ID NO: 68713 - DNA, 30 bp, Artificial Sequence
  Synthetic oligonucleotide
ccggtaaaaaggcccttttaatgcctcatc

SEQ ID NO: 68714 - DNA, 30 bp, Artificial Sequence
  Synthetic oligonucleotide
actcgtaaagtccgtccaacttgggtcatc

SEQ ID NO: 68715 - DNA, 30 bp, Artificial Sequence
  Synthetic oligonucleotide
acatcccatacactggacacgcaattcatc

SEQ ID NO: 68716 - DNA, 30 bp, Artificial Sequence
  Synthetic oligonucleotide
agataacttagggcatgaatcgggttcatc

SEQ ID NO: 68717 - DNA, 30 bp, Artificial Sequence
  Synthetic oligonucleotide
agggtagatgcgtgtaatccgatgaagatc

SEQ ID NO: 68718 - DNA, 30 bp, Artificial Sequence
  Synthetic oligonucleotide
actggggtacggtcacgaattgactagatc

SEQ ID NO: 68719 - DNA, 30 bp, Artificial Sequence
  Synthetic oligonucleotide
catcatacgtagtctaagcatggcacgatc

SEQ ID NO: 68720 - DNA, 30 bp, Artificial Sequence
  Synthetic oligonucleotide
ggctgtgtgtcataggagccaatcaggatc

SEQ ID NO: 68721 - DNA, 30 bp, Artificial Sequence
  Synthetic oligonucleotide
ttccacagagatgcaaagagtacgaggatc

SEQ ID NO: 68722 - DNA, 30 bp, Artificial Sequence
  Synthetic oligonucleotide
ggcaccgggcacgagaataaattgcggatc

SEQ ID NO: 68723 - DNA, 30 bp, Artificial Sequence
  Synthetic oligonucleotide
cgtcagttccagctggacaacagagggatc

SEQ ID NO: 68724 - DNA, 30 bp, Artificial Sequence
  Synthetic oligonucleotide
cgagagtgtcacgggtctggtttatggatc

SEQ ID NO: 68725 - DNA, 30 bp, Artificial Sequence
  Synthetic oligonucleotide
cccgaaggtctaaaagatgagacgatgatc

SEQ ID NO: 68726 - DNA, 30 bp, Artificial Sequence
  Synthetic oligonucleotide
acaacgcaaaagggtcagcttcgcctgatc

SEQ ID NO: 68727 - DNA, 30 bp, Artificial Sequence
  Synthetic oligonucleotide
acccgccttcatacaaaggaccaagtgatc

SEQ ID NO: 68728 - DNA, 30 bp, Artificial Sequence
  Synthetic oligonucleotide
ggaaggcattgagccaaatccgtgaatatc

SEQ ID NO: 68729 - DNA, 30 bp, Artificial Sequence
  Synthetic oligonucleotide
tcgtaccagcgatgttcaaattacgatatc

SEQ ID NO: 68730 - DNA, 30 bp, Artificial Sequence
  Synthetic oligonucleotide
aaaggagacaccatcatgtgcagcgatatc

SEQ ID NO: 68731 - DNA, 30 bp, Artificial Sequence
  Synthetic oligonucleotide
gtatggcgggaataaggagctgcggatatc

SEQ ID NO: 68732 - DNA, 30 bp, Artificial Sequence
  Synthetic oligonucleotide
gcgaatgatgacagtcctcggtcggatatc

SEQ ID NO: 68733 - DNA, 30 bp, Artificial Sequence
  Synthetic oligonucleotide
aggctctacacaagtcagctaggtggtatc

SEQ ID NO: 68734 - DNA, 30 bp, Artificial Sequence
  Synthetic oligonucleotide
gagcaaacacaagcctaggcgagatgtatc

SEQ ID NO: 68735 - DNA, 30 bp, Artificial Sequence
  Synthetic oligonucleotide
cgatattgcggatcgaggcgagactgtatc

SEQ ID NO: 68736 - DNA, 30 bp, Artificial Sequence
  Synthetic oligonucleotide
tgacacgaacggcattccggcgagtgtatc

SEQ ID NO: 68737 - DNA, 30 bp, Artificial Sequence
  Synthetic oligonucleotide
attacgtgatcaagtaagaacagtattatc

SEQ ID NO: 68738 - DNA, 30 bp, Artificial Sequence
  Synthetic oligonucleotide
acgaaagggcgacccaacgcgacacttatc

SEQ ID NO: 68739 - DNA, 30 bp, Artificial Sequence
  Synthetic oligonucleotide
agcgtcgacgggtaattagatcgtaaactc

SEQ ID NO: 68740 - DNA, 30 bp, Artificial Sequence
  Synthetic oligonucleotide
cgggaaataatgccgtttacgatccaactc

SEQ ID NO: 68741 - DNA, 30 bp, Artificial Sequence
  Synthetic oligonucleotide
ggaagactgaaatgattatagggcgaactc

SEQ ID NO: 68742 - DNA, 30 bp, Artificial Sequence
  Synthetic oligonucleotide
ccaacatggacattcacaacttaaacactc

SEQ ID NO: 68743 - DNA, 30 bp, Artificial Sequence
  Synthetic oligonucleotide
gcgtgcggagggttcagctaaaagccactc

SEQ ID NO: 68744 - DNA, 30 bp, Artificial Sequence
  Synthetic oligonucleotide
actgaggatcaagaattgggatatgcactc

SEQ ID NO: 68745 - DNA, 30 bp, Artificial Sequence
  Synthetic oligonucleotide
caaagacttcccaagtgttatctccgactc

SEQ ID NO: 68746 - DNA, 30 bp, Artificial Sequence
  Synthetic oligonucleotide
gctaatcgccaaatctagtcggggggactc

SEQ ID NO: 68747 - DNA, 30 bp, Artificial Sequence
  Synthetic oligonucleotide
tcggggtatgccgtcgttattggtggactc

SEQ ID NO: 68748 - DNA, 30 bp, Artificial Sequence
  Synthetic oligonucleotide
cgtgaatctccaaacagtgctcgaatactc

SEQ ID NO: 68749 - DNA, 31 bp, Artificial Sequence
  Synthetic oligonucleotide
atgggattgcactgctcgaggtgggatactc

SEQ ID NO: 68750 - DNA, 30 bp, Artificial Sequence
  Synthetic oligonucleotide
ccgtgtacccatgcggtggtagcgctactc

SEQ ID NO: 68751 - DNA, 30 bp, Artificial Sequence
  Synthetic oligonucleotide
cgaggtgataccttagagtccagtctactc

SEQ ID NO: 68752 - DNA, 30 bp, Artificial Sequence
  Synthetic oligonucleotide
tcacacaaaagtcggtgtggacaattactc

SEQ ID NO: 68753 - DNA, 30 bp, Artificial Sequence
  Synthetic oligonucleotide
atatctggctcggggaccaccaagcacctc

SEQ ID NO: 68754 - DNA, 30 bp, Artificial Sequence
  Synthetic oligonucleotide
aactgggaacgttggaccctacaagacctc

SEQ ID NO: 68755 - DNA, 30 bp, Artificial Sequence
  Synthetic oligonucleotide
gtagaaccatgaacaatatcgccagacctc

SEQ ID NO: 68756 - DNA, 30 bp, Artificial Sequence
  Synthetic oligonucleotide
cattgggagaaatcaatgtagtcggacctc

SEQ ID NO: 68757 - DNA, 30 bp, Artificial Sequence
  Synthetic oligonucleotide
ataagcgttcaagggctgggtagtgacctc

SEQ ID NO: 68758 - DNA, 30 bp, Artificial Sequence
  Synthetic oligonucleotide
taggggtatggattactcagagtacgcctc

SEQ ID NO: 68759 - DNA, 30 bp, Artificial Sequence
  Synthetic oligonucleotide
acactaacattcgtacatataatcggcctc

SEQ ID NO: 68760 - DNA, 30 bp, Artificial Sequence
  Synthetic oligonucleotide
gcgagtaacctgcggactatgaaatgcctc

SEQ ID NO: 68761 - DNA, 30 bp, Artificial Sequence
  Synthetic oligonucleotide
tctgtaacaaaacggagtgataacatcctc

SEQ ID NO: 68762 - DNA, 30 bp, Artificial Sequence
  Synthetic oligonucleotide
ggtaagaacacaacttagcgtcgtaagctc

SEQ ID NO: 68763 - DNA, 30 bp, Artificial Sequence
  Synthetic oligonucleotide
tcatgccgacactctctaatgtcatagctc

SEQ ID NO: 68764 - DNA, 30 bp, Artificial Sequence
  Synthetic oligonucleotide
ggttactcgaactggcttagcatatagctc

SEQ ID NO: 68765 - DNA, 30 bp, Artificial Sequence
  Synthetic oligonucleotide
gtgagtggcaggttaattgaggagtagctc

SEQ ID NO: 68766 - DNA, 30 bp, Artificial Sequence
  Synthetic oligonucleotide
aaaggcgggggagaaacccccaagacgctc

SEQ ID NO: 68767 - DNA, 30 bp, Artificial Sequence
  Synthetic oligonucleotide
acgtatgtcgcaatggcaaccatgccgctc

SEQ ID NO: 68768 - DNA, 30 bp, Artificial Sequence
  Synthetic oligonucleotide
ggcgggagcaagggatgtacgaataggctc

SEQ ID NO: 68769 - DNA, 30 bp, Artificial Sequence
  Synthetic oligonucleotide
agatcgagttagtaacgttcgttacggctc

SEQ ID NO: 68770 - DNA, 30 bp, Artificial Sequence
  Synthetic oligonucleotide
cctcaaggcgagagtatcactgggcggctc

SEQ ID NO: 68771 - DNA, 30 bp, Artificial Sequence
  Synthetic oligonucleotide
tcgttagcgtgcgcgtggcgtttcgggctc

SEQ ID NO: 68772 - DNA, 30 bp, Artificial Sequence
  Synthetic oligonucleotide
tataacgtgtagacaaccaaccaaatgctc

SEQ ID NO: 68773 - DNA, 30 bp, Artificial Sequence
  Synthetic oligonucleotide
gccggacatgtgcaggatattccaatgctc

SEQ ID NO: 68774 - DNA, 30 bp, Artificial Sequence
  Synthetic oligonucleotide
gccgtagcttcgtgacggcaaactgtgctc

SEQ ID NO: 68775 - DNA, 30 bp, Artificial Sequence
  Synthetic oligonucleotide
agcaggcttgcacgccaattacatgatctc

SEQ ID NO: 68776 - DNA, 30 bp, Artificial Sequence
  Synthetic oligonucleotide
cgaaaacgagccagcggtaaggcatatctc

SEQ ID NO: 68777 - DNA, 30 bp, Artificial Sequence
  Synthetic oligonucleotide
tagagcgagggttagttctagcagtatctc

SEQ ID NO: 68778 - DNA, 30 bp, Artificial Sequence
  Synthetic oligonucleotide
taactgcaatccggacgcgtctccactctc

SEQ ID NO: 68779 - DNA, 30 bp, Artificial Sequence
  Synthetic oligonucleotide
acgttgctacgtcggggacaagctgctctc

SEQ ID NO: 68780 - DNA, 30 bp, Artificial Sequence
  Synthetic oligonucleotide
acaggacaccaggtaacctagtccaaagtc

SEQ ID NO: 68781 - DNA, 30 bp, Artificial Sequence
  Synthetic oligonucleotide
atacaggacggataggcgctcgagaaagtc

SEQ ID NO: 68782 - DNA, 30 bp, Artificial Sequence
  Synthetic oligonucleotide
tcatgaattacggggccggcaatgaaagtc

SEQ ID NO: 68783 - DNA, 30 bp, Artificial Sequence
  Synthetic oligonucleotide
ggatacaattattaagtaaacagtaaagtc

SEQ ID NO: 68784 - DNA, 30 bp, Artificial Sequence
  Synthetic oligonucleotide
cggtttagatagggacggtgtcgtaaagtc

SEQ ID NO: 68785 - DNA, 30 bp, Artificial Sequence
  Synthetic oligonucleotide
tccaaagtaaacaaatgatcgctacaagtc

SEQ ID NO: 68786 - DNA, 30 bp, Artificial Sequence
  Synthetic oligonucleotide
cagcaatttttacgtcgagtggagcaagtc

SEQ ID NO: 68787 - DNA, 30 bp, Artificial Sequence
  Synthetic oligonucleotide
ttcggagcgttgggctaggtaaaataagtc

SEQ ID NO: 68788 - DNA, 30 bp, Artificial Sequence
  Synthetic oligonucleotide
gaaggatgctcggggcaatagtcctaagtc

SEQ ID NO: 68789 - DNA, 30 bp, Artificial Sequence
  Synthetic oligonucleotide
aagggcaagcgtcctcgaggccggtaagtc

SEQ ID NO: 68790 - DNA, 30 bp, Artificial Sequence
  Synthetic oligonucleotide
aggaaaggaatagagcattcaggtacagtc

SEQ ID NO: 68791 - DNA, 30 bp, Artificial Sequence
  Synthetic oligonucleotide
cagacaggaaccaagctggatcagccagtc

SEQ ID NO: 68792 - DNA, 30 bp, Artificial Sequence
  Synthetic oligonucleotide
aaaaggagggctaggatcacatcgccagtc

SEQ ID NO: 68793 - DNA, 30 bp, Artificial Sequence
  Synthetic oligonucleotide
aaaagccgactcagggtaacggatccagtc

SEQ ID NO: 68794 - DNA, 30 bp, Artificial Sequence
  Synthetic oligonucleotide
cacgttaatgatgtaatcgtgcttccagtc

SEQ ID NO: 68795 - DNA, 30 bp, Artificial Sequence
  Synthetic oligonucleotide
aatgcggtagggacactcagtcgggcagtc

SEQ ID NO: 68796 - DNA, 30 bp, Artificial Sequence
  Synthetic oligonucleotide
ggccgaatgggatcaagtgggatggcagtc

SEQ ID NO: 68797 - DNA, 30 bp, Artificial Sequence
  Synthetic oligonucleotide
aagcaaataccccaaattttgcgatcagtc

SEQ ID NO: 68798 - DNA, 30 bp, Artificial Sequence
  Synthetic oligonucleotide
aaccttaaggatgagtgtcgaattcgagtc

SEQ ID NO: 68799 - DNA, 30 bp, Artificial Sequence
  Synthetic oligonucleotide
ctggtcctcatctaacgagtagaactagtc

SEQ ID NO: 68800 - DNA, 30 bp, Artificial Sequence
  Synthetic oligonucleotide
cgagaccatggattccagggttgtctagtc

SEQ ID NO: 68801 - DNA, 30 bp, Artificial Sequence
  Synthetic oligonucleotide
tgtggaacaggcgtggtccttattctagtc

SEQ ID NO: 68802 - DNA, 30 bp, Artificial Sequence
  Synthetic oligonucleotide
tggggttatgaatatctggcacgaaacgtc

SEQ ID NO: 68803 - DNA, 30 bp, Artificial Sequence
  Synthetic oligonucleotide
tgtgatcgaaattatgtctcgcgcaacgtc

SEQ ID NO: 68804 - DNA, 30 bp, Artificial Sequence
  Synthetic oligonucleotide
ccttggaagcatactcgatacgtcaacgtc

SEQ ID NO: 68805 - DNA, 30 bp, Artificial Sequence
  Synthetic oligonucleotide
cagagcccagaccttagacaagggcacgtc

SEQ ID NO: 68806 - DNA, 30 bp, Artificial Sequence
  Synthetic oligonucleotide
ggcattgcgcaatgtgcaagaagagacgtc

SEQ ID NO: 68807 - DNA, 30 bp, Artificial Sequence
  Synthetic oligonucleotide
acgcggtggaccgattagaaatagtacgtc

SEQ ID NO: 68808 - DNA, 30 bp, Artificial Sequence
  Synthetic oligonucleotide
acgtttacaggaagggtattgccaaccgtc

SEQ ID NO: 68809 - DNA, 30 bp, Artificial Sequence
  Synthetic oligonucleotide
tgcggttgtaatgcatactcatataccgtc

SEQ ID NO: 68810 - DNA, 30 bp, Artificial Sequence
  Synthetic oligonucleotide
ggggtgaacccgcgtagagcatgtcccgtc

SEQ ID NO: 68811 - DNA, 30 bp, Artificial Sequence
  Synthetic oligonucleotide
tacagaatcccaagggtcctgcgaggcgtc

SEQ ID NO: 68812 - DNA, 30 bp, Artificial Sequence
  Synthetic oligonucleotide
acttacgcctgggagtacaggaagggcgtc

SEQ ID NO: 68813 - DNA, 30 bp, Artificial Sequence
  Synthetic oligonucleotide
agtggatttcatgccgctaattcgatcgtc

SEQ ID NO: 68814 - DNA, 30 bp, Artificial Sequence
  Synthetic oligonucleotide
tgcaagatggtagggggcttagcgctcgtc

SEQ ID NO: 68815 - DNA, 30 bp, Artificial Sequence
  Synthetic oligonucleotide
gcttacagagcaagcaaaggtctgctcgtc

SEQ ID NO: 68816 - DNA, 30 bp, Artificial Sequence
  Synthetic oligonucleotide
tcttcccgcgttctcttacatagtctcgtc

SEQ ID NO: 68817 - DNA, 30 bp, Artificial Sequence
  Synthetic oligonucleotide
agagacatacatggacatcccggattcgtc

SEQ ID NO: 68818 - DNA, 30 bp, Artificial Sequence
  Synthetic oligonucleotide
cgggccaaaagtgccaaatatcaaaaggtc

SEQ ID NO: 68819 - DNA, 30 bp, Artificial Sequence
  Synthetic oligonucleotide
cagtcagggatgcaaagagggctcaaggtc

SEQ ID NO: 68820 - DNA, 30 bp, Artificial Sequence
  Synthetic oligonucleotide
acgccactcaaaattacatgacataaggtc

SEQ ID NO: 68821 - DNA, 30 bp, Artificial Sequence
  Synthetic oligonucleotide
acggctgtgtgccggcgggaacaacaggtc

SEQ ID NO: 68822 - DNA, 30 bp, Artificial Sequence
  Synthetic oligonucleotide
acataacgcgcggaatatgtgtatcaggtc

SEQ ID NO: 68823 - DNA, 30 bp, Artificial Sequence
  Synthetic oligonucleotide
tagtggggcaactgggcaccgccataggtc

SEQ ID NO: 68824 - DNA, 30 bp, Artificial Sequence
  Synthetic oligonucleotide
cgacagagcggagctagtgatcgataggtc

SEQ ID NO: 68825 - DNA, 30 bp, Artificial Sequence
  Synthetic oligonucleotide
tgagcgtgacaagttgatagcaattaggtc

SEQ ID NO: 68826 - DNA, 30 bp, Artificial Sequence
  Synthetic oligonucleotide
acctcaagacacaagttaaggtgttaggtc

SEQ ID NO: 68827 - DNA, 30 bp, Artificial Sequence
  Synthetic oligonucleotide
tagattcgaccgaactacatctgcgcggtc

SEQ ID NO: 68828 - DNA, 30 bp, Artificial Sequence
  Synthetic oligonucleotide
gtcacgcggggaatacgcgtatgaagggtc

SEQ ID NO: 68829 - DNA, 30 bp, Artificial Sequence
  Synthetic oligonucleotide
cgaggagctacagtctacagttgtcgggtc

SEQ ID NO: 68830 - DNA, 30 bp, Artificial Sequence
  Synthetic oligonucleotide
agccatatatctgaagtagaaactggggtc

SEQ ID NO: 68831 - DNA, 30 bp, Artificial Sequence
  Synthetic oligonucleotide
cgcgcagagaaagcaagtatctaatgggtc

SEQ ID NO: 68832 - DNA, 30 bp, Artificial Sequence
  Synthetic oligonucleotide
ctacggtagaagcacgcgcattcatgggtc

SEQ ID NO: 68833 - DNA, 30 bp, Artificial Sequence
  Synthetic oligonucleotide
aggtaagtgataaaagacaacggatgggtc

SEQ ID NO: 68834 - DNA, 30 bp, Artificial Sequence
  Synthetic oligonucleotide
acgggcggatggatttcctttcgctgggtc

SEQ ID NO: 68835 - DNA, 30 bp, Artificial Sequence
  Synthetic oligonucleotide
gggtagatgtatacgatatcttgcttggtc

SEQ ID NO: 68836 - DNA, 30 bp, Artificial Sequence
  Synthetic oligonucleotide
gcaagtgaaaagcagatttgtaagttggtc

SEQ ID NO: 68837 - DNA, 30 bp, Artificial Sequence
  Synthetic oligonucleotide
acttacctctcccacactgctataaatgtc

SEQ ID NO: 68838 - DNA, 30 bp, Artificial Sequence
  Synthetic oligonucleotide
cgggagcaactgtaaggttcttagcatgtc

SEQ ID NO: 68839 - DNA, 30 bp, Artificial Sequence
  Synthetic oligonucleotide
agggggggctaagtccgtgctggccctgtc

SEQ ID NO: 68840 - DNA, 30 bp, Artificial Sequence
  Synthetic oligonucleotide
gaggaatgagtctgagtacacgagcctgtc

SEQ ID NO: 68841 - DNA, 30 bp, Artificial Sequence
  Synthetic oligonucleotide
cggggtgcgtctggctcctttcgaagtgtc

SEQ ID NO: 68842 - DNA, 30 bp, Artificial Sequence
  Synthetic oligonucleotide
aaccacattgctagagtgaagactggtgtc

SEQ ID NO: 68843 - DNA, 30 bp, Artificial Sequence
  Synthetic oligonucleotide
atggtcgggaagttgatccacggaattgtc

SEQ ID NO: 68844 - DNA, 30 bp, Artificial Sequence
  Synthetic oligonucleotide
cgagttgaggggagtagagcttgcattgtc

SEQ ID NO: 68845 - DNA, 30 bp, Artificial Sequence
  Synthetic oligonucleotide
cgccttgaactcgtgggttagtactttgtc

SEQ ID NO: 68846 - DNA, 30 bp, Artificial Sequence
  Synthetic oligonucleotide
tctgaaagagtatagcagttcagtaaattc

SEQ ID NO: 68847 - DNA, 30 bp, Artificial Sequence
  Synthetic oligonucleotide
agcggccacagtgctagtcgaggggaattc

SEQ ID NO: 68848 - DNA, 30 bp, Artificial Sequence
  Synthetic oligonucleotide
acgggctgaaactctctcgcgatggaattc

SEQ ID NO: 68849 - DNA, 30 bp, Artificial Sequence
  Synthetic oligonucleotide
agttggacgaggtccgggtcacaaccattc

SEQ ID NO: 68850 - DNA, 30 bp, Artificial Sequence
  Synthetic oligonucleotide
gtaagagaatttcaacatataccgagattc

SEQ ID NO: 68851 - DNA, 30 bp, Artificial Sequence
  Synthetic oligonucleotide
agtcacgaagctaccactgtgtcgcgattc

SEQ ID NO: 68852 - DNA, 30 bp, Artificial Sequence
  Synthetic oligonucleotide
tcggcctcgcaccgatagagctggcgattc

SEQ ID NO: 68853 - DNA, 30 bp, Artificial Sequence
  Synthetic oligonucleotide
tgaggttaatacgaaaaccaacgcgtattc

SEQ ID NO: 68854 - DNA, 30 bp, Artificial Sequence
  Synthetic oligonucleotide
ggctaagctaagaggtcgcgctcattattc

SEQ ID NO: 68855 - DNA, 30 bp, Artificial Sequence
  Synthetic oligonucleotide
aacgcaagtctgaatacatgattccacttc

SEQ ID NO: 68856 - DNA, 30 bp, Artificial Sequence
  Synthetic oligonucleotide
aatgagtagggagggaaccaccgatccttc

SEQ ID NO: 68857 - DNA, 30 bp, Artificial Sequence
  Synthetic oligonucleotide
taacgtagacctcagatctaacatggcttc

SEQ ID NO: 68858 - DNA, 30 bp, Artificial Sequence
  Synthetic oligonucleotide
gacatggagatggggcggcccgaactcttc

SEQ ID NO: 68859 - DNA, 30 bp, Artificial Sequence
  Synthetic oligonucleotide
agagaccagtggtgtcttgatgatcagttc

SEQ ID NO: 68860 - DNA, 30 bp, Artificial Sequence
  Synthetic oligonucleotide
acacgaggtatcgagaagtacaaatagttc

SEQ ID NO: 68861 - DNA, 30 bp, Artificial Sequence
  Synthetic oligonucleotide
ggcgagcgacattttaaacatcaaacgttc

SEQ ID NO: 68862 - DNA, 30 bp, Artificial Sequence
  Synthetic oligonucleotide
atgacatgccaagggtgatagcccacgttc

SEQ ID NO: 68863 - DNA, 30 bp, Artificial Sequence
  Synthetic oligonucleotide
tcaactagcgaacattgcatcgtgacgttc

SEQ ID NO: 68864 - DNA, 30 bp, Artificial Sequence
  Synthetic oligonucleotide
tgattcgggtaagaagtcaataacgcgttc

SEQ ID NO: 68865 - DNA, 30 bp, Artificial Sequence
  Synthetic oligonucleotide
ggtcataatccaagcataggccggaggttc

SEQ ID NO: 68866 - DNA, 30 bp, Artificial Sequence
  Synthetic oligonucleotide
caaaggaatgcatcgcatcaataacggttc

SEQ ID NO: 68867 - DNA, 30 bp, Artificial Sequence
  Synthetic oligonucleotide
gcttagtaagtggaagccattaagcggttc

SEQ ID NO: 68868 - DNA, 30 bp, Artificial Sequence
  Synthetic oligonucleotide
gaagaagctgtccattaagaggaagggttc

SEQ ID NO: 68869 - DNA, 30 bp, Artificial Sequence
  Synthetic oligonucleotide
gggacttgtgctaatcgggacttatggttc

SEQ ID NO: 68870 - DNA, 30 bp, Artificial Sequence
  Synthetic oligonucleotide
gcatacaaaaaggcagttacgtaaatgttc

SEQ ID NO: 68871 - DNA, 30 bp, Artificial Sequence
  Synthetic oligonucleotide
atagataaagagtggtaaacgcgcatgttc

SEQ ID NO: 68872 - DNA, 30 bp, Artificial Sequence
  Synthetic oligonucleotide
agctgatagggtagtatcctcgtcgtgttc

SEQ ID NO: 68873 - DNA, 30 bp, Artificial Sequence
  Synthetic oligonucleotide
cggtacatatctcagcaggaacaggtgttc

SEQ ID NO: 68874 - DNA, 30 bp, Artificial Sequence
  Synthetic oligonucleotide
ccaggggagtacctagaccaatttgtgttc

SEQ ID NO: 68875 - DNA, 30 bp, Artificial Sequence
  Synthetic oligonucleotide
cgatgtggcgtacaacacggttgtttgttc

SEQ ID NO: 68876 - DNA, 30 bp, Artificial Sequence
  Synthetic oligonucleotide
cattcgtcgtccgtacatatgcgaggtttc

SEQ ID NO: 68877 - DNA, 30 bp, Artificial Sequence
  Synthetic oligonucleotide
ggcataggacccgatcgagggcaaaaaaag

SEQ ID NO: 68878 - DNA, 30 bp, Artificial Sequence
  Synthetic oligonucleotide
tgtagaaatctcgaccacacatccaaaaag

SEQ ID NO: 68879 - DNA, 30 bp, Artificial Sequence
  Synthetic oligonucleotide
actcagtcttaactgtgtccgctgaaaaag

SEQ ID NO: 68880 - DNA, 30 bp, Artificial Sequence
  Synthetic oligonucleotide
gttcagccagaagtaatgtagactaaaaag

SEQ ID NO: 68881 - DNA, 30 bp, Artificial Sequence
  Synthetic oligonucleotide
ctaagtatggctgagcacaaatgtaaaaag

SEQ ID NO: 68882 - DNA, 30 bp, Artificial Sequence
  Synthetic oligonucleotide
tctaggaagtaaagaactgatatacaaaag

SEQ ID NO: 68883 - DNA, 30 bp, Artificial Sequence
  Synthetic oligonucleotide
gagcataccattagcgcggaagagcaaaag

SEQ ID NO: 68884 - DNA, 30 bp, Artificial Sequence
  Synthetic oligonucleotide
ccactggtgttagattcggggaggcaaaag

SEQ ID NO: 68885 - DNA, 30 bp, Artificial Sequence
  Synthetic oligonucleotide
ccgtaactgcaacgtgacaataggcaaaag

SEQ ID NO: 68886 - DNA, 29 bp, Artificial Sequence
  Synthetic oligonucleotide
tacggtggtgtttggattttaggcaaaag

SEQ ID NO: 68887 - DNA, 30 bp, Artificial Sequence
  Synthetic oligonucleotide
cccttacgtataggtgcatataacgaaaag

SEQ ID NO: 68888 - DNA, 30 bp, Artificial Sequence
  Synthetic oligonucleotide
agccgcaaacgttcaatgggataggaaaag

SEQ ID NO: 68889 - DNA, 30 bp, Artificial Sequence
  Synthetic oligonucleotide
catactcgtagtacgactgaacatgaaaag

SEQ ID NO: 68890 - DNA, 30 bp, Artificial Sequence
  Synthetic oligonucleotide
tctagcggaaacagactgtgtgatgaaaag

SEQ ID NO: 68891 - DNA, 30 bp, Artificial Sequence
  Synthetic oligonucleotide
tgtggcttaagctagccgcttatgtaaaag

SEQ ID NO: 68892 - DNA, 30 bp, Artificial Sequence
  Synthetic oligonucleotide
tcgcggagagggctccgcttaagttaaaag

SEQ ID NO: 68893 - DNA, 30 bp, Artificial Sequence
  Synthetic oligonucleotide
agaaggctttggctgagcaggagtacaaag

SEQ ID NO: 68894 - DNA, 30 bp, Artificial Sequence
  Synthetic oligonucleotide
gcacatcggctgcatttggagtgtacaaag

SEQ ID NO: 68895 - DNA, 30 bp, Artificial Sequence
  Synthetic oligonucleotide
atggttgcgagtcacagaggcgcaccaaag

SEQ ID NO: 68896 - DNA, 30 bp, Artificial Sequence
  Synthetic oligonucleotide
catgctaccaaccaaagcgaccagccaaag

SEQ ID NO: 68897 - DNA, 30 bp, Artificial Sequence
  Synthetic oligonucleotide
tggatggctatccccgatagtgatccaaag

SEQ ID NO: 68898 - DNA, 30 bp, Artificial Sequence
  Synthetic oligonucleotide
aggagaccgacgagggtgcaatgagcaaag

SEQ ID NO: 68899 - DNA, 30 bp, Artificial Sequence
  Synthetic oligonucleotide
ccgggtacctataagttggatgttgcaaag

SEQ ID NO: 68900 - DNA, 30 bp, Artificial Sequence
  Synthetic oligonucleotide
gggtagcactattcactatccacatcaaag

SEQ ID NO: 68901 - DNA, 30 bp, Artificial Sequence
  Synthetic oligonucleotide
ccagtaggattcggtttaactcggtcaaag

SEQ ID NO: 68902 - DNA, 30 bp, Artificial Sequence
  Synthetic oligonucleotide
atgagcgtctaaggtacgtgtggcagaaag

SEQ ID NO: 68903 - DNA, 30 bp, Artificial Sequence
  Synthetic oligonucleotide
acaggtcctagagattaatgcggtagaaag

SEQ ID NO: 68904 - DNA, 30 bp, Artificial Sequence
  Synthetic oligonucleotide
ctcgtacgctatatcccgcaataacgaaag

SEQ ID NO: 68905 - DNA, 30 bp, Artificial Sequence
  Synthetic oligonucleotide
aggctcacctcgaggatagaggcgcgaaag

SEQ ID NO: 68906 - DNA, 30 bp, Artificial Sequence
  Synthetic oligonucleotide
ttgacagggcgagctcccaccgttcgaaag

SEQ ID NO: 68907 - DNA, 30 bp, Artificial Sequence
  Synthetic oligonucleotide
gtgtaaaggactgagtgcaatgcaggaaag

SEQ ID NO: 68908 - DNA, 30 bp, Artificial Sequence
  Synthetic oligonucleotide
tcggtgtaaggcgtggacggtgtcggaaag

SEQ ID NO: 68909 - DNA, 30 bp, Artificial Sequence
  Synthetic oligonucleotide
gcgaccacgggcagcttctggtggggaaag

SEQ ID NO: 68910 - DNA, 30 bp, Artificial Sequence
  Synthetic oligonucleotide
cgctggtaccacgagtaggtttttggaaag

SEQ ID NO: 68911 - DNA, 30 bp, Artificial Sequence
  Synthetic oligonucleotide
tcgtaataatttgtagctattgcctgaaag

SEQ ID NO: 68912 - DNA, 30 bp, Artificial Sequence
  Synthetic oligonucleotide
ctaggcttgcaccgactaaaagatctaaag

SEQ ID NO: 68913 - DNA, 30 bp, Artificial Sequence
  Synthetic oligonucleotide
ccaggctaggagtcacgtgagcgggtaaag

SEQ ID NO: 68914 - DNA, 30 bp, Artificial Sequence
  Synthetic oligonucleotide
aggaaaatttaaccagcaggcggtttaaag

SEQ ID NO: 68915 - DNA, 30 bp, Artificial Sequence
  Synthetic oligonucleotide
acacgaaacagcttaggtgcgaataacaag

SEQ ID NO: 68916 - DNA, 30 bp, Artificial Sequence
  Synthetic oligonucleotide
agctaagtaaacggtcatcgcactaacaag

SEQ ID NO: 68917 - DNA, 30 bp, Artificial Sequence
  Synthetic oligonucleotide
taggcgtagggtctcggggatggtcacaag

SEQ ID NO: 68918 - DNA, 30 bp, Artificial Sequence
  Synthetic oligonucleotide
acgtcacgatattacgtgtgtagatacaag

SEQ ID NO: 68919 - DNA, 30 bp, Artificial Sequence
  Synthetic oligonucleotide
taggtatagcaaacccgaaacggatacaag

SEQ ID NO: 68920 - DNA, 30 bp, Artificial Sequence
  Synthetic oligonucleotide
accacgatctacaacaagctaaagaccaag

SEQ ID NO: 68921 - DNA, 30 bp, Artificial Sequence
  Synthetic oligonucleotide
gcccgggtcaagaacgtcgttgcgaccaag

SEQ ID NO: 68922 - DNA, 30 bp, Artificial Sequence
  Synthetic oligonucleotide
gcattcatcgtaatggaacagaaagccaag

SEQ ID NO: 68923 - DNA, 30 bp, Artificial Sequence
  Synthetic oligonucleotide
cattagccagaatgaacttgctgagccaag

SEQ ID NO: 68924 - DNA, 30 bp, Artificial Sequence
  Synthetic oligonucleotide
taatcgcgatagggatcggtactcgccaag

SEQ ID NO: 68925 - DNA, 30 bp, Artificial Sequence
  Synthetic oligonucleotide
ccggtatcccaacagcgggcagtcgccaag

SEQ ID NO: 68926 - DNA, 30 bp, Artificial Sequence
  Synthetic oligonucleotide
cgtcgacgttcaggatagtgtactgccaag

SEQ ID NO: 68927 - DNA, 30 bp, Artificial Sequence
  Synthetic oligonucleotide
acatatgaaccgaaaggcccggcctccaag

SEQ ID NO: 68928 - DNA, 30 bp, Artificial Sequence
  Synthetic oligonucleotide
gcatcgcatgaatcttcttagtcctccaag

SEQ ID NO: 68929 - DNA, 30 bp, Artificial Sequence
  Synthetic oligonucleotide
gtacaggccgtgtgtgacgtggggagcaag

SEQ ID NO: 68930 - DNA, 30 bp, Artificial Sequence
  Synthetic oligonucleotide
gccataaattaaaatgagtggttccgcaag

SEQ ID NO: 68931 - DNA, 30 bp, Artificial Sequence
  Synthetic oligonucleotide
cgggaatgaagttcactccgcgtgcgcaag

SEQ ID NO: 68932 - DNA, 30 bp, Artificial Sequence
  Synthetic oligonucleotide
ggacgagattcagagcctttgattcgcaag

SEQ ID NO: 68933 - DNA, 30 bp, Artificial Sequence
  Synthetic oligonucleotide
agctcattcgggtagctcgatctaggcaag

SEQ ID NO: 68934 - DNA, 30 bp, Artificial Sequence
  Synthetic oligonucleotide
ggtggtggagcgggataaaccatcggcaag

SEQ ID NO: 68935 - DNA, 30 bp, Artificial Sequence
  Synthetic oligonucleotide
cctgtcagtcatctgagggccttgggcaag

SEQ ID NO: 68936 - DNA, 30 bp, Artificial Sequence
  Synthetic oligonucleotide
tcttaggggtcgtcccacctcgtatgcaag

SEQ ID NO: 68937 - DNA, 30 bp, Artificial Sequence
  Synthetic oligonucleotide
gccaaatccaaaaagggtgctcagtgcaag

SEQ ID NO: 68938 - DNA, 30 bp, Artificial Sequence
  Synthetic oligonucleotide
cattagggataatcctacttaccttgcaag

SEQ ID NO: 68939 - DNA, 30 bp, Artificial Sequence
  Synthetic oligonucleotide
ggaatagcggtgtctcatccacgaatcaag

SEQ ID NO: 68940 - DNA, 30 bp, Artificial Sequence
  Synthetic oligonucleotide
ggtcgaattatattttcccgcgtcatcaag

SEQ ID NO: 68941 - DNA, 30 bp, Artificial Sequence
  Synthetic oligonucleotide
cgcgccacccgacaccgctttaaactcaag

SEQ ID NO: 68942 - DNA, 30 bp, Artificial Sequence
  Synthetic oligonucleotide
gcagaatggggaatcgacttacagttcaag

SEQ ID NO: 68943 - DNA, 30 bp, Artificial Sequence
  Synthetic oligonucleotide
tgatacacgtgtagattagcgactaagaag

SEQ ID NO: 68944 - DNA, 30 bp, Artificial Sequence
  Synthetic oligonucleotide
ttatatatcaacagtaacacgtctaagaag

SEQ ID NO: 68945 - DNA, 30 bp, Artificial Sequence
  Synthetic oligonucleotide
ttgaccggctccatttaactggaacagaag

SEQ ID NO: 68946 - DNA, 30 bp, Artificial Sequence
  Synthetic oligonucleotide
cgcgcgggaacgtaacccgttaagcagaag

SEQ ID NO: 68947 - DNA, 30 bp, Artificial Sequence
  Synthetic oligonucleotide
ctgtggcgactatgcggactcagtcagaag

SEQ ID NO: 68948 - DNA, 30 bp, Artificial Sequence
  Synthetic oligonucleotide
tgaagtgtcgcaggatgtcaaggcgagaag

SEQ ID NO: 68949 - DNA, 30 bp, Artificial Sequence
  Synthetic oligonucleotide
tacacacacccacctgaacgttgcgagaag

SEQ ID NO: 68950 - DNA, 30 bp, Artificial Sequence
  Synthetic oligonucleotide
acctatccgaccgtctagcgagtatagaag

SEQ ID NO: 68951 - DNA, 30 bp, Artificial Sequence
  Synthetic oligonucleotide
cggcgatagactacagtcaatcgctagaag

SEQ ID NO: 68952 - DNA, 30 bp, Artificial Sequence
  Synthetic oligonucleotide
gcatcaatgcgcattgctatgtattagaag

SEQ ID NO: 68953 - DNA, 30 bp, Artificial Sequence
  Synthetic oligonucleotide
cgaaacgacgtatactacaatcgaacgaag

SEQ ID NO: 68954 - DNA, 30 bp, Artificial Sequence
  Synthetic oligonucleotide
gggcgcgtcacaaaaggacctggaacgaag

SEQ ID NO: 68955 - DNA, 30 bp, Artificial Sequence
  Synthetic oligonucleotide
aggtaaccactcacaagtgcgtacacgaag

SEQ ID NO: 68956 - DNA, 30 bp, Artificial Sequence
  Synthetic oligonucleotide
aagggtaggtccacacatgctttgacgaag

SEQ ID NO: 68957 - DNA, 30 bp, Artificial Sequence
  Synthetic oligonucleotide
aggtgtccgcaatatgtagcgtctacgaag

SEQ ID NO: 68958 - DNA, 30 bp, Artificial Sequence
  Synthetic oligonucleotide
agcaaccggtgctatccaaggtaggcgaag

SEQ ID NO: 68959 - DNA, 30 bp, Artificial Sequence
  Synthetic oligonucleotide
tagtgcgtctataccccaattcgtgcgaag

SEQ ID NO: 68960 - DNA, 30 bp, Artificial Sequence
  Synthetic oligonucleotide
agtgctcccgaagccgttggctattcgaag

SEQ ID NO: 68961 - DNA, 30 bp, Artificial Sequence
  Synthetic oligonucleotide
cgggagacttgcgactatgagccttcgaag

SEQ ID NO: 68962 - DNA, 30 bp, Artificial Sequence
  Synthetic oligonucleotide
ttgggaggagccactacaagaccaaggaag

SEQ ID NO: 68963 - DNA, 30 bp, Artificial Sequence
  Synthetic oligonucleotide
tctctgccgaaacaaccggggcaacggaag

SEQ ID NO: 68964 - DNA, 30 bp, Artificial Sequence
  Synthetic oligonucleotide
aacgcattattaatgcggtccatacggaag

SEQ ID NO: 68965 - DNA, 30 bp, Artificial Sequence
  Synthetic oligonucleotide
ccgggatgtcgaccaagtgcatgagggaag

SEQ ID NO: 68966 - DNA, 30 bp, Artificial Sequence
  Synthetic oligonucleotide
taagtgcccacggacgcaaagagggggaag

SEQ ID NO: 68967 - DNA, 30 bp, Artificial Sequence
  Synthetic oligonucleotide
gagtgtggaaaagagttaaagtgatggaag

SEQ ID NO: 68968 - DNA, 30 bp, Artificial Sequence
  Synthetic oligonucleotide
ttagggactggcccgcgagtggattggaag

SEQ ID NO: 68969 - DNA, 30 bp, Artificial Sequence
  Synthetic oligonucleotide
gccagagcatctcctgaaaatcaaatgaag

SEQ ID NO: 68970 - DNA, 30 bp, Artificial Sequence
  Synthetic oligonucleotide
accgtcgttgcagtggagtccggaatgaag

SEQ ID NO: 68971 - DNA, 30 bp, Artificial Sequence
  Synthetic oligonucleotide
caaaatgctagcgtagcaggtataatgaag

SEQ ID NO: 68972 - DNA, 30 bp, Artificial Sequence
  Synthetic oligonucleotide
ccgtgtgaattggacaactagtctctgaag

SEQ ID NO: 68973 - DNA, 30 bp, Artificial Sequence
  Synthetic oligonucleotide
gcaacactggggtagtctaataagttgaag

SEQ ID NO: 68974 - DNA, 30 bp, Artificial Sequence
  Synthetic oligonucleotide
tccatggaggccgcaaccaatacgaataag

SEQ ID NO: 68975 - DNA, 30 bp, Artificial Sequence
  Synthetic oligonucleotide
cacgagacgcttgacaaagtgtggaataag

SEQ ID NO: 68976 - DNA, 30 bp, Artificial Sequence
  Synthetic oligonucleotide
actcgccaaggagacctgggttttaataag

SEQ ID NO: 68977 - DNA, 30 bp, Artificial Sequence
  Synthetic oligonucleotide
cataggcaggcaggcgtattactacataag

SEQ ID NO: 68978 - DNA, 30 bp, Artificial Sequence
  Synthetic oligonucleotide
gctgtcagattggtcggcctcaaagataag

SEQ ID NO: 68979 - DNA, 30 bp, Artificial Sequence
  Synthetic oligonucleotide
tagatcaatgaaatgacttggacggataag

SEQ ID NO: 68980 - DNA, 30 bp, Artificial Sequence
  Synthetic oligonucleotide
aaatagggctcataaaggaggagggataag

SEQ ID NO: 68981 - DNA, 30 bp, Artificial Sequence
  Synthetic oligonucleotide
cattatggggaagcgttgcataatgataag

SEQ ID NO: 68982 - DNA, 30 bp, Artificial Sequence
  Synthetic oligonucleotide
ccttgtttgtaatagagagtcccgtataag

SEQ ID NO: 68983 - DNA, 30 bp, Artificial Sequence
  Synthetic oligonucleotide
gtaaatcggttagtaacctccaccactaag

SEQ ID NO: 68984 - DNA, 30 bp, Artificial Sequence
  Synthetic oligonucleotide
ccgtctgtaggcatacagccaaagactaag

SEQ ID NO: 68985 - DNA, 30 bp, Artificial Sequence
  Synthetic oligonucleotide
cctgaggctctcgacccgcgatcgactaag

SEQ ID NO: 68986 - DNA, 30 bp, Artificial Sequence
  Synthetic oligonucleotide
gacggttcacctatgagagtcaggactaag

SEQ ID NO: 68987 - DNA, 30 bp, Artificial Sequence
  Synthetic oligonucleotide
tctgggcacctacctagccctatccctaag

SEQ ID NO: 68988 - DNA, 30 bp, Artificial Sequence
  Synthetic oligonucleotide
aaggtgactgaatgcgctatcgcctctaag

SEQ ID NO: 68989 - DNA, 30 bp, Artificial Sequence
  Synthetic oligonucleotide
aggaacgcggcccccacgttaataagtaag

SEQ ID NO: 68990 - DNA, 30 bp, Artificial Sequence
  Synthetic oligonucleotide
ctcatgtcgccttagaagatagggagtaag

SEQ ID NO: 68991 - DNA, 30 bp, Artificial Sequence
  Synthetic oligonucleotide
catcgcggaccgcagagatgggtgagtaag

SEQ ID NO: 68992 - DNA, 30 bp, Artificial Sequence
  Synthetic oligonucleotide
atgcataatcaactgtcgcttgtgagtaag

SEQ ID NO: 68993 - DNA, 30 bp, Artificial Sequence
  Synthetic oligonucleotide
accgtacctcccacgaatcacgttagtaag

SEQ ID NO: 68994 - DNA, 30 bp, Artificial Sequence
  Synthetic oligonucleotide
gccgggcacaccagaaaaaggccccgtaag

SEQ ID NO: 68995 - DNA, 30 bp, Artificial Sequence
  Synthetic oligonucleotide
aataactccaagagtgaaccctagcgtaag

SEQ ID NO: 68996 - DNA, 30 bp, Artificial Sequence
  Synthetic oligonucleotide
ggaggtaccgtagcgagtgggactcgtaag

SEQ ID NO: 68997 - DNA, 30 bp, Artificial Sequence
  Synthetic oligonucleotide
gacatacgttggatacttataggaggtaag

SEQ ID NO: 68998 - DNA, 30 bp, Artificial Sequence
  Synthetic oligonucleotide
tggcgtcctgcaaggactgtggtaggtaag

SEQ ID NO: 68999 - DNA, 30 bp, Artificial Sequence
  Synthetic oligonucleotide
aaaaagcggtgctagaagaccgggggtaag

SEQ ID NO: 69000 - DNA, 30 bp, Artificial Sequence
  Synthetic oligonucleotide
tgcggtacggctaatacttatgcgtgtaag

SEQ ID NO: 69001 - DNA, 30 bp, Artificial Sequence
  Synthetic oligonucleotide
catggcgagttgttggtcagataaattaag

SEQ ID NO: 69002 - DNA, 30 bp, Artificial Sequence
  Synthetic oligonucleotide
gcggatggaaagaaagacgaagtaattaag

SEQ ID NO: 69003 - DNA, 30 bp, Artificial Sequence
  Synthetic oligonucleotide
tggtagccaggcaagtatatttgcattaag

SEQ ID NO: 69004 - DNA, 30 bp, Artificial Sequence
  Synthetic oligonucleotide
cacgtaacatggaattcggtatctattaag

SEQ ID NO: 69005 - DNA, 30 bp, Artificial Sequence
  Synthetic oligonucleotide
cctcaccacacaacgttgcgagtgcttaag

SEQ ID NO: 69006 - DNA, 30 bp, Artificial Sequence
  Synthetic oligonucleotide
atcgtccacaatcggtacctattcgttaag

SEQ ID NO: 69007 - DNA, 30 bp, Artificial Sequence
  Synthetic oligonucleotide
gggtcgaaccttggcggtacgatggttaag

SEQ ID NO: 69008 - DNA, 30 bp, Artificial Sequence
  Synthetic oligonucleotide
cttgaggaagtcaaaacagttggatttaag

SEQ ID NO: 69009 - DNA, 30 bp, Artificial Sequence
  Synthetic oligonucleotide
tagatacgttaaaactctaacacgaaacag

SEQ ID NO: 69010 - DNA, 30 bp, Artificial Sequence
  Synthetic oligonucleotide
cggtactcgtcccatgaaaaaccccaacag

SEQ ID NO: 69011 - DNA, 30 bp, Artificial Sequence
  Synthetic oligonucleotide
accgacgtgttcgggcttaccgtccaacag

SEQ ID NO: 69012 - DNA, 30 bp, Artificial Sequence
  Synthetic oligonucleotide
catgcaagggtatatcaagtgcatcaacag

SEQ ID NO: 69013 - DNA, 30 bp, Artificial Sequence
  Synthetic oligonucleotide
cgatgaagtgtatttaattttacagaacag

SEQ ID NO: 69014 - DNA, 30 bp, Artificial Sequence
  Synthetic oligonucleotide
gcgcacgggattgattgaaaacacgaacag

SEQ ID NO: 69015 - DNA, 30 bp, Artificial Sequence
  Synthetic oligonucleotide
ttgagcagcatcacaacagccaactaacag

SEQ ID NO: 69016 - DNA, 30 bp, Artificial Sequence
  Synthetic oligonucleotide
cggtatttgaaagtggctacacgctaacag

SEQ ID NO: 69017 - DNA, 30 bp, Artificial Sequence
  Synthetic oligonucleotide
agatctactccgcagaaggcatgttaacag

SEQ ID NO: 69018 - DNA, 30 bp, Artificial Sequence
  Synthetic oligonucleotide
tagcttcccgcgacatctacgatttaacag

SEQ ID NO: 69019 - DNA, 30 bp, Artificial Sequence
  Synthetic oligonucleotide
tctaaggcataggcctgatccgacacacag

SEQ ID NO: 69020 - DNA, 30 bp, Artificial Sequence
  Synthetic oligonucleotide
acgaccgtagatgtgaggcaatggacacag

SEQ ID NO: 69021 - DNA, 30 bp, Artificial Sequence
  Synthetic oligonucleotide
atggagaccaccgcgaaatttttaccacag

SEQ ID NO: 69022 - DNA, 30 bp, Artificial Sequence
  Synthetic oligonucleotide
actcaagcgcccaggcattagagagcacag

SEQ ID NO: 69023 - DNA, 30 bp, Artificial Sequence
  Synthetic oligonucleotide
ggtcgggcgttcactacaatctcggcacag

SEQ ID NO: 69024 - DNA, 30 bp, Artificial Sequence
  Synthetic oligonucleotide
tctttaacggcctcaccgcgaatggcacag

SEQ ID NO: 69025 - DNA, 30 bp, Artificial Sequence
  Synthetic oligonucleotide
cacgctgaagacatctaccttatatcacag

SEQ ID NO: 69026 - DNA, 30 bp, Artificial Sequence
  Synthetic oligonucleotide
atgggttccaatgcaccacaggcaagacag

SEQ ID NO: 69027 - DNA, 30 bp, Artificial Sequence
  Synthetic oligonucleotide
tggggacttccgcgaacatcagtcagacag

SEQ ID NO: 69028 - DNA, 30 bp, Artificial Sequence
  Synthetic oligonucleotide
cctagtatactaccatatcattaacgacag

SEQ ID NO: 69029 - DNA, 30 bp, Artificial Sequence
  Synthetic oligonucleotide
accaggcagggtgcgcaagggttcggacag

SEQ ID NO: 69030 - DNA, 30 bp, Artificial Sequence
  Synthetic oligonucleotide
tgcgtcgcttgcaggcacatagatggacag

SEQ ID NO: 69031 - DNA, 30 bp, Artificial Sequence
  Synthetic oligonucleotide
ccattacgtacagaatatgcgttgtgacag

SEQ ID NO: 69032 - DNA, 30 bp, Artificial Sequence
  Synthetic oligonucleotide
tgaataggaagagatatggctctttgacag

SEQ ID NO: 69033 - DNA, 30 bp, Artificial Sequence
  Synthetic oligonucleotide
catgccgtccagtcgcgtccgggcatacag

SEQ ID NO: 69034 - DNA, 30 bp, Artificial Sequence
  Synthetic oligonucleotide
atcaacgtggttcatgttagcatgctacag

SEQ ID NO: 69035 - DNA, 30 bp, Artificial Sequence
  Synthetic oligonucleotide
gcacacgagcggctgagggtgaatctacag

SEQ ID NO: 69036 - DNA, 30 bp, Artificial Sequence
  Synthetic oligonucleotide
gatattacgagccgaatggaacttctacag

SEQ ID NO: 69037 - DNA, 30 bp, Artificial Sequence
  Synthetic oligonucleotide
gttttgaacagcgtaggaggggaggtacag

SEQ ID NO: 69038 - DNA, 30 bp, Artificial Sequence
  Synthetic oligonucleotide
attacgggatgagtcggtgcgcgattacag

SEQ ID NO: 69039 - DNA, 30 bp, Artificial Sequence
  Synthetic oligonucleotide
aaaaggtgacaacagttcatcgtcttacag

SEQ ID NO: 69040 - DNA, 30 bp, Artificial Sequence
  Synthetic oligonucleotide
taggtgggtgactcatctatagtgttacag

SEQ ID NO: 69041 - DNA, 30 bp, Artificial Sequence
  Synthetic oligonucleotide
aggtcacggaccctgcgctctcatttacag

SEQ ID NO: 69042 - DNA, 30 bp, Artificial Sequence
  Synthetic oligonucleotide
cagctatgacttgacctataccagaaccag

SEQ ID NO: 69043 - DNA, 30 bp, Artificial Sequence
  Synthetic oligonucleotide
agatccacgaatgaactcacgcgtaaccag

SEQ ID NO: 69044 - DNA, 29 bp, Artificial Sequence
  Synthetic oligonucleotide
tagacgatccataagcaagacgacaccag

SEQ ID NO: 69045 - DNA, 30 bp, Artificial Sequence
  Synthetic oligonucleotide
gaaaacgtccagaggtggacctaggaccag

SEQ ID NO: 69046 - DNA, 30 bp, Artificial Sequence
  Synthetic oligonucleotide
ggaaggcaatctccagacaccaaataccag

SEQ ID NO: 69047 - DNA, 30 bp, Artificial Sequence
  Synthetic oligonucleotide
gactaaactagttaggctcgggcataccag

SEQ ID NO: 69048 - DNA, 30 bp, Artificial Sequence
  Synthetic oligonucleotide
tcatgaccattccggccaggagagtaccag

SEQ ID NO: 69049 - DNA, 30 bp, Artificial Sequence
  Synthetic oligonucleotide
ggtgagcggggggctcgccacgagtaccag

SEQ ID NO: 69050 - DNA, 30 bp, Artificial Sequence
  Synthetic oligonucleotide
acccgtattgcatgccggaataggtaccag

SEQ ID NO: 69051 - DNA, 30 bp, Artificial Sequence
  Synthetic oligonucleotide
tatgtaaggaaagggtcaagtgggtaccag

SEQ ID NO: 69052 - DNA, 30 bp, Artificial Sequence
  Synthetic oligonucleotide
ctgggtggtcgagcttaacgaaaaacccag

SEQ ID NO: 69053 - DNA, 30 bp, Artificial Sequence
  Synthetic oligonucleotide
tcactctcaagtcatcaatgctacccccag

SEQ ID NO: 69054 - DNA, 30 bp, Artificial Sequence
  Synthetic oligonucleotide
cagggcccgcgaacaaggaactatccccag

SEQ ID NO: 69055 - DNA, 30 bp, Artificial Sequence
  Synthetic oligonucleotide
tacggtaaagtgtaatacacctttgcccag

SEQ ID NO: 69056 - DNA, 30 bp, Artificial Sequence
  Synthetic oligonucleotide
gcgagcacctcagtcggctcctgttcccag

SEQ ID NO: 69057 - DNA, 30 bp, Artificial Sequence
  Synthetic oligonucleotide
acgaggctaggaccctgctggtgcggccag

SEQ ID NO: 69058 - DNA, 30 bp, Artificial Sequence
  Synthetic oligonucleotide
gtattggaccgctagtgaagccgatgccag

SEQ ID NO: 69059 - DNA, 30 bp, Artificial Sequence
  Synthetic oligonucleotide
tggcacagcatgttcagagcagagtgccag

SEQ ID NO: 69060 - DNA, 30 bp, Artificial Sequence
  Synthetic oligonucleotide
cctagctaacgaggtgtgcggggaatccag

SEQ ID NO: 69061 - DNA, 30 bp, Artificial Sequence
  Synthetic oligonucleotide
gaactctgcaattactgttgaatcatccag

SEQ ID NO: 69062 - DNA, 30 bp, Artificial Sequence
  Synthetic oligonucleotide
gtatgggtacctctaaggcgaacaaagcag

SEQ ID NO: 69063 - DNA, 30 bp, Artificial Sequence
  Synthetic oligonucleotide
cagggccggcataggtgaagattcaagcag

SEQ ID NO: 69064 - DNA, 30 bp, Artificial Sequence
  Synthetic oligonucleotide
gatgatagaaacccgggaacagataagcag

SEQ ID NO: 69065 - DNA, 30 bp, Artificial Sequence
  Synthetic oligonucleotide
tatgccgcgtcgaagaataggcaacagcag

SEQ ID NO: 69066 - DNA, 30 bp, Artificial Sequence
  Synthetic oligonucleotide
acggttaatatcgggttgagagaacagcag

SEQ ID NO: 69067 - DNA, 30 bp, Artificial Sequence
  Synthetic oligonucleotide
attgaacgatgagagaacggaacacagcag

SEQ ID NO: 69068 - DNA, 30 bp, Artificial Sequence
  Synthetic oligonucleotide
cctccgtgtaaccgaccccgccaatagcag

SEQ ID NO: 69069 - DNA, 30 bp, Artificial Sequence
  Synthetic oligonucleotide
gatcatatacaaaatagatcgaacacgcag

SEQ ID NO: 69070 - DNA, 30 bp, Artificial Sequence
  Synthetic oligonucleotide
acgttacgaacgttttgcggatacccgcag

SEQ ID NO: 69071 - DNA, 30 bp, Artificial Sequence
  Synthetic oligonucleotide
tcaataagcaaaatgtacggttggccgcag

SEQ ID NO: 69072 - DNA, 30 bp, Artificial Sequence
  Synthetic oligonucleotide
gagcattgctcgaggggggtacgggcgcag

SEQ ID NO: 69073 - DNA, 30 bp, Artificial Sequence
  Synthetic oligonucleotide
ttccggcaaaattgatatagacaatcgcag

SEQ ID NO: 69074 - DNA, 30 bp, Artificial Sequence
  Synthetic oligonucleotide
cccaacgtgaggcgatcattaacgtcgcag

SEQ ID NO: 69075 - DNA, 30 bp, Artificial Sequence
  Synthetic oligonucleotide
caacggagacggatgttcctccaaaggcag

SEQ ID NO: 69076 - DNA, 30 bp, Artificial Sequence
  Synthetic oligonucleotide
tgtgccgtcataggttagcttgtaaggcag

SEQ ID NO: 69077 - DNA, 30 bp, Artificial Sequence
  Synthetic oligonucleotide
cgagcgagtgtaactggcccctagaggcag

SEQ ID NO: 69078 - DNA, 30 bp, Artificial Sequence
  Synthetic oligonucleotide
agctgtaccacgaacgcgtcagggcggcag

SEQ ID NO: 69079 - DNA, 30 bp, Artificial Sequence
  Synthetic oligonucleotide
ggcaaccgcacacaagaggtagatcggcag

SEQ ID NO: 69080 - DNA, 30 bp, Artificial Sequence
  Synthetic oligonucleotide
gaaagaggtgcgatatcttgccctcggcag

SEQ ID NO: 69081 - DNA, 30 bp, Artificial Sequence
  Synthetic oligonucleotide
gacggtctaactcgacatgagttcgggcag

SEQ ID NO: 69082 - DNA, 30 bp, Artificial Sequence
  Synthetic oligonucleotide
ccatagaaaacctgtgtatacgcggggcag

SEQ ID NO: 69083 - DNA, 30 bp, Artificial Sequence
  Synthetic oligonucleotide
aatagtatctaaacatgcaaatgtgggcag

SEQ ID NO: 69084 - DNA, 30 bp, Artificial Sequence
  Synthetic oligonucleotide
gtaatagcgggcgggctaatgtagtggcag

SEQ ID NO: 69085 - DNA, 30 bp, Artificial Sequence
  Synthetic oligonucleotide
ctgagcgtgggttgattataggcttggcag

SEQ ID NO: 69086 - DNA, 30 bp, Artificial Sequence
  Synthetic oligonucleotide
tatccgaatcgtcgtcaataaatttggcag

SEQ ID NO: 69087 - DNA, 30 bp, Artificial Sequence
  Synthetic oligonucleotide
tggaggcgttaaggaacctaagggatgcag

SEQ ID NO: 69088 - DNA, 30 bp, Artificial Sequence
  Synthetic oligonucleotide
gtaagaatgtctggctgggaaagtatgcag

SEQ ID NO: 69089 - DNA, 30 bp, Artificial Sequence
  Synthetic oligonucleotide
ttaattcgtctagtgcgaaggagtatgcag

SEQ ID NO: 69090 - DNA, 30 bp, Artificial Sequence
  Synthetic oligonucleotide
agatagatgcgatccagtattaaactgcag

SEQ ID NO: 69091 - DNA, 30 bp, Artificial Sequence
  Synthetic oligonucleotide
tagagaaaactgcatatgcgggccgtgcag

SEQ ID NO: 69092 - DNA, 30 bp, Artificial Sequence
  Synthetic oligonucleotide
cctgtgtgacacactaggggtagcaatcag

SEQ ID NO: 69093 - DNA, 30 bp, Artificial Sequence
  Synthetic oligonucleotide
agaacgcgtcgctttaggtagcagaatcag

SEQ ID NO: 69094 - DNA, 30 bp, Artificial Sequence
  Synthetic oligonucleotide
tcaacctcccgcgggctgcgtagacatcag

SEQ ID NO: 69095 - DNA, 30 bp, Artificial Sequence
  Synthetic oligonucleotide
ctaatgcgctagggtggctcgagagatcag

SEQ ID NO: 69096 - DNA, 30 bp, Artificial Sequence
  Synthetic oligonucleotide
gtgtcgaaagtatattcaacggctgatcag

SEQ ID NO: 69097 - DNA, 30 bp, Artificial Sequence
  Synthetic oligonucleotide
tacgtaagagcgactatgttgcttgatcag

SEQ ID NO: 69098 - DNA, 30 bp, Artificial Sequence
  Synthetic oligonucleotide
cgggtctgttaaaagactactggctatcag

SEQ ID NO: 69099 - DNA, 30 bp, Artificial Sequence
  Synthetic oligonucleotide
gcttgtgaatgtcaaccctgcaggtatcag

SEQ ID NO: 69100 - DNA, 30 bp, Artificial Sequence
  Synthetic oligonucleotide
tgacttactggggaccgggtgtcttatcag

SEQ ID NO: 69101 - DNA, 30 bp, Artificial Sequence
  Synthetic oligonucleotide
cgtccacattaaaatctaacctcaactcag

SEQ ID NO: 69102 - DNA, 30 bp, Artificial Sequence
  Synthetic oligonucleotide
cgatttttggcccagagaatgactactcag

SEQ ID NO: 69103 - DNA, 30 bp, Artificial Sequence
  Synthetic oligonucleotide
agcattgcggttggacttagaacacctcag

SEQ ID NO: 69104 - DNA, 30 bp, Artificial Sequence
  Synthetic oligonucleotide
cagagtctttgatttagtcgagtgcctcag

SEQ ID NO: 69105 - DNA, 30 bp, Artificial Sequence
  Synthetic oligonucleotide
acgtggaaagtacgtcctgctgatcctcag

SEQ ID NO: 69106 - DNA, 30 bp, Artificial Sequence
  Synthetic oligonucleotide
cgaagcgaaacacgcttgcatgaagctcag

SEQ ID NO: 69107 - DNA, 30 bp, Artificial Sequence
  Synthetic oligonucleotide
cggcctgcaaagagctagcgtacagctcag

SEQ ID NO: 69108 - DNA, 30 bp, Artificial Sequence
  Synthetic oligonucleotide
ccctccaatgaacgtgcttaagcagctcag

SEQ ID NO: 69109 - DNA, 30 bp, Artificial Sequence
  Synthetic oligonucleotide
gtcggatgcataagctagtcagcagctcag

SEQ ID NO: 69110 - DNA, 30 bp, Artificial Sequence
  Synthetic oligonucleotide
cagtcggcaacaggagataaatcgtctcag

SEQ ID NO: 69111 - DNA, 30 bp, Artificial Sequence
  Synthetic oligonucleotide
tgataggtaaacaccgccacataaagtcag

SEQ ID NO: 69112 - DNA, 31 bp, Artificial Sequence
  Synthetic oligonucleotide
ccctaaggcgtatattgcgaaacgtagtcag

SEQ ID NO: 69113 - DNA, 30 bp, Artificial Sequence
  Synthetic oligonucleotide
cggagagggttgtaagctccttgacgtcag

SEQ ID NO: 69114 - DNA, 30 bp, Artificial Sequence
  Synthetic oligonucleotide
agaatcagtctcaggtgcactatacgtcag

SEQ ID NO: 69115 - DNA, 30 bp, Artificial Sequence
  Synthetic oligonucleotide
taccggtgcatcgtttcgtgtgcgcgtcag

SEQ ID NO: 69116 - DNA, 30 bp, Artificial Sequence
  Synthetic oligonucleotide
agcaagaacgcgggcttgatgtaaggtcag

SEQ ID NO: 69117 - DNA, 30 bp, Artificial Sequence
  Synthetic oligonucleotide
tcggggctccaaggaagaaagacgggtcag

SEQ ID NO: 69118 - DNA, 30 bp, Artificial Sequence
  Synthetic oligonucleotide
ctccaaatgaggatggatagcttgggtcag

SEQ ID NO: 69119 - DNA, 30 bp, Artificial Sequence
  Synthetic oligonucleotide
ccagtggtcaagtgctaacgagatggtcag

SEQ ID NO: 69120 - DNA, 30 bp, Artificial Sequence
  Synthetic oligonucleotide
acacatcgccagaactccttacgatgtcag

SEQ ID NO: 69121 - DNA, 31 bp, Artificial Sequence
  Synthetic oligonucleotide
caaagagtaacataagggatcaggatgtcag

SEQ ID NO: 69122 - DNA, 30 bp, Artificial Sequence
  Synthetic oligonucleotide
atcagaacactcacagcccgtcactgtcag

SEQ ID NO: 69123 - DNA, 30 bp, Artificial Sequence
  Synthetic oligonucleotide
tgtggtctgcttagggagagaccgtgtcag

SEQ ID NO: 69124 - DNA, 30 bp, Artificial Sequence
  Synthetic oligonucleotide
actatagaaggttaacttaacggttgtcag

SEQ ID NO: 69125 - DNA, 30 bp, Artificial Sequence
  Synthetic oligonucleotide
tcggttggcaaacattaggttctgattcag

SEQ ID NO: 69126 - DNA, 30 bp, Artificial Sequence
  Synthetic oligonucleotide
cataagggatggccatctggcggagttcag

SEQ ID NO: 69127 - DNA, 30 bp, Artificial Sequence
  Synthetic oligonucleotide
ggaagcttgagggtcaaagcaacatttcag

SEQ ID NO: 69128 - DNA, 30 bp, Artificial Sequence
  Synthetic oligonucleotide
tctatagcgaggtatacattcggaaaagag

SEQ ID NO: 69129 - DNA, 30 bp, Artificial Sequence
  Synthetic oligonucleotide
agtgaacttctcagggcaaggtccaaagag

SEQ ID NO: 69130 - DNA, 30 bp, Artificial Sequence
  Synthetic oligonucleotide
aggtaatcgttcaggtagtcttcgaaagag

SEQ ID NO: 69131 - DNA, 30 bp, Artificial Sequence
  Synthetic oligonucleotide
tcctccgtgatcggcatgtccttacaagag

SEQ ID NO: 69132 - DNA, 30 bp, Artificial Sequence
  Synthetic oligonucleotide
ttgcgggacactttgataccaccgcaagag

SEQ ID NO: 69133 - DNA, 30 bp, Artificial Sequence
  Synthetic oligonucleotide
cactgcttccggttcaatagcactcaagag

SEQ ID NO: 69134 - DNA, 30 bp, Artificial Sequence
  Synthetic oligonucleotide
taaaacggatttttaatgtcgactcaagag

SEQ ID NO: 69135 - DNA, 30 bp, Artificial Sequence
  Synthetic oligonucleotide
gtcacgtgtccaacgctaaaatttcaagag

SEQ ID NO: 69136 - DNA, 30 bp, Artificial Sequence
  Synthetic oligonucleotide
ggcgcaagaatggattacatgtaagaagag

SEQ ID NO: 69137 - DNA, 30 bp, Artificial Sequence
  Synthetic oligonucleotide
tggcctaatactttttagtatcgcgaagag

SEQ ID NO: 69138 - DNA, 30 bp, Artificial Sequence
  Synthetic oligonucleotide
agatccagaacgtaaaataaactcgaagag

SEQ ID NO: 69139 - DNA, 30 bp, Artificial Sequence
  Synthetic oligonucleotide
gcctcactcgtagaatatcacgtcgaagag

SEQ ID NO: 69140 - DNA, 30 bp, Artificial Sequence
  Synthetic oligonucleotide
tgcatttctgagaaagacagccgggaagag

SEQ ID NO: 69141 - DNA, 30 bp, Artificial Sequence
  Synthetic oligonucleotide
accaatattggcatgcacgagggaacagag

SEQ ID NO: 69142 - DNA, 30 bp, Artificial Sequence
  Synthetic oligonucleotide
acgtgagcccacaaagactttgaagcagag

SEQ ID NO: 69143 - DNA, 30 bp, Artificial Sequence
  Synthetic oligonucleotide
ggtgagactagaaagaaccccacagcagag

SEQ ID NO: 69144 - DNA, 30 bp, Artificial Sequence
  Synthetic oligonucleotide
gtgtaggtgctggcagatgaactatcagag

SEQ ID NO: 69145 - DNA, 30 bp, Artificial Sequence
  Synthetic oligonucleotide
ctccaaagtcggcaaacaagataaagagag

SEQ ID NO: 69146 - DNA, 30 bp, Artificial Sequence
  Synthetic oligonucleotide
tgacgagaatcgttattggcttacggagag

SEQ ID NO: 69147 - DNA, 30 bp, Artificial Sequence
  Synthetic oligonucleotide
cgtgcctggagccgggtaccatccggagag

SEQ ID NO: 69148 - DNA, 30 bp, Artificial Sequence
  Synthetic oligonucleotide
gggtcgagcagcgaagaccgcgatggagag

SEQ ID NO: 69149 - DNA, 30 bp, Artificial Sequence
  Synthetic oligonucleotide
gtacatccgaaagtgcaaggtcttggagag

SEQ ID NO: 69150 - DNA, 30 bp, Artificial Sequence
  Synthetic oligonucleotide
gacagcgccgtattgtacctttgctgagag

SEQ ID NO: 69151 - DNA, 30 bp, Artificial Sequence
  Synthetic oligonucleotide
ggtggtccaaaagcacgaaactgcatagag

SEQ ID NO: 69152 - DNA, 30 bp, Artificial Sequence
  Synthetic oligonucleotide
gttcaaacacgcgtccatcgctggatagag

SEQ ID NO: 69153 - DNA, 30 bp, Artificial Sequence
  Synthetic oligonucleotide
tttgaagtccacttacaaaaatcactagag

SEQ ID NO: 69154 - DNA, 30 bp, Artificial Sequence
  Synthetic oligonucleotide
gggcagtccagaatatgacaccggctagag

SEQ ID NO: 69155 - DNA, 30 bp, Artificial Sequence
  Synthetic oligonucleotide
ttcgtcgctgagaaattatccggtctagag

SEQ ID NO: 69156 - DNA, 30 bp, Artificial Sequence
  Synthetic oligonucleotide
gggagtcatggtcactggcttacagtagag

SEQ ID NO: 69157 - DNA, 30 bp, Artificial Sequence
  Synthetic oligonucleotide
ccttgtatcttatcgctcaagagagtagag

SEQ ID NO: 69158 - DNA, 30 bp, Artificial Sequence
  Synthetic oligonucleotide
ccacgggacattcgtactaaacgagtagag

SEQ ID NO: 69159 - DNA, 30 bp, Artificial Sequence
  Synthetic oligonucleotide
cggatccaaaaacagtgggcaatagtagag

SEQ ID NO: 69160 - DNA, 30 bp, Artificial Sequence
  Synthetic oligonucleotide
ggtgggaggtgtggttatcttcgtgtagag

SEQ ID NO: 69161 - DNA, 30 bp, Artificial Sequence
  Synthetic oligonucleotide
caactaccatcagcggttcccgcattagag

SEQ ID NO: 69162 - DNA, 30 bp, Artificial Sequence
  Synthetic oligonucleotide
agtagaagagagtaattcaaaaagttagag

SEQ ID NO: 69163 - DNA, 30 bp, Artificial Sequence
  Synthetic oligonucleotide
gtatctgggaccagacctgtatcgttagag

SEQ ID NO: 69164 - DNA, 30 bp, Artificial Sequence
  Synthetic oligonucleotide
atagaaagcaagagcgagactccgcacgag

SEQ ID NO: 69165 - DNA, 30 bp, Artificial Sequence
  Synthetic oligonucleotide
tcattagggtctaatacgcggctagacgag

SEQ ID NO: 69166 - DNA, 30 bp, Artificial Sequence
  Synthetic oligonucleotide
aacgtggcgtttgcggaactgtaggacgag

SEQ ID NO: 69167 - DNA, 30 bp, Artificial Sequence
  Synthetic oligonucleotide
aggcccatcatgttgaatctgtgggacgag

SEQ ID NO: 69168 - DNA, 30 bp, Artificial Sequence
  Synthetic oligonucleotide
cgtaataaggacacgaagcaagttgacgag

SEQ ID NO: 69169 - DNA, 30 bp, Artificial Sequence
  Synthetic oligonucleotide
gcaagaaacttcgatagatttccatacgag

SEQ ID NO: 69170 - DNA, 30 bp, Artificial Sequence
  Synthetic oligonucleotide
cgttgtggggaaccccgccaacgatacgag

SEQ ID NO: 69171 - DNA, 30 bp, Artificial Sequence
  Synthetic oligonucleotide
gtaaccaaaaggcaggtaccgttctacgag

SEQ ID NO: 69172 - DNA, 30 bp, Artificial Sequence
  Synthetic oligonucleotide
actcgtcatggcggctattgagcttacgag

SEQ ID NO: 69173 - DNA, 30 bp, Artificial Sequence
  Synthetic oligonucleotide
tgaatacagggccgggggaagtcttacgag

SEQ ID NO: 69174 - DNA, 30 bp, Artificial Sequence
  Synthetic oligonucleotide
caaaagcagtctgaggtgagtcagaccgag

SEQ ID NO: 69175 - DNA, 30 bp, Artificial Sequence
  Synthetic oligonucleotide
agccccagggagtcacactcttggaccgag

SEQ ID NO: 69176 - DNA, 30 bp, Artificial Sequence
  Synthetic oligonucleotide
acccaactctaagtaactggatataccgag

SEQ ID NO: 69177 - DNA, 30 bp, Artificial Sequence
  Synthetic oligonucleotide
aggacaccgcgaacaaattgtaatcccgag

SEQ ID NO: 69178 - DNA, 30 bp, Artificial Sequence
  Synthetic oligonucleotide
ttagtgaggaagggggtcttcatctccgag

SEQ ID NO: 69179 - DNA, 30 bp, Artificial Sequence
  Synthetic oligonucleotide
aagtaagtgtcaggggttggaccacgcgag

SEQ ID NO: 69180 - DNA, 30 bp, Artificial Sequence
  Synthetic oligonucleotide
aaaacggaggacatgtcgactattcgcgag

SEQ ID NO: 69181 - DNA, 30 bp, Artificial Sequence
  Synthetic oligonucleotide
caactagcttgcgtgtgcaagcaatgcgag

SEQ ID NO: 69182 - DNA, 30 bp, Artificial Sequence
  Synthetic oligonucleotide
ttattggaggaacaaatcattcagtgcgag

SEQ ID NO: 69183 - DNA, 30 bp, Artificial Sequence
  Synthetic oligonucleotide
atcgggtatcgagggtcattttagtgcgag

SEQ ID NO: 69184 - DNA, 30 bp, Artificial Sequence
  Synthetic oligonucleotide
tggtgggtcccaatagataactattgcgag

SEQ ID NO: 69185 - DNA, 30 bp, Artificial Sequence
  Synthetic oligonucleotide
gcgcggcaacgcaagccaaacatgctcgag

SEQ ID NO: 69186 - DNA, 30 bp, Artificial Sequence
  Synthetic oligonucleotide
acaggtagtttccccgggccacccgtcgag

SEQ ID NO: 69187 - DNA, 30 bp, Artificial Sequence
  Synthetic oligonucleotide
cttggtatattctctgtcatgttcgtcgag

SEQ ID NO: 69188 - DNA, 30 bp, Artificial Sequence
  Synthetic oligonucleotide
cggttcttaaagcaaagctcatatgtcgag

SEQ ID NO: 69189 - DNA, 30 bp, Artificial Sequence
  Synthetic oligonucleotide
gcaaggaacgtattgtgttggagaaaggag

SEQ ID NO: 69190 - DNA, 30 bp, Artificial Sequence
  Synthetic oligonucleotide
cacacggttattcgcaagactctaaaggag

SEQ ID NO: 69191 - DNA, 30 bp, Artificial Sequence
  Synthetic oligonucleotide
cttctcttaaagcgcgctaggggcaaggag

SEQ ID NO: 69192 - DNA, 30 bp, Artificial Sequence
  Synthetic oligonucleotide
ttaggatggtctagtttcgcggttaaggag

SEQ ID NO: 69193 - DNA, 30 bp, Artificial Sequence
  Synthetic oligonucleotide
ggccatcctccccccagctcaaaacaggag

SEQ ID NO: 69194 - DNA, 30 bp, Artificial Sequence
  Synthetic oligonucleotide
tgtgtgcggagaccgccggctcaccaggag

SEQ ID NO: 69195 - DNA, 30 bp, Artificial Sequence
  Synthetic oligonucleotide
gcgtatgtaaacgggcctatgcttcaggag

SEQ ID NO: 69196 - DNA, 30 bp, Artificial Sequence
  Synthetic oligonucleotide
tgcatagacattaaatagttgcacgaggag

SEQ ID NO: 69197 - DNA, 30 bp, Artificial Sequence
  Synthetic oligonucleotide
gttaccagctgagaactcggccgctaggag

SEQ ID NO: 69198 - DNA, 30 bp, Artificial Sequence
  Synthetic oligonucleotide
tgcgacagccgtagctccatatgttaggag

SEQ ID NO: 69199 - DNA, 30 bp, Artificial Sequence
  Synthetic oligonucleotide
actgatctgtgtgtagctgagtgttaggag

SEQ ID NO: 69200 - DNA, 30 bp, Artificial Sequence
  Synthetic oligonucleotide
tggcaatccagcttatagtccgacacggag

SEQ ID NO: 69201 - DNA, 30 bp, Artificial Sequence
  Synthetic oligonucleotide
cgagagggtcaaaccacagcacttacggag

SEQ ID NO: 69202 - DNA, 30 bp, Artificial Sequence
  Synthetic oligonucleotide
ttcgaaagatgggtaatggcgagcccggag

SEQ ID NO: 69203 - DNA, 30 bp, Artificial Sequence
  Synthetic oligonucleotide
cacaactgtgtcggggaacataacgcggag

SEQ ID NO: 69204 - DNA, 30 bp, Artificial Sequence
  Synthetic oligonucleotide
tgagtagcggaccgtcagaaagacgcggag

SEQ ID NO: 69205 - DNA, 30 bp, Artificial Sequence
  Synthetic oligonucleotide
tcagacaactgataactgtagatcgcggag

SEQ ID NO: 69206 - DNA, 30 bp, Artificial Sequence
  Synthetic oligonucleotide
agaaaaactgatctgaaggacaaggcggag

SEQ ID NO: 69207 - DNA, 30 bp, Artificial Sequence
  Synthetic oligonucleotide
tgacgtcagtgccagctgtcgccctcggag

SEQ ID NO: 69208 - DNA, 30 bp, Artificial Sequence
  Synthetic oligonucleotide
gtcaggccatcgtaatgtaatcgctcggag

SEQ ID NO: 69209 - DNA, 30 bp, Artificial Sequence
  Synthetic oligonucleotide
tacttccggccaccgataaatacaagggag

SEQ ID NO: 69210 - DNA, 30 bp, Artificial Sequence
  Synthetic oligonucleotide
gtatgaggtccatgaggctgcgagagggag

SEQ ID NO: 69211 - DNA, 30 bp, Artificial Sequence
  Synthetic oligonucleotide
ggagtaggaagaatagatatgatgagggag

SEQ ID NO: 69212 - DNA, 30 bp, Artificial Sequence
  Synthetic oligonucleotide
tgtagtgcggaaagcacccacgtgagggag

SEQ ID NO: 69213 - DNA, 30 bp, Artificial Sequence
  Synthetic oligonucleotide
aggccaaattcctattagtgaggtagggag

SEQ ID NO: 69214 - DNA, 30 bp, Artificial Sequence
  Synthetic oligonucleotide
ctggtattggattacgtgtccgaacgggag

SEQ ID NO: 69215 - DNA, 30 bp, Artificial Sequence
  Synthetic oligonucleotide
ttcagatgtcgggtgacgtcccggggggag

SEQ ID NO: 69216 - DNA, 30 bp, Artificial Sequence
  Synthetic oligonucleotide
cgagcggggttttaggaccgtcggggggag

SEQ ID NO: 69217 - DNA, 30 bp, Artificial Sequence
  Synthetic oligonucleotide
ccgcaaaatcaaggtgtaattcctggggag

SEQ ID NO: 69218 - DNA, 30 bp, Artificial Sequence
  Synthetic oligonucleotide
tcggacacttcggggaatcgagctggggag

SEQ ID NO: 69219 - DNA, 30 bp, Artificial Sequence
  Synthetic oligonucleotide
gtgacgacgagtgcatccggacgtggggag

SEQ ID NO: 69220 - DNA, 30 bp, Artificial Sequence
  Synthetic oligonucleotide
ctagctagaaaggcatcttcgttagtggag

SEQ ID NO: 69221 - DNA, 30 bp, Artificial Sequence
  Synthetic oligonucleotide
gcgtacggtgtggtatggtgaatcgtggag

SEQ ID NO: 69222 - DNA, 30 bp, Artificial Sequence
  Synthetic oligonucleotide
gaaatacattacgattcagctcgggtggag

SEQ ID NO: 69223 - DNA, 30 bp, Artificial Sequence
  Synthetic oligonucleotide
tccggtaaagttgccactgttaccttggag

SEQ ID NO: 69224 - DNA, 30 bp, Artificial Sequence
  Synthetic oligonucleotide
gacagacttgcgatcacatcaagcaatgag

SEQ ID NO: 69225 - DNA, 30 bp, Artificial Sequence
  Synthetic oligonucleotide
aaaggcatgatagctctcagccgcaatgag

SEQ ID NO: 69226 - DNA, 30 bp, Artificial Sequence
  Synthetic oligonucleotide
gagccccgtccgattgatagttgcaatgag

SEQ ID NO: 69227 - DNA, 30 bp, Artificial Sequence
  Synthetic oligonucleotide
gatcgaaaaatgaactcggccctcaatgag

SEQ ID NO: 69228 - DNA, 30 bp, Artificial Sequence
  Synthetic oligonucleotide
accagggcaagggtgagactgtctaatgag

SEQ ID NO: 69229 - DNA, 30 bp, Artificial Sequence
  Synthetic oligonucleotide
cttcccgtccgaggaatggttagtaatgag

SEQ ID NO: 69230 - DNA, 30 bp, Artificial Sequence
  Synthetic oligonucleotide
ttgttgataaccgccgaatttggccatgag

SEQ ID NO: 69231 - DNA, 30 bp, Artificial Sequence
  Synthetic oligonucleotide
gcaggatggacctcatcttcacgtcatgag

SEQ ID NO: 69232 - DNA, 30 bp, Artificial Sequence
  Synthetic oligonucleotide
atgaactaagggctgcgtagggaggatgag

SEQ ID NO: 69233 - DNA, 30 bp, Artificial Sequence
  Synthetic oligonucleotide
agttcgggtcgggcgaggtggagatatgag

SEQ ID NO: 69234 - DNA, 30 bp, Artificial Sequence
  Synthetic oligonucleotide
cccagtgagtgggagactggccgatatgag

SEQ ID NO: 69235 - DNA, 30 bp, Artificial Sequence
  Synthetic oligonucleotide
gtgtcgcgaaggtatcatcgtatatatgag

SEQ ID NO: 69236 - DNA, 30 bp, Artificial Sequence
  Synthetic oligonucleotide
gggcctgggtgtaggtggaatacctatgag

SEQ ID NO: 69237 - DNA, 30 bp, Artificial Sequence
  Synthetic oligonucleotide
acgcacataacaatagtatgtgcggctgag

SEQ ID NO: 69238 - DNA, 30 bp, Artificial Sequence
  Synthetic oligonucleotide
aggaccttctaccttcccactaggtctgag

SEQ ID NO: 69239 - DNA, 30 bp, Artificial Sequence
  Synthetic oligonucleotide
tgtacggatggaactacattagggtctgag

SEQ ID NO: 69240 - DNA, 30 bp, Artificial Sequence
  Synthetic oligonucleotide
ggcgtctgggattacttcggcctgtctgag

SEQ ID NO: 69241 - DNA, 30 bp, Artificial Sequence
  Synthetic oligonucleotide
ggagcgtaggaagaaccaaggcgcagtgag

SEQ ID NO: 69242 - DNA, 30 bp, Artificial Sequence
  Synthetic oligonucleotide
ctcgggattagtatcgttgtaggcagtgag

SEQ ID NO: 69243 - DNA, 30 bp, Artificial Sequence
  Synthetic oligonucleotide
gaaccctgaaagaacaacgccagtagtgag

SEQ ID NO: 69244 - DNA, 30 bp, Artificial Sequence
  Synthetic oligonucleotide
ataccaagtagccttcgttcgttgcgtgag

SEQ ID NO: 69245 - DNA, 30 bp, Artificial Sequence
  Synthetic oligonucleotide
gcgcaactttccgctatgagcgaaggtgag

SEQ ID NO: 69246 - DNA, 30 bp, Artificial Sequence
  Synthetic oligonucleotide
agacgtcattatacaaacgtgccaggtgag

SEQ ID NO: 69247 - DNA, 30 bp, Artificial Sequence
  Synthetic oligonucleotide
catgcacagtatcgaaggcagtccggtgag

SEQ ID NO: 69248 - DNA, 30 bp, Artificial Sequence
  Synthetic oligonucleotide
atcttactgttgagggtctaagggggtgag

SEQ ID NO: 69249 - DNA, 30 bp, Artificial Sequence
  Synthetic oligonucleotide
acgagtcatacgtcataacgttatggtgag

SEQ ID NO: 69250 - DNA, 30 bp, Artificial Sequence
  Synthetic oligonucleotide
ggtgaattttaaccgcggaacaggtgtgag

SEQ ID NO: 69251 - DNA, 30 bp, Artificial Sequence
  Synthetic oligonucleotide
ccgaaaaggcatgttgagaatacttgtgag

SEQ ID NO: 69252 - DNA, 30 bp, Artificial Sequence
  Synthetic oligonucleotide
agcaggatatgttgtttgggtagcattgag

SEQ ID NO: 69253 - DNA, 30 bp, Artificial Sequence
  Synthetic oligonucleotide
cagttattacagcccaaattgcgcattgag

SEQ ID NO: 69254 - DNA, 30 bp, Artificial Sequence
  Synthetic oligonucleotide
agcacagcactttcaacattgaagcttgag

SEQ ID NO: 69255 - DNA, 30 bp, Artificial Sequence
  Synthetic oligonucleotide
acgcaattagttgcgagcctggagcttgag

SEQ ID NO: 69256 - DNA, 30 bp, Artificial Sequence
  Synthetic oligonucleotide
tctcggcgttctcgcagggccatagttgag

SEQ ID NO: 69257 - DNA, 30 bp, Artificial Sequence
  Synthetic oligonucleotide
ccctaaactcgtcgatcatagaccgttgag

SEQ ID NO: 69258 - DNA, 30 bp, Artificial Sequence
  Synthetic oligonucleotide
cgtgaccgcatagttggcgtcactgttgag

SEQ ID NO: 69259 - DNA, 30 bp, Artificial Sequence
  Synthetic oligonucleotide
attcacgatatgggggcaattgctgttgag

SEQ ID NO: 69260 - DNA, 30 bp, Artificial Sequence
  Synthetic oligonucleotide
aacaagtggactgtcgattgaggaaaatag

SEQ ID NO: 69261 - DNA, 30 bp, Artificial Sequence
  Synthetic oligonucleotide
tcaggtgattgcgaccagaagaccaaatag

SEQ ID NO: 69262 - DNA, 30 bp, Artificial Sequence
  Synthetic oligonucleotide
ggtaaataattaggtacgatcggacaatag

SEQ ID NO: 69263 - DNA, 30 bp, Artificial Sequence
  Synthetic oligonucleotide
acaccagtctactaaaagcccactcaatag

SEQ ID NO: 69264 - DNA, 30 bp, Artificial Sequence
  Synthetic oligonucleotide
gattatcagcctgacggaaggggtcaatag

SEQ ID NO: 69265 - DNA, 30 bp, Artificial Sequence
  Synthetic oligonucleotide
gcatagtacggagttaaagatggagaatag

SEQ ID NO: 69266 - DNA, 30 bp, Artificial Sequence
  Synthetic oligonucleotide
caaagagaagtcccggtggtgcgtgaatag

SEQ ID NO: 69267 - DNA, 30 bp, Artificial Sequence
  Synthetic oligonucleotide
cgtgcttgtgttgcctcactcccataatag

SEQ ID NO: 69268 - DNA, 30 bp, Artificial Sequence
  Synthetic oligonucleotide
ggtggatcgtgaggatcaaaatggtaatag

SEQ ID NO: 69269 - DNA, 30 bp, Artificial Sequence
  Synthetic oligonucleotide
tgtggcaagacagggctgtaatattaatag

SEQ ID NO: 69270 - DNA, 30 bp, Artificial Sequence
  Synthetic oligonucleotide
aatgccggcggggaaaaattgggttaatag

SEQ ID NO: 69271 - DNA, 30 bp, Artificial Sequence
  Synthetic oligonucleotide
cgaggaatgaatacacagtcgcgaacatag

SEQ ID NO: 69272 - DNA, 30 bp, Artificial Sequence
  Synthetic oligonucleotide
ggtaagtcctcgttgtgatgccccacatag

SEQ ID NO: 69273 - DNA, 30 bp, Artificial Sequence
  Synthetic oligonucleotide
cacgtagttgtggcctaatatccgacatag

SEQ ID NO: 69274 - DNA, 30 bp, Artificial Sequence
  Synthetic oligonucleotide
acaggcaggttgtggccatggtgaccatag

SEQ ID NO: 69275 - DNA, 30 bp, Artificial Sequence
  Synthetic oligonucleotide
atgggagggtgctgcaagctgttcccatag

SEQ ID NO: 69276 - DNA, 30 bp, Artificial Sequence
  Synthetic oligonucleotide
gccccgaaacacagcaagacatggccatag

SEQ ID NO: 69277 - DNA, 30 bp, Artificial Sequence
  Synthetic oligonucleotide
ggaagatcgatgctctccaaaatgccatag

SEQ ID NO: 69278 - DNA, 30 bp, Artificial Sequence
  Synthetic oligonucleotide
acgctgtgggcagccaccacatacgcatag

SEQ ID NO: 69279 - DNA, 30 bp, Artificial Sequence
  Synthetic oligonucleotide
atgtacttcctgggactggtgttcgcatag

SEQ ID NO: 69280 - DNA, 30 bp, Artificial Sequence
  Synthetic oligonucleotide
cctacctcactctcgtatggaggggcatag

SEQ ID NO: 69281 - DNA, 30 bp, Artificial Sequence
  Synthetic oligonucleotide
cgaggggctagcctagcatagggatcatag

SEQ ID NO: 69282 - DNA, 30 bp, Artificial Sequence
  Synthetic oligonucleotide
tgggcaattctaaaccagtaggactcatag

SEQ ID NO: 69283 - DNA, 30 bp, Artificial Sequence
  Synthetic oligonucleotide
gagcctcgatacccggaaggttaaagatag

SEQ ID NO: 69284 - DNA, 30 bp, Artificial Sequence
  Synthetic oligonucleotide
gggcgcgcccgatgttcttgcgacagatag

SEQ ID NO: 69285 - DNA, 30 bp, Artificial Sequence
  Synthetic oligonucleotide
gctggtacagaaagcctaggctgtcgatag

SEQ ID NO: 69286 - DNA, 30 bp, Artificial Sequence
  Synthetic oligonucleotide
agcccgctaagccctagttagaaaggatag

SEQ ID NO: 69287 - DNA, 30 bp, Artificial Sequence
  Synthetic oligonucleotide
attcgttcagcccggacgtgatagggatag

SEQ ID NO: 69288 - DNA, 30 bp, Artificial Sequence
  Synthetic oligonucleotide
tctaatggagggcgcataactgactgatag

SEQ ID NO: 69289 - DNA, 30 bp, Artificial Sequence
  Synthetic oligonucleotide
cggtcggagggaaagccacgagagtgatag

SEQ ID NO: 69290 - DNA, 30 bp, Artificial Sequence
  Synthetic oligonucleotide
tacgaagtaagacaacgggcaccttgatag

SEQ ID NO: 69291 - DNA, 30 bp, Artificial Sequence
  Synthetic oligonucleotide
cggtattaagagactggacaataaatatag

SEQ ID NO: 69292 - DNA, 30 bp, Artificial Sequence
  Synthetic oligonucleotide
taagcgatgtcgatctatagtactgtatag

SEQ ID NO: 69293 - DNA, 30 bp, Artificial Sequence
  Synthetic oligonucleotide
aggcgatagttgctgtcagcttgtgtatag

SEQ ID NO: 69294 - DNA, 30 bp, Artificial Sequence
  Synthetic oligonucleotide
atacagggattgacatcctacaggttatag

SEQ ID NO: 69295 - DNA, 30 bp, Artificial Sequence
  Synthetic oligonucleotide
agacatcaaagccgacctgagcggttatag

SEQ ID NO: 69296 - DNA, 30 bp, Artificial Sequence
  Synthetic oligonucleotide
acaccggcgcggtacctcaggcggttatag

SEQ ID NO: 69297 - DNA, 30 bp, Artificial Sequence
  Synthetic oligonucleotide
tcggatttagggacggagaagtataactag

SEQ ID NO: 69298 - DNA, 30 bp, Artificial Sequence
  Synthetic oligonucleotide
gaggctcccgactaaacacttcgtaactag

SEQ ID NO: 69299 - DNA, 30 bp, Artificial Sequence
  Synthetic oligonucleotide
tcttagagacatgggacgtggacccactag

SEQ ID NO: 69300 - DNA, 30 bp, Artificial Sequence
  Synthetic oligonucleotide
caaattggcgaagagagaagcggccactag

SEQ ID NO: 69301 - DNA, 30 bp, Artificial Sequence
  Synthetic oligonucleotide
tccagaaacggactcgtctacaagcactag

SEQ ID NO: 69302 - DNA, 30 bp, Artificial Sequence
  Synthetic oligonucleotide
gttacgctagatttatggtatacagactag

SEQ ID NO: 69303 - DNA, 30 bp, Artificial Sequence
  Synthetic oligonucleotide
ctccccgaacggagtgcatcgagagactag

SEQ ID NO: 69304 - DNA, 30 bp, Artificial Sequence
  Synthetic oligonucleotide
tcacacgcggtggacgtacgtgagtactag

SEQ ID NO: 69305 - DNA, 30 bp, Artificial Sequence
  Synthetic oligonucleotide
cacgggattaggaagtaggtatcatcctag

SEQ ID NO: 69306 - DNA, 30 bp, Artificial Sequence
  Synthetic oligonucleotide
gtgcatgataagagatcgggactttcctag

SEQ ID NO: 69307 - DNA, 30 bp, Artificial Sequence
  Synthetic oligonucleotide
cttcgagagagcatagtggaggtttcctag

SEQ ID NO: 69308 - DNA, 30 bp, Artificial Sequence
  Synthetic oligonucleotide
tcgaaggtcatgggaacccaaattcgctag

SEQ ID NO: 69309 - DNA, 30 bp, Artificial Sequence
  Synthetic oligonucleotide
ttcagggggccgacctgtgacataggctag

SEQ ID NO: 69310 - DNA, 30 bp, Artificial Sequence
  Synthetic oligonucleotide
gtagatgctcggcgagtaagcgaaatctag

SEQ ID NO: 69311 - DNA, 30 bp, Artificial Sequence
  Synthetic oligonucleotide
ttcggagcggaaagaaaacaaaggatctag

SEQ ID NO: 69312 - DNA, 30 bp, Artificial Sequence
  Synthetic oligonucleotide
tcttacgtagattggtgcgaggatatctag

SEQ ID NO: 69313 - DNA, 30 bp, Artificial Sequence
  Synthetic oligonucleotide
acgccatctaaagcaatgagcgttatctag

SEQ ID NO: 69314 - DNA, 30 bp, Artificial Sequence
  Synthetic oligonucleotide
cataacgaaacaacgttagaactggtctag

SEQ ID NO: 69315 - DNA, 30 bp, Artificial Sequence
  Synthetic oligonucleotide
ctgcgggggtgaatccagaagctgttctag

SEQ ID NO: 69316 - DNA, 30 bp, Artificial Sequence
  Synthetic oligonucleotide
tatcacgactcgggtacgaggaagaagtag

SEQ ID NO: 69317 - DNA, 30 bp, Artificial Sequence
  Synthetic oligonucleotide
acgtaatacgaccggacggcgattaagtag

SEQ ID NO: 69318 - DNA, 30 bp, Artificial Sequence
  Synthetic oligonucleotide
tacctaatgtaggttaagcgagttaagtag

SEQ ID NO: 69319 - DNA, 30 bp, Artificial Sequence
  Synthetic oligonucleotide
agatatgttgagcgtggtcacacccagtag

SEQ ID NO: 69320 - DNA, 30 bp, Artificial Sequence
  Synthetic oligonucleotide
gtgcgacgtagaagctcgcgaatccagtag

SEQ ID NO: 69321 - DNA, 30 bp, Artificial Sequence
  Synthetic oligonucleotide
cgtagtcagagaaagtgttccttgcagtag

SEQ ID NO: 69322 - DNA, 30 bp, Artificial Sequence
  Synthetic oligonucleotide
cgatacgcatcgccagcccgcaatcagtag

SEQ ID NO: 69323 - DNA, 30 bp, Artificial Sequence
  Synthetic oligonucleotide
gccgggatcacgataaggcaagttcagtag

SEQ ID NO: 69324 - DNA, 30 bp, Artificial Sequence
  Synthetic oligonucleotide
gaaacaagcctcccagtctaaggagagtag

SEQ ID NO: 69325 - DNA, 30 bp, Artificial Sequence
  Synthetic oligonucleotide
cttcaagccgtgaacccttggtcggagtag

SEQ ID NO: 69326 - DNA, 30 bp, Artificial Sequence
  Synthetic oligonucleotide
tttaagagctaaggtcgactcgtatagtag

SEQ ID NO: 69327 - DNA, 29 bp, Artificial Sequence
  Synthetic oligonucleotide
gtcggaaccgaggaatcgaaggctagtag

SEQ ID NO: 69328 - DNA, 30 bp, Artificial Sequence
  Synthetic oligonucleotide
tcaggttctgttgcgaaggttggctagtag

SEQ ID NO: 69329 - DNA, 30 bp, Artificial Sequence
  Synthetic oligonucleotide
ggcgccaatctctatagggaaataacgtag

SEQ ID NO: 69330 - DNA, 30 bp, Artificial Sequence
  Synthetic oligonucleotide
catcaagtgcaaggcgcgaactcaccgtag

SEQ ID NO: 69331 - DNA, 30 bp, Artificial Sequence
  Synthetic oligonucleotide
tctcgagtgaaaacataagtaactccgtag

SEQ ID NO: 69332 - DNA, 30 bp, Artificial Sequence
  Synthetic oligonucleotide
gcaacaaggcacgatattactagcgcgtag

SEQ ID NO: 69333 - DNA, 30 bp, Artificial Sequence
  Synthetic oligonucleotide
tatcacatcggtcagattactgtggcgtag

SEQ ID NO: 69334 - DNA, 30 bp, Artificial Sequence
  Synthetic oligonucleotide
gttggtccggtcagtcgatgtgctgcgtag

SEQ ID NO: 69335 - DNA, 30 bp, Artificial Sequence
  Synthetic oligonucleotide
ccgagctcaccgtttctggtcattgcgtag

SEQ ID NO: 69336 - DNA, 30 bp, Artificial Sequence
  Synthetic oligonucleotide
taagtacaccggtaagatcctgttgcgtag

SEQ ID NO: 69337 - DNA, 30 bp, Artificial Sequence
  Synthetic oligonucleotide
agagcacttatggggaaacgggattcgtag

SEQ ID NO: 69338 - DNA, 30 bp, Artificial Sequence
  Synthetic oligonucleotide
aactgtaattaagaacacacgaggaggtag

SEQ ID NO: 69339 - DNA, 30 bp, Artificial Sequence
  Synthetic oligonucleotide
tgcaaacccgtacaacgtaatagacggtag

SEQ ID NO: 69340 - DNA, 30 bp, Artificial Sequence
  Synthetic oligonucleotide
acagatcggcgttacgatcaggaagggtag

SEQ ID NO: 69341 - DNA, 30 bp, Artificial Sequence
  Synthetic oligonucleotide
cgaggttcttgggggcagactagggggtag

SEQ ID NO: 69342 - DNA, 30 bp, Artificial Sequence
  Synthetic oligonucleotide
ggcggaagacggtgccgatcagttgggtag

SEQ ID NO: 69343 - DNA, 30 bp, Artificial Sequence
  Synthetic oligonucleotide
gttagagctaacgtgcccacataatggtag

SEQ ID NO: 69344 - DNA, 30 bp, Artificial Sequence
  Synthetic oligonucleotide
ataaaaccagggtcatggggcagttggtag

SEQ ID NO: 69345 - DNA, 30 bp, Artificial Sequence
  Synthetic oligonucleotide
ccttgagcgtacagccggtcgttgatgtag

SEQ ID NO: 69346 - DNA, 30 bp, Artificial Sequence
  Synthetic oligonucleotide
ttgctaatggccgtaaagaatgagctgtag

SEQ ID NO: 69347 - DNA, 30 bp, Artificial Sequence
  Synthetic oligonucleotide
caattagggtacttttaggtaaggctgtag

SEQ ID NO: 69348 - DNA, 30 bp, Artificial Sequence
  Synthetic oligonucleotide
ccgttctgtcgggaagggcggatggtgtag

SEQ ID NO: 69349 - DNA, 30 bp, Artificial Sequence
  Synthetic oligonucleotide
gtaggaagaagtgagtaagtaaccttgtag

SEQ ID NO: 69350 - DNA, 30 bp, Artificial Sequence
  Synthetic oligonucleotide
agaatgaacgacacattaagcagtttgtag

SEQ ID NO: 69351 - DNA, 30 bp, Artificial Sequence
  Synthetic oligonucleotide
acgtctgtacacgttgtgttggtacattag

SEQ ID NO: 69352 - DNA, 30 bp, Artificial Sequence
  Synthetic oligonucleotide
ctttgggcaataggagcaaatgagcattag

SEQ ID NO: 69353 - DNA, 30 bp, Artificial Sequence
  Synthetic oligonucleotide
tgtcaggtacgtgtacagtttaatcattag

SEQ ID NO: 69354 - DNA, 30 bp, Artificial Sequence
  Synthetic oligonucleotide
acatgtggcgcgttccgagggtccgattag

SEQ ID NO: 69355 - DNA, 30 bp, Artificial Sequence
  Synthetic oligonucleotide
actccgatagggaagagtaagatatattag

SEQ ID NO: 69356 - DNA, 30 bp, Artificial Sequence
  Synthetic oligonucleotide
cgtgcagtggcaattccctagacgtattag

SEQ ID NO: 69357 - DNA, 30 bp, Artificial Sequence
  Synthetic oligonucleotide
cacgagaatgggtacgcgagtagaacttag

SEQ ID NO: 69358 - DNA, 30 bp, Artificial Sequence
  Synthetic oligonucleotide
cgccaatgagtgaagaatgagcgaacttag

SEQ ID NO: 69359 - DNA, 30 bp, Artificial Sequence
  Synthetic oligonucleotide
aggaaagagcatagtatcggctttacttag

SEQ ID NO: 69360 - DNA, 30 bp, Artificial Sequence
  Synthetic oligonucleotide
taaagcagttgttgatacagaataccttag

SEQ ID NO: 69361 - DNA, 30 bp, Artificial Sequence
  Synthetic oligonucleotide
cgttacggccttagtgaaggatgcgcttag

SEQ ID NO: 69362 - DNA, 30 bp, Artificial Sequence
  Synthetic oligonucleotide
tgcgaggcgggaacttttgggatcagttag

SEQ ID NO: 69363 - DNA, 30 bp, Artificial Sequence
  Synthetic oligonucleotide
ttaacaacaatctcgaaccgaacccgttag

SEQ ID NO: 69364 - DNA, 30 bp, Artificial Sequence
  Synthetic oligonucleotide
cgagggacaattgctcggagcgggtgttag

SEQ ID NO: 69365 - DNA, 30 bp, Artificial Sequence
  Synthetic oligonucleotide
ggtagcagggtcgatgacactctgatttag

SEQ ID NO: 69366 - DNA, 30 bp, Artificial Sequence
  Synthetic oligonucleotide
cgcctgaaaatggacaatatgtcagtttag

SEQ ID NO: 69367 - DNA, 30 bp, Artificial Sequence
  Synthetic oligonucleotide
ccattggatacgctaggttcagtcgtttag

SEQ ID NO: 69368 - DNA, 30 bp, Artificial Sequence
  Synthetic oligonucleotide
atgcagtgcacgaggaaatgaaaattttag

SEQ ID NO: 69369 - DNA, 30 bp, Artificial Sequence
  Synthetic oligonucleotide
taaggcagcgatatatcgtgaattcaaacg

SEQ ID NO: 69370 - DNA, 30 bp, Artificial Sequence
  Synthetic oligonucleotide
atgatgtgttactatgctcttaacgaaacg

SEQ ID NO: 69371 - DNA, 30 bp, Artificial Sequence
  Synthetic oligonucleotide
ccaaaggtgcatctagtcagccacgaaacg

SEQ ID NO: 69372 - DNA, 30 bp, Artificial Sequence
  Synthetic oligonucleotide
cggtcattgtaaactacagtatacgaaacg

SEQ ID NO: 69373 - DNA, 30 bp, Artificial Sequence
  Synthetic oligonucleotide
agcacgaatcaacagtttagtaaggaaacg

SEQ ID NO: 69374 - DNA, 31 bp, Artificial Sequence
  Synthetic oligonucleotide
tcataagccgagctctccgcgcgcaacaacg

SEQ ID NO: 69375 - DNA, 30 bp, Artificial Sequence
  Synthetic oligonucleotide
acgggattgtgtttggagagaatcacaacg

SEQ ID NO: 69376 - DNA, 30 bp, Artificial Sequence
  Synthetic oligonucleotide
ggagagcagcgtttacacgacagaccaacg

SEQ ID NO: 69377 - DNA, 30 bp, Artificial Sequence
  Synthetic oligonucleotide
tcctcatatatccgacaacacttgccaacg

SEQ ID NO: 69378 - DNA, 30 bp, Artificial Sequence
  Synthetic oligonucleotide
tgcctaagataattccaaattaatccaacg

SEQ ID NO: 69379 - DNA, 30 bp, Artificial Sequence
  Synthetic oligonucleotide
catacggtgccggtacacacagtagcaacg

SEQ ID NO: 69380 - DNA, 30 bp, Artificial Sequence
  Synthetic oligonucleotide
gggctaaggggctcgactgcagggtcaacg

SEQ ID NO: 69381 - DNA, 30 bp, Artificial Sequence
  Synthetic oligonucleotide
ttaggacgcggtcacatcagaacttcaacg

SEQ ID NO: 69382 - DNA, 30 bp, Artificial Sequence
  Synthetic oligonucleotide
tcggagggattgcatgggcaattttcaacg

SEQ ID NO: 69383 - DNA, 30 bp, Artificial Sequence
  Synthetic oligonucleotide
gactgtggaggagggactttagaccgaacg

SEQ ID NO: 69384 - DNA, 30 bp, Artificial Sequence
  Synthetic oligonucleotide
cgggggaccacaattagcccaccaggaacg

SEQ ID NO: 69385 - DNA, 30 bp, Artificial Sequence
  Synthetic oligonucleotide
atggacaccctacagatccttaatggaacg

SEQ ID NO: 69386 - DNA, 30 bp, Artificial Sequence
  Synthetic oligonucleotide
gtgatacgagcttacaagatacaatgaacg

SEQ ID NO: 69387 - DNA, 30 bp, Artificial Sequence
  Synthetic oligonucleotide
ggaaacccgcgggacctatgactgtgaacg

SEQ ID NO: 69388 - DNA, 30 bp, Artificial Sequence
  Synthetic oligonucleotide
taaatgaaatgttagaggtggcgttgaacg

SEQ ID NO: 69389 - DNA, 30 bp, Artificial Sequence
  Synthetic oligonucleotide
tcatactaacactagtccatgcaactaacg

SEQ ID NO: 69390 - DNA, 30 bp, Artificial Sequence
  Synthetic oligonucleotide
gtcccaaaccaatatgtttactgactaacg

SEQ ID NO: 69391 - DNA, 30 bp, Artificial Sequence
  Synthetic oligonucleotide
agggaacgcgaaaaattggtcgccctaacg

SEQ ID NO: 69392 - DNA, 30 bp, Artificial Sequence
  Synthetic oligonucleotide
cagagaaagttctacaaaggaagcctaacg

SEQ ID NO: 69393 - DNA, 30 bp, Artificial Sequence
  Synthetic oligonucleotide
gataaagctacgaccttgagacgcctaacg

SEQ ID NO: 69394 - DNA, 30 bp, Artificial Sequence
  Synthetic oligonucleotide
cttgcgtaacttaagcatagagtgctaacg

SEQ ID NO: 69395 - DNA, 30 bp, Artificial Sequence
  Synthetic oligonucleotide
agaatcagtctctacccgtgtcaagtaacg

SEQ ID NO: 69396 - DNA, 30 bp, Artificial Sequence
  Synthetic oligonucleotide
agatgtcgcggacgcgtcgcctcattaacg

SEQ ID NO: 69397 - DNA, 30 bp, Artificial Sequence
  Synthetic oligonucleotide
acatacttgaccgtttagtgcggattaacg

SEQ ID NO: 69398 - DNA, 30 bp, Artificial Sequence
  Synthetic oligonucleotide
gcgcgaaccagtgtagggtatggcttaacg

SEQ ID NO: 69399 - DNA, 30 bp, Artificial Sequence
  Synthetic oligonucleotide
gtcttagcaaaagtagtgctgggagacacg

SEQ ID NO: 69400 - DNA, 31 bp, Artificial Sequence
  Synthetic oligonucleotide
cttggggaacccaggaaagttatacgacacg

SEQ ID NO: 69401 - DNA, 30 bp, Artificial Sequence
  Synthetic oligonucleotide
gagcaagctatcaccaggttagccgacacg

SEQ ID NO: 69402 - DNA, 30 bp, Artificial Sequence
  Synthetic oligonucleotide
gcaaagtggtacgaccgtgaaatggacacg

SEQ ID NO: 69403 - DNA, 30 bp, Artificial Sequence
  Synthetic oligonucleotide
tcatccggtgaggtagaggatcgatacacg

SEQ ID NO: 69404 - DNA, 30 bp, Artificial Sequence
  Synthetic oligonucleotide
ctaagccaaagttctcggtcagcctacacg

SEQ ID NO: 69405 - DNA, 30 bp, Artificial Sequence
  Synthetic oligonucleotide
attcgaggttacaacacagaaaccaccacg

SEQ ID NO: 69406 - DNA, 30 bp, Artificial Sequence
  Synthetic oligonucleotide
tcgtacgactagtgaatcagaggccccacg

SEQ ID NO: 69407 - DNA, 30 bp, Artificial Sequence
  Synthetic oligonucleotide
agaacaaaccacatgaagcctactcccacg

SEQ ID NO: 69408 - DNA, 30 bp, Artificial Sequence
  Synthetic oligonucleotide
atgcaggggacactcgcgctgtatgccacg

SEQ ID NO: 69409 - DNA, 30 bp, Artificial Sequence
  Synthetic oligonucleotide
gggatcaccgcatacaggtgtcaatccacg

SEQ ID NO: 69410 - DNA, 30 bp, Artificial Sequence
  Synthetic oligonucleotide
tacaaaaatgttctgcgtggagttagcacg

SEQ ID NO: 69411 - DNA, 30 bp, Artificial Sequence
  Synthetic oligonucleotide
agacaagagaagcagtaagtagttcgcacg

SEQ ID NO: 69412 - DNA, 30 bp, Artificial Sequence
  Synthetic oligonucleotide
atcaaatgagcaatttagattacgggcacg

SEQ ID NO: 69413 - DNA, 30 bp, Artificial Sequence
  Synthetic oligonucleotide
tggaccagatagtacatggggatgggcacg

SEQ ID NO: 69414 - DNA, 30 bp, Artificial Sequence
  Synthetic oligonucleotide
ttatgaggggcgactatagcttcaatcacg

SEQ ID NO: 69415 - DNA, 30 bp, Artificial Sequence
  Synthetic oligonucleotide
aagacggatccagagcacattaacctcacg

SEQ ID NO: 69416 - DNA, 30 bp, Artificial Sequence
  Synthetic oligonucleotide
aaacgtagaatacattatctgacggtcacg

SEQ ID NO: 69417 - DNA, 30 bp, Artificial Sequence
  Synthetic oligonucleotide
tatggcgaaggaaaggatcgaaatgtcacg

SEQ ID NO: 69418 - DNA, 30 bp, Artificial Sequence
  Synthetic oligonucleotide
ggctagtcagggccgccgacttctttcacg

SEQ ID NO: 69419 - DNA, 30 bp, Artificial Sequence
  Synthetic oligonucleotide
gcgcggattcattaccccaatcgaaagacg

SEQ ID NO: 69420 - DNA, 30 bp, Artificial Sequence
  Synthetic oligonucleotide
aagtaatgtgcatctaatgcgttgaagacg

SEQ ID NO: 69421 - DNA, 30 bp, Artificial Sequence
  Synthetic oligonucleotide
cgggcaataaggacttttctgactaagacg

SEQ ID NO: 69422 - DNA, 30 bp, Artificial Sequence
  Synthetic oligonucleotide
tcgacgagccttttacggtgtcctcagacg

SEQ ID NO: 69423 - DNA, 30 bp, Artificial Sequence
  Synthetic oligonucleotide
acaaacattaatagaggggctaaggagacg

SEQ ID NO: 69424 - DNA, 30 bp, Artificial Sequence
  Synthetic oligonucleotide
atctcggggacggctggcgtgcgatagacg

SEQ ID NO: 69425 - DNA, 30 bp, Artificial Sequence
  Synthetic oligonucleotide
tggactgggtgtacagtcaagtcgtagacg

SEQ ID NO: 69426 - DNA, 30 bp, Artificial Sequence
  Synthetic oligonucleotide
ccaacctatgcgagctgataacatacgacg

SEQ ID NO: 69427 - DNA, 30 bp, Artificial Sequence
  Synthetic oligonucleotide
cgggcagtggactttcaatgtcgcccgacg

SEQ ID NO: 69428 - DNA, 30 bp, Artificial Sequence
  Synthetic oligonucleotide
atctaattccaggacagggtaatgccgacg

SEQ ID NO: 69429 - DNA, 30 bp, Artificial Sequence
  Synthetic oligonucleotide
gtgcgggatctataaacgatgatagcgacg

SEQ ID NO: 69430 - DNA, 30 bp, Artificial Sequence
  Synthetic oligonucleotide
gcgtggaaagtcgatagcatcgacgcgacg

SEQ ID NO: 69431 - DNA, 30 bp, Artificial Sequence
  Synthetic oligonucleotide
gtcagggaacaatgagtgtaaccaaggacg

SEQ ID NO: 69432 - DNA, 30 bp, Artificial Sequence
  Synthetic oligonucleotide
cgggaaggctcatggcttgagcacaggacg

SEQ ID NO: 69433 - DNA, 30 bp, Artificial Sequence
  Synthetic oligonucleotide
ctgcaatcaactcctcataccaccaggacg

SEQ ID NO: 69434 - DNA, 30 bp, Artificial Sequence
  Synthetic oligonucleotide
gtgcaatggtgtctgcgcagtagcaggacg

SEQ ID NO: 69435 - DNA, 30 bp, Artificial Sequence
  Synthetic oligonucleotide
gcggatctgtggtgagaaagggagaggacg

SEQ ID NO: 69436 - DNA, 30 bp, Artificial Sequence
  Synthetic oligonucleotide
aaaacgcatgtcttggtgtcggtgaggacg

SEQ ID NO: 69437 - DNA, 30 bp, Artificial Sequence
  Synthetic oligonucleotide
aaaggggagttgattaagtcgtgatggacg

SEQ ID NO: 69438 - DNA, 30 bp, Artificial Sequence
  Synthetic oligonucleotide
ttgtccgtagacaacgcgacagggtggacg

SEQ ID NO: 69439 - DNA, 30 bp, Artificial Sequence
  Synthetic oligonucleotide
acacggcgaacccgcgcgaaccattggacg

SEQ ID NO: 69440 - DNA, 30 bp, Artificial Sequence
  Synthetic oligonucleotide
tgtcagaccaagctggtcacgggaatgacg

SEQ ID NO: 69441 - DNA, 30 bp, Artificial Sequence
  Synthetic oligonucleotide
gaggttagtacggaaagtgtaatcctgacg

SEQ ID NO: 69442 - DNA, 30 bp, Artificial Sequence
  Synthetic oligonucleotide
gtgacgaagtccctggccgctcaagatacg

SEQ ID NO: 69443 - DNA, 30 bp, Artificial Sequence
  Synthetic oligonucleotide
agcgagtatcaacttccgtgtggtgatacg

SEQ ID NO: 69444 - DNA, 30 bp, Artificial Sequence
  Synthetic oligonucleotide
tcatggatctcgggatacgccctgactacg

SEQ ID NO: 69445 - DNA, 30 bp, Artificial Sequence
  Synthetic oligonucleotide
ggtgctgtaaccaagaactataatactacg

SEQ ID NO: 69446 - DNA, 30 bp, Artificial Sequence
  Synthetic oligonucleotide
acacgacgtgtgcatgttcatagccctacg

SEQ ID NO: 69447 - DNA, 30 bp, Artificial Sequence
  Synthetic oligonucleotide
tacgaacctgaagtgtgttccaggcctacg

SEQ ID NO: 69448 - DNA, 30 bp, Artificial Sequence
  Synthetic oligonucleotide
agtagtagggactcagtggaaaaagctacg

SEQ ID NO: 69449 - DNA, 30 bp, Artificial Sequence
  Synthetic oligonucleotide
gatacaaaaagaataaacggaatggctacg

SEQ ID NO: 69450 - DNA, 30 bp, Artificial Sequence
  Synthetic oligonucleotide
actgacagcaccccagcctgcctatctacg

SEQ ID NO: 69451 - DNA, 30 bp, Artificial Sequence
  Synthetic oligonucleotide
tacgaacactttaggtggtgatagtctacg

SEQ ID NO: 69452 - DNA, 30 bp, Artificial Sequence
  Synthetic oligonucleotide
ggctaaaggtccgagttccagaaaagtacg

SEQ ID NO: 69453 - DNA, 30 bp, Artificial Sequence
  Synthetic oligonucleotide
atgatgtagaagtagagagtgtaccgtacg

SEQ ID NO: 69454 - DNA, 30 bp, Artificial Sequence
  Synthetic oligonucleotide
cagggggccagccaacctaaataaggtacg

SEQ ID NO: 69455 - DNA, 30 bp, Artificial Sequence
  Synthetic oligonucleotide
tggaaagaccacatgcgttggctatgtacg

SEQ ID NO: 69456 - DNA, 30 bp, Artificial Sequence
  Synthetic oligonucleotide
atggcaaggggccgccttttatggtgtacg

SEQ ID NO: 69457 - DNA, 30 bp, Artificial Sequence
  Synthetic oligonucleotide
gatccagtggatgggccaatcaattgtacg

SEQ ID NO: 69458 - DNA, 30 bp, Artificial Sequence
  Synthetic oligonucleotide
tcgaaccgagcactatttccggtgattacg

SEQ ID NO: 69459 - DNA, 30 bp, Artificial Sequence
  Synthetic oligonucleotide
gtacaggcgcattaccaaacttctattacg

SEQ ID NO: 69460 - DNA, 30 bp, Artificial Sequence
  Synthetic oligonucleotide
aggggtgtttgtgcggaataattacttacg

SEQ ID NO: 69461 - DNA, 30 bp, Artificial Sequence
  Synthetic oligonucleotide
ggcacactcatgttaaaacaaagccttacg

SEQ ID NO: 69462 - DNA, 30 bp, Artificial Sequence
  Synthetic oligonucleotide
ccgacaacagcggaaaacctagctcttacg

SEQ ID NO: 69463 - DNA, 30 bp, Artificial Sequence
  Synthetic oligonucleotide
actcgcgcgctgggaagggttggtcttacg

SEQ ID NO: 69464 - DNA, 30 bp, Artificial Sequence
  Synthetic oligonucleotide
acagagagtagggatatggtctcggttacg

SEQ ID NO: 69465 - DNA, 30 bp, Artificial Sequence
  Synthetic oligonucleotide
atacaattggagacaaatggtcgtgttacg

SEQ ID NO: 69466 - DNA, 30 bp, Artificial Sequence
  Synthetic oligonucleotide
cgcgtacaagcggtcagtggcaggtttacg

SEQ ID NO: 69467 - DNA, 30 bp, Artificial Sequence
  Synthetic oligonucleotide
gtaatcagtgtccgcccgataatgaaaccg

SEQ ID NO: 69468 - DNA, 30 bp, Artificial Sequence
  Synthetic oligonucleotide
acgcgtgtgcgtatcgctacggtgaaaccg

SEQ ID NO: 69469 - DNA, 30 bp, Artificial Sequence
  Synthetic oligonucleotide
ggtcggggaagaatgactagctttcaaccg

SEQ ID NO: 69470 - DNA, 30 bp, Artificial Sequence
  Synthetic oligonucleotide
acgtattttgcttcatacaagatagaaccg

SEQ ID NO: 69471 - DNA, 30 bp, Artificial Sequence
  Synthetic oligonucleotide
cttgctgcgtacctgtgatcagctgaaccg

SEQ ID NO: 69472 - DNA, 30 bp, Artificial Sequence
  Synthetic oligonucleotide
tgaggtcaatcgtagttctggagctaaccg

SEQ ID NO: 69473 - DNA, 30 bp, Artificial Sequence
  Synthetic oligonucleotide
atatctgtatggtacagagagctcacaccg

SEQ ID NO: 69474 - DNA, 30 bp, Artificial Sequence
  Synthetic oligonucleotide
cttcaaaagggtgaatccacaaaaccaccg

SEQ ID NO: 69475 - DNA, 30 bp, Artificial Sequence
  Synthetic oligonucleotide
gctatagagctgggaaactcgacggcaccg

SEQ ID NO: 69476 - DNA, 30 bp, Artificial Sequence
  Synthetic oligonucleotide
gagagacaactgagagggctgacatcaccg

SEQ ID NO: 69477 - DNA, 30 bp, Artificial Sequence
  Synthetic oligonucleotide
gatggtaaagcttattaaacagtgtcaccg

SEQ ID NO: 69478 - DNA, 30 bp, Artificial Sequence
  Synthetic oligonucleotide
aggtattcgttgcgaccaagaatttcaccg

SEQ ID NO: 69479 - DNA, 30 bp, Artificial Sequence
  Synthetic oligonucleotide
ttgggacctacaatgtagtggaaaagaccg

SEQ ID NO: 69480 - DNA, 30 bp, Artificial Sequence
  Synthetic oligonucleotide
tacacgagaggagatggttttgtgcgaccg

SEQ ID NO: 69481 - DNA, 30 bp, Artificial Sequence
  Synthetic oligonucleotide
taaactgcgagcgagtcggaaaatcgaccg

SEQ ID NO: 69482 - DNA, 30 bp, Artificial Sequence
  Synthetic oligonucleotide
tcttacgaatcctctcaactttcaggaccg

SEQ ID NO: 69483 - DNA, 30 bp, Artificial Sequence
  Synthetic oligonucleotide
taagtcggctgcgcaacgactggaggaccg

SEQ ID NO: 69484 - DNA, 30 bp, Artificial Sequence
  Synthetic oligonucleotide
aggctgagtaatgtgctttaatcgggaccg

SEQ ID NO: 69485 - DNA, 30 bp, Artificial Sequence
  Synthetic oligonucleotide
accgtgagtagcgactgaatccggggaccg

SEQ ID NO: 69486 - DNA, 30 bp, Artificial Sequence
  Synthetic oligonucleotide
agccgacgggttaaggtagagatatgaccg

SEQ ID NO: 69487 - DNA, 30 bp, Artificial Sequence
  Synthetic oligonucleotide
ccagaatcagagatttcgcaatggataccg

SEQ ID NO: 69488 - DNA, 30 bp, Artificial Sequence
  Synthetic oligonucleotide
taggactaactaattgcgccacatctaccg

SEQ ID NO: 69489 - DNA, 30 bp, Artificial Sequence
  Synthetic oligonucleotide
gggagagggtctaggctagtgcatttaccg

SEQ ID NO: 69490 - DNA, 30 bp, Artificial Sequence
  Synthetic oligonucleotide
gcgagatcgtagcgagttggacctttaccg

SEQ ID NO: 69491 - DNA, 30 bp, Artificial Sequence
  Synthetic oligonucleotide
gcgaatgtatagcaggccgatcataacccg

SEQ ID NO: 69492 - DNA, 30 bp, Artificial Sequence
  Synthetic oligonucleotide
tgcggcggacgacaataagtcggacacccg

SEQ ID NO: 69493 - DNA, 30 bp, Artificial Sequence
  Synthetic oligonucleotide
agcagaagggggtccccaagtagccacccg

SEQ ID NO: 69494 - DNA, 30 bp, Artificial Sequence
  Synthetic oligonucleotide
ttccatgaagctcaagtgcgctgatacccg

SEQ ID NO: 69495 - DNA, 30 bp, Artificial Sequence
  Synthetic oligonucleotide
taggacacactcaaaaataactggtacccg

SEQ ID NO: 69496 - DNA, 30 bp, Artificial Sequence
  Synthetic oligonucleotide
aagggcactcgccaaatacgcccttacccg

SEQ ID NO: 69497 - DNA, 30 bp, Artificial Sequence
  Synthetic oligonucleotide
tgttggagtgtataaaactccgcctccccg

SEQ ID NO: 69498 - DNA, 30 bp, Artificial Sequence
  Synthetic oligonucleotide
tgagctgtccggatagtgtgatgctccccg

SEQ ID NO: 69499 - DNA, 30 bp, Artificial Sequence
  Synthetic oligonucleotide
tcgaacaaggttgtccgagtctgtagcccg

SEQ ID NO: 69500 - DNA, 30 bp, Artificial Sequence
  Synthetic oligonucleotide
atagcacttcgcagaagaagctccggcccg

SEQ ID NO: 69501 - DNA, 30 bp, Artificial Sequence
  Synthetic oligonucleotide
ggcatcacattccagacaacttgcatcccg

SEQ ID NO: 69502 - DNA, 30 bp, Artificial Sequence
  Synthetic oligonucleotide
agtttaagagtacagtgatacaggctcccg

SEQ ID NO: 69503 - DNA, 30 bp, Artificial Sequence
  Synthetic oligonucleotide
gtaacacggatgcgactactctacgtcccg

SEQ ID NO: 69504 - DNA, 30 bp, Artificial Sequence
  Synthetic oligonucleotide
accaagacgagaaggctaatagatgtcccg

SEQ ID NO: 69505 - DNA, 30 bp, Artificial Sequence
  Synthetic oligonucleotide
ggagtgatcggggaatcgtaagataagccg

SEQ ID NO: 69506 - DNA, 30 bp, Artificial Sequence
  Synthetic oligonucleotide
tcgtatatgagcggatgtctatacgagccg

SEQ ID NO: 69507 - DNA, 30 bp, Artificial Sequence
  Synthetic oligonucleotide
aaggagaatatcgggcacgctagctagccg

SEQ ID NO: 69508 - DNA, 30 bp, Artificial Sequence
  Synthetic oligonucleotide
ggctgaacccaaagtaaagtgtccccgccg

SEQ ID NO: 69509 - DNA, 30 bp, Artificial Sequence
  Synthetic oligonucleotide
gggatcgggcggtgctcactaaattcgccg

SEQ ID NO: 69510 - DNA, 30 bp, Artificial Sequence
  Synthetic oligonucleotide
gccccggggacactccacacatcttcgccg

SEQ ID NO: 69511 - DNA, 30 bp, Artificial Sequence
  Synthetic oligonucleotide
aagacatatcagtcgctaaaaaaaaggccg

SEQ ID NO: 69512 - DNA, 30 bp, Artificial Sequence
  Synthetic oligonucleotide
tcagactgtcgataactccgcccccggccg

SEQ ID NO: 69513 - DNA, 30 bp, Artificial Sequence
  Synthetic oligonucleotide
agtcaaagagaagacatccagtagtggccg

SEQ ID NO: 69514 - DNA, 30 bp, Artificial Sequence
  Synthetic oligonucleotide
agatatatcacaggaacaagggtaatgccg

SEQ ID NO: 69515 - DNA, 30 bp, Artificial Sequence
  Synthetic oligonucleotide
aagagataattacgaaagaggtagatgccg

SEQ ID NO: 69516 - DNA, 30 bp, Artificial Sequence
  Synthetic oligonucleotide
tctacctacacgaaaacactgctgatgccg

SEQ ID NO: 69517 - DNA, 30 bp, Artificial Sequence
  Synthetic oligonucleotide
tttggtgtgagccagagaactggggtgccg

SEQ ID NO: 69518 - DNA, 30 bp, Artificial Sequence
  Synthetic oligonucleotide
tagatgattccatgattaaacctattgccg

SEQ ID NO: 69519 - DNA, 30 bp, Artificial Sequence
  Synthetic oligonucleotide
gacgtctagtgacttgcgcaatccttgccg

SEQ ID NO: 69520 - DNA, 30 bp, Artificial Sequence
  Synthetic oligonucleotide
gataatagtagctccacaaacgtgaatccg

SEQ ID NO: 69521 - DNA, 30 bp, Artificial Sequence
  Synthetic oligonucleotide
cgtatgatcctaagggagaaatgagatccg

SEQ ID NO: 69522 - DNA, 30 bp, Artificial Sequence
  Synthetic oligonucleotide
tagggttcgcgtgcctgtcctcccgatccg

SEQ ID NO: 69523 - DNA, 30 bp, Artificial Sequence
  Synthetic oligonucleotide
agctatgtccatcagtcaggaagatatccg

SEQ ID NO: 69524 - DNA, 30 bp, Artificial Sequence
  Synthetic oligonucleotide
cgattcggcggatggcattcagactatccg

SEQ ID NO: 69525 - DNA, 30 bp, Artificial Sequence
  Synthetic oligonucleotide
cgaagaacagacttatgaggacagactccg

SEQ ID NO: 69526 - DNA, 30 bp, Artificial Sequence
  Synthetic oligonucleotide
cagtatggccaaacagacaatgaggctccg

SEQ ID NO: 69527 - DNA, 30 bp, Artificial Sequence
  Synthetic oligonucleotide
ggcaacgagaattgctcgtaagcctctccg

SEQ ID NO: 69528 - DNA, 30 bp, Artificial Sequence
  Synthetic oligonucleotide
gtacaacacttgttaagggatcaaagtccg

SEQ ID NO: 69529 - DNA, 30 bp, Artificial Sequence
  Synthetic oligonucleotide
aagggaactctaccctcagcttaaagtccg

SEQ ID NO: 69530 - DNA, 30 bp, Artificial Sequence
  Synthetic oligonucleotide
cccagtatagctactctgtgactaagtccg

SEQ ID NO: 69531 - DNA, 30 bp, Artificial Sequence
  Synthetic oligonucleotide
ccgagatatgtacgggggcgcatgagtccg

SEQ ID NO: 69532 - DNA, 30 bp, Artificial Sequence
  Synthetic oligonucleotide
ctgaatctatggaatttaataggtcgtccg

SEQ ID NO: 69533 - DNA, 30 bp, Artificial Sequence
  Synthetic oligonucleotide
cacgcgagtcacgatgtatcaattggtccg

SEQ ID NO: 69534 - DNA, 30 bp, Artificial Sequence
  Synthetic oligonucleotide
acacgcaaaggcgggccaggccgatgtccg

SEQ ID NO: 69535 - DNA, 30 bp, Artificial Sequence
  Synthetic oligonucleotide
aaggttgcacatgaaacaagtaacgttccg

SEQ ID NO: 69536 - DNA, 30 bp, Artificial Sequence
  Synthetic oligonucleotide
cgggtagcttttagtgggacgaatgttccg

SEQ ID NO: 69537 - DNA, 30 bp, Artificial Sequence
  Synthetic oligonucleotide
gcggtcatcagtggtcggcaagcctttccg

SEQ ID NO: 69538 - DNA, 30 bp, Artificial Sequence
  Synthetic oligonucleotide
gaacaggaggggtagtgaggggagtttccg

SEQ ID NO: 69539 - DNA, 30 bp, Artificial Sequence
  Synthetic oligonucleotide
gctggggagtaattctgggttagcaaagcg

SEQ ID NO: 69540 - DNA, 30 bp, Artificial Sequence
  Synthetic oligonucleotide
tctcgaacatcgtgattccctaggaaagcg

SEQ ID NO: 69541 - DNA, 30 bp, Artificial Sequence
  Synthetic oligonucleotide
atgacggaaggtcaggaagagcctaaagcg

SEQ ID NO: 69542 - DNA, 30 bp, Artificial Sequence
  Synthetic oligonucleotide
cctctgcaaatggacctccatagtaaagcg

SEQ ID NO: 69543 - DNA, 30 bp, Artificial Sequence
  Synthetic oligonucleotide
agtcgaagtgtgatgtggcggtaacaagcg

SEQ ID NO: 69544 - DNA, 30 bp, Artificial Sequence
  Synthetic oligonucleotide
gggttaagtttcgaggctagaaagcaagcg

SEQ ID NO: 69545 - DNA, 30 bp, Artificial Sequence
  Synthetic oligonucleotide
agttgccatgagatggacacaggcgaagcg

SEQ ID NO: 69546 - DNA, 30 bp, Artificial Sequence
  Synthetic oligonucleotide
agctgtctagtaaccctggcttaggaagcg

SEQ ID NO: 69547 - DNA, 30 bp, Artificial Sequence
  Synthetic oligonucleotide
tagttatcctcagtcaagcggagtgaagcg

SEQ ID NO: 69548 - DNA, 30 bp, Artificial Sequence
  Synthetic oligonucleotide
aattgtcgaaataacgtacaccaataagcg

SEQ ID NO: 69549 - DNA, 30 bp, Artificial Sequence
  Synthetic oligonucleotide
ggcggcgggacgatctagggggtaccagcg

SEQ ID NO: 69550 - DNA, 30 bp, Artificial Sequence
  Synthetic oligonucleotide
catcaaggaaaacactaagattacccagcg

SEQ ID NO: 69551 - DNA, 30 bp, Artificial Sequence
  Synthetic oligonucleotide
ctcctctagagatcgagctataagccagcg

SEQ ID NO: 69552 - DNA, 30 bp, Artificial Sequence
  Synthetic oligonucleotide
ctatcagatcagagaagatgacaagcagcg

SEQ ID NO: 69553 - DNA, 30 bp, Artificial Sequence
  Synthetic oligonucleotide
acggcctgccagtcatgactgctagcagcg

SEQ ID NO: 69554 - DNA, 30 bp, Artificial Sequence
  Synthetic oligonucleotide
agtcgggccgaccttcacggcgtatcagcg

SEQ ID NO: 69555 - DNA, 30 bp, Artificial Sequence
  Synthetic oligonucleotide
tgggctcgtgaatatacaatagcgtcagcg

SEQ ID NO: 69556 - DNA, 30 bp, Artificial Sequence
  Synthetic oligonucleotide
aggacggcatgagcacaatggtttagagcg

SEQ ID NO: 69557 - DNA, 30 bp, Artificial Sequence
  Synthetic oligonucleotide
cttaagggagtctggtgtaatgaccgagcg

SEQ ID NO: 69558 - DNA, 30 bp, Artificial Sequence
  Synthetic oligonucleotide
cgatatttactgtaggtagaatgtcgagcg

SEQ ID NO: 69559 - DNA, 30 bp, Artificial Sequence
  Synthetic oligonucleotide
gtcgaaatggggtggcgccattttcgagcg

SEQ ID NO: 69560 - DNA, 30 bp, Artificial Sequence
  Synthetic oligonucleotide
aagccggacggagtggaagacaggggagcg

SEQ ID NO: 69561 - DNA, 30 bp, Artificial Sequence
  Synthetic oligonucleotide
cagccggatagtgtgtagctaagctgagcg

SEQ ID NO: 69562 - DNA, 30 bp, Artificial Sequence
  Synthetic oligonucleotide
cggcatggaaagggctatatagccgtagcg

SEQ ID NO: 69563 - DNA, 30 bp, Artificial Sequence
  Synthetic oligonucleotide
cgaatcccgttctaagtcttgcaccacgcg

SEQ ID NO: 69564 - DNA, 30 bp, Artificial Sequence
  Synthetic oligonucleotide
tacaggaacgggggtcgacgtccccacgcg

SEQ ID NO: 69565 - DNA, 30 bp, Artificial Sequence
  Synthetic oligonucleotide
ataacggacaagtacaccgtcgagcacgcg

SEQ ID NO: 69566 - DNA, 30 bp, Artificial Sequence
  Synthetic oligonucleotide
tgttcagagcgaagctctagagggcacgcg

SEQ ID NO: 69567 - DNA, 30 bp, Artificial Sequence
  Synthetic oligonucleotide
tccgcaacgattgcacaaaggacatacgcg

SEQ ID NO: 69568 - DNA, 30 bp, Artificial Sequence
  Synthetic oligonucleotide
ctcgattacaaaatcgcatgaagcaccgcg

SEQ ID NO: 69569 - DNA, 30 bp, Artificial Sequence
  Synthetic oligonucleotide
cagatctgcgatcatcaagggccgaccgcg

SEQ ID NO: 69570 - DNA, 30 bp, Artificial Sequence
  Synthetic oligonucleotide
ttccacaggcaagaacatcgcggtaccgcg

SEQ ID NO: 69571 - DNA, 30 bp, Artificial Sequence
  Synthetic oligonucleotide
gccatggcatgtcctagcagctgtaccgcg

SEQ ID NO: 69572 - DNA, 30 bp, Artificial Sequence
  Synthetic oligonucleotide
catgccggtgtctactgaggaattcccgcg

SEQ ID NO: 69573 - DNA, 30 bp, Artificial Sequence
  Synthetic oligonucleotide
cggcgcgtgatgaagattgtgaaagccgcg

SEQ ID NO: 69574 - DNA, 30 bp, Artificial Sequence
  Synthetic oligonucleotide
taggacaaaagttggtcgcgccaatccgcg

SEQ ID NO: 69575 - DNA, 30 bp, Artificial Sequence
  Synthetic oligonucleotide
tgacggtccccgtgtcagggtacatccgcg

SEQ ID NO: 69576 - DNA, 30 bp, Artificial Sequence
  Synthetic oligonucleotide
gcactaattttcaggagtgtgcgatccgcg

SEQ ID NO: 69577 - DNA, 30 bp, Artificial Sequence
  Synthetic oligonucleotide
aagggaagacaggctcggtcagtttccgcg

SEQ ID NO: 69578 - DNA, 30 bp, Artificial Sequence
  Synthetic oligonucleotide
atgcggcatacatagaaatcttaaagcgcg

SEQ ID NO: 69579 - DNA, 30 bp, Artificial Sequence
  Synthetic oligonucleotide
attcgtactacttgttcaagcattagcgcg

SEQ ID NO: 69580 - DNA, 30 bp, Artificial Sequence
  Synthetic oligonucleotide
tgacagcgtctgcccagtgaggctcgcgcg

SEQ ID NO: 69581 - DNA, 30 bp, Artificial Sequence
  Synthetic oligonucleotide
tacggtatccgagcgtaccgatcaggcgcg

SEQ ID NO: 69582 - DNA, 30 bp, Artificial Sequence
  Synthetic oligonucleotide
gtaatcaattcacataaagactggggcgcg

SEQ ID NO: 69583 - DNA, 30 bp, Artificial Sequence
  Synthetic oligonucleotide
gatatcagcagaagtatagacaaaatcgcg

SEQ ID NO: 69584 - DNA, 30 bp, Artificial Sequence
  Synthetic oligonucleotide
cgggagaatgcattctgtgtggccatcgcg

SEQ ID NO: 69585 - DNA, 30 bp, Artificial Sequence
  Synthetic oligonucleotide
caaggaggtgtgtcctttctagatatcgcg

SEQ ID NO: 69586 - DNA, 30 bp, Artificial Sequence
  Synthetic oligonucleotide
ttatggggaggtaatcaaatcggtatcgcg

SEQ ID NO: 69587 - DNA, 30 bp, Artificial Sequence
  Synthetic oligonucleotide
tgagcacattgcaccagttcgaatgtcgcg

SEQ ID NO: 69588 - DNA, 30 bp, Artificial Sequence
  Synthetic oligonucleotide
cggtaactactatatgagtcacctgtcgcg

SEQ ID NO: 69589 - DNA, 30 bp, Artificial Sequence
  Synthetic oligonucleotide
cgactcatctgaaggaagctagatttcgcg

SEQ ID NO: 69590 - DNA, 30 bp, Artificial Sequence
  Synthetic oligonucleotide
gagggtctaactgccatgaggacccaggcg

SEQ ID NO: 69591 - DNA, 30 bp, Artificial Sequence
  Synthetic oligonucleotide
ctacccagaagacggtggattaggcaggcg

SEQ ID NO: 69592 - DNA, 30 bp, Artificial Sequence
  Synthetic oligonucleotide
atacctggggaataatgaaactaagaggcg

SEQ ID NO: 69593 - DNA, 30 bp, Artificial Sequence
  Synthetic oligonucleotide
cgtaagggttcatacgaaaatgcagaggcg

SEQ ID NO: 69594 - DNA, 30 bp, Artificial Sequence
  Synthetic oligonucleotide
accaatgctacgtcagcagtagctccggcg

SEQ ID NO: 69595 - DNA, 30 bp, Artificial Sequence
  Synthetic oligonucleotide
tcataggaagctcgaggggaagtggcggcg

SEQ ID NO: 69596 - DNA, 30 bp, Artificial Sequence
  Synthetic oligonucleotide
tcgaaattaagtataagttcgcgttcggcg

SEQ ID NO: 69597 - DNA, 30 bp, Artificial Sequence
  Synthetic oligonucleotide
gagcgtcactaagtgataattgtacgggcg

SEQ ID NO: 69598 - DNA, 30 bp, Artificial Sequence
  Synthetic oligonucleotide
atcaacgtgcacaatacctaggtctgggcg

SEQ ID NO: 69599 - DNA, 30 bp, Artificial Sequence
  Synthetic oligonucleotide
cgcactacatgggagtctggagacatggcg

SEQ ID NO: 69600 - DNA, 30 bp, Artificial Sequence
  Synthetic oligonucleotide
gaacggccccagtcggcgatatcagtggcg

SEQ ID NO: 69601 - DNA, 30 bp, Artificial Sequence
  Synthetic oligonucleotide
ggaccaagatcgtaaactgtcaccgtggcg

SEQ ID NO: 69602 - DNA, 30 bp, Artificial Sequence
  Synthetic oligonucleotide
cgattaatgcactcagagtcataattggcg

SEQ ID NO: 69603 - DNA, 30 bp, Artificial Sequence
  Synthetic oligonucleotide
cggaagacgaatatggaatcgacattggcg

SEQ ID NO: 69604 - DNA, 30 bp, Artificial Sequence
  Synthetic oligonucleotide
tagtaacggctagtagtagtggcattggcg

SEQ ID NO: 69605 - DNA, 30 bp, Artificial Sequence
  Synthetic oligonucleotide
cagtagaataaaagattggggtcgttggcg

SEQ ID NO: 69606 - DNA, 29 bp, Artificial Sequence
  Synthetic oligonucleotide
ccctggtgtatggtaaaccccagaatgcg

SEQ ID NO: 69607 - DNA, 30 bp, Artificial Sequence
  Synthetic oligonucleotide
aggtgagcgttagtatgttggggtaatgcg

SEQ ID NO: 69608 - DNA, 30 bp, Artificial Sequence
  Synthetic oligonucleotide
tacatcccgggtcgcgatcaaagacatgcg

SEQ ID NO: 69609 - DNA, 30 bp, Artificial Sequence
  Synthetic oligonucleotide
aatggctggattttccgtcggcgacatgcg

SEQ ID NO: 69610 - DNA, 30 bp, Artificial Sequence
  Synthetic oligonucleotide
accatcatggttagaggcatctcagatgcg

SEQ ID NO: 69611 - DNA, 30 bp, Artificial Sequence
  Synthetic oligonucleotide
gcctcgagtgcgtcgagaaattagcctgcg

SEQ ID NO: 69612 - DNA, 30 bp, Artificial Sequence
  Synthetic oligonucleotide
cgggtatacaggataacaccaaagtctgcg

SEQ ID NO: 69613 - DNA, 30 bp, Artificial Sequence
  Synthetic oligonucleotide
ataatgctaaattaccaagcgataggtgcg

SEQ ID NO: 69614 - DNA, 30 bp, Artificial Sequence
  Synthetic oligonucleotide
acatactatgtagcgaatgtgaggggtgcg

SEQ ID NO: 69615 - DNA, 30 bp, Artificial Sequence
  Synthetic oligonucleotide
ggccatcttggggaaaaaactgatattgcg

SEQ ID NO: 69616 - DNA, 30 bp, Artificial Sequence
  Synthetic oligonucleotide
aatgctgagcgatacgttggcgaggttgcg

SEQ ID NO: 69617 - DNA, 30 bp, Artificial Sequence
  Synthetic oligonucleotide
agcggacaattgtggaatcggggggttgcg

SEQ ID NO: 69618 - DNA, 30 bp, Artificial Sequence
  Synthetic oligonucleotide
acgatgtcaagaagcgttaaacttgttgcg

SEQ ID NO: 69619 - DNA, 30 bp, Artificial Sequence
  Synthetic oligonucleotide
ggacaacgtagatgtgaggctatctttgcg

SEQ ID NO: 69620 - DNA, 30 bp, Artificial Sequence
  Synthetic oligonucleotide
gcgtacgtgtactggtccttgagaaaatcg

SEQ ID NO: 69621 - DNA, 30 bp, Artificial Sequence
  Synthetic oligonucleotide
gaggagccctacaggaatgagcttcaatcg

SEQ ID NO: 69622 - DNA, 30 bp, Artificial Sequence
  Synthetic oligonucleotide
agacttcgggcactcgttggggtggaatcg

SEQ ID NO: 69623 - DNA, 30 bp, Artificial Sequence
  Synthetic oligonucleotide
ggatcgagtgtgatacctgtcgagtaatcg

SEQ ID NO: 69624 - DNA, 30 bp, Artificial Sequence
  Synthetic oligonucleotide
agtgaatgccaatcgcattcgagttaatcg

SEQ ID NO: 69625 - DNA, 30 bp, Artificial Sequence
  Synthetic oligonucleotide
tgaaaaacggtgcaggggagttgaacatcg

SEQ ID NO: 69626 - DNA, 30 bp, Artificial Sequence
  Synthetic oligonucleotide
atccggtgctgcagttgcctaataccatcg

SEQ ID NO: 69627 - DNA, 30 bp, Artificial Sequence
  Synthetic oligonucleotide
aattaccacagtcatgcacaaagctcatcg

SEQ ID NO: 69628 - DNA, 30 bp, Artificial Sequence
  Synthetic oligonucleotide
gttcgcaagtcgtgggtttgtacaagatcg

SEQ ID NO: 69629 - DNA, 30 bp, Artificial Sequence
  Synthetic oligonucleotide
atcaatcctcggagcgaaacgcgaagatcg

SEQ ID NO: 69630 - DNA, 30 bp, Artificial Sequence
  Synthetic oligonucleotide
ttgtaatgtcatcatattgtactcagatcg

SEQ ID NO: 69631 - DNA, 30 bp, Artificial Sequence
  Synthetic oligonucleotide
tatcagccgatgaattagacacaccgatcg

SEQ ID NO: 69632 - DNA, 30 bp, Artificial Sequence
  Synthetic oligonucleotide
tgtgcaagaaaaacgttgtcggaaggatcg

SEQ ID NO: 69633 - DNA, 30 bp, Artificial Sequence
  Synthetic oligonucleotide
cctactaaaggagggcgcacgcggggatcg

SEQ ID NO: 69634 - DNA, 30 bp, Artificial Sequence
  Synthetic oligonucleotide
gacttagcaagtgtaacgaagtctggatcg

SEQ ID NO: 69635 - DNA, 30 bp, Artificial Sequence
  Synthetic oligonucleotide
agccggttgaagccaccgatagaatgatcg

SEQ ID NO: 69636 - DNA, 30 bp, Artificial Sequence
  Synthetic oligonucleotide
ccaggggttaatagatgacttgcgtgatcg

SEQ ID NO: 69637 - DNA, 30 bp, Artificial Sequence
  Synthetic oligonucleotide
aggcattctgtaaggtcttgccaaatatcg

SEQ ID NO: 69638 - DNA, 30 bp, Artificial Sequence
  Synthetic oligonucleotide
ggaaagggacgatcaaaaaatcgcatatcg

SEQ ID NO: 69639 - DNA, 30 bp, Artificial Sequence
  Synthetic oligonucleotide
cggaagtcgagtgttagtagccgtatatcg

SEQ ID NO: 69640 - DNA, 30 bp, Artificial Sequence
  Synthetic oligonucleotide
aggggcagcttgtgaagggccgaactatcg

SEQ ID NO: 69641 - DNA, 30 bp, Artificial Sequence
  Synthetic oligonucleotide
aatgaaatatcaggtggcacatacctatcg

SEQ ID NO: 69642 - DNA, 30 bp, Artificial Sequence
  Synthetic oligonucleotide
ggtaagttcgtctgaacagcctacgtatcg

SEQ ID NO: 69643 - DNA, 30 bp, Artificial Sequence
  Synthetic oligonucleotide
gcgtatgcaagtgctatagacttattatcg

SEQ ID NO: 69644 - DNA, 30 bp, Artificial Sequence
  Synthetic oligonucleotide
ctcatatacgcgtagatctaaaataactcg

SEQ ID NO: 69645 - DNA, 30 bp, Artificial Sequence
  Synthetic oligonucleotide
agactaactacatcaggactagtccactcg

SEQ ID NO: 69646 - DNA, 30 bp, Artificial Sequence
  Synthetic oligonucleotide
taaacaggcacggagttgatatgatactcg

SEQ ID NO: 69647 - DNA, 30 bp, Artificial Sequence
  Synthetic oligonucleotide
ctaaaagggacactgattccggcgtactcg

SEQ ID NO: 69648 - DNA, 30 bp, Artificial Sequence
  Synthetic oligonucleotide
cctgttgatggaagctattgataggcctcg

SEQ ID NO: 69649 - DNA, 30 bp, Artificial Sequence
  Synthetic oligonucleotide
aagtgcgaaccgcaccttggtccatcctcg

SEQ ID NO: 69650 - DNA, 31 bp, Artificial Sequence
  Synthetic oligonucleotide
cagggatgagtcgggaaatttgcgttcctcg

SEQ ID NO: 69651 - DNA, 30 bp, Artificial Sequence
  Synthetic oligonucleotide
gcgaagggacaaggggggcgcaggggctcg

SEQ ID NO: 69652 - DNA, 30 bp, Artificial Sequence
  Synthetic oligonucleotide
acgtggcgctcacagagtaaattctgctcg

SEQ ID NO: 69653 - DNA, 30 bp, Artificial Sequence
  Synthetic oligonucleotide
cggaaccataatgaccgcataacttgctcg

SEQ ID NO: 69654 - DNA, 30 bp, Artificial Sequence
  Synthetic oligonucleotide
taatgaccgtgagaaccctacaaaatctcg

SEQ ID NO: 69655 - DNA, 30 bp, Artificial Sequence
  Synthetic oligonucleotide
ccgtaatgccatcatttgtgtacaatctcg

SEQ ID NO: 69656 - DNA, 30 bp, Artificial Sequence
  Synthetic oligonucleotide
ctacgtcttagtgtccggaaaatcatctcg

SEQ ID NO: 69657 - DNA, 30 bp, Artificial Sequence
  Synthetic oligonucleotide
attcaataaggtcgacaatttcgcctctcg

SEQ ID NO: 69658 - DNA, 30 bp, Artificial Sequence
  Synthetic oligonucleotide
atcggaagaaatacccactcgtagctctcg

SEQ ID NO: 69659 - DNA, 30 bp, Artificial Sequence
  Synthetic oligonucleotide
catagacggcaaacaaactcaatggtctcg

SEQ ID NO: 69660 - DNA, 30 bp, Artificial Sequence
  Synthetic oligonucleotide
acggcaggtcgttgaaggtatctggtctcg

SEQ ID NO: 69661 - DNA, 30 bp, Artificial Sequence
  Synthetic oligonucleotide
gctgcacaacctagcagctcacatttctcg

SEQ ID NO: 69662 - DNA, 30 bp, Artificial Sequence
  Synthetic oligonucleotide
taaactaggggggattgtgggccaaagtcg

SEQ ID NO: 69663 - DNA, 30 bp, Artificial Sequence
  Synthetic oligonucleotide
cgacgttactgatgtctactggtgaagtcg

SEQ ID NO: 69664 - DNA, 30 bp, Artificial Sequence
  Synthetic oligonucleotide
ccatcagatcatgattaggtaggacagtcg

SEQ ID NO: 69665 - DNA, 30 bp, Artificial Sequence
  Synthetic oligonucleotide
gaactgtccgtacaaacacgtgagcagtcg

SEQ ID NO: 69666 - DNA, 30 bp, Artificial Sequence
  Synthetic oligonucleotide
acggtggagtagccgacccattctcagtcg

SEQ ID NO: 69667 - DNA, 30 bp, Artificial Sequence
  Synthetic oligonucleotide
ccactaacccctctagactgactagagtcg

SEQ ID NO: 69668 - DNA, 30 bp, Artificial Sequence
  Synthetic oligonucleotide
ctgactatgctagcgcaaagaggcgagtcg

SEQ ID NO: 69669 - DNA, 30 bp, Artificial Sequence
  Synthetic oligonucleotide
caagaacggcactcttcctgacgtgagtcg

SEQ ID NO: 69670 - DNA, 30 bp, Artificial Sequence
  Synthetic oligonucleotide
cgcgatttactgtttatctaaaagtagtcg

SEQ ID NO: 69671 - DNA, 30 bp, Artificial Sequence
  Synthetic oligonucleotide
ttgcagcgggttacctcagatcaaacgtcg

SEQ ID NO: 69672 - DNA, 30 bp, Artificial Sequence
  Synthetic oligonucleotide
ataatagagtcagagagtggactgacgtcg

SEQ ID NO: 69673 - DNA, 30 bp, Artificial Sequence
  Synthetic oligonucleotide
aaacgctaggtagtcttatcgtacccgtcg

SEQ ID NO: 69674 - DNA, 30 bp, Artificial Sequence
  Synthetic oligonucleotide
cgccgctgaatcgttggtaggactccgtcg

SEQ ID NO: 69675 - DNA, 30 bp, Artificial Sequence
  Synthetic oligonucleotide
agaacgactgaactagacatagtggcgtcg

SEQ ID NO: 69676 - DNA, 30 bp, Artificial Sequence
  Synthetic oligonucleotide
ggttgattgaggattcagagcttgtcgtcg

SEQ ID NO: 69677 - DNA, 30 bp, Artificial Sequence
  Synthetic oligonucleotide
cctgacagaactgcgggtgtatctcggtcg

SEQ ID NO: 69678 - DNA, 30 bp, Artificial Sequence
  Synthetic oligonucleotide
ccggacagcggggatgcatctacagggtcg

SEQ ID NO: 69679 - DNA, 30 bp, Artificial Sequence
  Synthetic oligonucleotide
ctgagggaatacttttagatcgtcgggtcg

SEQ ID NO: 69680 - DNA, 30 bp, Artificial Sequence
  Synthetic oligonucleotide
gccaggaatactcggtattgggcggggtcg

SEQ ID NO: 69681 - DNA, 30 bp, Artificial Sequence
  Synthetic oligonucleotide
tatggtctaggaatcacacatcgatggtcg

SEQ ID NO: 69682 - DNA, 30 bp, Artificial Sequence
  Synthetic oligonucleotide
ggccgtaaatgtctaaaacaattctggtcg

SEQ ID NO: 69683 - DNA, 30 bp, Artificial Sequence
  Synthetic oligonucleotide
cgatttgactggccctaaccggcttggtcg

SEQ ID NO: 69684 - DNA, 30 bp, Artificial Sequence
  Synthetic oligonucleotide
tggtcatggcccgatttggcggcaatgtcg

SEQ ID NO: 69685 - DNA, 31 bp, Artificial Sequence
  Synthetic oligonucleotide
ttgctactcaactaccgtatcattgatgtcg

SEQ ID NO: 69686 - DNA, 30 bp, Artificial Sequence
  Synthetic oligonucleotide
cgccataatgggctaacaatgtggctgtcg

SEQ ID NO: 69687 - DNA, 30 bp, Artificial Sequence
  Synthetic oligonucleotide
aaagcgtgcgaagcaaccttgtaggtgtcg

SEQ ID NO: 69688 - DNA, 30 bp, Artificial Sequence
  Synthetic oligonucleotide
gatgagctctaccgcgaggaatacttgtcg

SEQ ID NO: 69689 - DNA, 30 bp, Artificial Sequence
  Synthetic oligonucleotide
cgaaagggtcatgagcgtcgttggttgtcg

SEQ ID NO: 69690 - DNA, 30 bp, Artificial Sequence
  Synthetic oligonucleotide
acggttagatctaatgtaactggtttgtcg

SEQ ID NO: 69691 - DNA, 30 bp, Artificial Sequence
  Synthetic oligonucleotide
ctgcgcactaataacctcgtacaaaattcg

SEQ ID NO: 69692 - DNA, 30 bp, Artificial Sequence
  Synthetic oligonucleotide
gccaccaaaggtaaaaggggttcgaattcg

SEQ ID NO: 69693 - DNA, 30 bp, Artificial Sequence
  Synthetic oligonucleotide
cgtcgagtccgagttaaactcagacattcg

SEQ ID NO: 69694 - DNA, 30 bp, Artificial Sequence
  Synthetic oligonucleotide
ccgggcatgcccggcaagagataggattcg

SEQ ID NO: 69695 - DNA, 30 bp, Artificial Sequence
  Synthetic oligonucleotide
gcgatctgcttgtaagattgaagtgattcg

SEQ ID NO: 69696 - DNA, 30 bp, Artificial Sequence
  Synthetic oligonucleotide
actgggataccagtaactgtgattgattcg

SEQ ID NO: 69697 - DNA, 30 bp, Artificial Sequence
  Synthetic oligonucleotide
taggttgaacgaaatcctcggtttacttcg

SEQ ID NO: 69698 - DNA, 30 bp, Artificial Sequence
  Synthetic oligonucleotide
aggcataactagaacagaccggtcccttcg

SEQ ID NO: 69699 - DNA, 30 bp, Artificial Sequence
  Synthetic oligonucleotide
aagggtccaccaaggtatgtccgagcttcg

SEQ ID NO: 69700 - DNA, 30 bp, Artificial Sequence
  Synthetic oligonucleotide
aaagaagtacgattcaaaatatcaagttcg

SEQ ID NO: 69701 - DNA, 30 bp, Artificial Sequence
  Synthetic oligonucleotide
acatgggtctgcctttgcgtcgcgagttcg

SEQ ID NO: 69702 - DNA, 30 bp, Artificial Sequence
  Synthetic oligonucleotide
gtatggtagagtcatttaaaactgagttcg

SEQ ID NO: 69703 - DNA, 30 bp, Artificial Sequence
  Synthetic oligonucleotide
tgtgacagatgtatcgaggtttgccgttcg

SEQ ID NO: 69704 - DNA, 30 bp, Artificial Sequence
  Synthetic oligonucleotide
tattggaatcaaggtgcgatactccgttcg

SEQ ID NO: 69705 - DNA, 30 bp, Artificial Sequence
  Synthetic oligonucleotide
acagtatgaccaggaggtccggtccgttcg

SEQ ID NO: 69706 - DNA, 30 bp, Artificial Sequence
  Synthetic oligonucleotide
tctagactaacctcatctgagtcgcgttcg

SEQ ID NO: 69707 - DNA, 30 bp, Artificial Sequence
  Synthetic oligonucleotide
ctattaggggtaaaacaaatccctcgttcg

SEQ ID NO: 69708 - DNA, 30 bp, Artificial Sequence
  Synthetic oligonucleotide
taccctccagagatagtaaagaaatgttcg

SEQ ID NO: 69709 - DNA, 30 bp, Artificial Sequence
  Synthetic oligonucleotide
acgatgtgcggtgtcccgggaaagtgttcg

SEQ ID NO: 69710 - DNA, 30 bp, Artificial Sequence
  Synthetic oligonucleotide
gatgctcacaggaggtgtgttgcgtgttcg

SEQ ID NO: 69711 - DNA, 30 bp, Artificial Sequence
  Synthetic oligonucleotide
agggttcaaggcgtagactctcacgtttcg

SEQ ID NO: 69712 - DNA, 30 bp, Artificial Sequence
  Synthetic oligonucleotide
agagcgcaataccctaatcatcatttttcg

SEQ ID NO: 69713 - DNA, 30 bp, Artificial Sequence
  Synthetic oligonucleotide
taaagtaccgcaccatggagtaaaaaaagg

SEQ ID NO: 69714 - DNA, 30 bp, Artificial Sequence
  Synthetic oligonucleotide
ggagtagacgtccttaatatgtcaaaaagg

SEQ ID NO: 69715 - DNA, 30 bp, Artificial Sequence
  Synthetic oligonucleotide
cacgtacgagaacgcgcggtcgacaaaagg

SEQ ID NO: 69716 - DNA, 30 bp, Artificial Sequence
  Synthetic oligonucleotide
tcagggaggatgaggagtttgtccaaaagg

SEQ ID NO: 69717 - DNA, 30 bp, Artificial Sequence
  Synthetic oligonucleotide
gtaggaagagtcacgcctggcaggaaaagg

SEQ ID NO: 69718 - DNA, 30 bp, Artificial Sequence
  Synthetic oligonucleotide
acgagggtcgtatgcgactccgttaaaagg

SEQ ID NO: 69719 - DNA, 30 bp, Artificial Sequence
  Synthetic oligonucleotide
gagcggaagataaaaacataatttaaaagg

SEQ ID NO: 69720 - DNA, 30 bp, Artificial Sequence
  Synthetic oligonucleotide
cgcctattgattccagatgatatacaaagg

SEQ ID NO: 69721 - DNA, 30 bp, Artificial Sequence
  Synthetic oligonucleotide
cgtacggtgcctacgcatgtgatccaaagg

SEQ ID NO: 69722 - DNA, 30 bp, Artificial Sequence
  Synthetic oligonucleotide
gacagtgactcctacgcctgtacggaaagg

SEQ ID NO: 69723 - DNA, 30 bp, Artificial Sequence
  Synthetic oligonucleotide
ttccccgggtggggcgagaacaatgaaagg

SEQ ID NO: 69724 - DNA, 30 bp, Artificial Sequence
  Synthetic oligonucleotide
ctcggcatcgagcagtcagagacataaagg

SEQ ID NO: 69725 - DNA, 30 bp, Artificial Sequence
  Synthetic oligonucleotide
ataaggaatatcgaagtagtggcgtaaagg

SEQ ID NO: 69726 - DNA, 30 bp, Artificial Sequence
  Synthetic oligonucleotide
tcccgagagaccacactgggatcgtaaagg

SEQ ID NO: 69727 - DNA, 30 bp, Artificial Sequence
  Synthetic oligonucleotide
gggtggactaggaaggttatagggtaaagg

SEQ ID NO: 69728 - DNA, 30 bp, Artificial Sequence
  Synthetic oligonucleotide
cccgtacatactggagggtaataaacaagg

SEQ ID NO: 69729 - DNA, 30 bp, Artificial Sequence
  Synthetic oligonucleotide
taatgcatgccagcgcaaacccacacaagg

SEQ ID NO: 69730 - DNA, 30 bp, Artificial Sequence
  Synthetic oligonucleotide
ttagcggggtgcttctagttggagacaagg

SEQ ID NO: 69731 - DNA, 30 bp, Artificial Sequence
  Synthetic oligonucleotide
gtgagcttgtgacgacacattaagccaagg

SEQ ID NO: 69732 - DNA, 30 bp, Artificial Sequence
  Synthetic oligonucleotide
acttacacagatatgagagatgctccaagg

SEQ ID NO: 69733 - DNA, 30 bp, Artificial Sequence
  Synthetic oligonucleotide
cacctaatgaaaccaaagagcacagcaagg

SEQ ID NO: 69734 - DNA, 30 bp, Artificial Sequence
  Synthetic oligonucleotide
tttcctatccaaagaatccgcgccgcaagg

SEQ ID NO: 69735 - DNA, 30 bp, Artificial Sequence
  Synthetic oligonucleotide
cgacagctaaagtgctgttgagtcgcaagg

SEQ ID NO: 69736 - DNA, 29 bp, Artificial Sequence
  Synthetic oligonucleotide
ctgggcataaatgaagctaaccgtcaagg

SEQ ID NO: 69737 - DNA, 30 bp, Artificial Sequence
  Synthetic oligonucleotide
ggtcaacaagctaacatggctggttcaagg

SEQ ID NO: 69738 - DNA, 30 bp, Artificial Sequence
  Synthetic oligonucleotide
aataattaaaccgagcatatcgctagaagg

SEQ ID NO: 69739 - DNA, 30 bp, Artificial Sequence
  Synthetic oligonucleotide
gatacggaatgaaaaaccatttctagaagg

SEQ ID NO: 69740 - DNA, 31 bp, Artificial Sequence
  Synthetic oligonucleotide
gtgtaatggtgtatgggatgataggcgaagg

SEQ ID NO: 69741 - DNA, 30 bp, Artificial Sequence
  Synthetic oligonucleotide
caaggtaatctcccgacgataaatcgaagg

SEQ ID NO: 69742 - DNA, 30 bp, Artificial Sequence
  Synthetic oligonucleotide
ggacggtcaacggaaatcaatcaaggaagg

SEQ ID NO: 69743 - DNA, 30 bp, Artificial Sequence
  Synthetic oligonucleotide
cttggatggacaatttgtttgacaggaagg

SEQ ID NO: 69744 - DNA, 30 bp, Artificial Sequence
  Synthetic oligonucleotide
gctgcgtgctgggggaacatcttaggaagg

SEQ ID NO: 69745 - DNA, 30 bp, Artificial Sequence
  Synthetic oligonucleotide
tgtagccggggaccgttccgaaagggaagg

SEQ ID NO: 69746 - DNA, 30 bp, Artificial Sequence
  Synthetic oligonucleotide
ttagcgtgacaaatcgttggttatggaagg

SEQ ID NO: 69747 - DNA, 30 bp, Artificial Sequence
  Synthetic oligonucleotide
tagctagtggtgtgaatcagtgtatgaagg

SEQ ID NO: 69748 - DNA, 30 bp, Artificial Sequence
  Synthetic oligonucleotide
aatgattgctacgacttagaaggaataagg

SEQ ID NO: 69749 - DNA, 30 bp, Artificial Sequence
  Synthetic oligonucleotide
acaagttaacgaactgactttagcataagg

SEQ ID NO: 69750 - DNA, 30 bp, Artificial Sequence
  Synthetic oligonucleotide
gcgtatgtcctcgttgtgtaggctataagg

SEQ ID NO: 69751 - DNA, 30 bp, Artificial Sequence
  Synthetic oligonucleotide
aatgcagtggtcgcacgtaacaaactaagg

SEQ ID NO: 69752 - DNA, 30 bp, Artificial Sequence
  Synthetic oligonucleotide
cacgcattcagttgtaactaccaactaagg

SEQ ID NO: 69753 - DNA, 30 bp, Artificial Sequence
  Synthetic oligonucleotide
tggacatagcatccagtcgggcccctaagg

SEQ ID NO: 69754 - DNA, 30 bp, Artificial Sequence
  Synthetic oligonucleotide
tccagtaaaatggcgaagtgttacttaagg

SEQ ID NO: 69755 - DNA, 30 bp, Artificial Sequence
  Synthetic oligonucleotide
ttaaaacacggctgtgaaggtgtgaacagg

SEQ ID NO: 69756 - DNA, 30 bp, Artificial Sequence
  Synthetic oligonucleotide
tagctagaacggtttgtattataacacagg

SEQ ID NO: 69757 - DNA, 30 bp, Artificial Sequence
  Synthetic oligonucleotide
cagtcaatttcgttcacactgaaagacagg

SEQ ID NO: 69758 - DNA, 30 bp, Artificial Sequence
  Synthetic oligonucleotide
cttggacgaattatccttggatcagacagg

SEQ ID NO: 69759 - DNA, 30 bp, Artificial Sequence
  Synthetic oligonucleotide
ggccaaaaccagtttactgggctcgacagg

SEQ ID NO: 69760 - DNA, 30 bp, Artificial Sequence
  Synthetic oligonucleotide
gcttggcgagtcacaatggagtgatacagg

SEQ ID NO: 69761 - DNA, 30 bp, Artificial Sequence
  Synthetic oligonucleotide
acatgagcccagaacatgggatcctacagg

SEQ ID NO: 69762 - DNA, 30 bp, Artificial Sequence
  Synthetic oligonucleotide
gcgtggggtaaaggccaagggaattacagg

SEQ ID NO: 69763 - DNA, 30 bp, Artificial Sequence
  Synthetic oligonucleotide
acaatgggcaaatcaccgtcgctaaccagg

SEQ ID NO: 69764 - DNA, 30 bp, Artificial Sequence
  Synthetic oligonucleotide
gagcgccactcgcggatcgacattaccagg

SEQ ID NO: 69765 - DNA, 30 bp, Artificial Sequence
  Synthetic oligonucleotide
gtcgccgtccgccaccgatgctagcccagg

SEQ ID NO: 69766 - DNA, 30 bp, Artificial Sequence
  Synthetic oligonucleotide
tacgcgtccggtgacgctattagagccagg

SEQ ID NO: 69767 - DNA, 30 bp, Artificial Sequence
  Synthetic oligonucleotide
gcgtaatttacggatcgtggaatgtccagg

SEQ ID NO: 69768 - DNA, 30 bp, Artificial Sequence
  Synthetic oligonucleotide
tcagcactaccctcccttgcaaattccagg

SEQ ID NO: 69769 - DNA, 30 bp, Artificial Sequence
  Synthetic oligonucleotide
cgcttataatccgaaagtttatcttccagg

SEQ ID NO: 69770 - DNA, 31 bp, Artificial Sequence
  Synthetic oligonucleotide
tgcttaaggcatcgtctcgtcgtgttccagg

SEQ ID NO: 69771 - DNA, 30 bp, Artificial Sequence
  Synthetic oligonucleotide
tacatcggggccatgaggaataaaagcagg

SEQ ID NO: 69772 - DNA, 30 bp, Artificial Sequence
  Synthetic oligonucleotide
cgttatagcacgcggagggggtgaagcagg

SEQ ID NO: 69773 - DNA, 30 bp, Artificial Sequence
  Synthetic oligonucleotide
cgtcaagctctctagtaaaacataagcagg

SEQ ID NO: 69774 - DNA, 30 bp, Artificial Sequence
  Synthetic oligonucleotide
ctaggccccatgataggatctagtagcagg

SEQ ID NO: 69775 - DNA, 30 bp, Artificial Sequence
  Synthetic oligonucleotide
atgggagagtcgatccattcgcgccgcagg

SEQ ID NO: 69776 - DNA, 30 bp, Artificial Sequence
  Synthetic oligonucleotide
gtggtctcaacaattaacggatcatgcagg

SEQ ID NO: 69777 - DNA, 30 bp, Artificial Sequence
  Synthetic oligonucleotide
tgggtacgtggtccatgcatgaacatcagg

SEQ ID NO: 69778 - DNA, 30 bp, Artificial Sequence
  Synthetic oligonucleotide
gactatgagaaggcggtcgcggagatcagg

SEQ ID NO: 69779 - DNA, 30 bp, Artificial Sequence
  Synthetic oligonucleotide
tggcatacatggtggcgtgggaatatcagg

SEQ ID NO: 69780 - DNA, 30 bp, Artificial Sequence
  Synthetic oligonucleotide
cgggtgcttatgcacagaataggactcagg

SEQ ID NO: 69781 - DNA, 30 bp, Artificial Sequence
  Synthetic oligonucleotide
aggtgagttctagagcataacctactcagg

SEQ ID NO: 69782 - DNA, 30 bp, Artificial Sequence
  Synthetic oligonucleotide
agagtatcggggcgaattcacaccctcagg

SEQ ID NO: 69783 - DNA, 30 bp, Artificial Sequence
  Synthetic oligonucleotide
cgcgtgaggcaaggttccagtcacgtcagg

SEQ ID NO: 69784 - DNA, 30 bp, Artificial Sequence
  Synthetic oligonucleotide
ccctaggttgagaataaaccgcgtttcagg

SEQ ID NO: 69785 - DNA, 30 bp, Artificial Sequence
  Synthetic oligonucleotide
cagagtgaacgaaagaaggaacgacagagg

SEQ ID NO: 69786 - DNA, 30 bp, Artificial Sequence
  Synthetic oligonucleotide
tcataatcgctacactccttggggcagagg

SEQ ID NO: 69787 - DNA, 30 bp, Artificial Sequence
  Synthetic oligonucleotide
cgtcgtgattaatggtgagtcagctagagg

SEQ ID NO: 69788 - DNA, 30 bp, Artificial Sequence
  Synthetic oligonucleotide
cagtctagacggtattagacgtggtagagg

SEQ ID NO: 69789 - DNA, 30 bp, Artificial Sequence
  Synthetic oligonucleotide
taagaagccaagttcgttcgttgttagagg

SEQ ID NO: 69790 - DNA, 30 bp, Artificial Sequence
  Synthetic oligonucleotide
cttggaaaagagatactgaaatttgcgagg

SEQ ID NO: 69791 - DNA, 30 bp, Artificial Sequence
  Synthetic oligonucleotide
tcatccctccagacctggaaacgatcgagg

SEQ ID NO: 69792 - DNA, 30 bp, Artificial Sequence
  Synthetic oligonucleotide
ttatccccagctcccgcagggttaaggagg

SEQ ID NO: 69793 - DNA, 30 bp, Artificial Sequence
  Synthetic oligonucleotide
gcgaggagtttctctccacttggcaggagg

SEQ ID NO: 69794 - DNA, 30 bp, Artificial Sequence
  Synthetic oligonucleotide
agagacacgggttaaatcaacgagaggagg

SEQ ID NO: 69795 - DNA, 30 bp, Artificial Sequence
  Synthetic oligonucleotide
cgcatattcggcgaattgtaaaaccggagg

SEQ ID NO: 69796 - DNA, 30 bp, Artificial Sequence
  Synthetic oligonucleotide
tgacacgtgagtcaaggaggagaccggagg

SEQ ID NO: 69797 - DNA, 30 bp, Artificial Sequence
  Synthetic oligonucleotide
aacgtaggccggcgaaggtgggcgcggagg

SEQ ID NO: 69798 - DNA, 30 bp, Artificial Sequence
  Synthetic oligonucleotide
tttgcgttttaatatgtagggggagggagg

SEQ ID NO: 69799 - DNA, 30 bp, Artificial Sequence
  Synthetic oligonucleotide
ggacaggcggacggggacaaaggggggagg

SEQ ID NO: 69800 - DNA, 30 bp, Artificial Sequence
  Synthetic oligonucleotide
gcgacgtgaacatggctatccaactggagg

SEQ ID NO: 69801 - DNA, 30 bp, Artificial Sequence
  Synthetic oligonucleotide
agaatgcgaacgggggacatgaacatgagg

SEQ ID NO: 69802 - DNA, 30 bp, Artificial Sequence
  Synthetic oligonucleotide
tgccacatgcaagccggcgtgttgatgagg

SEQ ID NO: 69803 - DNA, 30 bp, Artificial Sequence
  Synthetic oligonucleotide
ttgggcgagttaattcttggaggagtgagg

SEQ ID NO: 69804 - DNA, 30 bp, Artificial Sequence
  Synthetic oligonucleotide
gcgtctcaaggtagaatatttgtaaatagg

SEQ ID NO: 69805 - DNA, 30 bp, Artificial Sequence
  Synthetic oligonucleotide
cgacggaagcgggctgtacccgcccatagg

SEQ ID NO: 69806 - DNA, 30 bp, Artificial Sequence
  Synthetic oligonucleotide
gtgataacggttggattatgacttcatagg

SEQ ID NO: 69807 - DNA, 30 bp, Artificial Sequence
  Synthetic oligonucleotide
aggcatgagtgaattatcgaggtagatagg

SEQ ID NO: 69808 - DNA, 30 bp, Artificial Sequence
  Synthetic oligonucleotide
aagagaaggttcatcctaacgtgcgatagg

SEQ ID NO: 69809 - DNA, 30 bp, Artificial Sequence
  Synthetic oligonucleotide
tggaaggagggtattgcaacgggtgatagg

SEQ ID NO: 69810 - DNA, 30 bp, Artificial Sequence
  Synthetic oligonucleotide
cgggcgcatgttagtccatcgtgatatagg

SEQ ID NO: 69811 - DNA, 30 bp, Artificial Sequence
  Synthetic oligonucleotide
agcgagttccaccacaaatataattatagg

SEQ ID NO: 69812 - DNA, 30 bp, Artificial Sequence
  Synthetic oligonucleotide
tgggtaatgtgaatgcacaagcaaactagg

SEQ ID NO: 69813 - DNA, 30 bp, Artificial Sequence
  Synthetic oligonucleotide
caagaactgtcagatataagagagactagg

SEQ ID NO: 69814 - DNA, 30 bp, Artificial Sequence
  Synthetic oligonucleotide
tgtcttatagctacagatggagagactagg

SEQ ID NO: 69815 - DNA, 30 bp, Artificial Sequence
  Synthetic oligonucleotide
ggcgtatcattcctgggaacaacccctagg

SEQ ID NO: 69816 - DNA, 30 bp, Artificial Sequence
  Synthetic oligonucleotide
cagaccaaaatgcacggctaaattcctagg

SEQ ID NO: 69817 - DNA, 30 bp, Artificial Sequence
  Synthetic oligonucleotide
ggacgtgctaagcaatccgcgaatgctagg

SEQ ID NO: 69818 - DNA, 30 bp, Artificial Sequence
  Synthetic oligonucleotide
caaaagtggagtaaatgtcgtgtatctagg

SEQ ID NO: 69819 - DNA, 30 bp, Artificial Sequence
  Synthetic oligonucleotide
agaagcatccaggacacgaggaaaagtagg

SEQ ID NO: 69820 - DNA, 30 bp, Artificial Sequence
  Synthetic oligonucleotide
accagttctcgagcagatgggtaaagtagg

SEQ ID NO: 69821 - DNA, 30 bp, Artificial Sequence
  Synthetic oligonucleotide
ttgcagatcctctcaatgggatcaagtagg

SEQ ID NO: 69822 - DNA, 30 bp, Artificial Sequence
  Synthetic oligonucleotide
aaagcagatcgatgttagaagtgaagtagg

SEQ ID NO: 69823 - DNA, 30 bp, Artificial Sequence
  Synthetic oligonucleotide
aaaatacatatgagcggaggcataagtagg

SEQ ID NO: 69824 - DNA, 30 bp, Artificial Sequence
  Synthetic oligonucleotide
aattgtaccggacaacagggcgtaagtagg

SEQ ID NO: 69825 - DNA, 30 bp, Artificial Sequence
  Synthetic oligonucleotide
cgtcgtggtacaacaaaataggttagtagg

SEQ ID NO: 69826 - DNA, 30 bp, Artificial Sequence
  Synthetic oligonucleotide
cgctatggtcagcgcgtagacaatcgtagg

SEQ ID NO: 69827 - DNA, 30 bp, Artificial Sequence
  Synthetic oligonucleotide
atgtgtgggaaaattggcgtatggggtagg

SEQ ID NO: 69828 - DNA, 30 bp, Artificial Sequence
  Synthetic oligonucleotide
gcctattggagtgtcgacgtgggttgtagg

SEQ ID NO: 69829 - DNA, 30 bp, Artificial Sequence
  Synthetic oligonucleotide
tccgctactccaacaaggtgacaaattagg

SEQ ID NO: 69830 - DNA, 30 bp, Artificial Sequence
  Synthetic oligonucleotide
gctcagtttgcgtagaggactcgaattagg

SEQ ID NO: 69831 - DNA, 30 bp, Artificial Sequence
  Synthetic oligonucleotide
cgaccagggtaaaaaggatttggcattagg

SEQ ID NO: 69832 - DNA, 30 bp, Artificial Sequence
  Synthetic oligonucleotide
tggaaacgtaagataggactcaatattagg

SEQ ID NO: 69833 - DNA, 30 bp, Artificial Sequence
  Synthetic oligonucleotide
tccagcaaagaacatatgactccgcttagg

SEQ ID NO: 69834 - DNA, 30 bp, Artificial Sequence
  Synthetic oligonucleotide
acaagatctggcgtaccgagttcgcttagg

SEQ ID NO: 69835 - DNA, 30 bp, Artificial Sequence
  Synthetic oligonucleotide
cgtcacgatacggcgacggtactgtttagg

SEQ ID NO: 69836 - DNA, 30 bp, Artificial Sequence
  Synthetic oligonucleotide
actcgacggtaagcgcaaatgttacaacgg

SEQ ID NO: 69837 - DNA, 30 bp, Artificial Sequence
  Synthetic oligonucleotide
atggtatggcggctaagtagggcgcaacgg

SEQ ID NO: 69838 - DNA, 30 bp, Artificial Sequence
  Synthetic oligonucleotide
gcgtgtgcgatgaatgcgcctagtcaacgg

SEQ ID NO: 69839 - DNA, 30 bp, Artificial Sequence
  Synthetic oligonucleotide
ggcacgtcgtcctcggagcaaaatacacgg

SEQ ID NO: 69840 - DNA, 30 bp, Artificial Sequence
  Synthetic oligonucleotide
ctgcgaaacacagaggaagattgctcacgg

SEQ ID NO: 69841 - DNA, 30 bp, Artificial Sequence
  Synthetic oligonucleotide
tcagtggcaggtaaggaagcaggtggacgg

SEQ ID NO: 69842 - DNA, 30 bp, Artificial Sequence
  Synthetic oligonucleotide
taaacagacgatacggacggactgtgacgg

SEQ ID NO: 69843 - DNA, 30 bp, Artificial Sequence
  Synthetic oligonucleotide
ggattaactgaagtaagtcgagccatacgg

SEQ ID NO: 69844 - DNA, 30 bp, Artificial Sequence
  Synthetic oligonucleotide
tcatcgggaaagccggcgatagatatacgg

SEQ ID NO: 69845 - DNA, 30 bp, Artificial Sequence
  Synthetic oligonucleotide
gacaaggggagtatttttcatctgctacgg

SEQ ID NO: 69846 - DNA, 30 bp, Artificial Sequence
  Synthetic oligonucleotide
acgccaaggcgtgacaacccgcacgtacgg

SEQ ID NO: 69847 - DNA, 30 bp, Artificial Sequence
  Synthetic oligonucleotide
tgtagcgagtcacatgggggtacggtacgg

SEQ ID NO: 69848 - DNA, 30 bp, Artificial Sequence
  Synthetic oligonucleotide
tggtgagctctacacgataggagcttacgg

SEQ ID NO: 69849 - DNA, 30 bp, Artificial Sequence
  Synthetic oligonucleotide
taaatccagaaccacgataagaccaaccgg

SEQ ID NO: 69850 - DNA, 30 bp, Artificial Sequence
  Synthetic oligonucleotide
cctcattaaggctattatggtatagaccgg

SEQ ID NO: 69851 - DNA, 30 bp, Artificial Sequence
  Synthetic oligonucleotide
tgggccttaaagtatcttaagcgagcccgg

SEQ ID NO: 69852 - DNA, 30 bp, Artificial Sequence
  Synthetic oligonucleotide
ctgtaaacttggtgagaggtggccgcccgg

SEQ ID NO: 69853 - DNA, 30 bp, Artificial Sequence
  Synthetic oligonucleotide
acgggtggcatcagcgctgtaccaggccgg

SEQ ID NO: 69854 - DNA, 30 bp, Artificial Sequence
  Synthetic oligonucleotide
aacggcaaacaataatgccgattctgccgg

SEQ ID NO: 69855 - DNA, 30 bp, Artificial Sequence
  Synthetic oligonucleotide
tagcgttgtacgttgaaggtccgaatccgg

SEQ ID NO: 69856 - DNA, 30 bp, Artificial Sequence
  Synthetic oligonucleotide
aaagtgcacaagtgtcagcgcctgatccgg

SEQ ID NO: 69857 - DNA, 30 bp, Artificial Sequence
  Synthetic oligonucleotide
acggctctctctgagaattcagacctccgg

SEQ ID NO: 69858 - DNA, 30 bp, Artificial Sequence
  Synthetic oligonucleotide
gcgcacatgaatctgatcgtaagcctccgg

SEQ ID NO: 69859 - DNA, 30 bp, Artificial Sequence
  Synthetic oligonucleotide
cgtggatggtaggcaataagatctctccgg

SEQ ID NO: 69860 - DNA, 30 bp, Artificial Sequence
  Synthetic oligonucleotide
catgtggtcaatgttgggctcccattccgg

SEQ ID NO: 69861 - DNA, 30 bp, Artificial Sequence
  Synthetic oligonucleotide
actcaggggcgatatattagaccgttccgg

SEQ ID NO: 69862 - DNA, 30 bp, Artificial Sequence
  Synthetic oligonucleotide
tgcgctaaggagcgctggagccagaagcgg

SEQ ID NO: 69863 - DNA, 30 bp, Artificial Sequence
  Synthetic oligonucleotide
aacatggcgaccgttctgtgatggaagcgg

SEQ ID NO: 69864 - DNA, 30 bp, Artificial Sequence
  Synthetic oligonucleotide
cttgggtcaaaaagtcaagccgtgcagcgg

SEQ ID NO: 69865 - DNA, 30 bp, Artificial Sequence
  Synthetic oligonucleotide
aggctgccgtataagaagggtcgggagcgg

SEQ ID NO: 69866 - DNA, 30 bp, Artificial Sequence
  Synthetic oligonucleotide
tcgagctaactcggaggaacatcgtagcgg

SEQ ID NO: 69867 - DNA, 30 bp, Artificial Sequence
  Synthetic oligonucleotide
cgtgggacgaaacatatagattcaacgcgg

SEQ ID NO: 69868 - DNA, 30 bp, Artificial Sequence
  Synthetic oligonucleotide
aataatcacatatcacctttcgcaccgcgg

SEQ ID NO: 69869 - DNA, 30 bp, Artificial Sequence
  Synthetic oligonucleotide
atcaagcaacataccgggcgacatccgcgg

SEQ ID NO: 69870 - DNA, 30 bp, Artificial Sequence
  Synthetic oligonucleotide
tggccgaaacaatgagtaaccaaatcgcgg

SEQ ID NO: 69871 - DNA, 30 bp, Artificial Sequence
  Synthetic oligonucleotide
cagaacaaacccaaaaatctgttatcgcgg

SEQ ID NO: 69872 - DNA, 30 bp, Artificial Sequence
  Synthetic oligonucleotide
gcgttacagttcgcccgattttactcgcgg

SEQ ID NO: 69873 - DNA, 30 bp, Artificial Sequence
  Synthetic oligonucleotide
ggattgaactgaggaggccattgctcgcgg

SEQ ID NO: 69874 - DNA, 30 bp, Artificial Sequence
  Synthetic oligonucleotide
gccttaagagcgaatagtttgggcaggcgg

SEQ ID NO: 69875 - DNA, 30 bp, Artificial Sequence
  Synthetic oligonucleotide
gccaggggagtgcagaggtttctcaggcgg

SEQ ID NO: 69876 - DNA, 30 bp, Artificial Sequence
  Synthetic oligonucleotide
tcacatcggtggtcggacggaatccggcgg

SEQ ID NO: 69877 - DNA, 30 bp, Artificial Sequence
  Synthetic oligonucleotide
gtgctgcgtgtgctccataagatagggcgg

SEQ ID NO: 69878 - DNA, 30 bp, Artificial Sequence
  Synthetic oligonucleotide
cgtccaggtcgcgaatttctgtagtggcgg

SEQ ID NO: 69879 - DNA, 30 bp, Artificial Sequence
  Synthetic oligonucleotide
caacacagcgagagtgtgtgcatttggcgg

SEQ ID NO: 69880 - DNA, 30 bp, Artificial Sequence
  Synthetic oligonucleotide
aatcagaacggctaaatagcacgaatgcgg

SEQ ID NO: 69881 - DNA, 30 bp, Artificial Sequence
  Synthetic oligonucleotide
cgctggagactactaaaaacgaacatgcgg

SEQ ID NO: 69882 - DNA, 30 bp, Artificial Sequence
  Synthetic oligonucleotide
gcgcaagttgtgaccgtgttcatcatgcgg

SEQ ID NO: 69883 - DNA, 30 bp, Artificial Sequence
  Synthetic oligonucleotide
ataaaaataagatgccgacagaggatgcgg

SEQ ID NO: 69884 - DNA, 30 bp, Artificial Sequence
  Synthetic oligonucleotide
atgaataacccgagagatcgaatcgtgcgg

SEQ ID NO: 69885 - DNA, 30 bp, Artificial Sequence
  Synthetic oligonucleotide
acaaatactaccggagggccaaaggtgcgg

SEQ ID NO: 69886 - DNA, 30 bp, Artificial Sequence
  Synthetic oligonucleotide
actggctggacatgcctatacaaaaatcgg

SEQ ID NO: 69887 - DNA, 30 bp, Artificial Sequence
  Synthetic oligonucleotide
gtcgggttgaatgaagaattgaaaaatcgg

SEQ ID NO: 69888 - DNA, 30 bp, Artificial Sequence
  Synthetic oligonucleotide
acgtcagccgtgcttgatgtgtaaaatcgg

SEQ ID NO: 69889 - DNA, 30 bp, Artificial Sequence
  Synthetic oligonucleotide
agggacatactgtacccgagttacaatcgg

SEQ ID NO: 69890 - DNA, 30 bp, Artificial Sequence
  Synthetic oligonucleotide
cacgtaaaaacaagagccgtgaataatcgg

SEQ ID NO: 69891 - DNA, 30 bp, Artificial Sequence
  Synthetic oligonucleotide
ccggctcacgggttgtatttaaaccatcgg

SEQ ID NO: 69892 - DNA, 30 bp, Artificial Sequence
  Synthetic oligonucleotide
tttgcacgggtatctaaaagttgcgatcgg

SEQ ID NO: 69893 - DNA, 30 bp, Artificial Sequence
  Synthetic oligonucleotide
ggtagtgcctcgtccgaaagagaggatcgg

SEQ ID NO: 69894 - DNA, 30 bp, Artificial Sequence
  Synthetic oligonucleotide
ggcccgtgggcagacgtattatgaactcgg

SEQ ID NO: 69895 - DNA, 30 bp, Artificial Sequence
  Synthetic oligonucleotide
atcataatattgttataacactaacctcgg

SEQ ID NO: 69896 - DNA, 30 bp, Artificial Sequence
  Synthetic oligonucleotide
cacgacagctttcattctgcatgccctcgg

SEQ ID NO: 69897 - DNA, 30 bp, Artificial Sequence
  Synthetic oligonucleotide
acgtcagagaaagtctcgcaaacagctcgg

SEQ ID NO: 69898 - DNA, 30 bp, Artificial Sequence
  Synthetic oligonucleotide
cttgcatcttactgaagtagactggctcgg

SEQ ID NO: 69899 - DNA, 30 bp, Artificial Sequence
  Synthetic oligonucleotide
aagtgtgcggacttgcggcgataatctcgg

SEQ ID NO: 69900 - DNA, 30 bp, Artificial Sequence
  Synthetic oligonucleotide
cagctgtgaataaagaaagaactaagtcgg

SEQ ID NO: 69901 - DNA, 30 bp, Artificial Sequence
  Synthetic oligonucleotide
agcagtcgagaaatttgccggcgtcgtcgg

SEQ ID NO: 69902 - DNA, 30 bp, Artificial Sequence
  Synthetic oligonucleotide
ccaccggataatgacccccgttaaggtcgg

SEQ ID NO: 69903 - DNA, 30 bp, Artificial Sequence
  Synthetic oligonucleotide
tcacctagccatagatcccgacgttgtcgg

SEQ ID NO: 69904 - DNA, 30 bp, Artificial Sequence
  Synthetic oligonucleotide
aggtgcaagaggtcctacactgcaattcgg

SEQ ID NO: 69905 - DNA, 30 bp, Artificial Sequence
  Synthetic oligonucleotide
gagggggctctctattaacatcgaattcgg

SEQ ID NO: 69906 - DNA, 30 bp, Artificial Sequence
  Synthetic oligonucleotide
ttacacagttttatgcgtcaaatagttcgg

SEQ ID NO: 69907 - DNA, 30 bp, Artificial Sequence
  Synthetic oligonucleotide
gacattaatcaaaacccaatttcaaaaggg

SEQ ID NO: 69908 - DNA, 30 bp, Artificial Sequence
  Synthetic oligonucleotide
aactccgaaggagtacaaatgctaaaaggg

SEQ ID NO: 69909 - DNA, 30 bp, Artificial Sequence
  Synthetic oligonucleotide
agctggtgaagaataatctaactacaaggg

SEQ ID NO: 69910 - DNA, 30 bp, Artificial Sequence
  Synthetic oligonucleotide
tcagcggctcctaccccctaacttcaaggg

SEQ ID NO: 69911 - DNA, 30 bp, Artificial Sequence
  Synthetic oligonucleotide
agatgcagaggaactcgtagttacgaaggg

SEQ ID NO: 69912 - DNA, 30 bp, Artificial Sequence
  Synthetic oligonucleotide
gtgtgtcgtaggtatgccgtgatgtaaggg

SEQ ID NO: 69913 - DNA, 30 bp, Artificial Sequence
  Synthetic oligonucleotide
taggcactgtacgacttagcttatacaggg

SEQ ID NO: 69914 - DNA, 30 bp, Artificial Sequence
  Synthetic oligonucleotide
catcaaaaatccaaaagtatctgcccaggg

SEQ ID NO: 69915 - DNA, 30 bp, Artificial Sequence
  Synthetic oligonucleotide
aggaaataccttctctcttaaatgccaggg

SEQ ID NO: 69916 - DNA, 30 bp, Artificial Sequence
  Synthetic oligonucleotide
gggaattttgttgaccatgaaagctcaggg

SEQ ID NO: 69917 - DNA, 30 bp, Artificial Sequence
  Synthetic oligonucleotide
acgaacgttatttcgatatgtcaacgaggg

SEQ ID NO: 69918 - DNA, 30 bp, Artificial Sequence
  Synthetic oligonucleotide
tgggagaaccaatgaaaccccgaacgaggg

SEQ ID NO: 69919 - DNA, 30 bp, Artificial Sequence
  Synthetic oligonucleotide
cattgccacacccaaactccgcctcgaggg

SEQ ID NO: 69920 - DNA, 30 bp, Artificial Sequence
  Synthetic oligonucleotide
atgggtggacggacattgagagctcgaggg

SEQ ID NO: 69921 - DNA, 30 bp, Artificial Sequence
  Synthetic oligonucleotide
tgcataggggatagtggtggctccggaggg

SEQ ID NO: 69922 - DNA, 30 bp, Artificial Sequence
  Synthetic oligonucleotide
cgggtatctcagtaacgaatagaatgaggg

SEQ ID NO: 69923 - DNA, 30 bp, Artificial Sequence
  Synthetic oligonucleotide
tggccgtcacatatcacacctagatgaggg

SEQ ID NO: 69924 - DNA, 30 bp, Artificial Sequence
  Synthetic oligonucleotide
gtcgaagaggcctaacgcgagcggtgaggg

SEQ ID NO: 69925 - DNA, 30 bp, Artificial Sequence
  Synthetic oligonucleotide
gctccggcagctaatgaaatcaaaataggg

SEQ ID NO: 69926 - DNA, 30 bp, Artificial Sequence
  Synthetic oligonucleotide
gccggtctgctgagctaaagactaataggg

SEQ ID NO: 69927 - DNA, 30 bp, Artificial Sequence
  Synthetic oligonucleotide
tgcttactgactgggtcgagaaacctaggg

SEQ ID NO: 69928 - DNA, 30 bp, Artificial Sequence
  Synthetic oligonucleotide
ccaagacgactcctactggaagatctaggg

SEQ ID NO: 69929 - DNA, 30 bp, Artificial Sequence
  Synthetic oligonucleotide
tgcgaaggcagataattcttatgagtaggg

SEQ ID NO: 69930 - DNA, 30 bp, Artificial Sequence
  Synthetic oligonucleotide
agtaggtatgtaagcacgttccccgtaggg

SEQ ID NO: 69931 - DNA, 30 bp, Artificial Sequence
  Synthetic oligonucleotide
gtgttatataagtatcaagaaaacttaggg

SEQ ID NO: 69932 - DNA, 30 bp, Artificial Sequence
  Synthetic oligonucleotide
agggtaccttgtcaaaagtgaacgttaggg

SEQ ID NO: 69933 - DNA, 30 bp, Artificial Sequence
  Synthetic oligonucleotide
caatgaatgtcaaaggcggtatgtaacggg

SEQ ID NO: 69934 - DNA, 30 bp, Artificial Sequence
  Synthetic oligonucleotide
aaggatgtaattctaggacagtgtaacggg

SEQ ID NO: 69935 - DNA, 30 bp, Artificial Sequence
  Synthetic oligonucleotide
gtataccgacggcgtaatgtcactcacggg

SEQ ID NO: 69936 - DNA, 30 bp, Artificial Sequence
  Synthetic oligonucleotide
tcttccaggacatgaggtctctgtcacggg

SEQ ID NO: 69937 - DNA, 30 bp, Artificial Sequence
  Synthetic oligonucleotide
gttcaagaagggaggaaggtgacggacggg

SEQ ID NO: 69938 - DNA, 30 bp, Artificial Sequence
  Synthetic oligonucleotide
tcgtctgaaatgatagttcgtacggacggg

SEQ ID NO: 69939 - DNA, 30 bp, Artificial Sequence
  Synthetic oligonucleotide
tgatacggctaagctgtggccacttacggg

SEQ ID NO: 69940 - DNA, 30 bp, Artificial Sequence
  Synthetic oligonucleotide
cgtgaggcagggcgacatgccccgaccggg

SEQ ID NO: 69941 - DNA, 30 bp, Artificial Sequence
  Synthetic oligonucleotide
gaaagccctgtacgtcgacggtatgccggg

SEQ ID NO: 69942 - DNA, 30 bp, Artificial Sequence
  Synthetic oligonucleotide
tccaattgcacttaacccaaacttgccggg

SEQ ID NO: 69943 - DNA, 30 bp, Artificial Sequence
  Synthetic oligonucleotide
ggctgaataacagtactggaagactccggg

SEQ ID NO: 69944 - DNA, 30 bp, Artificial Sequence
  Synthetic oligonucleotide
actaaaccaggcgacctgactcggagcggg

SEQ ID NO: 69945 - DNA, 30 bp, Artificial Sequence
  Synthetic oligonucleotide
tacagacgacttgcgcccatggggatcggg

SEQ ID NO: 69946 - DNA, 30 bp, Artificial Sequence
  Synthetic oligonucleotide
cggaataatggctcgtaacgtatgatcggg

SEQ ID NO: 69947 - DNA, 30 bp, Artificial Sequence
  Synthetic oligonucleotide
gtccgcgggtaacaacatggacaactcggg

SEQ ID NO: 69948 - DNA, 30 bp, Artificial Sequence
  Synthetic oligonucleotide
ggagaaatgcctcccagcaggcacctcggg

SEQ ID NO: 69949 - DNA, 30 bp, Artificial Sequence
  Synthetic oligonucleotide
tgacgtgtgggcgatgggtcaagggtcggg

SEQ ID NO: 69950 - DNA, 30 bp, Artificial Sequence
  Synthetic oligonucleotide
cgaagtgtgcgatagggagtctagttcggg

SEQ ID NO: 69951 - DNA, 30 bp, Artificial Sequence
  Synthetic oligonucleotide
agcttacaggtgaggctgttaacgttcggg

SEQ ID NO: 69952 - DNA, 30 bp, Artificial Sequence
  Synthetic oligonucleotide
ctcttgatagcaactggcagaaacaagggg

SEQ ID NO: 69953 - DNA, 30 bp, Artificial Sequence
  Synthetic oligonucleotide
gattccattactggacaaaatacgaagggg

SEQ ID NO: 69954 - DNA, 31 bp, Artificial Sequence
  Synthetic oligonucleotide
gaccgtttgtgaagtcttggaggtccagggg

SEQ ID NO: 69955 - DNA, 30 bp, Artificial Sequence
  Synthetic oligonucleotide
tggcaatttacagatgaaacgtggcagggg

SEQ ID NO: 69956 - DNA, 30 bp, Artificial Sequence
  Synthetic oligonucleotide
agactctggtgcgatatcttaaaggagggg

SEQ ID NO: 69957 - DNA, 30 bp, Artificial Sequence
  Synthetic oligonucleotide
ctgctatgatcggtattccagaaatagggg

SEQ ID NO: 69958 - DNA, 30 bp, Artificial Sequence
  Synthetic oligonucleotide
cacaagacgctaatatcggaaccctagggg

SEQ ID NO: 69959 - DNA, 30 bp, Artificial Sequence
  Synthetic oligonucleotide
cgcttggaagtaggttaaattcgcacgggg

SEQ ID NO: 69960 - DNA, 30 bp, Artificial Sequence
  Synthetic oligonucleotide
ggggaacaacgcaatctaacgagtacgggg

SEQ ID NO: 69961 - DNA, 30 bp, Artificial Sequence
  Synthetic oligonucleotide
agataccggtaccaagcgttgagtacgggg

SEQ ID NO: 69962 - DNA, 30 bp, Artificial Sequence
  Synthetic oligonucleotide
ttaggatgcgactggggaaagctcccgggg

SEQ ID NO: 69963 - DNA, 30 bp, Artificial Sequence
  Synthetic oligonucleotide
acttagatcaagagttgcatttggccgggg

SEQ ID NO: 69964 - DNA, 30 bp, Artificial Sequence
  Synthetic oligonucleotide
cagttaaacacttggacctgggatccgggg

SEQ ID NO: 69965 - DNA, 30 bp, Artificial Sequence
  Synthetic oligonucleotide
cttagcattcatttgcaagatagagcgggg

SEQ ID NO: 69966 - DNA, 30 bp, Artificial Sequence
  Synthetic oligonucleotide
agccgcggtgctaaggaatatagcgcgggg

SEQ ID NO: 69967 - DNA, 30 bp, Artificial Sequence
  Synthetic oligonucleotide
tagtggtccccagtaaagcgtaaagggggg

SEQ ID NO: 69968 - DNA, 30 bp, Artificial Sequence
  Synthetic oligonucleotide
ttggttgagtagtccgacaagggtgggggg

SEQ ID NO: 69969 - DNA, 30 bp, Artificial Sequence
  Synthetic oligonucleotide
gatctgcgcctgcgaaaagtgggctggggg

SEQ ID NO: 69970 - DNA, 30 bp, Artificial Sequence
  Synthetic oligonucleotide
taagccgtatgtgcaaccgtgttgatgggg

SEQ ID NO: 69971 - DNA, 30 bp, Artificial Sequence
  Synthetic oligonucleotide
ggtcaatcagggttacatgacatactgggg

SEQ ID NO: 69972 - DNA, 31 bp, Artificial Sequence
  Synthetic oligonucleotide
aagcatattgcctccgactgttgctctgggg

SEQ ID NO: 69973 - DNA, 30 bp, Artificial Sequence
  Synthetic oligonucleotide
aacagtcataaccatcgattcccagtgggg

SEQ ID NO: 69974 - DNA, 30 bp, Artificial Sequence
  Synthetic oligonucleotide
tgcgatggagcgcggtagccgatagtgggg

SEQ ID NO: 69975 - DNA, 30 bp, Artificial Sequence
  Synthetic oligonucleotide
gctctctggcgggcgattgagtacgtgggg

SEQ ID NO: 69976 - DNA, 30 bp, Artificial Sequence
  Synthetic oligonucleotide
gtctgaataacgtggcgtcatcaggtgggg

SEQ ID NO: 69977 - DNA, 30 bp, Artificial Sequence
  Synthetic oligonucleotide
aagacgacatgtttaaaatacagtgtgggg

SEQ ID NO: 69978 - DNA, 30 bp, Artificial Sequence
  Synthetic oligonucleotide
aagacaagaccactaggcgaagaattgggg

SEQ ID NO: 69979 - DNA, 30 bp, Artificial Sequence
  Synthetic oligonucleotide
gagccgaacagtaagcttgattggttgggg

SEQ ID NO: 69980 - DNA, 30 bp, Artificial Sequence
  Synthetic oligonucleotide
ccaaaaggctgctggttatatcaaaatggg

SEQ ID NO: 69981 - DNA, 30 bp, Artificial Sequence
  Synthetic oligonucleotide
gcacgattcagtaaggccttgaacaatggg

SEQ ID NO: 69982 - DNA, 30 bp, Artificial Sequence
  Synthetic oligonucleotide
gtcacaaggtatcacgcaagaaagaatggg

SEQ ID NO: 69983 - DNA, 30 bp, Artificial Sequence
  Synthetic oligonucleotide
gagttactaactcaaagggcatcgaatggg

SEQ ID NO: 69984 - DNA, 30 bp, Artificial Sequence
  Synthetic oligonucleotide
ggaggagtgatagcccgtgcctaacatggg

SEQ ID NO: 69985 - DNA, 30 bp, Artificial Sequence
  Synthetic oligonucleotide
acagactgttgggcgatcctaggccatggg

SEQ ID NO: 69986 - DNA, 30 bp, Artificial Sequence
  Synthetic oligonucleotide
ggacgtaaagaactatacggttggcatggg

SEQ ID NO: 69987 - DNA, 30 bp, Artificial Sequence
  Synthetic oligonucleotide
ctaggataaatccaatacgacttcgatggg

SEQ ID NO: 69988 - DNA, 30 bp, Artificial Sequence
  Synthetic oligonucleotide
aactcgatggcagggtgcaacttcactggg

SEQ ID NO: 69989 - DNA, 30 bp, Artificial Sequence
  Synthetic oligonucleotide
gatcctagcgaaggcgctcaacatcctggg

SEQ ID NO: 69990 - DNA, 30 bp, Artificial Sequence
  Synthetic oligonucleotide
caggcgtacaggagttcaaggtgatctggg

SEQ ID NO: 69991 - DNA, 30 bp, Artificial Sequence
  Synthetic oligonucleotide
ccatccagacaaagaacgcaaccaagtggg

SEQ ID NO: 69992 - DNA, 31 bp, Artificial Sequence
  Synthetic oligonucleotide
ttcgagggagtaaacatccatggttcgtggg

SEQ ID NO: 69993 - DNA, 30 bp, Artificial Sequence
  Synthetic oligonucleotide
acactggaataatatattaggactggtggg

SEQ ID NO: 69994 - DNA, 30 bp, Artificial Sequence
  Synthetic oligonucleotide
agggaggactatacaagttacgtgtgtggg

SEQ ID NO: 69995 - DNA, 30 bp, Artificial Sequence
  Synthetic oligonucleotide
tgagggcaagcctctacttctcgttgtggg

SEQ ID NO: 69996 - DNA, 30 bp, Artificial Sequence
  Synthetic oligonucleotide
gaccgagtttatacggaagggagaattggg

SEQ ID NO: 69997 - DNA, 30 bp, Artificial Sequence
  Synthetic oligonucleotide
ctacattgagaaaaacagagtagaattggg

SEQ ID NO: 69998 - DNA, 30 bp, Artificial Sequence
  Synthetic oligonucleotide
agcttatttgctagccgttaacttattggg

SEQ ID NO: 69999 - DNA, 30 bp, Artificial Sequence
  Synthetic oligonucleotide
ctcggagcatagacgggggttgaacttggg

SEQ ID NO: 70000 - DNA, 30 bp, Artificial Sequence
  Synthetic oligonucleotide
ccgtaaccgttaaataaaggttttcttggg

SEQ ID NO: 70001 - DNA, 30 bp, Artificial Sequence
  Synthetic oligonucleotide
acgaacttatgtcaaaatgactaatttggg

SEQ ID NO: 70002 - DNA, 30 bp, Artificial Sequence
  Synthetic oligonucleotide
atgaagtgacgagcttgactggcaaaatgg

SEQ ID NO: 70003 - DNA, 30 bp, Artificial Sequence
  Synthetic oligonucleotide
gcgagtaattgtaagggtcgcaacaaatgg

SEQ ID NO: 70004 - DNA, 30 bp, Artificial Sequence
  Synthetic oligonucleotide
gtgggtggccgaacagttaagtccaaatgg

SEQ ID NO: 70005 - DNA, 30 bp, Artificial Sequence
  Synthetic oligonucleotide
gatagagataacgttcagggggttaaatgg

SEQ ID NO: 70006 - DNA, 30 bp, Artificial Sequence
  Synthetic oligonucleotide
agatgttatgctgagtcgaattaacaatgg

SEQ ID NO: 70007 - DNA, 30 bp, Artificial Sequence
  Synthetic oligonucleotide
acggtgagagctaccttgtccatagaatgg

SEQ ID NO: 70008 - DNA, 30 bp, Artificial Sequence
  Synthetic oligonucleotide
gctggaggcgcaatatagctacacgaatgg

SEQ ID NO: 70009 - DNA, 30 bp, Artificial Sequence
  Synthetic oligonucleotide
ccatagtccgtcacacatgccaatgaatgg

SEQ ID NO: 70010 - DNA, 30 bp, Artificial Sequence
  Synthetic oligonucleotide
tccgaaagactaggaaatgaaaggacatgg

SEQ ID NO: 70011 - DNA, 30 bp, Artificial Sequence
  Synthetic oligonucleotide
cgagccagggcggtgaagatttggccatgg

SEQ ID NO: 70012 - DNA, 30 bp, Artificial Sequence
  Synthetic oligonucleotide
acaaagcggacagagttggtatatccatgg

SEQ ID NO: 70013 - DNA, 30 bp, Artificial Sequence
  Synthetic oligonucleotide
gaaggcgactgaatagggtattcagcatgg

SEQ ID NO: 70014 - DNA, 30 bp, Artificial Sequence
  Synthetic oligonucleotide
tcatggaacacacctttctaaaccgcatgg

SEQ ID NO: 70015 - DNA, 30 bp, Artificial Sequence
  Synthetic oligonucleotide
tgaaggaaacaggggattgcagtcgcatgg

SEQ ID NO: 70016 - DNA, 30 bp, Artificial Sequence
  Synthetic oligonucleotide
actggtgtagatgcgtggacagcttcatgg

SEQ ID NO: 70017 - DNA, 30 bp, Artificial Sequence
  Synthetic oligonucleotide
aaaaagatatctctagacaaggaaagatgg

SEQ ID NO: 70018 - DNA, 30 bp, Artificial Sequence
  Synthetic oligonucleotide
tcgggatccgttatacgggcaataagatgg

SEQ ID NO: 70019 - DNA, 30 bp, Artificial Sequence
  Synthetic oligonucleotide
atggtaaatggtgctccagataacagatgg

SEQ ID NO: 70020 - DNA, 30 bp, Artificial Sequence
  Synthetic oligonucleotide
ataaagatgttgggcgttcgacaacgatgg

SEQ ID NO: 70021 - DNA, 30 bp, Artificial Sequence
  Synthetic oligonucleotide
ggggtgtatgggtggagtaatccacgatgg

SEQ ID NO: 70022 - DNA, 30 bp, Artificial Sequence
  Synthetic oligonucleotide
cgtcttgaaatggacagaacgggacgatgg

SEQ ID NO: 70023 - DNA, 30 bp, Artificial Sequence
  Synthetic oligonucleotide
gcgctagccaatagctggtaggtgggatgg

SEQ ID NO: 70024 - DNA, 30 bp, Artificial Sequence
  Synthetic oligonucleotide
accgtaggcgggatagaggttcgatgatgg

SEQ ID NO: 70025 - DNA, 30 bp, Artificial Sequence
  Synthetic oligonucleotide
cagaaattcagaggcccttaaggatgatgg

SEQ ID NO: 70026 - DNA, 30 bp, Artificial Sequence
  Synthetic oligonucleotide
gtaacgcacaattgtgtgtgtctgctatgg

SEQ ID NO: 70027 - DNA, 30 bp, Artificial Sequence
  Synthetic oligonucleotide
gaaggttcccacgatatagccttagtatgg

SEQ ID NO: 70028 - DNA, 30 bp, Artificial Sequence
  Synthetic oligonucleotide
gcgtgcgttgttggcttaaaggacgtatgg

SEQ ID NO: 70029 - DNA, 30 bp, Artificial Sequence
  Synthetic oligonucleotide
gtaaagagacctttaacaccttacgtatgg

SEQ ID NO: 70030 - DNA, 30 bp, Artificial Sequence
  Synthetic oligonucleotide
gcagacacgttcgggagaactacggtatgg

SEQ ID NO: 70031 - DNA, 30 bp, Artificial Sequence
  Synthetic oligonucleotide
gtagaacacactaatcataaccatgtatgg

SEQ ID NO: 70032 - DNA, 30 bp, Artificial Sequence
  Synthetic oligonucleotide
cactgccaagtgggaatcccgagcttatgg

SEQ ID NO: 70033 - DNA, 30 bp, Artificial Sequence
  Synthetic oligonucleotide
cacatcagatcgaagcattgcgggttatgg

SEQ ID NO: 70034 - DNA, 29 bp, Artificial Sequence
  Synthetic oligonucleotide
ttgtagggtgccaaggctggtgcaactgg

SEQ ID NO: 70035 - DNA, 30 bp, Artificial Sequence
  Synthetic oligonucleotide
ctacgccagatcgatcggaaaatacactgg

SEQ ID NO: 70036 - DNA, 30 bp, Artificial Sequence
  Synthetic oligonucleotide
tggacattaacacgtacgacaacccactgg

SEQ ID NO: 70037 - DNA, 30 bp, Artificial Sequence
  Synthetic oligonucleotide
gttacgggagatcagggatcaaagcactgg

SEQ ID NO: 70038 - DNA, 30 bp, Artificial Sequence
  Synthetic oligonucleotide
tggtacgagcaaggccgtcacgatgactgg

SEQ ID NO: 70039 - DNA, 30 bp, Artificial Sequence
  Synthetic oligonucleotide
catacgacctaacccgctgcgggaagctgg

SEQ ID NO: 70040 - DNA, 30 bp, Artificial Sequence
  Synthetic oligonucleotide
atcacagttatcgcaaacagggcatgctgg

SEQ ID NO: 70041 - DNA, 30 bp, Artificial Sequence
  Synthetic oligonucleotide
tgggaaaagatagtgttcccggggatctgg

SEQ ID NO: 70042 - DNA, 30 bp, Artificial Sequence
  Synthetic oligonucleotide
aaaggcaaaattcgagttcggcatatctgg

SEQ ID NO: 70043 - DNA, 30 bp, Artificial Sequence
  Synthetic oligonucleotide
agggatataccgggaacaagtacgctctgg

SEQ ID NO: 70044 - DNA, 30 bp, Artificial Sequence
  Synthetic oligonucleotide
tctatgagggcgagattcgcgggcttctgg

SEQ ID NO: 70045 - DNA, 30 bp, Artificial Sequence
  Synthetic oligonucleotide
cgctgtggcccaaggtcgtccgtcttctgg

SEQ ID NO: 70046 - DNA, 30 bp, Artificial Sequence
  Synthetic oligonucleotide
aggttattccacagaaaatcgttcttctgg

SEQ ID NO: 70047 - DNA, 30 bp, Artificial Sequence
  Synthetic oligonucleotide
ctacgaatgatctaagatttgtaaaagtgg

SEQ ID NO: 70048 - DNA, 30 bp, Artificial Sequence
  Synthetic oligonucleotide
gacttaaacatcctgctaaaaccaaagtgg

SEQ ID NO: 70049 - DNA, 30 bp, Artificial Sequence
  Synthetic oligonucleotide
tcgagagggaaaatctgttgccccaagtgg

SEQ ID NO: 70050 - DNA, 30 bp, Artificial Sequence
  Synthetic oligonucleotide
cttgaggggcaaatgtgtacgatcaagtgg

SEQ ID NO: 70051 - DNA, 30 bp, Artificial Sequence
  Synthetic oligonucleotide
gttacgagtgtcctgcttagggaccagtgg

SEQ ID NO: 70052 - DNA, 30 bp, Artificial Sequence
  Synthetic oligonucleotide
gggtagcatgcacatagatgggtccagtgg

SEQ ID NO: 70053 - DNA, 30 bp, Artificial Sequence
  Synthetic oligonucleotide
cctagaccgagcactacgcaaattcagtgg

SEQ ID NO: 70054 - DNA, 30 bp, Artificial Sequence
  Synthetic oligonucleotide
atggcgatctactcctagtagattcagtgg

SEQ ID NO: 70055 - DNA, 30 bp, Artificial Sequence
  Synthetic oligonucleotide
gccctgaatcgtgatcaagggatagagtgg

SEQ ID NO: 70056 - DNA, 30 bp, Artificial Sequence
  Synthetic oligonucleotide
tcagcactaatcaggcgggataattagtgg

SEQ ID NO: 70057 - DNA, 30 bp, Artificial Sequence
  Synthetic oligonucleotide
gacggacagtgaagcttttgtggaacgtgg

SEQ ID NO: 70058 - DNA, 30 bp, Artificial Sequence
  Synthetic oligonucleotide
taacagaatcatgctcaagagcaaccgtgg

SEQ ID NO: 70059 - DNA, 30 bp, Artificial Sequence
  Synthetic oligonucleotide
ccgcagaagtagtatagtcctgatgcgtgg

SEQ ID NO: 70060 - DNA, 30 bp, Artificial Sequence
  Synthetic oligonucleotide
tgtatgtgcgagaagttgttatgtgcgtgg

SEQ ID NO: 70061 - DNA, 30 bp, Artificial Sequence
  Synthetic oligonucleotide
ctaactaaataaaatcaacggctctcgtgg

SEQ ID NO: 70062 - DNA, 30 bp, Artificial Sequence
  Synthetic oligonucleotide
cgcgacttgactgatagactgggttcgtgg

SEQ ID NO: 70063 - DNA, 30 bp, Artificial Sequence
  Synthetic oligonucleotide
ctgggcgaactggattcagaactaaggtgg

SEQ ID NO: 70064 - DNA, 30 bp, Artificial Sequence
  Synthetic oligonucleotide
cgtgtcggattcagcaaaaagtataggtgg

SEQ ID NO: 70065 - DNA, 30 bp, Artificial Sequence
  Synthetic oligonucleotide
aaggagccctactcacatgagatggggtgg

SEQ ID NO: 70066 - DNA, 30 bp, Artificial Sequence
  Synthetic oligonucleotide
tgacaaaaaaagagtgcctgcctcatgtgg

SEQ ID NO: 70067 - DNA, 30 bp, Artificial Sequence
  Synthetic oligonucleotide
gcactcgaaagcaatctggaacaactgtgg

SEQ ID NO: 70068 - DNA, 30 bp, Artificial Sequence
  Synthetic oligonucleotide
ggctacgatatcgtcaaacggcccctgtgg

SEQ ID NO: 70069 - DNA, 30 bp, Artificial Sequence
  Synthetic oligonucleotide
ggtcagaaagcatcagaggggaacgtgtgg

SEQ ID NO: 70070 - DNA, 30 bp, Artificial Sequence
  Synthetic oligonucleotide
gtagcacgtgcatatgctcaggatgtgtgg

SEQ ID NO: 70071 - DNA, 30 bp, Artificial Sequence
  Synthetic oligonucleotide
caaccctcgtgggagaacatcggaaattgg

SEQ ID NO: 70072 - DNA, 30 bp, Artificial Sequence
  Synthetic oligonucleotide
tcgtagctctcgaagagcgagtctcattgg

SEQ ID NO: 70073 - DNA, 30 bp, Artificial Sequence
  Synthetic oligonucleotide
ggcaatacttgtaaggtttgttccgattgg

SEQ ID NO: 70074 - DNA, 30 bp, Artificial Sequence
  Synthetic oligonucleotide
cattcgaagaattctaacgcgcgcacttgg

SEQ ID NO: 70075 - DNA, 30 bp, Artificial Sequence
  Synthetic oligonucleotide
aagataacggcaaccaaaattaagacttgg

SEQ ID NO: 70076 - DNA, 30 bp, Artificial Sequence
  Synthetic oligonucleotide
cgaaagttggtatgaaactgagatacttgg

SEQ ID NO: 70077 - DNA, 30 bp, Artificial Sequence
  Synthetic oligonucleotide
ggaaaaggtgcaaagtccaaagtagcttgg

SEQ ID NO: 70078 - DNA, 30 bp, Artificial Sequence
  Synthetic oligonucleotide
aagtaaatagggcggaaaaagtactcttgg

SEQ ID NO: 70079 - DNA, 30 bp, Artificial Sequence
  Synthetic oligonucleotide
gcgcagcggtttgaaaaaggtaggtcttgg

SEQ ID NO: 70080 - DNA, 30 bp, Artificial Sequence
  Synthetic oligonucleotide
acagctcaaatctacagcgcaatatgttgg

SEQ ID NO: 70081 - DNA, 30 bp, Artificial Sequence
  Synthetic oligonucleotide
agaatcagcccagatcaccgcaattgttgg

SEQ ID NO: 70082 - DNA, 30 bp, Artificial Sequence
  Synthetic oligonucleotide
acgtccgtgtagaaccgttcgccaatttgg

SEQ ID NO: 70083 - DNA, 30 bp, Artificial Sequence
  Synthetic oligonucleotide
taccgagggcggatgaagttctggatttgg

SEQ ID NO: 70084 - DNA, 30 bp, Artificial Sequence
  Synthetic oligonucleotide
acgtggtgagtaacaaggtacagggtttgg

SEQ ID NO: 70085 - DNA, 30 bp, Artificial Sequence
  Synthetic oligonucleotide
cgataagtaagggctaacgatagattttgg

SEQ ID NO: 70086 - DNA, 30 bp, Artificial Sequence
  Synthetic oligonucleotide
ggaacaggggacctgatggtagcgttttgg

SEQ ID NO: 70087 - DNA, 30 bp, Artificial Sequence
  Synthetic oligonucleotide
gtcggaaaaacacgaaccctgggaaaaatg

SEQ ID NO: 70088 - DNA, 30 bp, Artificial Sequence
  Synthetic oligonucleotide
catgcacgggaagcaactgtccttcaaatg

SEQ ID NO: 70089 - DNA, 30 bp, Artificial Sequence
  Synthetic oligonucleotide
cgttcgttagacaagaatggtcgggaaatg

SEQ ID NO: 70090 - DNA, 30 bp, Artificial Sequence
  Synthetic oligonucleotide
ggtagaaacaacgcgccagtacgaacaatg

SEQ ID NO: 70091 - DNA, 30 bp, Artificial Sequence
  Synthetic oligonucleotide
cctatagtgaaaaagcgtgtaaagacaatg

SEQ ID NO: 70092 - DNA, 30 bp, Artificial Sequence
  Synthetic oligonucleotide
actggcaattcaatagcatgatttacaatg

SEQ ID NO: 70093 - DNA, 30 bp, Artificial Sequence
  Synthetic oligonucleotide
gggtacgcccaggtcagaaggcgcccaatg

SEQ ID NO: 70094 - DNA, 30 bp, Artificial Sequence
  Synthetic oligonucleotide
atgctcaataattccatgagtggtgcaatg

SEQ ID NO: 70095 - DNA, 31 bp, Artificial Sequence
  Synthetic oligonucleotide
taggtcacaaggtaaagagaccttaagaatg

SEQ ID NO: 70096 - DNA, 30 bp, Artificial Sequence
  Synthetic oligonucleotide
ctgaccgccagtccttttggacccagaatg

SEQ ID NO: 70097 - DNA, 30 bp, Artificial Sequence
  Synthetic oligonucleotide
cacgtgactacccacgtcagtacgagaatg

SEQ ID NO: 70098 - DNA, 30 bp, Artificial Sequence
  Synthetic oligonucleotide
ccattgcgacaacggaaagctacacgaatg

SEQ ID NO: 70099 - DNA, 30 bp, Artificial Sequence
  Synthetic oligonucleotide
cgcctgagataatagttgcatagccgaatg

SEQ ID NO: 70100 - DNA, 30 bp, Artificial Sequence
  Synthetic oligonucleotide
cgtcataggaagtgcctgatgtctcgaatg

SEQ ID NO: 70101 - DNA, 30 bp, Artificial Sequence
  Synthetic oligonucleotide
agacatagcacgtacacagtgaaaggaatg

SEQ ID NO: 70102 - DNA, 30 bp, Artificial Sequence
  Synthetic oligonucleotide
aatcaaaactgttgtggaacggtaggaatg

SEQ ID NO: 70103 - DNA, 30 bp, Artificial Sequence
  Synthetic oligonucleotide
agcgcccaatgtgtgtaaacctgatgaatg

SEQ ID NO: 70104 - DNA, 30 bp, Artificial Sequence
  Synthetic oligonucleotide
tcgttgtggctgatctagatactatgaatg

SEQ ID NO: 70105 - DNA, 30 bp, Artificial Sequence
  Synthetic oligonucleotide
gcgttaccctcccgttaacctggactaatg

SEQ ID NO: 70106 - DNA, 30 bp, Artificial Sequence
  Synthetic oligonucleotide
aggtgttaggtccagtgaaagtcaaacatg

SEQ ID NO: 70107 - DNA, 30 bp, Artificial Sequence
  Synthetic oligonucleotide
acgtagagtaacgcttacccgagcaacatg

SEQ ID NO: 70108 - DNA, 30 bp, Artificial Sequence
  Synthetic oligonucleotide
gcaacttcgtaagcgtaaactattaacatg

SEQ ID NO: 70109 - DNA, 30 bp, Artificial Sequence
  Synthetic oligonucleotide
caaggcttactgatatttgaatccaccatg

SEQ ID NO: 70110 - DNA, 30 bp, Artificial Sequence
  Synthetic oligonucleotide
ggtcgtgaaaagagacggcattttgccatg

SEQ ID NO: 70111 - DNA, 30 bp, Artificial Sequence
  Synthetic oligonucleotide
acacgaggtacagtgtgtaatataagcatg

SEQ ID NO: 70112 - DNA, 30 bp, Artificial Sequence
  Synthetic oligonucleotide
tacagtagatatggaaggagtatcagcatg

SEQ ID NO: 70113 - DNA, 30 bp, Artificial Sequence
  Synthetic oligonucleotide
gcacgtatgtgagtgggacgttggagcatg

SEQ ID NO: 70114 - DNA, 30 bp, Artificial Sequence
  Synthetic oligonucleotide
gacagattcttaggcaacttgtaaggcatg

SEQ ID NO: 70115 - DNA, 30 bp, Artificial Sequence
  Synthetic oligonucleotide
actcacggtaaggtatgttttgccggcatg

SEQ ID NO: 70116 - DNA, 30 bp, Artificial Sequence
  Synthetic oligonucleotide
gcgtatgtacgcctgacttctacgtgcatg

SEQ ID NO: 70117 - DNA, 30 bp, Artificial Sequence
  Synthetic oligonucleotide
gactaagtgtgctaatgtcatctgtgcatg

SEQ ID NO: 70118 - DNA, 30 bp, Artificial Sequence
  Synthetic oligonucleotide
ccaggggccattataacgttctccatcatg

SEQ ID NO: 70119 - DNA, 30 bp, Artificial Sequence
  Synthetic oligonucleotide
ataatcggatactagacaaattgggtcatg

SEQ ID NO: 70120 - DNA, 30 bp, Artificial Sequence
  Synthetic oligonucleotide
ggagctcagtcaatgagactatatttcatg

SEQ ID NO: 70121 - DNA, 30 bp, Artificial Sequence
  Synthetic oligonucleotide
ccctacgtaagagagttggggatcaagatg

SEQ ID NO: 70122 - DNA, 30 bp, Artificial Sequence
  Synthetic oligonucleotide
tgatctgtggcgagaccggaagagaagatg

SEQ ID NO: 70123 - DNA, 30 bp, Artificial Sequence
  Synthetic oligonucleotide
agctggctagaccccccttactctcagatg

SEQ ID NO: 70124 - DNA, 30 bp, Artificial Sequence
  Synthetic oligonucleotide
agaggcttgggcaataccgcccgtcagatg

SEQ ID NO: 70125 - DNA, 30 bp, Artificial Sequence
  Synthetic oligonucleotide
gagagagggtccatgatgaccgtagagatg

SEQ ID NO: 70126 - DNA, 30 bp, Artificial Sequence
  Synthetic oligonucleotide
caagatcaacggctacaggatctggagatg

SEQ ID NO: 70127 - DNA, 30 bp, Artificial Sequence
  Synthetic oligonucleotide
tcactgtgcagaccacgaggcattgagatg

SEQ ID NO: 70128 - DNA, 30 bp, Artificial Sequence
  Synthetic oligonucleotide
ttgccgtcacaatgacacagagtatagatg

SEQ ID NO: 70129 - DNA, 30 bp, Artificial Sequence
  Synthetic oligonucleotide
gtatgaggtcaagaggtgttgtatacgatg

SEQ ID NO: 70130 - DNA, 30 bp, Artificial Sequence
  Synthetic oligonucleotide
tcagcaggtgtgtaaacctacattacgatg

SEQ ID NO: 70131 - DNA, 30 bp, Artificial Sequence
  Synthetic oligonucleotide
cctgcggattatgaagtgtagcatccgatg

SEQ ID NO: 70132 - DNA, 31 bp, Artificial Sequence
  Synthetic oligonucleotide
ctgtgacgatgactaccagtaatctccgatg

SEQ ID NO: 70133 - DNA, 30 bp, Artificial Sequence
  Synthetic oligonucleotide
cagcaatccaggctgatctcgctagcgatg

SEQ ID NO: 70134 - DNA, 30 bp, Artificial Sequence
  Synthetic oligonucleotide
tgctgcggttgaggtgaccattgggcgatg

SEQ ID NO: 70135 - DNA, 30 bp, Artificial Sequence
  Synthetic oligonucleotide
agttagagacaataggcaacatatgcgatg

SEQ ID NO: 70136 - DNA, 30 bp, Artificial Sequence
  Synthetic oligonucleotide
gggttgaaagcgtaggactggtttgcgatg

SEQ ID NO: 70137 - DNA, 30 bp, Artificial Sequence
  Synthetic oligonucleotide
tactccaccgcagatgataatttctcgatg

SEQ ID NO: 70138 - DNA, 30 bp, Artificial Sequence
  Synthetic oligonucleotide
acgtaagtgtgaaaactctcgtcttcgatg

SEQ ID NO: 70139 - DNA, 30 bp, Artificial Sequence
  Synthetic oligonucleotide
agcattgcgaggttcagggccaacaggatg

SEQ ID NO: 70140 - DNA, 30 bp, Artificial Sequence
  Synthetic oligonucleotide
cattaccatgttagagtaaccgtcaggatg

SEQ ID NO: 70141 - DNA, 30 bp, Artificial Sequence
  Synthetic oligonucleotide
atcttataaatgcaaaacatggataggatg

SEQ ID NO: 70142 - DNA, 30 bp, Artificial Sequence
  Synthetic oligonucleotide
gtgaatagtgcatcgctatagttacggatg

SEQ ID NO: 70143 - DNA, 30 bp, Artificial Sequence
  Synthetic oligonucleotide
tcaccaggtcaggagacggacctccggatg

SEQ ID NO: 70144 - DNA, 30 bp, Artificial Sequence
  Synthetic oligonucleotide
tgactaatgggatggaccatacgtgggatg

SEQ ID NO: 70145 - DNA, 30 bp, Artificial Sequence
  Synthetic oligonucleotide
gatgaaagcgataataggttctggtggatg

SEQ ID NO: 70146 - DNA, 30 bp, Artificial Sequence
  Synthetic oligonucleotide
actaacagcgtaagcccctaatattggatg

SEQ ID NO: 70147 - DNA, 30 bp, Artificial Sequence
  Synthetic oligonucleotide
atgaagacaagatggtgaagttgagtgatg

SEQ ID NO: 70148 - DNA, 30 bp, Artificial Sequence
  Synthetic oligonucleotide
gtcgcaaattcgcgagccatgacggtgatg

SEQ ID NO: 70149 - DNA, 30 bp, Artificial Sequence
  Synthetic oligonucleotide
tacagaccgaggtcagtccgttatgtgatg

SEQ ID NO: 70150 - DNA, 30 bp, Artificial Sequence
  Synthetic oligonucleotide
gggatacagtgacagggttacgctaatatg

SEQ ID NO: 70151 - DNA, 30 bp, Artificial Sequence
  Synthetic oligonucleotide
agaataattagcggtgctaataagcatatg

SEQ ID NO: 70152 - DNA, 30 bp, Artificial Sequence
  Synthetic oligonucleotide
acagcagcgtcagcgtgtgtggcgcatatg

SEQ ID NO: 70153 - DNA, 30 bp, Artificial Sequence
  Synthetic oligonucleotide
agggcacacggatggggtagactatctatg

SEQ ID NO: 70154 - DNA, 30 bp, Artificial Sequence
  Synthetic oligonucleotide
tcgggaagaactgcacgaggagtacgtatg

SEQ ID NO: 70155 - DNA, 30 bp, Artificial Sequence
  Synthetic oligonucleotide
caccaccgtcacgtccaagtgaattgtatg

SEQ ID NO: 70156 - DNA, 30 bp, Artificial Sequence
  Synthetic oligonucleotide
gcctggatacagaacagggacatcgttatg

SEQ ID NO: 70157 - DNA, 30 bp, Artificial Sequence
  Synthetic oligonucleotide
gcgggattctaatcggatggtaagtttatg

SEQ ID NO: 70158 - DNA, 30 bp, Artificial Sequence
  Synthetic oligonucleotide
ctggcgtaggttcggtgtcactaaaaactg

SEQ ID NO: 70159 - DNA, 30 bp, Artificial Sequence
  Synthetic oligonucleotide
agtcgcatacggggccccgcttacaaactg

SEQ ID NO: 70160 - DNA, 30 bp, Artificial Sequence
  Synthetic oligonucleotide
tgatactccttaacactgaggttgaaactg

SEQ ID NO: 70161 - DNA, 30 bp, Artificial Sequence
  Synthetic oligonucleotide
tggtcagggagtgccccctagtctaaactg

SEQ ID NO: 70162 - DNA, 30 bp, Artificial Sequence
  Synthetic oligonucleotide
gctagtggcaaacgagggttgcgccaactg

SEQ ID NO: 70163 - DNA, 30 bp, Artificial Sequence
  Synthetic oligonucleotide
gggagcacacggcgtggatcacccgaactg

SEQ ID NO: 70164 - DNA, 30 bp, Artificial Sequence
  Synthetic oligonucleotide
aaccgacgatcttacaccgttatcgaactg

SEQ ID NO: 70165 - DNA, 30 bp, Artificial Sequence
  Synthetic oligonucleotide
gttggtagattcggtagggcaagtgaactg

SEQ ID NO: 70166 - DNA, 30 bp, Artificial Sequence
  Synthetic oligonucleotide
ccgccaatgataaggctgtcatggtaactg

SEQ ID NO: 70167 - DNA, 30 bp, Artificial Sequence
  Synthetic oligonucleotide
cgacggtgcagagaccatacatcaccactg

SEQ ID NO: 70168 - DNA, 30 bp, Artificial Sequence
  Synthetic oligonucleotide
cagagttgaccttaaggcgagaagccactg

SEQ ID NO: 70169 - DNA, 30 bp, Artificial Sequence
  Synthetic oligonucleotide
gtaagtcaggttgggggtgaccaagcactg

SEQ ID NO: 70170 - DNA, 30 bp, Artificial Sequence
  Synthetic oligonucleotide
ctggctccgatgagtgtacgtccggcactg

SEQ ID NO: 70171 - DNA, 30 bp, Artificial Sequence
  Synthetic oligonucleotide
atgtgtatatccctcggcgaaatctcactg

SEQ ID NO: 70172 - DNA, 30 bp, Artificial Sequence
  Synthetic oligonucleotide
tggggggacgtgcgttgcgggggttcactg

SEQ ID NO: 70173 - DNA, 30 bp, Artificial Sequence
  Synthetic oligonucleotide
ctgggcgttcagccggagttgggttcactg

SEQ ID NO: 70174 - DNA, 30 bp, Artificial Sequence
  Synthetic oligonucleotide
gatcgtcgagaatgtggtgacgacagactg

SEQ ID NO: 70175 - DNA, 30 bp, Artificial Sequence
  Synthetic oligonucleotide
catcgtattaagcgtcagataggtagactg

SEQ ID NO: 70176 - DNA, 30 bp, Artificial Sequence
  Synthetic oligonucleotide
gtgaggattgtggggaggcttatccgactg

SEQ ID NO: 70177 - DNA, 30 bp, Artificial Sequence
  Synthetic oligonucleotide
tttcctgtactaacagaacacagaggactg

SEQ ID NO: 70178 - DNA, 30 bp, Artificial Sequence
  Synthetic oligonucleotide
ttaagctcaccggctgcacttatcggactg

SEQ ID NO: 70179 - DNA, 30 bp, Artificial Sequence
  Synthetic oligonucleotide
ttatgcaacggaaattggataccgatactg

SEQ ID NO: 70180 - DNA, 30 bp, Artificial Sequence
  Synthetic oligonucleotide
atctgcgaacaagctatgcaaaatatactg

SEQ ID NO: 70181 - DNA, 30 bp, Artificial Sequence
  Synthetic oligonucleotide
tagaaagggggtcaggaacgaaggctactg

SEQ ID NO: 70182 - DNA, 30 bp, Artificial Sequence
  Synthetic oligonucleotide
ccatggtaatggacacgacatactctactg

SEQ ID NO: 70183 - DNA, 30 bp, Artificial Sequence
  Synthetic oligonucleotide
gacgtcattaacaaaaggtgggacgtactg

SEQ ID NO: 70184 - DNA, 30 bp, Artificial Sequence
  Synthetic oligonucleotide
gtaaagttatcacaaatcgattaggtactg

SEQ ID NO: 70185 - DNA, 30 bp, Artificial Sequence
  Synthetic oligonucleotide
gcatacatggaatagagaatttccttactg

SEQ ID NO: 70186 - DNA, 30 bp, Artificial Sequence
  Synthetic oligonucleotide
gaacatgtcacatgatgactagaagacctg

SEQ ID NO: 70187 - DNA, 30 bp, Artificial Sequence
  Synthetic oligonucleotide
acgaccatatagtgctcaaccgtcgacctg

SEQ ID NO: 70188 - DNA, 30 bp, Artificial Sequence
  Synthetic oligonucleotide
catagagggtatcacgtgcatatctacctg

SEQ ID NO: 70189 - DNA, 30 bp, Artificial Sequence
  Synthetic oligonucleotide
gccaaacgactgaaattgggagcgtacctg

SEQ ID NO: 70190 - DNA, 30 bp, Artificial Sequence
  Synthetic oligonucleotide
actcaaaaggcggcagagcaagcaaccctg

SEQ ID NO: 70191 - DNA, 30 bp, Artificial Sequence
  Synthetic oligonucleotide
tacagagctgcatatatcctgcgaagcctg

SEQ ID NO: 70192 - DNA, 30 bp, Artificial Sequence
  Synthetic oligonucleotide
caggctagaccaaggtcccactagggcctg

SEQ ID NO: 70193 - DNA, 30 bp, Artificial Sequence
  Synthetic oligonucleotide
cgctccattaggtgcaacttaagaatcctg

SEQ ID NO: 70194 - DNA, 30 bp, Artificial Sequence
  Synthetic oligonucleotide
cccaaaaggcgtggtttgagaggtaagctg

SEQ ID NO: 70195 - DNA, 30 bp, Artificial Sequence
  Synthetic oligonucleotide
cctgccataatataattaaagtgtaagctg

SEQ ID NO: 70196 - DNA, 30 bp, Artificial Sequence
  Synthetic oligonucleotide
tcagatacctatgttatagtaattgagctg

SEQ ID NO: 70197 - DNA, 30 bp, Artificial Sequence
  Synthetic oligonucleotide
caaagccaagtgaatcagaaggtcacgctg

SEQ ID NO: 70198 - DNA, 30 bp, Artificial Sequence
  Synthetic oligonucleotide
agcgaagagttccgggaacggttcgcgctg

SEQ ID NO: 70199 - DNA, 30 bp, Artificial Sequence
  Synthetic oligonucleotide
aggcgtgtcaaaatcagccatgtatcgctg

SEQ ID NO: 70200 - DNA, 30 bp, Artificial Sequence
  Synthetic oligonucleotide
aacagtctgaatagcgaacctgagtcgctg

SEQ ID NO: 70201 - DNA, 30 bp, Artificial Sequence
  Synthetic oligonucleotide
gtgcagtcaaaacggttgacatcgtcgctg

SEQ ID NO: 70202 - DNA, 30 bp, Artificial Sequence
  Synthetic oligonucleotide
actgatagtggccaaaatcgatgacggctg

SEQ ID NO: 70203 - DNA, 30 bp, Artificial Sequence
  Synthetic oligonucleotide
taaaacagtaggaacactatagtccggctg

SEQ ID NO: 70204 - DNA, 30 bp, Artificial Sequence
  Synthetic oligonucleotide
ttgctgagagtgtataatccgggcgggctg

SEQ ID NO: 70205 - DNA, 30 bp, Artificial Sequence
  Synthetic oligonucleotide
caaaaccctggcacaccaaggttaatgctg

SEQ ID NO: 70206 - DNA, 30 bp, Artificial Sequence
  Synthetic oligonucleotide
aggaactttaaggggtagtgctgtatgctg

SEQ ID NO: 70207 - DNA, 30 bp, Artificial Sequence
  Synthetic oligonucleotide
acgaatagcgtggcagactggatcctgctg

SEQ ID NO: 70208 - DNA, 30 bp, Artificial Sequence
  Synthetic oligonucleotide
taggagcatacgaaatgcatgcctctgctg

SEQ ID NO: 70209 - DNA, 30 bp, Artificial Sequence
  Synthetic oligonucleotide
acagttcctaatgtatgtcgatttgtgctg

SEQ ID NO: 70210 - DNA, 30 bp, Artificial Sequence
  Synthetic oligonucleotide
aggagggctttgttgtgtactgcggatctg

SEQ ID NO: 70211 - DNA, 30 bp, Artificial Sequence
  Synthetic oligonucleotide
ctaaaggaacaggaagcgctggtctatctg

SEQ ID NO: 70212 - DNA, 29 bp, Artificial Sequence
  Synthetic oligonucleotide
tagacgatgggatcacgtatttctatctg

SEQ ID NO: 70213 - DNA, 30 bp, Artificial Sequence
  Synthetic oligonucleotide
tggttctaggcgtaatgttaggatactctg

SEQ ID NO: 70214 - DNA, 30 bp, Artificial Sequence
  Synthetic oligonucleotide
aaaggcgattaactcgggccaatccctctg

SEQ ID NO: 70215 - DNA, 30 bp, Artificial Sequence
  Synthetic oligonucleotide
agtcaacaagtggttttcaatcatgctctg

SEQ ID NO: 70216 - DNA, 30 bp, Artificial Sequence
  Synthetic oligonucleotide
acgctaccgaatcgttccgcgatctctctg

SEQ ID NO: 70217 - DNA, 30 bp, Artificial Sequence
  Synthetic oligonucleotide
ccctaagcgatcggtgatcaaggaagtctg

SEQ ID NO: 70218 - DNA, 30 bp, Artificial Sequence
  Synthetic oligonucleotide
ccagatatcgaaagagtgggtccgagtctg

SEQ ID NO: 70219 - DNA, 30 bp, Artificial Sequence
  Synthetic oligonucleotide
cacgtctccgcggtgtaacgaaaacgtctg

SEQ ID NO: 70220 - DNA, 30 bp, Artificial Sequence
  Synthetic oligonucleotide
aggaggcagcttaggaaatagcagggtctg

SEQ ID NO: 70221 - DNA, 30 bp, Artificial Sequence
  Synthetic oligonucleotide
ccagccatgaggatagtatgaggaattctg

SEQ ID NO: 70222 - DNA, 30 bp, Artificial Sequence
  Synthetic oligonucleotide
aacttcacaatcaagcgagtaggaattctg

SEQ ID NO: 70223 - DNA, 30 bp, Artificial Sequence
  Synthetic oligonucleotide
agaacctagcctcgcgatgggcttattctg

SEQ ID NO: 70224 - DNA, 30 bp, Artificial Sequence
  Synthetic oligonucleotide
cggaatcagtgcacggataggccagttctg

SEQ ID NO: 70225 - DNA, 30 bp, Artificial Sequence
  Synthetic oligonucleotide
atgacggggaaaacctgaaaacttaaagtg

SEQ ID NO: 70226 - DNA, 30 bp, Artificial Sequence
  Synthetic oligonucleotide
agtgcgtgcggcattgtactagttaaagtg

SEQ ID NO: 70227 - DNA, 30 bp, Artificial Sequence
  Synthetic oligonucleotide
atgagcaactacccgaaacctaatcaagtg

SEQ ID NO: 70228 - DNA, 30 bp, Artificial Sequence
  Synthetic oligonucleotide
tcactagctggaaacatgtgaaactaagtg

SEQ ID NO: 70229 - DNA, 30 bp, Artificial Sequence
  Synthetic oligonucleotide
agcagagcgcatgttggatccacctaagtg

SEQ ID NO: 70230 - DNA, 30 bp, Artificial Sequence
  Synthetic oligonucleotide
cgccccctacagctgcaaacagtctaagtg

SEQ ID NO: 70231 - DNA, 30 bp, Artificial Sequence
  Synthetic oligonucleotide
caattattgtagtggactgctaaaacagtg

SEQ ID NO: 70232 - DNA, 30 bp, Artificial Sequence
  Synthetic oligonucleotide
gaaagttgtatggctcaaagtaaaacagtg

SEQ ID NO: 70233 - DNA, 30 bp, Artificial Sequence
  Synthetic oligonucleotide
gtaccagtcttataggcgatcaagacagtg

SEQ ID NO: 70234 - DNA, 30 bp, Artificial Sequence
  Synthetic oligonucleotide
acttgccgtcctaagacatgaacgacagtg

SEQ ID NO: 70235 - DNA, 30 bp, Artificial Sequence
  Synthetic oligonucleotide
gataaagcactatgttaaagtaggacagtg

SEQ ID NO: 70236 - DNA, 30 bp, Artificial Sequence
  Synthetic oligonucleotide
taagtcctgcttaggtgcgtctcaccagtg

SEQ ID NO: 70237 - DNA, 30 bp, Artificial Sequence
  Synthetic oligonucleotide
caacgacttgcgtgtcgcatacttccagtg

SEQ ID NO: 70238 - DNA, 30 bp, Artificial Sequence
  Synthetic oligonucleotide
actgttaagcgaagacaataccgggcagtg

SEQ ID NO: 70239 - DNA, 30 bp, Artificial Sequence
  Synthetic oligonucleotide
aggccaacagaacgcgatgttcgggcagtg

SEQ ID NO: 70240 - DNA, 30 bp, Artificial Sequence
  Synthetic oligonucleotide
cgcctgaacgtcataaacccgggggcagtg

SEQ ID NO: 70241 - DNA, 30 bp, Artificial Sequence
  Synthetic oligonucleotide
gccacgtcatggccaaggcactgatcagtg

SEQ ID NO: 70242 - DNA, 30 bp, Artificial Sequence
  Synthetic oligonucleotide
agctcacccacccactccgacttaagagtg

SEQ ID NO: 70243 - DNA, 30 bp, Artificial Sequence
  Synthetic oligonucleotide
tgacagacattaatgtatactaatagagtg

SEQ ID NO: 70244 - DNA, 30 bp, Artificial Sequence
  Synthetic oligonucleotide
cgaccagctcctaataagtatggtagagtg

SEQ ID NO: 70245 - DNA, 30 bp, Artificial Sequence
  Synthetic oligonucleotide
catccgcgaaagataaccattcatcgagtg

SEQ ID NO: 70246 - DNA, 30 bp, Artificial Sequence
  Synthetic oligonucleotide
gaactgtgtttagcagactgaaaaggagtg

SEQ ID NO: 70247 - DNA, 30 bp, Artificial Sequence
  Synthetic oligonucleotide
cgtcaaaaggggggcttatgggcaggagtg

SEQ ID NO: 70248 - DNA, 30 bp, Artificial Sequence
  Synthetic oligonucleotide
ataaccataatcatcgttagtgagtgagtg

SEQ ID NO: 70249 - DNA, 30 bp, Artificial Sequence
  Synthetic oligonucleotide
tatcaaggtccattaaggataacgtgagtg

SEQ ID NO: 70250 - DNA, 30 bp, Artificial Sequence
  Synthetic oligonucleotide
gccttgatggggaggtggactctcatagtg

SEQ ID NO: 70251 - DNA, 30 bp, Artificial Sequence
  Synthetic oligonucleotide
aggacctcgtctgaaggtgcggaactagtg

SEQ ID NO: 70252 - DNA, 30 bp, Artificial Sequence
  Synthetic oligonucleotide
caaaacaagattgaaggccatacactagtg

SEQ ID NO: 70253 - DNA, 30 bp, Artificial Sequence
  Synthetic oligonucleotide
tcgcgacatgtgaagcagtaaggactagtg

SEQ ID NO: 70254 - DNA, 30 bp, Artificial Sequence
  Synthetic oligonucleotide
ttggatagactaggtgttagagctctagtg

SEQ ID NO: 70255 - DNA, 30 bp, Artificial Sequence
  Synthetic oligonucleotide
ggacgtctggcaacggccctgtaagtagtg

SEQ ID NO: 70256 - DNA, 30 bp, Artificial Sequence
  Synthetic oligonucleotide
ggcgtatagttttgggacatgtcagtagtg

SEQ ID NO: 70257 - DNA, 30 bp, Artificial Sequence
  Synthetic oligonucleotide
cgggggctaacaggcaaaaatagagtagtg

SEQ ID NO: 70258 - DNA, 30 bp, Artificial Sequence
  Synthetic oligonucleotide
cgctacgaagaacgattgcgtgacgtagtg

SEQ ID NO: 70259 - DNA, 30 bp, Artificial Sequence
  Synthetic oligonucleotide
gacctgctcattctccgcgagtgaaacgtg

SEQ ID NO: 70260 - DNA, 30 bp, Artificial Sequence
  Synthetic oligonucleotide
agtgcataaattgcagtgcgttccaacgtg

SEQ ID NO: 70261 - DNA, 30 bp, Artificial Sequence
  Synthetic oligonucleotide
cagtctagacatagtgggatagataacgtg

SEQ ID NO: 70262 - DNA, 30 bp, Artificial Sequence
  Synthetic oligonucleotide
aaataataaagtgatgaaggcggtaacgtg

SEQ ID NO: 70263 - DNA, 30 bp, Artificial Sequence
  Synthetic oligonucleotide
tcgggtgttatagggtcatcaactcacgtg

SEQ ID NO: 70264 - DNA, 30 bp, Artificial Sequence
  Synthetic oligonucleotide
acacgaattcgtgtgcattgctcagacgtg

SEQ ID NO: 70265 - DNA, 30 bp, Artificial Sequence
  Synthetic oligonucleotide
acgatcccagtgcagatcgtaatagacgtg

SEQ ID NO: 70266 - DNA, 30 bp, Artificial Sequence
  Synthetic oligonucleotide
atcgcgagttaataaatcaggttagacgtg

SEQ ID NO: 70267 - DNA, 30 bp, Artificial Sequence
  Synthetic oligonucleotide
gaacggcagctggctggtaacgaggacgtg

SEQ ID NO: 70268 - DNA, 30 bp, Artificial Sequence
  Synthetic oligonucleotide
tgtggccgagaccgaggcgcgccggacgtg

SEQ ID NO: 70269 - DNA, 30 bp, Artificial Sequence
  Synthetic oligonucleotide
tgccatgtttacatcattgggcaacccgtg

SEQ ID NO: 70270 - DNA, 30 bp, Artificial Sequence
  Synthetic oligonucleotide
cgttgctaaatacaaagcaacggttccgtg

SEQ ID NO: 70271 - DNA, 30 bp, Artificial Sequence
  Synthetic oligonucleotide
tacctggagtactgaggcccaaacggcgtg

SEQ ID NO: 70272 - DNA, 30 bp, Artificial Sequence
  Synthetic oligonucleotide
gggcgctttgactactactaaactggcgtg

SEQ ID NO: 70273 - DNA, 30 bp, Artificial Sequence
  Synthetic oligonucleotide
gacttgagaagatacaatgtaggtggcgtg

SEQ ID NO: 70274 - DNA, 30 bp, Artificial Sequence
  Synthetic oligonucleotide
cgcatggggtacaaccggcggaccatcgtg

SEQ ID NO: 70275 - DNA, 30 bp, Artificial Sequence
  Synthetic oligonucleotide
actgccgacgtcggaagagatcaactcgtg

SEQ ID NO: 70276 - DNA, 30 bp, Artificial Sequence
  Synthetic oligonucleotide
cgagatcaggtaattgatttgaagctcgtg

SEQ ID NO: 70277 - DNA, 30 bp, Artificial Sequence
  Synthetic oligonucleotide
gtttcgaccgaacgacgttgtaggctcgtg

SEQ ID NO: 70278 - DNA, 30 bp, Artificial Sequence
  Synthetic oligonucleotide
gtaaaacaggaccgctcagaggatctcgtg

SEQ ID NO: 70279 - DNA, 30 bp, Artificial Sequence
  Synthetic oligonucleotide
gtgccctcgattgcagatgaaggtctcgtg

SEQ ID NO: 70280 - DNA, 30 bp, Artificial Sequence
  Synthetic oligonucleotide
ggctcgatcgaaatccgttcttgcgtcgtg

SEQ ID NO: 70281 - DNA, 30 bp, Artificial Sequence
  Synthetic oligonucleotide
aacatggggagatatcatgtgtcggtcgtg

SEQ ID NO: 70282 - DNA, 30 bp, Artificial Sequence
  Synthetic oligonucleotide
gaatcagacgtgggggtggtaggaaaggtg

SEQ ID NO: 70283 - DNA, 30 bp, Artificial Sequence
  Synthetic oligonucleotide
ggctgcactatcatctacatcaataaggtg

SEQ ID NO: 70284 - DNA, 30 bp, Artificial Sequence
  Synthetic oligonucleotide
cccgcatctcggcgatacgatggtaaggtg

SEQ ID NO: 70285 - DNA, 30 bp, Artificial Sequence
  Synthetic oligonucleotide
gaagactacactctgtcagaaattaaggtg

SEQ ID NO: 70286 - DNA, 30 bp, Artificial Sequence
  Synthetic oligonucleotide
cgtgaggggggcgagcggaagagacaggtg

SEQ ID NO: 70287 - DNA, 30 bp, Artificial Sequence
  Synthetic oligonucleotide
atccgcgaaagggtatttgaattacaggtg

SEQ ID NO: 70288 - DNA, 30 bp, Artificial Sequence
  Synthetic oligonucleotide
gactgaacctcaatacgcgcgctccaggtg

SEQ ID NO: 70289 - DNA, 30 bp, Artificial Sequence
  Synthetic oligonucleotide
caatcgcgccaattcgtcagtgcgcaggtg

SEQ ID NO: 70290 - DNA, 30 bp, Artificial Sequence
  Synthetic oligonucleotide
ccctccaacaattactccgtctaagaggtg

SEQ ID NO: 70291 - DNA, 30 bp, Artificial Sequence
  Synthetic oligonucleotide
cggcattgattacaatgaaaaggggaggtg

SEQ ID NO: 70292 - DNA, 30 bp, Artificial Sequence
  Synthetic oligonucleotide
aagctcggcaatcttatagttaatgaggtg

SEQ ID NO: 70293 - DNA, 30 bp, Artificial Sequence
  Synthetic oligonucleotide
tggtattatcggagggtgtgtctcccggtg

SEQ ID NO: 70294 - DNA, 30 bp, Artificial Sequence
  Synthetic oligonucleotide
agaggagggttaggcaaaaatgttgcggtg

SEQ ID NO: 70295 - DNA, 30 bp, Artificial Sequence
  Synthetic oligonucleotide
cgttagatgtaaaataaagggacctcggtg

SEQ ID NO: 70296 - DNA, 30 bp, Artificial Sequence
  Synthetic oligonucleotide
atcaaggaaaactactgtggccagtcggtg

SEQ ID NO: 70297 - DNA, 30 bp, Artificial Sequence
  Synthetic oligonucleotide
gtcgggtgggggtgatgccagtagtcggtg

SEQ ID NO: 70298 - DNA, 30 bp, Artificial Sequence
  Synthetic oligonucleotide
acgtatatacagaataaattcacttcggtg

SEQ ID NO: 70299 - DNA, 30 bp, Artificial Sequence
  Synthetic oligonucleotide
gcaaatgtaacattcgagcccacaagggtg

SEQ ID NO: 70300 - DNA, 30 bp, Artificial Sequence
  Synthetic oligonucleotide
ttagggcgcatcgtattattttacagggtg

SEQ ID NO: 70301 - DNA, 30 bp, Artificial Sequence
  Synthetic oligonucleotide
tcgggaacccgtataacgtccatcagggtg

SEQ ID NO: 70302 - DNA, 30 bp, Artificial Sequence
  Synthetic oligonucleotide
gggtgcatcggcttcgggcggcggagggtg

SEQ ID NO: 70303 - DNA, 30 bp, Artificial Sequence
  Synthetic oligonucleotide
ggcgcaatccagaaaatgccttttagggtg

SEQ ID NO: 70304 - DNA, 30 bp, Artificial Sequence
  Synthetic oligonucleotide
gaagccggagatggaggtttattacgggtg

SEQ ID NO: 70305 - DNA, 30 bp, Artificial Sequence
  Synthetic oligonucleotide
gagcgagtggttccaattgagtaccgggtg

SEQ ID NO: 70306 - DNA, 30 bp, Artificial Sequence
  Synthetic oligonucleotide
tcagacagccgaatctgtcatgttggggtg

SEQ ID NO: 70307 - DNA, 30 bp, Artificial Sequence
  Synthetic oligonucleotide
acaacagaacgtatggtaaacgcatgggtg

SEQ ID NO: 70308 - DNA, 30 bp, Artificial Sequence
  Synthetic oligonucleotide
aaggcattacattggtagaataactgggtg

SEQ ID NO: 70309 - DNA, 30 bp, Artificial Sequence
  Synthetic oligonucleotide
caacgcactgttgaagctaacaattgggtg

SEQ ID NO: 70310 - DNA, 30 bp, Artificial Sequence
  Synthetic oligonucleotide
tgcaactctaggaaatagattcgttgggtg

SEQ ID NO: 70311 - DNA, 30 bp, Artificial Sequence
  Synthetic oligonucleotide
ggctcacgggcgtccagactcctcatggtg

SEQ ID NO: 70312 - DNA, 30 bp, Artificial Sequence
  Synthetic oligonucleotide
gagatcgtcagttggtgtagcgtgatggtg

SEQ ID NO: 70313 - DNA, 30 bp, Artificial Sequence
  Synthetic oligonucleotide
ttacacaggccaggagatgggaacgtggtg

SEQ ID NO: 70314 - DNA, 30 bp, Artificial Sequence
  Synthetic oligonucleotide
ggctgggagtagtcgtcacatttcgtggtg

SEQ ID NO: 70315 - DNA, 30 bp, Artificial Sequence
  Synthetic oligonucleotide
tataagatcaggaaaactcgggatgtggtg

SEQ ID NO: 70316 - DNA, 30 bp, Artificial Sequence
  Synthetic oligonucleotide
aacgcatggataactcctgaagtattggtg

SEQ ID NO: 70317 - DNA, 30 bp, Artificial Sequence
  Synthetic oligonucleotide
tgtatgcgccacaacggaaaggtcttggtg

SEQ ID NO: 70318 - DNA, 30 bp, Artificial Sequence
  Synthetic oligonucleotide
ggattacggcaggctagaggatacaatgtg

SEQ ID NO: 70319 - DNA, 30 bp, Artificial Sequence
  Synthetic oligonucleotide
ttgcgtcaagtcactagttcctaagatgtg

SEQ ID NO: 70320 - DNA, 30 bp, Artificial Sequence
  Synthetic oligonucleotide
tcgaaaaagagagagtgccaatgtgatgtg

SEQ ID NO: 70321 - DNA, 30 bp, Artificial Sequence
  Synthetic oligonucleotide
tacttgcgagggaatgtttggagctatgtg

SEQ ID NO: 70322 - DNA, 30 bp, Artificial Sequence
  Synthetic oligonucleotide
caaggggtggtaacggtcaaaacgtatgtg

SEQ ID NO: 70323 - DNA, 30 bp, Artificial Sequence
  Synthetic oligonucleotide
gagcggtgaggaaagcgaagcgggtatgtg

SEQ ID NO: 70324 - DNA, 30 bp, Artificial Sequence
  Synthetic oligonucleotide
tttcggtgtagggtctgccgaggaactgtg

SEQ ID NO: 70325 - DNA, 30 bp, Artificial Sequence
  Synthetic oligonucleotide
cggaacatctattagcgcacccatactgtg

SEQ ID NO: 70326 - DNA, 30 bp, Artificial Sequence
  Synthetic oligonucleotide
acacttcacggtcaggtcacttatcctgtg

SEQ ID NO: 70327 - DNA, 30 bp, Artificial Sequence
  Synthetic oligonucleotide
tcgaataagtaatgaagtgaattcgctgtg

SEQ ID NO: 70328 - DNA, 30 bp, Artificial Sequence
  Synthetic oligonucleotide
ataccactcacacattcaaggagatctgtg

SEQ ID NO: 70329 - DNA, 30 bp, Artificial Sequence
  Synthetic oligonucleotide
tctagctattcgaacatataccactctgtg

SEQ ID NO: 70330 - DNA, 30 bp, Artificial Sequence
  Synthetic oligonucleotide
tggatagcggggctcatcgcatcttctgtg

SEQ ID NO: 70331 - DNA, 30 bp, Artificial Sequence
  Synthetic oligonucleotide
ctgtgcctacaatacgggagcgtaagtgtg

SEQ ID NO: 70332 - DNA, 30 bp, Artificial Sequence
  Synthetic oligonucleotide
ggggcggtgacgggttcagactagagtgtg

SEQ ID NO: 70333 - DNA, 30 bp, Artificial Sequence
  Synthetic oligonucleotide
atcgaaggtatatgtagattgcatagtgtg

SEQ ID NO: 70334 - DNA, 30 bp, Artificial Sequence
  Synthetic oligonucleotide
gaagctgaatggccccacaatcatagtgtg

SEQ ID NO: 70335 - DNA, 30 bp, Artificial Sequence
  Synthetic oligonucleotide
agggtgggaatgatcgcgtcctcacgtgtg

SEQ ID NO: 70336 - DNA, 30 bp, Artificial Sequence
  Synthetic oligonucleotide
tcaagtacatgggcttgtactatacgtgtg

SEQ ID NO: 70337 - DNA, 30 bp, Artificial Sequence
  Synthetic oligonucleotide
agaagtgcattcggactacgcatgcgtgtg

SEQ ID NO: 70338 - DNA, 30 bp, Artificial Sequence
  Synthetic oligonucleotide
ggtcgggaaggcaagaggctaaaaggtgtg

SEQ ID NO: 70339 - DNA, 30 bp, Artificial Sequence
  Synthetic oligonucleotide
cgcggcctgaggagagcaaaggaaggtgtg

SEQ ID NO: 70340 - DNA, 30 bp, Artificial Sequence
  Synthetic oligonucleotide
agaaatggctgcggtggaacctaaggtgtg

SEQ ID NO: 70341 - DNA, 30 bp, Artificial Sequence
  Synthetic oligonucleotide
aaagagagcagtcaacctccgtacggtgtg

SEQ ID NO: 70342 - DNA, 30 bp, Artificial Sequence
  Synthetic oligonucleotide
cgtgaagcgggcataatgtacatgattgtg

SEQ ID NO: 70343 - DNA, 30 bp, Artificial Sequence
  Synthetic oligonucleotide
gatgcgcaagctccgacagggtgagttgtg

SEQ ID NO: 70344 - DNA, 30 bp, Artificial Sequence
  Synthetic oligonucleotide
gggaggtataatggactacgaaaatttgtg

SEQ ID NO: 70345 - DNA, 30 bp, Artificial Sequence
  Synthetic oligonucleotide
agcgagtcagtatttcgtttgcaatttgtg

SEQ ID NO: 70346 - DNA, 30 bp, Artificial Sequence
  Synthetic oligonucleotide
acgatgtaggcataccaactgtaaaaattg

SEQ ID NO: 70347 - DNA, 30 bp, Artificial Sequence
  Synthetic oligonucleotide
ggatctcgcgatatggcataatgagaattg

SEQ ID NO: 70348 - DNA, 30 bp, Artificial Sequence
  Synthetic oligonucleotide
agcactgcgtgccagatactatgagaattg

SEQ ID NO: 70349 - DNA, 30 bp, Artificial Sequence
  Synthetic oligonucleotide
acagatacaggtgattacccgaaataattg

SEQ ID NO: 70350 - DNA, 30 bp, Artificial Sequence
  Synthetic oligonucleotide
cgcatttagcgggatccagggaaataattg

SEQ ID NO: 70351 - DNA, 30 bp, Artificial Sequence
  Synthetic oligonucleotide
cccaaaccaagcgtgtaaactgattaattg

SEQ ID NO: 70352 - DNA, 30 bp, Artificial Sequence
  Synthetic oligonucleotide
acaatagttcgcgaagaatctggcacattg

SEQ ID NO: 70353 - DNA, 30 bp, Artificial Sequence
  Synthetic oligonucleotide
cgttcgcatagagtctacacttcgacattg

SEQ ID NO: 70354 - DNA, 30 bp, Artificial Sequence
  Synthetic oligonucleotide
tgcgtaccgtgcaccacgatacgtacattg

SEQ ID NO: 70355 - DNA, 30 bp, Artificial Sequence
  Synthetic oligonucleotide
gaacgtagggtcacccgagaaggtgcattg

SEQ ID NO: 70356 - DNA, 30 bp, Artificial Sequence
  Synthetic oligonucleotide
cacagaagcacggcataggtaaagtcattg

SEQ ID NO: 70357 - DNA, 30 bp, Artificial Sequence
  Synthetic oligonucleotide
gatgatcacaggttttcaagagggtcattg

SEQ ID NO: 70358 - DNA, 30 bp, Artificial Sequence
  Synthetic oligonucleotide
acgtagacatggtgactggttaaaagattg

SEQ ID NO: 70359 - DNA, 30 bp, Artificial Sequence
  Synthetic oligonucleotide
gtgctcgctttcgacctgagaacaagattg

SEQ ID NO: 70360 - DNA, 30 bp, Artificial Sequence
  Synthetic oligonucleotide
agacaccgacggaagcgatctgcaagattg

SEQ ID NO: 70361 - DNA, 30 bp, Artificial Sequence
  Synthetic oligonucleotide
atattatcgtggggttacatagagcgattg

SEQ ID NO: 70362 - DNA, 30 bp, Artificial Sequence
  Synthetic oligonucleotide
ggtaacttccaattggtccggtgaggattg

SEQ ID NO: 70363 - DNA, 30 bp, Artificial Sequence
  Synthetic oligonucleotide
gtgccgagtaattcctcgtaaccatgattg

SEQ ID NO: 70364 - DNA, 30 bp, Artificial Sequence
  Synthetic oligonucleotide
acgcgcggctgtggtctgaacgtgtgattg

SEQ ID NO: 70365 - DNA, 30 bp, Artificial Sequence
  Synthetic oligonucleotide
gtcgcggccaggtccaccaaaaaaatattg

SEQ ID NO: 70366 - DNA, 30 bp, Artificial Sequence
  Synthetic oligonucleotide
agaaagcgttcatacataggactactattg

SEQ ID NO: 70367 - DNA, 30 bp, Artificial Sequence
  Synthetic oligonucleotide
taggcaatggtgatataccagcccctattg

SEQ ID NO: 70368 - DNA, 30 bp, Artificial Sequence
  Synthetic oligonucleotide
catactattgccgaaccagagtgcctattg

SEQ ID NO: 70369 - DNA, 30 bp, Artificial Sequence
  Synthetic oligonucleotide
agcattggtagggtccgtctaggagtattg

SEQ ID NO: 70370 - DNA, 30 bp, Artificial Sequence
  Synthetic oligonucleotide
ttcataggcggaggcgactactcgttattg

SEQ ID NO: 70371 - DNA, 30 bp, Artificial Sequence
  Synthetic oligonucleotide
ttgaatagttaccaaggatcggtgttattg

SEQ ID NO: 70372 - DNA, 30 bp, Artificial Sequence
  Synthetic oligonucleotide
ttagcggttgaattggctggcgacgacttg

SEQ ID NO: 70373 - DNA, 30 bp, Artificial Sequence
  Synthetic oligonucleotide
tcctctcggagaagcgaaggactggacttg

SEQ ID NO: 70374 - DNA, 30 bp, Artificial Sequence
  Synthetic oligonucleotide
ggtcaatcatcccaaagagtgtctgacttg

SEQ ID NO: 70375 - DNA, 30 bp, Artificial Sequence
  Synthetic oligonucleotide
agtagcggatatctgagtctggggtacttg

SEQ ID NO: 70376 - DNA, 30 bp, Artificial Sequence
  Synthetic oligonucleotide
ccgtgcagagcgaggccagttaggaccttg

SEQ ID NO: 70377 - DNA, 30 bp, Artificial Sequence
  Synthetic oligonucleotide
gtcaaggggtgaagatgcaataaagccttg

SEQ ID NO: 70378 - DNA, 30 bp, Artificial Sequence
  Synthetic oligonucleotide
ccaggcagccgaatgcctctaacaagcttg

SEQ ID NO: 70379 - DNA, 30 bp, Artificial Sequence
  Synthetic oligonucleotide
tgttaggaggggaggagactactgagcttg

SEQ ID NO: 70380 - DNA, 30 bp, Artificial Sequence
  Synthetic oligonucleotide
ctagatagactctcgagctcggttagcttg

SEQ ID NO: 70381 - DNA, 30 bp, Artificial Sequence
  Synthetic oligonucleotide
gggcgaaaacaacaacgcatatgccgcttg

SEQ ID NO: 70382 - DNA, 30 bp, Artificial Sequence
  Synthetic oligonucleotide
cgaactattgaacagcagtgtatcggcttg

SEQ ID NO: 70383 - DNA, 30 bp, Artificial Sequence
  Synthetic oligonucleotide
ttactacacaggttcggaactgacatcttg

SEQ ID NO: 70384 - DNA, 30 bp, Artificial Sequence
  Synthetic oligonucleotide
gtaacgatctcaaattaataaaccatcttg

SEQ ID NO: 70385 - DNA, 30 bp, Artificial Sequence
  Synthetic oligonucleotide
ctaacgcgagggtactcacgtatcatcttg

SEQ ID NO: 70386 - DNA, 30 bp, Artificial Sequence
  Synthetic oligonucleotide
atgcaaaacgacgatacttgttacctcttg

SEQ ID NO: 70387 - DNA, 30 bp, Artificial Sequence
  Synthetic oligonucleotide
ccgaaggaatgatcggagatccgcctcttg

SEQ ID NO: 70388 - DNA, 30 bp, Artificial Sequence
  Synthetic oligonucleotide
cggggagatagagagccttatgtagtcttg

SEQ ID NO: 70389 - DNA, 30 bp, Artificial Sequence
  Synthetic oligonucleotide
tcttatcacacgagcttttacaggaagttg

SEQ ID NO: 70390 - DNA, 30 bp, Artificial Sequence
  Synthetic oligonucleotide
ggacaggcctcaggtattagccgccagttg

SEQ ID NO: 70391 - DNA, 30 bp, Artificial Sequence
  Synthetic oligonucleotide
ggagaaagattagcgtgcaaatcagagttg

SEQ ID NO: 70392 - DNA, 30 bp, Artificial Sequence
  Synthetic oligonucleotide
gagcgacgaacgggaaggggggtcgagttg

SEQ ID NO: 70393 - DNA, 30 bp, Artificial Sequence
  Synthetic oligonucleotide
gttaggaaagatggaactcgaagggagttg

SEQ ID NO: 70394 - DNA, 30 bp, Artificial Sequence
  Synthetic oligonucleotide
taataagcgcacatcatcagcagtgagttg

SEQ ID NO: 70395 - DNA, 30 bp, Artificial Sequence
  Synthetic oligonucleotide
actagctgatggtcactgatagttgagttg

SEQ ID NO: 70396 - DNA, 30 bp, Artificial Sequence
  Synthetic oligonucleotide
tcgtgcgcgttacagaggtgtcattagttg

SEQ ID NO: 70397 - DNA, 30 bp, Artificial Sequence
  Synthetic oligonucleotide
cgtgccatatataccgttgggttcacgttg

SEQ ID NO: 70398 - DNA, 30 bp, Artificial Sequence
  Synthetic oligonucleotide
cggcagatcggcaacccaaagctcgcgttg

SEQ ID NO: 70399 - DNA, 30 bp, Artificial Sequence
  Synthetic oligonucleotide
aggttagataggtcttaaccgctcgcgttg

SEQ ID NO: 70400 - DNA, 30 bp, Artificial Sequence
  Synthetic oligonucleotide
cagtaacgcgagaactaggttgtggcgttg

SEQ ID NO: 70401 - DNA, 30 bp, Artificial Sequence
  Synthetic oligonucleotide
agtcagcgggtatggtactagctctcgttg

SEQ ID NO: 70402 - DNA, 30 bp, Artificial Sequence
  Synthetic oligonucleotide
ttagatcaagcataggtcgtattctcgttg

SEQ ID NO: 70403 - DNA, 30 bp, Artificial Sequence
  Synthetic oligonucleotide
agcggcgacctgctgggccatgcttcgttg

SEQ ID NO: 70404 - DNA, 30 bp, Artificial Sequence
  Synthetic oligonucleotide
actaggcatgactgaggtaacgaaaggttg

SEQ ID NO: 70405 - DNA, 30 bp, Artificial Sequence
  Synthetic oligonucleotide
aggccattgccgtaccggtacccatggttg

SEQ ID NO: 70406 - DNA, 30 bp, Artificial Sequence
  Synthetic oligonucleotide
gagagtaaggccactcagccccgcatgttg

SEQ ID NO: 70407 - DNA, 30 bp, Artificial Sequence
  Synthetic oligonucleotide
gacgtacaggtgcatagggacccgatgttg

SEQ ID NO: 70408 - DNA, 30 bp, Artificial Sequence
  Synthetic oligonucleotide
aagctaggacatgataacgcgcatatgttg

SEQ ID NO: 70409 - DNA, 30 bp, Artificial Sequence
  Synthetic oligonucleotide
ttcgaggaacgggtcacaggatcactgttg

SEQ ID NO: 70410 - DNA, 30 bp, Artificial Sequence
  Synthetic oligonucleotide
aagacatttaaacgccttaaaagggtgttg

SEQ ID NO: 70411 - DNA, 31 bp, Artificial Sequence
  Synthetic oligonucleotide
ctcgcggtttagcgtacgaacgttattgttg

SEQ ID NO: 70412 - DNA, 30 bp, Artificial Sequence
  Synthetic oligonucleotide
gtgcagagtcagatgcaagttatgttgttg

SEQ ID NO: 70413 - DNA, 30 bp, Artificial Sequence
  Synthetic oligonucleotide
aaggagtatgcgagcgggcgcaatttgttg

SEQ ID NO: 70414 - DNA, 30 bp, Artificial Sequence
  Synthetic oligonucleotide
agggctgaattgcggacgatcgatttgttg

SEQ ID NO: 70415 - DNA, 30 bp, Artificial Sequence
  Synthetic oligonucleotide
cgggtaaagaagcatccatctcaaaatttg

SEQ ID NO: 70416 - DNA, 30 bp, Artificial Sequence
  Synthetic oligonucleotide
accggtgagccctacgtctaaacgaatttg

SEQ ID NO: 70417 - DNA, 30 bp, Artificial Sequence
  Synthetic oligonucleotide
gaggcagagtgcttaaggtgactacatttg

SEQ ID NO: 70418 - DNA, 30 bp, Artificial Sequence
  Synthetic oligonucleotide
cagaaaatgagtcttatatctctgcatttg

SEQ ID NO: 70419 - DNA, 30 bp, Artificial Sequence
  Synthetic oligonucleotide
agaaaaggctaaagctgttacccatatttg

SEQ ID NO: 70420 - DNA, 30 bp, Artificial Sequence
  Synthetic oligonucleotide
catgcgaccgaaaacagaaataccgctttg

SEQ ID NO: 70421 - DNA, 30 bp, Artificial Sequence
  Synthetic oligonucleotide
cataggaagtaaggttttcgtcccgctttg

SEQ ID NO: 70422 - DNA, 30 bp, Artificial Sequence
  Synthetic oligonucleotide
tgcgtgcagctaaggataggctgcgctttg

SEQ ID NO: 70423 - DNA, 30 bp, Artificial Sequence
  Synthetic oligonucleotide
tcgagctaggtcggaacataacagtctttg

SEQ ID NO: 70424 - DNA, 30 bp, Artificial Sequence
  Synthetic oligonucleotide
accaatcaaggtcatccagccatcagtttg

SEQ ID NO: 70425 - DNA, 30 bp, Artificial Sequence
  Synthetic oligonucleotide
agaagtggttctaccgactctagtagtttg

SEQ ID NO: 70426 - DNA, 30 bp, Artificial Sequence
  Synthetic oligonucleotide
tcgagatcgaaatagtgtcgagaccgtttg

SEQ ID NO: 70427 - DNA, 30 bp, Artificial Sequence
  Synthetic oligonucleotide
ccgggccgggttaggcgcctgtctcgtttg

SEQ ID NO: 70428 - DNA, 30 bp, Artificial Sequence
  Synthetic oligonucleotide
cgttacgacatttcaggccccacatgtttg

SEQ ID NO: 70429 - DNA, 30 bp, Artificial Sequence
  Synthetic oligonucleotide
agagcggcgagcccagttatgcatgttttg

SEQ ID NO: 70430 - DNA, 30 bp, Artificial Sequence
  Synthetic oligonucleotide
agggcattaggattctggacctactttttg

SEQ ID NO: 70431 - DNA, 30 bp, Artificial Sequence
  Synthetic oligonucleotide
agatggcgtgctgactgggaatgcgaaaat

SEQ ID NO: 70432 - DNA, 30 bp, Artificial Sequence
  Synthetic oligonucleotide
cggtccaagagaacccacggcttcgaaaat

SEQ ID NO: 70433 - DNA, 30 bp, Artificial Sequence
  Synthetic oligonucleotide
tgacaatagattctggaagtaaggtaaaat

SEQ ID NO: 70434 - DNA, 30 bp, Artificial Sequence
  Synthetic oligonucleotide
ggggcaccttgggttgtcatcggaacaaat

SEQ ID NO: 70435 - DNA, 30 bp, Artificial Sequence
  Synthetic oligonucleotide
aaaagtgccgatacaacaacctttacaaat

SEQ ID NO: 70436 - DNA, 30 bp, Artificial Sequence
  Synthetic oligonucleotide
attcggagctgtataggtgactgggcaaat

SEQ ID NO: 70437 - DNA, 30 bp, Artificial Sequence
  Synthetic oligonucleotide
atgatggtacggaggttacatgcctcaaat

SEQ ID NO: 70438 - DNA, 30 bp, Artificial Sequence
  Synthetic oligonucleotide
cgctgaagttcagtgaaggtccgctcaaat

SEQ ID NO: 70439 - DNA, 30 bp, Artificial Sequence
  Synthetic oligonucleotide
gcgcataagtgtgaatttatctaaggaaat

SEQ ID NO: 70440 - DNA, 30 bp, Artificial Sequence
  Synthetic oligonucleotide
catagccagtctagaccggtgtgaggaaat

SEQ ID NO: 70441 - DNA, 30 bp, Artificial Sequence
  Synthetic oligonucleotide
tagagacgaacccgtacgacgataggaaat

SEQ ID NO: 70442 - DNA, 30 bp, Artificial Sequence
  Synthetic oligonucleotide
ggagagacatagatttgagtgtagggaaat

SEQ ID NO: 70443 - DNA, 30 bp, Artificial Sequence
  Synthetic oligonucleotide
agatggtagggctgagtctagattggaaat

SEQ ID NO: 70444 - DNA, 30 bp, Artificial Sequence
  Synthetic oligonucleotide
agcctaggctgcggtgtaatgctgtgaaat

SEQ ID NO: 70445 - DNA, 30 bp, Artificial Sequence
  Synthetic oligonucleotide
aggcactttaggggcaaacgatgttgaaat

SEQ ID NO: 70446 - DNA, 30 bp, Artificial Sequence
  Synthetic oligonucleotide
ccgttgcggccgaattctaaaagcataaat

SEQ ID NO: 70447 - DNA, 30 bp, Artificial Sequence
  Synthetic oligonucleotide
atcagcgaagagcttaaaatggctctaaat

SEQ ID NO: 70448 - DNA, 30 bp, Artificial Sequence
  Synthetic oligonucleotide
taccgggcacgcgagcagccaccggtaaat

SEQ ID NO: 70449 - DNA, 30 bp, Artificial Sequence
  Synthetic oligonucleotide
gacatatgacgggacatgcatccattaaat

SEQ ID NO: 70450 - DNA, 30 bp, Artificial Sequence
  Synthetic oligonucleotide
ccacgaacaattctaaacggctcaaacaat

SEQ ID NO: 70451 - DNA, 30 bp, Artificial Sequence
  Synthetic oligonucleotide
tcgaattagtacatggggggtataaacaat

SEQ ID NO: 70452 - DNA, 30 bp, Artificial Sequence
  Synthetic oligonucleotide
tgacaacagcacgccggcgcactccacaat

SEQ ID NO: 70453 - DNA, 30 bp, Artificial Sequence
  Synthetic oligonucleotide
cgccgtcgagttacagtgcggtaagacaat

SEQ ID NO: 70454 - DNA, 30 bp, Artificial Sequence
  Synthetic oligonucleotide
gtcaggtcagagttcacgtaggacgacaat

SEQ ID NO: 70455 - DNA, 30 bp, Artificial Sequence
  Synthetic oligonucleotide
cagtacgttacataaactctgccgaccaat

SEQ ID NO: 70456 - DNA, 30 bp, Artificial Sequence
  Synthetic oligonucleotide
gagaaaggtcttgaccgggcagggaccaat

SEQ ID NO: 70457 - DNA, 30 bp, Artificial Sequence
  Synthetic oligonucleotide
gcaagtaggctgaggcactcgtcacccaat

SEQ ID NO: 70458 - DNA, 30 bp, Artificial Sequence
  Synthetic oligonucleotide
gcacaagtcgtaacagactgtagtcccaat

SEQ ID NO: 70459 - DNA, 30 bp, Artificial Sequence
  Synthetic oligonucleotide
tatgtaaaaaaatctatctcgtaagccaat

SEQ ID NO: 70460 - DNA, 30 bp, Artificial Sequence
  Synthetic oligonucleotide
ccttggacttgacgggggtacctggccaat

SEQ ID NO: 70461 - DNA, 31 bp, Artificial Sequence
  Synthetic oligonucleotide
ataggatgactcttccgacagtgcgtccaat

SEQ ID NO: 70462 - DNA, 30 bp, Artificial Sequence
  Synthetic oligonucleotide
tgaccgtaggtacctcgaggggggtccaat

SEQ ID NO: 70463 - DNA, 30 bp, Artificial Sequence
  Synthetic oligonucleotide
taaatagctagagtgatgatatacagcaat

SEQ ID NO: 70464 - DNA, 30 bp, Artificial Sequence
  Synthetic oligonucleotide
gcggacattgagggcaaacggctgtgcaat

SEQ ID NO: 70465 - DNA, 30 bp, Artificial Sequence
  Synthetic oligonucleotide
acgagtggtagccgctccgtggtgatcaat

SEQ ID NO: 70466 - DNA, 30 bp, Artificial Sequence
  Synthetic oligonucleotide
atcggcggatgaagctagtatgcagtcaat

SEQ ID NO: 70467 - DNA, 30 bp, Artificial Sequence
  Synthetic oligonucleotide
tgtcaacacaatgtcttgtcaaccgtcaat

SEQ ID NO: 70468 - DNA, 30 bp, Artificial Sequence
  Synthetic oligonucleotide
gcctggagtcgggtatggaatcaaaagaat

SEQ ID NO: 70469 - DNA, 30 bp, Artificial Sequence
  Synthetic oligonucleotide
tgttgagagtggacttaccgcctaaagaat

SEQ ID NO: 70470 - DNA, 30 bp, Artificial Sequence
  Synthetic oligonucleotide
ccagaagaattcgaatgaacctacgagaat

SEQ ID NO: 70471 - DNA, 30 bp, Artificial Sequence
  Synthetic oligonucleotide
tgcagagtataattagataaactggagaat

SEQ ID NO: 70472 - DNA, 30 bp, Artificial Sequence
  Synthetic oligonucleotide
gaaccaagaacgaagtcaacgtatgagaat

SEQ ID NO: 70473 - DNA, 30 bp, Artificial Sequence
  Synthetic oligonucleotide
agaatgatgagatccagtagcgccacgaat

SEQ ID NO: 70474 - DNA, 31 bp, Artificial Sequence
  Synthetic oligonucleotide
cagaatacgattgtgtggcccgacgacgaat

SEQ ID NO: 70475 - DNA, 30 bp, Artificial Sequence
  Synthetic oligonucleotide
tcgtagactaccgagtaaattggcccgaat

SEQ ID NO: 70476 - DNA, 30 bp, Artificial Sequence
  Synthetic oligonucleotide
cacaggtccgaggtgacttaaccgccgaat

SEQ ID NO: 70477 - DNA, 30 bp, Artificial Sequence
  Synthetic oligonucleotide
tagcggctcgaagggacattagattcgaat

SEQ ID NO: 70478 - DNA, 30 bp, Artificial Sequence
  Synthetic oligonucleotide
taaaacaaaaagagaaatcggaacgggaat

SEQ ID NO: 70479 - DNA, 30 bp, Artificial Sequence
  Synthetic oligonucleotide
gcacgtatgatagcatagtattacgggaat

SEQ ID NO: 70480 - DNA, 30 bp, Artificial Sequence
  Synthetic oligonucleotide
cgggatgatatcggttacaacgccgggaat

SEQ ID NO: 70481 - DNA, 30 bp, Artificial Sequence
  Synthetic oligonucleotide
tcatctaaagaattatcataagcggggaat

SEQ ID NO: 70482 - DNA, 30 bp, Artificial Sequence
  Synthetic oligonucleotide
caaaggtaagctgatggtcaatcggggaat

SEQ ID NO: 70483 - DNA, 30 bp, Artificial Sequence
  Synthetic oligonucleotide
accgggtgccaatggaaagaactactgaat

SEQ ID NO: 70484 - DNA, 30 bp, Artificial Sequence
  Synthetic oligonucleotide
gagcgtgaagaactttcagcggccctgaat

SEQ ID NO: 70485 - DNA, 30 bp, Artificial Sequence
  Synthetic oligonucleotide
cggcgtacacatgcgggacatcagctgaat

SEQ ID NO: 70486 - DNA, 30 bp, Artificial Sequence
  Synthetic oligonucleotide
tgtgtcgggtggagaggcagtgcgctgaat

SEQ ID NO: 70487 - DNA, 30 bp, Artificial Sequence
  Synthetic oligonucleotide
ccaagcaaaggggggatcaacgtgctgaat

SEQ ID NO: 70488 - DNA, 30 bp, Artificial Sequence
  Synthetic oligonucleotide
tagatggcattagcccagtctgaggtgaat

SEQ ID NO: 70489 - DNA, 30 bp, Artificial Sequence
  Synthetic oligonucleotide
agcagcgtgaaagccccgtgaggattgaat

SEQ ID NO: 70490 - DNA, 30 bp, Artificial Sequence
  Synthetic oligonucleotide
ttagatggaaggccactttacgagaataat

SEQ ID NO: 70491 - DNA, 30 bp, Artificial Sequence
  Synthetic oligonucleotide
aatagggtgtcgggagataaaatgaataat

SEQ ID NO: 70492 - DNA, 30 bp, Artificial Sequence
  Synthetic oligonucleotide
ataaattgcgggaccaactcacaagataat

SEQ ID NO: 70493 - DNA, 30 bp, Artificial Sequence
  Synthetic oligonucleotide
ggacgcgccttctccaaagagcccgataat

SEQ ID NO: 70494 - DNA, 30 bp, Artificial Sequence
  Synthetic oligonucleotide
gggaccaatacatcccaaaggaaagctaat

SEQ ID NO: 70495 - DNA, 30 bp, Artificial Sequence
  Synthetic oligonucleotide
cgataataatagctgcgatttagtagtaat

SEQ ID NO: 70496 - DNA, 30 bp, Artificial Sequence
  Synthetic oligonucleotide
gaggagtggggagtcgaccgagcacgtaat

SEQ ID NO: 70497 - DNA, 30 bp, Artificial Sequence
  Synthetic oligonucleotide
ccgtctcctggagggcaaaacagaggtaat

SEQ ID NO: 70498 - DNA, 30 bp, Artificial Sequence
  Synthetic oligonucleotide
tggcgattaaggtaaagaatgctgggtaat

SEQ ID NO: 70499 - DNA, 30 bp, Artificial Sequence
  Synthetic oligonucleotide
gcgcaaaggataggtgcagtgctctgtaat

SEQ ID NO: 70500 - DNA, 30 bp, Artificial Sequence
  Synthetic oligonucleotide
tcagcgcatcgtgagacagtcatcattaat

SEQ ID NO: 70501 - DNA, 30 bp, Artificial Sequence
  Synthetic oligonucleotide
taaatcggggaaagaggaagaacgcttaat

SEQ ID NO: 70502 - DNA, 30 bp, Artificial Sequence
  Synthetic oligonucleotide
ggagaggtggtttcgctaactcgaaaacat

SEQ ID NO: 70503 - DNA, 30 bp, Artificial Sequence
  Synthetic oligonucleotide
tactaaccgagagtcagaacgtgaaaacat

SEQ ID NO: 70504 - DNA, 30 bp, Artificial Sequence
  Synthetic oligonucleotide
cagcttacggatgtgactacgccgaaacat

SEQ ID NO: 70505 - DNA, 30 bp, Artificial Sequence
  Synthetic oligonucleotide
gagcggatttcaagcagggtgaaggaacat

SEQ ID NO: 70506 - DNA, 30 bp, Artificial Sequence
  Synthetic oligonucleotide
gcggattggatatttcgcataaactaacat

SEQ ID NO: 70507 - DNA, 30 bp, Artificial Sequence
  Synthetic oligonucleotide
atccacttcggaattctgtttaactaacat

SEQ ID NO: 70508 - DNA, 30 bp, Artificial Sequence
  Synthetic oligonucleotide
agcacagacctttggcgagtccgttaacat

SEQ ID NO: 70509 - DNA, 30 bp, Artificial Sequence
  Synthetic oligonucleotide
cttaaagtaagcttcgacagctgaacacat

SEQ ID NO: 70510 - DNA, 30 bp, Artificial Sequence
  Synthetic oligonucleotide
ctagcgaccggaattgggaaggagacacat

SEQ ID NO: 70511 - DNA, 30 bp, Artificial Sequence
  Synthetic oligonucleotide
gggaaagtcggcattattggacttccacat

SEQ ID NO: 70512 - DNA, 30 bp, Artificial Sequence
  Synthetic oligonucleotide
cctccgtttagaccgaggggcaaggcacat

SEQ ID NO: 70513 - DNA, 30 bp, Artificial Sequence
  Synthetic oligonucleotide
aataacgaggacgaattggcttctgcacat

SEQ ID NO: 70514 - DNA, 30 bp, Artificial Sequence
  Synthetic oligonucleotide
acatacctacagccgtcctacacgtcacat

SEQ ID NO: 70515 - DNA, 30 bp, Artificial Sequence
  Synthetic oligonucleotide
acgggggcggaaccgataaattgcagacat

SEQ ID NO: 70516 - DNA, 30 bp, Artificial Sequence
  Synthetic oligonucleotide
actgggaactaactggcgactccgcgacat

SEQ ID NO: 70517 - DNA, 30 bp, Artificial Sequence
  Synthetic oligonucleotide
gacccgaacactaagtaggaagggcgacat

SEQ ID NO: 70518 - DNA, 30 bp, Artificial Sequence
  Synthetic oligonucleotide
atatgcatcctgagtaagccactgcgacat

SEQ ID NO: 70519 - DNA, 30 bp, Artificial Sequence
  Synthetic oligonucleotide
ccgcggcacccagtaaagcgggtaggacat

SEQ ID NO: 70520 - DNA, 30 bp, Artificial Sequence
  Synthetic oligonucleotide
gtccgcccggaagtaaggaggttgggacat

SEQ ID NO: 70521 - DNA, 30 bp, Artificial Sequence
  Synthetic oligonucleotide
gcgagagatcttctccacaagacctgacat

SEQ ID NO: 70522 - DNA, 30 bp, Artificial Sequence
  Synthetic oligonucleotide
aggcgtccacaatggtacaaaaagtgacat

SEQ ID NO: 70523 - DNA, 30 bp, Artificial Sequence
  Synthetic oligonucleotide
agcaatggctaaatgaacatacggctacat

SEQ ID NO: 70524 - DNA, 30 bp, Artificial Sequence
  Synthetic oligonucleotide
aaagggtacgaatggcgtactacggtacat

SEQ ID NO: 70525 - DNA, 30 bp, Artificial Sequence
  Synthetic oligonucleotide
gaaccaagtaaaggcagagattcggtacat

SEQ ID NO: 70526 - DNA, 30 bp, Artificial Sequence
  Synthetic oligonucleotide
tggcccaaatatcacttggctatggtacat

SEQ ID NO: 70527 - DNA, 30 bp, Artificial Sequence
  Synthetic oligonucleotide
gcgaggtaaccgagtacattcgtggtacat

SEQ ID NO: 70528 - DNA, 30 bp, Artificial Sequence
  Synthetic oligonucleotide
ggatgcggggcatcacatcgtaatccccat

SEQ ID NO: 70529 - DNA, 30 bp, Artificial Sequence
  Synthetic oligonucleotide
cgtattcgcgaaaccaaactcattccccat

SEQ ID NO: 70530 - DNA, 30 bp, Artificial Sequence
  Synthetic oligonucleotide
aagcggggacttgcttcggagtgtagccat

SEQ ID NO: 70531 - DNA, 30 bp, Artificial Sequence
  Synthetic oligonucleotide
acgcctcgtccggcactccgaaagcgccat

SEQ ID NO: 70532 - DNA, 30 bp, Artificial Sequence
  Synthetic oligonucleotide
ccaggcatgtgtggaggcgtaaatcgccat

SEQ ID NO: 70533 - DNA, 30 bp, Artificial Sequence
  Synthetic oligonucleotide
ccgatagctcagaagatacaacgaatccat

SEQ ID NO: 70534 - DNA, 30 bp, Artificial Sequence
  Synthetic oligonucleotide
gctcacacttctcaagtgaaccacatccat

SEQ ID NO: 70535 - DNA, 30 bp, Artificial Sequence
  Synthetic oligonucleotide
tgagtcaggtattagaaacgtgtgatccat

SEQ ID NO: 70536 - DNA, 30 bp, Artificial Sequence
  Synthetic oligonucleotide
ggcgacagcacacagccaactaaagtccat

SEQ ID NO: 70537 - DNA, 30 bp, Artificial Sequence
  Synthetic oligonucleotide
gggcagaatcatacaattcgaagcgtccat

SEQ ID NO: 70538 - DNA, 30 bp, Artificial Sequence
  Synthetic oligonucleotide
ggagaccggaagggcttaaaccatttccat

SEQ ID NO: 70539 - DNA, 30 bp, Artificial Sequence
  Synthetic oligonucleotide
cgaaaaaacagaccgccagctaaaaagcat

SEQ ID NO: 70540 - DNA, 30 bp, Artificial Sequence
  Synthetic oligonucleotide
ttctggacaacaaagttctgaataaagcat

SEQ ID NO: 70541 - DNA, 30 bp, Artificial Sequence
  Synthetic oligonucleotide
agtagtgatacaccgagattggtgaagcat

SEQ ID NO: 70542 - DNA, 30 bp, Artificial Sequence
  Synthetic oligonucleotide
acgaagctagtgccaagaagatcgcagcat

SEQ ID NO: 70543 - DNA, 30 bp, Artificial Sequence
  Synthetic oligonucleotide
gtgtcgaaatggagtacccgatatgagcat

SEQ ID NO: 70544 - DNA, 30 bp, Artificial Sequence
  Synthetic oligonucleotide
ccggccggaccgtatcccaggtagtcgcat

SEQ ID NO: 70545 - DNA, 30 bp, Artificial Sequence
  Synthetic oligonucleotide
caacgggaacgatacttagtggtgtcgcat

SEQ ID NO: 70546 - DNA, 30 bp, Artificial Sequence
  Synthetic oligonucleotide
gtgaacagggtaaatcgttgtccaaggcat

SEQ ID NO: 70547 - DNA, 30 bp, Artificial Sequence
  Synthetic oligonucleotide
cgttgcgggcagagcccagcagcaaggcat

SEQ ID NO: 70548 - DNA, 30 bp, Artificial Sequence
  Synthetic oligonucleotide
cgaggattggctcagcggtgaagcaggcat

SEQ ID NO: 70549 - DNA, 30 bp, Artificial Sequence
  Synthetic oligonucleotide
aggccacctgcgtccacctaaactcggcat

SEQ ID NO: 70550 - DNA, 30 bp, Artificial Sequence
  Synthetic oligonucleotide
tatcgaataggttgttagaaaccgtggcat

SEQ ID NO: 70551 - DNA, 30 bp, Artificial Sequence
  Synthetic oligonucleotide
acgtaaaaaaacatgtttaaaattctgcat

SEQ ID NO: 70552 - DNA, 30 bp, Artificial Sequence
  Synthetic oligonucleotide
actgaccataacgagatcgaaagcgtgcat

SEQ ID NO: 70553 - DNA, 30 bp, Artificial Sequence
  Synthetic oligonucleotide
gtgtgccaccttccctaatgagaattgcat

SEQ ID NO: 70554 - DNA, 30 bp, Artificial Sequence
  Synthetic oligonucleotide
ggagcgtttatagaaataaccggcaatcat

SEQ ID NO: 70555 - DNA, 30 bp, Artificial Sequence
  Synthetic oligonucleotide
tcggacaccagtaccttgagtctgaatcat

SEQ ID NO: 70556 - DNA, 30 bp, Artificial Sequence
  Synthetic oligonucleotide
gttgggacgccccaggacaagaataatcat

SEQ ID NO: 70557 - DNA, 30 bp, Artificial Sequence
  Synthetic oligonucleotide
agacagataattatcgaggtttaacatcat

SEQ ID NO: 70558 - DNA, 30 bp, Artificial Sequence
  Synthetic oligonucleotide
taatgggacataactggtggtgcacatcat

SEQ ID NO: 70559 - DNA, 30 bp, Artificial Sequence
  Synthetic oligonucleotide
acggaggactgtagtttcagagagcatcat

SEQ ID NO: 70560 - DNA, 30 bp, Artificial Sequence
  Synthetic oligonucleotide
taagttcagggagacaagaaaacttatcat

SEQ ID NO: 70561 - DNA, 30 bp, Artificial Sequence
  Synthetic oligonucleotide
taggcaagcggggtagactgagcgcctcat

SEQ ID NO: 70562 - DNA, 30 bp, Artificial Sequence
  Synthetic oligonucleotide
acgttgactggatgctttcctagagctcat

SEQ ID NO: 70563 - DNA, 30 bp, Artificial Sequence
  Synthetic oligonucleotide
gggctaaatagcgtccacggaaagagtcat

SEQ ID NO: 70564 - DNA, 30 bp, Artificial Sequence
  Synthetic oligonucleotide
gtgcgaagtcaacccttagtgcagcgtcat

SEQ ID NO: 70565 - DNA, 30 bp, Artificial Sequence
  Synthetic oligonucleotide
ttgataggtgagagacgggaagctggtcat

SEQ ID NO: 70566 - DNA, 30 bp, Artificial Sequence
  Synthetic oligonucleotide
gtgagtctagactaggaagataaacttcat

SEQ ID NO: 70567 - DNA, 30 bp, Artificial Sequence
  Synthetic oligonucleotide
cgatacatgaggttgaccgtcccctttcat

SEQ ID NO: 70568 - DNA, 30 bp, Artificial Sequence
  Synthetic oligonucleotide
ggagatcctcaaagacatgtttaaaaagat

SEQ ID NO: 70569 - DNA, 30 bp, Artificial Sequence
  Synthetic oligonucleotide
ggcaggggttttatacgccacgtgaaagat

SEQ ID NO: 70570 - DNA, 30 bp, Artificial Sequence
  Synthetic oligonucleotide
ctagttcaccaccgggcccgtaaacaagat

SEQ ID NO: 70571 - DNA, 30 bp, Artificial Sequence
  Synthetic oligonucleotide
acgtgtagtcctctagacaaccagcaagat

SEQ ID NO: 70572 - DNA, 30 bp, Artificial Sequence
  Synthetic oligonucleotide
gtgcttacacaataagagtacagtcaagat

SEQ ID NO: 70573 - DNA, 30 bp, Artificial Sequence
  Synthetic oligonucleotide
gctacataaacggaaattaatggataagat

SEQ ID NO: 70574 - DNA, 30 bp, Artificial Sequence
  Synthetic oligonucleotide
cacgaagttatctcaccaaacctataagat

SEQ ID NO: 70575 - DNA, 30 bp, Artificial Sequence
  Synthetic oligonucleotide
gcttaaccaagctcaacacgagcctaagat

SEQ ID NO: 70576 - DNA, 30 bp, Artificial Sequence
  Synthetic oligonucleotide
tctcggcacaatagattataaagaacagat

SEQ ID NO: 70577 - DNA, 30 bp, Artificial Sequence
  Synthetic oligonucleotide
gtacttcactgtacgtaactattcccagat

SEQ ID NO: 70578 - DNA, 30 bp, Artificial Sequence
  Synthetic oligonucleotide
gttgagcccactaggtaaggaaagccagat

SEQ ID NO: 70579 - DNA, 30 bp, Artificial Sequence
  Synthetic oligonucleotide
tcccattgatcgtggcaacagaaagcagat

SEQ ID NO: 70580 - DNA, 30 bp, Artificial Sequence
  Synthetic oligonucleotide
atcgataagtggagacttggattcgcagat

SEQ ID NO: 70581 - DNA, 30 bp, Artificial Sequence
  Synthetic oligonucleotide
cacacaccagcagcggagactagggcagat

SEQ ID NO: 70582 - DNA, 30 bp, Artificial Sequence
  Synthetic oligonucleotide
agcaagaccaacatgccttacagatcagat

SEQ ID NO: 70583 - DNA, 30 bp, Artificial Sequence
  Synthetic oligonucleotide
tacgttacttgaagatcgctagattcagat

SEQ ID NO: 70584 - DNA, 30 bp, Artificial Sequence
  Synthetic oligonucleotide
cgtgtagccattgttggttagaaaggagat

SEQ ID NO: 70585 - DNA, 30 bp, Artificial Sequence
  Synthetic oligonucleotide
aggaaggaaatggcaaggtcggtcggagat

SEQ ID NO: 70586 - DNA, 30 bp, Artificial Sequence
  Synthetic oligonucleotide
accaataaggaactcctcgatgactgagat

SEQ ID NO: 70587 - DNA, 30 bp, Artificial Sequence
  Synthetic oligonucleotide
taccataacacagccgacatggtgtgagat

SEQ ID NO: 70588 - DNA, 30 bp, Artificial Sequence
  Synthetic oligonucleotide
gcttacggaattttgaaatgtcacatagat

SEQ ID NO: 70589 - DNA, 30 bp, Artificial Sequence
  Synthetic oligonucleotide
atgccgggatgctctaggaatagagtagat

SEQ ID NO: 70590 - DNA, 30 bp, Artificial Sequence
  Synthetic oligonucleotide
tcgagcggtggcagtacgggtgcggtagat

SEQ ID NO: 70591 - DNA, 30 bp, Artificial Sequence
  Synthetic oligonucleotide
cgcctggctggtgaaagacgaatggtagat

SEQ ID NO: 70592 - DNA, 30 bp, Artificial Sequence
  Synthetic oligonucleotide
gcaaatatcgctaaggagagatgattagat

SEQ ID NO: 70593 - DNA, 30 bp, Artificial Sequence
  Synthetic oligonucleotide
ccatggcggtatttgcggcggactttagat

SEQ ID NO: 70594 - DNA, 30 bp, Artificial Sequence
  Synthetic oligonucleotide
ggcaataaattgccacatccgaatcacgat

SEQ ID NO: 70595 - DNA, 30 bp, Artificial Sequence
  Synthetic oligonucleotide
gcgcctaaaggtacgtagagacacgacgat

SEQ ID NO: 70596 - DNA, 30 bp, Artificial Sequence
  Synthetic oligonucleotide
atgtcgatcatgacgagggtgcgaaccgat

SEQ ID NO: 70597 - DNA, 30 bp, Artificial Sequence
  Synthetic oligonucleotide
acttcgattgaaagaaaggggggttccgat

SEQ ID NO: 70598 - DNA, 30 bp, Artificial Sequence
  Synthetic oligonucleotide
ttccaagggtcaaacgaagtaaggagcgat

SEQ ID NO: 70599 - DNA, 30 bp, Artificial Sequence
  Synthetic oligonucleotide
ggctgaacccgtctagaacccgttagcgat

SEQ ID NO: 70600 - DNA, 30 bp, Artificial Sequence
  Synthetic oligonucleotide
tagacagggaccttgacggcagaacgcgat

SEQ ID NO: 70601 - DNA, 30 bp, Artificial Sequence
  Synthetic oligonucleotide
cattagcgcgaggcgacataaggacgcgat

SEQ ID NO: 70602 - DNA, 30 bp, Artificial Sequence
  Synthetic oligonucleotide
acgtttccgtgaatatatgggaatcgcgat

SEQ ID NO: 70603 - DNA, 30 bp, Artificial Sequence
  Synthetic oligonucleotide
aggcaggcggatagagacatgcaaggcgat

SEQ ID NO: 70604 - DNA, 30 bp, Artificial Sequence
  Synthetic oligonucleotide
ctaacagcagctagcgaataggcaggcgat

SEQ ID NO: 70605 - DNA, 30 bp, Artificial Sequence
  Synthetic oligonucleotide
aaacgacaaatatcttgatcatagggcgat

SEQ ID NO: 70606 - DNA, 30 bp, Artificial Sequence
  Synthetic oligonucleotide
ctgcgtgagggtagaggtggtaatggcgat

SEQ ID NO: 70607 - DNA, 30 bp, Artificial Sequence
  Synthetic oligonucleotide
ctcacaactaaataccttagggaatgcgat

SEQ ID NO: 70608 - DNA, 30 bp, Artificial Sequence
  Synthetic oligonucleotide
aatggataggcagttagaacgaccgtcgat

SEQ ID NO: 70609 - DNA, 30 bp, Artificial Sequence
  Synthetic oligonucleotide
gggcagtatataagcacaagatctgtcgat

SEQ ID NO: 70610 - DNA, 30 bp, Artificial Sequence
  Synthetic oligonucleotide
tgacgagtgttgggccaggtctttgtcgat

SEQ ID NO: 70611 - DNA, 30 bp, Artificial Sequence
  Synthetic oligonucleotide
agtaacagcaagcgaagacatatgttcgat

SEQ ID NO: 70612 - DNA, 30 bp, Artificial Sequence
  Synthetic oligonucleotide
gggtatagttgaggacacgccgtgttcgat

SEQ ID NO: 70613 - DNA, 30 bp, Artificial Sequence
  Synthetic oligonucleotide
agtattaacgtaagtaatagggtgaaggat

SEQ ID NO: 70614 - DNA, 30 bp, Artificial Sequence
  Synthetic oligonucleotide
cgaagtcatcgcgttaacgtacaccaggat

SEQ ID NO: 70615 - DNA, 30 bp, Artificial Sequence
  Synthetic oligonucleotide
gttaaagtagaaactcattagttgcaggat

SEQ ID NO: 70616 - DNA, 30 bp, Artificial Sequence
  Synthetic oligonucleotide
attaagactcctaccgatacccaagaggat

SEQ ID NO: 70617 - DNA, 30 bp, Artificial Sequence
  Synthetic oligonucleotide
aggtaaggacagtgtgtgcaacacacggat

SEQ ID NO: 70618 - DNA, 30 bp, Artificial Sequence
  Synthetic oligonucleotide
agaatttgacagataagttgctaaccggat

SEQ ID NO: 70619 - DNA, 30 bp, Artificial Sequence
  Synthetic oligonucleotide
ggagagtgcagttgtgggccataagcggat

SEQ ID NO: 70620 - DNA, 30 bp, Artificial Sequence
  Synthetic oligonucleotide
tcatacaacctgtgtgggcatacggcggat

SEQ ID NO: 70621 - DNA, 30 bp, Artificial Sequence
  Synthetic oligonucleotide
tggcgcgggaacctatgtacatagtcggat

SEQ ID NO: 70622 - DNA, 30 bp, Artificial Sequence
  Synthetic oligonucleotide
aaccgtcacgtgtaggttaaggtcagggat

SEQ ID NO: 70623 - DNA, 30 bp, Artificial Sequence
  Synthetic oligonucleotide
cgccaacgcccaggaaatattacgagggat

SEQ ID NO: 70624 - DNA, 30 bp, Artificial Sequence
  Synthetic oligonucleotide
ctagtgggcctgagcatgaatccacgggat

SEQ ID NO: 70625 - DNA, 30 bp, Artificial Sequence
  Synthetic oligonucleotide
agcactggaactaacgataactagcgggat

SEQ ID NO: 70626 - DNA, 30 bp, Artificial Sequence
  Synthetic oligonucleotide
gggcttgccgccaagtgaaaaggtcgggat

SEQ ID NO: 70627 - DNA, 30 bp, Artificial Sequence
  Synthetic oligonucleotide
tgaggcccacagtgcgcccaccaaggggat

SEQ ID NO: 70628 - DNA, 30 bp, Artificial Sequence
  Synthetic oligonucleotide
cgatcgacccgtggaactttgcgaggggat

SEQ ID NO: 70629 - DNA, 30 bp, Artificial Sequence
  Synthetic oligonucleotide
aggcgacaaaatgcgtattcgttcggggat

SEQ ID NO: 70630 - DNA, 30 bp, Artificial Sequence
  Synthetic oligonucleotide
cgagggtacgtgctacacctgtgtatggat

SEQ ID NO: 70631 - DNA, 30 bp, Artificial Sequence
  Synthetic oligonucleotide
tcacccgaggcaaccagtgtgggcttggat

SEQ ID NO: 70632 - DNA, 30 bp, Artificial Sequence
  Synthetic oligonucleotide
ggtggcactagatctcagtgatgcgatgat

SEQ ID NO: 70633 - DNA, 30 bp, Artificial Sequence
  Synthetic oligonucleotide
acatctctagagtcagaaagaacggatgat

SEQ ID NO: 70634 - DNA, 30 bp, Artificial Sequence
  Synthetic oligonucleotide
cgtgtgtagtggggttcgcgccgggatgat

SEQ ID NO: 70635 - DNA, 30 bp, Artificial Sequence
  Synthetic oligonucleotide
tagggctctgagagggtacgctactatgat

SEQ ID NO: 70636 - DNA, 30 bp, Artificial Sequence
  Synthetic oligonucleotide
cattcgagagtagtcattgtgtgcactgat

SEQ ID NO: 70637 - DNA, 30 bp, Artificial Sequence
  Synthetic oligonucleotide
tgtaacccataataaagaagggtccctgat

SEQ ID NO: 70638 - DNA, 30 bp, Artificial Sequence
  Synthetic oligonucleotide
aaggtaaagtgccggtgatggtcggctgat

SEQ ID NO: 70639 - DNA, 30 bp, Artificial Sequence
  Synthetic oligonucleotide
tgcaccgtaatggagcgtgcgactgctgat

SEQ ID NO: 70640 - DNA, 30 bp, Artificial Sequence
  Synthetic oligonucleotide
gcccggcacacaaaccgtctagctgctgat

SEQ ID NO: 70641 - DNA, 30 bp, Artificial Sequence
  Synthetic oligonucleotide
accttaaatacagacaggcgcgaatctgat

SEQ ID NO: 70642 - DNA, 30 bp, Artificial Sequence
  Synthetic oligonucleotide
agcggagttaacaacggggggtcgtctgat

SEQ ID NO: 70643 - DNA, 30 bp, Artificial Sequence
  Synthetic oligonucleotide
ctacacaagataggaatgtcgtcaagtgat

SEQ ID NO: 70644 - DNA, 30 bp, Artificial Sequence
  Synthetic oligonucleotide
agaacaaggggatgatttactccgcgtgat

SEQ ID NO: 70645 - DNA, 30 bp, Artificial Sequence
  Synthetic oligonucleotide
ggggaagtgcattcagcttgagttcgtgat

SEQ ID NO: 70646 - DNA, 30 bp, Artificial Sequence
  Synthetic oligonucleotide
ctgacagagggaaaaggaggcgtaggtgat

SEQ ID NO: 70647 - DNA, 30 bp, Artificial Sequence
  Synthetic oligonucleotide
cgacaaatcttgcaaattcccactggtgat

SEQ ID NO: 70648 - DNA, 30 bp, Artificial Sequence
  Synthetic oligonucleotide
tcgatagagctcggtggaccagagtgtgat

SEQ ID NO: 70649 - DNA, 30 bp, Artificial Sequence
  Synthetic oligonucleotide
gacccacgaaagtcagtaaaaaattgtgat

SEQ ID NO: 70650 - DNA, 30 bp, Artificial Sequence
  Synthetic oligonucleotide
tctaccgaagcgggtatggcccgaattgat

SEQ ID NO: 70651 - DNA, 30 bp, Artificial Sequence
  Synthetic oligonucleotide
cggtaattaaggtaggtcagttgagttgat

SEQ ID NO: 70652 - DNA, 30 bp, Artificial Sequence
  Synthetic oligonucleotide
ccgcggtagtgcggcgaaacgaaggttgat

SEQ ID NO: 70653 - DNA, 30 bp, Artificial Sequence
  Synthetic oligonucleotide
gcgagaagctagcctgccttgggctttgat

SEQ ID NO: 70654 - DNA, 30 bp, Artificial Sequence
  Synthetic oligonucleotide
caagaaaaagttctaaatggacagtttgat

SEQ ID NO: 70655 - DNA, 30 bp, Artificial Sequence
  Synthetic oligonucleotide
gggtcaatcgatagagaattatggaaatat

SEQ ID NO: 70656 - DNA, 30 bp, Artificial Sequence
  Synthetic oligonucleotide
aagcatgccggtgacaaatatggagaatat

SEQ ID NO: 70657 - DNA, 30 bp, Artificial Sequence
  Synthetic oligonucleotide
ctacctgaatcgagcgaaacctacgaatat

SEQ ID NO: 70658 - DNA, 30 bp, Artificial Sequence
  Synthetic oligonucleotide
acgaattgctacagaagttagaccgaatat

SEQ ID NO: 70659 - DNA, 30 bp, Artificial Sequence
  Synthetic oligonucleotide
tagggtctacccacacatgtctgcgaatat

SEQ ID NO: 70660 - DNA, 30 bp, Artificial Sequence
  Synthetic oligonucleotide
ggtgagactgaattggtcgaaagcacatat

SEQ ID NO: 70661 - DNA, 30 bp, Artificial Sequence
  Synthetic oligonucleotide
ttacatatcatgtcaagtaaagtgacatat

SEQ ID NO: 70662 - DNA, 30 bp, Artificial Sequence
  Synthetic oligonucleotide
gggagttacataacaccgcaacgtacatat

SEQ ID NO: 70663 - DNA, 30 bp, Artificial Sequence
  Synthetic oligonucleotide
gtgagaggaaggagggttaattgatcatat

SEQ ID NO: 70664 - DNA, 30 bp, Artificial Sequence
  Synthetic oligonucleotide
agacgtggtatcattattcagacctcatat

SEQ ID NO: 70665 - DNA, 30 bp, Artificial Sequence
  Synthetic oligonucleotide
gtagaacgtatgaggagcgcaaacagatat

SEQ ID NO: 70666 - DNA, 31 bp, Artificial Sequence
  Synthetic oligonucleotide
aagaacgcacaactgaattaaggcgagatat

SEQ ID NO: 70667 - DNA, 30 bp, Artificial Sequence
  Synthetic oligonucleotide
gggccggatggcgaaaaaatagctagatat

SEQ ID NO: 70668 - DNA, 30 bp, Artificial Sequence
  Synthetic oligonucleotide
gtcggaccctttaacaggaaactacgatat

SEQ ID NO: 70669 - DNA, 30 bp, Artificial Sequence
  Synthetic oligonucleotide
taagcacatcaccaactatccgtacgatat

SEQ ID NO: 70670 - DNA, 30 bp, Artificial Sequence
  Synthetic oligonucleotide
ccacaaaacaagtaagcgactctccgatat

SEQ ID NO: 70671 - DNA, 30 bp, Artificial Sequence
  Synthetic oligonucleotide
taaaggttgagaagcttgggagaaggatat

SEQ ID NO: 70672 - DNA, 30 bp, Artificial Sequence
  Synthetic oligonucleotide
gcttctggtagcgccgacatgaggtgatat

SEQ ID NO: 70673 - DNA, 30 bp, Artificial Sequence
  Synthetic oligonucleotide
cgtaggacggatgcaagtgtctgagtatat

SEQ ID NO: 70674 - DNA, 30 bp, Artificial Sequence
  Synthetic oligonucleotide
cgcattacgagagtatggcatggcgtatat

SEQ ID NO: 70675 - DNA, 30 bp, Artificial Sequence
  Synthetic oligonucleotide
ggagtagcaacaaggcgagaagttgtatat

SEQ ID NO: 70676 - DNA, 30 bp, Artificial Sequence
  Synthetic oligonucleotide
atgtcgtgcgcgcatacctaaatgaactat

SEQ ID NO: 70677 - DNA, 30 bp, Artificial Sequence
  Synthetic oligonucleotide
aagaaagctaacgttagagttcgtaactat

SEQ ID NO: 70678 - DNA, 30 bp, Artificial Sequence
  Synthetic oligonucleotide
acagcaataaacggatctcgaacacactat

SEQ ID NO: 70679 - DNA, 30 bp, Artificial Sequence
  Synthetic oligonucleotide
gtagcagcggagaggtgccgacagtactat

SEQ ID NO: 70680 - DNA, 30 bp, Artificial Sequence
  Synthetic oligonucleotide
cggagcccgtagatcgtaaggatggcctat

SEQ ID NO: 70681 - DNA, 30 bp, Artificial Sequence
  Synthetic oligonucleotide
ttgttgtgttctcttgttgtgttttcctat

SEQ ID NO: 70682 - DNA, 30 bp, Artificial Sequence
  Synthetic oligonucleotide
aggaggagtttctgaggggctcacagctat

SEQ ID NO: 70683 - DNA, 30 bp, Artificial Sequence
  Synthetic oligonucleotide
atggagagatttgtagctagagagagctat

SEQ ID NO: 70684 - DNA, 30 bp, Artificial Sequence
  Synthetic oligonucleotide
tgcagacaaaacaaatagtgcgcgtgctat

SEQ ID NO: 70685 - DNA, 30 bp, Artificial Sequence
  Synthetic oligonucleotide
ggtactaggagaaaggtaaggtggtgctat

SEQ ID NO: 70686 - DNA, 30 bp, Artificial Sequence
  Synthetic oligonucleotide
gcgtcgccaaattaaggccaacaagtctat

SEQ ID NO: 70687 - DNA, 30 bp, Artificial Sequence
  Synthetic oligonucleotide
gcgttcagaagtgctcaaccggatgtctat

SEQ ID NO: 70688 - DNA, 30 bp, Artificial Sequence
  Synthetic oligonucleotide
gctagagtaagggcggtgtgccacaagtat

SEQ ID NO: 70689 - DNA, 30 bp, Artificial Sequence
  Synthetic oligonucleotide
acacacattcaaagtgtcgagtataagtat

SEQ ID NO: 70690 - DNA, 30 bp, Artificial Sequence
  Synthetic oligonucleotide
cgcaggacgcgacaactatcgcaacagtat

SEQ ID NO: 70691 - DNA, 30 bp, Artificial Sequence
  Synthetic oligonucleotide
cgccggtgtcgtcaatcagcatcacagtat

SEQ ID NO: 70692 - DNA, 30 bp, Artificial Sequence
  Synthetic oligonucleotide
ggtaagctgcaaaagtgatgaaccgagtat

SEQ ID NO: 70693 - DNA, 30 bp, Artificial Sequence
  Synthetic oligonucleotide
ctaaggcgtcacaaacgcaaataatagtat

SEQ ID NO: 70694 - DNA, 30 bp, Artificial Sequence
  Synthetic oligonucleotide
gctgaggttcactaagggcaaacaacgtat

SEQ ID NO: 70695 - DNA, 30 bp, Artificial Sequence
  Synthetic oligonucleotide
gacctataacaacacgaacaagcgacgtat

SEQ ID NO: 70696 - DNA, 30 bp, Artificial Sequence
  Synthetic oligonucleotide
gctccggctagcccaaaacgcgctacgtat

SEQ ID NO: 70697 - DNA, 30 bp, Artificial Sequence
  Synthetic oligonucleotide
tcgtgcgccgtagcgtgtccgggctcgtat

SEQ ID NO: 70698 - DNA, 30 bp, Artificial Sequence
  Synthetic oligonucleotide
acttccacttcagataaaaaacagcggtat

SEQ ID NO: 70699 - DNA, 30 bp, Artificial Sequence
  Synthetic oligonucleotide
tgtggttcacaaaacacctaacttcggtat

SEQ ID NO: 70700 - DNA, 30 bp, Artificial Sequence
  Synthetic oligonucleotide
cgcgagacactttgtcgacttacagggtat

SEQ ID NO: 70701 - DNA, 30 bp, Artificial Sequence
  Synthetic oligonucleotide
ccggaaccggggtaatcgcgagtagggtat

SEQ ID NO: 70702 - DNA, 30 bp, Artificial Sequence
  Synthetic oligonucleotide
agatcatggacaaaaaaggcgtgtctgtat

SEQ ID NO: 70703 - DNA, 30 bp, Artificial Sequence
  Synthetic oligonucleotide
acttagtggcaaagaagcacgaatttgtat

SEQ ID NO: 70704 - DNA, 30 bp, Artificial Sequence
  Synthetic oligonucleotide
gggcaggacgccgaacgtgcaccgaattat

SEQ ID NO: 70705 - DNA, 30 bp, Artificial Sequence
  Synthetic oligonucleotide
cggtcacgagtgctgtggcatgttcattat

SEQ ID NO: 70706 - DNA, 30 bp, Artificial Sequence
  Synthetic oligonucleotide
agcacagcgagccgtctgccaaacgattat

SEQ ID NO: 70707 - DNA, 30 bp, Artificial Sequence
  Synthetic oligonucleotide
tcgttggcaatcagcatacacctcgattat

SEQ ID NO: 70708 - DNA, 30 bp, Artificial Sequence
  Synthetic oligonucleotide
cagagggacacatttaatggagtggcttat

SEQ ID NO: 70709 - DNA, 30 bp, Artificial Sequence
  Synthetic oligonucleotide
atgtgtagaaccaagacactgtccagttat

SEQ ID NO: 70710 - DNA, 30 bp, Artificial Sequence
  Synthetic oligonucleotide
acgatagttgaaacttagcaaatgagttat

SEQ ID NO: 70711 - DNA, 30 bp, Artificial Sequence
  Synthetic oligonucleotide
agtaagggacgattgcaggtatctagttat

SEQ ID NO: 70712 - DNA, 30 bp, Artificial Sequence
  Synthetic oligonucleotide
cgactagggcaaagcggattcaattgttat

SEQ ID NO: 70713 - DNA, 30 bp, Artificial Sequence
  Synthetic oligonucleotide
agggtgtaactcctcaccgttatcgaaact

SEQ ID NO: 70714 - DNA, 30 bp, Artificial Sequence
  Synthetic oligonucleotide
taccgatattaatgcattgtctcggaaact

SEQ ID NO: 70715 - DNA, 30 bp, Artificial Sequence
  Synthetic oligonucleotide
gccgatcacagtcttaaacactcgacaact

SEQ ID NO: 70716 - DNA, 30 bp, Artificial Sequence
  Synthetic oligonucleotide
tgccgagctcaaaagtaagcacggacaact

SEQ ID NO: 70717 - DNA, 30 bp, Artificial Sequence
  Synthetic oligonucleotide
cgttacattctagactccatccctacaact

SEQ ID NO: 70718 - DNA, 30 bp, Artificial Sequence
  Synthetic oligonucleotide
acttgaggcgcgcgcgcaccaggatcaact

SEQ ID NO: 70719 - DNA, 30 bp, Artificial Sequence
  Synthetic oligonucleotide
gagcgaggtagattggtataggagtcaact

SEQ ID NO: 70720 - DNA, 30 bp, Artificial Sequence
  Synthetic oligonucleotide
gataggagcggaaaatagcaccgttcaact

SEQ ID NO: 70721 - DNA, 30 bp, Artificial Sequence
  Synthetic oligonucleotide
atgagcaataccaaggaacgtggtagaact

SEQ ID NO: 70722 - DNA, 31 bp, Artificial Sequence
  Synthetic oligonucleotide
aagtttccagagaaagggttggaatcgaact

SEQ ID NO: 70723 - DNA, 30 bp, Artificial Sequence
  Synthetic oligonucleotide
acaagggtatggaactgggtgtcaggaact

SEQ ID NO: 70724 - DNA, 30 bp, Artificial Sequence
  Synthetic oligonucleotide
accaaacatgatcgctaaccacagggaact

SEQ ID NO: 70725 - DNA, 30 bp, Artificial Sequence
  Synthetic oligonucleotide
catggggcgcgaaaggtcattgaatgaact

SEQ ID NO: 70726 - DNA, 30 bp, Artificial Sequence
  Synthetic oligonucleotide
aacgagtcacaactggccagcgtctgaact

SEQ ID NO: 70727 - DNA, 30 bp, Artificial Sequence
  Synthetic oligonucleotide
ttgtaagtggaacaacggccctagtgaact

SEQ ID NO: 70728 - DNA, 30 bp, Artificial Sequence
  Synthetic oligonucleotide
agtaccgggaggattcgccgtccaataact

SEQ ID NO: 70729 - DNA, 30 bp, Artificial Sequence
  Synthetic oligonucleotide
atccataagtgaacgcattggagaataact

SEQ ID NO: 70730 - DNA, 30 bp, Artificial Sequence
  Synthetic oligonucleotide
agagtagaggattgtgactccgagataact

SEQ ID NO: 70731 - DNA, 30 bp, Artificial Sequence
  Synthetic oligonucleotide
gtctaccgaagtcctagtgaaacactaact

SEQ ID NO: 70732 - DNA, 30 bp, Artificial Sequence
  Synthetic oligonucleotide
gggttgaaatcaattatcacacaagtaact

SEQ ID NO: 70733 - DNA, 30 bp, Artificial Sequence
  Synthetic oligonucleotide
actgtattacaaaaagcaggagcagtaact

SEQ ID NO: 70734 - DNA, 30 bp, Artificial Sequence
  Synthetic oligonucleotide
cgaatgtagtggtggtttgatagagtaact

SEQ ID NO: 70735 - DNA, 30 bp, Artificial Sequence
  Synthetic oligonucleotide
tgcgagggttacaccaggaaacaattaact

SEQ ID NO: 70736 - DNA, 31 bp, Artificial Sequence
  Synthetic oligonucleotide
gtacatagcaacacagtcccaccagttaact

SEQ ID NO: 70737 - DNA, 30 bp, Artificial Sequence
  Synthetic oligonucleotide
agggctcacattatggtccgaggggacact

SEQ ID NO: 70738 - DNA, 30 bp, Artificial Sequence
  Synthetic oligonucleotide
tcgagtatgacgattcgaagtgcgtacact

SEQ ID NO: 70739 - DNA, 30 bp, Artificial Sequence
  Synthetic oligonucleotide
cacgctcagtattctaggagcgacaccact

SEQ ID NO: 70740 - DNA, 30 bp, Artificial Sequence
  Synthetic oligonucleotide
atacggacgtcacacctagcagaagccact

SEQ ID NO: 70741 - DNA, 30 bp, Artificial Sequence
  Synthetic oligonucleotide
ctagcgacaggactgacagcgcgggccact

SEQ ID NO: 70742 - DNA, 30 bp, Artificial Sequence
  Synthetic oligonucleotide
cgccgattgtaccgagtggtctggagcact

SEQ ID NO: 70743 - DNA, 30 bp, Artificial Sequence
  Synthetic oligonucleotide
tagaagggtcaacatagccatttgggcact

SEQ ID NO: 70744 - DNA, 30 bp, Artificial Sequence
  Synthetic oligonucleotide
cgggcgtcccacgacgatcagagcatcact

SEQ ID NO: 70745 - DNA, 30 bp, Artificial Sequence
  Synthetic oligonucleotide
agatcactggctaaactacttccgatcact

SEQ ID NO: 70746 - DNA, 30 bp, Artificial Sequence
  Synthetic oligonucleotide
gcatagcgagcatactacgaactcctcact

SEQ ID NO: 70747 - DNA, 30 bp, Artificial Sequence
  Synthetic oligonucleotide
aaggaggttgaacattcggcgtgcacgact

SEQ ID NO: 70748 - DNA, 30 bp, Artificial Sequence
  Synthetic oligonucleotide
gtgtgaggtataatagtatgcattgcgact

SEQ ID NO: 70749 - DNA, 30 bp, Artificial Sequence
  Synthetic oligonucleotide
acatgttgatagtccagagcatgcaggact

SEQ ID NO: 70750 - DNA, 30 bp, Artificial Sequence
  Synthetic oligonucleotide
gcgtggcaataatatttcaggtggcggact

SEQ ID NO: 70751 - DNA, 30 bp, Artificial Sequence
  Synthetic oligonucleotide
gttcagctaacctcaggatcagtgcggact

SEQ ID NO: 70752 - DNA, 30 bp, Artificial Sequence
  Synthetic oligonucleotide
cggaatcagaggcgggacgcgtgtcggact

SEQ ID NO: 70753 - DNA, 30 bp, Artificial Sequence
  Synthetic oligonucleotide
ggagagcacgtaagcttttccacagggact

SEQ ID NO: 70754 - DNA, 30 bp, Artificial Sequence
  Synthetic oligonucleotide
cgaatttcgtatgtgagaatggctgggact

SEQ ID NO: 70755 - DNA, 30 bp, Artificial Sequence
  Synthetic oligonucleotide
agggcaattttgtccaattaatcactgact

SEQ ID NO: 70756 - DNA, 30 bp, Artificial Sequence
  Synthetic oligonucleotide
acgatcatactccggcaaagttgcctgact

SEQ ID NO: 70757 - DNA, 30 bp, Artificial Sequence
  Synthetic oligonucleotide
gtctggaatattgaaacccgtcttctgact

SEQ ID NO: 70758 - DNA, 30 bp, Artificial Sequence
  Synthetic oligonucleotide
ctcatcgttaagaataaaattctcgtgact

SEQ ID NO: 70759 - DNA, 30 bp, Artificial Sequence
  Synthetic oligonucleotide
gcatcggaacaatatgtctaatatgtgact

SEQ ID NO: 70760 - DNA, 30 bp, Artificial Sequence
  Synthetic oligonucleotide
ccccaaatatgggaaaggttgtatgtgact

SEQ ID NO: 70761 - DNA, 30 bp, Artificial Sequence
  Synthetic oligonucleotide
aagcgggattgagtgagacaagaacatact

SEQ ID NO: 70762 - DNA, 30 bp, Artificial Sequence
  Synthetic oligonucleotide
cacgcaaaaaaccagtcctgctgtcatact

SEQ ID NO: 70763 - DNA, 30 bp, Artificial Sequence
  Synthetic oligonucleotide
cgtggagaacttctaccgtgactcactact

SEQ ID NO: 70764 - DNA, 30 bp, Artificial Sequence
  Synthetic oligonucleotide
agtggatttgacagaacgtgggggactact

SEQ ID NO: 70765 - DNA, 30 bp, Artificial Sequence
  Synthetic oligonucleotide
taggacgaacctaacgggattactactact

SEQ ID NO: 70766 - DNA, 30 bp, Artificial Sequence
  Synthetic oligonucleotide
cgtgaaacttgacaaggtattacgcctact

SEQ ID NO: 70767 - DNA, 30 bp, Artificial Sequence
  Synthetic oligonucleotide
ccaagacaaaattaccgacggtaggctact

SEQ ID NO: 70768 - DNA, 30 bp, Artificial Sequence
  Synthetic oligonucleotide
tgagaaatccggagctgacactggcgtact

SEQ ID NO: 70769 - DNA, 30 bp, Artificial Sequence
  Synthetic oligonucleotide
tcacccgtagtacctccgttagtgcgtact

SEQ ID NO: 70770 - DNA, 30 bp, Artificial Sequence
  Synthetic oligonucleotide
gagatgtaagagaacgaacgactcaaacct

SEQ ID NO: 70771 - DNA, 30 bp, Artificial Sequence
  Synthetic oligonucleotide
cgagtaccgagaaactaacctgttcaacct

SEQ ID NO: 70772 - DNA, 30 bp, Artificial Sequence
  Synthetic oligonucleotide
ttaggatatgatgtaccaacagtagaacct

SEQ ID NO: 70773 - DNA, 30 bp, Artificial Sequence
  Synthetic oligonucleotide
aggagtcctagggggaggcttaactaacct

SEQ ID NO: 70774 - DNA, 30 bp, Artificial Sequence
  Synthetic oligonucleotide
ggacgtggtggcatttgggacgagtaacct

SEQ ID NO: 70775 - DNA, 30 bp, Artificial Sequence
  Synthetic oligonucleotide
cgaagctgggggaaaggtgttatgtaacct

SEQ ID NO: 70776 - DNA, 30 bp, Artificial Sequence
  Synthetic oligonucleotide
atcaggccagagcgcattaaataaacacct

SEQ ID NO: 70777 - DNA, 30 bp, Artificial Sequence
  Synthetic oligonucleotide
cgttagatatcagtaaaatcgttaacacct

SEQ ID NO: 70778 - DNA, 31 bp, Artificial Sequence
  Synthetic oligonucleotide
gaagcgaataaaagcttccgtggccacacct

SEQ ID NO: 70779 - DNA, 30 bp, Artificial Sequence
  Synthetic oligonucleotide
agggaccgttatagccaacttcgtagacct

SEQ ID NO: 70780 - DNA, 30 bp, Artificial Sequence
  Synthetic oligonucleotide
caaggctgtggtttgtgggattcgcgacct

SEQ ID NO: 70781 - DNA, 30 bp, Artificial Sequence
  Synthetic oligonucleotide
tcggaccgaagttgaaaagagatttgacct

SEQ ID NO: 70782 - DNA, 30 bp, Artificial Sequence
  Synthetic oligonucleotide
cagtggaggtaatcggatagccacatacct

SEQ ID NO: 70783 - DNA, 30 bp, Artificial Sequence
  Synthetic oligonucleotide
gagggatacgtcaacagtgagcggatacct

SEQ ID NO: 70784 - DNA, 30 bp, Artificial Sequence
  Synthetic oligonucleotide
gcggtagtgcgacatcaacgttaactacct

SEQ ID NO: 70785 - DNA, 30 bp, Artificial Sequence
  Synthetic oligonucleotide
cgtggctgtctcccactacacaaggaccct

SEQ ID NO: 70786 - DNA, 30 bp, Artificial Sequence
  Synthetic oligonucleotide
cgatcgtgtgtgcggagaaggtaacgccct

SEQ ID NO: 70787 - DNA, 29 bp, Artificial Sequence
  Synthetic oligonucleotide
ccctctcgctttctattcctttgtgccct

SEQ ID NO: 70788 - DNA, 30 bp, Artificial Sequence
  Synthetic oligonucleotide
tacacataagagcatctgagaatgttccct

SEQ ID NO: 70789 - DNA, 30 bp, Artificial Sequence
  Synthetic oligonucleotide
cggcccatagcggtacgacttgagtagcct

SEQ ID NO: 70790 - DNA, 30 bp, Artificial Sequence
  Synthetic oligonucleotide
gacataattcagagggcctcaggcacgcct

SEQ ID NO: 70791 - DNA, 30 bp, Artificial Sequence
  Synthetic oligonucleotide
tggaatgccgaggcgaataactgcaggcct

SEQ ID NO: 70792 - DNA, 30 bp, Artificial Sequence
  Synthetic oligonucleotide
tggcaagtcggctggtaacgagggaggcct

SEQ ID NO: 70793 - DNA, 30 bp, Artificial Sequence
  Synthetic oligonucleotide
cgctgtggcgcgacctagggaaataggcct

SEQ ID NO: 70794 - DNA, 30 bp, Artificial Sequence
  Synthetic oligonucleotide
tggtcaaggataacgtaaaacagacggcct

SEQ ID NO: 70795 - DNA, 30 bp, Artificial Sequence
  Synthetic oligonucleotide
ggaggtcaaaaacctgaaaagcaccggcct

SEQ ID NO: 70796 - DNA, 30 bp, Artificial Sequence
  Synthetic oligonucleotide
gatacgaggtcccacgacatagagcggcct

SEQ ID NO: 70797 - DNA, 30 bp, Artificial Sequence
  Synthetic oligonucleotide
cgtcgggtacatgtggtcagaggtcggcct

SEQ ID NO: 70798 - DNA, 30 bp, Artificial Sequence
  Synthetic oligonucleotide
gccaggtacgtacaaaccacaatagggcct

SEQ ID NO: 70799 - DNA, 30 bp, Artificial Sequence
  Synthetic oligonucleotide
cggttcgtaatagaggcataggacatgcct

SEQ ID NO: 70800 - DNA, 30 bp, Artificial Sequence
  Synthetic oligonucleotide
tcttgcataaagcataaacgctctaatcct

SEQ ID NO: 70801 - DNA, 30 bp, Artificial Sequence
  Synthetic oligonucleotide
ctatacaggacacaaagatcgttggatcct

SEQ ID NO: 70802 - DNA, 30 bp, Artificial Sequence
  Synthetic oligonucleotide
ccagggtggccaaagtgacggaagtatcct

SEQ ID NO: 70803 - DNA, 30 bp, Artificial Sequence
  Synthetic oligonucleotide
acgtcatagagtgtctcggatttccctcct

SEQ ID NO: 70804 - DNA, 30 bp, Artificial Sequence
  Synthetic oligonucleotide
aggtccgtaaaggatttgggatgagctcct

SEQ ID NO: 70805 - DNA, 30 bp, Artificial Sequence
  Synthetic oligonucleotide
gaggagtgatggaattcagtgggtcgtcct

SEQ ID NO: 70806 - DNA, 30 bp, Artificial Sequence
  Synthetic oligonucleotide
gaaagatcgggtgacatgcccataggtcct

SEQ ID NO: 70807 - DNA, 30 bp, Artificial Sequence
  Synthetic oligonucleotide
tcaattcgtccctatgagaaagagggtcct

SEQ ID NO: 70808 - DNA, 30 bp, Artificial Sequence
  Synthetic oligonucleotide
gttacgtagacgaccctgagtaactgtcct

SEQ ID NO: 70809 - DNA, 30 bp, Artificial Sequence
  Synthetic oligonucleotide
tcgtccgagataccagagggcgactgtcct

SEQ ID NO: 70810 - DNA, 30 bp, Artificial Sequence
  Synthetic oligonucleotide
cagcttagaatcaaactagaatcgaaagct

SEQ ID NO: 70811 - DNA, 30 bp, Artificial Sequence
  Synthetic oligonucleotide
tgaacagtattcagtgagcaaactaaagct

SEQ ID NO: 70812 - DNA, 30 bp, Artificial Sequence
  Synthetic oligonucleotide
gcacaattgtcattcgagagaagtaaagct

SEQ ID NO: 70813 - DNA, 30 bp, Artificial Sequence
  Synthetic oligonucleotide
cccgaatgtagcattgagtacggtcaagct

SEQ ID NO: 70814 - DNA, 30 bp, Artificial Sequence
  Synthetic oligonucleotide
aaatacggaaggtatgttgaaatcgaagct

SEQ ID NO: 70815 - DNA, 30 bp, Artificial Sequence
  Synthetic oligonucleotide
ccggctggaagtgagcggagtctggaagct

SEQ ID NO: 70816 - DNA, 30 bp, Artificial Sequence
  Synthetic oligonucleotide
caggctggagcttgtagggaagtggaagct

SEQ ID NO: 70817 - DNA, 30 bp, Artificial Sequence
  Synthetic oligonucleotide
cacgtaagctagggatcgattagtgaagct

SEQ ID NO: 70818 - DNA, 30 bp, Artificial Sequence
  Synthetic oligonucleotide
attaaagtagtgtaacactgggcgtaagct

SEQ ID NO: 70819 - DNA, 30 bp, Artificial Sequence
  Synthetic oligonucleotide
gcgccgacataccagagaagatatccagct

SEQ ID NO: 70820 - DNA, 30 bp, Artificial Sequence
  Synthetic oligonucleotide
acgatatggaaatgggaaggtcgagcagct

SEQ ID NO: 70821 - DNA, 30 bp, Artificial Sequence
  Synthetic oligonucleotide
actacgaatcaacagtctggcccggcagct

SEQ ID NO: 70822 - DNA, 30 bp, Artificial Sequence
  Synthetic oligonucleotide
ggatggcactaccagtccaggagtagagct

SEQ ID NO: 70823 - DNA, 30 bp, Artificial Sequence
  Synthetic oligonucleotide
ggaccaacgctagagcagatatggatagct

SEQ ID NO: 70824 - DNA, 30 bp, Artificial Sequence
  Synthetic oligonucleotide
ggactcaggcaggttgtaagagggctagct

SEQ ID NO: 70825 - DNA, 30 bp, Artificial Sequence
  Synthetic oligonucleotide
ccatagcaaggaccggatagagttttagct

SEQ ID NO: 70826 - DNA, 30 bp, Artificial Sequence
  Synthetic oligonucleotide
gccacacaattagtttcgagggaaaacgct

SEQ ID NO: 70827 - DNA, 30 bp, Artificial Sequence
  Synthetic oligonucleotide
gcgacaagaacagccacaatacataacgct

SEQ ID NO: 70828 - DNA, 30 bp, Artificial Sequence
  Synthetic oligonucleotide
ggtgcaggagtccagaagtggaagaccgct

SEQ ID NO: 70829 - DNA, 30 bp, Artificial Sequence
  Synthetic oligonucleotide
taagggaaggcaagaatttcctaagccgct

SEQ ID NO: 70830 - DNA, 30 bp, Artificial Sequence
  Synthetic oligonucleotide
aaagactcccatcaagaactagcgtccgct

SEQ ID NO: 70831 - DNA, 30 bp, Artificial Sequence
  Synthetic oligonucleotide
ggagaggaaaaagttaggagttctagcgct

SEQ ID NO: 70832 - DNA, 30 bp, Artificial Sequence
  Synthetic oligonucleotide
ctgcgcacacgtatcgaagtcatatgcgct

SEQ ID NO: 70833 - DNA, 30 bp, Artificial Sequence
  Synthetic oligonucleotide
gtagcgtcccgtaggtcactgctgtgcgct

SEQ ID NO: 70834 - DNA, 30 bp, Artificial Sequence
  Synthetic oligonucleotide
aggcaactgatcggaaaagaattaatcgct

SEQ ID NO: 70835 - DNA, 30 bp, Artificial Sequence
  Synthetic oligonucleotide
ggacgccgtcggaaacactgaattatcgct

SEQ ID NO: 70836 - DNA, 30 bp, Artificial Sequence
  Synthetic oligonucleotide
ctctggggaggagggggaacagacgtcgct

SEQ ID NO: 70837 - DNA, 30 bp, Artificial Sequence
  Synthetic oligonucleotide
ggagtcatattataagtgaacgacttcgct

SEQ ID NO: 70838 - DNA, 30 bp, Artificial Sequence
  Synthetic oligonucleotide
agagcgggcaatcaaccatagggtgaggct

SEQ ID NO: 70839 - DNA, 30 bp, Artificial Sequence
  Synthetic oligonucleotide
tcgtagtccccctacaaagagaaataggct

SEQ ID NO: 70840 - DNA, 30 bp, Artificial Sequence
  Synthetic oligonucleotide
cgtccatgattacccaggccgtcctaggct

SEQ ID NO: 70841 - DNA, 30 bp, Artificial Sequence
  Synthetic oligonucleotide
gaactcagtatggagggggtgctcacggct

SEQ ID NO: 70842 - DNA, 31 bp, Artificial Sequence
  Synthetic oligonucleotide
catcggcaaatatgtcggtgaacatacggct

SEQ ID NO: 70843 - DNA, 30 bp, Artificial Sequence
  Synthetic oligonucleotide
tggacgataaagccagcgcacgatacggct

SEQ ID NO: 70844 - DNA, 30 bp, Artificial Sequence
  Synthetic oligonucleotide
tcgtatcattcaagaagctacttcgcggct

SEQ ID NO: 70845 - DNA, 30 bp, Artificial Sequence
  Synthetic oligonucleotide
cgcacagcaggtaagcgacgaaaggcggct

SEQ ID NO: 70846 - DNA, 30 bp, Artificial Sequence
  Synthetic oligonucleotide
cgaaattcgtgataaggccagccggcggct

SEQ ID NO: 70847 - DNA, 30 bp, Artificial Sequence
  Synthetic oligonucleotide
gtcaggtgctacagacgaaccggggcggct

SEQ ID NO: 70848 - DNA, 30 bp, Artificial Sequence
  Synthetic oligonucleotide
ttggtagtaattacatcgcaggcacgggct

SEQ ID NO: 70849 - DNA, 30 bp, Artificial Sequence
  Synthetic oligonucleotide
gaagagccttccccgtaaagagtaggggct

SEQ ID NO: 70850 - DNA, 30 bp, Artificial Sequence
  Synthetic oligonucleotide
gtctgactgaggtgaaatgttgcgtgggct

SEQ ID NO: 70851 - DNA, 30 bp, Artificial Sequence
  Synthetic oligonucleotide
gggacaatcaagtgatggggatattgggct

SEQ ID NO: 70852 - DNA, 30 bp, Artificial Sequence
  Synthetic oligonucleotide
ggaagtcgtggggccgagtccattcatgct

SEQ ID NO: 70853 - DNA, 30 bp, Artificial Sequence
  Synthetic oligonucleotide
ccagagtcacgctggttgatgaaagatgct

SEQ ID NO: 70854 - DNA, 30 bp, Artificial Sequence
  Synthetic oligonucleotide
atccatgcgtgcgcgatttgaagggatgct

SEQ ID NO: 70855 - DNA, 30 bp, Artificial Sequence
  Synthetic oligonucleotide
gctccgggtgaacgtcgaacagaacctgct

SEQ ID NO: 70856 - DNA, 30 bp, Artificial Sequence
  Synthetic oligonucleotide
gtagaccctgtcccgttcagcgagcctgct

SEQ ID NO: 70857 - DNA, 30 bp, Artificial Sequence
  Synthetic oligonucleotide
tcgagctcgcaatgcacaaagaagcgtgct

SEQ ID NO: 70858 - DNA, 30 bp, Artificial Sequence
  Synthetic oligonucleotide
atcgagcggggccaaataattacgggtgct

SEQ ID NO: 70859 - DNA, 30 bp, Artificial Sequence
  Synthetic oligonucleotide
agtagcagacgtgatctgtcgtgaattgct

SEQ ID NO: 70860 - DNA, 30 bp, Artificial Sequence
  Synthetic oligonucleotide
ctcactataggggaatacggcgtcattgct

SEQ ID NO: 70861 - DNA, 30 bp, Artificial Sequence
  Synthetic oligonucleotide
ctcgggggtacggctcaaccttccaaatct

SEQ ID NO: 70862 - DNA, 30 bp, Artificial Sequence
  Synthetic oligonucleotide
aggagactatctgatcatagtgctaaatct

SEQ ID NO: 70863 - DNA, 30 bp, Artificial Sequence
  Synthetic oligonucleotide
cgacacgcaaaaatcctggcctctaaatct

SEQ ID NO: 70864 - DNA, 30 bp, Artificial Sequence
  Synthetic oligonucleotide
tagaggaggggatatgttctcaaccaatct

SEQ ID NO: 70865 - DNA, 30 bp, Artificial Sequence
  Synthetic oligonucleotide
atggtatcaaagttctgttacaacacatct

SEQ ID NO: 70866 - DNA, 30 bp, Artificial Sequence
  Synthetic oligonucleotide
cggaaccagggaccaaacgacagcacatct

SEQ ID NO: 70867 - DNA, 30 bp, Artificial Sequence
  Synthetic oligonucleotide
aacggcgagggtagaggactaatttcatct

SEQ ID NO: 70868 - DNA, 30 bp, Artificial Sequence
  Synthetic oligonucleotide
ccaaggagacgcgtctagtgtaaaggatct

SEQ ID NO: 70869 - DNA, 30 bp, Artificial Sequence
  Synthetic oligonucleotide
ggcgtgtctggaacagagcggagcatatct

SEQ ID NO: 70870 - DNA, 30 bp, Artificial Sequence
  Synthetic oligonucleotide
cgtaacaacgtaagctcgggtggcctatct

SEQ ID NO: 70871 - DNA, 30 bp, Artificial Sequence
  Synthetic oligonucleotide
ctagggtggcgccgagtgtggatgttatct

SEQ ID NO: 70872 - DNA, 30 bp, Artificial Sequence
  Synthetic oligonucleotide
aagcgagaaaacgcagggaaactcaactct

SEQ ID NO: 70873 - DNA, 30 bp, Artificial Sequence
  Synthetic oligonucleotide
gcacggcaatcatcgcggccacgagactct

SEQ ID NO: 70874 - DNA, 30 bp, Artificial Sequence
  Synthetic oligonucleotide
tctgggcggcatctgaaagcggaatactct

SEQ ID NO: 70875 - DNA, 30 bp, Artificial Sequence
  Synthetic oligonucleotide
gcgagtcggtaatgcgatcttcattactct

SEQ ID NO: 70876 - DNA, 30 bp, Artificial Sequence
  Synthetic oligonucleotide
tgacagtcttaggagcacatcactccctct

SEQ ID NO: 70877 - DNA, 30 bp, Artificial Sequence
  Synthetic oligonucleotide
cggagaaacttcttactaaagtgcgcctct

SEQ ID NO: 70878 - DNA, 30 bp, Artificial Sequence
  Synthetic oligonucleotide
atggatggcggctaaccggcacaaagctct

SEQ ID NO: 70879 - DNA, 30 bp, Artificial Sequence
  Synthetic oligonucleotide
acggaatcccaattgaaaaaggcactctct

SEQ ID NO: 70880 - DNA, 30 bp, Artificial Sequence
  Synthetic oligonucleotide
aacgaaggcaggtattccagcgaagtctct

SEQ ID NO: 70881 - DNA, 30 bp, Artificial Sequence
  Synthetic oligonucleotide
acgggtgcctggtagccaacaggagtctct

SEQ ID NO: 70882 - DNA, 30 bp, Artificial Sequence
  Synthetic oligonucleotide
tggtcacgatttttgttcggtgacaagtct

SEQ ID NO: 70883 - DNA, 30 bp, Artificial Sequence
  Synthetic oligonucleotide
aggaatcgtaccatgttacagtgcacgtct

SEQ ID NO: 70884 - DNA, 30 bp, Artificial Sequence
  Synthetic oligonucleotide
ggcacgttcacaagaagaggccatcggtct

SEQ ID NO: 70885 - DNA, 30 bp, Artificial Sequence
  Synthetic oligonucleotide
tggcgaatggtaacattggctcatgggtct

SEQ ID NO: 70886 - DNA, 30 bp, Artificial Sequence
  Synthetic oligonucleotide
cgtcatagcatatggccacacgtgtggtct

SEQ ID NO: 70887 - DNA, 30 bp, Artificial Sequence
  Synthetic oligonucleotide
tgaacagcgaaaaaggaagcgaagatgtct

SEQ ID NO: 70888 - DNA, 30 bp, Artificial Sequence
  Synthetic oligonucleotide
cggagaattatgtcggctggtctcctgtct

SEQ ID NO: 70889 - DNA, 30 bp, Artificial Sequence
  Synthetic oligonucleotide
tcgaagacactatcacacgcgttaacttct

SEQ ID NO: 70890 - DNA, 30 bp, Artificial Sequence
  Synthetic oligonucleotide
ctgaactaaatgtctcgtaataggccttct

SEQ ID NO: 70891 - DNA, 30 bp, Artificial Sequence
  Synthetic oligonucleotide
agtggggtctcgttaattgtcctgcgttct

SEQ ID NO: 70892 - DNA, 30 bp, Artificial Sequence
  Synthetic oligonucleotide
aaccaatcaagggaagacgaaaaaggttct

SEQ ID NO: 70893 - DNA, 30 bp, Artificial Sequence
  Synthetic oligonucleotide
aatgcacgaacaaaccaactacgatgttct

SEQ ID NO: 70894 - DNA, 30 bp, Artificial Sequence
  Synthetic oligonucleotide
catccactgctgggtgtcacataaaaaagt

SEQ ID NO: 70895 - DNA, 30 bp, Artificial Sequence
  Synthetic oligonucleotide
catggacgatgaacaatgatgagaaaaagt

SEQ ID NO: 70896 - DNA, 30 bp, Artificial Sequence
  Synthetic oligonucleotide
gcgcataggactgcgaacttgggaaaaagt

SEQ ID NO: 70897 - DNA, 30 bp, Artificial Sequence
  Synthetic oligonucleotide
gactccctcaacacgaaagtacacaaaagt

SEQ ID NO: 70898 - DNA, 30 bp, Artificial Sequence
  Synthetic oligonucleotide
gagcgctgattctagcggggatataaaagt

SEQ ID NO: 70899 - DNA, 30 bp, Artificial Sequence
  Synthetic oligonucleotide
gagcggtccgtaagaccgacactacaaagt

SEQ ID NO: 70900 - DNA, 30 bp, Artificial Sequence
  Synthetic oligonucleotide
tggagaagcaattgaagtacggaccaaagt

SEQ ID NO: 70901 - DNA, 30 bp, Artificial Sequence
  Synthetic oligonucleotide
gaatggaccagataatcaatcgagcaaagt

SEQ ID NO: 70902 - DNA, 30 bp, Artificial Sequence
  Synthetic oligonucleotide
gagctatgctcgaacgatgatacataaagt

SEQ ID NO: 70903 - DNA, 30 bp, Artificial Sequence
  Synthetic oligonucleotide
ggggcagcgaagctggcaatggaaacaagt

SEQ ID NO: 70904 - DNA, 30 bp, Artificial Sequence
  Synthetic oligonucleotide
gtccgagtggaggcttagaagtgcacaagt

SEQ ID NO: 70905 - DNA, 30 bp, Artificial Sequence
  Synthetic oligonucleotide
gtttgcattctaaaacgaggcgacccaagt

SEQ ID NO: 70906 - DNA, 30 bp, Artificial Sequence
  Synthetic oligonucleotide
gaggctacgaccaagaatatgtatccaagt

SEQ ID NO: 70907 - DNA, 30 bp, Artificial Sequence
  Synthetic oligonucleotide
aaatcgggattgtcttcggaatgatcaagt

SEQ ID NO: 70908 - DNA, 30 bp, Artificial Sequence
  Synthetic oligonucleotide
gggggtagatagatacaatgtaggtcaagt

SEQ ID NO: 70909 - DNA, 30 bp, Artificial Sequence
  Synthetic oligonucleotide
acgtaggggtaataggtacgattaagaagt

SEQ ID NO: 70910 - DNA, 30 bp, Artificial Sequence
  Synthetic oligonucleotide
gtgagcaagtagttgtagcaagcacgaagt

SEQ ID NO: 70911 - DNA, 30 bp, Artificial Sequence
  Synthetic oligonucleotide
agtatggtaataagacgtcgataccgaagt

SEQ ID NO: 70912 - DNA, 30 bp, Artificial Sequence
  Synthetic oligonucleotide
aaacccacagggggcagaccgccccgaagt

SEQ ID NO: 70913 - DNA, 30 bp, Artificial Sequence
  Synthetic oligonucleotide
taagtaacacttccacctctaaatcgaagt

SEQ ID NO: 70914 - DNA, 30 bp, Artificial Sequence
  Synthetic oligonucleotide
caagatcggtataggcacccgtgtcgaagt

SEQ ID NO: 70915 - DNA, 30 bp, Artificial Sequence
  Synthetic oligonucleotide
atggctggacgtcgattgtccgatggaagt

SEQ ID NO: 70916 - DNA, 30 bp, Artificial Sequence
  Synthetic oligonucleotide
gcgcatacgataggattgattcgagtaagt

SEQ ID NO: 70917 - DNA, 30 bp, Artificial Sequence
  Synthetic oligonucleotide
tcggtaggaagacttttggagccggtaagt

SEQ ID NO: 70918 - DNA, 30 bp, Artificial Sequence
  Synthetic oligonucleotide
cgtaggcggttcgaattagagtttgtaagt

SEQ ID NO: 70919 - DNA, 30 bp, Artificial Sequence
  Synthetic oligonucleotide
gatagccggggaaacggtttggaccacagt

SEQ ID NO: 70920 - DNA, 30 bp, Artificial Sequence
  Synthetic oligonucleotide
cgccctcagcgagtgagccgtccccacagt

SEQ ID NO: 70921 - DNA, 30 bp, Artificial Sequence
  Synthetic oligonucleotide
tagggagatctggattaagggacatacagt

SEQ ID NO: 70922 - DNA, 30 bp, Artificial Sequence
  Synthetic oligonucleotide
cccctaggaggccgatcggaccgatacagt

SEQ ID NO: 70923 - DNA, 30 bp, Artificial Sequence
  Synthetic oligonucleotide
cggagaataagggaatatagcgattacagt

SEQ ID NO: 70924 - DNA, 30 bp, Artificial Sequence
  Synthetic oligonucleotide
tgcaagcctgagtaaggaaaagggcccagt

SEQ ID NO: 70925 - DNA, 30 bp, Artificial Sequence
  Synthetic oligonucleotide
ctctaaacgaaagcggatcaaccagccagt

SEQ ID NO: 70926 - DNA, 30 bp, Artificial Sequence
  Synthetic oligonucleotide
tgcaccgatgcggggaagtgtgcagccagt

SEQ ID NO: 70927 - DNA, 30 bp, Artificial Sequence
  Synthetic oligonucleotide
cctataacttaagcggggataaaggccagt

SEQ ID NO: 70928 - DNA, 30 bp, Artificial Sequence
  Synthetic oligonucleotide
atcaacgcgggagtggataaacgggccagt

SEQ ID NO: 70929 - DNA, 30 bp, Artificial Sequence
  Synthetic oligonucleotide
tccagaaaggcgatgatttagctaagcagt

SEQ ID NO: 70930 - DNA, 30 bp, Artificial Sequence
  Synthetic oligonucleotide
gtcggagccggtgtacactacgagagcagt

SEQ ID NO: 70931 - DNA, 30 bp, Artificial Sequence
  Synthetic oligonucleotide
gaagtacgacatgggggtcaccgtagcagt

SEQ ID NO: 70932 - DNA, 30 bp, Artificial Sequence
  Synthetic oligonucleotide
aggtgcaaaggaaagacggaaatacgcagt

SEQ ID NO: 70933 - DNA, 30 bp, Artificial Sequence
  Synthetic oligonucleotide
tggtaagggggatggatcgtagaaatcagt

SEQ ID NO: 70934 - DNA, 30 bp, Artificial Sequence
  Synthetic oligonucleotide
tggagcagaggaatcgacatggtaatcagt

SEQ ID NO: 70935 - DNA, 30 bp, Artificial Sequence
  Synthetic oligonucleotide
ggacgaactatcggactttgcggtatcagt

SEQ ID NO: 70936 - DNA, 30 bp, Artificial Sequence
  Synthetic oligonucleotide
ggggatgggagagttacgatgattatcagt

SEQ ID NO: 70937 - DNA, 30 bp, Artificial Sequence
  Synthetic oligonucleotide
ggcccaaagaaaccgactggatcggtcagt

SEQ ID NO: 70938 - DNA, 30 bp, Artificial Sequence
  Synthetic oligonucleotide
acaataaaaagacacgcctttcgccagagt

SEQ ID NO: 70939 - DNA, 30 bp, Artificial Sequence
  Synthetic oligonucleotide
cgtgaggcaaggcttataacggctcagagt

SEQ ID NO: 70940 - DNA, 30 bp, Artificial Sequence
  Synthetic oligonucleotide
atacgctacagaagcggattaaaagagagt

SEQ ID NO: 70941 - DNA, 30 bp, Artificial Sequence
  Synthetic oligonucleotide
cgcgggacggttcgacgaggtagggagagt

SEQ ID NO: 70942 - DNA, 30 bp, Artificial Sequence
  Synthetic oligonucleotide
gtgtcacgataaaaagaccgtccatagagt

SEQ ID NO: 70943 - DNA, 30 bp, Artificial Sequence
  Synthetic oligonucleotide
gctaagccaatttgagaaaatgtctagagt

SEQ ID NO: 70944 - DNA, 30 bp, Artificial Sequence
  Synthetic oligonucleotide
gggtgattaatccaggtgcgttacacgagt

SEQ ID NO: 70945 - DNA, 30 bp, Artificial Sequence
  Synthetic oligonucleotide
tcctcaaaagggggatttgtagcaccgagt

SEQ ID NO: 70946 - DNA, 30 bp, Artificial Sequence
  Synthetic oligonucleotide
ggacaattgtagctgtttcaacccccgagt

SEQ ID NO: 70947 - DNA, 30 bp, Artificial Sequence
  Synthetic oligonucleotide
acgaggttaccaggaagctcacttccgagt

SEQ ID NO: 70948 - DNA, 30 bp, Artificial Sequence
  Synthetic oligonucleotide
cctgaattattagtctcttatccatcgagt

SEQ ID NO: 70949 - DNA, 30 bp, Artificial Sequence
  Synthetic oligonucleotide
cctaatttagcgcggggcatagccaggagt

SEQ ID NO: 70950 - DNA, 30 bp, Artificial Sequence
  Synthetic oligonucleotide
tagcaagtttttccgaaatcgcataggagt

SEQ ID NO: 70951 - DNA, 30 bp, Artificial Sequence
  Synthetic oligonucleotide
acagtacctgtcagtaagcgcccacggagt

SEQ ID NO: 70952 - DNA, 30 bp, Artificial Sequence
  Synthetic oligonucleotide
cgaaatggggtgcaagccgaccgacggagt

SEQ ID NO: 70953 - DNA, 30 bp, Artificial Sequence
  Synthetic oligonucleotide
cgtaccaccggtagagacacaagggggagt

SEQ ID NO: 70954 - DNA, 30 bp, Artificial Sequence
  Synthetic oligonucleotide
gtagggcggtttaccgaactgatggggagt

SEQ ID NO: 70955 - DNA, 30 bp, Artificial Sequence
  Synthetic oligonucleotide
cacatcagtcagaaaggaatagttgggagt

SEQ ID NO: 70956 - DNA, 30 bp, Artificial Sequence
  Synthetic oligonucleotide
gtttaaatgggtaacggtaccgaatggagt

SEQ ID NO: 70957 - DNA, 30 bp, Artificial Sequence
  Synthetic oligonucleotide
ttcgtatctacgccccgtgacagaatgagt

SEQ ID NO: 70958 - DNA, 30 bp, Artificial Sequence
  Synthetic oligonucleotide
cgggtaagtggcgtgcgactgagaatgagt

SEQ ID NO: 70959 - DNA, 30 bp, Artificial Sequence
  Synthetic oligonucleotide
cggtaccagtgtgtccaccatcgggtgagt

SEQ ID NO: 70960 - DNA, 30 bp, Artificial Sequence
  Synthetic oligonucleotide
gagtaaggaatgtcaaacaaaattttgagt

SEQ ID NO: 70961 - DNA, 30 bp, Artificial Sequence
  Synthetic oligonucleotide
cgcgggggggggcagaacatcggcaatagt

SEQ ID NO: 70962 - DNA, 30 bp, Artificial Sequence
  Synthetic oligonucleotide
ggtgcaacaccgactatcctaggccatagt

SEQ ID NO: 70963 - DNA, 30 bp, Artificial Sequence
  Synthetic oligonucleotide
gcgagaggttggcgggtatctccgcatagt

SEQ ID NO: 70964 - DNA, 30 bp, Artificial Sequence
  Synthetic oligonucleotide
ggaatacatacctaatcatgtgaccctagt

SEQ ID NO: 70965 - DNA, 31 bp, Artificial Sequence
  Synthetic oligonucleotide
aggactaaaaggatgttcggattaaagtagt

SEQ ID NO: 70966 - DNA, 30 bp, Artificial Sequence
  Synthetic oligonucleotide
gtcatgcagtgtacggaccgaacaagtagt

SEQ ID NO: 70967 - DNA, 30 bp, Artificial Sequence
  Synthetic oligonucleotide
cggtactctcatgatccaggggtgagtagt

SEQ ID NO: 70968 - DNA, 30 bp, Artificial Sequence
  Synthetic oligonucleotide
tgcaaagggagagaaacaggacatggtagt

SEQ ID NO: 70969 - DNA, 31 bp, Artificial Sequence
  Synthetic oligonucleotide
gtggagggcacagccgatcatagcgtgtagt

SEQ ID NO: 70970 - DNA, 30 bp, Artificial Sequence
  Synthetic oligonucleotide
aatggcgcgaggacggctgctcggtttagt

SEQ ID NO: 70971 - DNA, 30 bp, Artificial Sequence
  Synthetic oligonucleotide
tcgaacggcctatagggacccagttttagt

SEQ ID NO: 70972 - DNA, 31 bp, Artificial Sequence
  Synthetic oligonucleotide
agattatgcgcaaacattggatcgaaaacgt

SEQ ID NO: 70973 - DNA, 30 bp, Artificial Sequence
  Synthetic oligonucleotide
cggagattgaggagaacatatctcaaacgt

SEQ ID NO: 70974 - DNA, 30 bp, Artificial Sequence
  Synthetic oligonucleotide
gccaggaggagttatggaccagctaaacgt

SEQ ID NO: 70975 - DNA, 30 bp, Artificial Sequence
  Synthetic oligonucleotide
ggtaacccgggtagtagatatgtgcaacgt

SEQ ID NO: 70976 - DNA, 30 bp, Artificial Sequence
  Synthetic oligonucleotide
acgtctatgcggtagggcatggctcaacgt

SEQ ID NO: 70977 - DNA, 30 bp, Artificial Sequence
  Synthetic oligonucleotide
taggcacagcgcgggagtacggcggaacgt

SEQ ID NO: 70978 - DNA, 30 bp, Artificial Sequence
  Synthetic oligonucleotide
aagcgggggtgtagataagagattgaacgt

SEQ ID NO: 70979 - DNA, 30 bp, Artificial Sequence
  Synthetic oligonucleotide
cttgaaacaccgaagaagtccgattaacgt

SEQ ID NO: 70980 - DNA, 30 bp, Artificial Sequence
  Synthetic oligonucleotide
ctgcggagtaagaagctaccatagacacgt

SEQ ID NO: 70981 - DNA, 30 bp, Artificial Sequence
  Synthetic oligonucleotide
cgtcgaggcacgtgcgagtgaattacacgt

SEQ ID NO: 70982 - DNA, 30 bp, Artificial Sequence
  Synthetic oligonucleotide
gggtcgtgatcagcagtgagggtagcacgt

SEQ ID NO: 70983 - DNA, 30 bp, Artificial Sequence
  Synthetic oligonucleotide
cgtaatgggaatggggagtgcggtagacgt

SEQ ID NO: 70984 - DNA, 30 bp, Artificial Sequence
  Synthetic oligonucleotide
agttagcagacaaactagattgtacgacgt

SEQ ID NO: 70985 - DNA, 30 bp, Artificial Sequence
  Synthetic oligonucleotide
aggtataccagcggttaggcacagcgacgt

SEQ ID NO: 70986 - DNA, 30 bp, Artificial Sequence
  Synthetic oligonucleotide
cgaaggatcaagagtaccgtcgtgcgacgt

SEQ ID NO: 70987 - DNA, 30 bp, Artificial Sequence
  Synthetic oligonucleotide
gcccaggaagagagaaggcggaggggacgt

SEQ ID NO: 70988 - DNA, 30 bp, Artificial Sequence
  Synthetic oligonucleotide
gcatgtgaccctcgaacacggggatgacgt

SEQ ID NO: 70989 - DNA, 30 bp, Artificial Sequence
  Synthetic oligonucleotide
agaggtctcaggccatgtaaattatgacgt

SEQ ID NO: 70990 - DNA, 30 bp, Artificial Sequence
  Synthetic oligonucleotide
ctcgggcgcccgaagagatgttgctgacgt

SEQ ID NO: 70991 - DNA, 30 bp, Artificial Sequence
  Synthetic oligonucleotide
cctaaaagttgaccgacttcaaggatacgt

SEQ ID NO: 70992 - DNA, 30 bp, Artificial Sequence
  Synthetic oligonucleotide
taagacggaacctactgataccaagtacgt

SEQ ID NO: 70993 - DNA, 30 bp, Artificial Sequence
  Synthetic oligonucleotide
gaaaagccaagtcaggggtaaaaccaccgt

SEQ ID NO: 70994 - DNA, 30 bp, Artificial Sequence
  Synthetic oligonucleotide
cgaatgagccattgaacatggtgcgaccgt

SEQ ID NO: 70995 - DNA, 30 bp, Artificial Sequence
  Synthetic oligonucleotide
tgcaaaggccagggtacacggaagtaccgt

SEQ ID NO: 70996 - DNA, 30 bp, Artificial Sequence
  Synthetic oligonucleotide
gtgaggcgtgtgtagcgcggaccttaccgt

SEQ ID NO: 70997 - DNA, 30 bp, Artificial Sequence
  Synthetic oligonucleotide
taacgaggcagatcaaggacctaaacccgt

SEQ ID NO: 70998 - DNA, 30 bp, Artificial Sequence
  Synthetic oligonucleotide
cagagggcgtcgactgaagaccctgcccgt

SEQ ID NO: 70999 - DNA, 30 bp, Artificial Sequence
  Synthetic oligonucleotide
acgaagaggtgatgtgcaacgacatcccgt

SEQ ID NO: 71000 - DNA, 30 bp, Artificial Sequence
  Synthetic oligonucleotide
ttcgaggtccagatggcgtgctgaggccgt

SEQ ID NO: 71001 - DNA, 30 bp, Artificial Sequence
  Synthetic oligonucleotide
tccgatagggtggaaaagaaagggtgccgt

SEQ ID NO: 71002 - DNA, 30 bp, Artificial Sequence
  Synthetic oligonucleotide
gacaatcactgagggtcgactcgtctccgt

SEQ ID NO: 71003 - DNA, 30 bp, Artificial Sequence
  Synthetic oligonucleotide
ggctggtggaaattaaacgcttacgtccgt

SEQ ID NO: 71004 - DNA, 30 bp, Artificial Sequence
  Synthetic oligonucleotide
ataaaaatataggttaggtgtggcgtccgt

SEQ ID NO: 71005 - DNA, 30 bp, Artificial Sequence
  Synthetic oligonucleotide
tacggtgatccgcgagtccggaaattccgt

SEQ ID NO: 71006 - DNA, 30 bp, Artificial Sequence
  Synthetic oligonucleotide
gtggaccctaaacgcgacagagacttccgt

SEQ ID NO: 71007 - DNA, 30 bp, Artificial Sequence
  Synthetic oligonucleotide
atacttagttatggagaagggaactagcgt

SEQ ID NO: 71008 - DNA, 30 bp, Artificial Sequence
  Synthetic oligonucleotide
ttgggatgaacagaattctccgaaacgcgt

SEQ ID NO: 71009 - DNA, 30 bp, Artificial Sequence
  Synthetic oligonucleotide
acaaatgcattgataacctaaagaccgcgt

SEQ ID NO: 71010 - DNA, 30 bp, Artificial Sequence
  Synthetic oligonucleotide
ttcagggatggtgggggcaatacatcgcgt

SEQ ID NO: 71011 - DNA, 30 bp, Artificial Sequence
  Synthetic oligonucleotide
tgctactataatggatcactgttatcgcgt

SEQ ID NO: 71012 - DNA, 30 bp, Artificial Sequence
  Synthetic oligonucleotide
acgtccaagaatagactgccagcaaggcgt

SEQ ID NO: 71013 - DNA, 30 bp, Artificial Sequence
  Synthetic oligonucleotide
aacgcgaattaactatagtcgaagaggcgt

SEQ ID NO: 71014 - DNA, 30 bp, Artificial Sequence
  Synthetic oligonucleotide
gcacaaagtcgagatgaggtctggcggcgt

SEQ ID NO: 71015 - DNA, 30 bp, Artificial Sequence
  Synthetic oligonucleotide
agacgagataggaactctgcggcagggcgt

SEQ ID NO: 71016 - DNA, 30 bp, Artificial Sequence
  Synthetic oligonucleotide
cagctgttaaagaaggcgataagttggcgt

SEQ ID NO: 71017 - DNA, 30 bp, Artificial Sequence
  Synthetic oligonucleotide
gtccgaaggtggaatagggttgcaatgcgt

SEQ ID NO: 71018 - DNA, 31 bp, Artificial Sequence
  Synthetic oligonucleotide
ggccttcgctccacaaaatctcagcatgcgt

SEQ ID NO: 71019 - DNA, 31 bp, Artificial Sequence
  Synthetic oligonucleotide
caggtgtttaatctacgactagaaactgcgt

SEQ ID NO: 71020 - DNA, 30 bp, Artificial Sequence
  Synthetic oligonucleotide
catagccggaaagcaatcagaacgctgcgt

SEQ ID NO: 71021 - DNA, 30 bp, Artificial Sequence
  Synthetic oligonucleotide
acgttaagcaggccccatagaatgctgcgt

SEQ ID NO: 71022 - DNA, 30 bp, Artificial Sequence
  Synthetic oligonucleotide
gctacgaaagtctacacgaagatggtgcgt

SEQ ID NO: 71023 - DNA, 30 bp, Artificial Sequence
  Synthetic oligonucleotide
gggctacggagactgaaatatcccaatcgt

SEQ ID NO: 71024 - DNA, 30 bp, Artificial Sequence
  Synthetic oligonucleotide
aggacgctactgccatggaaggctaatcgt

SEQ ID NO: 71025 - DNA, 30 bp, Artificial Sequence
  Synthetic oligonucleotide
gctaacgacaaacacacctcaatgcatcgt

SEQ ID NO: 71026 - DNA, 30 bp, Artificial Sequence
  Synthetic oligonucleotide
ggtgagtatcaagtcagcagatatcatcgt

SEQ ID NO: 71027 - DNA, 30 bp, Artificial Sequence
  Synthetic oligonucleotide
aggatggggttcaatgagcgcatcgatcgt

SEQ ID NO: 71028 - DNA, 30 bp, Artificial Sequence
  Synthetic oligonucleotide
aagaaagattagaaactgcgctcgtatcgt

SEQ ID NO: 71029 - DNA, 30 bp, Artificial Sequence
  Synthetic oligonucleotide
gggcgggaaaatgaccagcccatttctcgt

SEQ ID NO: 71030 - DNA, 30 bp, Artificial Sequence
  Synthetic oligonucleotide
tgacgacaactctaccagacgatacgtcgt

SEQ ID NO: 71031 - DNA, 30 bp, Artificial Sequence
  Synthetic oligonucleotide
cactaggtctcaggaagggcggtctgtcgt

SEQ ID NO: 71032 - DNA, 30 bp, Artificial Sequence
  Synthetic oligonucleotide
tgagcacggaatgacacttcattgattcgt

SEQ ID NO: 71033 - DNA, 30 bp, Artificial Sequence
  Synthetic oligonucleotide
gcgtacggcacatacgtggctagacttcgt

SEQ ID NO: 71034 - DNA, 30 bp, Artificial Sequence
  Synthetic oligonucleotide
atggaatcccaatctcagatacgtcttcgt

SEQ ID NO: 71035 - DNA, 30 bp, Artificial Sequence
  Synthetic oligonucleotide
tacggagcgggtttccgtcccagaaaaggt

SEQ ID NO: 71036 - DNA, 30 bp, Artificial Sequence
  Synthetic oligonucleotide
ggtatgcacacaagcaattacaggaaaggt

SEQ ID NO: 71037 - DNA, 30 bp, Artificial Sequence
  Synthetic oligonucleotide
gttaaattgggtcttaataacggataaggt

SEQ ID NO: 71038 - DNA, 30 bp, Artificial Sequence
  Synthetic oligonucleotide
cctactgtcacttatagaggaacaccaggt

SEQ ID NO: 71039 - DNA, 30 bp, Artificial Sequence
  Synthetic oligonucleotide
gggagctatgctgtagtgtgaggcccaggt

SEQ ID NO: 71040 - DNA, 30 bp, Artificial Sequence
  Synthetic oligonucleotide
tacgacgtgaatctccctaacaagccaggt

SEQ ID NO: 71041 - DNA, 30 bp, Artificial Sequence
  Synthetic oligonucleotide
atcaagggtagattgaacatcgcacgaggt

SEQ ID NO: 71042 - DNA, 30 bp, Artificial Sequence
  Synthetic oligonucleotide
aggggattcgccaggtagtcgcgacgaggt

SEQ ID NO: 71043 - DNA, 30 bp, Artificial Sequence
  Synthetic oligonucleotide
acaagtcctaccccgtccagacaccgaggt

SEQ ID NO: 71044 - DNA, 30 bp, Artificial Sequence
  Synthetic oligonucleotide
tacctgtaaggggtataaggcataggaggt

SEQ ID NO: 71045 - DNA, 30 bp, Artificial Sequence
  Synthetic oligonucleotide
ctgagaaaatcgcttggacaagaatgaggt

SEQ ID NO: 71046 - DNA, 30 bp, Artificial Sequence
  Synthetic oligonucleotide
ccgaagggactgtctgatgaagcgataggt

SEQ ID NO: 71047 - DNA, 30 bp, Artificial Sequence
  Synthetic oligonucleotide
ctgtcgggaaaaaatctaaagtatataggt

SEQ ID NO: 71048 - DNA, 30 bp, Artificial Sequence
  Synthetic oligonucleotide
tggaaatgagagacaaaattgtaattaggt

SEQ ID NO: 71049 - DNA, 30 bp, Artificial Sequence
  Synthetic oligonucleotide
cggaagcgacatacgagtgcggggttaggt

SEQ ID NO: 71050 - DNA, 30 bp, Artificial Sequence
  Synthetic oligonucleotide
tgtcccaaggagtcgaatgccatgttaggt

SEQ ID NO: 71051 - DNA, 30 bp, Artificial Sequence
  Synthetic oligonucleotide
caggtcaaacgactccaaaagggaaacggt

SEQ ID NO: 71052 - DNA, 30 bp, Artificial Sequence
  Synthetic oligonucleotide
aagagcgttaagatcattacttggaacggt

SEQ ID NO: 71053 - DNA, 30 bp, Artificial Sequence
  Synthetic oligonucleotide
gctggtgcgtgctcgaagtaatctaacggt

SEQ ID NO: 71054 - DNA, 30 bp, Artificial Sequence
  Synthetic oligonucleotide
gcggcaggtcccggattgagactccacggt

SEQ ID NO: 71055 - DNA, 30 bp, Artificial Sequence
  Synthetic oligonucleotide
ggtagaccgaagagctaatgataggccggt

SEQ ID NO: 71056 - DNA, 30 bp, Artificial Sequence
  Synthetic oligonucleotide
acacattaaaagcaggttgggttaagcggt

SEQ ID NO: 71057 - DNA, 30 bp, Artificial Sequence
  Synthetic oligonucleotide
aacgtgcataaatggcttatcagtggcggt

SEQ ID NO: 71058 - DNA, 30 bp, Artificial Sequence
  Synthetic oligonucleotide
agagtagaactgtcaaccgaaagtctcggt

SEQ ID NO: 71059 - DNA, 30 bp, Artificial Sequence
  Synthetic oligonucleotide
tcgatatgtgcaagctacggcctaaagggt

SEQ ID NO: 71060 - DNA, 30 bp, Artificial Sequence
  Synthetic oligonucleotide
cggcagcatgcatgtaaattatggcagggt

SEQ ID NO: 71061 - DNA, 30 bp, Artificial Sequence
  Synthetic oligonucleotide
aaacagtatagcagcgagcacagagagggt

SEQ ID NO: 71062 - DNA, 30 bp, Artificial Sequence
  Synthetic oligonucleotide
attaaagaacacaagtagatagccccgggt

SEQ ID NO: 71063 - DNA, 30 bp, Artificial Sequence
  Synthetic oligonucleotide
attgagccggaatcacaaaattagccgggt

SEQ ID NO: 71064 - DNA, 30 bp, Artificial Sequence
  Synthetic oligonucleotide
cacgatgcgtaatgtacttgacatccgggt

SEQ ID NO: 71065 - DNA, 30 bp, Artificial Sequence
  Synthetic oligonucleotide
acaggggaacctgggcactgaagagcgggt

SEQ ID NO: 71066 - DNA, 30 bp, Artificial Sequence
  Synthetic oligonucleotide
ctgtcaacgccttatgaaacggaatcgggt

SEQ ID NO: 71067 - DNA, 30 bp, Artificial Sequence
  Synthetic oligonucleotide
ggcactggtgtagcgtgcgtcccctcgggt

SEQ ID NO: 71068 - DNA, 30 bp, Artificial Sequence
  Synthetic oligonucleotide
aggaacggaatgggtattaagcagaggggt

SEQ ID NO: 71069 - DNA, 30 bp, Artificial Sequence
  Synthetic oligonucleotide
ttatacagaaaggacaagattatgcggggt

SEQ ID NO: 71070 - DNA, 30 bp, Artificial Sequence
  Synthetic oligonucleotide
gtctagaagttagatattgacgggtggggt

SEQ ID NO: 71071 - DNA, 30 bp, Artificial Sequence
  Synthetic oligonucleotide
ttcaggcgagaaagggacggtgggtggggt

SEQ ID NO: 71072 - DNA, 30 bp, Artificial Sequence
  Synthetic oligonucleotide
gatgaggaaactaagtggggaaaaatgggt

SEQ ID NO: 71073 - DNA, 30 bp, Artificial Sequence
  Synthetic oligonucleotide
gcgaggattttagtcgtgccgtgaactggt

SEQ ID NO: 71074 - DNA, 30 bp, Artificial Sequence
  Synthetic oligonucleotide
cgagccgtcaatattcacagtatacctggt

SEQ ID NO: 71075 - DNA, 30 bp, Artificial Sequence
  Synthetic oligonucleotide
aaacgagagagggtccgactaatccctggt

SEQ ID NO: 71076 - DNA, 30 bp, Artificial Sequence
  Synthetic oligonucleotide
gcgaaacatagcagttgctcaccagctggt

SEQ ID NO: 71077 - DNA, 30 bp, Artificial Sequence
  Synthetic oligonucleotide
gcactgtactaggcgatcgtggaatctggt

SEQ ID NO: 71078 - DNA, 30 bp, Artificial Sequence
  Synthetic oligonucleotide
tcggtcgtaatcgatgtataatagtctggt

SEQ ID NO: 71079 - DNA, 30 bp, Artificial Sequence
  Synthetic oligonucleotide
tgctaaggactagtgtgtggaaggtctggt

SEQ ID NO: 71080 - DNA, 30 bp, Artificial Sequence
  Synthetic oligonucleotide
gcggcgtgtatgtgagtgggagcttctggt

SEQ ID NO: 71081 - DNA, 30 bp, Artificial Sequence
  Synthetic oligonucleotide
aggactccaggtggtcgggagtacagtggt

SEQ ID NO: 71082 - DNA, 30 bp, Artificial Sequence
  Synthetic oligonucleotide
aacgcgtctaggcgaaaggttaacattggt

SEQ ID NO: 71083 - DNA, 30 bp, Artificial Sequence
  Synthetic oligonucleotide
tagggaggagcctcctcattaagcattggt

SEQ ID NO: 71084 - DNA, 30 bp, Artificial Sequence
  Synthetic oligonucleotide
tcaaagaatcttataccgcgttgcattggt

SEQ ID NO: 71085 - DNA, 30 bp, Artificial Sequence
  Synthetic oligonucleotide
aatacggggtgaaggtccgcgattattggt

SEQ ID NO: 71086 - DNA, 30 bp, Artificial Sequence
  Synthetic oligonucleotide
atcagcgattgcgcaatagggtacaaatgt

SEQ ID NO: 71087 - DNA, 30 bp, Artificial Sequence
  Synthetic oligonucleotide
aggtaggatcgccgagtggcgtgccaatgt

SEQ ID NO: 71088 - DNA, 30 bp, Artificial Sequence
  Synthetic oligonucleotide
aacgggcggacggggattgtaaatcaatgt

SEQ ID NO: 71089 - DNA, 30 bp, Artificial Sequence
  Synthetic oligonucleotide
caataatcgaattaagtgcaacctgaatgt

SEQ ID NO: 71090 - DNA, 30 bp, Artificial Sequence
  Synthetic oligonucleotide
gtgagttgcacacaattcaagataacatgt

SEQ ID NO: 71091 - DNA, 30 bp, Artificial Sequence
  Synthetic oligonucleotide
ataacaccgtcggatagcgctcatacatgt

SEQ ID NO: 71092 - DNA, 30 bp, Artificial Sequence
  Synthetic oligonucleotide
gaccaaacctacctaggaccagaggcatgt

SEQ ID NO: 71093 - DNA, 30 bp, Artificial Sequence
  Synthetic oligonucleotide
gcgattttagcgaaagggatttaggcatgt

SEQ ID NO: 71094 - DNA, 30 bp, Artificial Sequence
  Synthetic oligonucleotide
tcaaggtaccggttctagccaggaggatgt

SEQ ID NO: 71095 - DNA, 30 bp, Artificial Sequence
  Synthetic oligonucleotide
gcaaaaggctaatcatcatagttaggatgt

SEQ ID NO: 71096 - DNA, 30 bp, Artificial Sequence
  Synthetic oligonucleotide
agggtggtacagcaggtcagcagtggatgt

SEQ ID NO: 71097 - DNA, 30 bp, Artificial Sequence
  Synthetic oligonucleotide
agtaaagttgaggtagggattagggtatgt

SEQ ID NO: 71098 - DNA, 30 bp, Artificial Sequence
  Synthetic oligonucleotide
cgttactcaaagttaatcgagataaactgt

SEQ ID NO: 71099 - DNA, 30 bp, Artificial Sequence
  Synthetic oligonucleotide
ccaccctggaaaagggggaataataactgt

SEQ ID NO: 71100 - DNA, 30 bp, Artificial Sequence
  Synthetic oligonucleotide
acctccgggaaggaagtgacgtaacactgt

SEQ ID NO: 71101 - DNA, 30 bp, Artificial Sequence
  Synthetic oligonucleotide
cgtaaactgtgtgatgcgacagtgccctgt

SEQ ID NO: 71102 - DNA, 30 bp, Artificial Sequence
  Synthetic oligonucleotide
tcaatcagctcggtataaggtcaagcctgt

SEQ ID NO: 71103 - DNA, 30 bp, Artificial Sequence
  Synthetic oligonucleotide
agaaagccgagaatacccactcaatcctgt

SEQ ID NO: 71104 - DNA, 30 bp, Artificial Sequence
  Synthetic oligonucleotide
ttggtgaggtggttccatgggaagcgctgt

SEQ ID NO: 71105 - DNA, 30 bp, Artificial Sequence
  Synthetic oligonucleotide
gcatcgaatttaaactggctacagtgctgt

SEQ ID NO: 71106 - DNA, 30 bp, Artificial Sequence
  Synthetic oligonucleotide
tgtcaaacggcggaaaactgggagatctgt

SEQ ID NO: 71107 - DNA, 30 bp, Artificial Sequence
  Synthetic oligonucleotide
ccgtatcagcaataactaactcgtgtctgt

SEQ ID NO: 71108 - DNA, 30 bp, Artificial Sequence
  Synthetic oligonucleotide
cctacttaacagggggattatcggcagtgt

SEQ ID NO: 71109 - DNA, 30 bp, Artificial Sequence
  Synthetic oligonucleotide
ccttggctgaacagcgcatgaaaggagtgt

SEQ ID NO: 71110 - DNA, 30 bp, Artificial Sequence
  Synthetic oligonucleotide
taggttcggagtaaggtagtcagaacgtgt

SEQ ID NO: 71111 - DNA, 30 bp, Artificial Sequence
  Synthetic oligonucleotide
cgacagtgagtttgtgcgggataaccgtgt

SEQ ID NO: 71112 - DNA, 30 bp, Artificial Sequence
  Synthetic oligonucleotide
accaggactttgagacctagaacaccgtgt

SEQ ID NO: 71113 - DNA, 30 bp, Artificial Sequence
  Synthetic oligonucleotide
tacccagccaagacaagcatgccaccgtgt

SEQ ID NO: 71114 - DNA, 30 bp, Artificial Sequence
  Synthetic oligonucleotide
cgtaaatacccttcaattacgattccgtgt

SEQ ID NO: 71115 - DNA, 30 bp, Artificial Sequence
  Synthetic oligonucleotide
tggccgaagaggggtcagaggtgggcgtgt

SEQ ID NO: 71116 - DNA, 30 bp, Artificial Sequence
  Synthetic oligonucleotide
cacaaggaaagcaaaagagacgtgtcgtgt

SEQ ID NO: 71117 - DNA, 30 bp, Artificial Sequence
  Synthetic oligonucleotide
ataggacaaacaatacgtaccttaaggtgt

SEQ ID NO: 71118 - DNA, 30 bp, Artificial Sequence
  Synthetic oligonucleotide
aagtgtgtcggaaagaagcaaatcaggtgt

SEQ ID NO: 71119 - DNA, 30 bp, Artificial Sequence
  Synthetic oligonucleotide
cgaaatggtccaactgccgatatcaggtgt

SEQ ID NO: 71120 - DNA, 30 bp, Artificial Sequence
  Synthetic oligonucleotide
acacgtgagggtcacgcaaaattgcggtgt

SEQ ID NO: 71121 - DNA, 30 bp, Artificial Sequence
  Synthetic oligonucleotide
cactccagcaatactgggatggatgggtgt

SEQ ID NO: 71122 - DNA, 30 bp, Artificial Sequence
  Synthetic oligonucleotide
cacacccttggagaaaaatcatcgatgtgt

SEQ ID NO: 71123 - DNA, 30 bp, Artificial Sequence
  Synthetic oligonucleotide
acgaaattgcggaaagtaggtgtgatgtgt

SEQ ID NO: 71124 - DNA, 30 bp, Artificial Sequence
  Synthetic oligonucleotide
cggatatagatgctcagtcaggtaacttgt

SEQ ID NO: 71125 - DNA, 30 bp, Artificial Sequence
  Synthetic oligonucleotide
tggtcgactagaggtatactttttgcttgt

SEQ ID NO: 71126 - DNA, 30 bp, Artificial Sequence
  Synthetic oligonucleotide
aagggggcggcattacacgcctcgtcttgt

SEQ ID NO: 71127 - DNA, 30 bp, Artificial Sequence
  Synthetic oligonucleotide
tgggacaaaggatatccggtacatcgttgt

SEQ ID NO: 71128 - DNA, 30 bp, Artificial Sequence
  Synthetic oligonucleotide
atatatggggacatctatcaagagggttgt

SEQ ID NO: 71129 - DNA, 30 bp, Artificial Sequence
  Synthetic oligonucleotide
gaagaaagtgcgagtgggcccgaactttgt

SEQ ID NO: 71130 - DNA, 30 bp, Artificial Sequence
  Synthetic oligonucleotide
gtgaattggggaagtgaagtcagtctttgt

SEQ ID NO: 71131 - DNA, 30 bp, Artificial Sequence
  Synthetic oligonucleotide
ataaccgtccgagagaagtcaactgtttgt

SEQ ID NO: 71132 - DNA, 30 bp, Artificial Sequence
  Synthetic oligonucleotide
tcgtgaaaaagagtacccagcaaattttgt

SEQ ID NO: 71133 - DNA, 30 bp, Artificial Sequence
  Synthetic oligonucleotide
gaacagatagggccaatcgatgtgaaaatt

SEQ ID NO: 71134 - DNA, 30 bp, Artificial Sequence
  Synthetic oligonucleotide
aacaggaagtggagaactgtcggtcaaatt

SEQ ID NO: 71135 - DNA, 30 bp, Artificial Sequence
  Synthetic oligonucleotide
aattgcaactcgagggggagggccacaatt

SEQ ID NO: 71136 - DNA, 30 bp, Artificial Sequence
  Synthetic oligonucleotide
agctccagaagaactagcggcaggacaatt

SEQ ID NO: 71137 - DNA, 30 bp, Artificial Sequence
  Synthetic oligonucleotide
caggttgcaaccccgtcaggtaggacaatt

SEQ ID NO: 71138 - DNA, 30 bp, Artificial Sequence
  Synthetic oligonucleotide
cgttcggcacgtttaatggcaaatgcaatt

SEQ ID NO: 71139 - DNA, 30 bp, Artificial Sequence
  Synthetic oligonucleotide
ggatcgtataaaagtggcaactgaagaatt

SEQ ID NO: 71140 - DNA, 30 bp, Artificial Sequence
  Synthetic oligonucleotide
tgacagcattgtcgtaacaggaccctaatt

SEQ ID NO: 71141 - DNA, 30 bp, Artificial Sequence
  Synthetic oligonucleotide
aggaacagctgcacagtcgcattggtaatt

SEQ ID NO: 71142 - DNA, 30 bp, Artificial Sequence
  Synthetic oligonucleotide
cgactaacccatgacatgagttgtcacatt

SEQ ID NO: 71143 - DNA, 30 bp, Artificial Sequence
  Synthetic oligonucleotide
tgaatgtgaggggaccacgtggacgacatt

SEQ ID NO: 71144 - DNA, 30 bp, Artificial Sequence
  Synthetic oligonucleotide
caacgtcaaccgaaggctcaaggctacatt

SEQ ID NO: 71145 - DNA, 30 bp, Artificial Sequence
  Synthetic oligonucleotide
agttcgtgaggtcacagtaggaataccatt

SEQ ID NO: 71146 - DNA, 30 bp, Artificial Sequence
  Synthetic oligonucleotide
cataacatgacatctacccgaagtaccatt

SEQ ID NO: 71147 - DNA, 30 bp, Artificial Sequence
  Synthetic oligonucleotide
acagtcaatcggatgagaggctgtaccatt

SEQ ID NO: 71148 - DNA, 30 bp, Artificial Sequence
  Synthetic oligonucleotide
gcaagtcggaggcacacgacgattaccatt

SEQ ID NO: 71149 - DNA, 30 bp, Artificial Sequence
  Synthetic oligonucleotide
aacgcgcctgagcgataggtggcgagcatt

SEQ ID NO: 71150 - DNA, 30 bp, Artificial Sequence
  Synthetic oligonucleotide
gtgaacgagtgccgctaaaccgccggcatt

SEQ ID NO: 71151 - DNA, 30 bp, Artificial Sequence
  Synthetic oligonucleotide
cgtgacggtcccacgtagaaggactgcatt

SEQ ID NO: 71152 - DNA, 30 bp, Artificial Sequence
  Synthetic oligonucleotide
tcacgtgtttgcgctcataggaatctcatt

SEQ ID NO: 71153 - DNA, 30 bp, Artificial Sequence
  Synthetic oligonucleotide
acatgttatagaacgaggtttagtgtcatt

SEQ ID NO: 71154 - DNA, 30 bp, Artificial Sequence
  Synthetic oligonucleotide
tagggctcgaggtaaaccatcatcaagatt

SEQ ID NO: 71155 - DNA, 30 bp, Artificial Sequence
  Synthetic oligonucleotide
cgagtcccgccattacgttaaattaagatt

SEQ ID NO: 71156 - DNA, 30 bp, Artificial Sequence
  Synthetic oligonucleotide
tcaggattgtgcttgatactcctccagatt

SEQ ID NO: 71157 - DNA, 30 bp, Artificial Sequence
  Synthetic oligonucleotide
cggacggaaacggggtcgaagaggacgatt

SEQ ID NO: 71158 - DNA, 30 bp, Artificial Sequence
  Synthetic oligonucleotide
tggcttacaccaatgaattaacgatcgatt

SEQ ID NO: 71159 - DNA, 30 bp, Artificial Sequence
  Synthetic oligonucleotide
aataactgtctcgaagacgaatactcgatt

SEQ ID NO: 71160 - DNA, 30 bp, Artificial Sequence
  Synthetic oligonucleotide
ggactgatatcgctttaagtgtgaaggatt

SEQ ID NO: 71161 - DNA, 30 bp, Artificial Sequence
  Synthetic oligonucleotide
gaccaaaaaaggatcgcccaagcgaggatt

SEQ ID NO: 71162 - DNA, 30 bp, Artificial Sequence
  Synthetic oligonucleotide
ggatggcacttcctaatcgaacaacggatt

SEQ ID NO: 71163 - DNA, 30 bp, Artificial Sequence
  Synthetic oligonucleotide
cggccagcagttcaaattgtatgtgggatt

SEQ ID NO: 71164 - DNA, 30 bp, Artificial Sequence
  Synthetic oligonucleotide
gctttgccaacgagacccaaacttgggatt

SEQ ID NO: 71165 - DNA, 30 bp, Artificial Sequence
  Synthetic oligonucleotide
aggacatgagattcttcttaggggtggatt

SEQ ID NO: 71166 - DNA, 30 bp, Artificial Sequence
  Synthetic oligonucleotide
tatgaaaaggcagacagaggaaaagtgatt

SEQ ID NO: 71167 - DNA, 30 bp, Artificial Sequence
  Synthetic oligonucleotide
gcagagtcaaaaagtatcgaagtggtgatt

SEQ ID NO: 71168 - DNA, 30 bp, Artificial Sequence
  Synthetic oligonucleotide
atagacgaaggatggaaaggcactttgatt

SEQ ID NO: 71169 - DNA, 30 bp, Artificial Sequence
  Synthetic oligonucleotide
aaggggatttcctccagacagagaaatatt

SEQ ID NO: 71170 - DNA, 30 bp, Artificial Sequence
  Synthetic oligonucleotide
gggcggaaagattagtgctgagtcgatatt

SEQ ID NO: 71171 - DNA, 30 bp, Artificial Sequence
  Synthetic oligonucleotide
accttaggtagggaagtgagtccacctatt

SEQ ID NO: 71172 - DNA, 30 bp, Artificial Sequence
  Synthetic oligonucleotide
acgggtaagcatgagagtcaaagacctatt

SEQ ID NO: 71173 - DNA, 30 bp, Artificial Sequence
  Synthetic oligonucleotide
accgatactaactgactccgtgtcgctatt

SEQ ID NO: 71174 - DNA, 30 bp, Artificial Sequence
  Synthetic oligonucleotide
gctgaaggatgatccgatcaggaccgtatt

SEQ ID NO: 71175 - DNA, 30 bp, Artificial Sequence
  Synthetic oligonucleotide
taacgaacacatgggtaatacttaaaactt

SEQ ID NO: 71176 - DNA, 30 bp, Artificial Sequence
  Synthetic oligonucleotide
ctgggagcccaataggcgagtccacaactt

SEQ ID NO: 71177 - DNA, 30 bp, Artificial Sequence
  Synthetic oligonucleotide
caactagcgcaggtggccggtcattaactt

SEQ ID NO: 71178 - DNA, 30 bp, Artificial Sequence
  Synthetic oligonucleotide
gaggtctaacgctagaactgtgcgtcactt

SEQ ID NO: 71179 - DNA, 29 bp, Artificial Sequence
  Synthetic oligonucleotide
cgaaccgatggctcgcgttagtccgactt

SEQ ID NO: 71180 - DNA, 30 bp, Artificial Sequence
  Synthetic oligonucleotide
tgcggcgacggaccttccgccaaatgactt

SEQ ID NO: 71181 - DNA, 30 bp, Artificial Sequence
  Synthetic oligonucleotide
caacagggttttgcaaacacggggtgactt

SEQ ID NO: 71182 - DNA, 30 bp, Artificial Sequence
  Synthetic oligonucleotide
ggaactaatagaaatcggctacccctactt

SEQ ID NO: 71183 - DNA, 30 bp, Artificial Sequence
  Synthetic oligonucleotide
cgataaagtggcgtggctaaattgttactt

SEQ ID NO: 71184 - DNA, 30 bp, Artificial Sequence
  Synthetic oligonucleotide
gggataaaagcgaagtaaccgatccacctt

SEQ ID NO: 71185 - DNA, 30 bp, Artificial Sequence
  Synthetic oligonucleotide
aacagtgacagaaacaagtgatcagacctt

SEQ ID NO: 71186 - DNA, 30 bp, Artificial Sequence
  Synthetic oligonucleotide
ggaagtcacaagcctcagtcccaggacctt

SEQ ID NO: 71187 - DNA, 30 bp, Artificial Sequence
  Synthetic oligonucleotide
acatccggatgatgactgagtgcaagcctt

SEQ ID NO: 71188 - DNA, 30 bp, Artificial Sequence
  Synthetic oligonucleotide
atgagttcaacaagggacgaggtatgcctt

SEQ ID NO: 71189 - DNA, 30 bp, Artificial Sequence
  Synthetic oligonucleotide
gggcagttagcacgggatcgtatcatcctt

SEQ ID NO: 71190 - DNA, 30 bp, Artificial Sequence
  Synthetic oligonucleotide
agcagtccccttcataacagtgcgctcctt

SEQ ID NO: 71191 - DNA, 30 bp, Artificial Sequence
  Synthetic oligonucleotide
gtccaacagtaccacgattcctgagtcctt

SEQ ID NO: 71192 - DNA, 30 bp, Artificial Sequence
  Synthetic oligonucleotide
gaatcgtccgttgcagcgcagagccagctt

SEQ ID NO: 71193 - DNA, 30 bp, Artificial Sequence
  Synthetic oligonucleotide
tcactcaaggtcgccatagttaaagagctt

SEQ ID NO: 71194 - DNA, 30 bp, Artificial Sequence
  Synthetic oligonucleotide
gcagtttgtcatgggtgggtgcaatagctt

SEQ ID NO: 71195 - DNA, 30 bp, Artificial Sequence
  Synthetic oligonucleotide
ggtcgggcccaacgcaatcttagcaggctt

SEQ ID NO: 71196 - DNA, 30 bp, Artificial Sequence
  Synthetic oligonucleotide
ggggcgaggaggcaattatacttcaggctt

SEQ ID NO: 71197 - DNA, 30 bp, Artificial Sequence
  Synthetic oligonucleotide
caagacgagtctagtagactacaacggctt

SEQ ID NO: 71198 - DNA, 30 bp, Artificial Sequence
  Synthetic oligonucleotide
gggacgtttagaagtccaaggctagggctt

SEQ ID NO: 71199 - DNA, 30 bp, Artificial Sequence
  Synthetic oligonucleotide
tacggtcaaaggcttcgtcatggcatgctt

SEQ ID NO: 71200 - DNA, 30 bp, Artificial Sequence
  Synthetic oligonucleotide
accagaggacgctcgcctaccgcgatgctt

SEQ ID NO: 71201 - DNA, 30 bp, Artificial Sequence
  Synthetic oligonucleotide
taattagggccaggtgcaagtagaaatctt

SEQ ID NO: 71202 - DNA, 30 bp, Artificial Sequence
  Synthetic oligonucleotide
taggagactcgcatgaaatgaggggatctt

SEQ ID NO: 71203 - DNA, 30 bp, Artificial Sequence
  Synthetic oligonucleotide
atgaagggggccacgtatgcgagttatctt

SEQ ID NO: 71204 - DNA, 30 bp, Artificial Sequence
  Synthetic oligonucleotide
cgggaccatattgtgccaaaagcgactctt

SEQ ID NO: 71205 - DNA, 30 bp, Artificial Sequence
  Synthetic oligonucleotide
tgagtgcgcacggatgggtctaaaaaagtt

SEQ ID NO: 71206 - DNA, 30 bp, Artificial Sequence
  Synthetic oligonucleotide
atacgaaagggctccgaaggctagaaagtt

SEQ ID NO: 71207 - DNA, 30 bp, Artificial Sequence
  Synthetic oligonucleotide
gcgacccggctaagggcgaattaacaagtt

SEQ ID NO: 71208 - DNA, 30 bp, Artificial Sequence
  Synthetic oligonucleotide
atggacatcatcgtgcaggcctatgaagtt

SEQ ID NO: 71209 - DNA, 30 bp, Artificial Sequence
  Synthetic oligonucleotide
cacaagtaaggtgggatagtgcactaagtt

SEQ ID NO: 71210 - DNA, 30 bp, Artificial Sequence
  Synthetic oligonucleotide
gtgtggatatcagtattcaaacatccagtt

SEQ ID NO: 71211 - DNA, 30 bp, Artificial Sequence
  Synthetic oligonucleotide
aagtcaaccgaagcgaaggatggtagagtt

SEQ ID NO: 71212 - DNA, 30 bp, Artificial Sequence
  Synthetic oligonucleotide
ttgaagatggaagctacacagcaccgagtt

SEQ ID NO: 71213 - DNA, 30 bp, Artificial Sequence
  Synthetic oligonucleotide
gggatctgaagtacaaccaccttaatagtt

SEQ ID NO: 71214 - DNA, 30 bp, Artificial Sequence
  Synthetic oligonucleotide
ccgacatagggaagattaatttagatagtt

SEQ ID NO: 71215 - DNA, 30 bp, Artificial Sequence
  Synthetic oligonucleotide
aagatgcgagaccagattaagttgctagtt

SEQ ID NO: 71216 - DNA, 30 bp, Artificial Sequence
  Synthetic oligonucleotide
gacggcgccctaagtgacaacggcttagtt

SEQ ID NO: 71217 - DNA, 30 bp, Artificial Sequence
  Synthetic oligonucleotide
cggtactagaatacgtatgtgacccacgtt

SEQ ID NO: 71218 - DNA, 30 bp, Artificial Sequence
  Synthetic oligonucleotide
acgtctcccaactttagcggtagggacgtt

SEQ ID NO: 71219 - DNA, 30 bp, Artificial Sequence
  Synthetic oligonucleotide
gagagccgggtcccaggaacaagatacgtt

SEQ ID NO: 71220 - DNA, 31 bp, Artificial Sequence
  Synthetic oligonucleotide
cgtacactgttgcgatcctacaagctacgtt

SEQ ID NO: 71221 - DNA, 30 bp, Artificial Sequence
  Synthetic oligonucleotide
gggctaatagggaagaaaggggcacccgtt

SEQ ID NO: 71222 - DNA, 30 bp, Artificial Sequence
  Synthetic oligonucleotide
agaactagagggcaattcccgacatccgtt

SEQ ID NO: 71223 - DNA, 29 bp, Artificial Sequence
  Synthetic oligonucleotide
gggtaactggtcatcgtcccgatagcgtt

SEQ ID NO: 71224 - DNA, 30 bp, Artificial Sequence
  Synthetic oligonucleotide
cggagatacgcatacgaatgcaatcgcgtt

SEQ ID NO: 71225 - DNA, 30 bp, Artificial Sequence
  Synthetic oligonucleotide
cgcgcgactggaatggactcagggggcgtt

SEQ ID NO: 71226 - DNA, 30 bp, Artificial Sequence
  Synthetic oligonucleotide
tcacattactaatgccgacccgttatcgtt

SEQ ID NO: 71227 - DNA, 30 bp, Artificial Sequence
  Synthetic oligonucleotide
cgatatcagacgaggtagagtaggctcgtt

SEQ ID NO: 71228 - DNA, 30 bp, Artificial Sequence
  Synthetic oligonucleotide
gacatcggaaatatcggaggtaagttcgtt

SEQ ID NO: 71229 - DNA, 30 bp, Artificial Sequence
  Synthetic oligonucleotide
gtagggttgtagaggttaaagacgttcgtt

SEQ ID NO: 71230 - DNA, 30 bp, Artificial Sequence
  Synthetic oligonucleotide
gccggtataagcggtgggatacaaaaggtt

SEQ ID NO: 71231 - DNA, 30 bp, Artificial Sequence
  Synthetic oligonucleotide
cgatcacagcaaggctttaagaccaaggtt

SEQ ID NO: 71232 - DNA, 30 bp, Artificial Sequence
  Synthetic oligonucleotide
gcatgaagatccgagagagaccgagaggtt

SEQ ID NO: 71233 - DNA, 30 bp, Artificial Sequence
  Synthetic oligonucleotide
gggggggttcccgcacaagctaaggaggtt

SEQ ID NO: 71234 - DNA, 30 bp, Artificial Sequence
  Synthetic oligonucleotide
agcaaaaagggtggttatcaaatctaggtt

SEQ ID NO: 71235 - DNA, 30 bp, Artificial Sequence
  Synthetic oligonucleotide
cagtgatcagactaatcacacgagtaggtt

SEQ ID NO: 71236 - DNA, 30 bp, Artificial Sequence
  Synthetic oligonucleotide
ggaaagaccataaaggcatcggacagggtt

SEQ ID NO: 71237 - DNA, 30 bp, Artificial Sequence
  Synthetic oligonucleotide
acagtcggaggaagttgacatctgagggtt

SEQ ID NO: 71238 - DNA, 30 bp, Artificial Sequence
  Synthetic oligonucleotide
tcgtgaaccattagggacaaggcacgggtt

SEQ ID NO: 71239 - DNA, 30 bp, Artificial Sequence
  Synthetic oligonucleotide
tctgtacggtgaaaagagcgtccagtggtt

SEQ ID NO: 71240 - DNA, 30 bp, Artificial Sequence
  Synthetic oligonucleotide
ctagtggatcgcgaatcgaacttcaatgtt

SEQ ID NO: 71241 - DNA, 30 bp, Artificial Sequence
  Synthetic oligonucleotide
gtagggtggcacgcagagcttgcgaatgtt

SEQ ID NO: 71242 - DNA, 30 bp, Artificial Sequence
  Synthetic oligonucleotide
acgtccatggccggaacccaaaaggatgtt

SEQ ID NO: 71243 - DNA, 30 bp, Artificial Sequence
  Synthetic oligonucleotide
gaaatggctgaggaagcggagtgccctgtt

SEQ ID NO: 71244 - DNA, 30 bp, Artificial Sequence
  Synthetic oligonucleotide
acacctacaagggagaccgaatctcctgtt

SEQ ID NO: 71245 - DNA, 30 bp, Artificial Sequence
  Synthetic oligonucleotide
gtaggggcgcgagaaggaatagagtctgtt

SEQ ID NO: 71246 - DNA, 30 bp, Artificial Sequence
  Synthetic oligonucleotide
tggcctgaagaaagagctattggaagtgtt

SEQ ID NO: 71247 - DNA, 30 bp, Artificial Sequence
  Synthetic oligonucleotide
ctgtaaagaatgaatggataagtcagtgtt

SEQ ID NO: 71248 - DNA, 30 bp, Artificial Sequence
  Synthetic oligonucleotide
ccgtcaaggccccgctaacggtagagtgtt

SEQ ID NO: 71249 - DNA, 30 bp, Artificial Sequence
  Synthetic oligonucleotide
acgcgtgaccagctacgtctactgcgtgtt

SEQ ID NO: 71250 - DNA, 30 bp, Artificial Sequence
  Synthetic oligonucleotide
aacgacgatgagggttgcggcgtatgtgtt

SEQ ID NO: 71251 - DNA, 31 bp, Artificial Sequence
  Synthetic oligonucleotide
aaacccgataccgaaaatgagtgagattgtt

SEQ ID NO: 71252 - DNA, 30 bp, Artificial Sequence
  Synthetic oligonucleotide
gaagaaggcagagctcagcctcgtattgtt

SEQ ID NO: 71253 - DNA, 30 bp, Artificial Sequence
  Synthetic oligonucleotide
tgggtaagtccgtcaggaagaatccttgtt

SEQ ID NO: 71254 - DNA, 30 bp, Artificial Sequence
  Synthetic oligonucleotide
gcaaggagcctgtgatatactagacaattt

SEQ ID NO: 71255 - DNA, 30 bp, Artificial Sequence
  Synthetic oligonucleotide
agtgaaatatctcggttgggaaagtaattt

SEQ ID NO: 71256 - DNA, 30 bp, Artificial Sequence
  Synthetic oligonucleotide
tgcgaagccatgctcaacataggtacattt

SEQ ID NO: 71257 - DNA, 30 bp, Artificial Sequence
  Synthetic oligonucleotide
cagagggtagagcataagttaatctcattt

SEQ ID NO: 71258 - DNA, 30 bp, Artificial Sequence
  Synthetic oligonucleotide
aaaccgaacgaaggggcgaaagcgtcattt

SEQ ID NO: 71259 - DNA, 30 bp, Artificial Sequence
  Synthetic oligonucleotide
tgatacaaggggtccgtaccgtagagattt

SEQ ID NO: 71260 - DNA, 30 bp, Artificial Sequence
  Synthetic oligonucleotide
agccaacagaattaccgtgcgcgtagattt

SEQ ID NO: 71261 - DNA, 30 bp, Artificial Sequence
  Synthetic oligonucleotide
gcgggaggatcaacacttttccagctattt

SEQ ID NO: 71262 - DNA, 30 bp, Artificial Sequence
  Synthetic oligonucleotide
cgccatgaaactatagtgacagcctacttt

SEQ ID NO: 71263 - DNA, 30 bp, Artificial Sequence
  Synthetic oligonucleotide
gggaaaaagcacctaaacatcatctccttt

SEQ ID NO: 71264 - DNA, 30 bp, Artificial Sequence
  Synthetic oligonucleotide
tgggtgcgagccgatctgaaatgtcgcttt

SEQ ID NO: 71265 - DNA, 30 bp, Artificial Sequence
  Synthetic oligonucleotide
atgggggacgcatgtaagggagaattcttt

SEQ ID NO: 71266 - DNA, 30 bp, Artificial Sequence
  Synthetic oligonucleotide
cgagcgggtgcattaatatcggaaaagttt

SEQ ID NO: 71267 - DNA, 30 bp, Artificial Sequence
  Synthetic oligonucleotide
tggtataagagggacacttagcctaagttt

SEQ ID NO: 71268 - DNA, 30 bp, Artificial Sequence
  Synthetic oligonucleotide
gtggcggagattgagggactgcaagagttt

SEQ ID NO: 71269 - DNA, 30 bp, Artificial Sequence
  Synthetic oligonucleotide
gctggaaagcggaaattagtctagacgttt

SEQ ID NO: 71270 - DNA, 30 bp, Artificial Sequence
  Synthetic oligonucleotide
cgcaaaactaagagctcgaataagccgttt

SEQ ID NO: 71271 - DNA, 30 bp, Artificial Sequence
  Synthetic oligonucleotide
acactccaaagtaaaacgatgaataggttt

SEQ ID NO: 71272 - DNA, 30 bp, Artificial Sequence
  Synthetic oligonucleotide
aacgaatggacccaagtgagcgtgcggttt

SEQ ID NO: 71273 - DNA, 30 bp, Artificial Sequence
  Synthetic oligonucleotide
acaagtgcaggattcattaacaaggggttt

SEQ ID NO: 71274 - DNA, 30 bp, Artificial Sequence
  Synthetic oligonucleotide
tgcccataaatcaggatgtaatgaatgttt

SEQ ID NO: 71275 - DNA, 30 bp, Artificial Sequence
  Synthetic oligonucleotide
cagaggggaacaatagcgtcagtagatttt

SEQ ID NO: 71276 - DNA, 30 bp, Artificial Sequence
  Synthetic oligonucleotide
caaggggggcaagtgaaagttgagtatttt

SEQ ID NO: 71277 - DNA, 30 bp, Artificial Sequence
  Synthetic oligonucleotide
aaggggatgggcattcgcacgacaactttt

SEQ ID NO: 71278 - DNA, 30 bp, Artificial Sequence
  Synthetic oligonucleotide
aaaagagcgggggagggacaagtacctttt

SEQ ID NO: 71279 - DNA, 30 bp, Artificial Sequence
  Synthetic oligonucleotide
cgtgaaggacgggctggctccaccagtttt

SEQ ID NO: 71280 - DNA, 30 bp, Artificial Sequence
  Synthetic oligonucleotide
cacgccttaatagcgtaaatgaaatgtttt

SEQ ID NO: 71281 - DNA, 31 bp, Artificial Sequence
  Synthetic oligonucleotide
tcagcttcgaggtaaaacgggaaatattttt

SEQ ID NO: 71282 - DNA, 30 bp, Artificial Sequence
  Synthetic oligonucleotide
aggtcatccggtgaccaataggtaaaaaaa

SEQ ID NO: 71283 - DNA, 30 bp, Artificial Sequence
  Synthetic oligonucleotide
agtggtggataaactacttggatcaaaaaa

SEQ ID NO: 71284 - DNA, 30 bp, Artificial Sequence
  Synthetic oligonucleotide
aggacagacgaggaacctctttggaaaaaa

SEQ ID NO: 71285 - DNA, 30 bp, Artificial Sequence
  Synthetic oligonucleotide
ccgtttcaagtcactctggtcccacaaaaa

SEQ ID NO: 71286 - DNA, 30 bp, Artificial Sequence
  Synthetic oligonucleotide
aagcgtgaattaactagagatgcccaaaaa

SEQ ID NO: 71287 - DNA, 30 bp, Artificial Sequence
  Synthetic oligonucleotide
gggccgattagcattgacaaccctcaaaaa

SEQ ID NO: 71288 - DNA, 30 bp, Artificial Sequence
  Synthetic oligonucleotide
cctggaggcaggcccgtaagcgcggaaaaa

SEQ ID NO: 71289 - DNA, 30 bp, Artificial Sequence
  Synthetic oligonucleotide
agaaagggaagggttaccctgattgaaaaa

SEQ ID NO: 71290 - DNA, 30 bp, Artificial Sequence
  Synthetic oligonucleotide
aacataaacattccgacataaggttaaaaa

SEQ ID NO: 71291 - DNA, 30 bp, Artificial Sequence
  Synthetic oligonucleotide
ggagacggaacaactgactctttaacaaaa

SEQ ID NO: 71292 - DNA, 30 bp, Artificial Sequence
  Synthetic oligonucleotide
taagtgagatcgcatgtgggcaatacaaaa

SEQ ID NO: 71293 - DNA, 30 bp, Artificial Sequence
  Synthetic oligonucleotide
accgatgataaatggcagctgcggccaaaa

SEQ ID NO: 71294 - DNA, 30 bp, Artificial Sequence
  Synthetic oligonucleotide
acgtaataaagtgttgccgcatctccaaaa

SEQ ID NO: 71295 - DNA, 30 bp, Artificial Sequence
  Synthetic oligonucleotide
gacgtccaaacctggacttgcggtccaaaa

SEQ ID NO: 71296 - DNA, 30 bp, Artificial Sequence
  Synthetic oligonucleotide
tgacagatccgatgattcgggtgagcaaaa

SEQ ID NO: 71297 - DNA, 30 bp, Artificial Sequence
  Synthetic oligonucleotide
gacctcaaaataacgcggacctcggcaaaa

SEQ ID NO: 71298 - DNA, 30 bp, Artificial Sequence
  Synthetic oligonucleotide
agggggtagtcgtattttcgcatggcaaaa

SEQ ID NO: 71299 - DNA, 30 bp, Artificial Sequence
  Synthetic oligonucleotide
atgaggtcatcatagtatcggatggcaaaa

SEQ ID NO: 71300 - DNA, 30 bp, Artificial Sequence
  Synthetic oligonucleotide
tgttacagccgattagggagattggcaaaa

SEQ ID NO: 71301 - DNA, 30 bp, Artificial Sequence
  Synthetic oligonucleotide
agggtcagattaaaactctcatattcaaaa

SEQ ID NO: 71302 - DNA, 30 bp, Artificial Sequence
  Synthetic oligonucleotide
tgagaggcagagcacctattccgttcaaaa

SEQ ID NO: 71303 - DNA, 30 bp, Artificial Sequence
  Synthetic oligonucleotide
cacaagaatatagacgatagacaccgaaaa

SEQ ID NO: 71304 - DNA, 30 bp, Artificial Sequence
  Synthetic oligonucleotide
ttggcagttatcagcaatacagatcgaaaa

SEQ ID NO: 71305 - DNA, 30 bp, Artificial Sequence
  Synthetic oligonucleotide
cggcatgcacgcgggtagctcaaaggaaaa

SEQ ID NO: 71306 - DNA, 30 bp, Artificial Sequence
  Synthetic oligonucleotide
gtgtgatctaacacacgtacagacggaaaa

SEQ ID NO: 71307 - DNA, 30 bp, Artificial Sequence
  Synthetic oligonucleotide
gggccgtcgcataatggagaccccggaaaa

SEQ ID NO: 71308 - DNA, 30 bp, Artificial Sequence
  Synthetic oligonucleotide
gtaagaggtggcggtggtaatccgggaaaa

SEQ ID NO: 71309 - DNA, 30 bp, Artificial Sequence
  Synthetic oligonucleotide
ttgacatatcgtaagcgacacgtgggaaaa

SEQ ID NO: 71310 - DNA, 30 bp, Artificial Sequence
  Synthetic oligonucleotide
catgagctgaccaacacgaggttgggaaaa

SEQ ID NO: 71311 - DNA, 31 bp, Artificial Sequence
  Synthetic oligonucleotide
tacaagtgcgaaatgagttgttagtggaaaa

SEQ ID NO: 71312 - DNA, 30 bp, Artificial Sequence
  Synthetic oligonucleotide
ctgcacttcccgcatgaccaacggtgaaaa

SEQ ID NO: 71313 - DNA, 30 bp, Artificial Sequence
  Synthetic oligonucleotide
gcgtaacttctaactaaaggcattgtaaaa

SEQ ID NO: 71314 - DNA, 30 bp, Artificial Sequence
  Synthetic oligonucleotide
acgacactcagatccgttaattgcttaaaa

SEQ ID NO: 71315 - DNA, 30 bp, Artificial Sequence
  Synthetic oligonucleotide
acgtggaattacataaaatttgggttaaaa

SEQ ID NO: 71316 - DNA, 30 bp, Artificial Sequence
  Synthetic oligonucleotide
tcatgggatattagtagctctgcgaacaaa

SEQ ID NO: 71317 - DNA, 30 bp, Artificial Sequence
  Synthetic oligonucleotide
ctacatggtttggatcttgtggctaacaaa

SEQ ID NO: 71318 - DNA, 30 bp, Artificial Sequence
  Synthetic oligonucleotide
gcagactcgcgttttacagaaccacacaaa

SEQ ID NO: 71319 - DNA, 30 bp, Artificial Sequence
  Synthetic oligonucleotide
tgtagtaaaaccaagaaggctagccacaaa

SEQ ID NO: 71320 - DNA, 30 bp, Artificial Sequence
  Synthetic oligonucleotide
acagtgctacggcgccgaaagcatcacaaa

SEQ ID NO: 71321 - DNA, 31 bp, Artificial Sequence
  Synthetic oligonucleotide
tggacaacggtctgaaggcgcaatcgacaaa

SEQ ID NO: 71322 - DNA, 30 bp, Artificial Sequence
  Synthetic oligonucleotide
gcgacaacttgattgggtactaaggacaaa

SEQ ID NO: 71323 - DNA, 30 bp, Artificial Sequence
  Synthetic oligonucleotide
cggtttggtgcaaggcaacaaagtgacaaa

SEQ ID NO: 71324 - DNA, 30 bp, Artificial Sequence
  Synthetic oligonucleotide
gaaggtgagccaggtgttcatacctacaaa

SEQ ID NO: 71325 - DNA, 30 bp, Artificial Sequence
  Synthetic oligonucleotide
ccgatattatattgcaatcagcccaccaaa

SEQ ID NO: 71326 - DNA, 30 bp, Artificial Sequence
  Synthetic oligonucleotide
agtgaaaacgtaagatatcgcacgaccaaa

SEQ ID NO: 71327 - DNA, 30 bp, Artificial Sequence
  Synthetic oligonucleotide
acgcggtccccaaactgtcttgtgaccaaa

SEQ ID NO: 71328 - DNA, 30 bp, Artificial Sequence
  Synthetic oligonucleotide
agcggaaagtcctcaatgatacctaccaaa

SEQ ID NO: 71329 - DNA, 30 bp, Artificial Sequence
  Synthetic oligonucleotide
gtcaaacacgggatttagaagcgtaccaaa

SEQ ID NO: 71330 - DNA, 30 bp, Artificial Sequence
  Synthetic oligonucleotide
ggaataggaaaccgagaggaaacacccaaa

SEQ ID NO: 71331 - DNA, 30 bp, Artificial Sequence
  Synthetic oligonucleotide
aggtgggacgttacatacggctgcgccaaa

SEQ ID NO: 71332 - DNA, 30 bp, Artificial Sequence
  Synthetic oligonucleotide
gacaaaacggtggatcactatatcgccaaa

SEQ ID NO: 71333 - DNA, 30 bp, Artificial Sequence
  Synthetic oligonucleotide
tagagagatcaccttataacggtaagcaaa

SEQ ID NO: 71334 - DNA, 30 bp, Artificial Sequence
  Synthetic oligonucleotide
cacaccagataaaccggaatcccgagcaaa

SEQ ID NO: 71335 - DNA, 30 bp, Artificial Sequence
  Synthetic oligonucleotide
aatgggcgccaacgactgagctttagcaaa

SEQ ID NO: 71336 - DNA, 30 bp, Artificial Sequence
  Synthetic oligonucleotide
tcgacaaattgacgatgtagaggacgcaaa

SEQ ID NO: 71337 - DNA, 30 bp, Artificial Sequence
  Synthetic oligonucleotide
ctgctccaaaaagagcgataagcaggcaaa

SEQ ID NO: 71338 - DNA, 30 bp, Artificial Sequence
  Synthetic oligonucleotide
acaaggtgctcatagttgacgtcatgcaaa

SEQ ID NO: 71339 - DNA, 30 bp, Artificial Sequence
  Synthetic oligonucleotide
tcgtagccccagctcgtgtggacgtgcaaa

SEQ ID NO: 71340 - DNA, 30 bp, Artificial Sequence
  Synthetic oligonucleotide
tctgcctgtggagtaaggtagcggtgcaaa

SEQ ID NO: 71341 - DNA, 30 bp, Artificial Sequence
  Synthetic oligonucleotide
cgtaatagaaacatatcggtaccttgcaaa

SEQ ID NO: 71342 - DNA, 30 bp, Artificial Sequence
  Synthetic oligonucleotide
cgttacacgctgatacataatctttgcaaa

SEQ ID NO: 71343 - DNA, 30 bp, Artificial Sequence
  Synthetic oligonucleotide
ttgggtgagaagacaggcttgggcatcaaa

SEQ ID NO: 71344 - DNA, 30 bp, Artificial Sequence
  Synthetic oligonucleotide
ggcgacgataatggtctttagtcgatcaaa

SEQ ID NO: 71345 - DNA, 30 bp, Artificial Sequence
  Synthetic oligonucleotide
gacaacgtgtcgatggaagtgtgtatcaaa

SEQ ID NO: 71346 - DNA, 30 bp, Artificial Sequence
  Synthetic oligonucleotide
tctgggctacatgcgccgtctaaactcaaa

SEQ ID NO: 71347 - DNA, 30 bp, Artificial Sequence
  Synthetic oligonucleotide
gagaagatgcaaattcatcgagagctcaaa

SEQ ID NO: 71348 - DNA, 30 bp, Artificial Sequence
  Synthetic oligonucleotide
ctcgcactcaagctggagtgcccgctcaaa

SEQ ID NO: 71349 - DNA, 30 bp, Artificial Sequence
  Synthetic oligonucleotide
aggtgctaggatgagagaagcgttctcaaa

SEQ ID NO: 71350 - DNA, 30 bp, Artificial Sequence
  Synthetic oligonucleotide
agtgatgctcttgcgccaatagaagtcaaa

SEQ ID NO: 71351 - DNA, 30 bp, Artificial Sequence
  Synthetic oligonucleotide
gtgcgactccccatccaacgtgtcgtcaaa

SEQ ID NO: 71352 - DNA, 30 bp, Artificial Sequence
  Synthetic oligonucleotide
ttagggacagacaagacgttgaaggtcaaa

SEQ ID NO: 71353 - DNA, 30 bp, Artificial Sequence
  Synthetic oligonucleotide
atctaacgggaacactggtgttgtttcaaa

SEQ ID NO: 71354 - DNA, 30 bp, Artificial Sequence
  Synthetic oligonucleotide
cacggtcaccacactggtattattttcaaa

SEQ ID NO: 71355 - DNA, 30 bp, Artificial Sequence
  Synthetic oligonucleotide
agggaccaaactcgtacaacactcaagaaa

SEQ ID NO: 71356 - DNA, 30 bp, Artificial Sequence
  Synthetic oligonucleotide
gccaagttcaccataggttagtcccagaaa

SEQ ID NO: 71357 - DNA, 30 bp, Artificial Sequence
  Synthetic oligonucleotide
acgcgggatggatgtgcgttactgcagaaa

SEQ ID NO: 71358 - DNA, 30 bp, Artificial Sequence
  Synthetic oligonucleotide
cggattcagaagcagttcaattgtcagaaa

SEQ ID NO: 71359 - DNA, 30 bp, Artificial Sequence
  Synthetic oligonucleotide
caggaataattaccagcaatgaatgagaaa

SEQ ID NO: 71360 - DNA, 30 bp, Artificial Sequence
  Synthetic oligonucleotide
aggtcgcgtaagcggggcgcacgtgagaaa

SEQ ID NO: 71361 - DNA, 30 bp, Artificial Sequence
  Synthetic oligonucleotide
ctagcacaggttcgaaaatgcgttgagaaa

SEQ ID NO: 71362 - DNA, 30 bp, Artificial Sequence
  Synthetic oligonucleotide
ctgcgccaggcacatgcgggccaatagaaa

SEQ ID NO: 71363 - DNA, 30 bp, Artificial Sequence
  Synthetic oligonucleotide
ggctaacaagaagggccatggaattagaaa

SEQ ID NO: 71364 - DNA, 28 bp, Artificial Sequence
  Synthetic oligonucleotide
agtggccaaggcgagaaagtattagaaa

SEQ ID NO: 71365 - DNA, 30 bp, Artificial Sequence
  Synthetic oligonucleotide
gagtagctttaaagacaaactcgcacgaaa

SEQ ID NO: 71366 - DNA, 30 bp, Artificial Sequence
  Synthetic oligonucleotide
ccgcattatgtgtaagtagcggtcccgaaa

SEQ ID NO: 71367 - DNA, 30 bp, Artificial Sequence
  Synthetic oligonucleotide
gtgcgtccggaataataatatttcgcgaaa

SEQ ID NO: 71368 - DNA, 30 bp, Artificial Sequence
  Synthetic oligonucleotide
taagacatagacctcaaacaaaatgcgaaa

SEQ ID NO: 71369 - DNA, 30 bp, Artificial Sequence
  Synthetic oligonucleotide
tagagttggtggaaccactaaattgcgaaa

SEQ ID NO: 71370 - DNA, 30 bp, Artificial Sequence
  Synthetic oligonucleotide
gctcaaccgacaagcgtcgcataatcgaaa

SEQ ID NO: 71371 - DNA, 30 bp, Artificial Sequence
  Synthetic oligonucleotide
tacacgggacaggtccacgacgtatcgaaa

SEQ ID NO: 71372 - DNA, 30 bp, Artificial Sequence
  Synthetic oligonucleotide
tcggctgcacagggaacatgagggaggaaa

SEQ ID NO: 71373 - DNA, 30 bp, Artificial Sequence
  Synthetic oligonucleotide
gcggaacgccagttaggccagacgcggaaa

SEQ ID NO: 71374 - DNA, 30 bp, Artificial Sequence
  Synthetic oligonucleotide
atcaagagccagtcttatgtgtgagggaaa

SEQ ID NO: 71375 - DNA, 30 bp, Artificial Sequence
  Synthetic oligonucleotide
gtcgaccaatacttgtactattacgggaaa

SEQ ID NO: 71376 - DNA, 30 bp, Artificial Sequence
  Synthetic oligonucleotide
gcctccacgttacaagaatgcatcgggaaa

SEQ ID NO: 71377 - DNA, 30 bp, Artificial Sequence
  Synthetic oligonucleotide
gggcaaatccgaagctgagaattcgggaaa

SEQ ID NO: 71378 - DNA, 30 bp, Artificial Sequence
  Synthetic oligonucleotide
cgaaacctggttccttccgtcttggggaaa

SEQ ID NO: 71379 - DNA, 30 bp, Artificial Sequence
  Synthetic oligonucleotide
taggccaaaactgaggtgatgatatggaaa

SEQ ID NO: 71380 - DNA, 30 bp, Artificial Sequence
  Synthetic oligonucleotide
gatagacggcatgtttatgtacagatgaaa

SEQ ID NO: 71381 - DNA, 30 bp, Artificial Sequence
  Synthetic oligonucleotide
aaacacgacgaaacgataatccctatgaaa

SEQ ID NO: 71382 - DNA, 30 bp, Artificial Sequence
  Synthetic oligonucleotide
cagggctcggacctagcagcgagactgaaa

SEQ ID NO: 71383 - DNA, 30 bp, Artificial Sequence
  Synthetic oligonucleotide
cttacgatgcgcggacgaaatcaagtgaaa

SEQ ID NO: 71384 - DNA, 30 bp, Artificial Sequence
  Synthetic oligonucleotide
acacgtgcgaactatgccgatcacgtgaaa

SEQ ID NO: 71385 - DNA, 30 bp, Artificial Sequence
  Synthetic oligonucleotide
ctggtcgaagggggcttgagcataaataaa

SEQ ID NO: 71386 - DNA, 30 bp, Artificial Sequence
  Synthetic oligonucleotide
atgccaggaacaaagcaagcaaccaataaa

SEQ ID NO: 71387 - DNA, 30 bp, Artificial Sequence
  Synthetic oligonucleotide
ggtacgatagcccgacatactgtcaataaa

SEQ ID NO: 71388 - DNA, 30 bp, Artificial Sequence
  Synthetic oligonucleotide
ggcatacatatgactatcggccagaataaa

SEQ ID NO: 71389 - DNA, 30 bp, Artificial Sequence
  Synthetic oligonucleotide
cattctccgagaggacaaagcatgaataaa

SEQ ID NO: 71390 - DNA, 30 bp, Artificial Sequence
  Synthetic oligonucleotide
aaggatgcaccaagtctgtcgattaataaa

SEQ ID NO: 71391 - DNA, 30 bp, Artificial Sequence
  Synthetic oligonucleotide
atgatcgtgtcctacatgaaaccacataaa

SEQ ID NO: 71392 - DNA, 30 bp, Artificial Sequence
  Synthetic oligonucleotide
cgatcgagttcgtagatgctggcgcataaa

SEQ ID NO: 71393 - DNA, 30 bp, Artificial Sequence
  Synthetic oligonucleotide
gtaagcagcagttgatctcagaacgataaa

SEQ ID NO: 71394 - DNA, 30 bp, Artificial Sequence
  Synthetic oligonucleotide
tcatagtgctgttataaccaacacgataaa

SEQ ID NO: 71395 - DNA, 30 bp, Artificial Sequence
  Synthetic oligonucleotide
gcaaccaacaactgggacttcgactataaa

SEQ ID NO: 71396 - DNA, 30 bp, Artificial Sequence
  Synthetic oligonucleotide
ataccagggatcggagtgccacggtataaa

SEQ ID NO: 71397 - DNA, 30 bp, Artificial Sequence
  Synthetic oligonucleotide
cgcgtggtggcgtaggcacacatgtataaa

SEQ ID NO: 71398 - DNA, 30 bp, Artificial Sequence
  Synthetic oligonucleotide
cgaataatggcatctccgaacgtcactaaa

SEQ ID NO: 71399 - DNA, 30 bp, Artificial Sequence
  Synthetic oligonucleotide
tcagatcgagagaaagtaacgagtactaaa

SEQ ID NO: 71400 - DNA, 30 bp, Artificial Sequence
  Synthetic oligonucleotide
ggtgtggacagcaagagctcaagacctaaa

SEQ ID NO: 71401 - DNA, 30 bp, Artificial Sequence
  Synthetic oligonucleotide
gccattagcggaccgaacccagcggctaaa

SEQ ID NO: 71402 - DNA, 30 bp, Artificial Sequence
  Synthetic oligonucleotide
gtgatatatgataatcgcaagaagagtaaa

SEQ ID NO: 71403 - DNA, 30 bp, Artificial Sequence
  Synthetic oligonucleotide
ggagctgaaacggcactactaagtagtaaa

SEQ ID NO: 71404 - DNA, 30 bp, Artificial Sequence
  Synthetic oligonucleotide
agtagcggataggccttgatgggtcgtaaa

SEQ ID NO: 71405 - DNA, 30 bp, Artificial Sequence
  Synthetic oligonucleotide
agggtacaggcggtaattccgacaggtaaa

SEQ ID NO: 71406 - DNA, 30 bp, Artificial Sequence
  Synthetic oligonucleotide
ccgcaatcctccggctgtagatcaggtaaa

SEQ ID NO: 71407 - DNA, 30 bp, Artificial Sequence
  Synthetic oligonucleotide
atgcacacgccgaagctgaacaggggtaaa

SEQ ID NO: 71408 - DNA, 30 bp, Artificial Sequence
  Synthetic oligonucleotide
tcgggaatggtcgtttaaccagcacttaaa

SEQ ID NO: 71409 - DNA, 30 bp, Artificial Sequence
  Synthetic oligonucleotide
acataagggtaaaattcgcagtatgttaaa

SEQ ID NO: 71410 - DNA, 30 bp, Artificial Sequence
  Synthetic oligonucleotide
gtcagaaatctaaagatgtcaaggcaacaa

SEQ ID NO: 71411 - DNA, 30 bp, Artificial Sequence
  Synthetic oligonucleotide
ctagagcatgttggagtgcgcattcaacaa

SEQ ID NO: 71412 - DNA, 30 bp, Artificial Sequence
  Synthetic oligonucleotide
gttcccgaacaactggaacgaactgaacaa

SEQ ID NO: 71413 - DNA, 30 bp, Artificial Sequence
  Synthetic oligonucleotide
gggcgtacatgtgttcagcgtgattaacaa

SEQ ID NO: 71414 - DNA, 30 bp, Artificial Sequence
  Synthetic oligonucleotide
ccgcctagcgatagggcaaggtgttaacaa

SEQ ID NO: 71415 - DNA, 30 bp, Artificial Sequence
  Synthetic oligonucleotide
ataaatgacagcatcctgaacaccacacaa

SEQ ID NO: 71416 - DNA, 30 bp, Artificial Sequence
  Synthetic oligonucleotide
tttgaccaacggaggccgacacgcacacaa

SEQ ID NO: 71417 - DNA, 29 bp, Artificial Sequence
  Synthetic oligonucleotide
gaacacgggtcgcacggaatcgcacacaa

SEQ ID NO: 71418 - DNA, 30 bp, Artificial Sequence
  Synthetic oligonucleotide
acgtatgagtcctagcgatggacaccacaa

SEQ ID NO: 71419 - DNA, 30 bp, Artificial Sequence
  Synthetic oligonucleotide
gggtagcggacgccgggagaatgaccacaa

SEQ ID NO: 71420 - DNA, 30 bp, Artificial Sequence
  Synthetic oligonucleotide
tggtgattaattaggggggttcaagcacaa

SEQ ID NO: 71421 - DNA, 30 bp, Artificial Sequence
  Synthetic oligonucleotide
gtattaagcggtgacgatgggttgagacaa

SEQ ID NO: 71422 - DNA, 30 bp, Artificial Sequence
  Synthetic oligonucleotide
ccataggatcggacgtctacctcacgacaa

SEQ ID NO: 71423 - DNA, 30 bp, Artificial Sequence
  Synthetic oligonucleotide
tacgactccatagcgctatggttacgacaa

SEQ ID NO: 71424 - DNA, 30 bp, Artificial Sequence
  Synthetic oligonucleotide
agatccaggaataagcgtgcaaaccgacaa

SEQ ID NO: 71425 - DNA, 30 bp, Artificial Sequence
  Synthetic oligonucleotide
actttcaccggagtacgaagtcagcgacaa

SEQ ID NO: 71426 - DNA, 30 bp, Artificial Sequence
  Synthetic oligonucleotide
taggtcgcgttgtgtattacgaatcgacaa

SEQ ID NO: 71427 - DNA, 30 bp, Artificial Sequence
  Synthetic oligonucleotide
gacactggtcaaataatctgtagaggacaa

SEQ ID NO: 71428 - DNA, 30 bp, Artificial Sequence
  Synthetic oligonucleotide
aggttcttgggaatcgacataatcggacaa

SEQ ID NO: 71429 - DNA, 30 bp, Artificial Sequence
  Synthetic oligonucleotide
gacagtgcacctccttggaaatggggacaa

SEQ ID NO: 71430 - DNA, 30 bp, Artificial Sequence
  Synthetic oligonucleotide
caagtggaaggtatcttcccagtgggacaa

SEQ ID NO: 71431 - DNA, 30 bp, Artificial Sequence
  Synthetic oligonucleotide
caaacattcttggtagggtatgatggacaa

SEQ ID NO: 71432 - DNA, 30 bp, Artificial Sequence
  Synthetic oligonucleotide
cagggtcctacgtgcaatactcaatgacaa

SEQ ID NO: 71433 - DNA, 30 bp, Artificial Sequence
  Synthetic oligonucleotide
caacctattagctcaccgaaaacactacaa

SEQ ID NO: 71434 - DNA, 30 bp, Artificial Sequence
  Synthetic oligonucleotide
gcatacattagggagcacagcctagtacaa

SEQ ID NO: 71435 - DNA, 30 bp, Artificial Sequence
  Synthetic oligonucleotide
tcggcggagtgggcgttacacttggtacaa

SEQ ID NO: 71436 - DNA, 30 bp, Artificial Sequence
  Synthetic oligonucleotide
agccaatcaacactactttttgttgtacaa

SEQ ID NO: 71437 - DNA, 30 bp, Artificial Sequence
  Synthetic oligonucleotide
ttggcttaccgtacagaccacgagttacaa

SEQ ID NO: 71438 - DNA, 30 bp, Artificial Sequence
  Synthetic oligonucleotide
acccgctaataaaccagggtcaataaccaa

SEQ ID NO: 71439 - DNA, 30 bp, Artificial Sequence
  Synthetic oligonucleotide
cttgcctgcggaggtggcgtgaccgaccaa

SEQ ID NO: 71440 - DNA, 30 bp, Artificial Sequence
  Synthetic oligonucleotide
acgcccacactgtaaacatacctcacccaa

SEQ ID NO: 71441 - DNA, 30 bp, Artificial Sequence
  Synthetic oligonucleotide
tctgatacgaagcgaaggctaataccccaa

SEQ ID NO: 71442 - DNA, 30 bp, Artificial Sequence
  Synthetic oligonucleotide
cctgtgagggaactcggagtgataccccaa

SEQ ID NO: 71443 - DNA, 30 bp, Artificial Sequence
  Synthetic oligonucleotide
agctacgatttgaccacattgactccccaa

SEQ ID NO: 71444 - DNA, 30 bp, Artificial Sequence
  Synthetic oligonucleotide
tagaagaacgtgagtgggcagcaggcccaa

SEQ ID NO: 71445 - DNA, 30 bp, Artificial Sequence
  Synthetic oligonucleotide
gtcgcggtcaacggaataaagccatcccaa

SEQ ID NO: 71446 - DNA, 30 bp, Artificial Sequence
  Synthetic oligonucleotide
gggtaaaaggaaaaccagatatagtcccaa

SEQ ID NO: 71447 - DNA, 30 bp, Artificial Sequence
  Synthetic oligonucleotide
ccggaaggtgtgaggcgctcttgaagccaa

SEQ ID NO: 71448 - DNA, 30 bp, Artificial Sequence
  Synthetic oligonucleotide
tcagaagttataaactggttccatagccaa

SEQ ID NO: 71449 - DNA, 30 bp, Artificial Sequence
  Synthetic oligonucleotide
taaagacacaaacttgtagggacacgccaa

SEQ ID NO: 71450 - DNA, 30 bp, Artificial Sequence
  Synthetic oligonucleotide
gtggacagagtgatcgttaacctaggccaa

SEQ ID NO: 71451 - DNA, 30 bp, Artificial Sequence
  Synthetic oligonucleotide
ccttcaaatccggtcaggcgaaacggccaa

SEQ ID NO: 71452 - DNA, 30 bp, Artificial Sequence
  Synthetic oligonucleotide
gtgcgagctacagtagaagacggcggccaa

SEQ ID NO: 71453 - DNA, 30 bp, Artificial Sequence
  Synthetic oligonucleotide
tccaaaatgggggaattatcggggtgccaa

SEQ ID NO: 71454 - DNA, 30 bp, Artificial Sequence
  Synthetic oligonucleotide
cgtcttaggggcgggtattaaaattgccaa

SEQ ID NO: 71455 - DNA, 30 bp, Artificial Sequence
  Synthetic oligonucleotide
agccgcgatcaagagtgattaactgtccaa

SEQ ID NO: 71456 - DNA, 30 bp, Artificial Sequence
  Synthetic oligonucleotide
atgtcctttcaacaccaatcattaaagcaa

SEQ ID NO: 71457 - DNA, 30 bp, Artificial Sequence
  Synthetic oligonucleotide
cccaggagcagagattgtcatcgcaagcaa

SEQ ID NO: 71458 - DNA, 30 bp, Artificial Sequence
  Synthetic oligonucleotide
agcaccacctggattcaaacgcttaagcaa

SEQ ID NO: 71459 - DNA, 30 bp, Artificial Sequence
  Synthetic oligonucleotide
acgtgttgtgtgcccatacaaaaccagcaa

SEQ ID NO: 71460 - DNA, 30 bp, Artificial Sequence
  Synthetic oligonucleotide
tacggcagatagtgttgataaaggcagcaa

SEQ ID NO: 71461 - DNA, 30 bp, Artificial Sequence
  Synthetic oligonucleotide
tacgtcgtgggcaagtctagcatgcagcaa

SEQ ID NO: 71462 - DNA, 30 bp, Artificial Sequence
  Synthetic oligonucleotide
tgtaagcgagggtggatagatcggtagcaa

SEQ ID NO: 71463 - DNA, 30 bp, Artificial Sequence
  Synthetic oligonucleotide
aatatggtgaagcgataagatatgtagcaa

SEQ ID NO: 71464 - DNA, 30 bp, Artificial Sequence
  Synthetic oligonucleotide
ttccactgtataacttaagaggtgtagcaa

SEQ ID NO: 71465 - DNA, 30 bp, Artificial Sequence
  Synthetic oligonucleotide
acaccagggggataggtagagaaaacgcaa

SEQ ID NO: 71466 - DNA, 30 bp, Artificial Sequence
  Synthetic oligonucleotide
tgcgcaggagcgagggaaagaagtacgcaa

SEQ ID NO: 71467 - DNA, 30 bp, Artificial Sequence
  Synthetic oligonucleotide
gtcaactctgatttaagatagggaccgcaa

SEQ ID NO: 71468 - DNA, 30 bp, Artificial Sequence
  Synthetic oligonucleotide
cctagacggagcgtggactgggggtcgcaa

SEQ ID NO: 71469 - DNA, 30 bp, Artificial Sequence
  Synthetic oligonucleotide
aacggacgaaggccaggatttatgtcgcaa

SEQ ID NO: 71470 - DNA, 30 bp, Artificial Sequence
  Synthetic oligonucleotide
aagaatcatccgtcattagccccaaggcaa

SEQ ID NO: 71471 - DNA, 30 bp, Artificial Sequence
  Synthetic oligonucleotide
ttaaggtacgatgctcgtgcgagtgggcaa

SEQ ID NO: 71472 - DNA, 30 bp, Artificial Sequence
  Synthetic oligonucleotide
gtatggcgcgtaattcaggacagcatgcaa

SEQ ID NO: 71473 - DNA, 30 bp, Artificial Sequence
  Synthetic oligonucleotide
tcctgcttgtcgaattcgaacagtatgcaa

SEQ ID NO: 71474 - DNA, 30 bp, Artificial Sequence
  Synthetic oligonucleotide
cagcacacagtttactagagctgtatgcaa

SEQ ID NO: 71475 - DNA, 30 bp, Artificial Sequence
  Synthetic oligonucleotide
aagatccaaggcgtccaggagccactgcaa

SEQ ID NO: 71476 - DNA, 30 bp, Artificial Sequence
  Synthetic oligonucleotide
acacgatatgacctacaacaatgtctgcaa

SEQ ID NO: 71477 - DNA, 30 bp, Artificial Sequence
  Synthetic oligonucleotide
ttgagtcattaaccgcctggatacaatcaa

SEQ ID NO: 71478 - DNA, 30 bp, Artificial Sequence
  Synthetic oligonucleotide
ggagctgcacctaaggtactagtgaatcaa

SEQ ID NO: 71479 - DNA, 30 bp, Artificial Sequence
  Synthetic oligonucleotide
cggtaggataactaactatgtacacatcaa

SEQ ID NO: 71480 - DNA, 30 bp, Artificial Sequence
  Synthetic oligonucleotide
cactgcatcaactataaggcgatgcatcaa

SEQ ID NO: 71481 - DNA, 30 bp, Artificial Sequence
  Synthetic oligonucleotide
gcatacagggaggcctgtggatgtcatcaa

SEQ ID NO: 71482 - DNA, 30 bp, Artificial Sequence
  Synthetic oligonucleotide
tcttaagcgatcctggaccatcaatatcaa

SEQ ID NO: 71483 - DNA, 30 bp, Artificial Sequence
  Synthetic oligonucleotide
gcgaggatatgacgcaaaagtacgtatcaa

SEQ ID NO: 71484 - DNA, 30 bp, Artificial Sequence
  Synthetic oligonucleotide
tcgggataagttcgtgtcttcctgcctcaa

SEQ ID NO: 71485 - DNA, 30 bp, Artificial Sequence
  Synthetic oligonucleotide
gcggattgatcggtgagcgccagagctcaa

SEQ ID NO: 71486 - DNA, 30 bp, Artificial Sequence
  Synthetic oligonucleotide
tgtccaagccgaaagttggtccgatctcaa

SEQ ID NO: 71487 - DNA, 30 bp, Artificial Sequence
  Synthetic oligonucleotide
acgggatttatggcaaaatagcaaagtcaa

SEQ ID NO: 71488 - DNA, 30 bp, Artificial Sequence
  Synthetic oligonucleotide
taaaggggaggacgtggtaccagcagtcaa

SEQ ID NO: 71489 - DNA, 30 bp, Artificial Sequence
  Synthetic oligonucleotide
gggctcattagtggaatactttgcagtcaa

SEQ ID NO: 71490 - DNA, 30 bp, Artificial Sequence
  Synthetic oligonucleotide
cgtcctatggatgtaatccaaatcagtcaa

SEQ ID NO: 71491 - DNA, 30 bp, Artificial Sequence
  Synthetic oligonucleotide
acaggcctgcctctgggaaaaacgagtcaa

SEQ ID NO: 71492 - DNA, 30 bp, Artificial Sequence
  Synthetic oligonucleotide
ccgacgataagaaccagtccgctgagtcaa

SEQ ID NO: 71493 - DNA, 30 bp, Artificial Sequence
  Synthetic oligonucleotide
acaggaagtcatcttgatcgaagaggtcaa

SEQ ID NO: 71494 - DNA, 30 bp, Artificial Sequence
  Synthetic oligonucleotide
gcgtgaggtaaagtaggctgggtgggtcaa

SEQ ID NO: 71495 - DNA, 30 bp, Artificial Sequence
  Synthetic oligonucleotide
ttgggcgatgagctacttgaagctggtcaa

SEQ ID NO: 71496 - DNA, 30 bp, Artificial Sequence
  Synthetic oligonucleotide
tggaacggaacggattagactggatgtcaa

SEQ ID NO: 71497 - DNA, 30 bp, Artificial Sequence
  Synthetic oligonucleotide
gtggtgggacgcacttaactcgtatgtcaa

SEQ ID NO: 71498 - DNA, 30 bp, Artificial Sequence
  Synthetic oligonucleotide
gactgaatacatgcggaagccacgattcaa

SEQ ID NO: 71499 - DNA, 30 bp, Artificial Sequence
  Synthetic oligonucleotide
catatggattaaaagagtgcaattattcaa

SEQ ID NO: 71500 - DNA, 30 bp, Artificial Sequence
  Synthetic oligonucleotide
gctacgggaaaacccagcccatgccttcaa

SEQ ID NO: 71501 - DNA, 30 bp, Artificial Sequence
  Synthetic oligonucleotide
cggaacaattagattaacgtatgcgttcaa

SEQ ID NO: 71502 - DNA, 30 bp, Artificial Sequence
  Synthetic oligonucleotide
atgctcgagtaacgaacgggggactttcaa

SEQ ID NO: 71503 - DNA, 30 bp, Artificial Sequence
  Synthetic oligonucleotide
acgccaacctatctttaggactcctttcaa

SEQ ID NO: 71504 - DNA, 30 bp, Artificial Sequence
  Synthetic oligonucleotide
agtcgcgacaccagtgcgaggatgtttcaa

SEQ ID NO: 71505 - DNA, 30 bp, Artificial Sequence
  Synthetic oligonucleotide
attcggcgctaagtcgtggagctaaaagaa

SEQ ID NO: 71506 - DNA, 30 bp, Artificial Sequence
  Synthetic oligonucleotide
gacaataaaactcatcggacggtaaaagaa

SEQ ID NO: 71507 - DNA, 30 bp, Artificial Sequence
  Synthetic oligonucleotide
acggttgtaaaagttgcaaattccaaagaa

SEQ ID NO: 71508 - DNA, 30 bp, Artificial Sequence
  Synthetic oligonucleotide
tcaactgaacgactagtttcgaataaagaa

SEQ ID NO: 71509 - DNA, 30 bp, Artificial Sequence
  Synthetic oligonucleotide
tctgaaagggggcaaaaatagcgacaagaa

SEQ ID NO: 71510 - DNA, 30 bp, Artificial Sequence
  Synthetic oligonucleotide
tgaatattaaaggtctcctgggagcaagaa

SEQ ID NO: 71511 - DNA, 30 bp, Artificial Sequence
  Synthetic oligonucleotide
gagagccctggggttcagtaatgagaagaa

SEQ ID NO: 71512 - DNA, 28 bp, Artificial Sequence
  Synthetic oligonucleotide
tacccagaaaccggtgaagacggaagaa

SEQ ID NO: 71513 - DNA, 30 bp, Artificial Sequence
  Synthetic oligonucleotide
tgtgtctcttgcgcacgggggagttaagaa

SEQ ID NO: 71514 - DNA, 30 bp, Artificial Sequence
  Synthetic oligonucleotide
aaataaaatgcaacaagttatacaacagaa

SEQ ID NO: 71515 - DNA, 30 bp, Artificial Sequence
  Synthetic oligonucleotide
agtaatgatggctcgccagctccgacagaa

SEQ ID NO: 71516 - DNA, 30 bp, Artificial Sequence
  Synthetic oligonucleotide
tgatcgagagcctccagtagctcgacagaa

SEQ ID NO: 71517 - DNA, 30 bp, Artificial Sequence
  Synthetic oligonucleotide
cagcgagggtctatggttgtgagtacagaa

SEQ ID NO: 71518 - DNA, 30 bp, Artificial Sequence
  Synthetic oligonucleotide
cctgaatgcggttcgcatggttaagcagaa

SEQ ID NO: 71519 - DNA, 30 bp, Artificial Sequence
  Synthetic oligonucleotide
tgtaacgtagtagaaggctacccagcagaa

SEQ ID NO: 71520 - DNA, 30 bp, Artificial Sequence
  Synthetic oligonucleotide
tacggacttcgcgagatcccctgagcagaa

SEQ ID NO: 71521 - DNA, 30 bp, Artificial Sequence
  Synthetic oligonucleotide
gtgtcacatcatccggatatcctggcagaa

SEQ ID NO: 71522 - DNA, 30 bp, Artificial Sequence
  Synthetic oligonucleotide
agtaataggtccagtcacagaagtgcagaa

SEQ ID NO: 71523 - DNA, 30 bp, Artificial Sequence
  Synthetic oligonucleotide
tagtcagagaaaggttcccaaggtgcagaa

SEQ ID NO: 71524 - DNA, 30 bp, Artificial Sequence
  Synthetic oligonucleotide
agttcaatagggactagaggacagtcagaa

SEQ ID NO: 71525 - DNA, 30 bp, Artificial Sequence
  Synthetic oligonucleotide
agcgctgacgaatgagaattgtggtcagaa

SEQ ID NO: 71526 - DNA, 30 bp, Artificial Sequence
  Synthetic oligonucleotide
ttgcttggaaccgtgctaggaaattcagaa

SEQ ID NO: 71527 - DNA, 30 bp, Artificial Sequence
  Synthetic oligonucleotide
gggctgtgataggcattcgtgaaaagagaa

SEQ ID NO: 71528 - DNA, 30 bp, Artificial Sequence
  Synthetic oligonucleotide
caagggcgttcaaggtatgggtctcgagaa

SEQ ID NO: 71529 - DNA, 30 bp, Artificial Sequence
  Synthetic oligonucleotide
catcaacgaaggggggtgtgcattcgagaa

SEQ ID NO: 71530 - DNA, 30 bp, Artificial Sequence
  Synthetic oligonucleotide
gaacaggctcgagatatttgtgtaggagaa

SEQ ID NO: 71531 - DNA, 30 bp, Artificial Sequence
  Synthetic oligonucleotide
ggcaaacgctagccgcctacccacggagaa

SEQ ID NO: 71532 - DNA, 30 bp, Artificial Sequence
  Synthetic oligonucleotide
gataatatctagcacataacgggcggagaa

SEQ ID NO: 71533 - DNA, 30 bp, Artificial Sequence
  Synthetic oligonucleotide
ctcactggacgtcaggataagcggggagaa

SEQ ID NO: 71534 - DNA, 30 bp, Artificial Sequence
  Synthetic oligonucleotide
taagtgagcgattaccgagcagtctgagaa

SEQ ID NO: 71535 - DNA, 30 bp, Artificial Sequence
  Synthetic oligonucleotide
ctacactggagcaagtgatctgcgtgagaa

SEQ ID NO: 71536 - DNA, 30 bp, Artificial Sequence
  Synthetic oligonucleotide
cacatcttttcacggtgtactacttgagaa

SEQ ID NO: 71537 - DNA, 30 bp, Artificial Sequence
  Synthetic oligonucleotide
acccattacataagataggtaaaaatagaa

SEQ ID NO: 71538 - DNA, 30 bp, Artificial Sequence
  Synthetic oligonucleotide
tctgggtgtatggtaagtaggataatagaa

SEQ ID NO: 71539 - DNA, 30 bp, Artificial Sequence
  Synthetic oligonucleotide
gtatatagatcgaaaaatggaaagatagaa

SEQ ID NO: 71540 - DNA, 30 bp, Artificial Sequence
  Synthetic oligonucleotide
taggaaaagaacctgcttatatgtatagaa

SEQ ID NO: 71541 - DNA, 30 bp, Artificial Sequence
  Synthetic oligonucleotide
acagtgcacatccatggtaggccactagaa

SEQ ID NO: 71542 - DNA, 30 bp, Artificial Sequence
  Synthetic oligonucleotide
acgagttttgggtaatgcttcgggctagaa

SEQ ID NO: 71543 - DNA, 30 bp, Artificial Sequence
  Synthetic oligonucleotide
cagcgagtcaatttgctgcgaccggtagaa

SEQ ID NO: 71544 - DNA, 30 bp, Artificial Sequence
  Synthetic oligonucleotide
gaacaacggcacacacgcttgaatgtagaa

SEQ ID NO: 71545 - DNA, 30 bp, Artificial Sequence
  Synthetic oligonucleotide
ataacccattaaagtggcctgtaattagaa

SEQ ID NO: 71546 - DNA, 30 bp, Artificial Sequence
  Synthetic oligonucleotide
cgtgagtggtcacttacttcgtgcttagaa

SEQ ID NO: 71547 - DNA, 30 bp, Artificial Sequence
  Synthetic oligonucleotide
tgctaccctgaatcgcgcccccagaacgaa

SEQ ID NO: 71548 - DNA, 30 bp, Artificial Sequence
  Synthetic oligonucleotide
ggaacgtgaggtagactcattcagaacgaa

SEQ ID NO: 71549 - DNA, 30 bp, Artificial Sequence
  Synthetic oligonucleotide
gaagtctaaacaacgtgcttattccacgaa

SEQ ID NO: 71550 - DNA, 30 bp, Artificial Sequence
  Synthetic oligonucleotide
gttaagaggagtggactctacaaagacgaa

SEQ ID NO: 71551 - DNA, 30 bp, Artificial Sequence
  Synthetic oligonucleotide
acgtaaaagcccctgtcagttgcatacgaa

SEQ ID NO: 71552 - DNA, 30 bp, Artificial Sequence
  Synthetic oligonucleotide
ccgcaatggttgaaagttacgctatacgaa

SEQ ID NO: 71553 - DNA, 30 bp, Artificial Sequence
  Synthetic oligonucleotide
ggagctcaaaaacgtaacgacataaccgaa

SEQ ID NO: 71554 - DNA, 30 bp, Artificial Sequence
  Synthetic oligonucleotide
gggacgatcgtcaagttgcgatacaccgaa

SEQ ID NO: 71555 - DNA, 30 bp, Artificial Sequence
  Synthetic oligonucleotide
aaggcaaggttctgcaggttcaagaccgaa

SEQ ID NO: 71556 - DNA, 30 bp, Artificial Sequence
  Synthetic oligonucleotide
acatcggacgcaagagaggtggaccccgaa

SEQ ID NO: 71557 - DNA, 30 bp, Artificial Sequence
  Synthetic oligonucleotide
agggtactatattccgttcccggtcccgaa

SEQ ID NO: 71558 - DNA, 30 bp, Artificial Sequence
  Synthetic oligonucleotide
taactgcatccaacagtatgccaggccgaa

SEQ ID NO: 71559 - DNA, 30 bp, Artificial Sequence
  Synthetic oligonucleotide
catgatcatgattatccccccgctgccgaa

SEQ ID NO: 71560 - DNA, 30 bp, Artificial Sequence
  Synthetic oligonucleotide
gtagcaagcaagagccctaaaaaatccgaa

SEQ ID NO: 71561 - DNA, 30 bp, Artificial Sequence
  Synthetic oligonucleotide
aaaccagacggaccgagctggtagtccgaa

SEQ ID NO: 71562 - DNA, 30 bp, Artificial Sequence
  Synthetic oligonucleotide
tgtggaattggtgggaaaactgattccgaa

SEQ ID NO: 71563 - DNA, 30 bp, Artificial Sequence
  Synthetic oligonucleotide
cgtaatagggcttaaactcgcgcttccgaa

SEQ ID NO: 71564 - DNA, 30 bp, Artificial Sequence
  Synthetic oligonucleotide
gacatagctgattgagcagggtcaggcgaa

SEQ ID NO: 71565 - DNA, 30 bp, Artificial Sequence
  Synthetic oligonucleotide
ccatagattctagacctcaaaatttgcgaa

SEQ ID NO: 71566 - DNA, 30 bp, Artificial Sequence
  Synthetic oligonucleotide
ccgaatcctgtagcgagatatgaaatcgaa

SEQ ID NO: 71567 - DNA, 30 bp, Artificial Sequence
  Synthetic oligonucleotide
atacacaaccggccagctcaaagattcgaa

SEQ ID NO: 71568 - DNA, 30 bp, Artificial Sequence
  Synthetic oligonucleotide
taccggataggggcttgtaccaatttcgaa

SEQ ID NO: 71569 - DNA, 30 bp, Artificial Sequence
  Synthetic oligonucleotide
cggggcaattatggacggaggagtttcgaa

SEQ ID NO: 71570 - DNA, 30 bp, Artificial Sequence
  Synthetic oligonucleotide
gccaatagctgtatgtgcactctaaaggaa

SEQ ID NO: 71571 - DNA, 30 bp, Artificial Sequence
  Synthetic oligonucleotide
catcggaccgtggttgatcacgataaggaa

SEQ ID NO: 71572 - DNA, 30 bp, Artificial Sequence
  Synthetic oligonucleotide
ctgccagatgtgagcgatcaccttaaggaa

SEQ ID NO: 71573 - DNA, 30 bp, Artificial Sequence
  Synthetic oligonucleotide
cagacacatagagtccggtgattccaggaa

SEQ ID NO: 71574 - DNA, 30 bp, Artificial Sequence
  Synthetic oligonucleotide
ggttcccggggagagacagtttatcaggaa

SEQ ID NO: 71575 - DNA, 30 bp, Artificial Sequence
  Synthetic oligonucleotide
gcgtaaaaatggtgcgcatctagtcaggaa

SEQ ID NO: 71576 - DNA, 30 bp, Artificial Sequence
  Synthetic oligonucleotide
tactatatcaaccatcgtgccaaggaggaa

SEQ ID NO: 71577 - DNA, 30 bp, Artificial Sequence
  Synthetic oligonucleotide
acatcgcatacatatgcggactatacggaa

SEQ ID NO: 71578 - DNA, 30 bp, Artificial Sequence
  Synthetic oligonucleotide
tggcgagttagaacccgcaatagagcggaa

SEQ ID NO: 71579 - DNA, 30 bp, Artificial Sequence
  Synthetic oligonucleotide
ttgcccctaatggtgcacgatcgtgcggaa

SEQ ID NO: 71580 - DNA, 30 bp, Artificial Sequence
  Synthetic oligonucleotide
agcaggtcgattagaactctggcatcggaa

SEQ ID NO: 71581 - DNA, 30 bp, Artificial Sequence
  Synthetic oligonucleotide
cagcgaaggctctatacgagacagtcggaa

SEQ ID NO: 71582 - DNA, 30 bp, Artificial Sequence
  Synthetic oligonucleotide
cgcaccacagttggagggaaaaacagggaa

SEQ ID NO: 71583 - DNA, 30 bp, Artificial Sequence
  Synthetic oligonucleotide
tcgatgcgactcgcaaaacacaggcgggaa

SEQ ID NO: 71584 - DNA, 30 bp, Artificial Sequence
  Synthetic oligonucleotide
tagtgagtgcggaaaaataagacaggggaa

SEQ ID NO: 71585 - DNA, 30 bp, Artificial Sequence
  Synthetic oligonucleotide
tcctggacccagaaacttctggcaggggaa

SEQ ID NO: 71586 - DNA, 30 bp, Artificial Sequence
  Synthetic oligonucleotide
atggtgttgactgaatcagggcgcggggaa

SEQ ID NO: 71587 - DNA, 30 bp, Artificial Sequence
  Synthetic oligonucleotide
aacgctagtgatagaatgagttgcggggaa

SEQ ID NO: 71588 - DNA, 30 bp, Artificial Sequence
  Synthetic oligonucleotide
taataggcgagaccttgcgtacggtgggaa

SEQ ID NO: 71589 - DNA, 30 bp, Artificial Sequence
  Synthetic oligonucleotide
caaggagaatcgtaagctcaattttgggaa

SEQ ID NO: 71590 - DNA, 30 bp, Artificial Sequence
  Synthetic oligonucleotide
tcagtagctcgagtactccttccgatggaa

SEQ ID NO: 71591 - DNA, 30 bp, Artificial Sequence
  Synthetic oligonucleotide
gcgaacacgagtacatgaatgtctatggaa

SEQ ID NO: 71592 - DNA, 30 bp, Artificial Sequence
  Synthetic oligonucleotide
tagaaacaggagatgaataaagtactggaa

SEQ ID NO: 71593 - DNA, 30 bp, Artificial Sequence
  Synthetic oligonucleotide
agccatagcagccagcagctcaccctggaa

SEQ ID NO: 71594 - DNA, 30 bp, Artificial Sequence
  Synthetic oligonucleotide
cggtcggtagtcattcctgaaaagctggaa

SEQ ID NO: 71595 - DNA, 30 bp, Artificial Sequence
  Synthetic oligonucleotide
ggcgtcgcccgtcgtgctctccttgtggaa

SEQ ID NO: 71596 - DNA, 30 bp, Artificial Sequence
  Synthetic oligonucleotide
cgtaatgtgaaacaagagttgcgattggaa

SEQ ID NO: 71597 - DNA, 30 bp, Artificial Sequence
  Synthetic oligonucleotide
cagggaagttggcttatcgaagccttggaa

SEQ ID NO: 71598 - DNA, 30 bp, Artificial Sequence
  Synthetic oligonucleotide
gaacggactgcgggacgttacagtaatgaa

SEQ ID NO: 71599 - DNA, 30 bp, Artificial Sequence
  Synthetic oligonucleotide
acaagtgcaggtaccgaggtttcgcatgaa

SEQ ID NO: 71600 - DNA, 30 bp, Artificial Sequence
  Synthetic oligonucleotide
ctcaagatgggcatgaaggagcgagatgaa

SEQ ID NO: 71601 - DNA, 30 bp, Artificial Sequence
  Synthetic oligonucleotide
cacgtgcacagtgcataggatggagatgaa

SEQ ID NO: 71602 - DNA, 30 bp, Artificial Sequence
  Synthetic oligonucleotide
acgttaaggaaccctctgctgcccgatgaa

SEQ ID NO: 71603 - DNA, 30 bp, Artificial Sequence
  Synthetic oligonucleotide
gtagaatgaatccgctgaaggggtgatgaa

SEQ ID NO: 71604 - DNA, 30 bp, Artificial Sequence
  Synthetic oligonucleotide
cgggcagagccaatagcttatcttgatgaa

SEQ ID NO: 71605 - DNA, 30 bp, Artificial Sequence
  Synthetic oligonucleotide
tgtattggcaaaggcacggggatatatgaa

SEQ ID NO: 71606 - DNA, 30 bp, Artificial Sequence
  Synthetic oligonucleotide
gatcagaaccaaagacttcaactctatgaa

SEQ ID NO: 71607 - DNA, 30 bp, Artificial Sequence
  Synthetic oligonucleotide
taaacgagtgccatatcaacttggtatgaa

SEQ ID NO: 71608 - DNA, 30 bp, Artificial Sequence
  Synthetic oligonucleotide
acgtcgaggttaggttgggccaatactgaa

SEQ ID NO: 71609 - DNA, 30 bp, Artificial Sequence
  Synthetic oligonucleotide
caaactcaagtccgttcgcataggcctgaa

SEQ ID NO: 71610 - DNA, 30 bp, Artificial Sequence
  Synthetic oligonucleotide
gtgagacaatccaaacgagattggcctgaa

SEQ ID NO: 71611 - DNA, 30 bp, Artificial Sequence
  Synthetic oligonucleotide
ggacgagcaataaatcctgacgatcctgaa

SEQ ID NO: 71612 - DNA, 30 bp, Artificial Sequence
  Synthetic oligonucleotide
cgaatagttcagagaaacagtcgagctgaa

SEQ ID NO: 71613 - DNA, 30 bp, Artificial Sequence
  Synthetic oligonucleotide
cgttattccttattaggtccaacgagtgaa

SEQ ID NO: 71614 - DNA, 30 bp, Artificial Sequence
  Synthetic oligonucleotide
caaagtcgattggctactacgaaccgtgaa

SEQ ID NO: 71615 - DNA, 30 bp, Artificial Sequence
  Synthetic oligonucleotide
taacaaatattgtggataaaaggtcgtgaa

SEQ ID NO: 71616 - DNA, 30 bp, Artificial Sequence
  Synthetic oligonucleotide
gcgtaagtaaaaggggaggtattatgtgaa

SEQ ID NO: 71617 - DNA, 30 bp, Artificial Sequence
  Synthetic oligonucleotide
gtggacctggctcagccctaagggtgtgaa

SEQ ID NO: 71618 - DNA, 30 bp, Artificial Sequence
  Synthetic oligonucleotide
tgaatcgagtgctgagcaatctattgtgaa

SEQ ID NO: 71619 - DNA, 30 bp, Artificial Sequence
  Synthetic oligonucleotide
ctcgcataccacacgaggagtgcccttgaa

SEQ ID NO: 71620 - DNA, 30 bp, Artificial Sequence
  Synthetic oligonucleotide
gttggaggcagatgtgaaactacgcttgaa

SEQ ID NO: 71621 - DNA, 30 bp, Artificial Sequence
  Synthetic oligonucleotide
aaggcgatttagccagcaggaccgcttgaa

SEQ ID NO: 71622 - DNA, 30 bp, Artificial Sequence
  Synthetic oligonucleotide
acggacacatcttcgtgcaccttctttgaa

SEQ ID NO: 71623 - DNA, 30 bp, Artificial Sequence
  Synthetic oligonucleotide
cgaatagatggcttcggtggtcggtttgaa

SEQ ID NO: 71624 - DNA, 30 bp, Artificial Sequence
  Synthetic oligonucleotide
gcgacgttaattgagattcccgcgaaataa

SEQ ID NO: 71625 - DNA, 30 bp, Artificial Sequence
  Synthetic oligonucleotide
gaacagaaggagatggggggtactaaataa

SEQ ID NO: 71626 - DNA, 30 bp, Artificial Sequence
  Synthetic oligonucleotide
caacttgggcaagtcagggcgtgacaataa

SEQ ID NO: 71627 - DNA, 30 bp, Artificial Sequence
  Synthetic oligonucleotide
acgggtagcggtctcctcaatgcggaataa

SEQ ID NO: 71628 - DNA, 30 bp, Artificial Sequence
  Synthetic oligonucleotide
ccaagacgcgctaagccgaacgtggaataa

SEQ ID NO: 71629 - DNA, 30 bp, Artificial Sequence
  Synthetic oligonucleotide
agccacattcgtcattgcgagctataataa

SEQ ID NO: 71630 - DNA, 30 bp, Artificial Sequence
  Synthetic oligonucleotide
acgcgtacaagattgtgtggattataataa

SEQ ID NO: 71631 - DNA, 30 bp, Artificial Sequence
  Synthetic oligonucleotide
cccataaaacagcagagtaaattaacataa

SEQ ID NO: 71632 - DNA, 30 bp, Artificial Sequence
  Synthetic oligonucleotide
atggaggatgagtgctccgccggtacataa

SEQ ID NO: 71633 - DNA, 30 bp, Artificial Sequence
  Synthetic oligonucleotide
gtaaatgggaagtcgctagatacgccataa

SEQ ID NO: 71634 - DNA, 30 bp, Artificial Sequence
  Synthetic oligonucleotide
aaagcggcagagggtctcgtactcgcataa

SEQ ID NO: 71635 - DNA, 30 bp, Artificial Sequence
  Synthetic oligonucleotide
ttcggtgcgaaggctgcgagaaaggcataa

SEQ ID NO: 71636 - DNA, 30 bp, Artificial Sequence
  Synthetic oligonucleotide
cggagggtgttgtctagtaacacggcataa

SEQ ID NO: 71637 - DNA, 30 bp, Artificial Sequence
  Synthetic oligonucleotide
tggaagcaaacgacggacacgtctgcataa

SEQ ID NO: 71638 - DNA, 30 bp, Artificial Sequence
  Synthetic oligonucleotide
ggggggatttgcgccatcacaaaatcataa

SEQ ID NO: 71639 - DNA, 30 bp, Artificial Sequence
  Synthetic oligonucleotide
tacgtccggtgtaagctagtttactcataa

SEQ ID NO: 71640 - DNA, 30 bp, Artificial Sequence
  Synthetic oligonucleotide
tagccgtggggttgtgtagaacaaagataa

SEQ ID NO: 71641 - DNA, 30 bp, Artificial Sequence
  Synthetic oligonucleotide
ggaacgacggaaggggaatcagctagataa

SEQ ID NO: 71642 - DNA, 30 bp, Artificial Sequence
  Synthetic oligonucleotide
acgggggtgcggaggctaaatctccgataa

SEQ ID NO: 71643 - DNA, 30 bp, Artificial Sequence
  Synthetic oligonucleotide
aagctcaagaccacgacagccgcgcgataa

SEQ ID NO: 71644 - DNA, 30 bp, Artificial Sequence
  Synthetic oligonucleotide
gattaaccaactaggtaggagcctcgataa

SEQ ID NO: 71645 - DNA, 30 bp, Artificial Sequence
  Synthetic oligonucleotide
gccaataaaacgaaaatttaacaaggataa

SEQ ID NO: 71646 - DNA, 30 bp, Artificial Sequence
  Synthetic oligonucleotide
tcaccggagttaggatggtactgcggataa

SEQ ID NO: 71647 - DNA, 30 bp, Artificial Sequence
  Synthetic oligonucleotide
gcatcatagaaattgacataaacctgataa

SEQ ID NO: 71648 - DNA, 30 bp, Artificial Sequence
  Synthetic oligonucleotide
gtgcgctcgcaatccgaaaacacaatataa

SEQ ID NO: 71649 - DNA, 26 bp, Artificial Sequence
  Synthetic oligonucleotide
aggaacccttggtaaacgacctataa

SEQ ID NO: 71650 - DNA, 30 bp, Artificial Sequence
  Synthetic oligonucleotide
cggatgtgaagtggctcgtccagagtataa

SEQ ID NO: 71651 - DNA, 30 bp, Artificial Sequence
  Synthetic oligonucleotide
gaacgggtcctacactccgcccaggtataa

SEQ ID NO: 71652 - DNA, 30 bp, Artificial Sequence
  Synthetic oligonucleotide
catgccctaactactcctacatcaaactaa

SEQ ID NO: 71653 - DNA, 30 bp, Artificial Sequence
  Synthetic oligonucleotide
catatcgggctggcactgacaggccactaa

SEQ ID NO: 71654 - DNA, 30 bp, Artificial Sequence
  Synthetic oligonucleotide
taggtaagtggtaagcggatttagcactaa

SEQ ID NO: 71655 - DNA, 30 bp, Artificial Sequence
  Synthetic oligonucleotide
atgtgaggaactgaaagcgcataagactaa

SEQ ID NO: 71656 - DNA, 30 bp, Artificial Sequence
  Synthetic oligonucleotide
ggatccctgtggcaggtgaaagttgactaa

SEQ ID NO: 71657 - DNA, 30 bp, Artificial Sequence
  Synthetic oligonucleotide
gcggtagggtatcgagcgtcaaactactaa

SEQ ID NO: 71658 - DNA, 30 bp, Artificial Sequence
  Synthetic oligonucleotide
gctcgggaagcctggcaaatctcctactaa

SEQ ID NO: 71659 - DNA, 30 bp, Artificial Sequence
  Synthetic oligonucleotide
atggtagtgtccgtgcgatcgaattactaa

SEQ ID NO: 71660 - DNA, 30 bp, Artificial Sequence
  Synthetic oligonucleotide
cagggtattatcggaaggagctacacctaa

SEQ ID NO: 71661 - DNA, 30 bp, Artificial Sequence
  Synthetic oligonucleotide
gacggagcggagccacgagcctgcagctaa

SEQ ID NO: 71662 - DNA, 30 bp, Artificial Sequence
  Synthetic oligonucleotide
gcgcatgaggagtgctgtcgtggtcgctaa

SEQ ID NO: 71663 - DNA, 30 bp, Artificial Sequence
  Synthetic oligonucleotide
aaagcgatccggtaaacactttaaggctaa

SEQ ID NO: 71664 - DNA, 30 bp, Artificial Sequence
  Synthetic oligonucleotide
acctccagtgagatgacggaccggatctaa

SEQ ID NO: 71665 - DNA, 30 bp, Artificial Sequence
  Synthetic oligonucleotide
tatcacggaacggcctgtcaccccgtctaa

SEQ ID NO: 71666 - DNA, 30 bp, Artificial Sequence
  Synthetic oligonucleotide
gggagagcaacatccgccgacacattctaa

SEQ ID NO: 71667 - DNA, 30 bp, Artificial Sequence
  Synthetic oligonucleotide
caacgggtgaacataaggtgcaccttctaa

SEQ ID NO: 71668 - DNA, 30 bp, Artificial Sequence
  Synthetic oligonucleotide
gaagtggtggatggagcccccgacaagtaa

SEQ ID NO: 71669 - DNA, 30 bp, Artificial Sequence
  Synthetic oligonucleotide
aggatgggggaattcgctaaccagaagtaa

SEQ ID NO: 71670 - DNA, 30 bp, Artificial Sequence
  Synthetic oligonucleotide
aaagatagaaaaggatgatcatctaagtaa

SEQ ID NO: 71671 - DNA, 30 bp, Artificial Sequence
  Synthetic oligonucleotide
catcgaagcatcggatgatatcaacagtaa

SEQ ID NO: 71672 - DNA, 30 bp, Artificial Sequence
  Synthetic oligonucleotide
gagaaggtgtcaagaacccccggccagtaa

SEQ ID NO: 71673 - DNA, 30 bp, Artificial Sequence
  Synthetic oligonucleotide
cagagtgaagctcacaaagactatcagtaa

SEQ ID NO: 71674 - DNA, 30 bp, Artificial Sequence
  Synthetic oligonucleotide
agagcctgttacaagaccgtacttcagtaa

SEQ ID NO: 71675 - DNA, 30 bp, Artificial Sequence
  Synthetic oligonucleotide
acggtcctgttcgaactcggtacatagtaa

SEQ ID NO: 71676 - DNA, 30 bp, Artificial Sequence
  Synthetic oligonucleotide
caccaggttaagggtgaacctagctagtaa

SEQ ID NO: 71677 - DNA, 30 bp, Artificial Sequence
  Synthetic oligonucleotide
cggttctgaaattacaattccgcgtagtaa

SEQ ID NO: 71678 - DNA, 30 bp, Artificial Sequence
  Synthetic oligonucleotide
tgagccgcggaagatctgatgggaacgtaa

SEQ ID NO: 71679 - DNA, 30 bp, Artificial Sequence
  Synthetic oligonucleotide
gcacggaggctaatatggaaaaacacgtaa

SEQ ID NO: 71680 - DNA, 30 bp, Artificial Sequence
  Synthetic oligonucleotide
cgcaaacgcataataggagtcgtcacgtaa

SEQ ID NO: 71681 - DNA, 30 bp, Artificial Sequence
  Synthetic oligonucleotide
atcggacatgtgcttacgctcagtacgtaa

SEQ ID NO: 71682 - DNA, 30 bp, Artificial Sequence
  Synthetic oligonucleotide
cctgtccactgatgatccggtatgccgtaa

SEQ ID NO: 71683 - DNA, 30 bp, Artificial Sequence
  Synthetic oligonucleotide
tgtgagggtgtaacgagtcaagaggcgtaa

SEQ ID NO: 71684 - DNA, 30 bp, Artificial Sequence
  Synthetic oligonucleotide
aaggaggatgtacccagcaagggggcgtaa

SEQ ID NO: 71685 - DNA, 30 bp, Artificial Sequence
  Synthetic oligonucleotide
cagaagaagatggaaaaattgattgcgtaa

SEQ ID NO: 71686 - DNA, 30 bp, Artificial Sequence
  Synthetic oligonucleotide
cgtctaaacgcatgccatttacaatcgtaa

SEQ ID NO: 71687 - DNA, 30 bp, Artificial Sequence
  Synthetic oligonucleotide
ttacctaggtggaggtaatcctaatcgtaa

SEQ ID NO: 71688 - DNA, 30 bp, Artificial Sequence
  Synthetic oligonucleotide
cggctaagcttttagatagacaagtcgtaa

SEQ ID NO: 71689 - DNA, 30 bp, Artificial Sequence
  Synthetic oligonucleotide
taacataataaaggctgtcgacggtcgtaa

SEQ ID NO: 71690 - DNA, 30 bp, Artificial Sequence
  Synthetic oligonucleotide
cgttgacttgacgacaaaacgcccaggtaa

SEQ ID NO: 71691 - DNA, 31 bp, Artificial Sequence
  Synthetic oligonucleotide
ctgacctagaggagggtgaggtaataggtaa

SEQ ID NO: 71692 - DNA, 30 bp, Artificial Sequence
  Synthetic oligonucleotide
cgttgagccctcacattcacttataggtaa

SEQ ID NO: 71693 - DNA, 30 bp, Artificial Sequence
  Synthetic oligonucleotide
ccaaaaggcgttaaccagtactcccggtaa

SEQ ID NO: 71694 - DNA, 30 bp, Artificial Sequence
  Synthetic oligonucleotide
ccctgaaacatgtaaggtgtacatcggtaa

SEQ ID NO: 71695 - DNA, 30 bp, Artificial Sequence
  Synthetic oligonucleotide
taacacagtggaacagctacgccggggtaa

SEQ ID NO: 71696 - DNA, 30 bp, Artificial Sequence
  Synthetic oligonucleotide
ggactccgaaatataatcaagcgaatgtaa

SEQ ID NO: 71697 - DNA, 30 bp, Artificial Sequence
  Synthetic oligonucleotide
tgccaatggccatgattcgcgatactgtaa

SEQ ID NO: 71698 - DNA, 30 bp, Artificial Sequence
  Synthetic oligonucleotide
gggcagcttataacggcaaagggagtgtaa

SEQ ID NO: 71699 - DNA, 30 bp, Artificial Sequence
  Synthetic oligonucleotide
agggaaatggaccttaggatagttttgtaa

SEQ ID NO: 71700 - DNA, 30 bp, Artificial Sequence
  Synthetic oligonucleotide
acaaagccatcacgcatggaaacgaattaa

SEQ ID NO: 71701 - DNA, 30 bp, Artificial Sequence
  Synthetic oligonucleotide
ttgtcctgataaagagtagtcgataattaa

SEQ ID NO: 71702 - DNA, 30 bp, Artificial Sequence
  Synthetic oligonucleotide
agacagatagagggtaatagggaggattaa

SEQ ID NO: 71703 - DNA, 30 bp, Artificial Sequence
  Synthetic oligonucleotide
cacggaagctcaacgggcaatccgtattaa

SEQ ID NO: 71704 - DNA, 30 bp, Artificial Sequence
  Synthetic oligonucleotide
tgaatctgccccgaattggagaggtattaa

SEQ ID NO: 71705 - DNA, 30 bp, Artificial Sequence
  Synthetic oligonucleotide
gcaggaacgtgaacatacgaaaattattaa

SEQ ID NO: 71706 - DNA, 30 bp, Artificial Sequence
  Synthetic oligonucleotide
tcgtgcggtgataacagactgttaacttaa

SEQ ID NO: 71707 - DNA, 30 bp, Artificial Sequence
  Synthetic oligonucleotide
ggcgtgaggattaacacctaatacccttaa

SEQ ID NO: 71708 - DNA, 30 bp, Artificial Sequence
  Synthetic oligonucleotide
tcagacaaataagaactatagaccccttaa

SEQ ID NO: 71709 - DNA, 30 bp, Artificial Sequence
  Synthetic oligonucleotide
ccctgactagggctaagaaagcagccttaa

SEQ ID NO: 71710 - DNA, 30 bp, Artificial Sequence
  Synthetic oligonucleotide
cgaaccggcaggggattcttgaactcttaa

SEQ ID NO: 71711 - DNA, 30 bp, Artificial Sequence
  Synthetic oligonucleotide
agttgaagtataacatagataaaaagttaa

SEQ ID NO: 71712 - DNA, 30 bp, Artificial Sequence
  Synthetic oligonucleotide
aggttagccatattcgacttaggaagttaa

SEQ ID NO: 71713 - DNA, 30 bp, Artificial Sequence
  Synthetic oligonucleotide
agataaataagaaccaattttcgcagttaa

SEQ ID NO: 71714 - DNA, 30 bp, Artificial Sequence
  Synthetic oligonucleotide
caagatcaaggtggtgtgccggtgagttaa

SEQ ID NO: 71715 - DNA, 30 bp, Artificial Sequence
  Synthetic oligonucleotide
cgtcaggatattgccggggaagatagttaa

SEQ ID NO: 71716 - DNA, 30 bp, Artificial Sequence
  Synthetic oligonucleotide
tcccgccacgtcaacacacgaactcgttaa

SEQ ID NO: 71717 - DNA, 30 bp, Artificial Sequence
  Synthetic oligonucleotide
ggacgagcggtttttcggcaatgaggttaa

SEQ ID NO: 71718 - DNA, 30 bp, Artificial Sequence
  Synthetic oligonucleotide
cgaagagcgcttgtgcagaggcacggttaa

SEQ ID NO: 71719 - DNA, 30 bp, Artificial Sequence
  Synthetic oligonucleotide
aagcacgccataaagcccagcgaatgttaa

SEQ ID NO: 71720 - DNA, 30 bp, Artificial Sequence
  Synthetic oligonucleotide
gatgaaagacattcgaaagcatgatgttaa

SEQ ID NO: 71721 - DNA, 30 bp, Artificial Sequence
  Synthetic oligonucleotide
cggggcatgcgcactatacaagattgttaa

SEQ ID NO: 71722 - DNA, 30 bp, Artificial Sequence
  Synthetic oligonucleotide
ccgagatgtaaatctgtagatagcctttaa

SEQ ID NO: 71723 - DNA, 30 bp, Artificial Sequence
  Synthetic oligonucleotide
cgaaagcgaatggagagaacgccgctttaa

SEQ ID NO: 71724 - DNA, 30 bp, Artificial Sequence
  Synthetic oligonucleotide
gatgacttagagagcaacaggcccaaaaca

SEQ ID NO: 71725 - DNA, 30 bp, Artificial Sequence
  Synthetic oligonucleotide
caatttgtagggaagggctgggctaaaaca

SEQ ID NO: 71726 - DNA, 30 bp, Artificial Sequence
  Synthetic oligonucleotide
caggctagctggcacagcccttcagaaaca

SEQ ID NO: 71727 - DNA, 30 bp, Artificial Sequence
  Synthetic oligonucleotide
gatatcatccacgtagtcgggaccgaaaca

SEQ ID NO: 71728 - DNA, 30 bp, Artificial Sequence
  Synthetic oligonucleotide
tgcgcgattggctgatagaaacaggaaaca

SEQ ID NO: 71729 - DNA, 30 bp, Artificial Sequence
  Synthetic oligonucleotide
cagaacaaccaccaaaatttagaggaaaca

SEQ ID NO: 71730 - DNA, 30 bp, Artificial Sequence
  Synthetic oligonucleotide
tcgattggcgtttttgaaggcgaggaaaca

SEQ ID NO: 71731 - DNA, 30 bp, Artificial Sequence
  Synthetic oligonucleotide
gtctgaatagtgaatgaatgcccggaaaca

SEQ ID NO: 71732 - DNA, 30 bp, Artificial Sequence
  Synthetic oligonucleotide
cgtgaatggtcacacggtgacatggaaaca

SEQ ID NO: 71733 - DNA, 30 bp, Artificial Sequence
  Synthetic oligonucleotide
gatgaaacccaatggcgatagaatgaaaca

SEQ ID NO: 71734 - DNA, 30 bp, Artificial Sequence
  Synthetic oligonucleotide
tcttatcagttctaaaggattcgctaaaca

SEQ ID NO: 71735 - DNA, 30 bp, Artificial Sequence
  Synthetic oligonucleotide
ccagctgtcgcctacaacagagtaacaaca

SEQ ID NO: 71736 - DNA, 30 bp, Artificial Sequence
  Synthetic oligonucleotide
ccagcacgccgtattgccagagccacaaca

SEQ ID NO: 71737 - DNA, 30 bp, Artificial Sequence
  Synthetic oligonucleotide
cataaatgacgatcgtaaaacctcacaaca

SEQ ID NO: 71738 - DNA, 30 bp, Artificial Sequence
  Synthetic oligonucleotide
cccggataaatgttaaatcagccaccaaca

SEQ ID NO: 71739 - DNA, 30 bp, Artificial Sequence
  Synthetic oligonucleotide
gctgggactcataattcgaattggccaaca

SEQ ID NO: 71740 - DNA, 30 bp, Artificial Sequence
  Synthetic oligonucleotide
aatgaggggaacaatctcgcccccgcaaca

SEQ ID NO: 71741 - DNA, 30 bp, Artificial Sequence
  Synthetic oligonucleotide
ccatccattaataaagcgtgtcatgcaaca

SEQ ID NO: 71742 - DNA, 30 bp, Artificial Sequence
  Synthetic oligonucleotide
gggtaaagcacaaccaggggagagtcaaca

SEQ ID NO: 71743 - DNA, 30 bp, Artificial Sequence
  Synthetic oligonucleotide
aggtgaggggccagaaaggatcccagaaca

SEQ ID NO: 71744 - DNA, 30 bp, Artificial Sequence
  Synthetic oligonucleotide
caaccgatcttagttaaaacaacaggaaca

SEQ ID NO: 71745 - DNA, 30 bp, Artificial Sequence
  Synthetic oligonucleotide
cctgcctcaaggagagtgctcgggggaaca

SEQ ID NO: 71746 - DNA, 30 bp, Artificial Sequence
  Synthetic oligonucleotide
caccgggatgcccagattgcagaatgaaca

SEQ ID NO: 71747 - DNA, 30 bp, Artificial Sequence
  Synthetic oligonucleotide
ctcaggcgccctgggcgggacaccctaaca

SEQ ID NO: 71748 - DNA, 30 bp, Artificial Sequence
  Synthetic oligonucleotide
ccacgtgattattcatgagcatggctaaca

SEQ ID NO: 71749 - DNA, 30 bp, Artificial Sequence
  Synthetic oligonucleotide
agggtgaatggttgtaagagcgaagtaaca

SEQ ID NO: 71750 - DNA, 30 bp, Artificial Sequence
  Synthetic oligonucleotide
tcatcaacacacaacagcgtagtcgtaaca

SEQ ID NO: 71751 - DNA, 30 bp, Artificial Sequence
  Synthetic oligonucleotide
gcaacgtgtagtgaaacccgtgtcgtaaca

SEQ ID NO: 71752 - DNA, 30 bp, Artificial Sequence
  Synthetic oligonucleotide
tgagattaccaaaatattcaattcgtaaca

SEQ ID NO: 71753 - DNA, 30 bp, Artificial Sequence
  Synthetic oligonucleotide
gcacgtcgcggagggccgtagtagttaaca

SEQ ID NO: 71754 - DNA, 30 bp, Artificial Sequence
  Synthetic oligonucleotide
ttcgaggaaaatatgttgacagcaaacaca

SEQ ID NO: 71755 - DNA, 30 bp, Artificial Sequence
  Synthetic oligonucleotide
atcccaacgtaagctatggagagaaacaca

SEQ ID NO: 71756 - DNA, 30 bp, Artificial Sequence
  Synthetic oligonucleotide
ttggggcttgaatagcatcctcacaacaca

SEQ ID NO: 71757 - DNA, 30 bp, Artificial Sequence
  Synthetic oligonucleotide
gcaacggtgatggattcgcctcataacaca

SEQ ID NO: 71758 - DNA, 30 bp, Artificial Sequence
  Synthetic oligonucleotide
acgttgccggatgaacggttgtaccacaca

SEQ ID NO: 71759 - DNA, 30 bp, Artificial Sequence
  Synthetic oligonucleotide
tgcaaaacagctatagaacgtcgtcacaca

SEQ ID NO: 71760 - DNA, 30 bp, Artificial Sequence
  Synthetic oligonucleotide
cggagtgaccgttgggtgataccaaccaca

SEQ ID NO: 71761 - DNA, 30 bp, Artificial Sequence
  Synthetic oligonucleotide
aacgcctgatgaacgttgttgaccaccaca

SEQ ID NO: 71762 - DNA, 30 bp, Artificial Sequence
  Synthetic oligonucleotide
gatcagaagggggctcacgaacataccaca

SEQ ID NO: 71763 - DNA, 30 bp, Artificial Sequence
  Synthetic oligonucleotide
tagggaagtaacaataatgaaactaccaca

SEQ ID NO: 71764 - DNA, 30 bp, Artificial Sequence
  Synthetic oligonucleotide
actacgggtcccatcgccacacttaccaca

SEQ ID NO: 71765 - DNA, 30 bp, Artificial Sequence
  Synthetic oligonucleotide
gacgattcgcaccgttaataattgcccaca

SEQ ID NO: 71766 - DNA, 30 bp, Artificial Sequence
  Synthetic oligonucleotide
acttcgactacaatccccgctaatcccaca

SEQ ID NO: 71767 - DNA, 30 bp, Artificial Sequence
  Synthetic oligonucleotide
tgagtcacggagggacttggaccagccaca

SEQ ID NO: 71768 - DNA, 30 bp, Artificial Sequence
  Synthetic oligonucleotide
gatctaccggaaaactgggacatctccaca

SEQ ID NO: 71769 - DNA, 30 bp, Artificial Sequence
  Synthetic oligonucleotide
tctatcccacttacattgagagtgtccaca

SEQ ID NO: 71770 - DNA, 30 bp, Artificial Sequence
  Synthetic oligonucleotide
atgcttgcgccacggcactagtaaagcaca

SEQ ID NO: 71771 - DNA, 30 bp, Artificial Sequence
  Synthetic oligonucleotide
ggtcccaacagtccggcctgcacaagcaca

SEQ ID NO: 71772 - DNA, 30 bp, Artificial Sequence
  Synthetic oligonucleotide
acaaagggtggagactgtgcaggtagcaca

SEQ ID NO: 71773 - DNA, 30 bp, Artificial Sequence
  Synthetic oligonucleotide
gccaagtaaacgcggttgggccagcgcaca

SEQ ID NO: 71774 - DNA, 30 bp, Artificial Sequence
  Synthetic oligonucleotide
ggaccagggaagtgcactaaagaaggcaca

SEQ ID NO: 71775 - DNA, 30 bp, Artificial Sequence
  Synthetic oligonucleotide
ccggggcattgccatgaaaacgagggcaca

SEQ ID NO: 71776 - DNA, 30 bp, Artificial Sequence
  Synthetic oligonucleotide
cccggaagaatgagatcaatagcgggcaca

SEQ ID NO: 71777 - DNA, 30 bp, Artificial Sequence
  Synthetic oligonucleotide
ctgcggatcacgctatgtaatgcgggcaca

SEQ ID NO: 71778 - DNA, 30 bp, Artificial Sequence
  Synthetic oligonucleotide
acaggaaaatgacactgaccgcatggcaca

SEQ ID NO: 71779 - DNA, 30 bp, Artificial Sequence
  Synthetic oligonucleotide
aagggagaccagagaacacgcttatgcaca

SEQ ID NO: 71780 - DNA, 30 bp, Artificial Sequence
  Synthetic oligonucleotide
ggcggacgtaacgctggacttcactgcaca

SEQ ID NO: 71781 - DNA, 30 bp, Artificial Sequence
  Synthetic oligonucleotide
aggactttgccctaagagtttatctgcaca

SEQ ID NO: 71782 - DNA, 30 bp, Artificial Sequence
  Synthetic oligonucleotide
ggaaccgatattgagttgggttggatcaca

SEQ ID NO: 71783 - DNA, 30 bp, Artificial Sequence
  Synthetic oligonucleotide
gggtactgacggaacagaacatccctcaca

SEQ ID NO: 71784 - DNA, 30 bp, Artificial Sequence
  Synthetic oligonucleotide
caacatcgacgaccataaagttgcctcaca

SEQ ID NO: 71785 - DNA, 30 bp, Artificial Sequence
  Synthetic oligonucleotide
accgtccagatcagtagagtaacgctcaca

SEQ ID NO: 71786 - DNA, 30 bp, Artificial Sequence
  Synthetic oligonucleotide
aggtactccgtcaggggtggctcagtcaca

SEQ ID NO: 71787 - DNA, 30 bp, Artificial Sequence
  Synthetic oligonucleotide
gacggccgacgctgttgagtgcacgtcaca

SEQ ID NO: 71788 - DNA, 30 bp, Artificial Sequence
  Synthetic oligonucleotide
atatagcggaaacattacgattatgtcaca

SEQ ID NO: 71789 - DNA, 30 bp, Artificial Sequence
  Synthetic oligonucleotide
atcggggaactgttatcattgccattcaca

SEQ ID NO: 71790 - DNA, 30 bp, Artificial Sequence
  Synthetic oligonucleotide
gccggtaaaagggatgcaggaaagttcaca

SEQ ID NO: 71791 - DNA, 30 bp, Artificial Sequence
  Synthetic oligonucleotide
ccgtctctacgcttcaaatcgcggttcaca

SEQ ID NO: 71792 - DNA, 30 bp, Artificial Sequence
  Synthetic oligonucleotide
ggctagatctcgatgtagtctagaaagaca

SEQ ID NO: 71793 - DNA, 30 bp, Artificial Sequence
  Synthetic oligonucleotide
gatggcagtcagacacccatccgaaagaca

SEQ ID NO: 71794 - DNA, 30 bp, Artificial Sequence
  Synthetic oligonucleotide
taggcacaggtgttacaagtatccaagaca

SEQ ID NO: 71795 - DNA, 30 bp, Artificial Sequence
  Synthetic oligonucleotide
acattagattaacgattaagtcgcaagaca

SEQ ID NO: 71796 - DNA, 30 bp, Artificial Sequence
  Synthetic oligonucleotide
cgcatggtgtggccgcaaacgggcaagaca

SEQ ID NO: 71797 - DNA, 30 bp, Artificial Sequence
  Synthetic oligonucleotide
ttatcacggccagcctaacgaaaacagaca

SEQ ID NO: 71798 - DNA, 30 bp, Artificial Sequence
  Synthetic oligonucleotide
cgagatacccctcaataatgtggacagaca

SEQ ID NO: 71799 - DNA, 30 bp, Artificial Sequence
  Synthetic oligonucleotide
tgcgagaactgggaatcacgcaggcagaca

SEQ ID NO: 71800 - DNA, 30 bp, Artificial Sequence
  Synthetic oligonucleotide
catgcctggttacggatgacggctgagaca

SEQ ID NO: 71801 - DNA, 30 bp, Artificial Sequence
  Synthetic oligonucleotide
cgctggaaggagtactcacagggttagaca

SEQ ID NO: 71802 - DNA, 30 bp, Artificial Sequence
  Synthetic oligonucleotide
aaaatacgaattggcacggcctagccgaca

SEQ ID NO: 71803 - DNA, 30 bp, Artificial Sequence
  Synthetic oligonucleotide
ccaccccgtatatgtaccgtaacagcgaca

SEQ ID NO: 71804 - DNA, 30 bp, Artificial Sequence
  Synthetic oligonucleotide
cgacgtcccactttcgtcataccagcgaca

SEQ ID NO: 71805 - DNA, 30 bp, Artificial Sequence
  Synthetic oligonucleotide
gtccttgaaagaggcaatagacacgcgaca

SEQ ID NO: 71806 - DNA, 30 bp, Artificial Sequence
  Synthetic oligonucleotide
ccacagtaaagtgatataacagttgcgaca

SEQ ID NO: 71807 - DNA, 30 bp, Artificial Sequence
  Synthetic oligonucleotide
ctgacccatggtaaatgagtcccaaggaca

SEQ ID NO: 71808 - DNA, 30 bp, Artificial Sequence
  Synthetic oligonucleotide
gttcaatgttcacatccagagttaaggaca

SEQ ID NO: 71809 - DNA, 30 bp, Artificial Sequence
  Synthetic oligonucleotide
aggcgccaaggggacagtcttctcaggaca

SEQ ID NO: 71810 - DNA, 30 bp, Artificial Sequence
  Synthetic oligonucleotide
cgacacttgcgccaaatgtcacataggaca

SEQ ID NO: 71811 - DNA, 30 bp, Artificial Sequence
  Synthetic oligonucleotide
gacgtagtgtgacatgcgcaccccgggaca

SEQ ID NO: 71812 - DNA, 30 bp, Artificial Sequence
  Synthetic oligonucleotide
tgccagtgccgaaagatgagtgccgggaca

SEQ ID NO: 71813 - DNA, 30 bp, Artificial Sequence
  Synthetic oligonucleotide
agcaaacgtccgtagcttataagggggaca

SEQ ID NO: 71814 - DNA, 30 bp, Artificial Sequence
  Synthetic oligonucleotide
cacgctcaagtgcaagagttctatgggaca

SEQ ID NO: 71815 - DNA, 30 bp, Artificial Sequence
  Synthetic oligonucleotide
gtaaaaacccatagtgtgtagcctgggaca

SEQ ID NO: 71816 - DNA, 30 bp, Artificial Sequence
  Synthetic oligonucleotide
atgctccataccttttgcctgtcgtggaca

SEQ ID NO: 71817 - DNA, 30 bp, Artificial Sequence
  Synthetic oligonucleotide
ttcgcgggagcgcgtaatggaggaatgaca

SEQ ID NO: 71818 - DNA, 30 bp, Artificial Sequence
  Synthetic oligonucleotide
tcggagctcaaatactgattgtgcatgaca

SEQ ID NO: 71819 - DNA, 31 bp, Artificial Sequence
  Synthetic oligonucleotide
tctccacgaatccaacagcccaaagatgaca

SEQ ID NO: 71820 - DNA, 30 bp, Artificial Sequence
  Synthetic oligonucleotide
cagataggcacgaatgcttgaaatctgaca

SEQ ID NO: 71821 - DNA, 28 bp, Artificial Sequence
  Synthetic oligonucleotide
aaaaggagaagacgtgacccaagtgaca

SEQ ID NO: 71822 - DNA, 30 bp, Artificial Sequence
  Synthetic oligonucleotide
agtaaaaaggcattggcaacaatcgtgaca

SEQ ID NO: 71823 - DNA, 30 bp, Artificial Sequence
  Synthetic oligonucleotide
gtctgcggactgtaattgtgcttggtgaca

SEQ ID NO: 71824 - DNA, 30 bp, Artificial Sequence
  Synthetic oligonucleotide
gggataaaaggggttgatcattgtgtgaca

SEQ ID NO: 71825 - DNA, 30 bp, Artificial Sequence
  Synthetic oligonucleotide
actacgttcagtggactgtcagggcataca

SEQ ID NO: 71826 - DNA, 30 bp, Artificial Sequence
  Synthetic oligonucleotide
cggacacctagttaaatccataaagataca

SEQ ID NO: 71827 - DNA, 30 bp, Artificial Sequence
  Synthetic oligonucleotide
gtgtacagtggaatcgaatgacgatataca

SEQ ID NO: 71828 - DNA, 30 bp, Artificial Sequence
  Synthetic oligonucleotide
tctagtgtaggtggacacaaagtgcctaca

SEQ ID NO: 71829 - DNA, 30 bp, Artificial Sequence
  Synthetic oligonucleotide
aagggggtggaatatcccagcacttctaca

SEQ ID NO: 71830 - DNA, 30 bp, Artificial Sequence
  Synthetic oligonucleotide
aaccatatacaagaggtggaaggtagtaca

SEQ ID NO: 71831 - DNA, 30 bp, Artificial Sequence
  Synthetic oligonucleotide
ggcaggggttagtatgccgtctaccgtaca

SEQ ID NO: 71832 - DNA, 30 bp, Artificial Sequence
  Synthetic oligonucleotide
ccttaagcatcacaagcggcctatcgtaca

SEQ ID NO: 71833 - DNA, 30 bp, Artificial Sequence
  Synthetic oligonucleotide
gtcaatcgagtatgtagaaacgttcgtaca

SEQ ID NO: 71834 - DNA, 30 bp, Artificial Sequence
  Synthetic oligonucleotide
gcagaacgcacaacagcgatagagggtaca

SEQ ID NO: 71835 - DNA, 30 bp, Artificial Sequence
  Synthetic oligonucleotide
tggaacacacatcaaaaaactatttgtaca

SEQ ID NO: 71836 - DNA, 30 bp, Artificial Sequence
  Synthetic oligonucleotide
cgaaaaattgttctgtagaactccattaca

SEQ ID NO: 71837 - DNA, 30 bp, Artificial Sequence
  Synthetic oligonucleotide
ctacggaccaacttaggcaacgtcattaca

SEQ ID NO: 71838 - DNA, 30 bp, Artificial Sequence
  Synthetic oligonucleotide
acgtgaagggacgcacgataaaaacttaca

SEQ ID NO: 71839 - DNA, 30 bp, Artificial Sequence
  Synthetic oligonucleotide
atgaagcgggaaaatggacatcctcttaca

SEQ ID NO: 71840 - DNA, 30 bp, Artificial Sequence
  Synthetic oligonucleotide
gtcgcaacagaaagtgtcgtagtatttaca

SEQ ID NO: 71841 - DNA, 30 bp, Artificial Sequence
  Synthetic oligonucleotide
ggctcccgaataaggtaggggtcttaacca

SEQ ID NO: 71842 - DNA, 30 bp, Artificial Sequence
  Synthetic oligonucleotide
acatgtctccagattggatttagcacacca

SEQ ID NO: 71843 - DNA, 30 bp, Artificial Sequence
  Synthetic oligonucleotide
gtgcgtagaagtgctaagttatgagcacca

SEQ ID NO: 71844 - DNA, 30 bp, Artificial Sequence
  Synthetic oligonucleotide
gtaaggcagtgtgaattaaagcggtcacca

SEQ ID NO: 71845 - DNA, 30 bp, Artificial Sequence
  Synthetic oligonucleotide
tccttgcgcaattacagtcacaggagacca

SEQ ID NO: 71846 - DNA, 30 bp, Artificial Sequence
  Synthetic oligonucleotide
ccgtacgagagaacaagcatgtgccgacca

SEQ ID NO: 71847 - DNA, 30 bp, Artificial Sequence
  Synthetic oligonucleotide
gactgaaggacgtgtggcggcgcaatacca

SEQ ID NO: 71848 - DNA, 30 bp, Artificial Sequence
  Synthetic oligonucleotide
gcgaagcggtatgtgtcgaaggtgctacca

SEQ ID NO: 71849 - DNA, 30 bp, Artificial Sequence
  Synthetic oligonucleotide
cggtagtaaaagtggaggagctaagtacca

SEQ ID NO: 71850 - DNA, 30 bp, Artificial Sequence
  Synthetic oligonucleotide
atgtgtcatcgtatccccaacccattacca

SEQ ID NO: 71851 - DNA, 30 bp, Artificial Sequence
  Synthetic oligonucleotide
gcaagtacaagtgtcagaggcgagaaccca

SEQ ID NO: 71852 - DNA, 30 bp, Artificial Sequence
  Synthetic oligonucleotide
agtatgatagagctaatgcaagcgaaccca

SEQ ID NO: 71853 - DNA, 30 bp, Artificial Sequence
  Synthetic oligonucleotide
ctgtgacatggaaatccgctgaaagaccca

SEQ ID NO: 71854 - DNA, 30 bp, Artificial Sequence
  Synthetic oligonucleotide
gctagaggaaggcttttataatcgtaccca

SEQ ID NO: 71855 - DNA, 30 bp, Artificial Sequence
  Synthetic oligonucleotide
aagaactgtgtgaagggaagattggcccca

SEQ ID NO: 71856 - DNA, 30 bp, Artificial Sequence
  Synthetic oligonucleotide
atcgagataacaaggttcgataaaagccca

SEQ ID NO: 71857 - DNA, 30 bp, Artificial Sequence
  Synthetic oligonucleotide
gaggaaaatgccagggtccacgtaagccca

SEQ ID NO: 71858 - DNA, 30 bp, Artificial Sequence
  Synthetic oligonucleotide
acgaggtagagctttggattgagcagccca

SEQ ID NO: 71859 - DNA, 30 bp, Artificial Sequence
  Synthetic oligonucleotide
cgaaacgggctatggctcgactgaggccca

SEQ ID NO: 71860 - DNA, 30 bp, Artificial Sequence
  Synthetic oligonucleotide
cggacttaccgcgggtgaaaacacggccca

SEQ ID NO: 71861 - DNA, 30 bp, Artificial Sequence
  Synthetic oligonucleotide
gacgtcgtagcaaagtagagatgctgccca

SEQ ID NO: 71862 - DNA, 30 bp, Artificial Sequence
  Synthetic oligonucleotide
tcaatttaactactgaaagcgtcgatccca

SEQ ID NO: 71863 - DNA, 30 bp, Artificial Sequence
  Synthetic oligonucleotide
caacattattcggccgtctaagggatccca

SEQ ID NO: 71864 - DNA, 30 bp, Artificial Sequence
  Synthetic oligonucleotide
acgagttcatatcgaaagtattaactccca

SEQ ID NO: 71865 - DNA, 30 bp, Artificial Sequence
  Synthetic oligonucleotide
acacattgacgagggtcagaaagcctccca

SEQ ID NO: 71866 - DNA, 30 bp, Artificial Sequence
  Synthetic oligonucleotide
cataacgtgtagttgctagtcggtgtccca

SEQ ID NO: 71867 - DNA, 30 bp, Artificial Sequence
  Synthetic oligonucleotide
ccataaaatgagacgtatggcgacttccca

SEQ ID NO: 71868 - DNA, 30 bp, Artificial Sequence
  Synthetic oligonucleotide
cgaaagaaggctattcgaaccttcaagcca

SEQ ID NO: 71869 - DNA, 30 bp, Artificial Sequence
  Synthetic oligonucleotide
atcgcgaattacgaagcccgtgggaagcca

SEQ ID NO: 71870 - DNA, 30 bp, Artificial Sequence
  Synthetic oligonucleotide
acgtttaaagagcaaagagtgaaccagcca

SEQ ID NO: 71871 - DNA, 30 bp, Artificial Sequence
  Synthetic oligonucleotide
tatggcgtcggtagggtagaaactcagcca

SEQ ID NO: 71872 - DNA, 30 bp, Artificial Sequence
  Synthetic oligonucleotide
aggtcaggggcttcgttagagtgcgagcca

SEQ ID NO: 71873 - DNA, 30 bp, Artificial Sequence
  Synthetic oligonucleotide
cgaaaccgactatagaataagcgttagcca

SEQ ID NO: 71874 - DNA, 30 bp, Artificial Sequence
  Synthetic oligonucleotide
tagcccaaacgacactgtacgagctcgcca

SEQ ID NO: 71875 - DNA, 30 bp, Artificial Sequence
  Synthetic oligonucleotide
tagatgatcaaaagatttaacatctcgcca

SEQ ID NO: 71876 - DNA, 30 bp, Artificial Sequence
  Synthetic oligonucleotide
cgtaccacctcgttccttcgtatctcgcca

SEQ ID NO: 71877 - DNA, 30 bp, Artificial Sequence
  Synthetic oligonucleotide
tacataaaaagcagctcgctagcgaggcca

SEQ ID NO: 71878 - DNA, 30 bp, Artificial Sequence
  Synthetic oligonucleotide
tcatactgtcgacggcccatagagtggcca

SEQ ID NO: 71879 - DNA, 30 bp, Artificial Sequence
  Synthetic oligonucleotide
ggtataggatagtgaagtaaatagtggcca

SEQ ID NO: 71880 - DNA, 30 bp, Artificial Sequence
  Synthetic oligonucleotide
tgatatcagccaagtccgaggccgatgcca

SEQ ID NO: 71881 - DNA, 30 bp, Artificial Sequence
  Synthetic oligonucleotide
taaattgaaaaagatgacagagccctgcca

SEQ ID NO: 71882 - DNA, 30 bp, Artificial Sequence
  Synthetic oligonucleotide
cacggtcaagccggaagtagttccctgcca

SEQ ID NO: 71883 - DNA, 30 bp, Artificial Sequence
  Synthetic oligonucleotide
caaaggcgatccgacacgagctctctgcca

SEQ ID NO: 71884 - DNA, 30 bp, Artificial Sequence
  Synthetic oligonucleotide
caaggtcgtgagttgaatatccgtctgcca

SEQ ID NO: 71885 - DNA, 30 bp, Artificial Sequence
  Synthetic oligonucleotide
aacgtttgaaggtacggatgggcggtgcca

SEQ ID NO: 71886 - DNA, 30 bp, Artificial Sequence
  Synthetic oligonucleotide
gagggtacaaacaccacttacacattgcca

SEQ ID NO: 71887 - DNA, 30 bp, Artificial Sequence
  Synthetic oligonucleotide
gcaagaaaggcgcagggaaggttgttgcca

SEQ ID NO: 71888 - DNA, 30 bp, Artificial Sequence
  Synthetic oligonucleotide
gactaaatacagcaagacctcttaaatcca

SEQ ID NO: 71889 - DNA, 30 bp, Artificial Sequence
  Synthetic oligonucleotide
gtggagtggtgctaacgtaccaacaatcca

SEQ ID NO: 71890 - DNA, 30 bp, Artificial Sequence
  Synthetic oligonucleotide
aatggcatcgatacaataacagagaatcca

SEQ ID NO: 71891 - DNA, 30 bp, Artificial Sequence
  Synthetic oligonucleotide
tgctcagggttgaaatctcggtcacatcca

SEQ ID NO: 71892 - DNA, 30 bp, Artificial Sequence
  Synthetic oligonucleotide
atcggcttgaagatttagaggtaagatcca

SEQ ID NO: 71893 - DNA, 30 bp, Artificial Sequence
  Synthetic oligonucleotide
agtaaaacacagcaccttagcgccgatcca

SEQ ID NO: 71894 - DNA, 30 bp, Artificial Sequence
  Synthetic oligonucleotide
ggagtaagagcagcagccaggtctgatcca

SEQ ID NO: 71895 - DNA, 30 bp, Artificial Sequence
  Synthetic oligonucleotide
cgccctggtagcccgacgatatagactcca

SEQ ID NO: 71896 - DNA, 30 bp, Artificial Sequence
  Synthetic oligonucleotide
cattaaggtgattatacggatacgactcca

SEQ ID NO: 71897 - DNA, 30 bp, Artificial Sequence
  Synthetic oligonucleotide
aaggacgagggatccaggaagtgtcctcca

SEQ ID NO: 71898 - DNA, 30 bp, Artificial Sequence
  Synthetic oligonucleotide
accgagtcgagctaaggtagatcaagtcca

SEQ ID NO: 71899 - DNA, 30 bp, Artificial Sequence
  Synthetic oligonucleotide
gggaatcggtcgcgcacgagccaatgtcca

SEQ ID NO: 71900 - DNA, 30 bp, Artificial Sequence
  Synthetic oligonucleotide
atcggaaaacttatcgaattgaactgtcca

SEQ ID NO: 71901 - DNA, 30 bp, Artificial Sequence
  Synthetic oligonucleotide
gcgaatctacattcgtcaagttgcattcca

SEQ ID NO: 71902 - DNA, 30 bp, Artificial Sequence
  Synthetic oligonucleotide
aagattgtaaagcgagagaggttgattcca

SEQ ID NO: 71903 - DNA, 30 bp, Artificial Sequence
  Synthetic oligonucleotide
cggcagagacacctgagtagcacccttcca

SEQ ID NO: 71904 - DNA, 30 bp, Artificial Sequence
  Synthetic oligonucleotide
agcgagagacccttataaatactaaaagca

SEQ ID NO: 71905 - DNA, 30 bp, Artificial Sequence
  Synthetic oligonucleotide
aggtatgagcgtctctaatccgtgaaagca

SEQ ID NO: 71906 - DNA, 30 bp, Artificial Sequence
  Synthetic oligonucleotide
catcttttgtcaagtaaacgggtgaaagca

SEQ ID NO: 71907 - DNA, 30 bp, Artificial Sequence
  Synthetic oligonucleotide
ctagggtgcaatgtccaggtagagcaagca

SEQ ID NO: 71908 - DNA, 30 bp, Artificial Sequence
  Synthetic oligonucleotide
ggttaggttataagagcagcaactcaagca

SEQ ID NO: 71909 - DNA, 30 bp, Artificial Sequence
  Synthetic oligonucleotide
acggaatctaataggaacaggtctcaagca

SEQ ID NO: 71910 - DNA, 30 bp, Artificial Sequence
  Synthetic oligonucleotide
gtaagaagtcgatcgtacgaaggagaagca

SEQ ID NO: 71911 - DNA, 30 bp, Artificial Sequence
  Synthetic oligonucleotide
cgactactcgagaagtgcggaatggaagca

SEQ ID NO: 71912 - DNA, 30 bp, Artificial Sequence
  Synthetic oligonucleotide
gccgtccagcgtcatatttcgaactaagca

SEQ ID NO: 71913 - DNA, 30 bp, Artificial Sequence
  Synthetic oligonucleotide
caggtaagtaagagaaccccgagctaagca

SEQ ID NO: 71914 - DNA, 30 bp, Artificial Sequence
  Synthetic oligonucleotide
taaaggttaggggtgaggcccatctaagca

SEQ ID NO: 71915 - DNA, 30 bp, Artificial Sequence
  Synthetic oligonucleotide
ggaatgtagtgaatagcggatccgtaagca

SEQ ID NO: 71916 - DNA, 30 bp, Artificial Sequence
  Synthetic oligonucleotide
gcgtcaattcaggtgatctgatacacagca

SEQ ID NO: 71917 - DNA, 30 bp, Artificial Sequence
  Synthetic oligonucleotide
ccgacgtcttgccagatagatagcacagca

SEQ ID NO: 71918 - DNA, 30 bp, Artificial Sequence
  Synthetic oligonucleotide
catagagtgttcggacggcagatgacagca

SEQ ID NO: 71919 - DNA, 30 bp, Artificial Sequence
  Synthetic oligonucleotide
gacaccccagtcttgtgagaagccccagca

SEQ ID NO: 71920 - DNA, 30 bp, Artificial Sequence
  Synthetic oligonucleotide
ctcgtccaagataatggactcggtccagca

SEQ ID NO: 71921 - DNA, 30 bp, Artificial Sequence
  Synthetic oligonucleotide
aaggcgccacttggctaggagatagcagca

SEQ ID NO: 71922 - DNA, 30 bp, Artificial Sequence
  Synthetic oligonucleotide
aggagggtgagtccccgaacttgcgcagca

SEQ ID NO: 71923 - DNA, 31 bp, Artificial Sequence
  Synthetic oligonucleotide
acatggtcatagtaatgttccaatcgcagca

SEQ ID NO: 71924 - DNA, 30 bp, Artificial Sequence
  Synthetic oligonucleotide
ggattggggaaaagtcacaggtatgcagca

SEQ ID NO: 71925 - DNA, 30 bp, Artificial Sequence
  Synthetic oligonucleotide
atctggcagtctggactgcgcaaatcagca

SEQ ID NO: 71926 - DNA, 30 bp, Artificial Sequence
  Synthetic oligonucleotide
tatcgagaatcacaggattcttccagagca

SEQ ID NO: 71927 - DNA, 30 bp, Artificial Sequence
  Synthetic oligonucleotide
tcgaaccaattagagccacttagccgagca

SEQ ID NO: 71928 - DNA, 30 bp, Artificial Sequence
  Synthetic oligonucleotide
gatactaacacaatgggatattgaggagca

SEQ ID NO: 71929 - DNA, 30 bp, Artificial Sequence
  Synthetic oligonucleotide
aaagctttggcgacaattggaaatggagca

SEQ ID NO: 71930 - DNA, 30 bp, Artificial Sequence
  Synthetic oligonucleotide
ataagcgggaacaccctatagtttggagca

SEQ ID NO: 71931 - DNA, 30 bp, Artificial Sequence
  Synthetic oligonucleotide
ctaactgatggtcagagtcgtgactgagca

SEQ ID NO: 71932 - DNA, 30 bp, Artificial Sequence
  Synthetic oligonucleotide
ccgtgtaagaattatcgctaactttgagca

SEQ ID NO: 71933 - DNA, 30 bp, Artificial Sequence
  Synthetic oligonucleotide
actgcacgatcagtagaagtattcatagca

SEQ ID NO: 71934 - DNA, 30 bp, Artificial Sequence
  Synthetic oligonucleotide
tgaccgaacgcaagttatcagttcatagca

SEQ ID NO: 71935 - DNA, 30 bp, Artificial Sequence
  Synthetic oligonucleotide
tatttgaccaaaagagtaaactaactagca

SEQ ID NO: 71936 - DNA, 30 bp, Artificial Sequence
  Synthetic oligonucleotide
ggtcgtcgatacagagccaaggagctagca

SEQ ID NO: 71937 - DNA, 30 bp, Artificial Sequence
  Synthetic oligonucleotide
ataaggctaactttgaagtaaaaagtagca

SEQ ID NO: 71938 - DNA, 30 bp, Artificial Sequence
  Synthetic oligonucleotide
aaaaaggaccaaaatatagttagagtagca

SEQ ID NO: 71939 - DNA, 30 bp, Artificial Sequence
  Synthetic oligonucleotide
cactgtgaccatagaaattattcggtagca

SEQ ID NO: 71940 - DNA, 30 bp, Artificial Sequence
  Synthetic oligonucleotide
aagggaccaggtaactattctagtgtagca

SEQ ID NO: 71941 - DNA, 30 bp, Artificial Sequence
  Synthetic oligonucleotide
cagatagcgaaaaaacggggaagattagca

SEQ ID NO: 71942 - DNA, 30 bp, Artificial Sequence
  Synthetic oligonucleotide
agaaatgtgtcaaggactattaggttagca

SEQ ID NO: 71943 - DNA, 30 bp, Artificial Sequence
  Synthetic oligonucleotide
cgtaacggtcagtctgagcgacgtttagca

SEQ ID NO: 71944 - DNA, 30 bp, Artificial Sequence
  Synthetic oligonucleotide
caaggcagtaatgccggttcgaggaacgca

SEQ ID NO: 71945 - DNA, 30 bp, Artificial Sequence
  Synthetic oligonucleotide
ctacgtacaagggcgataacgcggaacgca

SEQ ID NO: 71946 - DNA, 30 bp, Artificial Sequence
  Synthetic oligonucleotide
aaggcgaagtggtcggcagtactccacgca

SEQ ID NO: 71947 - DNA, 30 bp, Artificial Sequence
  Synthetic oligonucleotide
tcgagcaggatcgacccaccaatcgacgca

SEQ ID NO: 71948 - DNA, 30 bp, Artificial Sequence
  Synthetic oligonucleotide
gacactgggataggttatgagcgctacgca

SEQ ID NO: 71949 - DNA, 30 bp, Artificial Sequence
  Synthetic oligonucleotide
gtgtgtagcctacaggcatctgagtacgca

SEQ ID NO: 71950 - DNA, 30 bp, Artificial Sequence
  Synthetic oligonucleotide
acggcacgtccaagtttgaggaaaaccgca

SEQ ID NO: 71951 - DNA, 30 bp, Artificial Sequence
  Synthetic oligonucleotide
aaggaggctaattagtcggcggcgaccgca

SEQ ID NO: 71952 - DNA, 30 bp, Artificial Sequence
  Synthetic oligonucleotide
ataggaggggtgtaaatgtcatgggccgca

SEQ ID NO: 71953 - DNA, 30 bp, Artificial Sequence
  Synthetic oligonucleotide
taacattcagtcaatgggaaggtggccgca

SEQ ID NO: 71954 - DNA, 30 bp, Artificial Sequence
  Synthetic oligonucleotide
agtatatttgaacctgaacagttaagcgca

SEQ ID NO: 71955 - DNA, 30 bp, Artificial Sequence
  Synthetic oligonucleotide
cacggttactcttttgtaacagagagcgca

SEQ ID NO: 71956 - DNA, 30 bp, Artificial Sequence
  Synthetic oligonucleotide
ttggaaagtcatcgatatatagggagcgca

SEQ ID NO: 71957 - DNA, 30 bp, Artificial Sequence
  Synthetic oligonucleotide
ccgagtagacgcatggattagattagcgca

SEQ ID NO: 71958 - DNA, 30 bp, Artificial Sequence
  Synthetic oligonucleotide
tactcgcaggccaaaaaaagtgggcgcgca

SEQ ID NO: 71959 - DNA, 30 bp, Artificial Sequence
  Synthetic oligonucleotide
ccccatgactatggcatgaaactgcgcgca

SEQ ID NO: 71960 - DNA, 30 bp, Artificial Sequence
  Synthetic oligonucleotide
atgctagccagcgtgaatcgcaccggcgca

SEQ ID NO: 71961 - DNA, 30 bp, Artificial Sequence
  Synthetic oligonucleotide
cggattggataccgtcgataaatgggcgca

SEQ ID NO: 71962 - DNA, 30 bp, Artificial Sequence
  Synthetic oligonucleotide
aatataaggcctaggagactgatatgcgca

SEQ ID NO: 71963 - DNA, 30 bp, Artificial Sequence
  Synthetic oligonucleotide
tcatgaacggggcctcggtagggcatcgca

SEQ ID NO: 71964 - DNA, 30 bp, Artificial Sequence
  Synthetic oligonucleotide
agccgatgatgtgtcagccaaaatctcgca

SEQ ID NO: 71965 - DNA, 30 bp, Artificial Sequence
  Synthetic oligonucleotide
catgaagtctgctcaatttatttcgtcgca

SEQ ID NO: 71966 - DNA, 30 bp, Artificial Sequence
  Synthetic oligonucleotide
ccataactcactggcactgggatggtcgca

SEQ ID NO: 71967 - DNA, 30 bp, Artificial Sequence
  Synthetic oligonucleotide
tacgcgtgctgagtgtacggcgaattcgca

SEQ ID NO: 71968 - DNA, 30 bp, Artificial Sequence
  Synthetic oligonucleotide
tttcgagcgggtagtggtcgtgatttcgca

SEQ ID NO: 71969 - DNA, 30 bp, Artificial Sequence
  Synthetic oligonucleotide
cggaactggctcgtataaccattacaggca

SEQ ID NO: 71970 - DNA, 30 bp, Artificial Sequence
  Synthetic oligonucleotide
tgtaatagggcggccgataagcatcaggca

SEQ ID NO: 71971 - DNA, 30 bp, Artificial Sequence
  Synthetic oligonucleotide
caaaccgaccccctggaaaaaaaagaggca

SEQ ID NO: 71972 - DNA, 30 bp, Artificial Sequence
  Synthetic oligonucleotide
tgcgaggctaagttcacatacgcataggca

SEQ ID NO: 71973 - DNA, 30 bp, Artificial Sequence
  Synthetic oligonucleotide
ggctagtcgaagatcagactcccgtaggca

SEQ ID NO: 71974 - DNA, 30 bp, Artificial Sequence
  Synthetic oligonucleotide
ctgcatcgagtttcaagggggttaccggca

SEQ ID NO: 71975 - DNA, 30 bp, Artificial Sequence
  Synthetic oligonucleotide
atgggcgatcttagaagtctccgcgcggca

SEQ ID NO: 71976 - DNA, 30 bp, Artificial Sequence
  Synthetic oligonucleotide
tggagacatggtggattccgataggcggca

SEQ ID NO: 71977 - DNA, 30 bp, Artificial Sequence
  Synthetic oligonucleotide
acactgattgggcacttacttccttcggca

SEQ ID NO: 71978 - DNA, 30 bp, Artificial Sequence
  Synthetic oligonucleotide
cgaactgatatgaatagcacgttttcggca

SEQ ID NO: 71979 - DNA, 30 bp, Artificial Sequence
  Synthetic oligonucleotide
gcctggcggtctgttgaattaggaagggca

SEQ ID NO: 71980 - DNA, 30 bp, Artificial Sequence
  Synthetic oligonucleotide
aggcaagtgttgtcaagctcgtatagggca

SEQ ID NO: 71981 - DNA, 30 bp, Artificial Sequence
  Synthetic oligonucleotide
gtgaatgtagcgttaggctcaacacgggca

SEQ ID NO: 71982 - DNA, 30 bp, Artificial Sequence
  Synthetic oligonucleotide
gtattgggcacgaagcccgagtgaatggca

SEQ ID NO: 71983 - DNA, 30 bp, Artificial Sequence
  Synthetic oligonucleotide
attaggaaacccgcgtaccaagggatggca

SEQ ID NO: 71984 - DNA, 30 bp, Artificial Sequence
  Synthetic oligonucleotide
ttaaggcgtgtaccaagctgagcaaatgca

SEQ ID NO: 71985 - DNA, 30 bp, Artificial Sequence
  Synthetic oligonucleotide
gtaaaggggacagccctaccatgcaatgca

SEQ ID NO: 71986 - DNA, 30 bp, Artificial Sequence
  Synthetic oligonucleotide
ggcacgagctggatgttagagttagatgca

SEQ ID NO: 71987 - DNA, 30 bp, Artificial Sequence
  Synthetic oligonucleotide
gggaggatgaccgaaacaaacccaactgca

SEQ ID NO: 71988 - DNA, 30 bp, Artificial Sequence
  Synthetic oligonucleotide
cgcggacattttgtctggcacagaggtgca

SEQ ID NO: 71989 - DNA, 30 bp, Artificial Sequence
  Synthetic oligonucleotide
ctagtgataacgttcacgagcgtaggtgca

SEQ ID NO: 71990 - DNA, 30 bp, Artificial Sequence
  Synthetic oligonucleotide
aaggccttgggcgtcggtgtcgactgtgca

SEQ ID NO: 71991 - DNA, 30 bp, Artificial Sequence
  Synthetic oligonucleotide
catcacgcaatctactccagtggctgtgca

SEQ ID NO: 71992 - DNA, 30 bp, Artificial Sequence
  Synthetic oligonucleotide
gtcaatacaatgggcgaagccaagattgca

SEQ ID NO: 71993 - DNA, 30 bp, Artificial Sequence
  Synthetic oligonucleotide
taaacaggcagtcggaggaataagattgca

SEQ ID NO: 71994 - DNA, 30 bp, Artificial Sequence
  Synthetic oligonucleotide
gggacatccttaatatagccgggagttgca

SEQ ID NO: 71995 - DNA, 30 bp, Artificial Sequence
  Synthetic oligonucleotide
cgagacggttggggggggagcagatttgca

SEQ ID NO: 71996 - DNA, 30 bp, Artificial Sequence
  Synthetic oligonucleotide
tcaagacaggttattatagtgaccaaatca

SEQ ID NO: 71997 - DNA, 30 bp, Artificial Sequence
  Synthetic oligonucleotide
atacgtcaggatcaatagcgcaatcaatca

SEQ ID NO: 71998 - DNA, 30 bp, Artificial Sequence
  Synthetic oligonucleotide
tcggaactgtgtcggcgtagatttcaatca

SEQ ID NO: 71999 - DNA, 30 bp, Artificial Sequence
  Synthetic oligonucleotide
ggggctaagagccatacctgacaagaatca

SEQ ID NO: 72000 - DNA, 30 bp, Artificial Sequence
  Synthetic oligonucleotide
ctcggtcctcggaagaaccattaagaatca

SEQ ID NO: 72001 - DNA, 30 bp, Artificial Sequence
  Synthetic oligonucleotide
ggagacaagtatgtgaccacgcgggaatca

SEQ ID NO: 72002 - DNA, 30 bp, Artificial Sequence
  Synthetic oligonucleotide
agtaagcagtgaggggctcccccctaatca

SEQ ID NO: 72003 - DNA, 30 bp, Artificial Sequence
  Synthetic oligonucleotide
ggggttggattgatcgtaagttgctaatca

SEQ ID NO: 72004 - DNA, 30 bp, Artificial Sequence
  Synthetic oligonucleotide
acgatttactacccctaacgtttgtaatca

SEQ ID NO: 72005 - DNA, 30 bp, Artificial Sequence
  Synthetic oligonucleotide
tgcaaggaagaaagtcgcagggggacatca

SEQ ID NO: 72006 - DNA, 30 bp, Artificial Sequence
  Synthetic oligonucleotide
gcaggcccgatagcactagaccgtacatca

SEQ ID NO: 72007 - DNA, 30 bp, Artificial Sequence
  Synthetic oligonucleotide
tgcaggccgaggaggcaagccgccgcatca

SEQ ID NO: 72008 - DNA, 30 bp, Artificial Sequence
  Synthetic oligonucleotide
gcatccggatcgggtcaaagcgccgcatca

SEQ ID NO: 72009 - DNA, 30 bp, Artificial Sequence
  Synthetic oligonucleotide
tcagttaggtgctccaggcacacggcatca

SEQ ID NO: 72010 - DNA, 30 bp, Artificial Sequence
  Synthetic oligonucleotide
tcgtgatgagttttggcttcagctgcatca

SEQ ID NO: 72011 - DNA, 30 bp, Artificial Sequence
  Synthetic oligonucleotide
gcacggtgaggaataaggttagtgtcatca

SEQ ID NO: 72012 - DNA, 30 bp, Artificial Sequence
  Synthetic oligonucleotide
taggtcgaaatgcgatcatacgagagatca

SEQ ID NO: 72013 - DNA, 30 bp, Artificial Sequence
  Synthetic oligonucleotide
aacaggacaagtcacagaggtaatcgatca

SEQ ID NO: 72014 - DNA, 30 bp, Artificial Sequence
  Synthetic oligonucleotide
cagcctcaggctcggatggtaaaaggatca

SEQ ID NO: 72015 - DNA, 30 bp, Artificial Sequence
  Synthetic oligonucleotide
atacggtatgtttggcagaatcacggatca

SEQ ID NO: 72016 - DNA, 30 bp, Artificial Sequence
  Synthetic oligonucleotide
ggggggctctcccggtaacgatttggatca

SEQ ID NO: 72017 - DNA, 30 bp, Artificial Sequence
  Synthetic oligonucleotide
ggccggcgggacgagacgcaaccatgatca

SEQ ID NO: 72018 - DNA, 30 bp, Artificial Sequence
  Synthetic oligonucleotide
aggggagatccgtgatcgcaggattgatca

SEQ ID NO: 72019 - DNA, 30 bp, Artificial Sequence
  Synthetic oligonucleotide
gcgtgccgtggggtcagttgacagatatca

SEQ ID NO: 72020 - DNA, 30 bp, Artificial Sequence
  Synthetic oligonucleotide
ggcaaacaaatcaaagcgtaaacgatatca

SEQ ID NO: 72021 - DNA, 30 bp, Artificial Sequence
  Synthetic oligonucleotide
catgttcacaaggggaatgtgtcactatca

SEQ ID NO: 72022 - DNA, 30 bp, Artificial Sequence
  Synthetic oligonucleotide
cctggggtctcgttccaagaaaacctatca

SEQ ID NO: 72023 - DNA, 30 bp, Artificial Sequence
  Synthetic oligonucleotide
tgcgaaacttgtgtatgcaatggtctatca

SEQ ID NO: 72024 - DNA, 30 bp, Artificial Sequence
  Synthetic oligonucleotide
gacctcggacattgctggaagcgtgtatca

SEQ ID NO: 72025 - DNA, 30 bp, Artificial Sequence
  Synthetic oligonucleotide
aggtgaagaaacaaaactgtgagaaactca

SEQ ID NO: 72026 - DNA, 30 bp, Artificial Sequence
  Synthetic oligonucleotide
acaagtcacagtgtaaggaggaacaactca

SEQ ID NO: 72027 - DNA, 30 bp, Artificial Sequence
  Synthetic oligonucleotide
ggcaataacgatggaaatcgtaacaactca

SEQ ID NO: 72028 - DNA, 30 bp, Artificial Sequence
  Synthetic oligonucleotide
ctcgtaagcgtgtaaggtcctgtcaactca

SEQ ID NO: 72029 - DNA, 30 bp, Artificial Sequence
  Synthetic oligonucleotide
aggacgaccatatccaaggttaatcactca

SEQ ID NO: 72030 - DNA, 30 bp, Artificial Sequence
  Synthetic oligonucleotide
acaattgtcatggtatgagggtaagactca

SEQ ID NO: 72031 - DNA, 30 bp, Artificial Sequence
  Synthetic oligonucleotide
cctggctgagcaccggataagcatccctca

SEQ ID NO: 72032 - DNA, 30 bp, Artificial Sequence
  Synthetic oligonucleotide
tgggccgagccattaaatattgacagctca

SEQ ID NO: 72033 - DNA, 30 bp, Artificial Sequence
  Synthetic oligonucleotide
ccggcataaaactggcaaagatttagctca

SEQ ID NO: 72034 - DNA, 30 bp, Artificial Sequence
  Synthetic oligonucleotide
gatagaggaggtcgaggcatggaccgctca

SEQ ID NO: 72035 - DNA, 30 bp, Artificial Sequence
  Synthetic oligonucleotide
acgtaagttcggatatgtaactttcgctca

SEQ ID NO: 72036 - DNA, 30 bp, Artificial Sequence
  Synthetic oligonucleotide
actagacgtcagttcggtagaacaggctca

SEQ ID NO: 72037 - DNA, 30 bp, Artificial Sequence
  Synthetic oligonucleotide
ggcaggaagaagaggcgtaggaatggctca

SEQ ID NO: 72038 - DNA, 30 bp, Artificial Sequence
  Synthetic oligonucleotide
cagaacgagaaccttcgttgtagtggctca

SEQ ID NO: 72039 - DNA, 30 bp, Artificial Sequence
  Synthetic oligonucleotide
tcaataaggggcaatattgttggctgctca

SEQ ID NO: 72040 - DNA, 30 bp, Artificial Sequence
  Synthetic oligonucleotide
atcagtaggggatcaaggagatgctgctca

SEQ ID NO: 72041 - DNA, 30 bp, Artificial Sequence
  Synthetic oligonucleotide
agggccagcggaggtatacacaccatctca

SEQ ID NO: 72042 - DNA, 30 bp, Artificial Sequence
  Synthetic oligonucleotide
acggcaaacctgttggactgtcggatctca

SEQ ID NO: 72043 - DNA, 30 bp, Artificial Sequence
  Synthetic oligonucleotide
ctaactaaaggaatttggctaaagctctca

SEQ ID NO: 72044 - DNA, 30 bp, Artificial Sequence
  Synthetic oligonucleotide
aaaatgggggaagacgagaacgcgctctca

SEQ ID NO: 72045 - DNA, 30 bp, Artificial Sequence
  Synthetic oligonucleotide
ggaggatacaccgaatcggtatcagtctca

SEQ ID NO: 72046 - DNA, 30 bp, Artificial Sequence
  Synthetic oligonucleotide
tcgtccccaattactcgtcccaaggtctca

SEQ ID NO: 72047 - DNA, 30 bp, Artificial Sequence
  Synthetic oligonucleotide
actcatgccgggccgaacccatatgtctca

SEQ ID NO: 72048 - DNA, 30 bp, Artificial Sequence
  Synthetic oligonucleotide
agtggggctggctgagcgagattgcagtca

SEQ ID NO: 72049 - DNA, 30 bp, Artificial Sequence
  Synthetic oligonucleotide
gaagatcccttatcataatgtggtcagtca

SEQ ID NO: 72050 - DNA, 30 bp, Artificial Sequence
  Synthetic oligonucleotide
caagtagggacagcacagtaaacatagtca

SEQ ID NO: 72051 - DNA, 30 bp, Artificial Sequence
  Synthetic oligonucleotide
ttacagatccaaatatcatagttctagtca

SEQ ID NO: 72052 - DNA, 30 bp, Artificial Sequence
  Synthetic oligonucleotide
aggtccgccgggaactggaattcgtagtca

SEQ ID NO: 72053 - DNA, 30 bp, Artificial Sequence
  Synthetic oligonucleotide
gcgtcatcggttaatgacgagtagacgtca

SEQ ID NO: 72054 - DNA, 30 bp, Artificial Sequence
  Synthetic oligonucleotide
attgtacgcgaacagatgagattgacgtca

SEQ ID NO: 72055 - DNA, 30 bp, Artificial Sequence
  Synthetic oligonucleotide
caagtctggatggaagaacagagtacgtca

SEQ ID NO: 72056 - DNA, 30 bp, Artificial Sequence
  Synthetic oligonucleotide
cactcgcaacacgcttagttctcgccgtca

SEQ ID NO: 72057 - DNA, 30 bp, Artificial Sequence
  Synthetic oligonucleotide
tcttatgtaactttaacttaatgtccgtca

SEQ ID NO: 72058 - DNA, 30 bp, Artificial Sequence
  Synthetic oligonucleotide
tgagtcagctcaaccgagccagaggcgtca

SEQ ID NO: 72059 - DNA, 30 bp, Artificial Sequence
  Synthetic oligonucleotide
acattacggctagcctatgagactgcgtca

SEQ ID NO: 72060 - DNA, 30 bp, Artificial Sequence
  Synthetic oligonucleotide
tgcgtgcccagtaacacggatgggtcgtca

SEQ ID NO: 72061 - DNA, 30 bp, Artificial Sequence
  Synthetic oligonucleotide
ggagggccagagtcgtaattctggaggtca

SEQ ID NO: 72062 - DNA, 30 bp, Artificial Sequence
  Synthetic oligonucleotide
aaaagactcccacactggcgggtgaggtca

SEQ ID NO: 72063 - DNA, 30 bp, Artificial Sequence
  Synthetic oligonucleotide
aggtaaggaatcacgagcccagaacggtca

SEQ ID NO: 72064 - DNA, 30 bp, Artificial Sequence
  Synthetic oligonucleotide
ggactcgttatgatcggatagcaagggtca

SEQ ID NO: 72065 - DNA, 30 bp, Artificial Sequence
  Synthetic oligonucleotide
aaccctacgcgagagcgccggcgcgggtca

SEQ ID NO: 72066 - DNA, 30 bp, Artificial Sequence
  Synthetic oligonucleotide
tacagaaaggatacgaggaccactgggtca

SEQ ID NO: 72067 - DNA, 29 bp, Artificial Sequence
  Synthetic oligonucleotide
aggagcgtcagtgagcagttactgggtca

SEQ ID NO: 72068 - DNA, 30 bp, Artificial Sequence
  Synthetic oligonucleotide
gcaaagtccttaacaaatcgggttgggtca

SEQ ID NO: 72069 - DNA, 30 bp, Artificial Sequence
  Synthetic oligonucleotide
ggccatcgctcgctctaatgctactggtca

SEQ ID NO: 72070 - DNA, 30 bp, Artificial Sequence
  Synthetic oligonucleotide
gggaccgagcggtatatgaacgacttgtca

SEQ ID NO: 72071 - DNA, 30 bp, Artificial Sequence
  Synthetic oligonucleotide
tatctcggaaggaaaacgtggtgcttgtca

SEQ ID NO: 72072 - DNA, 30 bp, Artificial Sequence
  Synthetic oligonucleotide
tacaagccgggttaccgatgactgttgtca

SEQ ID NO: 72073 - DNA, 30 bp, Artificial Sequence
  Synthetic oligonucleotide
tgaggtgtagcgccaccggactctttgtca

SEQ ID NO: 72074 - DNA, 30 bp, Artificial Sequence
  Synthetic oligonucleotide
ataaagacttgaacaatattgagaaattca

SEQ ID NO: 72075 - DNA, 30 bp, Artificial Sequence
  Synthetic oligonucleotide
aggcaggaccggcgcaactgtacgcattca

SEQ ID NO: 72076 - DNA, 30 bp, Artificial Sequence
  Synthetic oligonucleotide
ggtaccgaggtgatcaaatcgggtgattca

SEQ ID NO: 72077 - DNA, 30 bp, Artificial Sequence
  Synthetic oligonucleotide
gcgtcagctgattgatggctatattattca

SEQ ID NO: 72078 - DNA, 30 bp, Artificial Sequence
  Synthetic oligonucleotide
ggataacagccaccgggacaacgagcttca

SEQ ID NO: 72079 - DNA, 30 bp, Artificial Sequence
  Synthetic oligonucleotide
taaagccataaagtaaggggcctcgcttca

SEQ ID NO: 72080 - DNA, 30 bp, Artificial Sequence
  Synthetic oligonucleotide
ggtgaacagaaccatcagctgtatcgttca

SEQ ID NO: 72081 - DNA, 30 bp, Artificial Sequence
  Synthetic oligonucleotide
catacacaggatatatacggataggtttca

SEQ ID NO: 72082 - DNA, 30 bp, Artificial Sequence
  Synthetic oligonucleotide
ggtcaaccgtgcaagcaccagtacaaaaga

SEQ ID NO: 72083 - DNA, 30 bp, Artificial Sequence
  Synthetic oligonucleotide
tgcacgtcatagtttccgacaaagaaaaga

SEQ ID NO: 72084 - DNA, 30 bp, Artificial Sequence
  Synthetic oligonucleotide
aaaatgaatggcgtgctcccaaggaaaaga

SEQ ID NO: 72085 - DNA, 30 bp, Artificial Sequence
  Synthetic oligonucleotide
catcaagaactgaagaggtggaaacaaaga

SEQ ID NO: 72086 - DNA, 30 bp, Artificial Sequence
  Synthetic oligonucleotide
agtagaccaaactgaaaacagcgacaaaga

SEQ ID NO: 72087 - DNA, 30 bp, Artificial Sequence
  Synthetic oligonucleotide
cggcttcgtaggcaacgtactatacaaaga

SEQ ID NO: 72088 - DNA, 30 bp, Artificial Sequence
  Synthetic oligonucleotide
agcgacgcaaagcaccagggagtacaaaga

SEQ ID NO: 72089 - DNA, 30 bp, Artificial Sequence
  Synthetic oligonucleotide
tacggagatgaatcctgaaagttacaaaga

SEQ ID NO: 72090 - DNA, 30 bp, Artificial Sequence
  Synthetic oligonucleotide
catggaatttatacgtaggtgggccaaaga

SEQ ID NO: 72091 - DNA, 30 bp, Artificial Sequence
  Synthetic oligonucleotide
tcagaaacttcgtgaaggcagtcgcaaaga

SEQ ID NO: 72092 - DNA, 30 bp, Artificial Sequence
  Synthetic oligonucleotide
gggtatggagggatcgttatatttcaaaga

SEQ ID NO: 72093 - DNA, 30 bp, Artificial Sequence
  Synthetic oligonucleotide
gggatacgggagggcctccgtaaagaaaga

SEQ ID NO: 72094 - DNA, 30 bp, Artificial Sequence
  Synthetic oligonucleotide
agtgggtctaaaactctttgcccggaaaga

SEQ ID NO: 72095 - DNA, 30 bp, Artificial Sequence
  Synthetic oligonucleotide
tggtatcgaattctatcaagggcggaaaga

SEQ ID NO: 72096 - DNA, 30 bp, Artificial Sequence
  Synthetic oligonucleotide
acaacgttcccgaagtaagtccttgaaaga

SEQ ID NO: 72097 - DNA, 30 bp, Artificial Sequence
  Synthetic oligonucleotide
ccgagagctagtacaggtcaaacataaaga

SEQ ID NO: 72098 - DNA, 30 bp, Artificial Sequence
  Synthetic oligonucleotide
cagacggccaagtcgtttcttccataaaga

SEQ ID NO: 72099 - DNA, 30 bp, Artificial Sequence
  Synthetic oligonucleotide
aaaggttgtacttggataatacgctaaaga

SEQ ID NO: 72100 - DNA, 30 bp, Artificial Sequence
  Synthetic oligonucleotide
ctgggccacgggtaaaagtacggttaaaga

SEQ ID NO: 72101 - DNA, 30 bp, Artificial Sequence
  Synthetic oligonucleotide
aggggatgaaacggtaaggatatttaaaga

SEQ ID NO: 72102 - DNA, 30 bp, Artificial Sequence
  Synthetic oligonucleotide
gggtgaacatatgagatgtttccaacaaga

SEQ ID NO: 72103 - DNA, 30 bp, Artificial Sequence
  Synthetic oligonucleotide
ggattgctaattacaatgtagagcccaaga

SEQ ID NO: 72104 - DNA, 30 bp, Artificial Sequence
  Synthetic oligonucleotide
cagtaaggacgtgggggcagtagagcaaga

SEQ ID NO: 72105 - DNA, 30 bp, Artificial Sequence
  Synthetic oligonucleotide
cccgccggtgtaaagcggcctaaggcaaga

SEQ ID NO: 72106 - DNA, 30 bp, Artificial Sequence
  Synthetic oligonucleotide
gaaaaaaggcaggcgtcctccctatcaaga

SEQ ID NO: 72107 - DNA, 30 bp, Artificial Sequence
  Synthetic oligonucleotide
gttaatggcactcaggggagtgtaagaaga

SEQ ID NO: 72108 - DNA, 30 bp, Artificial Sequence
  Synthetic oligonucleotide
gcgacttagtagtcgtggttattaagaaga

SEQ ID NO: 72109 - DNA, 30 bp, Artificial Sequence
  Synthetic oligonucleotide
cggatataagggttaaataggcacagaaga

SEQ ID NO: 72110 - DNA, 30 bp, Artificial Sequence
  Synthetic oligonucleotide
tgcgacgctacggagactggaaagagaaga

SEQ ID NO: 72111 - DNA, 30 bp, Artificial Sequence
  Synthetic oligonucleotide
ctcgttgcaccagtgcgatttgtgagaaga

SEQ ID NO: 72112 - DNA, 30 bp, Artificial Sequence
  Synthetic oligonucleotide
acggatccactgctggtcggaagacgaaga

SEQ ID NO: 72113 - DNA, 30 bp, Artificial Sequence
  Synthetic oligonucleotide
ggtcttgtcaaagccggccgggagtgaaga

SEQ ID NO: 72114 - DNA, 30 bp, Artificial Sequence
  Synthetic oligonucleotide
cgttgagcattaaatgtctcaataataaga

SEQ ID NO: 72115 - DNA, 30 bp, Artificial Sequence
  Synthetic oligonucleotide
cggttgctgaaatgataacagcacataaga

SEQ ID NO: 72116 - DNA, 30 bp, Artificial Sequence
  Synthetic oligonucleotide
tcacaatattgggatcatctgtccataaga

SEQ ID NO: 72117 - DNA, 30 bp, Artificial Sequence
  Synthetic oligonucleotide
ggtaggagttccggtggtgccagtataaga

SEQ ID NO: 72118 - DNA, 30 bp, Artificial Sequence
  Synthetic oligonucleotide
tcgcgggtctccgaatagccacagctaaga

SEQ ID NO: 72119 - DNA, 31 bp, Artificial Sequence
  Synthetic oligonucleotide
ggaaacagggcttgccgtggccgaagtaaga

SEQ ID NO: 72120 - DNA, 30 bp, Artificial Sequence
  Synthetic oligonucleotide
aacgggaaatcatttaacgtgaacgtaaga

SEQ ID NO: 72121 - DNA, 30 bp, Artificial Sequence
  Synthetic oligonucleotide
agctggcggtagtgcgaccagcgggtaaga

SEQ ID NO: 72122 - DNA, 30 bp, Artificial Sequence
  Synthetic oligonucleotide
agcgctgtacgaaattacggttgggtaaga

SEQ ID NO: 72123 - DNA, 30 bp, Artificial Sequence
  Synthetic oligonucleotide
gcattgaagtgagaacggtcattggtaaga

SEQ ID NO: 72124 - DNA, 30 bp, Artificial Sequence
  Synthetic oligonucleotide
aaccagatgaaccactgttcttgattaaga

SEQ ID NO: 72125 - DNA, 30 bp, Artificial Sequence
  Synthetic oligonucleotide
taagtacagcttcgtaggagagcgttaaga

SEQ ID NO: 72126 - DNA, 30 bp, Artificial Sequence
  Synthetic oligonucleotide
ggaagatgagcaagtaaatggcttttaaga

SEQ ID NO: 72127 - DNA, 30 bp, Artificial Sequence
  Synthetic oligonucleotide
tacggacggtgggtagaagcggttttaaga

SEQ ID NO: 72128 - DNA, 30 bp, Artificial Sequence
  Synthetic oligonucleotide
accgcgtaaccgatgtgtgttccgaacaga

SEQ ID NO: 72129 - DNA, 30 bp, Artificial Sequence
  Synthetic oligonucleotide
tgattataaaggatgggctacagtaacaga

SEQ ID NO: 72130 - DNA, 30 bp, Artificial Sequence
  Synthetic oligonucleotide
ctaggatgttgctgctaaggagaacacaga

SEQ ID NO: 72131 - DNA, 30 bp, Artificial Sequence
  Synthetic oligonucleotide
ccacacatctatattttcctaacacacaga

SEQ ID NO: 72132 - DNA, 30 bp, Artificial Sequence
  Synthetic oligonucleotide
aaggcccaatctaatttcgattaccacaga

SEQ ID NO: 72133 - DNA, 30 bp, Artificial Sequence
  Synthetic oligonucleotide
gagaataggagccagctaccaagccacaga

SEQ ID NO: 72134 - DNA, 30 bp, Artificial Sequence
  Synthetic oligonucleotide
ttaaaaatcgggtgtgtggtatccgacaga

SEQ ID NO: 72135 - DNA, 30 bp, Artificial Sequence
  Synthetic oligonucleotide
agttattaagtaggtcgttgtctcgacaga

SEQ ID NO: 72136 - DNA, 30 bp, Artificial Sequence
  Synthetic oligonucleotide
gcgccgatgtctggaatttcgactgacaga

SEQ ID NO: 72137 - DNA, 30 bp, Artificial Sequence
  Synthetic oligonucleotide
ccggggcgtagggcgcccactagatacaga

SEQ ID NO: 72138 - DNA, 30 bp, Artificial Sequence
  Synthetic oligonucleotide
gctagataccccggcaaatggtggaccaga

SEQ ID NO: 72139 - DNA, 30 bp, Artificial Sequence
  Synthetic oligonucleotide
tcagaactaagggagcaatagggtaccaga

SEQ ID NO: 72140 - DNA, 30 bp, Artificial Sequence
  Synthetic oligonucleotide
agcgggacaaacactttgaggcaagccaga

SEQ ID NO: 72141 - DNA, 30 bp, Artificial Sequence
  Synthetic oligonucleotide
acacacgtaagtgtaaggtcgtgcgccaga

SEQ ID NO: 72142 - DNA, 30 bp, Artificial Sequence
  Synthetic oligonucleotide
accttgcaagactcggaggctagcagcaga

SEQ ID NO: 72143 - DNA, 30 bp, Artificial Sequence
  Synthetic oligonucleotide
gaggaagtggagaagttcgcgttgcgcaga

SEQ ID NO: 72144 - DNA, 30 bp, Artificial Sequence
  Synthetic oligonucleotide
aaatagtgaccggggcgatagaaaggcaga

SEQ ID NO: 72145 - DNA, 30 bp, Artificial Sequence
  Synthetic oligonucleotide
atccacagtgcgtccgcgaaaccaggcaga

SEQ ID NO: 72146 - DNA, 30 bp, Artificial Sequence
  Synthetic oligonucleotide
ggtgggcatcgacccacctcacaatgcaga

SEQ ID NO: 72147 - DNA, 30 bp, Artificial Sequence
  Synthetic oligonucleotide
gtacgccgaattttaggaacaaactgcaga

SEQ ID NO: 72148 - DNA, 30 bp, Artificial Sequence
  Synthetic oligonucleotide
cgttcgtgtcaattagttactacctgcaga

SEQ ID NO: 72149 - DNA, 30 bp, Artificial Sequence
  Synthetic oligonucleotide
tgtggacacaagtgatggtggttcatcaga

SEQ ID NO: 72150 - DNA, 30 bp, Artificial Sequence
  Synthetic oligonucleotide
taaaatgccagggaagggtggtgactcaga

SEQ ID NO: 72151 - DNA, 30 bp, Artificial Sequence
  Synthetic oligonucleotide
tggccgattcaatcatggagagtactcaga

SEQ ID NO: 72152 - DNA, 30 bp, Artificial Sequence
  Synthetic oligonucleotide
cattgacagaatgggctaactttactcaga

SEQ ID NO: 72153 - DNA, 30 bp, Artificial Sequence
  Synthetic oligonucleotide
ccagtaagatgattgtcggttgcagtcaga

SEQ ID NO: 72154 - DNA, 30 bp, Artificial Sequence
  Synthetic oligonucleotide
acagttaaacggcggtcgtccagggtcaga

SEQ ID NO: 72155 - DNA, 30 bp, Artificial Sequence
  Synthetic oligonucleotide
gacctcatgtattgggaactcctggtcaga

SEQ ID NO: 72156 - DNA, 30 bp, Artificial Sequence
  Synthetic oligonucleotide
tagatactgtcttgcaaacggcgattcaga

SEQ ID NO: 72157 - DNA, 30 bp, Artificial Sequence
  Synthetic oligonucleotide
gaatgcgattacaaggacatggatttcaga

SEQ ID NO: 72158 - DNA, 30 bp, Artificial Sequence
  Synthetic oligonucleotide
tacgtgtcaccctaacaagattgcaagaga

SEQ ID NO: 72159 - DNA, 30 bp, Artificial Sequence
  Synthetic oligonucleotide
ggtcaaaggagagtgaaatcgtagaagaga

SEQ ID NO: 72160 - DNA, 30 bp, Artificial Sequence
  Synthetic oligonucleotide
cccgctctatgcacccagagagggaagaga

SEQ ID NO: 72161 - DNA, 30 bp, Artificial Sequence
  Synthetic oligonucleotide
cccgcgccgtaatggcggctggggaagaga

SEQ ID NO: 72162 - DNA, 30 bp, Artificial Sequence
  Synthetic oligonucleotide
ttgatcaacgttttctggaacggacagaga

SEQ ID NO: 72163 - DNA, 30 bp, Artificial Sequence
  Synthetic oligonucleotide
ttcaggtataacaggggactatgacagaga

SEQ ID NO: 72164 - DNA, 30 bp, Artificial Sequence
  Synthetic oligonucleotide
acagtcatggtaggctcaatttgacagaga

SEQ ID NO: 72165 - DNA, 30 bp, Artificial Sequence
  Synthetic oligonucleotide
ctagggggcacattcaggaaacttcagaga

SEQ ID NO: 72166 - DNA, 30 bp, Artificial Sequence
  Synthetic oligonucleotide
gtgcgtgtcgaaagaaattctgcagagaga

SEQ ID NO: 72167 - DNA, 30 bp, Artificial Sequence
  Synthetic oligonucleotide
gttccagctccatcggatcgcgtcgagaga

SEQ ID NO: 72168 - DNA, 30 bp, Artificial Sequence
  Synthetic oligonucleotide
aaagggctacagcttcaggggtgatagaga

SEQ ID NO: 72169 - DNA, 30 bp, Artificial Sequence
  Synthetic oligonucleotide
agcaatacgcttgcaggaaattgatagaga

SEQ ID NO: 72170 - DNA, 30 bp, Artificial Sequence
  Synthetic oligonucleotide
tgctaagaacggggatgacctccgtagaga

SEQ ID NO: 72171 - DNA, 30 bp, Artificial Sequence
  Synthetic oligonucleotide
ggagctgggccctggtaaagtaattagaga

SEQ ID NO: 72172 - DNA, 30 bp, Artificial Sequence
  Synthetic oligonucleotide
ggattactaaaagatatcggctagacgaga

SEQ ID NO: 72173 - DNA, 30 bp, Artificial Sequence
  Synthetic oligonucleotide
caggagcctctaagaggaacgcggacgaga

SEQ ID NO: 72174 - DNA, 30 bp, Artificial Sequence
  Synthetic oligonucleotide
tcttcggaagatgtaatcttggggacgaga

SEQ ID NO: 72175 - DNA, 30 bp, Artificial Sequence
  Synthetic oligonucleotide
aggctagtatacacaccgggtatcgcgaga

SEQ ID NO: 72176 - DNA, 30 bp, Artificial Sequence
  Synthetic oligonucleotide
gggcccagcggaaccccgatgaaggcgaga

SEQ ID NO: 72177 - DNA, 30 bp, Artificial Sequence
  Synthetic oligonucleotide
tggtgtatgggataaaggtagcgtgcgaga

SEQ ID NO: 72178 - DNA, 30 bp, Artificial Sequence
  Synthetic oligonucleotide
cagattactgttaactaagacttgtcgaga

SEQ ID NO: 72179 - DNA, 30 bp, Artificial Sequence
  Synthetic oligonucleotide
ggattaaaagataaaagagggatttcgaga

SEQ ID NO: 72180 - DNA, 30 bp, Artificial Sequence
  Synthetic oligonucleotide
caggtgcaacgatctaaatatgacaggaga

SEQ ID NO: 72181 - DNA, 30 bp, Artificial Sequence
  Synthetic oligonucleotide
tctatggcactagtgacactggccaggaga

SEQ ID NO: 72182 - DNA, 30 bp, Artificial Sequence
  Synthetic oligonucleotide
actacgatacgaaaggtgcgtggcaggaga

SEQ ID NO: 72183 - DNA, 30 bp, Artificial Sequence
  Synthetic oligonucleotide
tcatcacggcaactcaataagacgaggaga

SEQ ID NO: 72184 - DNA, 30 bp, Artificial Sequence
  Synthetic oligonucleotide
cggtaatgctgaagggacttacagcggaga

SEQ ID NO: 72185 - DNA, 30 bp, Artificial Sequence
  Synthetic oligonucleotide
taaggtagtaatcgaacaatctctcggaga

SEQ ID NO: 72186 - DNA, 30 bp, Artificial Sequence
  Synthetic oligonucleotide
gcgtgacagtggggatgcttgagcgggaga

SEQ ID NO: 72187 - DNA, 30 bp, Artificial Sequence
  Synthetic oligonucleotide
cgcgaatattgctgagatcttatcgggaga

SEQ ID NO: 72188 - DNA, 30 bp, Artificial Sequence
  Synthetic oligonucleotide
tagaaagaagtggtggggcatcaatggaga

SEQ ID NO: 72189 - DNA, 30 bp, Artificial Sequence
  Synthetic oligonucleotide
gcgcggtggttgtaggatgtttggtggaga

SEQ ID NO: 72190 - DNA, 30 bp, Artificial Sequence
  Synthetic oligonucleotide
gatacggttgtcgaagagctctaaatgaga

SEQ ID NO: 72191 - DNA, 30 bp, Artificial Sequence
  Synthetic oligonucleotide
tcactaacgtccacagtcgccctgatgaga

SEQ ID NO: 72192 - DNA, 30 bp, Artificial Sequence
  Synthetic oligonucleotide
cggtcatattatagaaggttcgctatgaga

SEQ ID NO: 72193 - DNA, 30 bp, Artificial Sequence
  Synthetic oligonucleotide
catagtagctaaaatagcatgttactgaga

SEQ ID NO: 72194 - DNA, 30 bp, Artificial Sequence
  Synthetic oligonucleotide
tggacagttggaatctgggtcgatgtgaga

SEQ ID NO: 72195 - DNA, 30 bp, Artificial Sequence
  Synthetic oligonucleotide
gcgacatcgttcccgaaggaaactgtgaga

SEQ ID NO: 72196 - DNA, 30 bp, Artificial Sequence
  Synthetic oligonucleotide
gtgaggtaagactgctgtattggtgtgaga

SEQ ID NO: 72197 - DNA, 30 bp, Artificial Sequence
  Synthetic oligonucleotide
acagtgttccagtcaatgcgctgtgtgaga

SEQ ID NO: 72198 - DNA, 30 bp, Artificial Sequence
  Synthetic oligonucleotide
gggaactatgagcgacggttaacattgaga

SEQ ID NO: 72199 - DNA, 30 bp, Artificial Sequence
  Synthetic oligonucleotide
caaagggagcattgtgatataaacttgaga

SEQ ID NO: 72200 - DNA, 30 bp, Artificial Sequence
  Synthetic oligonucleotide
ctggctcagagtcgctggagtattttgaga

SEQ ID NO: 72201 - DNA, 30 bp, Artificial Sequence
  Synthetic oligonucleotide
gaaaaaaggaaagaagcggttcacaataga

SEQ ID NO: 72202 - DNA, 30 bp, Artificial Sequence
  Synthetic oligonucleotide
accagggggttcgttgagtatcagcataga

SEQ ID NO: 72203 - DNA, 30 bp, Artificial Sequence
  Synthetic oligonucleotide
tcagcacaccgtgtaaggacgggtcataga

SEQ ID NO: 72204 - DNA, 30 bp, Artificial Sequence
  Synthetic oligonucleotide
cgggcaatcgtaatgcctgagaaagataga

SEQ ID NO: 72205 - DNA, 30 bp, Artificial Sequence
  Synthetic oligonucleotide
ccttctgtactttcggggaggggatataga

SEQ ID NO: 72206 - DNA, 30 bp, Artificial Sequence
  Synthetic oligonucleotide
gtagcagaatgccaagctgagagctataga

SEQ ID NO: 72207 - DNA, 30 bp, Artificial Sequence
  Synthetic oligonucleotide
tcggtaaacacggtgttacatcgctataga

SEQ ID NO: 72208 - DNA, 30 bp, Artificial Sequence
  Synthetic oligonucleotide
ccttaatcatcttagccaaggccgtataga

SEQ ID NO: 72209 - DNA, 30 bp, Artificial Sequence
  Synthetic oligonucleotide
aactgcttaaacaaggcgaccgagactaga

SEQ ID NO: 72210 - DNA, 30 bp, Artificial Sequence
  Synthetic oligonucleotide
ggggcgtgatgcctccgtcgacgtactaga

SEQ ID NO: 72211 - DNA, 30 bp, Artificial Sequence
  Synthetic oligonucleotide
agagtatgctgcgtcgtacaatgtactaga

SEQ ID NO: 72212 - DNA, 30 bp, Artificial Sequence
  Synthetic oligonucleotide
aacagcctttaacacatcgaatgagctaga

SEQ ID NO: 72213 - DNA, 30 bp, Artificial Sequence
  Synthetic oligonucleotide
gcgtcggattgcaggagtcctaaaagtaga

SEQ ID NO: 72214 - DNA, 30 bp, Artificial Sequence
  Synthetic oligonucleotide
catgcggtcaataacacggtggaaagtaga

SEQ ID NO: 72215 - DNA, 30 bp, Artificial Sequence
  Synthetic oligonucleotide
gggggccgtaccgcgtttgaggagcgtaga

SEQ ID NO: 72216 - DNA, 30 bp, Artificial Sequence
  Synthetic oligonucleotide
cgcagggttggtcagggggtatttcgtaga

SEQ ID NO: 72217 - DNA, 30 bp, Artificial Sequence
  Synthetic oligonucleotide
ctatcatgtccgagaaagaaaccaggtaga

SEQ ID NO: 72218 - DNA, 30 bp, Artificial Sequence
  Synthetic oligonucleotide
aggatgaaagtagtcctctcaataggtaga

SEQ ID NO: 72219 - DNA, 30 bp, Artificial Sequence
  Synthetic oligonucleotide
ggaaggccatgaactagaaatatatgtaga

SEQ ID NO: 72220 - DNA, 30 bp, Artificial Sequence
  Synthetic oligonucleotide
cctggtgtgaactcgagacatatttgtaga

SEQ ID NO: 72221 - DNA, 30 bp, Artificial Sequence
  Synthetic oligonucleotide
agtacctatactcgcccagactgaattaga

SEQ ID NO: 72222 - DNA, 30 bp, Artificial Sequence
  Synthetic oligonucleotide
gaccgcctcacctctatagccatcattaga

SEQ ID NO: 72223 - DNA, 30 bp, Artificial Sequence
  Synthetic oligonucleotide
tgataacatgtcactacggaaacgattaga

SEQ ID NO: 72224 - DNA, 30 bp, Artificial Sequence
  Synthetic oligonucleotide
ccactcctgaagactgaagaacatattaga

SEQ ID NO: 72225 - DNA, 30 bp, Artificial Sequence
  Synthetic oligonucleotide
acgcctcaaagcataaactcgttacttaga

SEQ ID NO: 72226 - DNA, 30 bp, Artificial Sequence
  Synthetic oligonucleotide
ctcaaagagcccaaaaactagaaccttaga

SEQ ID NO: 72227 - DNA, 30 bp, Artificial Sequence
  Synthetic oligonucleotide
ggtgaggggcaaccgagaggtcgagttaga

SEQ ID NO: 72228 - DNA, 30 bp, Artificial Sequence
  Synthetic oligonucleotide
caataaagaaaaagcccacgggccgttaga

SEQ ID NO: 72229 - DNA, 30 bp, Artificial Sequence
  Synthetic oligonucleotide
ggacgaggagagtaagccgagacgaaacga

SEQ ID NO: 72230 - DNA, 30 bp, Artificial Sequence
  Synthetic oligonucleotide
tccacggcaatgttagctatgtcgaaacga

SEQ ID NO: 72231 - DNA, 30 bp, Artificial Sequence
  Synthetic oligonucleotide
ctagcactcctgatgcccaccgaacaacga

SEQ ID NO: 72232 - DNA, 30 bp, Artificial Sequence
  Synthetic oligonucleotide
tgctgagaggtcctcttcaacggccaacga

SEQ ID NO: 72233 - DNA, 30 bp, Artificial Sequence
  Synthetic oligonucleotide
tgtagcaggtaacacggcaatgtccaacga

SEQ ID NO: 72234 - DNA, 30 bp, Artificial Sequence
  Synthetic oligonucleotide
tactcgattagaagggcgtaaagcgaacga

SEQ ID NO: 72235 - DNA, 30 bp, Artificial Sequence
  Synthetic oligonucleotide
cgggccacacaccactgtacagaggaacga

SEQ ID NO: 72236 - DNA, 30 bp, Artificial Sequence
  Synthetic oligonucleotide
aaggataaaccaggcagactctaggaacga

SEQ ID NO: 72237 - DNA, 30 bp, Artificial Sequence
  Synthetic oligonucleotide
accgtggatatcagctctgcacgataacga

SEQ ID NO: 72238 - DNA, 30 bp, Artificial Sequence
  Synthetic oligonucleotide
gttgtagtgtatgcaaacagggagacacga

SEQ ID NO: 72239 - DNA, 30 bp, Artificial Sequence
  Synthetic oligonucleotide
cagacgattggaatatggaaatcgacacga

SEQ ID NO: 72240 - DNA, 30 bp, Artificial Sequence
  Synthetic oligonucleotide
atccggtacgtgatggattcaaatgcacga

SEQ ID NO: 72241 - DNA, 30 bp, Artificial Sequence
  Synthetic oligonucleotide
gtgcataagcgaagatggagtctgtcacga

SEQ ID NO: 72242 - DNA, 30 bp, Artificial Sequence
  Synthetic oligonucleotide
cgacgcaacgatgtcgtgcttatgagacga

SEQ ID NO: 72243 - DNA, 30 bp, Artificial Sequence
  Synthetic oligonucleotide
ttcgaacagggagacacacttcaaggacga

SEQ ID NO: 72244 - DNA, 30 bp, Artificial Sequence
  Synthetic oligonucleotide
agagcaggcagattttggactctaatacga

SEQ ID NO: 72245 - DNA, 30 bp, Artificial Sequence
  Synthetic oligonucleotide
ggcgctgaagtgcatcggcagtccatacga

SEQ ID NO: 72246 - DNA, 30 bp, Artificial Sequence
  Synthetic oligonucleotide
ggggagtgaacaggcagaatagatctacga

SEQ ID NO: 72247 - DNA, 30 bp, Artificial Sequence
  Synthetic oligonucleotide
ctggctaacgacacagattccaaggtacga

SEQ ID NO: 72248 - DNA, 30 bp, Artificial Sequence
  Synthetic oligonucleotide
cggagtgtaaaaggaatgcgtagggtacga

SEQ ID NO: 72249 - DNA, 30 bp, Artificial Sequence
  Synthetic oligonucleotide
tataaaataagggggatccagtatgtacga

SEQ ID NO: 72250 - DNA, 30 bp, Artificial Sequence
  Synthetic oligonucleotide
cgaatggatcaacaggcctcacgtttacga

SEQ ID NO: 72251 - DNA, 30 bp, Artificial Sequence
  Synthetic oligonucleotide
atcagcgcgaggaaaagcgatacaaaccga

SEQ ID NO: 72252 - DNA, 30 bp, Artificial Sequence
  Synthetic oligonucleotide
agccacgggatacttgtacaatcgaaccga

SEQ ID NO: 72253 - DNA, 30 bp, Artificial Sequence
  Synthetic oligonucleotide
cgtgtggtttgggccacatcatcccaccga

SEQ ID NO: 72254 - DNA, 30 bp, Artificial Sequence
  Synthetic oligonucleotide
agaagggagcaggattcgtattgccaccga

SEQ ID NO: 72255 - DNA, 30 bp, Artificial Sequence
  Synthetic oligonucleotide
ggccctaaaactttggatggcatccaccga

SEQ ID NO: 72256 - DNA, 30 bp, Artificial Sequence
  Synthetic oligonucleotide
agaaacattggaatcaagatgacagaccga

SEQ ID NO: 72257 - DNA, 30 bp, Artificial Sequence
  Synthetic oligonucleotide
cattaagcgtggatgccttatacagaccga

SEQ ID NO: 72258 - DNA, 30 bp, Artificial Sequence
  Synthetic oligonucleotide
agatgtagacggtgtcctgaagcagaccga

SEQ ID NO: 72259 - DNA, 30 bp, Artificial Sequence
  Synthetic oligonucleotide
gagcagcaataaaattagttaaatgcccga

SEQ ID NO: 72260 - DNA, 30 bp, Artificial Sequence
  Synthetic oligonucleotide
gacatatgactttaaggagagtgtagccga

SEQ ID NO: 72261 - DNA, 30 bp, Artificial Sequence
  Synthetic oligonucleotide
tcagcgtgcagggggcgcgtagtccgccga

SEQ ID NO: 72262 - DNA, 30 bp, Artificial Sequence
  Synthetic oligonucleotide
gtggtgttaatgtgaccggtaagtcgccga

SEQ ID NO: 72263 - DNA, 30 bp, Artificial Sequence
  Synthetic oligonucleotide
gactagtatgctgaggaagtaacaggccga

SEQ ID NO: 72264 - DNA, 30 bp, Artificial Sequence
  Synthetic oligonucleotide
cctacagccaccgtgagatacaatggccga

SEQ ID NO: 72265 - DNA, 30 bp, Artificial Sequence
  Synthetic oligonucleotide
gcggcgtagaattttctcgttaggatccga

SEQ ID NO: 72266 - DNA, 30 bp, Artificial Sequence
  Synthetic oligonucleotide
gatggatcacccagagatacttcagtccga

SEQ ID NO: 72267 - DNA, 30 bp, Artificial Sequence
  Synthetic oligonucleotide
cgaccctcttgactgcaaccgaagaagcga

SEQ ID NO: 72268 - DNA, 30 bp, Artificial Sequence
  Synthetic oligonucleotide
ctagcgaagctagcagtgtcgtctaagcga

SEQ ID NO: 72269 - DNA, 30 bp, Artificial Sequence
  Synthetic oligonucleotide
acatagtgaagctatacaacagcacagcga

SEQ ID NO: 72270 - DNA, 30 bp, Artificial Sequence
  Synthetic oligonucleotide
gatcgcattagcctacccatacaagagcga

SEQ ID NO: 72271 - DNA, 30 bp, Artificial Sequence
  Synthetic oligonucleotide
acttgctacggtgggtgcatagtttagcga

SEQ ID NO: 72272 - DNA, 30 bp, Artificial Sequence
  Synthetic oligonucleotide
ctcccacatacatgggaccacgcaccgcga

SEQ ID NO: 72273 - DNA, 30 bp, Artificial Sequence
  Synthetic oligonucleotide
gaaccgagggcgagagtttcgtgaccgcga

SEQ ID NO: 72274 - DNA, 30 bp, Artificial Sequence
  Synthetic oligonucleotide
cgagaagcatgctctcacaaatggccgcga

SEQ ID NO: 72275 - DNA, 30 bp, Artificial Sequence
  Synthetic oligonucleotide
ttagcacagctgggggagagaggtgcgcga

SEQ ID NO: 72276 - DNA, 30 bp, Artificial Sequence
  Synthetic oligonucleotide
attaggctggcatttcataaggcgtcgcga

SEQ ID NO: 72277 - DNA, 30 bp, Artificial Sequence
  Synthetic oligonucleotide
tcaggccgccctggccgaaaatccaggcga

SEQ ID NO: 72278 - DNA, 30 bp, Artificial Sequence
  Synthetic oligonucleotide
cggcctggagaagtgccacaccggaggcga

SEQ ID NO: 72279 - DNA, 30 bp, Artificial Sequence
  Synthetic oligonucleotide
agggagctccagaaaggcgatcggaggcga

SEQ ID NO: 72280 - DNA, 30 bp, Artificial Sequence
  Synthetic oligonucleotide
cacccagcggaacactagggacttgggcga

SEQ ID NO: 72281 - DNA, 30 bp, Artificial Sequence
  Synthetic oligonucleotide
agggatgttaggcctaacacatacgtgcga

SEQ ID NO: 72282 - DNA, 30 bp, Artificial Sequence
  Synthetic oligonucleotide
ttaggcagcaagattaaagtttatgtgcga

SEQ ID NO: 72283 - DNA, 30 bp, Artificial Sequence
  Synthetic oligonucleotide
cccatgagtataagtgcggcgttattgcga

SEQ ID NO: 72284 - DNA, 30 bp, Artificial Sequence
  Synthetic oligonucleotide
ggcggtggtagatacgctgttctgttgcga

SEQ ID NO: 72285 - DNA, 30 bp, Artificial Sequence
  Synthetic oligonucleotide
ggagggcgtcccacgccagcaaatttgcga

SEQ ID NO: 72286 - DNA, 30 bp, Artificial Sequence
  Synthetic oligonucleotide
ggggattaaccctgcaaagactggcatcga

SEQ ID NO: 72287 - DNA, 30 bp, Artificial Sequence
  Synthetic oligonucleotide
gtcatctaggggtcccgtatcaaagatcga

SEQ ID NO: 72288 - DNA, 30 bp, Artificial Sequence
  Synthetic oligonucleotide
ctaaggctcaccgaagccggcattgatcga

SEQ ID NO: 72289 - DNA, 30 bp, Artificial Sequence
  Synthetic oligonucleotide
tcgcttgaatcggggcgcaagtgatatcga

SEQ ID NO: 72290 - DNA, 30 bp, Artificial Sequence
  Synthetic oligonucleotide
agtgtaatggaatcgggttgttaaactcga

SEQ ID NO: 72291 - DNA, 30 bp, Artificial Sequence
  Synthetic oligonucleotide
aacttaatgcatagggaaggtaggtctcga

SEQ ID NO: 72292 - DNA, 30 bp, Artificial Sequence
  Synthetic oligonucleotide
gaactccgggcatgtaataaagaaagtcga

SEQ ID NO: 72293 - DNA, 30 bp, Artificial Sequence
  Synthetic oligonucleotide
cgtcgcaaagcgcaatgcacagaacgtcga

SEQ ID NO: 72294 - DNA, 30 bp, Artificial Sequence
  Synthetic oligonucleotide
tcaatcactctgatatggattacaggtcga

SEQ ID NO: 72295 - DNA, 30 bp, Artificial Sequence
  Synthetic oligonucleotide
cacgtttcaccccttataaagacatgtcga

SEQ ID NO: 72296 - DNA, 30 bp, Artificial Sequence
  Synthetic oligonucleotide
catcagctgagtggagcagttggatgtcga

SEQ ID NO: 72297 - DNA, 30 bp, Artificial Sequence
  Synthetic oligonucleotide
ataagatgagtgatggggcgcaagtgtcga

SEQ ID NO: 72298 - DNA, 30 bp, Artificial Sequence
  Synthetic oligonucleotide
gcaggttacctaatcaaatgcggaattcga

SEQ ID NO: 72299 - DNA, 30 bp, Artificial Sequence
  Synthetic oligonucleotide
gtacattaggatattgcaaggtggattcga

SEQ ID NO: 72300 - DNA, 30 bp, Artificial Sequence
  Synthetic oligonucleotide
ccagggtccagactgaacaaacctattcga

SEQ ID NO: 72301 - DNA, 30 bp, Artificial Sequence
  Synthetic oligonucleotide
cgagtcgtaccgtagtagctattagttcga

SEQ ID NO: 72302 - DNA, 30 bp, Artificial Sequence
  Synthetic oligonucleotide
cagtacataagatgcggaattgcaaaagga

SEQ ID NO: 72303 - DNA, 30 bp, Artificial Sequence
  Synthetic oligonucleotide
tactactgttgcatgtaagaacacaaagga

SEQ ID NO: 72304 - DNA, 30 bp, Artificial Sequence
  Synthetic oligonucleotide
actagtgcccagagattgaggatgaaagga

SEQ ID NO: 72305 - DNA, 30 bp, Artificial Sequence
  Synthetic oligonucleotide
tcgtatcgttattaaaaatctgataaagga

SEQ ID NO: 72306 - DNA, 30 bp, Artificial Sequence
  Synthetic oligonucleotide
aacacggatgaaacttttatcgcacaagga

SEQ ID NO: 72307 - DNA, 30 bp, Artificial Sequence
  Synthetic oligonucleotide
cttgcgatagagcttggaagctgataagga

SEQ ID NO: 72308 - DNA, 30 bp, Artificial Sequence
  Synthetic oligonucleotide
gcgcgcaaaagtagttccaggaagtaagga

SEQ ID NO: 72309 - DNA, 30 bp, Artificial Sequence
  Synthetic oligonucleotide
cgctcttggctaggttcgggagtgtaagga

SEQ ID NO: 72310 - DNA, 30 bp, Artificial Sequence
  Synthetic oligonucleotide
ggaggtattcgggacaacgttacttaagga

SEQ ID NO: 72311 - DNA, 30 bp, Artificial Sequence
  Synthetic oligonucleotide
gcttggaaatgttccatagcttcaacagga

SEQ ID NO: 72312 - DNA, 30 bp, Artificial Sequence
  Synthetic oligonucleotide
cggtaagtcctgcaacgtattataacagga

SEQ ID NO: 72313 - DNA, 30 bp, Artificial Sequence
  Synthetic oligonucleotide
tcagctggcaattaaggttagcatccagga

SEQ ID NO: 72314 - DNA, 30 bp, Artificial Sequence
  Synthetic oligonucleotide
gcaccatagtgacgataaataagtccagga

SEQ ID NO: 72315 - DNA, 30 bp, Artificial Sequence
  Synthetic oligonucleotide
aggctacccggcgtacgtcactaagcagga

SEQ ID NO: 72316 - DNA, 30 bp, Artificial Sequence
  Synthetic oligonucleotide
gggaggatccaactcacatacttagcagga

SEQ ID NO: 72317 - DNA, 30 bp, Artificial Sequence
  Synthetic oligonucleotide
gtgataattggtgacctgggcaaggcagga

SEQ ID NO: 72318 - DNA, 30 bp, Artificial Sequence
  Synthetic oligonucleotide
tgagctacctctaatatcacggcggcagga

SEQ ID NO: 72319 - DNA, 30 bp, Artificial Sequence
  Synthetic oligonucleotide
caagaggccagagggacagttaatgcagga

SEQ ID NO: 72320 - DNA, 31 bp, Artificial Sequence
  Synthetic oligonucleotide
tgaatgtagtgaggaggacgcttagtcagga

SEQ ID NO: 72321 - DNA, 30 bp, Artificial Sequence
  Synthetic oligonucleotide
cagacaggggccataccgtccgattcagga

SEQ ID NO: 72322 - DNA, 30 bp, Artificial Sequence
  Synthetic oligonucleotide
actgaccaacaaacggacctgtatagagga

SEQ ID NO: 72323 - DNA, 30 bp, Artificial Sequence
  Synthetic oligonucleotide
ccgtgcttgagtgcaagattcggtagagga

SEQ ID NO: 72324 - DNA, 30 bp, Artificial Sequence
  Synthetic oligonucleotide
tgccttggactgactgatcacaaacgagga

SEQ ID NO: 72325 - DNA, 30 bp, Artificial Sequence
  Synthetic oligonucleotide
agataccatgcacaggcgtgaacacgagga

SEQ ID NO: 72326 - DNA, 30 bp, Artificial Sequence
  Synthetic oligonucleotide
atggtataattatagtggacatacggagga

SEQ ID NO: 72327 - DNA, 30 bp, Artificial Sequence
  Synthetic oligonucleotide
gtcgtagcatgatgggctcgagcgggagga

SEQ ID NO: 72328 - DNA, 30 bp, Artificial Sequence
  Synthetic oligonucleotide
atacaggattcgggaagatatgggtgagga

SEQ ID NO: 72329 - DNA, 30 bp, Artificial Sequence
  Synthetic oligonucleotide
ctaaaaatccagaacgctattgggtgagga

SEQ ID NO: 72330 - DNA, 30 bp, Artificial Sequence
  Synthetic oligonucleotide
acatgcataggaaaaattgaagccatagga

SEQ ID NO: 72331 - DNA, 30 bp, Artificial Sequence
  Synthetic oligonucleotide
ccgcggtaggcaataactgtttgcatagga

SEQ ID NO: 72332 - DNA, 30 bp, Artificial Sequence
  Synthetic oligonucleotide
ttaaggttgcgaggtttcgaggagatagga

SEQ ID NO: 72333 - DNA, 30 bp, Artificial Sequence
  Synthetic oligonucleotide
aagaagccttaatgcatgataggactagga

SEQ ID NO: 72334 - DNA, 30 bp, Artificial Sequence
  Synthetic oligonucleotide
aagtccaggggcgtcggacctaacgtagga

SEQ ID NO: 72335 - DNA, 30 bp, Artificial Sequence
  Synthetic oligonucleotide
taggcttgtatcggaggacgatgcgtagga

SEQ ID NO: 72336 - DNA, 30 bp, Artificial Sequence
  Synthetic oligonucleotide
tgatcgcaataagttgggtatactttagga

SEQ ID NO: 72337 - DNA, 30 bp, Artificial Sequence
  Synthetic oligonucleotide
tcggaaagtagggtatccagcgccaacgga

SEQ ID NO: 72338 - DNA, 30 bp, Artificial Sequence
  Synthetic oligonucleotide
gccacgaggtgtttgaaaggcccgcacgga

SEQ ID NO: 72339 - DNA, 30 bp, Artificial Sequence
  Synthetic oligonucleotide
tgtgaactatagcaagaggtcggtcacgga

SEQ ID NO: 72340 - DNA, 30 bp, Artificial Sequence
  Synthetic oligonucleotide
ccctaactagtgcattgttcatttcacgga

SEQ ID NO: 72341 - DNA, 30 bp, Artificial Sequence
  Synthetic oligonucleotide
ccaatcagacctatgggtgacacagacgga

SEQ ID NO: 72342 - DNA, 30 bp, Artificial Sequence
  Synthetic oligonucleotide
aatgagaacgtgacgatgagaaataccgga

SEQ ID NO: 72343 - DNA, 30 bp, Artificial Sequence
  Synthetic oligonucleotide
cgtcgcaagggcaaatagctccataccgga

SEQ ID NO: 72344 - DNA, 30 bp, Artificial Sequence
  Synthetic oligonucleotide
atcttgctaaacaccatcatggctaccgga

SEQ ID NO: 72345 - DNA, 30 bp, Artificial Sequence
  Synthetic oligonucleotide
agatggcaatggatctagaggtaagccgga

SEQ ID NO: 72346 - DNA, 30 bp, Artificial Sequence
  Synthetic oligonucleotide
tacgtgcgagaacatctgcggggagccgga

SEQ ID NO: 72347 - DNA, 30 bp, Artificial Sequence
  Synthetic oligonucleotide
agcacaagtgcgcttaattcgttttccgga

SEQ ID NO: 72348 - DNA, 30 bp, Artificial Sequence
  Synthetic oligonucleotide
ataagaagagggtatccatacgtcagcgga

SEQ ID NO: 72349 - DNA, 30 bp, Artificial Sequence
  Synthetic oligonucleotide
ggatctaacgtgctgcgcatggggagcgga

SEQ ID NO: 72350 - DNA, 30 bp, Artificial Sequence
  Synthetic oligonucleotide
ggtgaagtccctgccctctgcacccgcgga

SEQ ID NO: 72351 - DNA, 30 bp, Artificial Sequence
  Synthetic oligonucleotide
tgcgctgagtcaaaatgatcgtcaggcgga

SEQ ID NO: 72352 - DNA, 30 bp, Artificial Sequence
  Synthetic oligonucleotide
tccggtcactactgcaggagtttaggcgga

SEQ ID NO: 72353 - DNA, 30 bp, Artificial Sequence
  Synthetic oligonucleotide
acatgctcgctcgggggtggtatcggcgga

SEQ ID NO: 72354 - DNA, 30 bp, Artificial Sequence
  Synthetic oligonucleotide
ggctaaagtgggagcccgaataagggcgga

SEQ ID NO: 72355 - DNA, 30 bp, Artificial Sequence
  Synthetic oligonucleotide
gcggtagagtgaatgatcgattcctgcgga

SEQ ID NO: 72356 - DNA, 30 bp, Artificial Sequence
  Synthetic oligonucleotide
agaacctaagtggagcatgaaatctgcgga

SEQ ID NO: 72357 - DNA, 30 bp, Artificial Sequence
  Synthetic oligonucleotide
taagccacatgggtgaaaccgtgactcgga

SEQ ID NO: 72358 - DNA, 30 bp, Artificial Sequence
  Synthetic oligonucleotide
tccacctacaaaagtcagggaggcttcgga

SEQ ID NO: 72359 - DNA, 30 bp, Artificial Sequence
  Synthetic oligonucleotide
aaggcggaaagatctagatacgtgttcgga

SEQ ID NO: 72360 - DNA, 30 bp, Artificial Sequence
  Synthetic oligonucleotide
ttcgcaggggaaacacctctaagcaaggga

SEQ ID NO: 72361 - DNA, 30 bp, Artificial Sequence
  Synthetic oligonucleotide
acgaagagaatcctaagcgaacttcaggga

SEQ ID NO: 72362 - DNA, 30 bp, Artificial Sequence
  Synthetic oligonucleotide
atcgttcctggatatacctttagagaggga

SEQ ID NO: 72363 - DNA, 30 bp, Artificial Sequence
  Synthetic oligonucleotide
tacgcgagggtgcgcgagggtgacgaggga

SEQ ID NO: 72364 - DNA, 30 bp, Artificial Sequence
  Synthetic oligonucleotide
tagaccaaggcatggcgccacggggaggga

SEQ ID NO: 72365 - DNA, 30 bp, Artificial Sequence
  Synthetic oligonucleotide
ttacgggaacgctaacaagcggcataggga

SEQ ID NO: 72366 - DNA, 30 bp, Artificial Sequence
  Synthetic oligonucleotide
tcatcgataaaatggaagaatgcataggga

SEQ ID NO: 72367 - DNA, 30 bp, Artificial Sequence
  Synthetic oligonucleotide
ttgaaagcgactgttaagcaggggacggga

SEQ ID NO: 72368 - DNA, 30 bp, Artificial Sequence
  Synthetic oligonucleotide
tcctaagacggtatgtacagaaagccggga

SEQ ID NO: 72369 - DNA, 30 bp, Artificial Sequence
  Synthetic oligonucleotide
acagaccagtctgcactagagggtccggga

SEQ ID NO: 72370 - DNA, 30 bp, Artificial Sequence
  Synthetic oligonucleotide
gaaagaaggcttgaatttatatcagcggga

SEQ ID NO: 72371 - DNA, 30 bp, Artificial Sequence
  Synthetic oligonucleotide
tccagcgtaaaggggatctaacgttcggga

SEQ ID NO: 72372 - DNA, 30 bp, Artificial Sequence
  Synthetic oligonucleotide
ctgattcagccttatcatgaggtcagggga

SEQ ID NO: 72373 - DNA, 30 bp, Artificial Sequence
  Synthetic oligonucleotide
cagagtgattagcggtttccgcgccgggga

SEQ ID NO: 72374 - DNA, 30 bp, Artificial Sequence
  Synthetic oligonucleotide
gtaatagttggtaatagcgaggtccgggga

SEQ ID NO: 72375 - DNA, 39 bp, Artificial Sequence
  Synthetic oligonucleotide
aaataatacattcatggtatggtcggggatcggggggga

SEQ ID NO: 72376 - DNA, 38 bp, Artificial Sequence
  Synthetic oligonucleotide
agatatacattcatggtatggtcggggatcggggggga

SEQ ID NO: 72377 - DNA, 30 bp, Artificial Sequence
  Synthetic oligonucleotide
aggtagctgtagtcggcaatttgatgggga

SEQ ID NO: 72378 - DNA, 30 bp, Artificial Sequence
  Synthetic oligonucleotide
cctcgaccagaatccggtacatattgggga

SEQ ID NO: 72379 - DNA, 30 bp, Artificial Sequence
  Synthetic oligonucleotide
caaagtccacccagaaaacaaggttgggga

SEQ ID NO: 72380 - DNA, 30 bp, Artificial Sequence
  Synthetic oligonucleotide
aggtggattgtaatcaaaaatggttgggga

SEQ ID NO: 72381 - DNA, 29 bp, Artificial Sequence
  Synthetic oligonucleotide
tggagcgcgaatacccgggagtaatggga

SEQ ID NO: 72382 - DNA, 30 bp, Artificial Sequence
  Synthetic oligonucleotide
tctatcgcggcccgtatgatcgggatggga

SEQ ID NO: 72383 - DNA, 30 bp, Artificial Sequence
  Synthetic oligonucleotide
acctaatatccttctcacacgatgatggga

SEQ ID NO: 72384 - DNA, 30 bp, Artificial Sequence
  Synthetic oligonucleotide
agaaacggcaaggagggagagtctatggga

SEQ ID NO: 72385 - DNA, 30 bp, Artificial Sequence
  Synthetic oligonucleotide
ggctataggcactaaatgcatagactggga

SEQ ID NO: 72386 - DNA, 30 bp, Artificial Sequence
  Synthetic oligonucleotide
cagaatgagactccaccgggtagtgtggga

SEQ ID NO: 72387 - DNA, 30 bp, Artificial Sequence
  Synthetic oligonucleotide
atgcttagagcggaaccatgaacattggga

SEQ ID NO: 72388 - DNA, 30 bp, Artificial Sequence
  Synthetic oligonucleotide
cggtaggaggaaggtttgttatacttggga

SEQ ID NO: 72389 - DNA, 30 bp, Artificial Sequence
  Synthetic oligonucleotide
tcgtgtaagctgtgcgttattggcttggga

SEQ ID NO: 72390 - DNA, 30 bp, Artificial Sequence
  Synthetic oligonucleotide
caggtagcgacgtgagctggcatgttggga

SEQ ID NO: 72391 - DNA, 30 bp, Artificial Sequence
  Synthetic oligonucleotide
tcgaataccctcttaagaatcaaaaatgga

SEQ ID NO: 72392 - DNA, 30 bp, Artificial Sequence
  Synthetic oligonucleotide
cggcataaaattcatcggaacggacatgga

SEQ ID NO: 72393 - DNA, 30 bp, Artificial Sequence
  Synthetic oligonucleotide
tgtcatacaatatcaagataaaagcatgga

SEQ ID NO: 72394 - DNA, 30 bp, Artificial Sequence
  Synthetic oligonucleotide
gaaactccggacgagcggcgagacgatgga

SEQ ID NO: 72395 - DNA, 30 bp, Artificial Sequence
  Synthetic oligonucleotide
atgcggagcgaccttaaaaccggcgatgga

SEQ ID NO: 72396 - DNA, 30 bp, Artificial Sequence
  Synthetic oligonucleotide
acacacaggctacggtattccacggatgga

SEQ ID NO: 72397 - DNA, 30 bp, Artificial Sequence
  Synthetic oligonucleotide
cactattgtggagataataattaatatgga

SEQ ID NO: 72398 - DNA, 30 bp, Artificial Sequence
  Synthetic oligonucleotide
atgaaggcttagttaacccagccatatgga

SEQ ID NO: 72399 - DNA, 30 bp, Artificial Sequence
  Synthetic oligonucleotide
gggcgttcttagaccgacataagctatgga

SEQ ID NO: 72400 - DNA, 30 bp, Artificial Sequence
  Synthetic oligonucleotide
tcgaaattctacttcgatcgaaagactgga

SEQ ID NO: 72401 - DNA, 30 bp, Artificial Sequence
  Synthetic oligonucleotide
gcctgccagggagacgggtttatgactgga

SEQ ID NO: 72402 - DNA, 30 bp, Artificial Sequence
  Synthetic oligonucleotide
gcgcactaagcgacattgaatgctactgga

SEQ ID NO: 72403 - DNA, 30 bp, Artificial Sequence
  Synthetic oligonucleotide
taggaacgagggtcaatgggaaaacctgga

SEQ ID NO: 72404 - DNA, 30 bp, Artificial Sequence
  Synthetic oligonucleotide
cgggattgggacactcctcgctcgcctgga

SEQ ID NO: 72405 - DNA, 30 bp, Artificial Sequence
  Synthetic oligonucleotide
gactatacagcgaaaggtggtggagctgga

SEQ ID NO: 72406 - DNA, 30 bp, Artificial Sequence
  Synthetic oligonucleotide
tctattacaagaggatggagtaagtctgga

SEQ ID NO: 72407 - DNA, 30 bp, Artificial Sequence
  Synthetic oligonucleotide
acattagcaaaaaatcagggccggtctgga

SEQ ID NO: 72408 - DNA, 30 bp, Artificial Sequence
  Synthetic oligonucleotide
cccagggtggcgagaatgtaatgttctgga

SEQ ID NO: 72409 - DNA, 30 bp, Artificial Sequence
  Synthetic oligonucleotide
cgtatacgtatgttctaggagatcagtgga

SEQ ID NO: 72410 - DNA, 30 bp, Artificial Sequence
  Synthetic oligonucleotide
caatgagatggaagaattgagactagtgga

SEQ ID NO: 72411 - DNA, 30 bp, Artificial Sequence
  Synthetic oligonucleotide
gagcaccataatctggagaatattagtgga

SEQ ID NO: 72412 - DNA, 30 bp, Artificial Sequence
  Synthetic oligonucleotide
gatgtgcgggctagcaaggtgcaccgtgga

SEQ ID NO: 72413 - DNA, 30 bp, Artificial Sequence
  Synthetic oligonucleotide
tgacatgagcgtaatgagtttacaggtgga

SEQ ID NO: 72414 - DNA, 30 bp, Artificial Sequence
  Synthetic oligonucleotide
tcggagcagtgagagcgtatgaacggtgga

SEQ ID NO: 72415 - DNA, 30 bp, Artificial Sequence
  Synthetic oligonucleotide
gtgcaagacaaagagctagacgggggtgga

SEQ ID NO: 72416 - DNA, 30 bp, Artificial Sequence
  Synthetic oligonucleotide
cggtatgcaatacgaattaaatcttgtgga

SEQ ID NO: 72417 - DNA, 30 bp, Artificial Sequence
  Synthetic oligonucleotide
ggtaacgagaatgcggtgaggcgccttgga

SEQ ID NO: 72418 - DNA, 30 bp, Artificial Sequence
  Synthetic oligonucleotide
gaatggcaggacgtgcgagaagatcttgga

SEQ ID NO: 72419 - DNA, 30 bp, Artificial Sequence
  Synthetic oligonucleotide
gcacaggcacgggcaggcactaaatttgga

SEQ ID NO: 72420 - DNA, 30 bp, Artificial Sequence
  Synthetic oligonucleotide
tcggaaggaattttctctacaacgtttgga

SEQ ID NO: 72421 - DNA, 30 bp, Artificial Sequence
  Synthetic oligonucleotide
ggccgcaatccggataagggccaaaaatga

SEQ ID NO: 72422 - DNA, 30 bp, Artificial Sequence
  Synthetic oligonucleotide
acgtgtttccggagctgaacgataaaatga

SEQ ID NO: 72423 - DNA, 30 bp, Artificial Sequence
  Synthetic oligonucleotide
ggatggctgagtcccgttgaacacaaatga

SEQ ID NO: 72424 - DNA, 31 bp, Artificial Sequence
  Synthetic oligonucleotide
ggcaaaaagagggacggggtgtgatcaatga

SEQ ID NO: 72425 - DNA, 30 bp, Artificial Sequence
  Synthetic oligonucleotide
gagatacgaaccatggagtggtaagaatga

SEQ ID NO: 72426 - DNA, 30 bp, Artificial Sequence
  Synthetic oligonucleotide
cgtcgattaccttgaacgagcgtggaatga

SEQ ID NO: 72427 - DNA, 30 bp, Artificial Sequence
  Synthetic oligonucleotide
gcccggtccaggtgagtcgaggcgtaatga

SEQ ID NO: 72428 - DNA, 30 bp, Artificial Sequence
  Synthetic oligonucleotide
aagtgaaactcaaccatccgtggttaatga

SEQ ID NO: 72429 - DNA, 30 bp, Artificial Sequence
  Synthetic oligonucleotide
tcgagatccgaatacatttgtgcgacatga

SEQ ID NO: 72430 - DNA, 30 bp, Artificial Sequence
  Synthetic oligonucleotide
aggttggcaaggtacataggaaacccatga

SEQ ID NO: 72431 - DNA, 30 bp, Artificial Sequence
  Synthetic oligonucleotide
ggaatgtaaaaggtctgtaaaaacgcatga

SEQ ID NO: 72432 - DNA, 31 bp, Artificial Sequence
  Synthetic oligonucleotide
tgctaatcacgtaacgtggacaagcgcatga

SEQ ID NO: 72433 - DNA, 30 bp, Artificial Sequence
  Synthetic oligonucleotide
caataccacttccgaacaagacaggcatga

SEQ ID NO: 72434 - DNA, 30 bp, Artificial Sequence
  Synthetic oligonucleotide
aacacagggtaatagttcgcacatgcatga

SEQ ID NO: 72435 - DNA, 30 bp, Artificial Sequence
  Synthetic oligonucleotide
ctgccgtgtagtgacgaattagctcgatga

SEQ ID NO: 72436 - DNA, 30 bp, Artificial Sequence
  Synthetic oligonucleotide
tccgcgggggtattcattacagaaggatga

SEQ ID NO: 72437 - DNA, 30 bp, Artificial Sequence
  Synthetic oligonucleotide
atggttaaccgtcgggaggaataaggatga

SEQ ID NO: 72438 - DNA, 30 bp, Artificial Sequence
  Synthetic oligonucleotide
agtcatccgggaaagaaatactacggatga

SEQ ID NO: 72439 - DNA, 30 bp, Artificial Sequence
  Synthetic oligonucleotide
gggctgtgcacgtaggaaaactccggatga

SEQ ID NO: 72440 - DNA, 30 bp, Artificial Sequence
  Synthetic oligonucleotide
cctaacgtgcacaatgctgatgtgggatga

SEQ ID NO: 72441 - DNA, 30 bp, Artificial Sequence
  Synthetic oligonucleotide
aacaatagagaggtccagtgaggctgatga

SEQ ID NO: 72442 - DNA, 30 bp, Artificial Sequence
  Synthetic oligonucleotide
tcaggcgaggagggcagagttgggtgatga

SEQ ID NO: 72443 - DNA, 30 bp, Artificial Sequence
  Synthetic oligonucleotide
tggcagtttgaggcgaacagagacgtatga

SEQ ID NO: 72444 - DNA, 30 bp, Artificial Sequence
  Synthetic oligonucleotide
gcgaggggcattggtaagtgagaggtatga

SEQ ID NO: 72445 - DNA, 30 bp, Artificial Sequence
  Synthetic oligonucleotide
tgacagggtcgggcacggggaacattatga

SEQ ID NO: 72446 - DNA, 30 bp, Artificial Sequence
  Synthetic oligonucleotide
gcatgcgtggacatattgcacgatttatga

SEQ ID NO: 72447 - DNA, 30 bp, Artificial Sequence
  Synthetic oligonucleotide
ctaaaggccgaatgggaaacagagaactga

SEQ ID NO: 72448 - DNA, 30 bp, Artificial Sequence
  Synthetic oligonucleotide
accgagtcccagtcctgcatagaatactga

SEQ ID NO: 72449 - DNA, 30 bp, Artificial Sequence
  Synthetic oligonucleotide
tgagaatgaacctttgaaagactatactga

SEQ ID NO: 72450 - DNA, 30 bp, Artificial Sequence
  Synthetic oligonucleotide
cgagtgagacaatcattgcgaaactactga

SEQ ID NO: 72451 - DNA, 30 bp, Artificial Sequence
  Synthetic oligonucleotide
attgtacataacaaaaaaggggtctactga

SEQ ID NO: 72452 - DNA, 30 bp, Artificial Sequence
  Synthetic oligonucleotide
ccgagaagttggtaacagggatcgtactga

SEQ ID NO: 72453 - DNA, 30 bp, Artificial Sequence
  Synthetic oligonucleotide
acacggccttgtcactgcagaagcacctga

SEQ ID NO: 72454 - DNA, 30 bp, Artificial Sequence
  Synthetic oligonucleotide
gaacggctggccgatcatcgctacgcctga

SEQ ID NO: 72455 - DNA, 30 bp, Artificial Sequence
  Synthetic oligonucleotide
tgcgaatggcagcggacataaccttcctga

SEQ ID NO: 72456 - DNA, 30 bp, Artificial Sequence
  Synthetic oligonucleotide
ctcaatcttagaacaggcgtggcgagctga

SEQ ID NO: 72457 - DNA, 30 bp, Artificial Sequence
  Synthetic oligonucleotide
tatacagaggcagaatggccaagacgctga

SEQ ID NO: 72458 - DNA, 30 bp, Artificial Sequence
  Synthetic oligonucleotide
atcgccaaaacccgcggcgtagagggctga

SEQ ID NO: 72459 - DNA, 30 bp, Artificial Sequence
  Synthetic oligonucleotide
gcggttgcaacgtggatacacactggctga

SEQ ID NO: 72460 - DNA, 30 bp, Artificial Sequence
  Synthetic oligonucleotide
cattcttcgtgagtaagcgtaagtggctga

SEQ ID NO: 72461 - DNA, 30 bp, Artificial Sequence
  Synthetic oligonucleotide
gggaccaatgaggataggcaatactgctga

SEQ ID NO: 72462 - DNA, 31 bp, Artificial Sequence
  Synthetic oligonucleotide
catatcgtggactgaggtaacctcgatctga

SEQ ID NO: 72463 - DNA, 30 bp, Artificial Sequence
  Synthetic oligonucleotide
agatatcgtgagttggactgagtgatctga

SEQ ID NO: 72464 - DNA, 30 bp, Artificial Sequence
  Synthetic oligonucleotide
gcctcgggtacaaatgtaaactccgtctga

SEQ ID NO: 72465 - DNA, 30 bp, Artificial Sequence
  Synthetic oligonucleotide
tcgtacggtaactgggggatacgggtctga

SEQ ID NO: 72466 - DNA, 30 bp, Artificial Sequence
  Synthetic oligonucleotide
gtgacttcggcgtagaggagtaatgtctga

SEQ ID NO: 72467 - DNA, 30 bp, Artificial Sequence
  Synthetic oligonucleotide
aacagaagaagtgcgtcacaagatttctga

SEQ ID NO: 72468 - DNA, 30 bp, Artificial Sequence
  Synthetic oligonucleotide
acgggtatgtgaaactcaactgacaagtga

SEQ ID NO: 72469 - DNA, 30 bp, Artificial Sequence
  Synthetic oligonucleotide
acctcagaagcgcgtagaatagagaagtga

SEQ ID NO: 72470 - DNA, 30 bp, Artificial Sequence
  Synthetic oligonucleotide
gtccaggacaccaagcttacttcgaagtga

SEQ ID NO: 72471 - DNA, 30 bp, Artificial Sequence
  Synthetic oligonucleotide
ggggggggagtaaggaggcgtaaacagtga

SEQ ID NO: 72472 - DNA, 30 bp, Artificial Sequence
  Synthetic oligonucleotide
agcgaaagggaatgttagcttttgcagtga

SEQ ID NO: 72473 - DNA, 30 bp, Artificial Sequence
  Synthetic oligonucleotide
gggtatagccgccacagaatgactcagtga

SEQ ID NO: 72474 - DNA, 30 bp, Artificial Sequence
  Synthetic oligonucleotide
agaatccgatacgattaatacattcagtga

SEQ ID NO: 72475 - DNA, 30 bp, Artificial Sequence
  Synthetic oligonucleotide
ccacgggggaagaatattgcggaagagtga

SEQ ID NO: 72476 - DNA, 30 bp, Artificial Sequence
  Synthetic oligonucleotide
caggggctgtttactcgggaaggttagtga

SEQ ID NO: 72477 - DNA, 30 bp, Artificial Sequence
  Synthetic oligonucleotide
ttagcgtgctagcgaaatagtgctacgtga

SEQ ID NO: 72478 - DNA, 30 bp, Artificial Sequence
  Synthetic oligonucleotide
aaagcgagggagcttggaccaaaaccgtga

SEQ ID NO: 72479 - DNA, 30 bp, Artificial Sequence
  Synthetic oligonucleotide
cgacatatgggcccattatccgatccgtga

SEQ ID NO: 72480 - DNA, 30 bp, Artificial Sequence
  Synthetic oligonucleotide
tcatgtaggacacgtcttctgcacgcgtga

SEQ ID NO: 72481 - DNA, 30 bp, Artificial Sequence
  Synthetic oligonucleotide
aggcgtgcacagcccagtaccaatgcgtga

SEQ ID NO: 72482 - DNA, 30 bp, Artificial Sequence
  Synthetic oligonucleotide
ggtaacgtcaaaggaacataataatcgtga

SEQ ID NO: 72483 - DNA, 30 bp, Artificial Sequence
  Synthetic oligonucleotide
catgatcctaatttcgacgaatctcggtga

SEQ ID NO: 72484 - DNA, 30 bp, Artificial Sequence
  Synthetic oligonucleotide
gataacaaagttcaaatcatgagtgggtga

SEQ ID NO: 72485 - DNA, 30 bp, Artificial Sequence
  Synthetic oligonucleotide
ctgatcggcagttatgcgatacgtgggtga

SEQ ID NO: 72486 - DNA, 30 bp, Artificial Sequence
  Synthetic oligonucleotide
gatgtgtcgaaccatcaaacttacatgtga

SEQ ID NO: 72487 - DNA, 30 bp, Artificial Sequence
  Synthetic oligonucleotide
acgaaggggctgttgtcacatgtcatgtga

SEQ ID NO: 72488 - DNA, 30 bp, Artificial Sequence
  Synthetic oligonucleotide
ccagtccgtagggggagagctcttatgtga

SEQ ID NO: 72489 - DNA, 30 bp, Artificial Sequence
  Synthetic oligonucleotide
gcatagtaagctacgaagattagcgtgtga

SEQ ID NO: 72490 - DNA, 30 bp, Artificial Sequence
  Synthetic oligonucleotide
cgggaaatggaaagtgcaggtcgggtgtga

SEQ ID NO: 72491 - DNA, 30 bp, Artificial Sequence
  Synthetic oligonucleotide
ccggcgtaaatagcgggcatttgggtgtga

SEQ ID NO: 72492 - DNA, 30 bp, Artificial Sequence
  Synthetic oligonucleotide
aacacgctcgagacattatggtccttgtga

SEQ ID NO: 72493 - DNA, 30 bp, Artificial Sequence
  Synthetic oligonucleotide
gcgggccgcaatcaaggcggaacaaattga

SEQ ID NO: 72494 - DNA, 30 bp, Artificial Sequence
  Synthetic oligonucleotide
cgcgtataaatgaggcgggggctagattga

SEQ ID NO: 72495 - DNA, 30 bp, Artificial Sequence
  Synthetic oligonucleotide
tatgcggcacggaccagacaatgatattga

SEQ ID NO: 72496 - DNA, 30 bp, Artificial Sequence
  Synthetic oligonucleotide
cgcctaaaacacacacccaacgcttattga

SEQ ID NO: 72497 - DNA, 30 bp, Artificial Sequence
  Synthetic oligonucleotide
aggtggttgcgagccgaacaggacacttga

SEQ ID NO: 72498 - DNA, 30 bp, Artificial Sequence
  Synthetic oligonucleotide
ctactagatagtgaaagtcccaagacttga

SEQ ID NO: 72499 - DNA, 30 bp, Artificial Sequence
  Synthetic oligonucleotide
agcgcacgagcttaaaatggtgcgacttga

SEQ ID NO: 72500 - DNA, 30 bp, Artificial Sequence
  Synthetic oligonucleotide
ttacggctaacagtggaagaggggacttga

SEQ ID NO: 72501 - DNA, 30 bp, Artificial Sequence
  Synthetic oligonucleotide
aggtaacaacgatagtctcagaacccttga

SEQ ID NO: 72502 - DNA, 30 bp, Artificial Sequence
  Synthetic oligonucleotide
acgcgttctcgatatggcaagatctcttga

SEQ ID NO: 72503 - DNA, 30 bp, Artificial Sequence
  Synthetic oligonucleotide
tgtaccaacggtacctgggatccaagttga

SEQ ID NO: 72504 - DNA, 30 bp, Artificial Sequence
  Synthetic oligonucleotide
cgcgagtctgagattttaagcttgcgttga

SEQ ID NO: 72505 - DNA, 30 bp, Artificial Sequence
  Synthetic oligonucleotide
caaaaaattagaaggcacgggcaaggttga

SEQ ID NO: 72506 - DNA, 30 bp, Artificial Sequence
  Synthetic oligonucleotide
ggcttggcgttggaccacgacgacggttga

SEQ ID NO: 72507 - DNA, 30 bp, Artificial Sequence
  Synthetic oligonucleotide
catcgaataaatgagttcgctaccggttga

SEQ ID NO: 72508 - DNA, 30 bp, Artificial Sequence
  Synthetic oligonucleotide
agagcaggcgtataagagtcaaggggttga

SEQ ID NO: 72509 - DNA, 30 bp, Artificial Sequence
  Synthetic oligonucleotide
tcaggtcaacaaaacaaatcagaatgttga

SEQ ID NO: 72510 - DNA, 30 bp, Artificial Sequence
  Synthetic oligonucleotide
aggagggagtcattatcaggttagatttga

SEQ ID NO: 72511 - DNA, 30 bp, Artificial Sequence
  Synthetic oligonucleotide
cgttcaatgcctcattccgtgctgatttga

SEQ ID NO: 72512 - DNA, 30 bp, Artificial Sequence
  Synthetic oligonucleotide
acggtaagcgtacagaaagtacttctttga

SEQ ID NO: 72513 - DNA, 30 bp, Artificial Sequence
  Synthetic oligonucleotide
tgagaccgaaccgagaccgcgcaattttga

SEQ ID NO: 72514 - DNA, 30 bp, Artificial Sequence
  Synthetic oligonucleotide
ccggtagaggtacgacggcaatcaaaaata

SEQ ID NO: 72515 - DNA, 30 bp, Artificial Sequence
  Synthetic oligonucleotide
gactagcaaggcaagccgggtcccaaaata

SEQ ID NO: 72516 - DNA, 30 bp, Artificial Sequence
  Synthetic oligonucleotide
tgcacagaatgcgtgatggacccccaaata

SEQ ID NO: 72517 - DNA, 30 bp, Artificial Sequence
  Synthetic oligonucleotide
tcgatagatctcagtataccagagcaaata

SEQ ID NO: 72518 - DNA, 30 bp, Artificial Sequence
  Synthetic oligonucleotide
gttgatatcaaacatgagacctggcaaata

SEQ ID NO: 72519 - DNA, 30 bp, Artificial Sequence
  Synthetic oligonucleotide
ggacagctacgcttcaaaaaggaagaaata

SEQ ID NO: 72520 - DNA, 30 bp, Artificial Sequence
  Synthetic oligonucleotide
gataggggcagacttcacacaccagaaata

SEQ ID NO: 72521 - DNA, 30 bp, Artificial Sequence
  Synthetic oligonucleotide
acccagcaaacaacaaggcggtgagaaata

SEQ ID NO: 72522 - DNA, 30 bp, Artificial Sequence
  Synthetic oligonucleotide
cgcgttatagagatggaaaaagtggaaata

SEQ ID NO: 72523 - DNA, 30 bp, Artificial Sequence
  Synthetic oligonucleotide
actcagatcgtgtggctatcgacataaata

SEQ ID NO: 72524 - DNA, 30 bp, Artificial Sequence
  Synthetic oligonucleotide
ccttaaacaacaaagagcgcgatgtaaata

SEQ ID NO: 72525 - DNA, 30 bp, Artificial Sequence
  Synthetic oligonucleotide
acggcatcagaagcgtgcaagaccacaata

SEQ ID NO: 72526 - DNA, 30 bp, Artificial Sequence
  Synthetic oligonucleotide
aacttaagagggactcccaatgcaccaata

SEQ ID NO: 72527 - DNA, 30 bp, Artificial Sequence
  Synthetic oligonucleotide
ccacgtaaagaccaataattgctgccaata

SEQ ID NO: 72528 - DNA, 30 bp, Artificial Sequence
  Synthetic oligonucleotide
tgtagaagtgtcgatgagtcgtaagcaata

SEQ ID NO: 72529 - DNA, 30 bp, Artificial Sequence
  Synthetic oligonucleotide
ggagaatagaacacaaccacaacagcaata

SEQ ID NO: 72530 - DNA, 30 bp, Artificial Sequence
  Synthetic oligonucleotide
taatacctgccgaaaggagcttgagcaata

SEQ ID NO: 72531 - DNA, 30 bp, Artificial Sequence
  Synthetic oligonucleotide
agaggggtaaacagagcccacagaagaata

SEQ ID NO: 72532 - DNA, 30 bp, Artificial Sequence
  Synthetic oligonucleotide
atgaactggtatgcctaggatcaaggaata

SEQ ID NO: 72533 - DNA, 30 bp, Artificial Sequence
  Synthetic oligonucleotide
gatggatccattagcgagcctgcaggaata

SEQ ID NO: 72534 - DNA, 30 bp, Artificial Sequence
  Synthetic oligonucleotide
cctcagcgaaccacatcgatgcgcggaata

SEQ ID NO: 72535 - DNA, 30 bp, Artificial Sequence
  Synthetic oligonucleotide
ttaccgagaatgtgagcagtggccataata

SEQ ID NO: 72536 - DNA, 30 bp, Artificial Sequence
  Synthetic oligonucleotide
gcagaacgcatgtacgaacaagtgataata

SEQ ID NO: 72537 - DNA, 30 bp, Artificial Sequence
  Synthetic oligonucleotide
agatcctcaggagccgtccatttgctaata

SEQ ID NO: 72538 - DNA, 30 bp, Artificial Sequence
  Synthetic oligonucleotide
acaacggtgatttacggtggaacggtaata

SEQ ID NO: 72539 - DNA, 30 bp, Artificial Sequence
  Synthetic oligonucleotide
ccggatcctacggagacagggcgattaata

SEQ ID NO: 72540 - DNA, 30 bp, Artificial Sequence
  Synthetic oligonucleotide
ttagaacaaacggatgcttagtgcttaata

SEQ ID NO: 72541 - DNA, 31 bp, Artificial Sequence
  Synthetic oligonucleotide
cagggaacacgtactacagcgtcttttaata

SEQ ID NO: 72542 - DNA, 30 bp, Artificial Sequence
  Synthetic oligonucleotide
ccggaggaccgagggccaaagcacaacata

SEQ ID NO: 72543 - DNA, 30 bp, Artificial Sequence
  Synthetic oligonucleotide
ggtacgtcacaccagatgacaggacacata

SEQ ID NO: 72544 - DNA, 30 bp, Artificial Sequence
  Synthetic oligonucleotide
tgggaagcctgtccgaacatgggacacata

SEQ ID NO: 72545 - DNA, 30 bp, Artificial Sequence
  Synthetic oligonucleotide
ccttcaattgaaatgaagtgataccacata

SEQ ID NO: 72546 - DNA, 30 bp, Artificial Sequence
  Synthetic oligonucleotide
cgccaaacggagttcgaatgaccagacata

SEQ ID NO: 72547 - DNA, 30 bp, Artificial Sequence
  Synthetic oligonucleotide
tatcgcctcgataatgtggggaccgacata

SEQ ID NO: 72548 - DNA, 30 bp, Artificial Sequence
  Synthetic oligonucleotide
aaatccgactaaggccggaatgccgacata

SEQ ID NO: 72549 - DNA, 30 bp, Artificial Sequence
  Synthetic oligonucleotide
aggggtggcgagaaagacattggttacata

SEQ ID NO: 72550 - DNA, 30 bp, Artificial Sequence
  Synthetic oligonucleotide
ccgtgaagaaaataggtggcttcctccata

SEQ ID NO: 72551 - DNA, 30 bp, Artificial Sequence
  Synthetic oligonucleotide
ttggtagtgccagtgcgatattcgagcata

SEQ ID NO: 72552 - DNA, 30 bp, Artificial Sequence
  Synthetic oligonucleotide
ctacgttgcaacaatgaatacgttagcata

SEQ ID NO: 72553 - DNA, 30 bp, Artificial Sequence
  Synthetic oligonucleotide
ctcgcctggaggaagatctttgcgcgcata

SEQ ID NO: 72554 - DNA, 30 bp, Artificial Sequence
  Synthetic oligonucleotide
gacgtggagatcgtaatccgggccggcata

SEQ ID NO: 72555 - DNA, 30 bp, Artificial Sequence
  Synthetic oligonucleotide
gcgacgacctttagtgcccacaccctcata

SEQ ID NO: 72556 - DNA, 31 bp, Artificial Sequence
  Synthetic oligonucleotide
acgtccacttcgcttggctgccaccctcata

SEQ ID NO: 72557 - DNA, 30 bp, Artificial Sequence
  Synthetic oligonucleotide
ctcgaagaaagggtgggctaatgtctcata

SEQ ID NO: 72558 - DNA, 30 bp, Artificial Sequence
  Synthetic oligonucleotide
tcggtgggtataaccgactgttaagtcata

SEQ ID NO: 72559 - DNA, 30 bp, Artificial Sequence
  Synthetic oligonucleotide
ctagagtaagtcagtcgaatgttagtcata

SEQ ID NO: 72560 - DNA, 30 bp, Artificial Sequence
  Synthetic oligonucleotide
gcgatataactagagtgaaatagtgtcata

SEQ ID NO: 72561 - DNA, 30 bp, Artificial Sequence
  Synthetic oligonucleotide
agtgaaggcaacggttgaggtaacaagata

SEQ ID NO: 72562 - DNA, 30 bp, Artificial Sequence
  Synthetic oligonucleotide
accgctaggcgtgagataatgcttaagata

SEQ ID NO: 72563 - DNA, 30 bp, Artificial Sequence
  Synthetic oligonucleotide
agtggtgaatacagaaggctgacacagata

SEQ ID NO: 72564 - DNA, 30 bp, Artificial Sequence
  Synthetic oligonucleotide
ctaacatcaaagtcgcggtcgagacagata

SEQ ID NO: 72565 - DNA, 30 bp, Artificial Sequence
  Synthetic oligonucleotide
gtcacgcgtcccgaggatagtgaagagata

SEQ ID NO: 72566 - DNA, 30 bp, Artificial Sequence
  Synthetic oligonucleotide
cgaagttccggaagatgttgcccagagata

SEQ ID NO: 72567 - DNA, 30 bp, Artificial Sequence
  Synthetic oligonucleotide
ccgtgcaaacacccgctatgggtagagata

SEQ ID NO: 72568 - DNA, 30 bp, Artificial Sequence
  Synthetic oligonucleotide
cgggaccaggactaacctatcgtcgagata

SEQ ID NO: 72569 - DNA, 30 bp, Artificial Sequence
  Synthetic oligonucleotide
aagggcttgaatactcagtttgaggagata

SEQ ID NO: 72570 - DNA, 30 bp, Artificial Sequence
  Synthetic oligonucleotide
tggatctaaggaattgagtacgcaacgata

SEQ ID NO: 72571 - DNA, 30 bp, Artificial Sequence
  Synthetic oligonucleotide
tctgcacctagcgaaaataacacgccgata

SEQ ID NO: 72572 - DNA, 30 bp, Artificial Sequence
  Synthetic oligonucleotide
gtaacgagtcgcaacagggtctgatcgata

SEQ ID NO: 72573 - DNA, 30 bp, Artificial Sequence
  Synthetic oligonucleotide
cggtttcgctgtaacagttaattatcgata

SEQ ID NO: 72574 - DNA, 30 bp, Artificial Sequence
  Synthetic oligonucleotide
tccaagctggagggagaaaccacctcgata

SEQ ID NO: 72575 - DNA, 30 bp, Artificial Sequence
  Synthetic oligonucleotide
agcgaactcctctgtacggaagagtcgata

SEQ ID NO: 72576 - DNA, 30 bp, Artificial Sequence
  Synthetic oligonucleotide
tcactaagggatcgatctagagtgaggata

SEQ ID NO: 72577 - DNA, 30 bp, Artificial Sequence
  Synthetic oligonucleotide
tataaactcggaggagcatgatgtaggata

SEQ ID NO: 72578 - DNA, 30 bp, Artificial Sequence
  Synthetic oligonucleotide
tcgatctgtctacaatccaagagtcggata

SEQ ID NO: 72579 - DNA, 30 bp, Artificial Sequence
  Synthetic oligonucleotide
cgtaatgtctggttggcaatacaagggata

SEQ ID NO: 72580 - DNA, 30 bp, Artificial Sequence
  Synthetic oligonucleotide
cttcgaggatacagcgagcgcctggggata

SEQ ID NO: 72581 - DNA, 30 bp, Artificial Sequence
  Synthetic oligonucleotide
ggcactactagctatctgatcagtgggata

SEQ ID NO: 72582 - DNA, 30 bp, Artificial Sequence
  Synthetic oligonucleotide
ctcaaggggcctcgggcactgaagtggata

SEQ ID NO: 72583 - DNA, 30 bp, Artificial Sequence
  Synthetic oligonucleotide
gcttaaatgcatgggggcgccgtttggata

SEQ ID NO: 72584 - DNA, 30 bp, Artificial Sequence
  Synthetic oligonucleotide
tcggaaaaggctacagatgcgttcatgata

SEQ ID NO: 72585 - DNA, 30 bp, Artificial Sequence
  Synthetic oligonucleotide
gatgtgcggggccaagccgtacaactgata

SEQ ID NO: 72586 - DNA, 30 bp, Artificial Sequence
  Synthetic oligonucleotide
gtgtggacaattcgaatgaccgatctgata

SEQ ID NO: 72587 - DNA, 30 bp, Artificial Sequence
  Synthetic oligonucleotide
cctgtgccccacgtaatatcgagcaatata

SEQ ID NO: 72588 - DNA, 30 bp, Artificial Sequence
  Synthetic oligonucleotide
ggtcctgggcacctattgcactcacatata

SEQ ID NO: 72589 - DNA, 30 bp, Artificial Sequence
  Synthetic oligonucleotide
gtacagagctgcactgggggccggcatata

SEQ ID NO: 72590 - DNA, 30 bp, Artificial Sequence
  Synthetic oligonucleotide
cctgattgagtgtgggctaggtggtatata

SEQ ID NO: 72591 - DNA, 30 bp, Artificial Sequence
  Synthetic oligonucleotide
gtaggcaaaatctagtggggacttcgtata

SEQ ID NO: 72592 - DNA, 30 bp, Artificial Sequence
  Synthetic oligonucleotide
ggctcaactagccaacgcctgtaaggtata

SEQ ID NO: 72593 - DNA, 28 bp, Artificial Sequence
  Synthetic oligonucleotide
cgttaccccgaaggttgcgagaggtata

SEQ ID NO: 72594 - DNA, 30 bp, Artificial Sequence
  Synthetic oligonucleotide
aaggaggaaatgaacgtattgacatgtata

SEQ ID NO: 72595 - DNA, 30 bp, Artificial Sequence
  Synthetic oligonucleotide
ggctctacatatacagagggcgcgtgtata

SEQ ID NO: 72596 - DNA, 30 bp, Artificial Sequence
  Synthetic oligonucleotide
cggagcggggcggtgctgttgagcaaacta

SEQ ID NO: 72597 - DNA, 30 bp, Artificial Sequence
  Synthetic oligonucleotide
tacgagtattgtctgacaggactgaaacta

SEQ ID NO: 72598 - DNA, 30 bp, Artificial Sequence
  Synthetic oligonucleotide
gtaactcaaacgaatggaagagcccaacta

SEQ ID NO: 72599 - DNA, 30 bp, Artificial Sequence
  Synthetic oligonucleotide
gtctcgcactatacgataggtggccaacta

SEQ ID NO: 72600 - DNA, 30 bp, Artificial Sequence
  Synthetic oligonucleotide
agggactccagagatatatcctgccaacta

SEQ ID NO: 72601 - DNA, 30 bp, Artificial Sequence
  Synthetic oligonucleotide
tcaagatagaatgaaccaacgccagaacta

SEQ ID NO: 72602 - DNA, 30 bp, Artificial Sequence
  Synthetic oligonucleotide
catcacatgataggtgtactctggtaacta

SEQ ID NO: 72603 - DNA, 30 bp, Artificial Sequence
  Synthetic oligonucleotide
tataagcaactaagttccaccaattaacta

SEQ ID NO: 72604 - DNA, 30 bp, Artificial Sequence
  Synthetic oligonucleotide
tgcgggtcgtgtggcaaatgtagaacacta

SEQ ID NO: 72605 - DNA, 30 bp, Artificial Sequence
  Synthetic oligonucleotide
gcgtctaggacctaaacctgggaagcacta

SEQ ID NO: 72606 - DNA, 31 bp, Artificial Sequence
  Synthetic oligonucleotide
gcaaactacttcgagtacaaactgatcacta

SEQ ID NO: 72607 - DNA, 30 bp, Artificial Sequence
  Synthetic oligonucleotide
acacggcacgaaaataacgtcagcagacta

SEQ ID NO: 72608 - DNA, 30 bp, Artificial Sequence
  Synthetic oligonucleotide
cgtggagatgattaggtaggcttcagacta

SEQ ID NO: 72609 - DNA, 30 bp, Artificial Sequence
  Synthetic oligonucleotide
gcggaggccacgtgtatgcgagccatacta

SEQ ID NO: 72610 - DNA, 30 bp, Artificial Sequence
  Synthetic oligonucleotide
taccaagtaaattggagtgctacgatacta

SEQ ID NO: 72611 - DNA, 30 bp, Artificial Sequence
  Synthetic oligonucleotide
ccggggagacacgatggaaccctgatacta

SEQ ID NO: 72612 - DNA, 30 bp, Artificial Sequence
  Synthetic oligonucleotide
cggtgatctcaatcatttattcagctacta

SEQ ID NO: 72613 - DNA, 30 bp, Artificial Sequence
  Synthetic oligonucleotide
tgggacggtcacgacatgatagttgtacta

SEQ ID NO: 72614 - DNA, 30 bp, Artificial Sequence
  Synthetic oligonucleotide
tagggcatatccgaagcggaaagattacta

SEQ ID NO: 72615 - DNA, 30 bp, Artificial Sequence
  Synthetic oligonucleotide
acaacgttgggaaatgatggagcgttacta

SEQ ID NO: 72616 - DNA, 30 bp, Artificial Sequence
  Synthetic oligonucleotide
tatcggcaggacagtgcacgaagaaaccta

SEQ ID NO: 72617 - DNA, 30 bp, Artificial Sequence
  Synthetic oligonucleotide
gcatacccggtcgaagaacgcattaaccta

SEQ ID NO: 72618 - DNA, 30 bp, Artificial Sequence
  Synthetic oligonucleotide
agatcaggaaaatgaatgtggtcacaccta

SEQ ID NO: 72619 - DNA, 30 bp, Artificial Sequence
  Synthetic oligonucleotide
agcagaaggaagtaatatcgaatagaccta

SEQ ID NO: 72620 - DNA, 30 bp, Artificial Sequence
  Synthetic oligonucleotide
ttcaggtggacgaagatacgatacgaccta

SEQ ID NO: 72621 - DNA, 30 bp, Artificial Sequence
  Synthetic oligonucleotide
agcggcatattgtggaggagaatcgaccta

SEQ ID NO: 72622 - DNA, 30 bp, Artificial Sequence
  Synthetic oligonucleotide
tgaaaaggcgatataacccgaacaccccta

SEQ ID NO: 72623 - DNA, 30 bp, Artificial Sequence
  Synthetic oligonucleotide
ccacgccagaaaaacaagtccttaccccta

SEQ ID NO: 72624 - DNA, 30 bp, Artificial Sequence
  Synthetic oligonucleotide
gcggggtcattaacatgattataagcccta

SEQ ID NO: 72625 - DNA, 30 bp, Artificial Sequence
  Synthetic oligonucleotide
gcgtgccgaggaatagacccacgtagccta

SEQ ID NO: 72626 - DNA, 30 bp, Artificial Sequence
  Synthetic oligonucleotide
tcgacaacccggtacgtctcagagggccta

SEQ ID NO: 72627 - DNA, 30 bp, Artificial Sequence
  Synthetic oligonucleotide
cggtcatcagcgtaaaatgtctgctgccta

SEQ ID NO: 72628 - DNA, 30 bp, Artificial Sequence
  Synthetic oligonucleotide
tggtagagaagacaggtagtgtatatccta

SEQ ID NO: 72629 - DNA, 30 bp, Artificial Sequence
  Synthetic oligonucleotide
ggagcagtgtatccgcccaatgtgcagcta

SEQ ID NO: 72630 - DNA, 30 bp, Artificial Sequence
  Synthetic oligonucleotide
tgtagcgtgcggaatgcgtaggttcagcta

SEQ ID NO: 72631 - DNA, 30 bp, Artificial Sequence
  Synthetic oligonucleotide
tagacgttcctgagtgcagtagcagagcta

SEQ ID NO: 72632 - DNA, 30 bp, Artificial Sequence
  Synthetic oligonucleotide
tgtttataatgccagaaaaaccgctagcta

SEQ ID NO: 72633 - DNA, 29 bp, Artificial Sequence
  Synthetic oligonucleotide
acgtgaataagttggttttccatccgcta

SEQ ID NO: 72634 - DNA, 30 bp, Artificial Sequence
  Synthetic oligonucleotide
tccaatgaaggctatgccccaaaagcgcta

SEQ ID NO: 72635 - DNA, 30 bp, Artificial Sequence
  Synthetic oligonucleotide
ctaaagaggtgcgattagcgaggggcgcta

SEQ ID NO: 72636 - DNA, 30 bp, Artificial Sequence
  Synthetic oligonucleotide
gggtggagaaggatagtcacgccatcgcta

SEQ ID NO: 72637 - DNA, 30 bp, Artificial Sequence
  Synthetic oligonucleotide
atcacagaaatcacccgctatgcttcgcta

SEQ ID NO: 72638 - DNA, 30 bp, Artificial Sequence
  Synthetic oligonucleotide
gacaaccgtatccaccctatagcaaggcta

SEQ ID NO: 72639 - DNA, 30 bp, Artificial Sequence
  Synthetic oligonucleotide
ccatgaggtaaattacccactaggaggcta

SEQ ID NO: 72640 - DNA, 30 bp, Artificial Sequence
  Synthetic oligonucleotide
atacgtgacacataaaagttaattaggcta

SEQ ID NO: 72641 - DNA, 30 bp, Artificial Sequence
  Synthetic oligonucleotide
gacgggaagccatggtggaaaacagggcta

SEQ ID NO: 72642 - DNA, 30 bp, Artificial Sequence
  Synthetic oligonucleotide
cggtaaaagattcgccggtactcagggcta

SEQ ID NO: 72643 - DNA, 29 bp, Artificial Sequence
  Synthetic oligonucleotide
tcaggcgatacagctcggaaagttggcta

SEQ ID NO: 72644 - DNA, 30 bp, Artificial Sequence
  Synthetic oligonucleotide
atgatcggtgaaatgtcctataacatgcta

SEQ ID NO: 72645 - DNA, 30 bp, Artificial Sequence
  Synthetic oligonucleotide
acgaataaagaacgtaacgtcactctgcta

SEQ ID NO: 72646 - DNA, 30 bp, Artificial Sequence
  Synthetic oligonucleotide
gggcctagattaactgtaaccaaagtgcta

SEQ ID NO: 72647 - DNA, 30 bp, Artificial Sequence
  Synthetic oligonucleotide
catcgaaggattcgcgtatccatcgtgcta

SEQ ID NO: 72648 - DNA, 30 bp, Artificial Sequence
  Synthetic oligonucleotide
acagccatacagcagagaagaacggtgcta

SEQ ID NO: 72649 - DNA, 30 bp, Artificial Sequence
  Synthetic oligonucleotide
gttaatgaaactcgtgataagaatcatcta

SEQ ID NO: 72650 - DNA, 30 bp, Artificial Sequence
  Synthetic oligonucleotide
ggataccgtgccacaaattccgatcatcta

SEQ ID NO: 72651 - DNA, 30 bp, Artificial Sequence
  Synthetic oligonucleotide
ttcgtaacggtcaacctctagagtgatcta

SEQ ID NO: 72652 - DNA, 30 bp, Artificial Sequence
  Synthetic oligonucleotide
cgatcagaggccggagttcgcatatatcta

SEQ ID NO: 72653 - DNA, 30 bp, Artificial Sequence
  Synthetic oligonucleotide
cggggtgctgactagttgaagaactatcta

SEQ ID NO: 72654 - DNA, 30 bp, Artificial Sequence
  Synthetic oligonucleotide
cggtcgccgactcagagttggcagtctcta

SEQ ID NO: 72655 - DNA, 30 bp, Artificial Sequence
  Synthetic oligonucleotide
cacgaaagtatagttcggagtggaagtcta

SEQ ID NO: 72656 - DNA, 30 bp, Artificial Sequence
  Synthetic oligonucleotide
gcacaggggaggatcgggcaaaagcgtcta

SEQ ID NO: 72657 - DNA, 30 bp, Artificial Sequence
  Synthetic oligonucleotide
gggcgaatgacccaaatcgtaacgcgtcta

SEQ ID NO: 72658 - DNA, 30 bp, Artificial Sequence
  Synthetic oligonucleotide
tgtggaataagtcatataagaaatcgtcta

SEQ ID NO: 72659 - DNA, 30 bp, Artificial Sequence
  Synthetic oligonucleotide
gcaagtcgagactaagaatatgctggtcta

SEQ ID NO: 72660 - DNA, 30 bp, Artificial Sequence
  Synthetic oligonucleotide
acaaacaattaggagtaagtacagattcta

SEQ ID NO: 72661 - DNA, 30 bp, Artificial Sequence
  Synthetic oligonucleotide
tggaacggcaatagcgagggaagacttcta

SEQ ID NO: 72662 - DNA, 30 bp, Artificial Sequence
  Synthetic oligonucleotide
ggggcgagaaattgtgtgcaacacaaagta

SEQ ID NO: 72663 - DNA, 30 bp, Artificial Sequence
  Synthetic oligonucleotide
gttcgggcgccgaggcgagcagagaaagta

SEQ ID NO: 72664 - DNA, 30 bp, Artificial Sequence
  Synthetic oligonucleotide
cggtacttatcagcaaggcgcggtaaagta

SEQ ID NO: 72665 - DNA, 30 bp, Artificial Sequence
  Synthetic oligonucleotide
tatagatgtagagtcataagcaagcaagta

SEQ ID NO: 72666 - DNA, 30 bp, Artificial Sequence
  Synthetic oligonucleotide
agagcccaaggtcgtgctatgagcgaagta

SEQ ID NO: 72667 - DNA, 30 bp, Artificial Sequence
  Synthetic oligonucleotide
ccttcctaacagctgatcatgagggaagta

SEQ ID NO: 72668 - DNA, 30 bp, Artificial Sequence
  Synthetic oligonucleotide
gtctcgttatagagctggcgttctgaagta

SEQ ID NO: 72669 - DNA, 30 bp, Artificial Sequence
  Synthetic oligonucleotide
gcatagaccctaaattcataactctaagta

SEQ ID NO: 72670 - DNA, 30 bp, Artificial Sequence
  Synthetic oligonucleotide
ggcacttggggtaattaagctgcttaagta

SEQ ID NO: 72671 - DNA, 30 bp, Artificial Sequence
  Synthetic oligonucleotide
gtaagaaggggccactcttcctaaacagta

SEQ ID NO: 72672 - DNA, 30 bp, Artificial Sequence
  Synthetic oligonucleotide
gcggcgagcaggtctgtcatatcaacagta

SEQ ID NO: 72673 - DNA, 30 bp, Artificial Sequence
  Synthetic oligonucleotide
acgaatatcgtaggatatgtaagcccagta

SEQ ID NO: 72674 - DNA, 30 bp, Artificial Sequence
  Synthetic oligonucleotide
gtgggcaatcttcgagttttcgggccagta

SEQ ID NO: 72675 - DNA, 30 bp, Artificial Sequence
  Synthetic oligonucleotide
tcaagtagccgtggtattagtactccagta

SEQ ID NO: 72676 - DNA, 30 bp, Artificial Sequence
  Synthetic oligonucleotide
agtgtgaatgtatgaacttgtcctccagta

SEQ ID NO: 72677 - DNA, 30 bp, Artificial Sequence
  Synthetic oligonucleotide
cggtttggaaatgtgaaatccacagcagta

SEQ ID NO: 72678 - DNA, 30 bp, Artificial Sequence
  Synthetic oligonucleotide
cagcgatataacgtctccagtccagcagta

SEQ ID NO: 72679 - DNA, 30 bp, Artificial Sequence
  Synthetic oligonucleotide
aaggaaaagctaagtttcctctcttcagta

SEQ ID NO: 72680 - DNA, 30 bp, Artificial Sequence
  Synthetic oligonucleotide
gcaagaaagggactgatgcttatttcagta

SEQ ID NO: 72681 - DNA, 30 bp, Artificial Sequence
  Synthetic oligonucleotide
agccgcaaagcacgacggtaataaagagta

SEQ ID NO: 72682 - DNA, 30 bp, Artificial Sequence
  Synthetic oligonucleotide
gccgtaaggagagtcttggtatggagagta

SEQ ID NO: 72683 - DNA, 30 bp, Artificial Sequence
  Synthetic oligonucleotide
aagtgggacgtgcaggtggtccttagagta

SEQ ID NO: 72684 - DNA, 30 bp, Artificial Sequence
  Synthetic oligonucleotide
tgagcaagggtcgggctttttgaaggagta

SEQ ID NO: 72685 - DNA, 30 bp, Artificial Sequence
  Synthetic oligonucleotide
gataaaatgcacaaaggtcacttgggagta

SEQ ID NO: 72686 - DNA, 30 bp, Artificial Sequence
  Synthetic oligonucleotide
caactgatgagtagtcagggctgtggagta

SEQ ID NO: 72687 - DNA, 30 bp, Artificial Sequence
  Synthetic oligonucleotide
gtacaacggctcggaccattttgtggagta

SEQ ID NO: 72688 - DNA, 30 bp, Artificial Sequence
  Synthetic oligonucleotide
ggccgctagattcagaatatggttggagta

SEQ ID NO: 72689 - DNA, 30 bp, Artificial Sequence
  Synthetic oligonucleotide
attagatcaaaataggatactccgtgagta

SEQ ID NO: 72690 - DNA, 30 bp, Artificial Sequence
  Synthetic oligonucleotide
ttcaggaaacgtgcgggaagggaaatagta

SEQ ID NO: 72691 - DNA, 30 bp, Artificial Sequence
  Synthetic oligonucleotide
agtttcgatacatgcgaatcacatatagta

SEQ ID NO: 72692 - DNA, 30 bp, Artificial Sequence
  Synthetic oligonucleotide
gtaaaggaggtatatctgaaatcattagta

SEQ ID NO: 72693 - DNA, 30 bp, Artificial Sequence
  Synthetic oligonucleotide
aacgaggaccatacgcccggatcattagta

SEQ ID NO: 72694 - DNA, 30 bp, Artificial Sequence
  Synthetic oligonucleotide
gtgacacgagttgttcggcatagcttagta

SEQ ID NO: 72695 - DNA, 30 bp, Artificial Sequence
  Synthetic oligonucleotide
taagtaagtgggaaagggaaacataacgta

SEQ ID NO: 72696 - DNA, 30 bp, Artificial Sequence
  Synthetic oligonucleotide
gagatgtgtagatttgtccggcatcacgta

SEQ ID NO: 72697 - DNA, 30 bp, Artificial Sequence
  Synthetic oligonucleotide
atcggctgatagacccttgacagttacgta

SEQ ID NO: 72698 - DNA, 30 bp, Artificial Sequence
  Synthetic oligonucleotide
ggcgatgcctaattattattttagaccgta

SEQ ID NO: 72699 - DNA, 30 bp, Artificial Sequence
  Synthetic oligonucleotide
ctaggacgctccgtcttctcataacccgta

SEQ ID NO: 72700 - DNA, 30 bp, Artificial Sequence
  Synthetic oligonucleotide
gaaagtggaaaattaaccgtgtaccccgta

SEQ ID NO: 72701 - DNA, 30 bp, Artificial Sequence
  Synthetic oligonucleotide
gtggtataagtgcccacttaccaagccgta

SEQ ID NO: 72702 - DNA, 30 bp, Artificial Sequence
  Synthetic oligonucleotide
ggtcgtcaagcgggaagtatcgacgccgta

SEQ ID NO: 72703 - DNA, 30 bp, Artificial Sequence
  Synthetic oligonucleotide
gggggctaatttcttgacaaatgtgccgta

SEQ ID NO: 72704 - DNA, 30 bp, Artificial Sequence
  Synthetic oligonucleotide
tattagcaagacgacagtctctcgtccgta

SEQ ID NO: 72705 - DNA, 30 bp, Artificial Sequence
  Synthetic oligonucleotide
cctctgcatagggataaaagagtcagcgta

SEQ ID NO: 72706 - DNA, 30 bp, Artificial Sequence
  Synthetic oligonucleotide
tggatgtcagggaatggaatttagagcgta

SEQ ID NO: 72707 - DNA, 30 bp, Artificial Sequence
  Synthetic oligonucleotide
caggggactgaatagtctgctacgcgcgta

SEQ ID NO: 72708 - DNA, 30 bp, Artificial Sequence
  Synthetic oligonucleotide
tatgcagtggaatggtggggtggtcgcgta

SEQ ID NO: 72709 - DNA, 30 bp, Artificial Sequence
  Synthetic oligonucleotide
ctatgcaggttgtgtctactggcaggcgta

SEQ ID NO: 72710 - DNA, 30 bp, Artificial Sequence
  Synthetic oligonucleotide
cattaaagtgtgacgacgggttccggcgta

SEQ ID NO: 72711 - DNA, 30 bp, Artificial Sequence
  Synthetic oligonucleotide
aattgtggtacggacatgttgatcggcgta

SEQ ID NO: 72712 - DNA, 30 bp, Artificial Sequence
  Synthetic oligonucleotide
cgtttagtcgacagagtctgtgcgggcgta

SEQ ID NO: 72713 - DNA, 30 bp, Artificial Sequence
  Synthetic oligonucleotide
gtaggaacttagtcaccgcgagcctgcgta

SEQ ID NO: 72714 - DNA, 30 bp, Artificial Sequence
  Synthetic oligonucleotide
tcagggaagcatgtgaacggaaacatcgta

SEQ ID NO: 72715 - DNA, 30 bp, Artificial Sequence
  Synthetic oligonucleotide
agatgcaatggacatttgttgcccttcgta

SEQ ID NO: 72716 - DNA, 30 bp, Artificial Sequence
  Synthetic oligonucleotide
ggaaatataggaggtataccgtctccggta

SEQ ID NO: 72717 - DNA, 30 bp, Artificial Sequence
  Synthetic oligonucleotide
tcaacccgagggcacatgcagggtccggta

SEQ ID NO: 72718 - DNA, 30 bp, Artificial Sequence
  Synthetic oligonucleotide
cgtggtcgaaagtaggagtaaagcgcggta

SEQ ID NO: 72719 - DNA, 30 bp, Artificial Sequence
  Synthetic oligonucleotide
ctgctcaggggggcgactgcgatggcggta

SEQ ID NO: 72720 - DNA, 30 bp, Artificial Sequence
  Synthetic oligonucleotide
tgagcgagaattggaacaaccagttcggta

SEQ ID NO: 72721 - DNA, 30 bp, Artificial Sequence
  Synthetic oligonucleotide
aactaacgcgggcgaatcacaaagagggta

SEQ ID NO: 72722 - DNA, 30 bp, Artificial Sequence
  Synthetic oligonucleotide
ggcggctcgggatccggcataatgagggta

SEQ ID NO: 72723 - DNA, 30 bp, Artificial Sequence
  Synthetic oligonucleotide
accggagtcaatggaaatgcacaacgggta

SEQ ID NO: 72724 - DNA, 30 bp, Artificial Sequence
  Synthetic oligonucleotide
gcaagcgcatgcgaggatatactgcgggta

SEQ ID NO: 72725 - DNA, 30 bp, Artificial Sequence
  Synthetic oligonucleotide
gtagccggtttagtggtgaccgtgcgggta

SEQ ID NO: 72726 - DNA, 30 bp, Artificial Sequence
  Synthetic oligonucleotide
tggtacagaaattaaaacgattcaggggta

SEQ ID NO: 72727 - DNA, 30 bp, Artificial Sequence
  Synthetic oligonucleotide
aaagacgccagatgaggggggccatgggta

SEQ ID NO: 72728 - DNA, 30 bp, Artificial Sequence
  Synthetic oligonucleotide
catgatggcttacacgtaaagttatgggta

SEQ ID NO: 72729 - DNA, 30 bp, Artificial Sequence
  Synthetic oligonucleotide
agagtacggcccgcctaagtattgatggta

SEQ ID NO: 72730 - DNA, 30 bp, Artificial Sequence
  Synthetic oligonucleotide
ggtgactatcgatgggggaacagtctggta

SEQ ID NO: 72731 - DNA, 31 bp, Artificial Sequence
  Synthetic oligonucleotide
tgaggaaaaagagagcggcctcgtaaatgta

SEQ ID NO: 72732 - DNA, 30 bp, Artificial Sequence
  Synthetic oligonucleotide
tgataccttatagagcgggcgcccaatgta

SEQ ID NO: 72733 - DNA, 30 bp, Artificial Sequence
  Synthetic oligonucleotide
aagcactaatgtcactatatcccgaatgta

SEQ ID NO: 72734 - DNA, 30 bp, Artificial Sequence
  Synthetic oligonucleotide
ggtatcgcgggatgtgcaaaataagatgta

SEQ ID NO: 72735 - DNA, 30 bp, Artificial Sequence
  Synthetic oligonucleotide
tagtgcgaaacatagcagggtatatatgta

SEQ ID NO: 72736 - DNA, 30 bp, Artificial Sequence
  Synthetic oligonucleotide
aaaagtacagagaatcagtccgactatgta

SEQ ID NO: 72737 - DNA, 30 bp, Artificial Sequence
  Synthetic oligonucleotide
catggcagtcaagtgcaccgccattatgta

SEQ ID NO: 72738 - DNA, 30 bp, Artificial Sequence
  Synthetic oligonucleotide
gatagagacgcgaaaatggcgcttactgta

SEQ ID NO: 72739 - DNA, 30 bp, Artificial Sequence
  Synthetic oligonucleotide
ggtccacggggaaatgttacgtaatctgta

SEQ ID NO: 72740 - DNA, 30 bp, Artificial Sequence
  Synthetic oligonucleotide
aaggtcgtgtagattcgagatcgctctgta

SEQ ID NO: 72741 - DNA, 30 bp, Artificial Sequence
  Synthetic oligonucleotide
agactgtgggcaatttggactttgagtgta

SEQ ID NO: 72742 - DNA, 30 bp, Artificial Sequence
  Synthetic oligonucleotide
gtgcacaggaggctacgcaccattagtgta

SEQ ID NO: 72743 - DNA, 30 bp, Artificial Sequence
  Synthetic oligonucleotide
gccggataggccttatagatgattagtgta

SEQ ID NO: 72744 - DNA, 30 bp, Artificial Sequence
  Synthetic oligonucleotide
caggtgggctgagcgtgttttcgatgtgta

SEQ ID NO: 72745 - DNA, 30 bp, Artificial Sequence
  Synthetic oligonucleotide
gataagaactggggttcacgtcggattgta

SEQ ID NO: 72746 - DNA, 30 bp, Artificial Sequence
  Synthetic oligonucleotide
gcctcatgggccagacggggcgtgcttgta

SEQ ID NO: 72747 - DNA, 30 bp, Artificial Sequence
  Synthetic oligonucleotide
aagggattctttgctagaaagagggttgta

SEQ ID NO: 72748 - DNA, 30 bp, Artificial Sequence
  Synthetic oligonucleotide
cagagccctgttagtagtgacctggttgta

SEQ ID NO: 72749 - DNA, 30 bp, Artificial Sequence
  Synthetic oligonucleotide
tgatggacgcatgatggcgtaaggtttgta

SEQ ID NO: 72750 - DNA, 30 bp, Artificial Sequence
  Synthetic oligonucleotide
gcgtcataagacgtgatctagagttttgta

SEQ ID NO: 72751 - DNA, 30 bp, Artificial Sequence
  Synthetic oligonucleotide
aggtgattcatgtgctgaatacattaatta

SEQ ID NO: 72752 - DNA, 30 bp, Artificial Sequence
  Synthetic oligonucleotide
ataagcgggagggacggaggttattaatta

SEQ ID NO: 72753 - DNA, 30 bp, Artificial Sequence
  Synthetic oligonucleotide
acgcaaagaaagtaatgctggtcaccatta

SEQ ID NO: 72754 - DNA, 30 bp, Artificial Sequence
  Synthetic oligonucleotide
atgcttcgggggaacaggcttgagccatta

SEQ ID NO: 72755 - DNA, 30 bp, Artificial Sequence
  Synthetic oligonucleotide
tcgtaagcaacgagcacaccgatcgcatta

SEQ ID NO: 72756 - DNA, 30 bp, Artificial Sequence
  Synthetic oligonucleotide
acaggtcggggaatgagattgttcgcatta

SEQ ID NO: 72757 - DNA, 30 bp, Artificial Sequence
  Synthetic oligonucleotide
cggtcacaatctatcacacctacggcatta

SEQ ID NO: 72758 - DNA, 30 bp, Artificial Sequence
  Synthetic oligonucleotide
agtgtaagtaaggccatatatagatcatta

SEQ ID NO: 72759 - DNA, 30 bp, Artificial Sequence
  Synthetic oligonucleotide
aaccagaaaggaagaatagtctagtcatta

SEQ ID NO: 72760 - DNA, 30 bp, Artificial Sequence
  Synthetic oligonucleotide
cgctaaaagcacgatgacagtacaagatta

SEQ ID NO: 72761 - DNA, 30 bp, Artificial Sequence
  Synthetic oligonucleotide
acgttcgtcagggctaagtggctcagatta

SEQ ID NO: 72762 - DNA, 30 bp, Artificial Sequence
  Synthetic oligonucleotide
tacttgcaaagaaactccataattggatta

SEQ ID NO: 72763 - DNA, 30 bp, Artificial Sequence
  Synthetic oligonucleotide
tgtagccgaaggacatcagctgtgtgatta

SEQ ID NO: 72764 - DNA, 30 bp, Artificial Sequence
  Synthetic oligonucleotide
gtagtacatccaacgggatcggattgatta

SEQ ID NO: 72765 - DNA, 30 bp, Artificial Sequence
  Synthetic oligonucleotide
agcacttatgcgttacacttgagattatta

SEQ ID NO: 72766 - DNA, 30 bp, Artificial Sequence
  Synthetic oligonucleotide
catgacgggacaggtggaaaagaccactta

SEQ ID NO: 72767 - DNA, 30 bp, Artificial Sequence
  Synthetic oligonucleotide
cacgagccgtgagagcagcagaaggactta

SEQ ID NO: 72768 - DNA, 30 bp, Artificial Sequence
  Synthetic oligonucleotide
cttattcctttcaaataagtcgtttactta

SEQ ID NO: 72769 - DNA, 30 bp, Artificial Sequence
  Synthetic oligonucleotide
catcgaggaactcaattgcagggaacctta

SEQ ID NO: 72770 - DNA, 30 bp, Artificial Sequence
  Synthetic oligonucleotide
tcgcactggacgaactgtataggcacctta

SEQ ID NO: 72771 - DNA, 30 bp, Artificial Sequence
  Synthetic oligonucleotide
taacatacaccaagatgctaaggtccctta

SEQ ID NO: 72772 - DNA, 30 bp, Artificial Sequence
  Synthetic oligonucleotide
gcttgaccgcgccgacaatactaaagctta

SEQ ID NO: 72773 - DNA, 30 bp, Artificial Sequence
  Synthetic oligonucleotide
gctgagaggcgattaagataaggcagctta

SEQ ID NO: 72774 - DNA, 30 bp, Artificial Sequence
  Synthetic oligonucleotide
cagtggacaaggcttccatggagtagctta

SEQ ID NO: 72775 - DNA, 30 bp, Artificial Sequence
  Synthetic oligonucleotide
caggatatcgggctatgagtttggcgctta

SEQ ID NO: 72776 - DNA, 30 bp, Artificial Sequence
  Synthetic oligonucleotide
gggctactctctccagcaaacagaggctta

SEQ ID NO: 72777 - DNA, 30 bp, Artificial Sequence
  Synthetic oligonucleotide
ctgtaggtcaagtcaaagagtgtcggctta

SEQ ID NO: 72778 - DNA, 30 bp, Artificial Sequence
  Synthetic oligonucleotide
accggatgctgtggaagagttacatgctta

SEQ ID NO: 72779 - DNA, 30 bp, Artificial Sequence
  Synthetic oligonucleotide
gacgacaatcaagaagacgaggtgtgctta

SEQ ID NO: 72780 - DNA, 30 bp, Artificial Sequence
  Synthetic oligonucleotide
ccggagtggctccgattgaaccgttgctta

SEQ ID NO: 72781 - DNA, 30 bp, Artificial Sequence
  Synthetic oligonucleotide
gataacgcgatgcccaacatcctcatctta

SEQ ID NO: 72782 - DNA, 30 bp, Artificial Sequence
  Synthetic oligonucleotide
agggtagcgctaagctgtacatgagtctta

SEQ ID NO: 72783 - DNA, 30 bp, Artificial Sequence
  Synthetic oligonucleotide
aggttctaaggagcctataagcggcagtta

SEQ ID NO: 72784 - DNA, 30 bp, Artificial Sequence
  Synthetic oligonucleotide
gtcatcacacgattgtacaataggtagtta

SEQ ID NO: 72785 - DNA, 30 bp, Artificial Sequence
  Synthetic oligonucleotide
ggtattagccaataataatgagtaacgtta

SEQ ID NO: 72786 - DNA, 30 bp, Artificial Sequence
  Synthetic oligonucleotide
caggactaatggagttttgcagaaccgtta

SEQ ID NO: 72787 - DNA, 30 bp, Artificial Sequence
  Synthetic oligonucleotide
actggcaatagttaacttcgctctgcgtta

SEQ ID NO: 72788 - DNA, 30 bp, Artificial Sequence
  Synthetic oligonucleotide
tatggatcgggagtaagagggcgctcgtta

SEQ ID NO: 72789 - DNA, 30 bp, Artificial Sequence
  Synthetic oligonucleotide
actcactggaaagtagcgactctacggtta

SEQ ID NO: 72790 - DNA, 30 bp, Artificial Sequence
  Synthetic oligonucleotide
caagctgcgttggcggttattgcggtgtta

SEQ ID NO: 72791 - DNA, 30 bp, Artificial Sequence
  Synthetic oligonucleotide
cggggacattggtcatcattagctgtgtta

SEQ ID NO: 72792 - DNA, 30 bp, Artificial Sequence
  Synthetic oligonucleotide
aaagacaccccaatcgaacgaatgttgtta

SEQ ID NO: 72793 - DNA, 30 bp, Artificial Sequence
  Synthetic oligonucleotide
acataccagtaacgggggtggtggaattta

SEQ ID NO: 72794 - DNA, 30 bp, Artificial Sequence
  Synthetic oligonucleotide
acgacaaacgttgaactcaaataatattta

SEQ ID NO: 72795 - DNA, 30 bp, Artificial Sequence
  Synthetic oligonucleotide
atgggggcgtgccagcaaaggagctattta

SEQ ID NO: 72796 - DNA, 30 bp, Artificial Sequence
  Synthetic oligonucleotide
agggtgatgtacaggaaaactattagttta

SEQ ID NO: 72797 - DNA, 30 bp, Artificial Sequence
  Synthetic oligonucleotide
caactaggctagggagggatgtggtgttta

SEQ ID NO: 72798 - DNA, 30 bp, Artificial Sequence
  Synthetic oligonucleotide
atgcaagtcgtgcatggcgtccagatttta

SEQ ID NO: 72799 - DNA, 30 bp, Artificial Sequence
  Synthetic oligonucleotide
agagaagccagggtaagttgccgtctttta

SEQ ID NO: 72800 - DNA, 30 bp, Artificial Sequence
  Synthetic oligonucleotide
cgggtagcaacataggaatagaaagtttta

SEQ ID NO: 72801 - DNA, 30 bp, Artificial Sequence
  Synthetic oligonucleotide
aacgaactagtaggttatcacacgcaaaac

SEQ ID NO: 72802 - DNA, 30 bp, Artificial Sequence
  Synthetic oligonucleotide
ataggtgaagttagggaatccatagaaaac

SEQ ID NO: 72803 - DNA, 30 bp, Artificial Sequence
  Synthetic oligonucleotide
actcacaactgacccgaaccgcacgaaaac

SEQ ID NO: 72804 - DNA, 30 bp, Artificial Sequence
  Synthetic oligonucleotide
acagtggcgtacgaagcattggtataaaac

SEQ ID NO: 72805 - DNA, 30 bp, Artificial Sequence
  Synthetic oligonucleotide
tgtaccgacacactcgatcattgaacaaac

SEQ ID NO: 72806 - DNA, 30 bp, Artificial Sequence
  Synthetic oligonucleotide
agatatcgagaggtacggtgcaggccaaac

SEQ ID NO: 72807 - DNA, 30 bp, Artificial Sequence
  Synthetic oligonucleotide
aggaagccccagatcacagaaagtccaaac

SEQ ID NO: 72808 - DNA, 30 bp, Artificial Sequence
  Synthetic oligonucleotide
cgggtaggaaggccgtccataagtccaaac

SEQ ID NO: 72809 - DNA, 30 bp, Artificial Sequence
  Synthetic oligonucleotide
agagggaggtgaacgaagtctgacgcaaac

SEQ ID NO: 72810 - DNA, 30 bp, Artificial Sequence
  Synthetic oligonucleotide
gctagggtaggagactgaacacgatcaaac

SEQ ID NO: 72811 - DNA, 30 bp, Artificial Sequence
  Synthetic oligonucleotide
tgtgaaaaagcagcggacctgatatcaaac

SEQ ID NO: 72812 - DNA, 30 bp, Artificial Sequence
  Synthetic oligonucleotide
ggttgcaacaattgcgctcacatcagaaac

SEQ ID NO: 72813 - DNA, 30 bp, Artificial Sequence
  Synthetic oligonucleotide
cagaaaggacagtttcggaacgagcgaaac

SEQ ID NO: 72814 - DNA, 30 bp, Artificial Sequence
  Synthetic oligonucleotide
gggtgaagtaataacctttcatcgggaaac

SEQ ID NO: 72815 - DNA, 30 bp, Artificial Sequence
  Synthetic oligonucleotide
gatcagcactcaccgagttaaagggtaaac

SEQ ID NO: 72816 - DNA, 30 bp, Artificial Sequence
  Synthetic oligonucleotide
tcctgggacagatatcgccccatgttaaac

SEQ ID NO: 72817 - DNA, 30 bp, Artificial Sequence
  Synthetic oligonucleotide
gcaacagcacgcatttaaaacttcaacaac

SEQ ID NO: 72818 - DNA, 30 bp, Artificial Sequence
  Synthetic oligonucleotide
aagggttgagtggaaatgaaaacgaacaac

SEQ ID NO: 72819 - DNA, 30 bp, Artificial Sequence
  Synthetic oligonucleotide
cgtcaattttgacaaagtgaattacacaac

SEQ ID NO: 72820 - DNA, 30 bp, Artificial Sequence
  Synthetic oligonucleotide
cgtggcgagtcaacaagtggatccgacaac

SEQ ID NO: 72821 - DNA, 30 bp, Artificial Sequence
  Synthetic oligonucleotide
aaccaacaacatttcccattcggcgacaac

SEQ ID NO: 72822 - DNA, 30 bp, Artificial Sequence
  Synthetic oligonucleotide
cggtcagagaagacgtttacaaaggacaac

SEQ ID NO: 72823 - DNA, 30 bp, Artificial Sequence
  Synthetic oligonucleotide
acgaatgacctgctacattagttggacaac

SEQ ID NO: 72824 - DNA, 30 bp, Artificial Sequence
  Synthetic oligonucleotide
ggattctgagtgcaggtcggccagtacaac

SEQ ID NO: 72825 - DNA, 30 bp, Artificial Sequence
  Synthetic oligonucleotide
atcggaattggaccttactacggcaccaac

SEQ ID NO: 72826 - DNA, 30 bp, Artificial Sequence
  Synthetic oligonucleotide
attcgaatgacggtctaacacgatcccaac

SEQ ID NO: 72827 - DNA, 30 bp, Artificial Sequence
  Synthetic oligonucleotide
tattgactaacataagcatcaggctccaac

SEQ ID NO: 72828 - DNA, 30 bp, Artificial Sequence
  Synthetic oligonucleotide
gaaaggcagccccagtacatctgcagcaac

SEQ ID NO: 72829 - DNA, 30 bp, Artificial Sequence
  Synthetic oligonucleotide
accgtgctgcgaaacgtgtgaatcggcaac

SEQ ID NO: 72830 - DNA, 30 bp, Artificial Sequence
  Synthetic oligonucleotide
atcttgaaatcctcacagagaaagggcaac

SEQ ID NO: 72831 - DNA, 30 bp, Artificial Sequence
  Synthetic oligonucleotide
gggagtagggctggttccccttagatcaac

SEQ ID NO: 72832 - DNA, 30 bp, Artificial Sequence
  Synthetic oligonucleotide
catatacgtggacatgcccagaagctcaac

SEQ ID NO: 72833 - DNA, 30 bp, Artificial Sequence
  Synthetic oligonucleotide
aaaggtcccgagtgcccgattaatctcaac

SEQ ID NO: 72834 - DNA, 30 bp, Artificial Sequence
  Synthetic oligonucleotide
tcgtgtttaggagagacctgaatcttcaac

SEQ ID NO: 72835 - DNA, 30 bp, Artificial Sequence
  Synthetic oligonucleotide
aggaatactagaaagctaacaatcaagaac

SEQ ID NO: 72836 - DNA, 30 bp, Artificial Sequence
  Synthetic oligonucleotide
acgaggcttgcgatcgccgcctagaagaac

SEQ ID NO: 72837 - DNA, 30 bp, Artificial Sequence
  Synthetic oligonucleotide
gttagcatgaaaaattccgaatttaagaac

SEQ ID NO: 72838 - DNA, 30 bp, Artificial Sequence
  Synthetic oligonucleotide
cgtaccgacctcaatcgccacaatgagaac

SEQ ID NO: 72839 - DNA, 30 bp, Artificial Sequence
  Synthetic oligonucleotide
agggatgacgcaaacgcgggtggtgagaac

SEQ ID NO: 72840 - DNA, 30 bp, Artificial Sequence
  Synthetic oligonucleotide
tggtaccgcgtaaggacagtcgtctagaac

SEQ ID NO: 72841 - DNA, 30 bp, Artificial Sequence
  Synthetic oligonucleotide
acggcaaggcagtcagagaaaaattagaac

SEQ ID NO: 72842 - DNA, 30 bp, Artificial Sequence
  Synthetic oligonucleotide
aatggaaagataagggaatggtccacgaac

SEQ ID NO: 72843 - DNA, 30 bp, Artificial Sequence
  Synthetic oligonucleotide
gtaagataataaatgaggatatctccgaac

SEQ ID NO: 72844 - DNA, 30 bp, Artificial Sequence
  Synthetic oligonucleotide
cacaaactaattgcagataagtattcgaac

SEQ ID NO: 72845 - DNA, 30 bp, Artificial Sequence
  Synthetic oligonucleotide
caaacgatcaatagcaggggccataggaac

SEQ ID NO: 72846 - DNA, 30 bp, Artificial Sequence
  Synthetic oligonucleotide
ggaagtgtattgctataatccgtgcggaac

SEQ ID NO: 72847 - DNA, 31 bp, Artificial Sequence
  Synthetic oligonucleotide
aggatgacggttttatactagcatcgggaac

SEQ ID NO: 72848 - DNA, 30 bp, Artificial Sequence
  Synthetic oligonucleotide
gaggcattgagattgaataagaatgggaac

SEQ ID NO: 72849 - DNA, 30 bp, Artificial Sequence
  Synthetic oligonucleotide
gacggcgaagttaaggaagcggtctggaac

SEQ ID NO: 72850 - DNA, 30 bp, Artificial Sequence
  Synthetic oligonucleotide
ggtgccacaagaggttaagccgctatgaac

SEQ ID NO: 72851 - DNA, 30 bp, Artificial Sequence
  Synthetic oligonucleotide
agagtggtagttggaaagatcgttctgaac

SEQ ID NO: 72852 - DNA, 30 bp, Artificial Sequence
  Synthetic oligonucleotide
cggatcagctagttagagactctcgtgaac

SEQ ID NO: 72853 - DNA, 30 bp, Artificial Sequence
  Synthetic oligonucleotide
cggatgtggcatgcaagctatcgggtgaac

SEQ ID NO: 72854 - DNA, 30 bp, Artificial Sequence
  Synthetic oligonucleotide
gtacatggaggggggacggttcaattgaac

SEQ ID NO: 72855 - DNA, 30 bp, Artificial Sequence
  Synthetic oligonucleotide
aactgccagcgcgaccgaatgatcaataac

SEQ ID NO: 72856 - DNA, 30 bp, Artificial Sequence
  Synthetic oligonucleotide
actgacgtgactgggagtagccggaataac

SEQ ID NO: 72857 - DNA, 30 bp, Artificial Sequence
  Synthetic oligonucleotide
tcgctggtgaagcgcaggccttcccataac

SEQ ID NO: 72858 - DNA, 30 bp, Artificial Sequence
  Synthetic oligonucleotide
cgaatatccatgaattgcatgaaatataac

SEQ ID NO: 72859 - DNA, 30 bp, Artificial Sequence
  Synthetic oligonucleotide
cggctccctcggatgccctactagactaac

SEQ ID NO: 72860 - DNA, 30 bp, Artificial Sequence
  Synthetic oligonucleotide
gtcgaggcagacattgtccctgcagctaac

SEQ ID NO: 72861 - DNA, 30 bp, Artificial Sequence
  Synthetic oligonucleotide
cgacgggctacatggcacttgagagctaac

SEQ ID NO: 72862 - DNA, 30 bp, Artificial Sequence
  Synthetic oligonucleotide
agacaggaatagggatatatggaggctaac

SEQ ID NO: 72863 - DNA, 30 bp, Artificial Sequence
  Synthetic oligonucleotide
gtacccgctaggtatatagcgcatgctaac

SEQ ID NO: 72864 - DNA, 30 bp, Artificial Sequence
  Synthetic oligonucleotide
atgccgtgggaaatggccgtattctctaac

SEQ ID NO: 72865 - DNA, 30 bp, Artificial Sequence
  Synthetic oligonucleotide
ggagttgtctggtcgtaaaagaaaagtaac

SEQ ID NO: 72866 - DNA, 30 bp, Artificial Sequence
  Synthetic oligonucleotide
gaagaaagaaagtaaggacagtaaagtaac

SEQ ID NO: 72867 - DNA, 30 bp, Artificial Sequence
  Synthetic oligonucleotide
taaaccgtgatgatgggcactgtccgtaac

SEQ ID NO: 72868 - DNA, 30 bp, Artificial Sequence
  Synthetic oligonucleotide
caggaagcacgaccaaggcgatttcgtaac

SEQ ID NO: 72869 - DNA, 30 bp, Artificial Sequence
  Synthetic oligonucleotide
cgcataagggccgaagctataacgggtaac

SEQ ID NO: 72870 - DNA, 30 bp, Artificial Sequence
  Synthetic oligonucleotide
cagcaaacgcgtcgagtgagcacatgtaac

SEQ ID NO: 72871 - DNA, 30 bp, Artificial Sequence
  Synthetic oligonucleotide
gcctcaggtgatgcgattcattcgtgtaac

SEQ ID NO: 72872 - DNA, 30 bp, Artificial Sequence
  Synthetic oligonucleotide
cccgaccgttgaagggcactcgcaaaacac

SEQ ID NO: 72873 - DNA, 30 bp, Artificial Sequence
  Synthetic oligonucleotide
gatgagagctacacgtggtgcaagaaacac

SEQ ID NO: 72874 - DNA, 30 bp, Artificial Sequence
  Synthetic oligonucleotide
acacaagaattgcgaactggccgtcaacac

SEQ ID NO: 72875 - DNA, 30 bp, Artificial Sequence
  Synthetic oligonucleotide
cggcagctagcagaaaagatttgtcaacac

SEQ ID NO: 72876 - DNA, 30 bp, Artificial Sequence
  Synthetic oligonucleotide
tcaccctaagggtgtcgccgtgttcaacac

SEQ ID NO: 72877 - DNA, 30 bp, Artificial Sequence
  Synthetic oligonucleotide
gcaggctgtaaacatgtagtgtagacacac

SEQ ID NO: 72878 - DNA, 30 bp, Artificial Sequence
  Synthetic oligonucleotide
cagcccaagacggtattagccattacacac

SEQ ID NO: 72879 - DNA, 30 bp, Artificial Sequence
  Synthetic oligonucleotide
gctcaaaacaatgattacagtaaaccacac

SEQ ID NO: 72880 - DNA, 30 bp, Artificial Sequence
  Synthetic oligonucleotide
cggaaattcggagggatccaatcggcacac

SEQ ID NO: 72881 - DNA, 30 bp, Artificial Sequence
  Synthetic oligonucleotide
taattgccagacccacggtcaacatcacac

SEQ ID NO: 72882 - DNA, 30 bp, Artificial Sequence
  Synthetic oligonucleotide
ccacgttcgggattatcttattgttcacac

SEQ ID NO: 72883 - DNA, 30 bp, Artificial Sequence
  Synthetic oligonucleotide
ggagaaaatctgcagggaaccgtaagacac

SEQ ID NO: 72884 - DNA, 30 bp, Artificial Sequence
  Synthetic oligonucleotide
aaagaaggtgcggtaatatctaagggacac

SEQ ID NO: 72885 - DNA, 30 bp, Artificial Sequence
  Synthetic oligonucleotide
ctatttgggcgacttagtctggagggacac

SEQ ID NO: 72886 - DNA, 30 bp, Artificial Sequence
  Synthetic oligonucleotide
ttatagaaacactagaatgtgacaatacac

SEQ ID NO: 72887 - DNA, 30 bp, Artificial Sequence
  Synthetic oligonucleotide
tgacgttggtcggacaagcgccatatacac

SEQ ID NO: 72888 - DNA, 30 bp, Artificial Sequence
  Synthetic oligonucleotide
ggttaacggaaaccagaattagcactacac

SEQ ID NO: 72889 - DNA, 30 bp, Artificial Sequence
  Synthetic oligonucleotide
gcaccggaattcaatgtggaaagactacac

SEQ ID NO: 72890 - DNA, 30 bp, Artificial Sequence
  Synthetic oligonucleotide
tgggactgctacgtatccacaaagctacac

SEQ ID NO: 72891 - DNA, 30 bp, Artificial Sequence
  Synthetic oligonucleotide
atctagcgagatcgagggaagcatctacac

SEQ ID NO: 72892 - DNA, 30 bp, Artificial Sequence
  Synthetic oligonucleotide
agtcaacagcaagggctaactgacgtacac

SEQ ID NO: 72893 - DNA, 30 bp, Artificial Sequence
  Synthetic oligonucleotide
tgagcactgtgtaaaataggaagcgtacac

SEQ ID NO: 72894 - DNA, 30 bp, Artificial Sequence
  Synthetic oligonucleotide
cattcctgggttgggtcgatttcggtacac

SEQ ID NO: 72895 - DNA, 30 bp, Artificial Sequence
  Synthetic oligonucleotide
acctgggatgcaatgaactttcgtgaccac

SEQ ID NO: 72896 - DNA, 30 bp, Artificial Sequence
  Synthetic oligonucleotide
agcgaaggaggtaatgtagggatataccac

SEQ ID NO: 72897 - DNA, 30 bp, Artificial Sequence
  Synthetic oligonucleotide
ctggaactgccgggggtgcatggttaccac

SEQ ID NO: 72898 - DNA, 30 bp, Artificial Sequence
  Synthetic oligonucleotide
gaggcaaccaccgaattgcaaagatcccac

SEQ ID NO: 72899 - DNA, 30 bp, Artificial Sequence
  Synthetic oligonucleotide
cgaccggcctacagttgtaattcatgccac

SEQ ID NO: 72900 - DNA, 30 bp, Artificial Sequence
  Synthetic oligonucleotide
tggactgaatgtacactacaactgtgccac

SEQ ID NO: 72901 - DNA, 30 bp, Artificial Sequence
  Synthetic oligonucleotide
ccattcgacgataacgccaaccattgccac

SEQ ID NO: 72902 - DNA, 30 bp, Artificial Sequence
  Synthetic oligonucleotide
taggagtacttccgggagagccgttgccac

SEQ ID NO: 72903 - DNA, 30 bp, Artificial Sequence
  Synthetic oligonucleotide
gggcatcggatacaaggaacttagctccac

SEQ ID NO: 72904 - DNA, 30 bp, Artificial Sequence
  Synthetic oligonucleotide
ggccatgcaacagaatatcccgttctccac

SEQ ID NO: 72905 - DNA, 30 bp, Artificial Sequence
  Synthetic oligonucleotide
cacacgttgaaggaattaggtttagtccac

SEQ ID NO: 72906 - DNA, 30 bp, Artificial Sequence
  Synthetic oligonucleotide
acttagccaaggagggaaggctgggtccac

SEQ ID NO: 72907 - DNA, 30 bp, Artificial Sequence
  Synthetic oligonucleotide
caacctgaggacactcacaaatgccagcac

SEQ ID NO: 72908 - DNA, 30 bp, Artificial Sequence
  Synthetic oligonucleotide
tcattcatctatcagagacgtgcatagcac

SEQ ID NO: 72909 - DNA, 30 bp, Artificial Sequence
  Synthetic oligonucleotide
cgttcggtaagactttgcagaaggtagcac

SEQ ID NO: 72910 - DNA, 30 bp, Artificial Sequence
  Synthetic oligonucleotide
ttgcgggttacatatccattaacttagcac

SEQ ID NO: 72911 - DNA, 30 bp, Artificial Sequence
  Synthetic oligonucleotide
taaggattcggtagattcgaatcttagcac

SEQ ID NO: 72912 - DNA, 30 bp, Artificial Sequence
  Synthetic oligonucleotide
cagggaaactcgacccctggtgaaacgcac

SEQ ID NO: 72913 - DNA, 30 bp, Artificial Sequence
  Synthetic oligonucleotide
tgcaatactcatcaagagccaggcccgcac

SEQ ID NO: 72914 - DNA, 30 bp, Artificial Sequence
  Synthetic oligonucleotide
accaggtatcacatattagacaaatcgcac

SEQ ID NO: 72915 - DNA, 30 bp, Artificial Sequence
  Synthetic oligonucleotide
agatcacacccgagaagtgagcaatcgcac

SEQ ID NO: 72916 - DNA, 30 bp, Artificial Sequence
  Synthetic oligonucleotide
aggcgtcaagctgaagaagcggcttcgcac

SEQ ID NO: 72917 - DNA, 30 bp, Artificial Sequence
  Synthetic oligonucleotide
cgagagcaccccaccaagctattgaggcac

SEQ ID NO: 72918 - DNA, 30 bp, Artificial Sequence
  Synthetic oligonucleotide
aatcgcacaactaaggaaccgtagcggcac

SEQ ID NO: 72919 - DNA, 30 bp, Artificial Sequence
  Synthetic oligonucleotide
taggtccgagaagttggggtgtgtcggcac

SEQ ID NO: 72920 - DNA, 30 bp, Artificial Sequence
  Synthetic oligonucleotide
cgcagtacgcgctgggagggtggtgggcac

SEQ ID NO: 72921 - DNA, 30 bp, Artificial Sequence
  Synthetic oligonucleotide
actgacccgaaagaagtgtgatcgatgcac

SEQ ID NO: 72922 - DNA, 30 bp, Artificial Sequence
  Synthetic oligonucleotide
gggaagaggcggatacatgtatctctgcac

SEQ ID NO: 72923 - DNA, 30 bp, Artificial Sequence
  Synthetic oligonucleotide
ggcgagcatcgtagactgcgttatgtgcac

SEQ ID NO: 72924 - DNA, 30 bp, Artificial Sequence
  Synthetic oligonucleotide
agggtggtattagtcaggggatagttgcac

SEQ ID NO: 72925 - DNA, 30 bp, Artificial Sequence
  Synthetic oligonucleotide
gctgaagcccggacgtgtggtacaaatcac

SEQ ID NO: 72926 - DNA, 30 bp, Artificial Sequence
  Synthetic oligonucleotide
ccgagcaagcaactaatgtaccggcatcac

SEQ ID NO: 72927 - DNA, 30 bp, Artificial Sequence
  Synthetic oligonucleotide
agccagtaatatcaacgagtgacctatcac

SEQ ID NO: 72928 - DNA, 30 bp, Artificial Sequence
  Synthetic oligonucleotide
atggcgggcgaccgatatcagtattatcac

SEQ ID NO: 72929 - DNA, 30 bp, Artificial Sequence
  Synthetic oligonucleotide
gttgggaaacgctcacagaagaagactcac

SEQ ID NO: 72930 - DNA, 30 bp, Artificial Sequence
  Synthetic oligonucleotide
tgaggactgtctatgtatcagcagactcac

SEQ ID NO: 72931 - DNA, 30 bp, Artificial Sequence
  Synthetic oligonucleotide
gagggtaacattagccgacaagccgctcac

SEQ ID NO: 72932 - DNA, 30 bp, Artificial Sequence
  Synthetic oligonucleotide
tcatggtattgttatgtgtcctgtgctcac

SEQ ID NO: 72933 - DNA, 30 bp, Artificial Sequence
  Synthetic oligonucleotide
taggaagcgggtaatgggcagtaaggtcac

SEQ ID NO: 72934 - DNA, 30 bp, Artificial Sequence
  Synthetic oligonucleotide
ccaacggaaaagataagtaagcccggtcac

SEQ ID NO: 72935 - DNA, 30 bp, Artificial Sequence
  Synthetic oligonucleotide
ttaggggcggaggacagaaagtaatgtcac

SEQ ID NO: 72936 - DNA, 30 bp, Artificial Sequence
  Synthetic oligonucleotide
ggaggcacaactacaaggactgttattcac

SEQ ID NO: 72937 - DNA, 30 bp, Artificial Sequence
  Synthetic oligonucleotide
aaacaaggtatagatctagtccaatttcac

SEQ ID NO: 72938 - DNA, 34 bp, Artificial Sequence
  Synthetic oligonucleotide
gatactagaccaccacgtgtccatccaaaaagac

SEQ ID NO: 72939 - DNA, 30 bp, Artificial Sequence
  Synthetic oligonucleotide
taacgcgagatatagctgtcgatcaaagac

SEQ ID NO: 72940 - DNA, 30 bp, Artificial Sequence
  Synthetic oligonucleotide
taccagaaaggttgaagtgtgtgccaagac

SEQ ID NO: 72941 - DNA, 30 bp, Artificial Sequence
  Synthetic oligonucleotide
taagggcctggcaaaccaaaaccgcaagac

SEQ ID NO: 72942 - DNA, 30 bp, Artificial Sequence
  Synthetic oligonucleotide
agtcacaaggaaccgttgatacgagaagac

SEQ ID NO: 72943 - DNA, 30 bp, Artificial Sequence
  Synthetic oligonucleotide
acctgaagaccagggggtgaagctgaagac

SEQ ID NO: 72944 - DNA, 30 bp, Artificial Sequence
  Synthetic oligonucleotide
cgagcttaagtcgccctatcacgtgaagac

SEQ ID NO: 72945 - DNA, 30 bp, Artificial Sequence
  Synthetic oligonucleotide
tttggcagtcgtagaagaaggaccacagac

SEQ ID NO: 72946 - DNA, 30 bp, Artificial Sequence
  Synthetic oligonucleotide
ctgactgctaccgagcaattgagtacagac

SEQ ID NO: 72947 - DNA, 30 bp, Artificial Sequence
  Synthetic oligonucleotide
gtggggaagggccgtatgagggttacagac

SEQ ID NO: 72948 - DNA, 30 bp, Artificial Sequence
  Synthetic oligonucleotide
accatggtacgataaggggactacccagac

SEQ ID NO: 72949 - DNA, 30 bp, Artificial Sequence
  Synthetic oligonucleotide
ttgtaatacggttaacactaaaccccagac

SEQ ID NO: 72950 - DNA, 30 bp, Artificial Sequence
  Synthetic oligonucleotide
cacaaagtttctaataccattaggccagac

SEQ ID NO: 72951 - DNA, 30 bp, Artificial Sequence
  Synthetic oligonucleotide
tcctagaatgaaatttgaacagtgccagac

SEQ ID NO: 72952 - DNA, 30 bp, Artificial Sequence
  Synthetic oligonucleotide
ctttcgcaaaacattgcttgtagtccagac

SEQ ID NO: 72953 - DNA, 30 bp, Artificial Sequence
  Synthetic oligonucleotide
agacacccttacactaggtcacgagcagac

SEQ ID NO: 72954 - DNA, 30 bp, Artificial Sequence
  Synthetic oligonucleotide
ggagcaaagcatcaatgacggcaggcagac

SEQ ID NO: 72955 - DNA, 30 bp, Artificial Sequence
  Synthetic oligonucleotide
tattggacccctccgtcagaggaggcagac

SEQ ID NO: 72956 - DNA, 30 bp, Artificial Sequence
  Synthetic oligonucleotide
tgccgtggtggcaaagcgccgaagagagac

SEQ ID NO: 72957 - DNA, 30 bp, Artificial Sequence
  Synthetic oligonucleotide
actacccggtagcgaggttgcgaacgagac

SEQ ID NO: 72958 - DNA, 30 bp, Artificial Sequence
  Synthetic oligonucleotide
tcggcgtataggtgactgacgggtcgagac

SEQ ID NO: 72959 - DNA, 30 bp, Artificial Sequence
  Synthetic oligonucleotide
ataacatgactaatcacgccaaactgagac

SEQ ID NO: 72960 - DNA, 30 bp, Artificial Sequence
  Synthetic oligonucleotide
aggttgactggtaaagagaaaaagtgagac

SEQ ID NO: 72961 - DNA, 30 bp, Artificial Sequence
  Synthetic oligonucleotide
acccattaaataggagcttaagaaatagac

SEQ ID NO: 72962 - DNA, 30 bp, Artificial Sequence
  Synthetic oligonucleotide
cgataagacaaagtcaggcttataatagac

SEQ ID NO: 72963 - DNA, 30 bp, Artificial Sequence
  Synthetic oligonucleotide
aacgtgaataggtactaacaagccctagac

SEQ ID NO: 72964 - DNA, 30 bp, Artificial Sequence
  Synthetic oligonucleotide
tgagcaatgccgaccaagaagaatctagac

SEQ ID NO: 72965 - DNA, 30 bp, Artificial Sequence
  Synthetic oligonucleotide
agttcacacgtattaggaggccgtctagac

SEQ ID NO: 72966 - DNA, 30 bp, Artificial Sequence
  Synthetic oligonucleotide
ggagagctggtccctagatgccccgtagac

SEQ ID NO: 72967 - DNA, 30 bp, Artificial Sequence
  Synthetic oligonucleotide
gtgtacccgctcgcgagggagtggaacgac

SEQ ID NO: 72968 - DNA, 30 bp, Artificial Sequence
  Synthetic oligonucleotide
acgcgaacatcttcactcggcgtacacgac

SEQ ID NO: 72969 - DNA, 30 bp, Artificial Sequence
  Synthetic oligonucleotide
acagcattcgaccgttggtcaccctacgac

SEQ ID NO: 72970 - DNA, 30 bp, Artificial Sequence
  Synthetic oligonucleotide
ggattaccaagctatcccgaagtttacgac

SEQ ID NO: 72971 - DNA, 30 bp, Artificial Sequence
  Synthetic oligonucleotide
tagacggaataacaaatcctctcgtccgac

SEQ ID NO: 72972 - DNA, 30 bp, Artificial Sequence
  Synthetic oligonucleotide
cacatccgcgaacacccaactgaaagcgac

SEQ ID NO: 72973 - DNA, 30 bp, Artificial Sequence
  Synthetic oligonucleotide
cacagtaaccggcaggaaagatagcgcgac

SEQ ID NO: 72974 - DNA, 30 bp, Artificial Sequence
  Synthetic oligonucleotide
caactcgtaagttgtaagattgcgcgcgac

SEQ ID NO: 72975 - DNA, 30 bp, Artificial Sequence
  Synthetic oligonucleotide
gcgaacacgcaattcctctagggaggcgac

SEQ ID NO: 72976 - DNA, 30 bp, Artificial Sequence
  Synthetic oligonucleotide
ccagcggaaccagaacagtggagtggcgac

SEQ ID NO: 72977 - DNA, 30 bp, Artificial Sequence
  Synthetic oligonucleotide
ggtggacgacgcctggatcaagccatcgac

SEQ ID NO: 72978 - DNA, 30 bp, Artificial Sequence
  Synthetic oligonucleotide
ggcgaccccaggggatacaaacctatcgac

SEQ ID NO: 72979 - DNA, 30 bp, Artificial Sequence
  Synthetic oligonucleotide
gcggaatcgcagtctaagagccgtatcgac

SEQ ID NO: 72980 - DNA, 30 bp, Artificial Sequence
  Synthetic oligonucleotide
gaaaagaagattaaccagtgagttatcgac

SEQ ID NO: 72981 - DNA, 29 bp, Artificial Sequence
  Synthetic oligonucleotide
ccaaaaagccatgggcacaactcctcgac

SEQ ID NO: 72982 - DNA, 30 bp, Artificial Sequence
  Synthetic oligonucleotide
gggctaaccatggggtgacgaaccttcgac

SEQ ID NO: 72983 - DNA, 30 bp, Artificial Sequence
  Synthetic oligonucleotide
atgggatgtggaagagcacagctgaaggac

SEQ ID NO: 72984 - DNA, 30 bp, Artificial Sequence
  Synthetic oligonucleotide
aggctactggatgagcaaaactaacaggac

SEQ ID NO: 72985 - DNA, 30 bp, Artificial Sequence
  Synthetic oligonucleotide
gacgccggctaaggcgctagtcaagaggac

SEQ ID NO: 72986 - DNA, 30 bp, Artificial Sequence
  Synthetic oligonucleotide
aggcgtccaggggatgtagaacgagaggac

SEQ ID NO: 72987 - DNA, 30 bp, Artificial Sequence
  Synthetic oligonucleotide
tgggggcaacgagatgggttagtctaggac

SEQ ID NO: 72988 - DNA, 30 bp, Artificial Sequence
  Synthetic oligonucleotide
cgcgtgtgtaagcaagtacgacaagcggac

SEQ ID NO: 72989 - DNA, 30 bp, Artificial Sequence
  Synthetic oligonucleotide
ctcgcgtagtagttggagtgcgtggcggac

SEQ ID NO: 72990 - DNA, 30 bp, Artificial Sequence
  Synthetic oligonucleotide
ggtcgcgagtgaaactcatgattaagggac

SEQ ID NO: 72991 - DNA, 30 bp, Artificial Sequence
  Synthetic oligonucleotide
cgggacagtgtatacatcgtggacagggac

SEQ ID NO: 72992 - DNA, 30 bp, Artificial Sequence
  Synthetic oligonucleotide
acaacaggtctggtggcatactccagggac

SEQ ID NO: 72993 - DNA, 30 bp, Artificial Sequence
  Synthetic oligonucleotide
aatcgagggacatgcgttgtggaaggggac

SEQ ID NO: 72994 - DNA, 30 bp, Artificial Sequence
  Synthetic oligonucleotide
tggtaccgggaattggagaccatcggggac

SEQ ID NO: 72995 - DNA, 30 bp, Artificial Sequence
  Synthetic oligonucleotide
agtcagcatatctgacgtcacaggggggac

SEQ ID NO: 72996 - DNA, 30 bp, Artificial Sequence
  Synthetic oligonucleotide
taggtagggcgtcgataatacaaatgggac

SEQ ID NO: 72997 - DNA, 30 bp, Artificial Sequence
  Synthetic oligonucleotide
aggaacataaaatagaagctttattgggac

SEQ ID NO: 72998 - DNA, 30 bp, Artificial Sequence
  Synthetic oligonucleotide
gtatccacaggggttacaaaagagatggac

SEQ ID NO: 72999 - DNA, 30 bp, Artificial Sequence
  Synthetic oligonucleotide
ggaccacggtcagaattatgaagtatggac

SEQ ID NO: 73000 - DNA, 30 bp, Artificial Sequence
  Synthetic oligonucleotide
caataatcacgcccattgcgaatcctggac

SEQ ID NO: 73001 - DNA, 30 bp, Artificial Sequence
  Synthetic oligonucleotide
aaagccctgcgagttggtaatagggtggac

SEQ ID NO: 73002 - DNA, 30 bp, Artificial Sequence
  Synthetic oligonucleotide
ccactaattagaccgaaccaatgggtggac

SEQ ID NO: 73003 - DNA, 30 bp, Artificial Sequence
  Synthetic oligonucleotide
tgtccacaggtcaaatattgtcgcaatgac

SEQ ID NO: 73004 - DNA, 26 bp, Artificial Sequence
  Synthetic oligonucleotide
taaggggcaatgttagctgcaatgac

SEQ ID NO: 73005 - DNA, 30 bp, Artificial Sequence
  Synthetic oligonucleotide
cgcgcgaatccaagcaggtgtcaggatgac

SEQ ID NO: 73006 - DNA, 30 bp, Artificial Sequence
  Synthetic oligonucleotide
ctatgtacaaggcaactaagatgtgatgac

SEQ ID NO: 73007 - DNA, 30 bp, Artificial Sequence
  Synthetic oligonucleotide
catgctgaataatcgcttgaaattgatgac

SEQ ID NO: 73008 - DNA, 30 bp, Artificial Sequence
  Synthetic oligonucleotide
gagcaaacgagagacaatatttcgactgac

SEQ ID NO: 73009 - DNA, 30 bp, Artificial Sequence
  Synthetic oligonucleotide
ggttccgagttccgcaacgccgtgactgac

SEQ ID NO: 73010 - DNA, 30 bp, Artificial Sequence
  Synthetic oligonucleotide
agggaccgtaattgagcaaactaggctgac

SEQ ID NO: 73011 - DNA, 30 bp, Artificial Sequence
  Synthetic oligonucleotide
agagagcgataggcgctgagcgactctgac

SEQ ID NO: 73012 - DNA, 30 bp, Artificial Sequence
  Synthetic oligonucleotide
cgttgaaacatcagagtacaagggtctgac

SEQ ID NO: 73013 - DNA, 30 bp, Artificial Sequence
  Synthetic oligonucleotide
ggacctaataagaacgtcacccgaggtgac

SEQ ID NO: 73014 - DNA, 30 bp, Artificial Sequence
  Synthetic oligonucleotide
gcgccaacgacgcgaccgggcatgggtgac

SEQ ID NO: 73015 - DNA, 30 bp, Artificial Sequence
  Synthetic oligonucleotide
gaagcgtacaagccgggatagacctgtgac

SEQ ID NO: 73016 - DNA, 31 bp, Artificial Sequence
  Synthetic oligonucleotide
ttgaagtggtcacacgcgctacccaattgac

SEQ ID NO: 73017 - DNA, 30 bp, Artificial Sequence
  Synthetic oligonucleotide
tcacacctaaaggaatgaccagtcattgac

SEQ ID NO: 73018 - DNA, 30 bp, Artificial Sequence
  Synthetic oligonucleotide
tacaataggaggaaagcagaaggacttgac

SEQ ID NO: 73019 - DNA, 30 bp, Artificial Sequence
  Synthetic oligonucleotide
ctcgactaccggatgtggagtcaacaatac

SEQ ID NO: 73020 - DNA, 30 bp, Artificial Sequence
  Synthetic oligonucleotide
ggtacgagacctactggtgtcaggcaatac

SEQ ID NO: 73021 - DNA, 30 bp, Artificial Sequence
  Synthetic oligonucleotide
tctgagttaaccaaccgatacacagaatac

SEQ ID NO: 73022 - DNA, 30 bp, Artificial Sequence
  Synthetic oligonucleotide
agccatagaatgagggactaggacgaatac

SEQ ID NO: 73023 - DNA, 30 bp, Artificial Sequence
  Synthetic oligonucleotide
tcaagaggccacctaagagtctcggaatac

SEQ ID NO: 73024 - DNA, 30 bp, Artificial Sequence
  Synthetic oligonucleotide
ctacaggaccgcatgtgttcggctgaatac

SEQ ID NO: 73025 - DNA, 30 bp, Artificial Sequence
  Synthetic oligonucleotide
acggacttataatacccaattacgacatac

SEQ ID NO: 73026 - DNA, 30 bp, Artificial Sequence
  Synthetic oligonucleotide
gtcacggtagagaatagatgcttagcatac

SEQ ID NO: 73027 - DNA, 30 bp, Artificial Sequence
  Synthetic oligonucleotide
actagtggaagcggtacagtcgtcgcatac

SEQ ID NO: 73028 - DNA, 30 bp, Artificial Sequence
  Synthetic oligonucleotide
aagggggatcggaataacgcactggcatac

SEQ ID NO: 73029 - DNA, 30 bp, Artificial Sequence
  Synthetic oligonucleotide
ggtcaacgtaatcgtcgatgagaatcatac

SEQ ID NO: 73030 - DNA, 30 bp, Artificial Sequence
  Synthetic oligonucleotide
gaatggataaccgaagggcgtgcgagatac

SEQ ID NO: 73031 - DNA, 30 bp, Artificial Sequence
  Synthetic oligonucleotide
ggcttactggaacaggtggtcgaacgatac

SEQ ID NO: 73032 - DNA, 30 bp, Artificial Sequence
  Synthetic oligonucleotide
cggatagtgactgtacagagcataggatac

SEQ ID NO: 73033 - DNA, 30 bp, Artificial Sequence
  Synthetic oligonucleotide
aggtacatttaaatgtatagactcggatac

SEQ ID NO: 73034 - DNA, 30 bp, Artificial Sequence
  Synthetic oligonucleotide
ggggaacgtcggtacttctgcaggggatac

SEQ ID NO: 73035 - DNA, 30 bp, Artificial Sequence
  Synthetic oligonucleotide
cagagccggtgagtaagactaaggtgatac

SEQ ID NO: 73036 - DNA, 30 bp, Artificial Sequence
  Synthetic oligonucleotide
gccacataaggaagcggattcaatatatac

SEQ ID NO: 73037 - DNA, 30 bp, Artificial Sequence
  Synthetic oligonucleotide
gacggaaaatattccgaccatggtgtatac

SEQ ID NO: 73038 - DNA, 30 bp, Artificial Sequence
  Synthetic oligonucleotide
gggacgttaatggatggaccgattgtatac

SEQ ID NO: 73039 - DNA, 30 bp, Artificial Sequence
  Synthetic oligonucleotide
gtgtccacacgcgttaggggacagcactac

SEQ ID NO: 73040 - DNA, 30 bp, Artificial Sequence
  Synthetic oligonucleotide
ctaggtgaacaccggatccagcgaacctac

SEQ ID NO: 73041 - DNA, 30 bp, Artificial Sequence
  Synthetic oligonucleotide
caatcgaggagaatattctgtatgacctac

SEQ ID NO: 73042 - DNA, 30 bp, Artificial Sequence
  Synthetic oligonucleotide
ggggccgctgggttgagattagcgcgctac

SEQ ID NO: 73043 - DNA, 30 bp, Artificial Sequence
  Synthetic oligonucleotide
acgatggggtgggaggtacactcaggctac

SEQ ID NO: 73044 - DNA, 30 bp, Artificial Sequence
  Synthetic oligonucleotide
caccgaggctgcagttataatagcggctac

SEQ ID NO: 73045 - DNA, 30 bp, Artificial Sequence
  Synthetic oligonucleotide
atgacgtgtggatccgagagacgttgctac

SEQ ID NO: 73046 - DNA, 30 bp, Artificial Sequence
  Synthetic oligonucleotide
taaggcgcacaacgggtgagtggaatctac

SEQ ID NO: 73047 - DNA, 30 bp, Artificial Sequence
  Synthetic oligonucleotide
agacgagtggaagttaaccgtaacatctac

SEQ ID NO: 73048 - DNA, 30 bp, Artificial Sequence
  Synthetic oligonucleotide
agaacagcatccctataagaagacgtctac

SEQ ID NO: 73049 - DNA, 30 bp, Artificial Sequence
  Synthetic oligonucleotide
tacgggacttgcgaatttgggttggtctac

SEQ ID NO: 73050 - DNA, 30 bp, Artificial Sequence
  Synthetic oligonucleotide
ggacattccagtcggttcccggtcgagtac

SEQ ID NO: 73051 - DNA, 30 bp, Artificial Sequence
  Synthetic oligonucleotide
cgacctgtctctgggatcggtgtcgagtac

SEQ ID NO: 73052 - DNA, 30 bp, Artificial Sequence
  Synthetic oligonucleotide
cgagcctaacggggtgcacaacgggagtac

SEQ ID NO: 73053 - DNA, 30 bp, Artificial Sequence
  Synthetic oligonucleotide
aggagtccaggtattacgaaggcaccgtac

SEQ ID NO: 73054 - DNA, 30 bp, Artificial Sequence
  Synthetic oligonucleotide
tcgccatacgcttcgaacaaaaccccgtac

SEQ ID NO: 73055 - DNA, 30 bp, Artificial Sequence
  Synthetic oligonucleotide
gtacggtgattccattgggcaattgcgtac

SEQ ID NO: 73056 - DNA, 30 bp, Artificial Sequence
  Synthetic oligonucleotide
ctgccatagacgggatccaagcgatcgtac

SEQ ID NO: 73057 - DNA, 30 bp, Artificial Sequence
  Synthetic oligonucleotide
aaacgaatacttaatgccagcatcaggtac

SEQ ID NO: 73058 - DNA, 30 bp, Artificial Sequence
  Synthetic oligonucleotide
agccactgggccaacccttcgaagaggtac

SEQ ID NO: 73059 - DNA, 30 bp, Artificial Sequence
  Synthetic oligonucleotide
ctgaagacagagcgcacttctagtaggtac

SEQ ID NO: 73060 - DNA, 30 bp, Artificial Sequence
  Synthetic oligonucleotide
ccaaagagtaccggctgctgtcttgggtac

SEQ ID NO: 73061 - DNA, 30 bp, Artificial Sequence
  Synthetic oligonucleotide
aggaaggtactgaagaaagacgcgatgtac

SEQ ID NO: 73062 - DNA, 30 bp, Artificial Sequence
  Synthetic oligonucleotide
cagagggtagcaaataaggggcccctgtac

SEQ ID NO: 73063 - DNA, 30 bp, Artificial Sequence
  Synthetic oligonucleotide
tatcacctaccaaatacgtgaccagtgtac

SEQ ID NO: 73064 - DNA, 30 bp, Artificial Sequence
  Synthetic oligonucleotide
aaagtggttccgggcgatcttagagtgtac

SEQ ID NO: 73065 - DNA, 30 bp, Artificial Sequence
  Synthetic oligonucleotide
gggaaactccgaaacgaaactgccgtgtac

SEQ ID NO: 73066 - DNA, 30 bp, Artificial Sequence
  Synthetic oligonucleotide
atccgtcgacattgagtatagcgggtgtac

SEQ ID NO: 73067 - DNA, 30 bp, Artificial Sequence
  Synthetic oligonucleotide
tcacccgtaggcgggaacacaatgttgtac

SEQ ID NO: 73068 - DNA, 30 bp, Artificial Sequence
  Synthetic oligonucleotide
catcgggttcctaatgcgagtgcgccttac

SEQ ID NO: 73069 - DNA, 30 bp, Artificial Sequence
  Synthetic oligonucleotide
acgatagatgccccggatcaccaggcttac

SEQ ID NO: 73070 - DNA, 30 bp, Artificial Sequence
  Synthetic oligonucleotide
tcgagggtccaggcgatcaacgttagttac

SEQ ID NO: 73071 - DNA, 30 bp, Artificial Sequence
  Synthetic oligonucleotide
ggttggctggacgcgttacatcgtcgttac

SEQ ID NO: 73072 - DNA, 30 bp, Artificial Sequence
  Synthetic oligonucleotide
tatgaaggttgcgaagttcaccacggttac

SEQ ID NO: 73073 - DNA, 30 bp, Artificial Sequence
  Synthetic oligonucleotide
gccaggcgcgagataacttcggcggtttac

SEQ ID NO: 73074 - DNA, 30 bp, Artificial Sequence
  Synthetic oligonucleotide
gcaagatcgtgaggttatagactgttttac

SEQ ID NO: 73075 - DNA, 30 bp, Artificial Sequence
  Synthetic oligonucleotide
tcgtgacctgaggacgggagcctaaaaacc

SEQ ID NO: 73076 - DNA, 30 bp, Artificial Sequence
  Synthetic oligonucleotide
atcggagccccagacgtggccggcaaaacc

SEQ ID NO: 73077 - DNA, 30 bp, Artificial Sequence
  Synthetic oligonucleotide
atcgtccggggtagtttgaatggcgaaacc

SEQ ID NO: 73078 - DNA, 30 bp, Artificial Sequence
  Synthetic oligonucleotide
ggcataaaacggtcgggcattaaggaaacc

SEQ ID NO: 73079 - DNA, 30 bp, Artificial Sequence
  Synthetic oligonucleotide
cgtgaaggactgcttcgtctgtcataaacc

SEQ ID NO: 73080 - DNA, 30 bp, Artificial Sequence
  Synthetic oligonucleotide
gagcaactgataatgttcaatggaacaacc

SEQ ID NO: 73081 - DNA, 30 bp, Artificial Sequence
  Synthetic oligonucleotide
tcgcgtttgaccggcaccccgaggacaacc

SEQ ID NO: 73082 - DNA, 30 bp, Artificial Sequence
  Synthetic oligonucleotide
atgctgggatcttaaaaacctaggacaacc

SEQ ID NO: 73083 - DNA, 30 bp, Artificial Sequence
  Synthetic oligonucleotide
cgtagggcgcacgtgcaccacgcatcaacc

SEQ ID NO: 73084 - DNA, 30 bp, Artificial Sequence
  Synthetic oligonucleotide
aggcaggcaagacagactctttatagaacc

SEQ ID NO: 73085 - DNA, 30 bp, Artificial Sequence
  Synthetic oligonucleotide
gggcataagcgtgtctttgagtctagaacc

SEQ ID NO: 73086 - DNA, 31 bp, Artificial Sequence
  Synthetic oligonucleotide
ccgggatccgacatgtaccatatagcgaacc

SEQ ID NO: 73087 - DNA, 30 bp, Artificial Sequence
  Synthetic oligonucleotide
tctgctacccaaaagacctgagggcgaacc

SEQ ID NO: 73088 - DNA, 30 bp, Artificial Sequence
  Synthetic oligonucleotide
gcccacacaggagctgcgaagcgatgaacc

SEQ ID NO: 73089 - DNA, 30 bp, Artificial Sequence
  Synthetic oligonucleotide
gacgcgccatagcacgggtggactctaacc

SEQ ID NO: 73090 - DNA, 30 bp, Artificial Sequence
  Synthetic oligonucleotide
aacgtaagggggcaatcgtgcgtcgtaacc

SEQ ID NO: 73091 - DNA, 30 bp, Artificial Sequence
  Synthetic oligonucleotide
acattatgacaatgcgataaggggttaacc

SEQ ID NO: 73092 - DNA, 30 bp, Artificial Sequence
  Synthetic oligonucleotide
agatagataagaccgggggcgcacaacacc

SEQ ID NO: 73093 - DNA, 30 bp, Artificial Sequence
  Synthetic oligonucleotide
agacaaagaaggcggatttggcataacacc

SEQ ID NO: 73094 - DNA, 30 bp, Artificial Sequence
  Synthetic oligonucleotide
cgatactcaggctatacatggtaacacacc

SEQ ID NO: 73095 - DNA, 30 bp, Artificial Sequence
  Synthetic oligonucleotide
ggaaagaacggggattaccgtccacacacc

SEQ ID NO: 73096 - DNA, 30 bp, Artificial Sequence
  Synthetic oligonucleotide
agaagaattacggcatccatcatagacacc

SEQ ID NO: 73097 - DNA, 30 bp, Artificial Sequence
  Synthetic oligonucleotide
agctagtccatcggtcagtcgaaatacacc

SEQ ID NO: 73098 - DNA, 30 bp, Artificial Sequence
  Synthetic oligonucleotide
gccgtcatcgaggaacagctaatgtacacc

SEQ ID NO: 73099 - DNA, 30 bp, Artificial Sequence
  Synthetic oligonucleotide
ctcgcatgacttagaccgaggagtaccacc

SEQ ID NO: 73100 - DNA, 30 bp, Artificial Sequence
  Synthetic oligonucleotide
agggggagcaagactcatggtgcacccacc

SEQ ID NO: 73101 - DNA, 30 bp, Artificial Sequence
  Synthetic oligonucleotide
aacgtgtgcgatcaacggttaagacccacc

SEQ ID NO: 73102 - DNA, 30 bp, Artificial Sequence
  Synthetic oligonucleotide
acataaaacaccaacatctcggctcccacc

SEQ ID NO: 73103 - DNA, 30 bp, Artificial Sequence
  Synthetic oligonucleotide
catgggatccgaatcctaggttgggccacc

SEQ ID NO: 73104 - DNA, 30 bp, Artificial Sequence
  Synthetic oligonucleotide
gggccatacgtgtgcaaacctatttccacc

SEQ ID NO: 73105 - DNA, 30 bp, Artificial Sequence
  Synthetic oligonucleotide
ctaacaccaacccggcacatacaaatcacc

SEQ ID NO: 73106 - DNA, 30 bp, Artificial Sequence
  Synthetic oligonucleotide
acattcagtggcctgaacagggtgatcacc

SEQ ID NO: 73107 - DNA, 30 bp, Artificial Sequence
  Synthetic oligonucleotide
tgttgaggaaacgacggcggctagctcacc

SEQ ID NO: 73108 - DNA, 30 bp, Artificial Sequence
  Synthetic oligonucleotide
agtatatctcggcaaatcgacagggtcacc

SEQ ID NO: 73109 - DNA, 30 bp, Artificial Sequence
  Synthetic oligonucleotide
gagactggatcaaggtaagcaaatgtcacc

SEQ ID NO: 73110 - DNA, 30 bp, Artificial Sequence
  Synthetic oligonucleotide
aggtactgcaagatttgcacggaattcacc

SEQ ID NO: 73111 - DNA, 30 bp, Artificial Sequence
  Synthetic oligonucleotide
cacccagtcaaggggagttaggggttcacc

SEQ ID NO: 73112 - DNA, 30 bp, Artificial Sequence
  Synthetic oligonucleotide
ctgaagtgtataaccagcaaagtgaagacc

SEQ ID NO: 73113 - DNA, 30 bp, Artificial Sequence
  Synthetic oligonucleotide
gcggtgaggagcgggaccacgactaagacc

SEQ ID NO: 73114 - DNA, 30 bp, Artificial Sequence
  Synthetic oligonucleotide
cctcatcagcatacttacagggactagacc

SEQ ID NO: 73115 - DNA, 30 bp, Artificial Sequence
  Synthetic oligonucleotide
tggggtattatgatcaagataaaaacgacc

SEQ ID NO: 73116 - DNA, 30 bp, Artificial Sequence
  Synthetic oligonucleotide
gccatacactaggacgcgtaaacgacgacc

SEQ ID NO: 73117 - DNA, 30 bp, Artificial Sequence
  Synthetic oligonucleotide
cgggatgtccaatgtctgagaggtacgacc

SEQ ID NO: 73118 - DNA, 30 bp, Artificial Sequence
  Synthetic oligonucleotide
tgatgattacaggaaatctgacgtccgacc

SEQ ID NO: 73119 - DNA, 30 bp, Artificial Sequence
  Synthetic oligonucleotide
acgagtcacgggatgactaatagggcgacc

SEQ ID NO: 73120 - DNA, 30 bp, Artificial Sequence
  Synthetic oligonucleotide
ccaacaggaccagtacggtgtctggcgacc

SEQ ID NO: 73121 - DNA, 30 bp, Artificial Sequence
  Synthetic oligonucleotide
tcacgagtcagatcgggtagactctcgacc

SEQ ID NO: 73122 - DNA, 30 bp, Artificial Sequence
  Synthetic oligonucleotide
gcgtaaagtggaacttcaacgaagtcgacc

SEQ ID NO: 73123 - DNA, 30 bp, Artificial Sequence
  Synthetic oligonucleotide
gcctagaccgacactttgagaggaaggacc

SEQ ID NO: 73124 - DNA, 30 bp, Artificial Sequence
  Synthetic oligonucleotide
gaagagaagtagaccctaagaaagctgacc

SEQ ID NO: 73125 - DNA, 30 bp, Artificial Sequence
  Synthetic oligonucleotide
agtgacctgctggaaggcggagatctgacc

SEQ ID NO: 73126 - DNA, 30 bp, Artificial Sequence
  Synthetic oligonucleotide
tgacgggccaagtggttgaacataaatacc

SEQ ID NO: 73127 - DNA, 30 bp, Artificial Sequence
  Synthetic oligonucleotide
cctaatcggagtccgcgaaagaacaatacc

SEQ ID NO: 73128 - DNA, 30 bp, Artificial Sequence
  Synthetic oligonucleotide
aatggcgacacgtgaaggaagccacatacc

SEQ ID NO: 73129 - DNA, 30 bp, Artificial Sequence
  Synthetic oligonucleotide
ccgtggatcaactatgctcataagcatacc

SEQ ID NO: 73130 - DNA, 30 bp, Artificial Sequence
  Synthetic oligonucleotide
acggcgtaatctgaggacggcaaggatacc

SEQ ID NO: 73131 - DNA, 30 bp, Artificial Sequence
  Synthetic oligonucleotide
atataaaagtcgagtcgtaaggaatatacc

SEQ ID NO: 73132 - DNA, 30 bp, Artificial Sequence
  Synthetic oligonucleotide
gcatcagaggacgagaggataagaactacc

SEQ ID NO: 73133 - DNA, 30 bp, Artificial Sequence
  Synthetic oligonucleotide
ccatcggtctccgggccagtcgtgactacc

SEQ ID NO: 73134 - DNA, 30 bp, Artificial Sequence
  Synthetic oligonucleotide
gattatggtgtgaaggcgaacaaacctacc

SEQ ID NO: 73135 - DNA, 30 bp, Artificial Sequence
  Synthetic oligonucleotide
tgaggggaaagggtgtaggtacaaagtacc

SEQ ID NO: 73136 - DNA, 30 bp, Artificial Sequence
  Synthetic oligonucleotide
tctggaggttcacggcaagatgtgagtacc

SEQ ID NO: 73137 - DNA, 30 bp, Artificial Sequence
  Synthetic oligonucleotide
tacgacttcacggagtaggaggcgcgtacc

SEQ ID NO: 73138 - DNA, 30 bp, Artificial Sequence
  Synthetic oligonucleotide
aaggtgagggacgcgcgactatcctgtacc

SEQ ID NO: 73139 - DNA, 30 bp, Artificial Sequence
  Synthetic oligonucleotide
aggcacacgcgatactcacttcagattacc

SEQ ID NO: 73140 - DNA, 30 bp, Artificial Sequence
  Synthetic oligonucleotide
cgtatctgggtggactgtaccaaggttacc

SEQ ID NO: 73141 - DNA, 30 bp, Artificial Sequence
  Synthetic oligonucleotide
acggcaagtgaataaaacggtgaggttacc

SEQ ID NO: 73142 - DNA, 30 bp, Artificial Sequence
  Synthetic oligonucleotide
ataagccaatgaaaactgttaatgcaaccc

SEQ ID NO: 73143 - DNA, 29 bp, Artificial Sequence
  Synthetic oligonucleotide
tcaaacacaatttaggctcggaggaaccc

SEQ ID NO: 73144 - DNA, 30 bp, Artificial Sequence
  Synthetic oligonucleotide
gagggaaccagtgattgtacatgggaaccc

SEQ ID NO: 73145 - DNA, 30 bp, Artificial Sequence
  Synthetic oligonucleotide
cgtccgcatacaccgaacacgagctaaccc

SEQ ID NO: 73146 - DNA, 30 bp, Artificial Sequence
  Synthetic oligonucleotide
caggggggccacagtctacggtcaacaccc

SEQ ID NO: 73147 - DNA, 30 bp, Artificial Sequence
  Synthetic oligonucleotide
gaaagacaggaatcaatgaatgttacaccc

SEQ ID NO: 73148 - DNA, 30 bp, Artificial Sequence
  Synthetic oligonucleotide
cagcgtatcccagcaacgctttaagcaccc

SEQ ID NO: 73149 - DNA, 30 bp, Artificial Sequence
  Synthetic oligonucleotide
cagttgtctcaactgataagcggtgcaccc

SEQ ID NO: 73150 - DNA, 30 bp, Artificial Sequence
  Synthetic oligonucleotide
ctacgagctgtgcccagggggtgaggaccc

SEQ ID NO: 73151 - DNA, 30 bp, Artificial Sequence
  Synthetic oligonucleotide
tcactgtgtaaagcgtaatgggacataccc

SEQ ID NO: 73152 - DNA, 30 bp, Artificial Sequence
  Synthetic oligonucleotide
tctgaccaaggcgaagggcatgctataccc

SEQ ID NO: 73153 - DNA, 30 bp, Artificial Sequence
  Synthetic oligonucleotide
aggtaacgttaacgtgaggtcgtcctaccc

SEQ ID NO: 73154 - DNA, 30 bp, Artificial Sequence
  Synthetic oligonucleotide
atcatggcgtatgagcatcaagagctaccc

SEQ ID NO: 73155 - DNA, 30 bp, Artificial Sequence
  Synthetic oligonucleotide
tgatacgaaaaatagcgtcgtcctctaccc

SEQ ID NO: 73156 - DNA, 30 bp, Artificial Sequence
  Synthetic oligonucleotide
gtcaaatggacaaaaccgactcacgtaccc

SEQ ID NO: 73157 - DNA, 30 bp, Artificial Sequence
  Synthetic oligonucleotide
gacagaacagattaagtgtgcgtgttaccc

SEQ ID NO: 73158 - DNA, 30 bp, Artificial Sequence
  Synthetic oligonucleotide
cctagctggagcacgaatgtcgcaaacccc

SEQ ID NO: 73159 - DNA, 30 bp, Artificial Sequence
  Synthetic oligonucleotide
atggcccacgattcaaggtaggtgtacccc

SEQ ID NO: 73160 - DNA, 30 bp, Artificial Sequence
  Synthetic oligonucleotide
agacggtacgcgcaaaacatgcactccccc

SEQ ID NO: 73161 - DNA, 30 bp, Artificial Sequence
  Synthetic oligonucleotide
agcattcggacccacaccattagtagcccc

SEQ ID NO: 73162 - DNA, 30 bp, Artificial Sequence
  Synthetic oligonucleotide
tcaaggggtgcgaaagcgtgcgggcgcccc

SEQ ID NO: 73163 - DNA, 30 bp, Artificial Sequence
  Synthetic oligonucleotide
tcccaagcaaaccgtgcacccaaaggcccc

SEQ ID NO: 73164 - DNA, 30 bp, Artificial Sequence
  Synthetic oligonucleotide
aggcctacgcctgtcgcaaaagcactcccc

SEQ ID NO: 73165 - DNA, 30 bp, Artificial Sequence
  Synthetic oligonucleotide
gatgaggataagcctgttcggcacgtcccc

SEQ ID NO: 73166 - DNA, 30 bp, Artificial Sequence
  Synthetic oligonucleotide
aatcttgtgttctccttttgtgttttcccc

SEQ ID NO: 73167 - DNA, 30 bp, Artificial Sequence
  Synthetic oligonucleotide
tggacacctcatgcccgttagtgcgagccc

SEQ ID NO: 73168 - DNA, 30 bp, Artificial Sequence
  Synthetic oligonucleotide
ccctaaggggaacagtgtatccgatagccc

SEQ ID NO: 73169 - DNA, 30 bp, Artificial Sequence
  Synthetic oligonucleotide
agtccacctcaaacatgagacttgtagccc

SEQ ID NO: 73170 - DNA, 30 bp, Artificial Sequence
  Synthetic oligonucleotide
gctgaagtaacaataagagctgccacgccc

SEQ ID NO: 73171 - DNA, 30 bp, Artificial Sequence
  Synthetic oligonucleotide
tcggtagccaactcctagcctgtgcggccc

SEQ ID NO: 73172 - DNA, 30 bp, Artificial Sequence
  Synthetic oligonucleotide
gagatgaaggtagagaatcgactttggccc

SEQ ID NO: 73173 - DNA, 30 bp, Artificial Sequence
  Synthetic oligonucleotide
aacgtcaggtcgcgcaagttcgagatgccc

SEQ ID NO: 73174 - DNA, 30 bp, Artificial Sequence
  Synthetic oligonucleotide
tacgtactctggtctcgggccgggctgccc

SEQ ID NO: 73175 - DNA, 30 bp, Artificial Sequence
  Synthetic oligonucleotide
ggtaggacaaccctcgtcatgttagtgccc

SEQ ID NO: 73176 - DNA, 30 bp, Artificial Sequence
  Synthetic oligonucleotide
tacaagaactgggtccgtactcgtgtgccc

SEQ ID NO: 73177 - DNA, 30 bp, Artificial Sequence
  Synthetic oligonucleotide
cacgttacgggcctcatgtacggaaatccc

SEQ ID NO: 73178 - DNA, 30 bp, Artificial Sequence
  Synthetic oligonucleotide
aggtgtaagcgagactgaccgaaagatccc

SEQ ID NO: 73179 - DNA, 30 bp, Artificial Sequence
  Synthetic oligonucleotide
tacgcggattaatttgtgggggaagatccc

SEQ ID NO: 73180 - DNA, 30 bp, Artificial Sequence
  Synthetic oligonucleotide
gggtagtatgtggtatcattaggcgatccc

SEQ ID NO: 73181 - DNA, 30 bp, Artificial Sequence
  Synthetic oligonucleotide
ccctgtaattactggaaagatcttgctccc

SEQ ID NO: 73182 - DNA, 30 bp, Artificial Sequence
  Synthetic oligonucleotide
ggcatcgagttcgattcgaattaccgtccc

SEQ ID NO: 73183 - DNA, 30 bp, Artificial Sequence
  Synthetic oligonucleotide
atagcgaaatctcaacaatctgaacttccc

SEQ ID NO: 73184 - DNA, 30 bp, Artificial Sequence
  Synthetic oligonucleotide
ctggaatagatggttagtattgcatttccc

SEQ ID NO: 73185 - DNA, 30 bp, Artificial Sequence
  Synthetic oligonucleotide
ccggggtggtgacaatcctgcagatttccc

SEQ ID NO: 73186 - DNA, 30 bp, Artificial Sequence
  Synthetic oligonucleotide
acgcccacgttgtaaacggagacgaaagcc

SEQ ID NO: 73187 - DNA, 30 bp, Artificial Sequence
  Synthetic oligonucleotide
ccgagttgcgttagtccataagtgaaagcc

SEQ ID NO: 73188 - DNA, 30 bp, Artificial Sequence
  Synthetic oligonucleotide
ctgtataaacattgtggatcggataaagcc

SEQ ID NO: 73189 - DNA, 30 bp, Artificial Sequence
  Synthetic oligonucleotide
gactaccgcgggacctagccaaaacaagcc

SEQ ID NO: 73190 - DNA, 30 bp, Artificial Sequence
  Synthetic oligonucleotide
ctgtagcttgtcgcgaacgagtgccaagcc

SEQ ID NO: 73191 - DNA, 30 bp, Artificial Sequence
  Synthetic oligonucleotide
caaaaccaaaatcgcggagttagtcaagcc

SEQ ID NO: 73192 - DNA, 30 bp, Artificial Sequence
  Synthetic oligonucleotide
aaggtatcccaagaacggccaacagaagcc

SEQ ID NO: 73193 - DNA, 30 bp, Artificial Sequence
  Synthetic oligonucleotide
gtgctaatcggacacaatgatcatgaagcc

SEQ ID NO: 73194 - DNA, 30 bp, Artificial Sequence
  Synthetic oligonucleotide
atccagcacgaacaattaggccaataagcc

SEQ ID NO: 73195 - DNA, 30 bp, Artificial Sequence
  Synthetic oligonucleotide
aatcgtactgacagatatctcaagtaagcc

SEQ ID NO: 73196 - DNA, 30 bp, Artificial Sequence
  Synthetic oligonucleotide
caggcgtgccgaataactcccaggtaagcc

SEQ ID NO: 73197 - DNA, 30 bp, Artificial Sequence
  Synthetic oligonucleotide
aacgcggcacaaaataccggggaaacagcc

SEQ ID NO: 73198 - DNA, 30 bp, Artificial Sequence
  Synthetic oligonucleotide
ctgttgctaggggttgaggaatagacagcc

SEQ ID NO: 73199 - DNA, 30 bp, Artificial Sequence
  Synthetic oligonucleotide
agttcttgtctcgaatgcccatttccagcc

SEQ ID NO: 73200 - DNA, 30 bp, Artificial Sequence
  Synthetic oligonucleotide
cacaatacgtaaagtgccgtagaagcagcc

SEQ ID NO: 73201 - DNA, 30 bp, Artificial Sequence
  Synthetic oligonucleotide
gggtgggtatatttccacaacgattcagcc

SEQ ID NO: 73202 - DNA, 30 bp, Artificial Sequence
  Synthetic oligonucleotide
ctcagcggtttgaaacgaacgaaaggagcc

SEQ ID NO: 73203 - DNA, 30 bp, Artificial Sequence
  Synthetic oligonucleotide
tcataattgaagcagatccttatgggagcc

SEQ ID NO: 73204 - DNA, 30 bp, Artificial Sequence
  Synthetic oligonucleotide
tcaatgagattgctaaaaatcatatgagcc

SEQ ID NO: 73205 - DNA, 30 bp, Artificial Sequence
  Synthetic oligonucleotide
agagtcgccgtacggaggacgatagtagcc

SEQ ID NO: 73206 - DNA, 30 bp, Artificial Sequence
  Synthetic oligonucleotide
gcaaaatgggcagcataacctgaattagcc

SEQ ID NO: 73207 - DNA, 30 bp, Artificial Sequence
  Synthetic oligonucleotide
cgcgatttaacatatacgacaattaccgcc

SEQ ID NO: 73208 - DNA, 30 bp, Artificial Sequence
  Synthetic oligonucleotide
gcgctgaacccttacgattggtgcgccgcc

SEQ ID NO: 73209 - DNA, 30 bp, Artificial Sequence
  Synthetic oligonucleotide
atcgtggggtctcatgtattttcatccgcc

SEQ ID NO: 73210 - DNA, 30 bp, Artificial Sequence
  Synthetic oligonucleotide
taaacagtgtcggtacgattaatgagcgcc

SEQ ID NO: 73211 - DNA, 30 bp, Artificial Sequence
  Synthetic oligonucleotide
tctggatttaaggcttggggaactcgcgcc

SEQ ID NO: 73212 - DNA, 30 bp, Artificial Sequence
  Synthetic oligonucleotide
gttgatgaaacagcgtcaaagtgaggcgcc

SEQ ID NO: 73213 - DNA, 30 bp, Artificial Sequence
  Synthetic oligonucleotide
cgaacggtagagcggaggacctcgggcgcc

SEQ ID NO: 73214 - DNA, 30 bp, Artificial Sequence
  Synthetic oligonucleotide
aacatccgattacaaggaagggtctgcgcc

SEQ ID NO: 73215 - DNA, 30 bp, Artificial Sequence
  Synthetic oligonucleotide
gccatggtacagccgaacggtaggtgcgcc

SEQ ID NO: 73216 - DNA, 30 bp, Artificial Sequence
  Synthetic oligonucleotide
attcacgttaaataggtgagagacatcgcc

SEQ ID NO: 73217 - DNA, 30 bp, Artificial Sequence
  Synthetic oligonucleotide
ccaagtgacgttaacagttcaccaaaggcc

SEQ ID NO: 73218 - DNA, 30 bp, Artificial Sequence
  Synthetic oligonucleotide
agaactaagtaagggcatgctgccaaggcc

SEQ ID NO: 73219 - DNA, 30 bp, Artificial Sequence
  Synthetic oligonucleotide
gagagaaggttcatatcacgtttgcaggcc

SEQ ID NO: 73220 - DNA, 30 bp, Artificial Sequence
  Synthetic oligonucleotide
caagtcaccttggagtccattcgtgaggcc

SEQ ID NO: 73221 - DNA, 30 bp, Artificial Sequence
  Synthetic oligonucleotide
gagcattgtcgtaaggtaaacaactaggcc

SEQ ID NO: 73222 - DNA, 30 bp, Artificial Sequence
  Synthetic oligonucleotide
caagaatgtgatgaatagggacactaggcc

SEQ ID NO: 73223 - DNA, 30 bp, Artificial Sequence
  Synthetic oligonucleotide
gtctaaagcagggatgggaaccctacggcc

SEQ ID NO: 73224 - DNA, 30 bp, Artificial Sequence
  Synthetic oligonucleotide
acaagggccgatggcgtagaatctacggcc

SEQ ID NO: 73225 - DNA, 30 bp, Artificial Sequence
  Synthetic oligonucleotide
aaggcttaaaagtaacatacgagtacggcc

SEQ ID NO: 73226 - DNA, 30 bp, Artificial Sequence
  Synthetic oligonucleotide
tggggcttaggggttcaacgataatcggcc

SEQ ID NO: 73227 - DNA, 30 bp, Artificial Sequence
  Synthetic oligonucleotide
ctaatggattgaaggcagacaaagagggcc

SEQ ID NO: 73228 - DNA, 30 bp, Artificial Sequence
  Synthetic oligonucleotide
atacaacttcgaatagtaggctcacgggcc

SEQ ID NO: 73229 - DNA, 30 bp, Artificial Sequence
  Synthetic oligonucleotide
tgagctgactgatttcgaatgagaggggcc

SEQ ID NO: 73230 - DNA, 30 bp, Artificial Sequence
  Synthetic oligonucleotide
aggatgacgtaagcgttaacaatcggggcc

SEQ ID NO: 73231 - DNA, 30 bp, Artificial Sequence
  Synthetic oligonucleotide
aggcgaatcctgtttcaaaataatggggcc

SEQ ID NO: 73232 - DNA, 30 bp, Artificial Sequence
  Synthetic oligonucleotide
caccaccaatgaagctcccgattagtggcc

SEQ ID NO: 73233 - DNA, 30 bp, Artificial Sequence
  Synthetic oligonucleotide
gacgtacgaaagcaatgtttcagtgtggcc

SEQ ID NO: 73234 - DNA, 30 bp, Artificial Sequence
  Synthetic oligonucleotide
ccacgctcattgtgtgcactagttcatgcc

SEQ ID NO: 73235 - DNA, 30 bp, Artificial Sequence
  Synthetic oligonucleotide
cggggtcagttccggacatcaagttgtgcc

SEQ ID NO: 73236 - DNA, 30 bp, Artificial Sequence
  Synthetic oligonucleotide
ccgagaactataatgcaagtcctcattgcc

SEQ ID NO: 73237 - DNA, 30 bp, Artificial Sequence
  Synthetic oligonucleotide
ggacagatgtcacagggtagctagattgcc

SEQ ID NO: 73238 - DNA, 30 bp, Artificial Sequence
  Synthetic oligonucleotide
acgagtgagtttaccaggtatatacttgcc

SEQ ID NO: 73239 - DNA, 30 bp, Artificial Sequence
  Synthetic oligonucleotide
gtacgatacaagcgatgggagatggttgcc

SEQ ID NO: 73240 - DNA, 30 bp, Artificial Sequence
  Synthetic oligonucleotide
cggcaaagaagaatcgaccccggttaatcc

SEQ ID NO: 73241 - DNA, 30 bp, Artificial Sequence
  Synthetic oligonucleotide
cggctatgcttgactatgtctatcacatcc

SEQ ID NO: 73242 - DNA, 30 bp, Artificial Sequence
  Synthetic oligonucleotide
acatcggtcggattcaatgaacgtccatcc

SEQ ID NO: 73243 - DNA, 30 bp, Artificial Sequence
  Synthetic oligonucleotide
aagatctgagcagcccgcgtccaggcatcc

SEQ ID NO: 73244 - DNA, 30 bp, Artificial Sequence
  Synthetic oligonucleotide
ggacggtcaacattcggcgtaccacgatcc

SEQ ID NO: 73245 - DNA, 31 bp, Artificial Sequence
  Synthetic oligonucleotide
gaggtccggcgaatatcaatgtctacgatcc

SEQ ID NO: 73246 - DNA, 30 bp, Artificial Sequence
  Synthetic oligonucleotide
gaagggatcaactacttaggccatcgatcc

SEQ ID NO: 73247 - DNA, 31 bp, Artificial Sequence
  Synthetic oligonucleotide
ccccgacacgaaaaactcgttctacatatcc

SEQ ID NO: 73248 - DNA, 30 bp, Artificial Sequence
  Synthetic oligonucleotide
gatcataaggctaggctaaagctgatatcc

SEQ ID NO: 73249 - DNA, 30 bp, Artificial Sequence
  Synthetic oligonucleotide
tggtgcggtgtccttttacatgatctatcc

SEQ ID NO: 73250 - DNA, 30 bp, Artificial Sequence
  Synthetic oligonucleotide
tgggggtaaatgaaacaccgaaaacactcc

SEQ ID NO: 73251 - DNA, 30 bp, Artificial Sequence
  Synthetic oligonucleotide
ggagacttgtcccgcgaggtagccgactcc

SEQ ID NO: 73252 - DNA, 30 bp, Artificial Sequence
  Synthetic oligonucleotide
cgggaaggactcccttcagcaaactactcc

SEQ ID NO: 73253 - DNA, 30 bp, Artificial Sequence
  Synthetic oligonucleotide
ggatcccgtctgccgagtcgactacgctcc

SEQ ID NO: 73254 - DNA, 30 bp, Artificial Sequence
  Synthetic oligonucleotide
cgccaccaacttaacatatccactcgctcc

SEQ ID NO: 73255 - DNA, 30 bp, Artificial Sequence
  Synthetic oligonucleotide
tcgttactctctggaacgtgttcgtgctcc

SEQ ID NO: 73256 - DNA, 30 bp, Artificial Sequence
  Synthetic oligonucleotide
tccacggacgtggaacaagcttaactctcc

SEQ ID NO: 73257 - DNA, 35 bp, Artificial Sequence
  Synthetic oligonucleotide
tctaccttcttgcacctccctaagccaccctctcc

SEQ ID NO: 73258 - DNA, 30 bp, Artificial Sequence
  Synthetic oligonucleotide
tcaaggaatcccatcgggaactgtctctcc

SEQ ID NO: 73259 - DNA, 30 bp, Artificial Sequence
  Synthetic oligonucleotide
ccacgaaaggactgacggtcttgattctcc

SEQ ID NO: 73260 - DNA, 30 bp, Artificial Sequence
  Synthetic oligonucleotide
accgctaatgaggttcaagggtagcagtcc

SEQ ID NO: 73261 - DNA, 30 bp, Artificial Sequence
  Synthetic oligonucleotide
actcacaagtgctggaaaagccaatagtcc

SEQ ID NO: 73262 - DNA, 30 bp, Artificial Sequence
  Synthetic oligonucleotide
agtgtaacctttccgaatagtggatagtcc

SEQ ID NO: 73263 - DNA, 30 bp, Artificial Sequence
  Synthetic oligonucleotide
tggttgactagtattcgaggaaagtcgtcc

SEQ ID NO: 73264 - DNA, 29 bp, Artificial Sequence
  Synthetic oligonucleotide
tgcatgcgtcggtgggtagagtgtcgtcc

SEQ ID NO: 73265 - DNA, 30 bp, Artificial Sequence
  Synthetic oligonucleotide
cagttcgttgtggcgttggaaagtaggtcc

SEQ ID NO: 73266 - DNA, 30 bp, Artificial Sequence
  Synthetic oligonucleotide
aacgcgaacatagggtactgtagtcggtcc

SEQ ID NO: 73267 - DNA, 30 bp, Artificial Sequence
  Synthetic oligonucleotide
cgggtatgcggtatacagattcgagggtcc

SEQ ID NO: 73268 - DNA, 30 bp, Artificial Sequence
  Synthetic oligonucleotide
catgattcgggaacgatcaagcgctggtcc

SEQ ID NO: 73269 - DNA, 30 bp, Artificial Sequence
  Synthetic oligonucleotide
ggcaaactaagtctacatcggctgtggtcc

SEQ ID NO: 73270 - DNA, 30 bp, Artificial Sequence
  Synthetic oligonucleotide
taggacctataacacgggcgagagccttcc

SEQ ID NO: 73271 - DNA, 30 bp, Artificial Sequence
  Synthetic oligonucleotide
gcaatgggttggactagaaggctatgttcc

SEQ ID NO: 73272 - DNA, 30 bp, Artificial Sequence
  Synthetic oligonucleotide
aacaacattctcgccctaatctgctgttcc

SEQ ID NO: 73273 - DNA, 30 bp, Artificial Sequence
  Synthetic oligonucleotide
tccaaaaggtcgaaaggtagcttaaaaagc

SEQ ID NO: 73274 - DNA, 30 bp, Artificial Sequence
  Synthetic oligonucleotide
ccgcacggaggaacgtacgttcgcaaaagc

SEQ ID NO: 73275 - DNA, 30 bp, Artificial Sequence
  Synthetic oligonucleotide
cagcaagaccgtatgtaacggcgggaaagc

SEQ ID NO: 73276 - DNA, 30 bp, Artificial Sequence
  Synthetic oligonucleotide
cacgaacagtggtctatgctatgtgaaagc

SEQ ID NO: 73277 - DNA, 30 bp, Artificial Sequence
  Synthetic oligonucleotide
ccgaaaacccgaggcatataagtataaagc

SEQ ID NO: 73278 - DNA, 30 bp, Artificial Sequence
  Synthetic oligonucleotide
atcctcggatgtatgggcctgggttaaagc

SEQ ID NO: 73279 - DNA, 30 bp, Artificial Sequence
  Synthetic oligonucleotide
gagcaaggggatcagatcaatcacacaagc

SEQ ID NO: 73280 - DNA, 30 bp, Artificial Sequence
  Synthetic oligonucleotide
accgcccacgcaatacccggggacacaagc

SEQ ID NO: 73281 - DNA, 30 bp, Artificial Sequence
  Synthetic oligonucleotide
gttacatagtggccaagcggtggagcaagc

SEQ ID NO: 73282 - DNA, 30 bp, Artificial Sequence
  Synthetic oligonucleotide
gtctgcgtaaagtagaacggcgtatcaagc

SEQ ID NO: 73283 - DNA, 30 bp, Artificial Sequence
  Synthetic oligonucleotide
tttaagcggtaactaaccccagcttcaagc

SEQ ID NO: 73284 - DNA, 30 bp, Artificial Sequence
  Synthetic oligonucleotide
acgtgctagaccaggtcgactaaacgaagc

SEQ ID NO: 73285 - DNA, 30 bp, Artificial Sequence
  Synthetic oligonucleotide
agaatagcgtcccgtggctcgattctaagc

SEQ ID NO: 73286 - DNA, 30 bp, Artificial Sequence
  Synthetic oligonucleotide
gaaaagtatcaccgcaaaattcaagtaagc

SEQ ID NO: 73287 - DNA, 30 bp, Artificial Sequence
  Synthetic oligonucleotide
acgaggctcgaagaagagaccttggtaagc

SEQ ID NO: 73288 - DNA, 30 bp, Artificial Sequence
  Synthetic oligonucleotide
ggagatcaaagcactccgcagggattaagc

SEQ ID NO: 73289 - DNA, 30 bp, Artificial Sequence
  Synthetic oligonucleotide
ggcagtcaaaatcctgacacttgcttaagc

SEQ ID NO: 73290 - DNA, 30 bp, Artificial Sequence
  Synthetic oligonucleotide
cacctacaacctactgcctcatcacacagc

SEQ ID NO: 73291 - DNA, 30 bp, Artificial Sequence
  Synthetic oligonucleotide
taaagaataatgctagtcttcgggcacagc

SEQ ID NO: 73292 - DNA, 30 bp, Artificial Sequence
  Synthetic oligonucleotide
tggagaagcactgtgcggcaggtagacagc

SEQ ID NO: 73293 - DNA, 30 bp, Artificial Sequence
  Synthetic oligonucleotide
acgagaaagacatcccctggataggacagc

SEQ ID NO: 73294 - DNA, 30 bp, Artificial Sequence
  Synthetic oligonucleotide
cgcaagccatgggggcggtggtcggacagc

SEQ ID NO: 73295 - DNA, 30 bp, Artificial Sequence
  Synthetic oligonucleotide
agatgattcaacgaatccgcggacgccagc

SEQ ID NO: 73296 - DNA, 30 bp, Artificial Sequence
  Synthetic oligonucleotide
cgttaagccgtgagaggtgaaatcgccagc

SEQ ID NO: 73297 - DNA, 30 bp, Artificial Sequence
  Synthetic oligonucleotide
tacatcagtagaaatccgcaagaatccagc

SEQ ID NO: 73298 - DNA, 30 bp, Artificial Sequence
  Synthetic oligonucleotide
gcccataatcacgcggaataaccgtccagc

SEQ ID NO: 73299 - DNA, 30 bp, Artificial Sequence
  Synthetic oligonucleotide
ttggcatagggatcatggctcgggtccagc

SEQ ID NO: 73300 - DNA, 30 bp, Artificial Sequence
  Synthetic oligonucleotide
tcgtcggcattttagctggaaacgagcagc

SEQ ID NO: 73301 - DNA, 30 bp, Artificial Sequence
  Synthetic oligonucleotide
ccgtatggcactgtaggtcgaatgggcagc

SEQ ID NO: 73302 - DNA, 30 bp, Artificial Sequence
  Synthetic oligonucleotide
tcgtttcactacgaagatcggaggtgcagc

SEQ ID NO: 73303 - DNA, 30 bp, Artificial Sequence
  Synthetic oligonucleotide
aagggaaagagtccctctccctcttgcagc

SEQ ID NO: 73304 - DNA, 30 bp, Artificial Sequence
  Synthetic oligonucleotide
gttaccggaactggattgacacgtatcagc

SEQ ID NO: 73305 - DNA, 30 bp, Artificial Sequence
  Synthetic oligonucleotide
agggcggtacaaacgcgggacatactcagc

SEQ ID NO: 73306 - DNA, 30 bp, Artificial Sequence
  Synthetic oligonucleotide
agacagattggtggggcagtgcatctcagc

SEQ ID NO: 73307 - DNA, 30 bp, Artificial Sequence
  Synthetic oligonucleotide
ttgggcaagagtggctaaggcccagtcagc

SEQ ID NO: 73308 - DNA, 30 bp, Artificial Sequence
  Synthetic oligonucleotide
ctacggatcttcctgaaatataaggtcagc

SEQ ID NO: 73309 - DNA, 30 bp, Artificial Sequence
  Synthetic oligonucleotide
acaatggctccatgacatgagggtgtcagc

SEQ ID NO: 73310 - DNA, 30 bp, Artificial Sequence
  Synthetic oligonucleotide
aggcaacgagttttcgccgagacgaagagc

SEQ ID NO: 73311 - DNA, 30 bp, Artificial Sequence
  Synthetic oligonucleotide
atccaaaagactgataggggtgggaagagc

SEQ ID NO: 73312 - DNA, 30 bp, Artificial Sequence
  Synthetic oligonucleotide
gtgaagccagaacgtgaagtacggtagagc

SEQ ID NO: 73313 - DNA, 30 bp, Artificial Sequence
  Synthetic oligonucleotide
ttacttgggcgtaaagaggaatattagagc

SEQ ID NO: 73314 - DNA, 30 bp, Artificial Sequence
  Synthetic oligonucleotide
caaaggctgacgtctcgaaggctttagagc

SEQ ID NO: 73315 - DNA, 30 bp, Artificial Sequence
  Synthetic oligonucleotide
gtacgggagctgcaataagacaagacgagc

SEQ ID NO: 73316 - DNA, 30 bp, Artificial Sequence
  Synthetic oligonucleotide
gctaggcgatctctcacacaggtaccgagc

SEQ ID NO: 73317 - DNA, 30 bp, Artificial Sequence
  Synthetic oligonucleotide
tcgactatacttgcagggcggattccgagc

SEQ ID NO: 73318 - DNA, 30 bp, Artificial Sequence
  Synthetic oligonucleotide
gaggtcgccaaggggggctaacatgcgagc

SEQ ID NO: 73319 - DNA, 30 bp, Artificial Sequence
  Synthetic oligonucleotide
cgagatgatcgtcacggaaatgactcgagc

SEQ ID NO: 73320 - DNA, 30 bp, Artificial Sequence
  Synthetic oligonucleotide
cctccgagtagcgaagtacccatccggagc

SEQ ID NO: 73321 - DNA, 30 bp, Artificial Sequence
  Synthetic oligonucleotide
tcaccccaggcgctgtcggggaaagggagc

SEQ ID NO: 73322 - DNA, 30 bp, Artificial Sequence
  Synthetic oligonucleotide
cacacagtggagagggttttagagtggagc

SEQ ID NO: 73323 - DNA, 30 bp, Artificial Sequence
  Synthetic oligonucleotide
taagatcctcatttctggaggtggtggagc

SEQ ID NO: 73324 - DNA, 30 bp, Artificial Sequence
  Synthetic oligonucleotide
cgcataatatttatggtcgattacatgagc

SEQ ID NO: 73325 - DNA, 29 bp, Artificial Sequence
  Synthetic oligonucleotide
agatataatcgaaccagtctgagatgagc

SEQ ID NO: 73326 - DNA, 30 bp, Artificial Sequence
  Synthetic oligonucleotide
agagccgtgataccctcccaaaaagtgagc

SEQ ID NO: 73327 - DNA, 30 bp, Artificial Sequence
  Synthetic oligonucleotide
atgataatccaagctattacagtagtgagc

SEQ ID NO: 73328 - DNA, 30 bp, Artificial Sequence
  Synthetic oligonucleotide
tgtacgccacttcgatatcccgcggtgagc

SEQ ID NO: 73329 - DNA, 30 bp, Artificial Sequence
  Synthetic oligonucleotide
aaacacgagaagggccgattcagcttgagc

SEQ ID NO: 73330 - DNA, 30 bp, Artificial Sequence
  Synthetic oligonucleotide
ccggggatgattatatatggcggccatagc

SEQ ID NO: 73331 - DNA, 30 bp, Artificial Sequence
  Synthetic oligonucleotide
tctgctgggaattgcaggtcgaccgatagc

SEQ ID NO: 73332 - DNA, 30 bp, Artificial Sequence
  Synthetic oligonucleotide
tatgaggagttgtaggtgccacatgatagc

SEQ ID NO: 73333 - DNA, 30 bp, Artificial Sequence
  Synthetic oligonucleotide
accggctgcttcgtataagagtgctatagc

SEQ ID NO: 73334 - DNA, 30 bp, Artificial Sequence
  Synthetic oligonucleotide
cacctaaatgtcaagcgcagtctacctagc

SEQ ID NO: 73335 - DNA, 30 bp, Artificial Sequence
  Synthetic oligonucleotide
agctcccctccacaaaagtacctagctagc

SEQ ID NO: 73336 - DNA, 30 bp, Artificial Sequence
  Synthetic oligonucleotide
agcgaaagggcacgaaacagcccggctagc

SEQ ID NO: 73337 - DNA, 30 bp, Artificial Sequence
  Synthetic oligonucleotide
aggcaaagcatgcctttcgacgttgctagc

SEQ ID NO: 73338 - DNA, 30 bp, Artificial Sequence
  Synthetic oligonucleotide
ccccaaagtagttgagtatttggatctagc

SEQ ID NO: 73339 - DNA, 30 bp, Artificial Sequence
  Synthetic oligonucleotide
cgccagatggagagcctcaaggaaagtagc

SEQ ID NO: 73340 - DNA, 30 bp, Artificial Sequence
  Synthetic oligonucleotide
tggaggtgggaggccccagagcagagtagc

SEQ ID NO: 73341 - DNA, 30 bp, Artificial Sequence
  Synthetic oligonucleotide
acgagccgggctgactaggggcagagtagc

SEQ ID NO: 73342 - DNA, 30 bp, Artificial Sequence
  Synthetic oligonucleotide
ggctcgttttcggaagccatcatgagtagc

SEQ ID NO: 73343 - DNA, 30 bp, Artificial Sequence
  Synthetic oligonucleotide
gcagtgggacgaagacctggtgttagtagc

SEQ ID NO: 73344 - DNA, 30 bp, Artificial Sequence
  Synthetic oligonucleotide
atggccggcttcgaaagtcagaatcgtagc

SEQ ID NO: 73345 - DNA, 30 bp, Artificial Sequence
  Synthetic oligonucleotide
tcatgtgcatcagtgtggagtaaaggtagc

SEQ ID NO: 73346 - DNA, 30 bp, Artificial Sequence
  Synthetic oligonucleotide
tagggccagtgtgacaagcctacaggtagc

SEQ ID NO: 73347 - DNA, 30 bp, Artificial Sequence
  Synthetic oligonucleotide
agatatccgatttgtcacactaagtgtagc

SEQ ID NO: 73348 - DNA, 30 bp, Artificial Sequence
  Synthetic oligonucleotide
cgaacgatgctctagtgcaggagtattagc

SEQ ID NO: 73349 - DNA, 30 bp, Artificial Sequence
  Synthetic oligonucleotide
gtgtcccagagtactcaccaggaacttagc

SEQ ID NO: 73350 - DNA, 30 bp, Artificial Sequence
  Synthetic oligonucleotide
cggcgtgcgcaaagcaacgagcaccttagc

SEQ ID NO: 73351 - DNA, 30 bp, Artificial Sequence
  Synthetic oligonucleotide
gcatatcgaccacaatctggacttcttagc

SEQ ID NO: 73352 - DNA, 30 bp, Artificial Sequence
  Synthetic oligonucleotide
gccgaagtcatgtcaatggccggatttagc

SEQ ID NO: 73353 - DNA, 30 bp, Artificial Sequence
  Synthetic oligonucleotide
tgacgacccggggtcaaatgactatttagc

SEQ ID NO: 73354 - DNA, 30 bp, Artificial Sequence
  Synthetic oligonucleotide
catcagccataagaggattccaagtttagc

SEQ ID NO: 73355 - DNA, 30 bp, Artificial Sequence
  Synthetic oligonucleotide
ctggaaaaagataacttttgggacaaacgc

SEQ ID NO: 73356 - DNA, 30 bp, Artificial Sequence
  Synthetic oligonucleotide
atccgaggggcgcaagcattgaagcaacgc

SEQ ID NO: 73357 - DNA, 30 bp, Artificial Sequence
  Synthetic oligonucleotide
cgatatagtgaagaagcaaatttctaacgc

SEQ ID NO: 73358 - DNA, 30 bp, Artificial Sequence
  Synthetic oligonucleotide
agagtacatttgaaagcgacagatggacgc

SEQ ID NO: 73359 - DNA, 30 bp, Artificial Sequence
  Synthetic oligonucleotide
aacagaagagctcctcccctagtaatacgc

SEQ ID NO: 73360 - DNA, 30 bp, Artificial Sequence
  Synthetic oligonucleotide
gtgtaaacgatatctggacatcaagtacgc

SEQ ID NO: 73361 - DNA, 30 bp, Artificial Sequence
  Synthetic oligonucleotide
ctggattgtagttaacagagctacgtacgc

SEQ ID NO: 73362 - DNA, 30 bp, Artificial Sequence
  Synthetic oligonucleotide
atccgccgtgagatacagagggatgaccgc

SEQ ID NO: 73363 - DNA, 30 bp, Artificial Sequence
  Synthetic oligonucleotide
tgttggtcaccgagcgatgacaaataccgc

SEQ ID NO: 73364 - DNA, 30 bp, Artificial Sequence
  Synthetic oligonucleotide
tccttgaatcccgcgatctgtaactaccgc

SEQ ID NO: 73365 - DNA, 30 bp, Artificial Sequence
  Synthetic oligonucleotide
taggggtggggaacaaagtggcacacccgc

SEQ ID NO: 73366 - DNA, 30 bp, Artificial Sequence
  Synthetic oligonucleotide
atgggggggtcgaagcataatgcgacccgc

SEQ ID NO: 73367 - DNA, 30 bp, Artificial Sequence
  Synthetic oligonucleotide
ggctgagtctcagtaaatatagctacccgc

SEQ ID NO: 73368 - DNA, 30 bp, Artificial Sequence
  Synthetic oligonucleotide
accatggttacgatcaggcgtcgcgcccgc

SEQ ID NO: 73369 - DNA, 30 bp, Artificial Sequence
  Synthetic oligonucleotide
gaagatcgttccacgttgctagatgcccgc

SEQ ID NO: 73370 - DNA, 30 bp, Artificial Sequence
  Synthetic oligonucleotide
gtcatgcattatactaggcgaaaccgccgc

SEQ ID NO: 73371 - DNA, 30 bp, Artificial Sequence
  Synthetic oligonucleotide
cgcctcaaacgcgaggcttatcgccgccgc

SEQ ID NO: 73372 - DNA, 30 bp, Artificial Sequence
  Synthetic oligonucleotide
aagaagtgtccatacgggatcgggggccgc

SEQ ID NO: 73373 - DNA, 30 bp, Artificial Sequence
  Synthetic oligonucleotide
tggcggggatgtactacgttacagatccgc

SEQ ID NO: 73374 - DNA, 30 bp, Artificial Sequence
  Synthetic oligonucleotide
tccatcacgtaaaaacaatgcatgatccgc

SEQ ID NO: 73375 - DNA, 31 bp, Artificial Sequence
  Synthetic oligonucleotide
ccagatagcagacgagtcgcagtcgctccgc

SEQ ID NO: 73376 - DNA, 30 bp, Artificial Sequence
  Synthetic oligonucleotide
aaggccaattccggcatgaatgagttccgc

SEQ ID NO: 73377 - DNA, 30 bp, Artificial Sequence
  Synthetic oligonucleotide
ccaagctgagggatggtgatctttttccgc

SEQ ID NO: 73378 - DNA, 30 bp, Artificial Sequence
  Synthetic oligonucleotide
aatcaagacacggactttagccaccagcgc

SEQ ID NO: 73379 - DNA, 30 bp, Artificial Sequence
  Synthetic oligonucleotide
ggcacaagcaaaacttctggcatccagcgc

SEQ ID NO: 73380 - DNA, 30 bp, Artificial Sequence
  Synthetic oligonucleotide
ttgtccgccggtagtcacgcaagagagcgc

SEQ ID NO: 73381 - DNA, 30 bp, Artificial Sequence
  Synthetic oligonucleotide
ttaaaaaggaaaatcaaacatctagagcgc

SEQ ID NO: 73382 - DNA, 30 bp, Artificial Sequence
  Synthetic oligonucleotide
gtagtcaaactagggtatatgggggcgcgc

SEQ ID NO: 73383 - DNA, 30 bp, Artificial Sequence
  Synthetic oligonucleotide
gtgcgtagtccttaatatgctacctcgcgc

SEQ ID NO: 73384 - DNA, 30 bp, Artificial Sequence
  Synthetic oligonucleotide
acactcgtagcatctgagggttcaaggcgc

SEQ ID NO: 73385 - DNA, 30 bp, Artificial Sequence
  Synthetic oligonucleotide
cacaatagaagatccgagccccctcggcgc

SEQ ID NO: 73386 - DNA, 30 bp, Artificial Sequence
  Synthetic oligonucleotide
ccaagattaaacaggtaagtgagagggcgc

SEQ ID NO: 73387 - DNA, 30 bp, Artificial Sequence
  Synthetic oligonucleotide
taatttagtccgaacaaggactgaatgcgc

SEQ ID NO: 73388 - DNA, 30 bp, Artificial Sequence
  Synthetic oligonucleotide
agctcctattaaagccgccgctgaatgcgc

SEQ ID NO: 73389 - DNA, 30 bp, Artificial Sequence
  Synthetic oligonucleotide
taaattggctcgtggagtactggcatgcgc

SEQ ID NO: 73390 - DNA, 30 bp, Artificial Sequence
  Synthetic oligonucleotide
acatttaaaagggtaagcgtaggtatgcgc

SEQ ID NO: 73391 - DNA, 30 bp, Artificial Sequence
  Synthetic oligonucleotide
cgggaggtgcgaggtcagtataatctgcgc

SEQ ID NO: 73392 - DNA, 30 bp, Artificial Sequence
  Synthetic oligonucleotide
acatgttacgcgagcttaaccttagtgcgc

SEQ ID NO: 73393 - DNA, 30 bp, Artificial Sequence
  Synthetic oligonucleotide
taccggaagcaatgctttaaggacgtgcgc

SEQ ID NO: 73394 - DNA, 29 bp, Artificial Sequence
  Synthetic oligonucleotide
cgactcgattacagacggaatccgtgcgc

SEQ ID NO: 73395 - DNA, 30 bp, Artificial Sequence
  Synthetic oligonucleotide
ggtcccaatggctctatcacgaaggtgcgc

SEQ ID NO: 73396 - DNA, 30 bp, Artificial Sequence
  Synthetic oligonucleotide
ggattcagaaggagcacgtgcagggtgcgc

SEQ ID NO: 73397 - DNA, 30 bp, Artificial Sequence
  Synthetic oligonucleotide
taggtgagactcgaaaaatcagtgttgcgc

SEQ ID NO: 73398 - DNA, 30 bp, Artificial Sequence
  Synthetic oligonucleotide
ccgccggcttaaggtgagtcatacaatcgc

SEQ ID NO: 73399 - DNA, 30 bp, Artificial Sequence
  Synthetic oligonucleotide
tgggacgctcactcatcaggcgcgaatcgc

SEQ ID NO: 73400 - DNA, 30 bp, Artificial Sequence
  Synthetic oligonucleotide
tgcggcgcacggtcaacacagtaccatcgc

SEQ ID NO: 73401 - DNA, 30 bp, Artificial Sequence
  Synthetic oligonucleotide
cttagaatctaccagataaacagtcatcgc

SEQ ID NO: 73402 - DNA, 30 bp, Artificial Sequence
  Synthetic oligonucleotide
agttagagacgaaagtcaatcagtcatcgc

SEQ ID NO: 73403 - DNA, 30 bp, Artificial Sequence
  Synthetic oligonucleotide
gtgagaacgtagcgtataatcgcctatcgc

SEQ ID NO: 73404 - DNA, 30 bp, Artificial Sequence
  Synthetic oligonucleotide
gaacttcctagaagggaggatgaacctcgc

SEQ ID NO: 73405 - DNA, 30 bp, Artificial Sequence
  Synthetic oligonucleotide
tcctaagttggcttgcctcgaccccctcgc

SEQ ID NO: 73406 - DNA, 30 bp, Artificial Sequence
  Synthetic oligonucleotide
ggaacgcaccgacttagggaccttcctcgc

SEQ ID NO: 73407 - DNA, 30 bp, Artificial Sequence
  Synthetic oligonucleotide
aaaacaggaataagcatcagtccggctcgc

SEQ ID NO: 73408 - DNA, 30 bp, Artificial Sequence
  Synthetic oligonucleotide
aagggattacaacattggggttcggctcgc

SEQ ID NO: 73409 - DNA, 30 bp, Artificial Sequence
  Synthetic oligonucleotide
taaccgtaagttcgtggacagatgggtcgc

SEQ ID NO: 73410 - DNA, 30 bp, Artificial Sequence
  Synthetic oligonucleotide
gtcagtcccagaggaaagccaagtattcgc

SEQ ID NO: 73411 - DNA, 30 bp, Artificial Sequence
  Synthetic oligonucleotide
gaaacagctgctaggaccaagcgacttcgc

SEQ ID NO: 73412 - DNA, 30 bp, Artificial Sequence
  Synthetic oligonucleotide
gtcctcacgggaaaatagaagccatttcgc

SEQ ID NO: 73413 - DNA, 30 bp, Artificial Sequence
  Synthetic oligonucleotide
aagggcaatgcattagaggtaagaaaaggc

SEQ ID NO: 73414 - DNA, 30 bp, Artificial Sequence
  Synthetic oligonucleotide
acctcggtgtaagcgctgagaatagaaggc

SEQ ID NO: 73415 - DNA, 30 bp, Artificial Sequence
  Synthetic oligonucleotide
tgccaaacttcggcggccctgaacgaaggc

SEQ ID NO: 73416 - DNA, 30 bp, Artificial Sequence
  Synthetic oligonucleotide
gcgtacaccaaatgtgtggcgtccgaaggc

SEQ ID NO: 73417 - DNA, 30 bp, Artificial Sequence
  Synthetic oligonucleotide
gggaagcaagttacaactcatattgaaggc

SEQ ID NO: 73418 - DNA, 30 bp, Artificial Sequence
  Synthetic oligonucleotide
aggacgtattattagttgtgcgcataaggc

SEQ ID NO: 73419 - DNA, 30 bp, Artificial Sequence
  Synthetic oligonucleotide
tagaggctacatatcgacattcgctaaggc

SEQ ID NO: 73420 - DNA, 30 bp, Artificial Sequence
  Synthetic oligonucleotide
ccgatcaactgctacagctagtgctaaggc

SEQ ID NO: 73421 - DNA, 30 bp, Artificial Sequence
  Synthetic oligonucleotide
acaaaaatggtaatcaactgaagttaaggc

SEQ ID NO: 73422 - DNA, 30 bp, Artificial Sequence
  Synthetic oligonucleotide
acgatcgccttcgaggaaaggtacccaggc

SEQ ID NO: 73423 - DNA, 30 bp, Artificial Sequence
  Synthetic oligonucleotide
cggctgggtcagcacagattcaatccaggc

SEQ ID NO: 73424 - DNA, 30 bp, Artificial Sequence
  Synthetic oligonucleotide
agaaaaacggagtatgaagtgttcggaggc

SEQ ID NO: 73425 - DNA, 30 bp, Artificial Sequence
  Synthetic oligonucleotide
atggaccgtaggggggaaaccgatataggc

SEQ ID NO: 73426 - DNA, 30 bp, Artificial Sequence
  Synthetic oligonucleotide
acgggactactacgcaaaagtagagtaggc

SEQ ID NO: 73427 - DNA, 30 bp, Artificial Sequence
  Synthetic oligonucleotide
aaaggtgccaactggaacactgatgtaggc

SEQ ID NO: 73428 - DNA, 30 bp, Artificial Sequence
  Synthetic oligonucleotide
gcacaaggtacaagcatttaaaccaacggc

SEQ ID NO: 73429 - DNA, 30 bp, Artificial Sequence
  Synthetic oligonucleotide
caattcagagtaagagcaaaaatgaacggc

SEQ ID NO: 73430 - DNA, 30 bp, Artificial Sequence
  Synthetic oligonucleotide
taacgatatagcctgcccaacatagacggc

SEQ ID NO: 73431 - DNA, 31 bp, Artificial Sequence
  Synthetic oligonucleotide
ccccacagaacacagtgaattcggggacggc

SEQ ID NO: 73432 - DNA, 30 bp, Artificial Sequence
  Synthetic oligonucleotide
acatcgaccacagatggcaattctgacggc

SEQ ID NO: 73433 - DNA, 30 bp, Artificial Sequence
  Synthetic oligonucleotide
aacagcctagcactcactgacacaaccggc

SEQ ID NO: 73434 - DNA, 30 bp, Artificial Sequence
  Synthetic oligonucleotide
cacgcgtgaataatgtcaatactacccggc

SEQ ID NO: 73435 - DNA, 30 bp, Artificial Sequence
  Synthetic oligonucleotide
ccgcgggaatcaagtttcagaccggccggc

SEQ ID NO: 73436 - DNA, 30 bp, Artificial Sequence
  Synthetic oligonucleotide
atggacagttgcggtagcattacctccggc

SEQ ID NO: 73437 - DNA, 30 bp, Artificial Sequence
  Synthetic oligonucleotide
acctactacgagggaccccggctgggcggc

SEQ ID NO: 73438 - DNA, 30 bp, Artificial Sequence
  Synthetic oligonucleotide
atggtatgccgtcaatagacaaccatcggc

SEQ ID NO: 73439 - DNA, 30 bp, Artificial Sequence
  Synthetic oligonucleotide
ccacctaatcatacgaatttgggcctcggc

SEQ ID NO: 73440 - DNA, 30 bp, Artificial Sequence
  Synthetic oligonucleotide
acaacgcggattggcttgatagtcttcggc

SEQ ID NO: 73441 - DNA, 30 bp, Artificial Sequence
  Synthetic oligonucleotide
ctaaaaaggattagccaggccacgttcggc

SEQ ID NO: 73442 - DNA, 30 bp, Artificial Sequence
  Synthetic oligonucleotide
ctggaaggccgtaggtcagtgtatttcggc

SEQ ID NO: 73443 - DNA, 30 bp, Artificial Sequence
  Synthetic oligonucleotide
ttgtcgtagtgggacacgactgagaagggc

SEQ ID NO: 73444 - DNA, 30 bp, Artificial Sequence
  Synthetic oligonucleotide
cgccggttccgccgacttaaagcacagggc

SEQ ID NO: 73445 - DNA, 30 bp, Artificial Sequence
  Synthetic oligonucleotide
tcttgcaaactacggtaattatatcagggc

SEQ ID NO: 73446 - DNA, 30 bp, Artificial Sequence
  Synthetic oligonucleotide
gcacggacttcggatcgcgttatcgagggc

SEQ ID NO: 73447 - DNA, 30 bp, Artificial Sequence
  Synthetic oligonucleotide
tggaaacaggcttacgtgagcatcccgggc

SEQ ID NO: 73448 - DNA, 30 bp, Artificial Sequence
  Synthetic oligonucleotide
caatacactaacaccgttcattaggcgggc

SEQ ID NO: 73449 - DNA, 31 bp, Artificial Sequence
  Synthetic oligonucleotide
gactccgatattgagggcaaaacgggcgggc

SEQ ID NO: 73450 - DNA, 30 bp, Artificial Sequence
  Synthetic oligonucleotide
agaacaaactcagatgcaacacaaaggggc

SEQ ID NO: 73451 - DNA, 30 bp, Artificial Sequence
  Synthetic oligonucleotide
atgctgagaaaaatgggtcgcgataggggc

SEQ ID NO: 73452 - DNA, 30 bp, Artificial Sequence
  Synthetic oligonucleotide
accgcgaactataacacatgcgaacggggc

SEQ ID NO: 73453 - DNA, 30 bp, Artificial Sequence
  Synthetic oligonucleotide
aatcgtgggtcaaggagaggtggacggggc

SEQ ID NO: 73454 - DNA, 30 bp, Artificial Sequence
  Synthetic oligonucleotide
atggtattctggtactgaagtatacggggc

SEQ ID NO: 73455 - DNA, 30 bp, Artificial Sequence
  Synthetic oligonucleotide
cactcggaagctgttgcagattgggggggc

SEQ ID NO: 73456 - DNA, 30 bp, Artificial Sequence
  Synthetic oligonucleotide
gactgtagagggaacaggaagaaatggggc

SEQ ID NO: 73457 - DNA, 30 bp, Artificial Sequence
  Synthetic oligonucleotide
ctccgacactcgggcaccagaaagtggggc

SEQ ID NO: 73458 - DNA, 30 bp, Artificial Sequence
  Synthetic oligonucleotide
tgcgtaggcaaggcgcatcagacttggggc

SEQ ID NO: 73459 - DNA, 30 bp, Artificial Sequence
  Synthetic oligonucleotide
aggcacactggggattcttaagtttggggc

SEQ ID NO: 73460 - DNA, 30 bp, Artificial Sequence
  Synthetic oligonucleotide
tccagaaccagcatgtgggttgaaatgggc

SEQ ID NO: 73461 - DNA, 30 bp, Artificial Sequence
  Synthetic oligonucleotide
ggaggaccatataaaggggcctatatgggc

SEQ ID NO: 73462 - DNA, 30 bp, Artificial Sequence
  Synthetic oligonucleotide
ggtagatagaaattaccttagtgcgtgggc

SEQ ID NO: 73463 - DNA, 30 bp, Artificial Sequence
  Synthetic oligonucleotide
ccaagagcacgctccccattgcaggtgggc

SEQ ID NO: 73464 - DNA, 30 bp, Artificial Sequence
  Synthetic oligonucleotide
aaggtgataataaacaaatccggtgtgggc

SEQ ID NO: 73465 - DNA, 30 bp, Artificial Sequence
  Synthetic oligonucleotide
aggggaaactggtgggaagttcggttgggc

SEQ ID NO: 73466 - DNA, 30 bp, Artificial Sequence
  Synthetic oligonucleotide
gtgctaagtcgggtgaatggatatcatggc

SEQ ID NO: 73467 - DNA, 30 bp, Artificial Sequence
  Synthetic oligonucleotide
aaactgaacactcgttgggctgtggatggc

SEQ ID NO: 73468 - DNA, 30 bp, Artificial Sequence
  Synthetic oligonucleotide
ggccaaagtcgagacaagcttacacctggc

SEQ ID NO: 73469 - DNA, 30 bp, Artificial Sequence
  Synthetic oligonucleotide
tgatatgataacctcctgtacctcgctggc

SEQ ID NO: 73470 - DNA, 30 bp, Artificial Sequence
  Synthetic oligonucleotide
ccgttacaactagatcacattgtggctggc

SEQ ID NO: 73471 - DNA, 30 bp, Artificial Sequence
  Synthetic oligonucleotide
ccgatacacatcaaagagtaccctgctggc

SEQ ID NO: 73472 - DNA, 30 bp, Artificial Sequence
  Synthetic oligonucleotide
taaggaaacgatacgatggcggaatctggc

SEQ ID NO: 73473 - DNA, 30 bp, Artificial Sequence
  Synthetic oligonucleotide
ttacaaagagttataagtgttgcctctggc

SEQ ID NO: 73474 - DNA, 30 bp, Artificial Sequence
  Synthetic oligonucleotide
agtaaaagatggtgtattaatggctctggc

SEQ ID NO: 73475 - DNA, 29 bp, Artificial Sequence
  Synthetic oligonucleotide
ggcggatcatgtgggtgcctccttctggc

SEQ ID NO: 73476 - DNA, 30 bp, Artificial Sequence
  Synthetic oligonucleotide
ttgacgataatcttacgcgaataaggtggc

SEQ ID NO: 73477 - DNA, 30 bp, Artificial Sequence
  Synthetic oligonucleotide
ttgagaaaagcgttgtaacagtaaggtggc

SEQ ID NO: 73478 - DNA, 30 bp, Artificial Sequence
  Synthetic oligonucleotide
tcaggaccgaggggggaaaatgtcggtggc

SEQ ID NO: 73479 - DNA, 30 bp, Artificial Sequence
  Synthetic oligonucleotide
agcactagacggattggtatcgcgtgtggc

SEQ ID NO: 73480 - DNA, 30 bp, Artificial Sequence
  Synthetic oligonucleotide
cgtgtcggggcgcaacgctgtgggtgtggc

SEQ ID NO: 73481 - DNA, 30 bp, Artificial Sequence
  Synthetic oligonucleotide
tcgtgtactcggctaaaccggccagttggc

SEQ ID NO: 73482 - DNA, 30 bp, Artificial Sequence
  Synthetic oligonucleotide
ccgcttcagagaggggaaacgaggtttggc

SEQ ID NO: 73483 - DNA, 30 bp, Artificial Sequence
  Synthetic oligonucleotide
cgaatagagattcctctgggcggcaaatgc

SEQ ID NO: 73484 - DNA, 30 bp, Artificial Sequence
  Synthetic oligonucleotide
tggtgttatcgaacgggctaaccacaatgc

SEQ ID NO: 73485 - DNA, 30 bp, Artificial Sequence
  Synthetic oligonucleotide
accagggttaggttaatagggctgcaatgc

SEQ ID NO: 73486 - DNA, 30 bp, Artificial Sequence
  Synthetic oligonucleotide
ccctgcattgaaaccaagcgggaagaatgc

SEQ ID NO: 73487 - DNA, 30 bp, Artificial Sequence
  Synthetic oligonucleotide
aagccaatccggtgatcatgttacgaatgc

SEQ ID NO: 73488 - DNA, 30 bp, Artificial Sequence
  Synthetic oligonucleotide
catgtacggtactgttcgtcgggcgaatgc

SEQ ID NO: 73489 - DNA, 30 bp, Artificial Sequence
  Synthetic oligonucleotide
gtaaaggggtactcttatcacgatgaatgc

SEQ ID NO: 73490 - DNA, 30 bp, Artificial Sequence
  Synthetic oligonucleotide
taggtggatttacagtagttcgactaatgc

SEQ ID NO: 73491 - DNA, 30 bp, Artificial Sequence
  Synthetic oligonucleotide
ctaagggcttgtaaatgtagggagagatgc

SEQ ID NO: 73492 - DNA, 30 bp, Artificial Sequence
  Synthetic oligonucleotide
gaccgtaatcagaggtgaaactagcgatgc

SEQ ID NO: 73493 - DNA, 30 bp, Artificial Sequence
  Synthetic oligonucleotide
aagtggaataaaggatatggatcaggatgc

SEQ ID NO: 73494 - DNA, 30 bp, Artificial Sequence
  Synthetic oligonucleotide
cgggtgaaatacaatctacgacggtgatgc

SEQ ID NO: 73495 - DNA, 30 bp, Artificial Sequence
  Synthetic oligonucleotide
caaagtaaaagtcgagacctatcagtatgc

SEQ ID NO: 73496 - DNA, 30 bp, Artificial Sequence
  Synthetic oligonucleotide
tggttgagtctagtcaacggtaagaactgc

SEQ ID NO: 73497 - DNA, 30 bp, Artificial Sequence
  Synthetic oligonucleotide
agatgtcgttggaccgtcgtttagaactgc

SEQ ID NO: 73498 - DNA, 30 bp, Artificial Sequence
  Synthetic oligonucleotide
aactatagcgcatgcggtgctcaacactgc

SEQ ID NO: 73499 - DNA, 30 bp, Artificial Sequence
  Synthetic oligonucleotide
ccgattatgccatcccacaacgttcactgc

SEQ ID NO: 73500 - DNA, 30 bp, Artificial Sequence
  Synthetic oligonucleotide
ctatggaggtggtcagattagaaggactgc

SEQ ID NO: 73501 - DNA, 30 bp, Artificial Sequence
  Synthetic oligonucleotide
tatgcgaaggacatgttaaaaaactactgc

SEQ ID NO: 73502 - DNA, 30 bp, Artificial Sequence
  Synthetic oligonucleotide
agcgaacacgatgagatggacactacctgc

SEQ ID NO: 73503 - DNA, 30 bp, Artificial Sequence
  Synthetic oligonucleotide
tcgggactgtgagatctaacctagccctgc

SEQ ID NO: 73504 - DNA, 30 bp, Artificial Sequence
  Synthetic oligonucleotide
atgtaaaagaacaaagtgtaatacgcctgc

SEQ ID NO: 73505 - DNA, 30 bp, Artificial Sequence
  Synthetic oligonucleotide
aactgggacgtggtgctctcgattgcctgc

SEQ ID NO: 73506 - DNA, 30 bp, Artificial Sequence
  Synthetic oligonucleotide
tgtgtaaacactacgaactgggtaagctgc

SEQ ID NO: 73507 - DNA, 30 bp, Artificial Sequence
  Synthetic oligonucleotide
atggggcaattagtatcgcgcacacgctgc

SEQ ID NO: 73508 - DNA, 30 bp, Artificial Sequence
  Synthetic oligonucleotide
ttcaaaggcccgagaacataggggggctgc

SEQ ID NO: 73509 - DNA, 30 bp, Artificial Sequence
  Synthetic oligonucleotide
ctgatccaggaccgatcgaacgctggctgc

SEQ ID NO: 73510 - DNA, 30 bp, Artificial Sequence
  Synthetic oligonucleotide
caaaccgcgaacgggggctcgacccagtgc

SEQ ID NO: 73511 - DNA, 30 bp, Artificial Sequence
  Synthetic oligonucleotide
tcctgaacatgtaacgatttgggccagtgc

SEQ ID NO: 73512 - DNA, 30 bp, Artificial Sequence
  Synthetic oligonucleotide
gtaccaagaagagatgatatttgccagtgc

SEQ ID NO: 73513 - DNA, 30 bp, Artificial Sequence
  Synthetic oligonucleotide
acaatgattcagccgtggccaatccagtgc

SEQ ID NO: 73514 - DNA, 30 bp, Artificial Sequence
  Synthetic oligonucleotide
tccagggaaggtgtgacaaaaatgcagtgc

SEQ ID NO: 73515 - DNA, 30 bp, Artificial Sequence
  Synthetic oligonucleotide
aactagagtagcaagctctcaaacaggtgc

SEQ ID NO: 73516 - DNA, 30 bp, Artificial Sequence
  Synthetic oligonucleotide
tccttcgtcatattcatcatacgagggtgc

SEQ ID NO: 73517 - DNA, 30 bp, Artificial Sequence
  Synthetic oligonucleotide
acctcaaaacaggttgaaacttgagggtgc

SEQ ID NO: 73518 - DNA, 30 bp, Artificial Sequence
  Synthetic oligonucleotide
acaggcctgccgtgggggagattaatgtgc

SEQ ID NO: 73519 - DNA, 30 bp, Artificial Sequence
  Synthetic oligonucleotide
gtcgagctagctttgtcaatacagctgtgc

SEQ ID NO: 73520 - DNA, 30 bp, Artificial Sequence
  Synthetic oligonucleotide
atggtatgggctagtcaagtctaagtgtgc

SEQ ID NO: 73521 - DNA, 30 bp, Artificial Sequence
  Synthetic oligonucleotide
cgatgaccaaggccgtaagcgtgcaattgc

SEQ ID NO: 73522 - DNA, 30 bp, Artificial Sequence
  Synthetic oligonucleotide
tcctcagtgcgccgtaattatgagaattgc

SEQ ID NO: 73523 - DNA, 30 bp, Artificial Sequence
  Synthetic oligonucleotide
cttaacttaccccgaggggaatcgaattgc

SEQ ID NO: 73524 - DNA, 30 bp, Artificial Sequence
  Synthetic oligonucleotide
gagaggggcgcaaacagtgagccacattgc

SEQ ID NO: 73525 - DNA, 30 bp, Artificial Sequence
  Synthetic oligonucleotide
gggatgagtcaacataaggaataggattgc

SEQ ID NO: 73526 - DNA, 30 bp, Artificial Sequence
  Synthetic oligonucleotide
aaagaccagaggccgtcattatgggattgc

SEQ ID NO: 73527 - DNA, 30 bp, Artificial Sequence
  Synthetic oligonucleotide
cacagacatggctttaccagctcaacttgc

SEQ ID NO: 73528 - DNA, 30 bp, Artificial Sequence
  Synthetic oligonucleotide
ctaacgcgagggggagtatgtattacttgc

SEQ ID NO: 73529 - DNA, 30 bp, Artificial Sequence
  Synthetic oligonucleotide
agacaaactgtcaaagttcccagcccttgc

SEQ ID NO: 73530 - DNA, 30 bp, Artificial Sequence
  Synthetic oligonucleotide
gaagcgatataaacctcggacaaggcttgc

SEQ ID NO: 73531 - DNA, 30 bp, Artificial Sequence
  Synthetic oligonucleotide
ttgacatacagagtaagcccagacagttgc

SEQ ID NO: 73532 - DNA, 30 bp, Artificial Sequence
  Synthetic oligonucleotide
cggaatcagaacgtcgccttacggagttgc

SEQ ID NO: 73533 - DNA, 30 bp, Artificial Sequence
  Synthetic oligonucleotide
tagggacgtgtaagtcgaaccgtaggttgc

SEQ ID NO: 73534 - DNA, 30 bp, Artificial Sequence
  Synthetic oligonucleotide
cggagagtacggtgatcttacgttggttgc

SEQ ID NO: 73535 - DNA, 30 bp, Artificial Sequence
  Synthetic oligonucleotide
ggcggccaatcctgctattactaagaaatc

SEQ ID NO: 73536 - DNA, 30 bp, Artificial Sequence
  Synthetic oligonucleotide
acttcggtgggtacacaggagcaagcaatc

SEQ ID NO: 73537 - DNA, 30 bp, Artificial Sequence
  Synthetic oligonucleotide
gtgctactatgcgcgcggagtcgagcaatc

SEQ ID NO: 73538 - DNA, 30 bp, Artificial Sequence
  Synthetic oligonucleotide
ggaactcataacggtaagacatgggcaatc

SEQ ID NO: 73539 - DNA, 30 bp, Artificial Sequence
  Synthetic oligonucleotide
agcggtggaatatgggaaacctgtgcaatc

SEQ ID NO: 73540 - DNA, 30 bp, Artificial Sequence
  Synthetic oligonucleotide
acctcgtgttacatgaagtgctcacgaatc

SEQ ID NO: 73541 - DNA, 30 bp, Artificial Sequence
  Synthetic oligonucleotide
taaacgtagctcagtataaagggccgaatc

SEQ ID NO: 73542 - DNA, 30 bp, Artificial Sequence
  Synthetic oligonucleotide
ccgagatatgagtttagagaaaagcgaatc

SEQ ID NO: 73543 - DNA, 30 bp, Artificial Sequence
  Synthetic oligonucleotide
cgtcaattctcggcacggtatgttcgaatc

SEQ ID NO: 73544 - DNA, 30 bp, Artificial Sequence
  Synthetic oligonucleotide
ggaaaccgggaaaacacagtatgcggaatc

SEQ ID NO: 73545 - DNA, 30 bp, Artificial Sequence
  Synthetic oligonucleotide
cagggacatgaattgtgtttgccgggaatc

SEQ ID NO: 73546 - DNA, 30 bp, Artificial Sequence
  Synthetic oligonucleotide
cgctgtcagaccgaaaacactaggggaatc

SEQ ID NO: 73547 - DNA, 30 bp, Artificial Sequence
  Synthetic oligonucleotide
taaccgaagtatagtatctcacaatgaatc

SEQ ID NO: 73548 - DNA, 30 bp, Artificial Sequence
  Synthetic oligonucleotide
gacgacgaggaatgtgctacttactgaatc

SEQ ID NO: 73549 - DNA, 30 bp, Artificial Sequence
  Synthetic oligonucleotide
gaaacggggacaaacagttcaatactaatc

SEQ ID NO: 73550 - DNA, 30 bp, Artificial Sequence
  Synthetic oligonucleotide
cactaacctctcacaatcaggaaagtaatc

SEQ ID NO: 73551 - DNA, 30 bp, Artificial Sequence
  Synthetic oligonucleotide
agtgtcataacgtagtgtggggagttaatc

SEQ ID NO: 73552 - DNA, 30 bp, Artificial Sequence
  Synthetic oligonucleotide
tgggggttcgttgagagcagaggaaacatc

SEQ ID NO: 73553 - DNA, 30 bp, Artificial Sequence
  Synthetic oligonucleotide
cgttgtaggtctaagaagatagtaaacatc

SEQ ID NO: 73554 - DNA, 30 bp, Artificial Sequence
  Synthetic oligonucleotide
ctaaaagctaaaccctaaagagagaacatc

SEQ ID NO: 73555 - DNA, 30 bp, Artificial Sequence
  Synthetic oligonucleotide
gacaaaagcgcccctcatgtagaccacatc

SEQ ID NO: 73556 - DNA, 30 bp, Artificial Sequence
  Synthetic oligonucleotide
tcccgaagaaaatgagcggggtcccacatc

SEQ ID NO: 73557 - DNA, 30 bp, Artificial Sequence
  Synthetic oligonucleotide
ggcagaaaattaagttcacctcatcacatc

SEQ ID NO: 73558 - DNA, 30 bp, Artificial Sequence
  Synthetic oligonucleotide
cacgccggccgacattaatgcggcgacatc

SEQ ID NO: 73559 - DNA, 30 bp, Artificial Sequence
  Synthetic oligonucleotide
gaaacgataccataaagaaaggaatacatc

SEQ ID NO: 73560 - DNA, 30 bp, Artificial Sequence
  Synthetic oligonucleotide
actgagtaaggcaatgcgagagcgaccatc

SEQ ID NO: 73561 - DNA, 30 bp, Artificial Sequence
  Synthetic oligonucleotide
acagatacaaccacactttggcttcccatc

SEQ ID NO: 73562 - DNA, 30 bp, Artificial Sequence
  Synthetic oligonucleotide
gggtccgggggaattgctgtgcgtgccatc

SEQ ID NO: 73563 - DNA, 30 bp, Artificial Sequence
  Synthetic oligonucleotide
tgtagtaacagtaatagtgtcttatccatc

SEQ ID NO: 73564 - DNA, 30 bp, Artificial Sequence
  Synthetic oligonucleotide
ctagtgttagaggaacgtggtatctccatc

SEQ ID NO: 73565 - DNA, 30 bp, Artificial Sequence
  Synthetic oligonucleotide
gtgtgaaaaaggtcgagatcaatttccatc

SEQ ID NO: 73566 - DNA, 30 bp, Artificial Sequence
  Synthetic oligonucleotide
ggacagtacacagtgacagactgtagcatc

SEQ ID NO: 73567 - DNA, 30 bp, Artificial Sequence
  Synthetic oligonucleotide
ccgaagctgaggcacgacacctctcgcatc

SEQ ID NO: 73568 - DNA, 30 bp, Artificial Sequence
  Synthetic oligonucleotide
cggggcaatacatcatagcaaattcgcatc

SEQ ID NO: 73569 - DNA, 30 bp, Artificial Sequence
  Synthetic oligonucleotide
ttacgaggaattgttggggggaaaggcatc

SEQ ID NO: 73570 - DNA, 30 bp, Artificial Sequence
  Synthetic oligonucleotide
ggtattattaatcaataacacgaatgcatc

SEQ ID NO: 73571 - DNA, 30 bp, Artificial Sequence
  Synthetic oligonucleotide
caaacgagcgagactaactgcggcatcatc

SEQ ID NO: 73572 - DNA, 30 bp, Artificial Sequence
  Synthetic oligonucleotide
ggtcaggtccatgctaattcagcgctcatc

SEQ ID NO: 73573 - DNA, 30 bp, Artificial Sequence
  Synthetic oligonucleotide
cggtgaactcttgggcaagatttgctcatc

SEQ ID NO: 73574 - DNA, 30 bp, Artificial Sequence
  Synthetic oligonucleotide
caaatatgccgaactaatcctgctgtcatc

SEQ ID NO: 73575 - DNA, 30 bp, Artificial Sequence
  Synthetic oligonucleotide
aagtgaatatagaccagccacataaagatc

SEQ ID NO: 73576 - DNA, 30 bp, Artificial Sequence
  Synthetic oligonucleotide
gggaacgtgctactactcattgtaaagatc

SEQ ID NO: 73577 - DNA, 30 bp, Artificial Sequence
  Synthetic oligonucleotide
gacgaatccgttaaaggctgacagaagatc

SEQ ID NO: 73578 - DNA, 30 bp, Artificial Sequence
  Synthetic oligonucleotide
gctgttatcacatcatccgtacaccagatc

SEQ ID NO: 73579 - DNA, 30 bp, Artificial Sequence
  Synthetic oligonucleotide
cgctgtcggtaggtggcaactgaagagatc

SEQ ID NO: 73580 - DNA, 30 bp, Artificial Sequence
  Synthetic oligonucleotide
tcgttcggatataatgtactagaggagatc

SEQ ID NO: 73581 - DNA, 30 bp, Artificial Sequence
  Synthetic oligonucleotide
ggacatctgaacgtactcgaaaagacgatc

SEQ ID NO: 73582 - DNA, 30 bp, Artificial Sequence
  Synthetic oligonucleotide
acgcggtaacggagggtctctagtacgatc

SEQ ID NO: 73583 - DNA, 30 bp, Artificial Sequence
  Synthetic oligonucleotide
tcgtgcgcttcatgagtacacatgccgatc

SEQ ID NO: 73584 - DNA, 30 bp, Artificial Sequence
  Synthetic oligonucleotide
cgtggagcatccctcacacggaacgcgatc

SEQ ID NO: 73585 - DNA, 30 bp, Artificial Sequence
  Synthetic oligonucleotide
gccatgggtgtccgagcgaagttgtcgatc

SEQ ID NO: 73586 - DNA, 30 bp, Artificial Sequence
  Synthetic oligonucleotide
gccgtagtatcaggaaaaagcaccaggatc

SEQ ID NO: 73587 - DNA, 30 bp, Artificial Sequence
  Synthetic oligonucleotide
tggccgaaagaaacacgttcaatcaggatc

SEQ ID NO: 73588 - DNA, 30 bp, Artificial Sequence
  Synthetic oligonucleotide
taaccaaccgcgaggtccaactatcggatc

SEQ ID NO: 73589 - DNA, 30 bp, Artificial Sequence
  Synthetic oligonucleotide
atgtacaaaggcatattccggtatctgatc

SEQ ID NO: 73590 - DNA, 30 bp, Artificial Sequence
  Synthetic oligonucleotide
tagataaggattaactaaggctagaatatc

SEQ ID NO: 73591 - DNA, 30 bp, Artificial Sequence
  Synthetic oligonucleotide
actacactccaaattcaaagcatgcatatc

SEQ ID NO: 73592 - DNA, 30 bp, Artificial Sequence
  Synthetic oligonucleotide
tcaagtatcctcacggggacgaagactatc

SEQ ID NO: 73593 - DNA, 30 bp, Artificial Sequence
  Synthetic oligonucleotide
cagggcagggaaaaactggctgatgctatc

SEQ ID NO: 73594 - DNA, 30 bp, Artificial Sequence
  Synthetic oligonucleotide
agacctcgtgagtaatggctaaaatctatc

SEQ ID NO: 73595 - DNA, 30 bp, Artificial Sequence
  Synthetic oligonucleotide
atacgctaaggacatgagaacgcgggtatc

SEQ ID NO: 73596 - DNA, 30 bp, Artificial Sequence
  Synthetic oligonucleotide
tcaatacaacatgctgcgttcgaagttatc

SEQ ID NO: 73597 - DNA, 30 bp, Artificial Sequence
  Synthetic oligonucleotide
ggccctacgagagacaaacgggaatttatc

SEQ ID NO: 73598 - DNA, 30 bp, Artificial Sequence
  Synthetic oligonucleotide
gggacgtcaagcctatgacgaaagtttatc

SEQ ID NO: 73599 - DNA, 30 bp, Artificial Sequence
  Synthetic oligonucleotide
tacggtgagccacgagggtgcatcaaactc

SEQ ID NO: 73600 - DNA, 30 bp, Artificial Sequence
  Synthetic oligonucleotide
tggtttaccggaacagggctcaagaaactc

SEQ ID NO: 73601 - DNA, 30 bp, Artificial Sequence
  Synthetic oligonucleotide
catgtaatgaggtaacggaccactacactc

SEQ ID NO: 73602 - DNA, 30 bp, Artificial Sequence
  Synthetic oligonucleotide
cgtgagaggagtcggaaaagacatagactc

SEQ ID NO: 73603 - DNA, 30 bp, Artificial Sequence
  Synthetic oligonucleotide
cggacgacgttcatttaggaactcggactc

SEQ ID NO: 73604 - DNA, 30 bp, Artificial Sequence
  Synthetic oligonucleotide
caatgcgtgtgattagaaggcattggactc

SEQ ID NO: 73605 - DNA, 30 bp, Artificial Sequence
  Synthetic oligonucleotide
cacacaaaacgtagtactccaaaaatactc

SEQ ID NO: 73606 - DNA, 31 bp, Artificial Sequence
  Synthetic oligonucleotide
agggaggcacggttttcaagtctaaaacctc

SEQ ID NO: 73607 - DNA, 30 bp, Artificial Sequence
  Synthetic oligonucleotide
aagtcagtgcaactgtgcaacgacaacctc

SEQ ID NO: 73608 - DNA, 30 bp, Artificial Sequence
  Synthetic oligonucleotide
gcagcaaacacatcaggacatccccacctc

SEQ ID NO: 73609 - DNA, 30 bp, Artificial Sequence
  Synthetic oligonucleotide
cagtacatatagcaaaaaaagcaaaccctc

SEQ ID NO: 73610 - DNA, 30 bp, Artificial Sequence
  Synthetic oligonucleotide
tggtaataacagattggtaggcacaccctc

SEQ ID NO: 73611 - DNA, 30 bp, Artificial Sequence
  Synthetic oligonucleotide
atcgctaaaggtgatagcacatctaccctc

SEQ ID NO: 73612 - DNA, 30 bp, Artificial Sequence
  Synthetic oligonucleotide
gatgataaagggcaggagatgaatagcctc

SEQ ID NO: 73613 - DNA, 30 bp, Artificial Sequence
  Synthetic oligonucleotide
cgggtacggaccactaaatttcggatcctc

SEQ ID NO: 73614 - DNA, 30 bp, Artificial Sequence
  Synthetic oligonucleotide
acgagaaaaactgaaatctgactactcctc

SEQ ID NO: 73615 - DNA, 30 bp, Artificial Sequence
  Synthetic oligonucleotide
tcgagcgcacgtgaggcttagggcgtcctc

SEQ ID NO: 73616 - DNA, 30 bp, Artificial Sequence
  Synthetic oligonucleotide
atggccaggcttagggggctagtgttcctc

SEQ ID NO: 73617 - DNA, 30 bp, Artificial Sequence
  Synthetic oligonucleotide
tggacctgggtgcacgtcaaaacgaagctc

SEQ ID NO: 73618 - DNA, 30 bp, Artificial Sequence
  Synthetic oligonucleotide
agaccagtcaaactgccaagggttaagctc

SEQ ID NO: 73619 - DNA, 30 bp, Artificial Sequence
  Synthetic oligonucleotide
gacaaagatcgaacagctgacccacagctc

SEQ ID NO: 73620 - DNA, 30 bp, Artificial Sequence
  Synthetic oligonucleotide
tcctactagacccggcccgacaaagagctc

SEQ ID NO: 73621 - DNA, 30 bp, Artificial Sequence
  Synthetic oligonucleotide
cacgataatggatcttaaaggtccgagctc

SEQ ID NO: 73622 - DNA, 30 bp, Artificial Sequence
  Synthetic oligonucleotide
ttaggacatgagtgatatggggcttagctc

SEQ ID NO: 73623 - DNA, 30 bp, Artificial Sequence
  Synthetic oligonucleotide
aacatagcaatatccagttgaatcccgctc

SEQ ID NO: 73624 - DNA, 30 bp, Artificial Sequence
  Synthetic oligonucleotide
ttcctccaaacgaaaacaacactcccgctc

SEQ ID NO: 73625 - DNA, 31 bp, Artificial Sequence
  Synthetic oligonucleotide
atgccggattatgccgaaggcgaaagcgctc

SEQ ID NO: 73626 - DNA, 30 bp, Artificial Sequence
  Synthetic oligonucleotide
ctcaaatccgcaccataatagcagaggctc

SEQ ID NO: 73627 - DNA, 30 bp, Artificial Sequence
  Synthetic oligonucleotide
tggcaacgttacaaacgatgctttgggctc

SEQ ID NO: 73628 - DNA, 30 bp, Artificial Sequence
  Synthetic oligonucleotide
aggcaccgagaggttctcaaatgggtgctc

SEQ ID NO: 73629 - DNA, 30 bp, Artificial Sequence
  Synthetic oligonucleotide
gggatcgctaacagtgctacgaacactctc

SEQ ID NO: 73630 - DNA, 30 bp, Artificial Sequence
  Synthetic oligonucleotide
tagtaagagagtagcagacagcccactctc

SEQ ID NO: 73631 - DNA, 30 bp, Artificial Sequence
  Synthetic oligonucleotide
gggagtcgacgttggtgccgacaatgtctc

SEQ ID NO: 73632 - DNA, 30 bp, Artificial Sequence
  Synthetic oligonucleotide
tcttcctagaaacacagactaagcattctc

SEQ ID NO: 73633 - DNA, 30 bp, Artificial Sequence
  Synthetic oligonucleotide
ccacaacaaccctcaacacttggtattctc

SEQ ID NO: 73634 - DNA, 30 bp, Artificial Sequence
  Synthetic oligonucleotide
tgcgtatagcatggatcgtcgctacttctc

SEQ ID NO: 73635 - DNA, 30 bp, Artificial Sequence
  Synthetic oligonucleotide
aaggttaaccaccacctaggaaaagttctc

SEQ ID NO: 73636 - DNA, 30 bp, Artificial Sequence
  Synthetic oligonucleotide
ttctaggaaaggctggtaaagtgacaagtc

SEQ ID NO: 73637 - DNA, 30 bp, Artificial Sequence
  Synthetic oligonucleotide
tgcagagcgtaaacggttaagtaccaagtc

SEQ ID NO: 73638 - DNA, 30 bp, Artificial Sequence
  Synthetic oligonucleotide
gatggcattgtgcctgcttgagatcaagtc

SEQ ID NO: 73639 - DNA, 30 bp, Artificial Sequence
  Synthetic oligonucleotide
cgctcaacatcaccatcgtgcgggtaagtc

SEQ ID NO: 73640 - DNA, 30 bp, Artificial Sequence
  Synthetic oligonucleotide
tgcgcgctttcgaaaacaaagactacagtc

SEQ ID NO: 73641 - DNA, 30 bp, Artificial Sequence
  Synthetic oligonucleotide
caggcccatgccttcgtaacttctacagtc

SEQ ID NO: 73642 - DNA, 30 bp, Artificial Sequence
  Synthetic oligonucleotide
acgtttaaatcctaacctgcaagtacagtc

SEQ ID NO: 73643 - DNA, 31 bp, Artificial Sequence
  Synthetic oligonucleotide
tgtaagtatagggaagcataatgatccagtc

SEQ ID NO: 73644 - DNA, 30 bp, Artificial Sequence
  Synthetic oligonucleotide
aggtcaacctatctaagtttgcaatcagtc

SEQ ID NO: 73645 - DNA, 30 bp, Artificial Sequence
  Synthetic oligonucleotide
cggcagaggccgactaacgcgctcagagtc

SEQ ID NO: 73646 - DNA, 30 bp, Artificial Sequence
  Synthetic oligonucleotide
gaggatgtgaaactacgggcctaccgagtc

SEQ ID NO: 73647 - DNA, 30 bp, Artificial Sequence
  Synthetic oligonucleotide
ccattgaccaggagcatccaatcgcgagtc

SEQ ID NO: 73648 - DNA, 30 bp, Artificial Sequence
  Synthetic oligonucleotide
aaggaatagtgttagtgacgggttggagtc

SEQ ID NO: 73649 - DNA, 30 bp, Artificial Sequence
  Synthetic oligonucleotide
gcgggcgatcggtggagaagcttttgagtc

SEQ ID NO: 73650 - DNA, 30 bp, Artificial Sequence
  Synthetic oligonucleotide
tacagtaagtgcgatcgataagtactagtc

SEQ ID NO: 73651 - DNA, 30 bp, Artificial Sequence
  Synthetic oligonucleotide
acgctataaatggaagtgagtcttctagtc

SEQ ID NO: 73652 - DNA, 30 bp, Artificial Sequence
  Synthetic oligonucleotide
gcgaaagggtaaaacggccttacgttagtc

SEQ ID NO: 73653 - DNA, 30 bp, Artificial Sequence
  Synthetic oligonucleotide
ggaccagaacagatgcagacctaacacgtc

SEQ ID NO: 73654 - DNA, 30 bp, Artificial Sequence
  Synthetic oligonucleotide
aacaggggaatttactcgtaacgccacgtc

SEQ ID NO: 73655 - DNA, 30 bp, Artificial Sequence
  Synthetic oligonucleotide
tactgaaaaccgctctaggcacggcacgtc

SEQ ID NO: 73656 - DNA, 30 bp, Artificial Sequence
  Synthetic oligonucleotide
agatcggggtgagtgagtacggatcacgtc

SEQ ID NO: 73657 - DNA, 30 bp, Artificial Sequence
  Synthetic oligonucleotide
cagtttgggcgtggtaaccttagagacgtc

SEQ ID NO: 73658 - DNA, 30 bp, Artificial Sequence
  Synthetic oligonucleotide
ttcggcacaccaccttggcccgaggacgtc

SEQ ID NO: 73659 - DNA, 30 bp, Artificial Sequence
  Synthetic oligonucleotide
tcgtcattttggtaagtatgcagggacgtc

SEQ ID NO: 73660 - DNA, 30 bp, Artificial Sequence
  Synthetic oligonucleotide
gggccgacgatagcccgtgagtgtgacgtc

SEQ ID NO: 73661 - DNA, 30 bp, Artificial Sequence
  Synthetic oligonucleotide
ccgctaaggccgtatacgttcccacccgtc

SEQ ID NO: 73662 - DNA, 30 bp, Artificial Sequence
  Synthetic oligonucleotide
agacaggctaacatcgctgtgcgagccgtc

SEQ ID NO: 73663 - DNA, 30 bp, Artificial Sequence
  Synthetic oligonucleotide
acaccccattctaaagaatgagcatccgtc

SEQ ID NO: 73664 - DNA, 30 bp, Artificial Sequence
  Synthetic oligonucleotide
atgggtagccacgcccgtatacgctccgtc

SEQ ID NO: 73665 - DNA, 30 bp, Artificial Sequence
  Synthetic oligonucleotide
agaatatacaattcgtggggctgttccgtc

SEQ ID NO: 73666 - DNA, 30 bp, Artificial Sequence
  Synthetic oligonucleotide
ggacagcatggcatatcactcggaagcgtc

SEQ ID NO: 73667 - DNA, 30 bp, Artificial Sequence
  Synthetic oligonucleotide
tcgtgatgttgactcacccggatacgcgtc

SEQ ID NO: 73668 - DNA, 30 bp, Artificial Sequence
  Synthetic oligonucleotide
ggacttacaggtacggtcgatatgggcgtc

SEQ ID NO: 73669 - DNA, 30 bp, Artificial Sequence
  Synthetic oligonucleotide
gccaaaaaagataaaatgcgagtctgcgtc

SEQ ID NO: 73670 - DNA, 30 bp, Artificial Sequence
  Synthetic oligonucleotide
cagcgcgcaaatgcctctagcaggatcgtc

SEQ ID NO: 73671 - DNA, 30 bp, Artificial Sequence
  Synthetic oligonucleotide
aggtgagtccggtccggatgtcctatcgtc

SEQ ID NO: 73672 - DNA, 30 bp, Artificial Sequence
  Synthetic oligonucleotide
caagtacctaacggtcggccaagagtcgtc

SEQ ID NO: 73673 - DNA, 30 bp, Artificial Sequence
  Synthetic oligonucleotide
caatgcaagtcagatgtataaaatgtcgtc

SEQ ID NO: 73674 - DNA, 30 bp, Artificial Sequence
  Synthetic oligonucleotide
gcggcggatgcccgaaatgtaacgttcgtc

SEQ ID NO: 73675 - DNA, 30 bp, Artificial Sequence
  Synthetic oligonucleotide
agatcacaaagttgaaaccagacaaaggtc

SEQ ID NO: 73676 - DNA, 30 bp, Artificial Sequence
  Synthetic oligonucleotide
gcatgatcaaaaccgcagcgagccaaggtc

SEQ ID NO: 73677 - DNA, 30 bp, Artificial Sequence
  Synthetic oligonucleotide
taaacatttaacgcgccggaaaagaaggtc

SEQ ID NO: 73678 - DNA, 30 bp, Artificial Sequence
  Synthetic oligonucleotide
cgttgagaagcgtttagggcatagaaggtc

SEQ ID NO: 73679 - DNA, 30 bp, Artificial Sequence
  Synthetic oligonucleotide
atgcataggagtctagccacaagtaaggtc

SEQ ID NO: 73680 - DNA, 30 bp, Artificial Sequence
  Synthetic oligonucleotide
acggatatttaggatcagggctctcaggtc

SEQ ID NO: 73681 - DNA, 30 bp, Artificial Sequence
  Synthetic oligonucleotide
actaaaggtatggctatgtctaacgaggtc

SEQ ID NO: 73682 - DNA, 30 bp, Artificial Sequence
  Synthetic oligonucleotide
catggaggctaaagagtcgaaaatgaggtc

SEQ ID NO: 73683 - DNA, 30 bp, Artificial Sequence
  Synthetic oligonucleotide
caggatgggtgatggaagagaattgaggtc

SEQ ID NO: 73684 - DNA, 30 bp, Artificial Sequence
  Synthetic oligonucleotide
gacgaagagtccctacagagaagaacggtc

SEQ ID NO: 73685 - DNA, 30 bp, Artificial Sequence
  Synthetic oligonucleotide
ttcagccgggcacgatgggagggatcggtc

SEQ ID NO: 73686 - DNA, 30 bp, Artificial Sequence
  Synthetic oligonucleotide
cgaggtgtagagacaaatgatggatcggtc

SEQ ID NO: 73687 - DNA, 30 bp, Artificial Sequence
  Synthetic oligonucleotide
acaggagttagtgctttacacacgtcggtc

SEQ ID NO: 73688 - DNA, 30 bp, Artificial Sequence
  Synthetic oligonucleotide
agaaactcgggaaggtacttagccagggtc

SEQ ID NO: 73689 - DNA, 30 bp, Artificial Sequence
  Synthetic oligonucleotide
acacactctattgaattaatcggtcgggtc

SEQ ID NO: 73690 - DNA, 30 bp, Artificial Sequence
  Synthetic oligonucleotide
cggagcgagtatactagtcggacaggggtc

SEQ ID NO: 73691 - DNA, 30 bp, Artificial Sequence
  Synthetic oligonucleotide
tcagagaattgcgactttcgaatgggggtc

SEQ ID NO: 73692 - DNA, 30 bp, Artificial Sequence
  Synthetic oligonucleotide
ataaggatgcgactcaaaatatgtgtggtc

SEQ ID NO: 73693 - DNA, 30 bp, Artificial Sequence
  Synthetic oligonucleotide
caaagtacggaggaaaatcgggttgtggtc

SEQ ID NO: 73694 - DNA, 30 bp, Artificial Sequence
  Synthetic oligonucleotide
ccagacgaaactatgaagtcgaccttggtc

SEQ ID NO: 73695 - DNA, 30 bp, Artificial Sequence
  Synthetic oligonucleotide
tccatgaaacaataataggtcagcaatgtc

SEQ ID NO: 73696 - DNA, 30 bp, Artificial Sequence
  Synthetic oligonucleotide
cataagcgggggtaggttagccctaatgtc

SEQ ID NO: 73697 - DNA, 30 bp, Artificial Sequence
  Synthetic oligonucleotide
gcacggtagcggaacatcgtcatccatgtc

SEQ ID NO: 73698 - DNA, 30 bp, Artificial Sequence
  Synthetic oligonucleotide
caacgcattaagcgcaaaatatcgcatgtc

SEQ ID NO: 73699 - DNA, 30 bp, Artificial Sequence
  Synthetic oligonucleotide
tgtgagagatcggttaaataagccgatgtc

SEQ ID NO: 73700 - DNA, 30 bp, Artificial Sequence
  Synthetic oligonucleotide
cctgccgagaggtggggcctggaatatgtc

SEQ ID NO: 73701 - DNA, 30 bp, Artificial Sequence
  Synthetic oligonucleotide
aggaacgacgcggaccggacgcgcactgtc

SEQ ID NO: 73702 - DNA, 30 bp, Artificial Sequence
  Synthetic oligonucleotide
atccgtgcaggcgaatcgacgcgtactgtc

SEQ ID NO: 73703 - DNA, 30 bp, Artificial Sequence
  Synthetic oligonucleotide
agccaatggaagtggggcaggtcaggtgtc

SEQ ID NO: 73704 - DNA, 30 bp, Artificial Sequence
  Synthetic oligonucleotide
tccaaggcgtgcgtagaagcgcagggtgtc

SEQ ID NO: 73705 - DNA, 30 bp, Artificial Sequence
  Synthetic oligonucleotide
catgggaggccactttggctgggtggtgtc

SEQ ID NO: 73706 - DNA, 30 bp, Artificial Sequence
  Synthetic oligonucleotide
cctgaagtagtatggtgagcgtgctgtgtc

SEQ ID NO: 73707 - DNA, 30 bp, Artificial Sequence
  Synthetic oligonucleotide
ggaggctgagggtcgtcgctagaccttgtc

SEQ ID NO: 73708 - DNA, 30 bp, Artificial Sequence
  Synthetic oligonucleotide
tcgacggctggagcgaaacggccgcttgtc

SEQ ID NO: 73709 - DNA, 30 bp, Artificial Sequence
  Synthetic oligonucleotide
cgattagcgtgccggaagatagttcttgtc

SEQ ID NO: 73710 - DNA, 30 bp, Artificial Sequence
  Synthetic oligonucleotide
gctggcgacagatgcgcgcgtggcgaattc

SEQ ID NO: 73711 - DNA, 30 bp, Artificial Sequence
  Synthetic oligonucleotide
ccgagctgaacaatacgaacgtgcgaattc

SEQ ID NO: 73712 - DNA, 30 bp, Artificial Sequence
  Synthetic oligonucleotide
cgaaactatcagcctaatcgtcaggaattc

SEQ ID NO: 73713 - DNA, 30 bp, Artificial Sequence
  Synthetic oligonucleotide
agagatggggtgagagcccccgatgaattc

SEQ ID NO: 73714 - DNA, 30 bp, Artificial Sequence
  Synthetic oligonucleotide
agaatgtttgaggaagaccaggaataattc

SEQ ID NO: 73715 - DNA, 30 bp, Artificial Sequence
  Synthetic oligonucleotide
cctcgggtgaattagtatcggccggcattc

SEQ ID NO: 73716 - DNA, 30 bp, Artificial Sequence
  Synthetic oligonucleotide
tataatgaaataggggtcaaaaggcgattc

SEQ ID NO: 73717 - DNA, 30 bp, Artificial Sequence
  Synthetic oligonucleotide
tggggactccgagggtgacgaaagggattc

SEQ ID NO: 73718 - DNA, 30 bp, Artificial Sequence
  Synthetic oligonucleotide
tgattggtagataacggaccagggtgattc

SEQ ID NO: 73719 - DNA, 30 bp, Artificial Sequence
  Synthetic oligonucleotide
ttgcgtctgtaacggcaatggtgactattc

SEQ ID NO: 73720 - DNA, 30 bp, Artificial Sequence
  Synthetic oligonucleotide
gaagaatgggataggcatcatgctgtattc

SEQ ID NO: 73721 - DNA, 30 bp, Artificial Sequence
  Synthetic oligonucleotide
ccgcatactggtcagacatctggaaacttc

SEQ ID NO: 73722 - DNA, 30 bp, Artificial Sequence
  Synthetic oligonucleotide
ccaatcgaccttgtgaccagtcgacacttc

SEQ ID NO: 73723 - DNA, 31 bp, Artificial Sequence
  Synthetic oligonucleotide
atgcgacgttctaaggtggcagcctgacttc

SEQ ID NO: 73724 - DNA, 30 bp, Artificial Sequence
  Synthetic oligonucleotide
gataccttgccagaatgccgtccttacttc

SEQ ID NO: 73725 - DNA, 30 bp, Artificial Sequence
  Synthetic oligonucleotide
tcgaacagtccgattttaaggccaaccttc

SEQ ID NO: 73726 - DNA, 30 bp, Artificial Sequence
  Synthetic oligonucleotide
agtaacaaccgccagtcttctgagaccttc

SEQ ID NO: 73727 - DNA, 30 bp, Artificial Sequence
  Synthetic oligonucleotide
aacgtcgtgctaagcgatgacagacccttc

SEQ ID NO: 73728 - DNA, 30 bp, Artificial Sequence
  Synthetic oligonucleotide
catctagagacggtgatgtttgtcgccttc

SEQ ID NO: 73729 - DNA, 30 bp, Artificial Sequence
  Synthetic oligonucleotide
ccgattggcatcctagaccacgatatcttc

SEQ ID NO: 73730 - DNA, 30 bp, Artificial Sequence
  Synthetic oligonucleotide
tgggggcacaattgcggatacggaaagttc

SEQ ID NO: 73731 - DNA, 30 bp, Artificial Sequence
  Synthetic oligonucleotide
tcagggggtagggcgggaaaactcaagttc

SEQ ID NO: 73732 - DNA, 30 bp, Artificial Sequence
  Synthetic oligonucleotide
caaggattcgcccggatcgaagtccagttc

SEQ ID NO: 73733 - DNA, 30 bp, Artificial Sequence
  Synthetic oligonucleotide
aatagaagttggggacaggcgcgtgagttc

SEQ ID NO: 73734 - DNA, 30 bp, Artificial Sequence
  Synthetic oligonucleotide
cgaaaatcgttgggctaaaaccgctagttc

SEQ ID NO: 73735 - DNA, 30 bp, Artificial Sequence
  Synthetic oligonucleotide
ggaactggcgggccaagagagcgctagttc

SEQ ID NO: 73736 - DNA, 30 bp, Artificial Sequence
  Synthetic oligonucleotide
gggccggaaatatagagtgggcctacgttc

SEQ ID NO: 73737 - DNA, 30 bp, Artificial Sequence
  Synthetic oligonucleotide
tgaaataagaaatatcagctgatgccgttc

SEQ ID NO: 73738 - DNA, 30 bp, Artificial Sequence
  Synthetic oligonucleotide
tcgggcgactgatgcttagtttcagcgttc

SEQ ID NO: 73739 - DNA, 30 bp, Artificial Sequence
  Synthetic oligonucleotide
cattgagacagatgtggaggcgagtcgttc

SEQ ID NO: 73740 - DNA, 30 bp, Artificial Sequence
  Synthetic oligonucleotide
cgcccaaatctactccaggcgacgtcgttc

SEQ ID NO: 73741 - DNA, 30 bp, Artificial Sequence
  Synthetic oligonucleotide
ttgggagggaacgttaacctcccgtcgttc

SEQ ID NO: 73742 - DNA, 30 bp, Artificial Sequence
  Synthetic oligonucleotide
tcgaattcgttcaagtaagccctgtcgttc

SEQ ID NO: 73743 - DNA, 30 bp, Artificial Sequence
  Synthetic oligonucleotide
cgtaaaccatcgtgcatcacagaaaggttc

SEQ ID NO: 73744 - DNA, 30 bp, Artificial Sequence
  Synthetic oligonucleotide
gtgcagtaccacgtccgaagaaataggttc

SEQ ID NO: 73745 - DNA, 30 bp, Artificial Sequence
  Synthetic oligonucleotide
tctgacttcaatcggtaggtcgataggttc

SEQ ID NO: 73746 - DNA, 30 bp, Artificial Sequence
  Synthetic oligonucleotide
tgtggcgtgtatctatggacattggggttc

SEQ ID NO: 73747 - DNA, 30 bp, Artificial Sequence
  Synthetic oligonucleotide
gggctgaaaacctgagatatggttgggttc

SEQ ID NO: 73748 - DNA, 30 bp, Artificial Sequence
  Synthetic oligonucleotide
aagaacgtacccagtgtataaaactggttc

SEQ ID NO: 73749 - DNA, 30 bp, Artificial Sequence
  Synthetic oligonucleotide
tgccggcgggaatatcaactcactatgttc

SEQ ID NO: 73750 - DNA, 30 bp, Artificial Sequence
  Synthetic oligonucleotide
gattgaagattaaacaaactatcgctgttc

SEQ ID NO: 73751 - DNA, 30 bp, Artificial Sequence
  Synthetic oligonucleotide
cgcgcgtgtgtaaagctgatagaagtgttc

SEQ ID NO: 73752 - DNA, 30 bp, Artificial Sequence
  Synthetic oligonucleotide
ggggccctgaagagagccaatcccgtgttc

SEQ ID NO: 73753 - DNA, 30 bp, Artificial Sequence
  Synthetic oligonucleotide
agcgacgaaaggctaagggatccggtgttc

SEQ ID NO: 73754 - DNA, 30 bp, Artificial Sequence
  Synthetic oligonucleotide
cagcaaaacacggaggatcgggcagatttc

SEQ ID NO: 73755 - DNA, 30 bp, Artificial Sequence
  Synthetic oligonucleotide
gccgaacgggacaagacgctgagagatttc

SEQ ID NO: 73756 - DNA, 30 bp, Artificial Sequence
  Synthetic oligonucleotide
gggccgggataaatactaagcaacgatttc

SEQ ID NO: 73757 - DNA, 30 bp, Artificial Sequence
  Synthetic oligonucleotide
cgcacatgtcaataagtgcagaagactttc

SEQ ID NO: 73758 - DNA, 30 bp, Artificial Sequence
  Synthetic oligonucleotide
acgaagcacaattcgtctatacagtctttc

SEQ ID NO: 73759 - DNA, 30 bp, Artificial Sequence
  Synthetic oligonucleotide
gaagggtggactcggtaaaaaccaagtttc

SEQ ID NO: 73760 - DNA, 30 bp, Artificial Sequence
  Synthetic oligonucleotide
tgcaacggacgacgttgggaagagcgtttc

SEQ ID NO: 73761 - DNA, 30 bp, Artificial Sequence
  Synthetic oligonucleotide
tcggggccaaaacaaaagtcgtctggtttc

SEQ ID NO: 73762 - DNA, 30 bp, Artificial Sequence
  Synthetic oligonucleotide
gctcagggaagaaactagccatgatgtttc

SEQ ID NO: 73763 - DNA, 30 bp, Artificial Sequence
  Synthetic oligonucleotide
cacgagtaacatccagaatcacgtcttttc

SEQ ID NO: 73764 - DNA, 30 bp, Artificial Sequence
  Synthetic oligonucleotide
aagataaaagtcacgagtagtgatgttttc

SEQ ID NO: 73765 - DNA, 30 bp, Artificial Sequence
  Synthetic oligonucleotide
aaggccatatcctcgtgtttaacaaaaaag

SEQ ID NO: 73766 - DNA, 30 bp, Artificial Sequence
  Synthetic oligonucleotide
cgatgggagcaactggtaacggctaaaaag

SEQ ID NO: 73767 - DNA, 30 bp, Artificial Sequence
  Synthetic oligonucleotide
agcccgtcaaaagtcacagcattccaaaag

SEQ ID NO: 73768 - DNA, 30 bp, Artificial Sequence
  Synthetic oligonucleotide
cccgccgtggaactgctagcagcggaaaag

SEQ ID NO: 73769 - DNA, 30 bp, Artificial Sequence
  Synthetic oligonucleotide
actcaatgaaatgggctctggggttaaaag

SEQ ID NO: 73770 - DNA, 30 bp, Artificial Sequence
  Synthetic oligonucleotide
cggaccggtgcagttgaatgccacacaaag

SEQ ID NO: 73771 - DNA, 30 bp, Artificial Sequence
  Synthetic oligonucleotide
gcggcggtgataggtggatgcgacacaaag

SEQ ID NO: 73772 - DNA, 30 bp, Artificial Sequence
  Synthetic oligonucleotide
ctagaacgaccatacgtcagtaatacaaag

SEQ ID NO: 73773 - DNA, 30 bp, Artificial Sequence
  Synthetic oligonucleotide
tgttgaagtagcctcgctgatattacaaag

SEQ ID NO: 73774 - DNA, 30 bp, Artificial Sequence
  Synthetic oligonucleotide
agtatcgacgactgagagagcgcaccaaag

SEQ ID NO: 73775 - DNA, 30 bp, Artificial Sequence
  Synthetic oligonucleotide
ctggcccgcccaagttactttaacccaaag

SEQ ID NO: 73776 - DNA, 30 bp, Artificial Sequence
  Synthetic oligonucleotide
taggcaaattgatcggcgcttaggccaaag

SEQ ID NO: 73777 - DNA, 30 bp, Artificial Sequence
  Synthetic oligonucleotide
gaaaccactggaggtgactcgaaagcaaag

SEQ ID NO: 73778 - DNA, 30 bp, Artificial Sequence
  Synthetic oligonucleotide
ggtctagtaccacgacaagctacggcaaag

SEQ ID NO: 73779 - DNA, 30 bp, Artificial Sequence
  Synthetic oligonucleotide
catattgggttaagattcagtggggcaaag

SEQ ID NO: 73780 - DNA, 30 bp, Artificial Sequence
  Synthetic oligonucleotide
gttgaaaagtctgtgtagcggcgaagaaag

SEQ ID NO: 73781 - DNA, 30 bp, Artificial Sequence
  Synthetic oligonucleotide
accctattagagactcacgaactaagaaag

SEQ ID NO: 73782 - DNA, 30 bp, Artificial Sequence
  Synthetic oligonucleotide
ggagggttgccatgcgaagctatcagaaag

SEQ ID NO: 73783 - DNA, 30 bp, Artificial Sequence
  Synthetic oligonucleotide
tgccatcaataaaactgcgggacgagaaag

SEQ ID NO: 73784 - DNA, 30 bp, Artificial Sequence
  Synthetic oligonucleotide
attagagggcattaaaacaacatacgaaag

SEQ ID NO: 73785 - DNA, 30 bp, Artificial Sequence
  Synthetic oligonucleotide
ggggccacgtctgagggtcccatgcgaaag

SEQ ID NO: 73786 - DNA, 30 bp, Artificial Sequence
  Synthetic oligonucleotide
aggacggagatattctttaaacgtcgaaag

SEQ ID NO: 73787 - DNA, 30 bp, Artificial Sequence
  Synthetic oligonucleotide
cgggctaaaactcatttagctcacggaaag

SEQ ID NO: 73788 - DNA, 31 bp, Artificial Sequence
  Synthetic oligonucleotide
ggacttcagtagcatcagttttaagggaaag

SEQ ID NO: 73789 - DNA, 30 bp, Artificial Sequence
  Synthetic oligonucleotide
gttcgcctcaaccttatcacgggtggaaag

SEQ ID NO: 73790 - DNA, 30 bp, Artificial Sequence
  Synthetic oligonucleotide
aatatccgggattatacactaccctgaaag

SEQ ID NO: 73791 - DNA, 30 bp, Artificial Sequence
  Synthetic oligonucleotide
gtcaatcgcacgacggcttcccagtgaaag

SEQ ID NO: 73792 - DNA, 30 bp, Artificial Sequence
  Synthetic oligonucleotide
gaggggagtatctttgtggtcgtgtgaaag

SEQ ID NO: 73793 - DNA, 30 bp, Artificial Sequence
  Synthetic oligonucleotide
ccatgagtccgtaggactcgaagaataaag

SEQ ID NO: 73794 - DNA, 30 bp, Artificial Sequence
  Synthetic oligonucleotide
ttgtgagtgataaataggcctctaataaag

SEQ ID NO: 73795 - DNA, 30 bp, Artificial Sequence
  Synthetic oligonucleotide
actgggggaagatatgagattgtaataaag

SEQ ID NO: 73796 - DNA, 30 bp, Artificial Sequence
  Synthetic oligonucleotide
taaatcgtatgattctgctaaaacctaaag

SEQ ID NO: 73797 - DNA, 30 bp, Artificial Sequence
  Synthetic oligonucleotide
ggtgacggacttaatagaatgagcctaaag

SEQ ID NO: 73798 - DNA, 30 bp, Artificial Sequence
  Synthetic oligonucleotide
tcagataatgcgcaacaaacggtcctaaag

SEQ ID NO: 73799 - DNA, 30 bp, Artificial Sequence
  Synthetic oligonucleotide
tgccaatgtacacgagtttacgcgctaaag

SEQ ID NO: 73800 - DNA, 30 bp, Artificial Sequence
  Synthetic oligonucleotide
tcaatgatgcgcagggattgcagtctaaag

SEQ ID NO: 73801 - DNA, 30 bp, Artificial Sequence
  Synthetic oligonucleotide
gctgaaaccggttcacaacgtagtctaaag

SEQ ID NO: 73802 - DNA, 30 bp, Artificial Sequence
  Synthetic oligonucleotide
caggacaatttctcgtttgggcctgtaaag

SEQ ID NO: 73803 - DNA, 30 bp, Artificial Sequence
  Synthetic oligonucleotide
atgtaccagatcgatgcgagagccttaaag

SEQ ID NO: 73804 - DNA, 30 bp, Artificial Sequence
  Synthetic oligonucleotide
accatcacacgatccgtggttacaaacaag

SEQ ID NO: 73805 - DNA, 30 bp, Artificial Sequence
  Synthetic oligonucleotide
atctaaccgatatttggctccagaaacaag

SEQ ID NO: 73806 - DNA, 30 bp, Artificial Sequence
  Synthetic oligonucleotide
agcacagaagatcaagaggttctaaacaag

SEQ ID NO: 73807 - DNA, 30 bp, Artificial Sequence
  Synthetic oligonucleotide
ctaatgaaagtccgtggtgagtaagacaag

SEQ ID NO: 73808 - DNA, 30 bp, Artificial Sequence
  Synthetic oligonucleotide
ttcgacggtactccagcgtactcagacaag

SEQ ID NO: 73809 - DNA, 30 bp, Artificial Sequence
  Synthetic oligonucleotide
tataggtctaaacaggcgccggtagacaag

SEQ ID NO: 73810 - DNA, 30 bp, Artificial Sequence
  Synthetic oligonucleotide
ctccggcgaaccaagtgactgtccgacaag

SEQ ID NO: 73811 - DNA, 30 bp, Artificial Sequence
  Synthetic oligonucleotide
gtacggccgtcaagcctcgagcaatacaag

SEQ ID NO: 73812 - DNA, 30 bp, Artificial Sequence
  Synthetic oligonucleotide
ctgcatctacgccagttgtgctaatacaag

SEQ ID NO: 73813 - DNA, 30 bp, Artificial Sequence
  Synthetic oligonucleotide
aactaccagcggatggcgagaggatacaag

SEQ ID NO: 73814 - DNA, 30 bp, Artificial Sequence
  Synthetic oligonucleotide
gcaatcccgattaggaagtagtcctacaag

SEQ ID NO: 73815 - DNA, 30 bp, Artificial Sequence
  Synthetic oligonucleotide
gtgaagtccctcatcggaaaacgttacaag

SEQ ID NO: 73816 - DNA, 30 bp, Artificial Sequence
  Synthetic oligonucleotide
acgaaatcggcttagctagaccacaccaag

SEQ ID NO: 73817 - DNA, 30 bp, Artificial Sequence
  Synthetic oligonucleotide
aagaccaaaagacacataccatggaccaag

SEQ ID NO: 73818 - DNA, 30 bp, Artificial Sequence
  Synthetic oligonucleotide
atgcattgcatacaggggctacaacccaag

SEQ ID NO: 73819 - DNA, 30 bp, Artificial Sequence
  Synthetic oligonucleotide
taggcatcgcctaagcagcaaaaagccaag

SEQ ID NO: 73820 - DNA, 30 bp, Artificial Sequence
  Synthetic oligonucleotide
atcgagattcgagagctccgctaagccaag

SEQ ID NO: 73821 - DNA, 30 bp, Artificial Sequence
  Synthetic oligonucleotide
taccggtaaatggatctgctgcgtgccaag

SEQ ID NO: 73822 - DNA, 30 bp, Artificial Sequence
  Synthetic oligonucleotide
tccagtgtagacacaagatatgcaagcaag

SEQ ID NO: 73823 - DNA, 30 bp, Artificial Sequence
  Synthetic oligonucleotide
aggcacatacgagctaaggtcatacgcaag

SEQ ID NO: 73824 - DNA, 30 bp, Artificial Sequence
  Synthetic oligonucleotide
gtggttgttcaactggctagggcgcgcaag

SEQ ID NO: 73825 - DNA, 30 bp, Artificial Sequence
  Synthetic oligonucleotide
ccccgtatagcgcgtcttagagaaggcaag

SEQ ID NO: 73826 - DNA, 30 bp, Artificial Sequence
  Synthetic oligonucleotide
agccggatctgctacgctggcccaggcaag

SEQ ID NO: 73827 - DNA, 30 bp, Artificial Sequence
  Synthetic oligonucleotide
gaggaatcgattgaaggacaaataggcaag

SEQ ID NO: 73828 - DNA, 30 bp, Artificial Sequence
  Synthetic oligonucleotide
agacacaggtcaagttcataactaggcaag

SEQ ID NO: 73829 - DNA, 30 bp, Artificial Sequence
  Synthetic oligonucleotide
ggatcaccttcgacctttcggccgggcaag

SEQ ID NO: 73830 - DNA, 30 bp, Artificial Sequence
  Synthetic oligonucleotide
ggctccagaggaaaagattttcgatgcaag

SEQ ID NO: 73831 - DNA, 30 bp, Artificial Sequence
  Synthetic oligonucleotide
tgtaatggatcatgaatgtggtactgcaag

SEQ ID NO: 73832 - DNA, 30 bp, Artificial Sequence
  Synthetic oligonucleotide
tagctttgatgatatactacctcaatcaag

SEQ ID NO: 73833 - DNA, 30 bp, Artificial Sequence
  Synthetic oligonucleotide
ggcaataacatcccgcaattattaatcaag

SEQ ID NO: 73834 - DNA, 30 bp, Artificial Sequence
  Synthetic oligonucleotide
ggcaagtatgcaagtccgcggaccatcaag

SEQ ID NO: 73835 - DNA, 30 bp, Artificial Sequence
  Synthetic oligonucleotide
cctgaactgttcttgaaattcctcatcaag

SEQ ID NO: 73836 - DNA, 30 bp, Artificial Sequence
  Synthetic oligonucleotide
ggtacgaggtggaacctcttcaaactcaag

SEQ ID NO: 73837 - DNA, 30 bp, Artificial Sequence
  Synthetic oligonucleotide
tggtgaggggtgtggcgctgagacctcaag

SEQ ID NO: 73838 - DNA, 30 bp, Artificial Sequence
  Synthetic oligonucleotide
tgtctcatattcagcaagagaggagtcaag

SEQ ID NO: 73839 - DNA, 30 bp, Artificial Sequence
  Synthetic oligonucleotide
tgtcacgttcgcaacggtgttgtagtcaag

SEQ ID NO: 73840 - DNA, 30 bp, Artificial Sequence
  Synthetic oligonucleotide
ggctgcgagcgacttcgtaagaacgtcaag

SEQ ID NO: 73841 - DNA, 30 bp, Artificial Sequence
  Synthetic oligonucleotide
gtgctgggcgacgaaaacacagccgtcaag

SEQ ID NO: 73842 - DNA, 30 bp, Artificial Sequence
  Synthetic oligonucleotide
tggcgtgctccgtccacggcaagattcaag

SEQ ID NO: 73843 - DNA, 30 bp, Artificial Sequence
  Synthetic oligonucleotide
tgttgaagatcgttcgacttacacttcaag

SEQ ID NO: 73844 - DNA, 30 bp, Artificial Sequence
  Synthetic oligonucleotide
gacagtgggatcatccaagctaccttcaag

SEQ ID NO: 73845 - DNA, 31 bp, Artificial Sequence
  Synthetic oligonucleotide
ttaccgtggcacgatcgttaccagtttcaag

SEQ ID NO: 73846 - DNA, 30 bp, Artificial Sequence
  Synthetic oligonucleotide
tatctattgcgcgaaaagcggtcaaagaag

SEQ ID NO: 73847 - DNA, 30 bp, Artificial Sequence
  Synthetic oligonucleotide
gggaggtcgtgtactccatgcagaaagaag

SEQ ID NO: 73848 - DNA, 30 bp, Artificial Sequence
  Synthetic oligonucleotide
tcaaagtacacagtaaagggaaccaagaag

SEQ ID NO: 73849 - DNA, 30 bp, Artificial Sequence
  Synthetic oligonucleotide
actctggcaggaaaaatcatcaccaagaag

SEQ ID NO: 73850 - DNA, 30 bp, Artificial Sequence
  Synthetic oligonucleotide
ggactaggagacatatgactctccaagaag

SEQ ID NO: 73851 - DNA, 30 bp, Artificial Sequence
  Synthetic oligonucleotide
ataggaagcgtttcagtgctgagacagaag

SEQ ID NO: 73852 - DNA, 30 bp, Artificial Sequence
  Synthetic oligonucleotide
tggccggacggagtatcgaagtcgcagaag

SEQ ID NO: 73853 - DNA, 30 bp, Artificial Sequence
  Synthetic oligonucleotide
ctaaaacaatcagctcgagaattgcagaag

SEQ ID NO: 73854 - DNA, 30 bp, Artificial Sequence
  Synthetic oligonucleotide
aacacagaaatcactgtacggcgtcagaag

SEQ ID NO: 73855 - DNA, 30 bp, Artificial Sequence
  Synthetic oligonucleotide
gacattgtctactgcgataggacagagaag

SEQ ID NO: 73856 - DNA, 30 bp, Artificial Sequence
  Synthetic oligonucleotide
atactcatgccgcgtcggtgttcggagaag

SEQ ID NO: 73857 - DNA, 30 bp, Artificial Sequence
  Synthetic oligonucleotide
actgattgtggcgtccctctggtggagaag

SEQ ID NO: 73858 - DNA, 31 bp, Artificial Sequence
  Synthetic oligonucleotide
aaacgggatatacaggaaaagtcaatagaag

SEQ ID NO: 73859 - DNA, 30 bp, Artificial Sequence
  Synthetic oligonucleotide
acattaagacatttcctcccggactagaag

SEQ ID NO: 73860 - DNA, 30 bp, Artificial Sequence
  Synthetic oligonucleotide
aaagataactcaattgagtagccctagaag

SEQ ID NO: 73861 - DNA, 30 bp, Artificial Sequence
  Synthetic oligonucleotide
ccacccagggattgtagtgcgccgtagaag

SEQ ID NO: 73862 - DNA, 30 bp, Artificial Sequence
  Synthetic oligonucleotide
ctgcagccagatctcgtccaaagttagaag

SEQ ID NO: 73863 - DNA, 30 bp, Artificial Sequence
  Synthetic oligonucleotide
cgcagtcaaagtaagtcaagttaaacgaag

SEQ ID NO: 73864 - DNA, 30 bp, Artificial Sequence
  Synthetic oligonucleotide
tacaaccggaaccaaaggaatgatacgaag

SEQ ID NO: 73865 - DNA, 30 bp, Artificial Sequence
  Synthetic oligonucleotide
gttgaagaaaggtatacttcttcgccgaag

SEQ ID NO: 73866 - DNA, 30 bp, Artificial Sequence
  Synthetic oligonucleotide
aacagtaaaaggaaatggcatctagcgaag

SEQ ID NO: 73867 - DNA, 30 bp, Artificial Sequence
  Synthetic oligonucleotide
gtccagttgtcggggtgtgagtcggcgaag

SEQ ID NO: 73868 - DNA, 30 bp, Artificial Sequence
  Synthetic oligonucleotide
atgggaaaccttgaatacgtttgatcgaag

SEQ ID NO: 73869 - DNA, 30 bp, Artificial Sequence
  Synthetic oligonucleotide
caaacaattccagtaccacggccctcgaag

SEQ ID NO: 73870 - DNA, 30 bp, Artificial Sequence
  Synthetic oligonucleotide
ccagagttggcacaccggcgtacgtcgaag

SEQ ID NO: 73871 - DNA, 30 bp, Artificial Sequence
  Synthetic oligonucleotide
tagctactcaactgaactgatagttcgaag

SEQ ID NO: 73872 - DNA, 30 bp, Artificial Sequence
  Synthetic oligonucleotide
ttcaagcgaggaggttattaccgttcgaag

SEQ ID NO: 73873 - DNA, 30 bp, Artificial Sequence
  Synthetic oligonucleotide
atgagtgctctgcgcagtacagaaaggaag

SEQ ID NO: 73874 - DNA, 30 bp, Artificial Sequence
  Synthetic oligonucleotide
ctggaatctcaaatgctcgcatcaaggaag

SEQ ID NO: 73875 - DNA, 30 bp, Artificial Sequence
  Synthetic oligonucleotide
aaataaagggcgtatctctgcttgaggaag

SEQ ID NO: 73876 - DNA, 30 bp, Artificial Sequence
  Synthetic oligonucleotide
ccgaaaatcgcaactcggagccaacggaag

SEQ ID NO: 73877 - DNA, 30 bp, Artificial Sequence
  Synthetic oligonucleotide
ctgggcttgggtagaatcgtgtcgcggaag

SEQ ID NO: 73878 - DNA, 30 bp, Artificial Sequence
  Synthetic oligonucleotide
gtctgcaataccgaactacctatgcggaag

SEQ ID NO: 73879 - DNA, 30 bp, Artificial Sequence
  Synthetic oligonucleotide
aaagacagtcgcgggcaacaatctcggaag

SEQ ID NO: 73880 - DNA, 30 bp, Artificial Sequence
  Synthetic oligonucleotide
aggagttgatttcccaagggaagagggaag

SEQ ID NO: 73881 - DNA, 30 bp, Artificial Sequence
  Synthetic oligonucleotide
cgtgggacggattacctacgataggggaag

SEQ ID NO: 73882 - DNA, 30 bp, Artificial Sequence
  Synthetic oligonucleotide
aagcaatagtaatttttccggtcggggaag

SEQ ID NO: 73883 - DNA, 30 bp, Artificial Sequence
  Synthetic oligonucleotide
ctcgagtttaatgaactcccacatgggaag

SEQ ID NO: 73884 - DNA, 30 bp, Artificial Sequence
  Synthetic oligonucleotide
atggtaagttgttgttagagagttgggaag

SEQ ID NO: 73885 - DNA, 30 bp, Artificial Sequence
  Synthetic oligonucleotide
cttttgctgtcgaacgtgggcccaatgaag

SEQ ID NO: 73886 - DNA, 31 bp, Artificial Sequence
  Synthetic oligonucleotide
ggtcactcatgtgacgtagttttggctgaag

SEQ ID NO: 73887 - DNA, 30 bp, Artificial Sequence
  Synthetic oligonucleotide
cctaaaattatggataatggaaatgtgaag

SEQ ID NO: 73888 - DNA, 30 bp, Artificial Sequence
  Synthetic oligonucleotide
ttaaactacgattaggatcgcaaattgaag

SEQ ID NO: 73889 - DNA, 30 bp, Artificial Sequence
  Synthetic oligonucleotide
tcggagaaagtgtttgaactccggaataag

SEQ ID NO: 73890 - DNA, 30 bp, Artificial Sequence
  Synthetic oligonucleotide
ctagcggtagaatcggtacaggctaataag

SEQ ID NO: 73891 - DNA, 30 bp, Artificial Sequence
  Synthetic oligonucleotide
gaagacaagaggtcttctcaaagtcataag

SEQ ID NO: 73892 - DNA, 30 bp, Artificial Sequence
  Synthetic oligonucleotide
ccgaaattgaacgcaatgagagttgataag

SEQ ID NO: 73893 - DNA, 30 bp, Artificial Sequence
  Synthetic oligonucleotide
aaacatgtggaatatagtgcaaagtataag

SEQ ID NO: 73894 - DNA, 30 bp, Artificial Sequence
  Synthetic oligonucleotide
gggaagggaatgaacccgatatggtataag

SEQ ID NO: 73895 - DNA, 30 bp, Artificial Sequence
  Synthetic oligonucleotide
gattcaaaggaaagaatctctgcaactaag

SEQ ID NO: 73896 - DNA, 30 bp, Artificial Sequence
  Synthetic oligonucleotide
acggaggcaggcgaggtcgtagaacctaag

SEQ ID NO: 73897 - DNA, 30 bp, Artificial Sequence
  Synthetic oligonucleotide
gacccataacacattatcccatcagctaag

SEQ ID NO: 73898 - DNA, 30 bp, Artificial Sequence
  Synthetic oligonucleotide
acgacataagatttagcagtataggctaag

SEQ ID NO: 73899 - DNA, 30 bp, Artificial Sequence
  Synthetic oligonucleotide
agctggcagaccattgacttgctggctaag

SEQ ID NO: 73900 - DNA, 30 bp, Artificial Sequence
  Synthetic oligonucleotide
ccaaactacttaagcgctccgacgtctaag

SEQ ID NO: 73901 - DNA, 30 bp, Artificial Sequence
  Synthetic oligonucleotide
tctcgcgggcccgttagtttaaagagtaag

SEQ ID NO: 73902 - DNA, 30 bp, Artificial Sequence
  Synthetic oligonucleotide
tcaaataaaaacaagtaccagttgagtaag

SEQ ID NO: 73903 - DNA, 30 bp, Artificial Sequence
  Synthetic oligonucleotide
acagccagagtgcctgtcataaggggtaag

SEQ ID NO: 73904 - DNA, 30 bp, Artificial Sequence
  Synthetic oligonucleotide
atagcagggcagtgcagaactcggtgtaag

SEQ ID NO: 73905 - DNA, 30 bp, Artificial Sequence
  Synthetic oligonucleotide
gacaagtttggaatggagcaaatgtgtaag

SEQ ID NO: 73906 - DNA, 30 bp, Artificial Sequence
  Synthetic oligonucleotide
tcactggtgacagatgaagaaatgtgtaag

SEQ ID NO: 73907 - DNA, 30 bp, Artificial Sequence
  Synthetic oligonucleotide
cataggcccgcattaagtcgtggaattaag

SEQ ID NO: 73908 - DNA, 30 bp, Artificial Sequence
  Synthetic oligonucleotide
tgcaattacgacgatcagagtcatattaag

SEQ ID NO: 73909 - DNA, 30 bp, Artificial Sequence
  Synthetic oligonucleotide
ccgcatacgccaaacagtatcgtccttaag

SEQ ID NO: 73910 - DNA, 30 bp, Artificial Sequence
  Synthetic oligonucleotide
acgtggacattccttcacgcgtcgcttaag

SEQ ID NO: 73911 - DNA, 30 bp, Artificial Sequence
  Synthetic oligonucleotide
gctcacatgagcctaagtaggcacgttaag

SEQ ID NO: 73912 - DNA, 30 bp, Artificial Sequence
  Synthetic oligonucleotide
atcgcatcgcctatgtcatatgaggttaag

SEQ ID NO: 73913 - DNA, 30 bp, Artificial Sequence
  Synthetic oligonucleotide
cacgtaaagacgatcctgcatctggttaag

SEQ ID NO: 73914 - DNA, 30 bp, Artificial Sequence
  Synthetic oligonucleotide
gagacaggatgaggatcgggggatgttaag

SEQ ID NO: 73915 - DNA, 30 bp, Artificial Sequence
  Synthetic oligonucleotide
ttaggcgaccctgagcggattataaaacag

SEQ ID NO: 73916 - DNA, 30 bp, Artificial Sequence
  Synthetic oligonucleotide
atctggaatgaataattgacgaggaaacag

SEQ ID NO: 73917 - DNA, 29 bp, Artificial Sequence
  Synthetic oligonucleotide
cttgcactccaatacgataatggaaacag

SEQ ID NO: 73918 - DNA, 30 bp, Artificial Sequence
  Synthetic oligonucleotide
gcttctggactgagaattacaatgaaacag

SEQ ID NO: 73919 - DNA, 30 bp, Artificial Sequence
  Synthetic oligonucleotide
aaaaagactacgaaggggagcacccaacag

SEQ ID NO: 73920 - DNA, 30 bp, Artificial Sequence
  Synthetic oligonucleotide
acaggatcaatgtaagtactactccaacag

SEQ ID NO: 73921 - DNA, 30 bp, Artificial Sequence
  Synthetic oligonucleotide
tgtggagtagtacgcgtccataagcaacag

SEQ ID NO: 73922 - DNA, 30 bp, Artificial Sequence
  Synthetic oligonucleotide
tggacgcgtttctggaatataatgcaacag

SEQ ID NO: 73923 - DNA, 30 bp, Artificial Sequence
  Synthetic oligonucleotide
tggacttggttgccgactatcgcgtaacag

SEQ ID NO: 73924 - DNA, 30 bp, Artificial Sequence
  Synthetic oligonucleotide
atcatccgagaattgccaaggcattaacag

SEQ ID NO: 73925 - DNA, 30 bp, Artificial Sequence
  Synthetic oligonucleotide
tcaatcaatgtaaaaggagaatgaacacag

SEQ ID NO: 73926 - DNA, 30 bp, Artificial Sequence
  Synthetic oligonucleotide
cagccatagcaagatgtccttgtaacacag

SEQ ID NO: 73927 - DNA, 30 bp, Artificial Sequence
  Synthetic oligonucleotide
gcacgcgcgctaactggaatacaaccacag

SEQ ID NO: 73928 - DNA, 30 bp, Artificial Sequence
  Synthetic oligonucleotide
tcgggaagtgtcggagcagcgacaccacag

SEQ ID NO: 73929 - DNA, 30 bp, Artificial Sequence
  Synthetic oligonucleotide
tgataggtgctcgcgggtccgagtccacag

SEQ ID NO: 73930 - DNA, 30 bp, Artificial Sequence
  Synthetic oligonucleotide
gagggaggtcggacagatcgctcggcacag

SEQ ID NO: 73931 - DNA, 30 bp, Artificial Sequence
  Synthetic oligonucleotide
agtaccctgggtatgctgttccctgcacag

SEQ ID NO: 73932 - DNA, 30 bp, Artificial Sequence
  Synthetic oligonucleotide
aacgatacgctagacggttcttcgtcacag

SEQ ID NO: 73933 - DNA, 30 bp, Artificial Sequence
  Synthetic oligonucleotide
gtacactacgaatttattgaaacttcacag

SEQ ID NO: 73934 - DNA, 30 bp, Artificial Sequence
  Synthetic oligonucleotide
gtcggagccagtgagcttcatgaacgacag

SEQ ID NO: 73935 - DNA, 30 bp, Artificial Sequence
  Synthetic oligonucleotide
ggaagtaaaaacagcttggtcatacgacag

SEQ ID NO: 73936 - DNA, 30 bp, Artificial Sequence
  Synthetic oligonucleotide
aactaaacgtcacccccgaggttccgacag

SEQ ID NO: 73937 - DNA, 30 bp, Artificial Sequence
  Synthetic oligonucleotide
gagcatgaccctatcactctacagcgacag

SEQ ID NO: 73938 - DNA, 30 bp, Artificial Sequence
  Synthetic oligonucleotide
ttggggtaccggccaaggctgcgtcgacag

SEQ ID NO: 73939 - DNA, 30 bp, Artificial Sequence
  Synthetic oligonucleotide
gggaagtgctatataagctaggtaggacag

SEQ ID NO: 73940 - DNA, 30 bp, Artificial Sequence
  Synthetic oligonucleotide
ttaaaagcaggttactatgtggcctgacag

SEQ ID NO: 73941 - DNA, 30 bp, Artificial Sequence
  Synthetic oligonucleotide
ttgagtcgttggttcagacacaagtgacag

SEQ ID NO: 73942 - DNA, 30 bp, Artificial Sequence
  Synthetic oligonucleotide
ctgatttccaaatcatgtgaaacaatacag

SEQ ID NO: 73943 - DNA, 30 bp, Artificial Sequence
  Synthetic oligonucleotide
aatagactctaccgaaaactgatactacag

SEQ ID NO: 73944 - DNA, 30 bp, Artificial Sequence
  Synthetic oligonucleotide
accgagcgcaccaagcgtgtcgagctacag

SEQ ID NO: 73945 - DNA, 30 bp, Artificial Sequence
  Synthetic oligonucleotide
ggtacaccatctggtaggatttatgtacag

SEQ ID NO: 73946 - DNA, 30 bp, Artificial Sequence
  Synthetic oligonucleotide
ctaggagaatgtcctcatgcgcccttacag

SEQ ID NO: 73947 - DNA, 30 bp, Artificial Sequence
  Synthetic oligonucleotide
aatcatcaacttaccgacaggggaaaccag

SEQ ID NO: 73948 - DNA, 30 bp, Artificial Sequence
  Synthetic oligonucleotide
gtgaaggatatcatgggtctttgcaaccag

SEQ ID NO: 73949 - DNA, 30 bp, Artificial Sequence
  Synthetic oligonucleotide
gggctatatctcacgtggtgcaaccaccag

SEQ ID NO: 73950 - DNA, 30 bp, Artificial Sequence
  Synthetic oligonucleotide
gacctaggcacagcgaacatataccaccag

SEQ ID NO: 73951 - DNA, 30 bp, Artificial Sequence
  Synthetic oligonucleotide
cccgtatggcgtcacaggcatcagcaccag

SEQ ID NO: 73952 - DNA, 30 bp, Artificial Sequence
  Synthetic oligonucleotide
cttccagggcaggtagggtctcgtcaccag

SEQ ID NO: 73953 - DNA, 30 bp, Artificial Sequence
  Synthetic oligonucleotide
acggacggccacttcgggccgaaagaccag

SEQ ID NO: 73954 - DNA, 30 bp, Artificial Sequence
  Synthetic oligonucleotide
cgttgggtagctctgcgattcgcggaccag

SEQ ID NO: 73955 - DNA, 30 bp, Artificial Sequence
  Synthetic oligonucleotide
atgggtcagttaatttatcagggggaccag

SEQ ID NO: 73956 - DNA, 30 bp, Artificial Sequence
  Synthetic oligonucleotide
ttgccacaattaaggtaatggaaataccag

SEQ ID NO: 73957 - DNA, 30 bp, Artificial Sequence
  Synthetic oligonucleotide
tccgacaggtgacattccgtagctacccag

SEQ ID NO: 73958 - DNA, 30 bp, Artificial Sequence
  Synthetic oligonucleotide
atgcacaataagtagtaacgtcttacccag

SEQ ID NO: 73959 - DNA, 30 bp, Artificial Sequence
  Synthetic oligonucleotide
taatctcgctcagacatatggtcgccccag

SEQ ID NO: 73960 - DNA, 30 bp, Artificial Sequence
  Synthetic oligonucleotide
gggttagcgttcaggaccaacttggcccag

SEQ ID NO: 73961 - DNA, 30 bp, Artificial Sequence
  Synthetic oligonucleotide
tggtgtgtaagcatgtgaccgacatcccag

SEQ ID NO: 73962 - DNA, 30 bp, Artificial Sequence
  Synthetic oligonucleotide
ataaaggattcgaaagatctgacttcccag

SEQ ID NO: 73963 - DNA, 30 bp, Artificial Sequence
  Synthetic oligonucleotide
gtttgcgtagaacgacacgtaaaaagccag

SEQ ID NO: 73964 - DNA, 30 bp, Artificial Sequence
  Synthetic oligonucleotide
gtgcaaaaggcttgaattgtacatagccag

SEQ ID NO: 73965 - DNA, 30 bp, Artificial Sequence
  Synthetic oligonucleotide
tgagattagtacgaaaggtctggacgccag

SEQ ID NO: 73966 - DNA, 30 bp, Artificial Sequence
  Synthetic oligonucleotide
cgggctgagtctggtagcaactcccgccag

SEQ ID NO: 73967 - DNA, 30 bp, Artificial Sequence
  Synthetic oligonucleotide
aagtcaacactcaaactcgtgatgcgccag

SEQ ID NO: 73968 - DNA, 30 bp, Artificial Sequence
  Synthetic oligonucleotide
cgtacgggacaaattgaatacgatcgccag

SEQ ID NO: 73969 - DNA, 30 bp, Artificial Sequence
  Synthetic oligonucleotide
catagtggcgagggggctactacaggccag

SEQ ID NO: 73970 - DNA, 30 bp, Artificial Sequence
  Synthetic oligonucleotide
gagcgggagtgaagtctcttcccaggccag

SEQ ID NO: 73971 - DNA, 30 bp, Artificial Sequence
  Synthetic oligonucleotide
gtactagagtggccggtgatatattgccag

SEQ ID NO: 73972 - DNA, 30 bp, Artificial Sequence
  Synthetic oligonucleotide
gccggtttgagcgggtggtaggaaatccag

SEQ ID NO: 73973 - DNA, 30 bp, Artificial Sequence
  Synthetic oligonucleotide
aaggtatgacgggacttaacggagctccag

SEQ ID NO: 73974 - DNA, 30 bp, Artificial Sequence
  Synthetic oligonucleotide
aaaccccacctaggatagtcacgagtccag

SEQ ID NO: 73975 - DNA, 30 bp, Artificial Sequence
  Synthetic oligonucleotide
attgactagacggtctcgtggatagtccag

SEQ ID NO: 73976 - DNA, 30 bp, Artificial Sequence
  Synthetic oligonucleotide
cgcgcaaagcgatggtcacgaatcgtccag

SEQ ID NO: 73977 - DNA, 30 bp, Artificial Sequence
  Synthetic oligonucleotide
cctaacggtgaacaacactcgaccaagcag

SEQ ID NO: 73978 - DNA, 30 bp, Artificial Sequence
  Synthetic oligonucleotide
cgatcactgagtcatcgatctggcaagcag

SEQ ID NO: 73979 - DNA, 30 bp, Artificial Sequence
  Synthetic oligonucleotide
tgcatagcatcgaaaagctcatcacagcag

SEQ ID NO: 73980 - DNA, 30 bp, Artificial Sequence
  Synthetic oligonucleotide
ctggaggagttgaggctagttttagagcag

SEQ ID NO: 73981 - DNA, 30 bp, Artificial Sequence
  Synthetic oligonucleotide
cacactagaacactagattgtccctagcag

SEQ ID NO: 73982 - DNA, 30 bp, Artificial Sequence
  Synthetic oligonucleotide
atgagagactgggggactaatcaaacgcag

SEQ ID NO: 73983 - DNA, 30 bp, Artificial Sequence
  Synthetic oligonucleotide
gcgatagagtgcgtagcatgatcagcgcag

SEQ ID NO: 73984 - DNA, 30 bp, Artificial Sequence
  Synthetic oligonucleotide
tagataagggtgcctgagcgttgtgcgcag

SEQ ID NO: 73985 - DNA, 30 bp, Artificial Sequence
  Synthetic oligonucleotide
ctggagtgtggttcaatgcccaaatcgcag

SEQ ID NO: 73986 - DNA, 30 bp, Artificial Sequence
  Synthetic oligonucleotide
ctaacggtagcattgatatacaaaaggcag

SEQ ID NO: 73987 - DNA, 30 bp, Artificial Sequence
  Synthetic oligonucleotide
cgatcctatttcatggaatggttagggcag

SEQ ID NO: 73988 - DNA, 30 bp, Artificial Sequence
  Synthetic oligonucleotide
taacggcacaagtcgatcgcaacggggcag

SEQ ID NO: 73989 - DNA, 30 bp, Artificial Sequence
  Synthetic oligonucleotide
cgtgaggtaacctagggtgcaactgggcag

SEQ ID NO: 73990 - DNA, 30 bp, Artificial Sequence
  Synthetic oligonucleotide
gtatacaggcaaacgcactcaagtgggcag

SEQ ID NO: 73991 - DNA, 30 bp, Artificial Sequence
  Synthetic oligonucleotide
cgatccggcgctcataataggatatggcag

SEQ ID NO: 73992 - DNA, 30 bp, Artificial Sequence
  Synthetic oligonucleotide
acgggggttccacacgagtgactttggcag

SEQ ID NO: 73993 - DNA, 30 bp, Artificial Sequence
  Synthetic oligonucleotide
agcgctattccttttcaacgattaatgcag

SEQ ID NO: 73994 - DNA, 30 bp, Artificial Sequence
  Synthetic oligonucleotide
atagggcccaggtttcactgaacactgcag

SEQ ID NO: 73995 - DNA, 30 bp, Artificial Sequence
  Synthetic oligonucleotide
agcgccacgaccatataacagcgcctgcag

SEQ ID NO: 73996 - DNA, 30 bp, Artificial Sequence
  Synthetic oligonucleotide
gctacggacgtatatattcacaagctgcag

SEQ ID NO: 73997 - DNA, 30 bp, Artificial Sequence
  Synthetic oligonucleotide
gccaggcaggaagagcgattagcgctgcag

SEQ ID NO: 73998 - DNA, 30 bp, Artificial Sequence
  Synthetic oligonucleotide
tcgtcagataggagcggtgattttctgcag

SEQ ID NO: 73999 - DNA, 30 bp, Artificial Sequence
  Synthetic oligonucleotide
gggaggtcgggctatggcgtgggagtgcag

SEQ ID NO: 74000 - DNA, 30 bp, Artificial Sequence
  Synthetic oligonucleotide
acggtgcacattttaagaggaaacgtgcag

SEQ ID NO: 74001 - DNA, 30 bp, Artificial Sequence
  Synthetic oligonucleotide
agcacggtgagatgtcatgtattaaatcag

SEQ ID NO: 74002 - DNA, 30 bp, Artificial Sequence
  Synthetic oligonucleotide
acattgcaattgactccgccattgaatcag

SEQ ID NO: 74003 - DNA, 29 bp, Artificial Sequence
  Synthetic oligonucleotide
gcaggtcatggttattcctacagcatcag

SEQ ID NO: 74004 - DNA, 30 bp, Artificial Sequence
  Synthetic oligonucleotide
catctagtgacacccaaacgttggcatcag

SEQ ID NO: 74005 - DNA, 30 bp, Artificial Sequence
  Synthetic oligonucleotide
ctaggtgtcatactcgtcacagatcatcag

SEQ ID NO: 74006 - DNA, 30 bp, Artificial Sequence
  Synthetic oligonucleotide
ttggacttcgatactcctagccccgatcag

SEQ ID NO: 74007 - DNA, 30 bp, Artificial Sequence
  Synthetic oligonucleotide
ctggtggagagacgacagacggttgatcag

SEQ ID NO: 74008 - DNA, 30 bp, Artificial Sequence
  Synthetic oligonucleotide
tgaaagaaacaataggtgacaacctatcag

SEQ ID NO: 74009 - DNA, 30 bp, Artificial Sequence
  Synthetic oligonucleotide
gagagcagaactagttccggtcaaactcag

SEQ ID NO: 74010 - DNA, 30 bp, Artificial Sequence
  Synthetic oligonucleotide
gatgatcagtcagtgttatacgagactcag

SEQ ID NO: 74011 - DNA, 30 bp, Artificial Sequence
  Synthetic oligonucleotide
ccaattgtttgggagctaagatgccctcag

SEQ ID NO: 74012 - DNA, 30 bp, Artificial Sequence
  Synthetic oligonucleotide
cgctgagaggcttaaggcctcgtttctcag

SEQ ID NO: 74013 - DNA, 30 bp, Artificial Sequence
  Synthetic oligonucleotide
gatctcagtcaaggctcggtgctcagtcag

SEQ ID NO: 74014 - DNA, 30 bp, Artificial Sequence
  Synthetic oligonucleotide
atcgcgactgataccgactatgatagtcag

SEQ ID NO: 74015 - DNA, 30 bp, Artificial Sequence
  Synthetic oligonucleotide
acgatgattttggagtagttctcacgtcag

SEQ ID NO: 74016 - DNA, 30 bp, Artificial Sequence
  Synthetic oligonucleotide
ccgtattgaaaccgtccaacaagacgtcag

SEQ ID NO: 74017 - DNA, 30 bp, Artificial Sequence
  Synthetic oligonucleotide
aagtgtaagggagacgtcgagatacgtcag

SEQ ID NO: 74018 - DNA, 30 bp, Artificial Sequence
  Synthetic oligonucleotide
cgcgccatgttagcgggaccgatacgtcag

SEQ ID NO: 74019 - DNA, 30 bp, Artificial Sequence
  Synthetic oligonucleotide
agggcaaccaaagtgcatccatgcggtcag

SEQ ID NO: 74020 - DNA, 30 bp, Artificial Sequence
  Synthetic oligonucleotide
agtgtagttgtacaggcccggcaaattcag

SEQ ID NO: 74021 - DNA, 30 bp, Artificial Sequence
  Synthetic oligonucleotide
cttaaaaaatgggttcctacctgaattcag

SEQ ID NO: 74022 - DNA, 31 bp, Artificial Sequence
  Synthetic oligonucleotide
ggccgcggggggatcagaatatgtgattcag

SEQ ID NO: 74023 - DNA, 30 bp, Artificial Sequence
  Synthetic oligonucleotide
tagggcgtctaatatccgacacgtattcag

SEQ ID NO: 74024 - DNA, 30 bp, Artificial Sequence
  Synthetic oligonucleotide
ttacaaaccgcgggctagtcggaacttcag

SEQ ID NO: 74025 - DNA, 30 bp, Artificial Sequence
  Synthetic oligonucleotide
aatgtggataatggtggacaccagcttcag

SEQ ID NO: 74026 - DNA, 30 bp, Artificial Sequence
  Synthetic oligonucleotide
cggtaacaaactgcccggctcacagttcag

SEQ ID NO: 74027 - DNA, 30 bp, Artificial Sequence
  Synthetic oligonucleotide
aggatggtctacccaagaggaagatttcag

SEQ ID NO: 74028 - DNA, 30 bp, Artificial Sequence
  Synthetic oligonucleotide
aatagcgagacgttcataacatcgtttcag

SEQ ID NO: 74029 - DNA, 30 bp, Artificial Sequence
  Synthetic oligonucleotide
tcggtcggcagacagcctcttgtgtttcag

SEQ ID NO: 74030 - DNA, 30 bp, Artificial Sequence
  Synthetic oligonucleotide
ggtacacagaagtccgccccaggaaaagag

SEQ ID NO: 74031 - DNA, 30 bp, Artificial Sequence
  Synthetic oligonucleotide
agtgcttatgggaaggacacgcaccaagag

SEQ ID NO: 74032 - DNA, 30 bp, Artificial Sequence
  Synthetic oligonucleotide
caaggattgccgaccacaggtcgtcaagag

SEQ ID NO: 74033 - DNA, 30 bp, Artificial Sequence
  Synthetic oligonucleotide
aggcttactggcaaaacgtcgattcaagag

SEQ ID NO: 74034 - DNA, 30 bp, Artificial Sequence
  Synthetic oligonucleotide
accaacgtatttgcgtatggatccgaagag

SEQ ID NO: 74035 - DNA, 30 bp, Artificial Sequence
  Synthetic oligonucleotide
aacaatcgtctggacatccgacgcgaagag

SEQ ID NO: 74036 - DNA, 30 bp, Artificial Sequence
  Synthetic oligonucleotide
aatcaggatggatggcgtatgtgcgaagag

SEQ ID NO: 74037 - DNA, 30 bp, Artificial Sequence
  Synthetic oligonucleotide
tatggtctcgtttactggttgcgggaagag

SEQ ID NO: 74038 - DNA, 30 bp, Artificial Sequence
  Synthetic oligonucleotide
caaacaacttcatatggtctggtggaagag

SEQ ID NO: 74039 - DNA, 30 bp, Artificial Sequence
  Synthetic oligonucleotide
atgggcctcatctgtcatcaccgtgaagag

SEQ ID NO: 74040 - DNA, 30 bp, Artificial Sequence
  Synthetic oligonucleotide
gtgtgtacatccgcctgaaagattgaagag

SEQ ID NO: 74041 - DNA, 30 bp, Artificial Sequence
  Synthetic oligonucleotide
ctgatggaactgaatgtgtgtagttaagag

SEQ ID NO: 74042 - DNA, 30 bp, Artificial Sequence
  Synthetic oligonucleotide
aaaggcgtatgatacgtccgttgaacagag

SEQ ID NO: 74043 - DNA, 30 bp, Artificial Sequence
  Synthetic oligonucleotide
atcgtttcaaggtcttgattccacacagag

SEQ ID NO: 74044 - DNA, 30 bp, Artificial Sequence
  Synthetic oligonucleotide
tctcaaagtgccgctaaactgtacacagag

SEQ ID NO: 74045 - DNA, 30 bp, Artificial Sequence
  Synthetic oligonucleotide
atgcgttggagaatgggtaacagcacagag

SEQ ID NO: 74046 - DNA, 30 bp, Artificial Sequence
  Synthetic oligonucleotide
agagataagtagagcatttcaatagcagag

SEQ ID NO: 74047 - DNA, 30 bp, Artificial Sequence
  Synthetic oligonucleotide
tactaaagagtaggcacattgggatcagag

SEQ ID NO: 74048 - DNA, 30 bp, Artificial Sequence
  Synthetic oligonucleotide
aagggagatccagtttggcgttgttcagag

SEQ ID NO: 74049 - DNA, 30 bp, Artificial Sequence
  Synthetic oligonucleotide
acctataccttttcaaccaagtaaagagag

SEQ ID NO: 74050 - DNA, 30 bp, Artificial Sequence
  Synthetic oligonucleotide
cagagagcagctgaatgattgagtagagag

SEQ ID NO: 74051 - DNA, 30 bp, Artificial Sequence
  Synthetic oligonucleotide
acatggcaggtccagtgttaggcacgagag

SEQ ID NO: 74052 - DNA, 30 bp, Artificial Sequence
  Synthetic oligonucleotide
tgcatgccaccctaaggccgcctcggagag

SEQ ID NO: 74053 - DNA, 30 bp, Artificial Sequence
  Synthetic oligonucleotide
ttaattcgtttgaagctgaaacgcatagag

SEQ ID NO: 74054 - DNA, 30 bp, Artificial Sequence
  Synthetic oligonucleotide
catccctcatcgtcccgtctccagctagag

SEQ ID NO: 74055 - DNA, 30 bp, Artificial Sequence
  Synthetic oligonucleotide
cggttacccctgctgaccccagaagtagag

SEQ ID NO: 74056 - DNA, 30 bp, Artificial Sequence
  Synthetic oligonucleotide
gtattatcagatgctgtcgagccagtagag

SEQ ID NO: 74057 - DNA, 30 bp, Artificial Sequence
  Synthetic oligonucleotide
ggaggtgtccagcaaattctcgctgtagag

SEQ ID NO: 74058 - DNA, 30 bp, Artificial Sequence
  Synthetic oligonucleotide
gttagcagctcaattggagcatctgtagag

SEQ ID NO: 74059 - DNA, 30 bp, Artificial Sequence
  Synthetic oligonucleotide
acctgcgtgtcgtggacgaactttgtagag

SEQ ID NO: 74060 - DNA, 30 bp, Artificial Sequence
  Synthetic oligonucleotide
tcaagtgctaaagcggaataggtcttagag

SEQ ID NO: 74061 - DNA, 30 bp, Artificial Sequence
  Synthetic oligonucleotide
accgtcggaagactcgtatcgacgttagag

SEQ ID NO: 74062 - DNA, 30 bp, Artificial Sequence
  Synthetic oligonucleotide
acgtttgccacacagatggcatcaaacgag

SEQ ID NO: 74063 - DNA, 30 bp, Artificial Sequence
  Synthetic oligonucleotide
gagatgcaccaataaatgctaagaaacgag

SEQ ID NO: 74064 - DNA, 30 bp, Artificial Sequence
  Synthetic oligonucleotide
atgttagacactgagttctgatccaacgag

SEQ ID NO: 74065 - DNA, 30 bp, Artificial Sequence
  Synthetic oligonucleotide
ggagaatgaaggaatgtctgctgcaacgag

SEQ ID NO: 74066 - DNA, 30 bp, Artificial Sequence
  Synthetic oligonucleotide
tagaaaaggatcacgtggaggtagaacgag

SEQ ID NO: 74067 - DNA, 30 bp, Artificial Sequence
  Synthetic oligonucleotide
gatcagttccctggatcgagccggaacgag

SEQ ID NO: 74068 - DNA, 30 bp, Artificial Sequence
  Synthetic oligonucleotide
gaagaacgttgtgaaaaaatctgtaacgag

SEQ ID NO: 74069 - DNA, 30 bp, Artificial Sequence
  Synthetic oligonucleotide
acttaacacggagaacgcgcagtccacgag

SEQ ID NO: 74070 - DNA, 30 bp, Artificial Sequence
  Synthetic oligonucleotide
atgcaagcactaaagttagtttggcacgag

SEQ ID NO: 74071 - DNA, 30 bp, Artificial Sequence
  Synthetic oligonucleotide
tgtctcaattgacattgacagattcacgag

SEQ ID NO: 74072 - DNA, 30 bp, Artificial Sequence
  Synthetic oligonucleotide
gcgctcatgggcgaaacttagtcagacgag

SEQ ID NO: 74073 - DNA, 30 bp, Artificial Sequence
  Synthetic oligonucleotide
ttgcgcgtttaacttgtacgatcggacgag

SEQ ID NO: 74074 - DNA, 30 bp, Artificial Sequence
  Synthetic oligonucleotide
ccagacatggcgtaaaggcgtctggacgag

SEQ ID NO: 74075 - DNA, 30 bp, Artificial Sequence
  Synthetic oligonucleotide
atggttcggaaacggatacttcgctacgag

SEQ ID NO: 74076 - DNA, 30 bp, Artificial Sequence
  Synthetic oligonucleotide
gcggtaaacagccgggagcctcattacgag

SEQ ID NO: 74077 - DNA, 30 bp, Artificial Sequence
  Synthetic oligonucleotide
gttcgcgagtgcgaaattgatcgaaccgag

SEQ ID NO: 74078 - DNA, 30 bp, Artificial Sequence
  Synthetic oligonucleotide
gaggtatcaagttggagcatattgaccgag

SEQ ID NO: 74079 - DNA, 30 bp, Artificial Sequence
  Synthetic oligonucleotide
acacaagcgatcggattcgggagtaccgag

SEQ ID NO: 74080 - DNA, 30 bp, Artificial Sequence
  Synthetic oligonucleotide
ggtgcataatcattgctgcgcaaccccgag

SEQ ID NO: 74081 - DNA, 30 bp, Artificial Sequence
  Synthetic oligonucleotide
tcgggggattatgcgatgatgaggcccgag

SEQ ID NO: 74082 - DNA, 30 bp, Artificial Sequence
  Synthetic oligonucleotide
gggcgcaggtctaaggaagtatgtgccgag

SEQ ID NO: 74083 - DNA, 30 bp, Artificial Sequence
  Synthetic oligonucleotide
acttgacatcggacgtttcattaatccgag

SEQ ID NO: 74084 - DNA, 30 bp, Artificial Sequence
  Synthetic oligonucleotide
cggaactaagcgtcttatgatggatccgag

SEQ ID NO: 74085 - DNA, 30 bp, Artificial Sequence
  Synthetic oligonucleotide
ccgtaagcattacccaatggtagttccgag

SEQ ID NO: 74086 - DNA, 30 bp, Artificial Sequence
  Synthetic oligonucleotide
agaagggcagcgggtgcgtatataagcgag

SEQ ID NO: 74087 - DNA, 30 bp, Artificial Sequence
  Synthetic oligonucleotide
acgcttaaggaagaagaatctctaagcgag

SEQ ID NO: 74088 - DNA, 30 bp, Artificial Sequence
  Synthetic oligonucleotide
ggggtcctaggcggtgcgtctcagagcgag

SEQ ID NO: 74089 - DNA, 30 bp, Artificial Sequence
  Synthetic oligonucleotide
acgttgcgggctactacctagtggagcgag

SEQ ID NO: 74090 - DNA, 30 bp, Artificial Sequence
  Synthetic oligonucleotide
gtcataataaaccatgcaacctcccgcgag

SEQ ID NO: 74091 - DNA, 30 bp, Artificial Sequence
  Synthetic oligonucleotide
gaagttcccagacatgcgcgaataggcgag

SEQ ID NO: 74092 - DNA, 30 bp, Artificial Sequence
  Synthetic oligonucleotide
caccccggaagtcaatacttagccggcgag

SEQ ID NO: 74093 - DNA, 30 bp, Artificial Sequence
  Synthetic oligonucleotide
ttgaacattaactaatccgttaggggcgag

SEQ ID NO: 74094 - DNA, 30 bp, Artificial Sequence
  Synthetic oligonucleotide
ccggttgcgcctcaattctaagattgcgag

SEQ ID NO: 74095 - DNA, 30 bp, Artificial Sequence
  Synthetic oligonucleotide
cgctacaacttttagataaatgcttgcgag

SEQ ID NO: 74096 - DNA, 30 bp, Artificial Sequence
  Synthetic oligonucleotide
ataaaaggtatcgcgtgtgctgcttgcgag

SEQ ID NO: 74097 - DNA, 30 bp, Artificial Sequence
  Synthetic oligonucleotide
ctcgggaccgtgcgttgtaaatgcatcgag

SEQ ID NO: 74098 - DNA, 30 bp, Artificial Sequence
  Synthetic oligonucleotide
tgagcttagccgaaagtggccctactcgag

SEQ ID NO: 74099 - DNA, 30 bp, Artificial Sequence
  Synthetic oligonucleotide
ggggatagttcgctattggagttactcgag

SEQ ID NO: 74100 - DNA, 30 bp, Artificial Sequence
  Synthetic oligonucleotide
gtactggcgcatggatgggcaccagtcgag

SEQ ID NO: 74101 - DNA, 30 bp, Artificial Sequence
  Synthetic oligonucleotide
ggggtacttcttcgtataagagaattcgag

SEQ ID NO: 74102 - DNA, 30 bp, Artificial Sequence
  Synthetic oligonucleotide
gctcagactctagcgtaccaaataaaggag

SEQ ID NO: 74103 - DNA, 30 bp, Artificial Sequence
  Synthetic oligonucleotide
acgtttgctattgcaagtggtggcaaggag

SEQ ID NO: 74104 - DNA, 30 bp, Artificial Sequence
  Synthetic oligonucleotide
aaggattatcgctaacaaagtaagaaggag

SEQ ID NO: 74105 - DNA, 30 bp, Artificial Sequence
  Synthetic oligonucleotide
ttgagcgtcggggttaagtcaagacaggag

SEQ ID NO: 74106 - DNA, 30 bp, Artificial Sequence
  Synthetic oligonucleotide
ttacaggaacagtgttgaggtctacaggag

SEQ ID NO: 74107 - DNA, 30 bp, Artificial Sequence
  Synthetic oligonucleotide
tgtgcagtcatgccacagtgtggccaggag

SEQ ID NO: 74108 - DNA, 30 bp, Artificial Sequence
  Synthetic oligonucleotide
gggggtttaaccataataatgatccaggag

SEQ ID NO: 74109 - DNA, 30 bp, Artificial Sequence
  Synthetic oligonucleotide
ggtgattattggcagctatcggtccaggag

SEQ ID NO: 74110 - DNA, 30 bp, Artificial Sequence
  Synthetic oligonucleotide
gtagcaagctaggtggtaattagtcaggag

SEQ ID NO: 74111 - DNA, 30 bp, Artificial Sequence
  Synthetic oligonucleotide
aagggtgcgaaagtccgaagcagcgaggag

SEQ ID NO: 74112 - DNA, 30 bp, Artificial Sequence
  Synthetic oligonucleotide
aatgcaaattgccgagacgcaatcgaggag

SEQ ID NO: 74113 - DNA, 30 bp, Artificial Sequence
  Synthetic oligonucleotide
acagcaggcggtattggttaacactaggag

SEQ ID NO: 74114 - DNA, 30 bp, Artificial Sequence
  Synthetic oligonucleotide
taatgcaaagtccatgtgtggcactaggag

SEQ ID NO: 74115 - DNA, 30 bp, Artificial Sequence
  Synthetic oligonucleotide
accagcccaagcagttggttcgggtaggag

SEQ ID NO: 74116 - DNA, 30 bp, Artificial Sequence
  Synthetic oligonucleotide
agggactcaggagcgaatttgtaaacggag

SEQ ID NO: 74117 - DNA, 30 bp, Artificial Sequence
  Synthetic oligonucleotide
gtagtactgtatgggcattataccacggag

SEQ ID NO: 74118 - DNA, 30 bp, Artificial Sequence
  Synthetic oligonucleotide
tggcacttggggaatgtctctacgccggag

SEQ ID NO: 74119 - DNA, 30 bp, Artificial Sequence
  Synthetic oligonucleotide
tcgaacctgtaggcgtatcttgaagcggag

SEQ ID NO: 74120 - DNA, 30 bp, Artificial Sequence
  Synthetic oligonucleotide
aaatggccttcgtcgtaacgacgagcggag

SEQ ID NO: 74121 - DNA, 30 bp, Artificial Sequence
  Synthetic oligonucleotide
agcactgctagtggttatacgtgggcggag

SEQ ID NO: 74122 - DNA, 30 bp, Artificial Sequence
  Synthetic oligonucleotide
gtcggcatttggcagcatcagcagtcggag

SEQ ID NO: 74123 - DNA, 30 bp, Artificial Sequence
  Synthetic oligonucleotide
ggacaacctgtgggacacactaggagggag

SEQ ID NO: 74124 - DNA, 30 bp, Artificial Sequence
  Synthetic oligonucleotide
atggaggcgcccggggttactctgagggag

SEQ ID NO: 74125 - DNA, 30 bp, Artificial Sequence
  Synthetic oligonucleotide
cggctttagagcttacgactgtgccgggag

SEQ ID NO: 74126 - DNA, 30 bp, Artificial Sequence
  Synthetic oligonucleotide
cgctatgaacgtcctatctatccgcgggag

SEQ ID NO: 74127 - DNA, 30 bp, Artificial Sequence
  Synthetic oligonucleotide
gctaagtgagacagtcatattgtgcgggag

SEQ ID NO: 74128 - DNA, 30 bp, Artificial Sequence
  Synthetic oligonucleotide
cggccaaccagggggcgaggagctggggag

SEQ ID NO: 74129 - DNA, 30 bp, Artificial Sequence
  Synthetic oligonucleotide
cgtttatgggcgcaccctgggttatgggag

SEQ ID NO: 74130 - DNA, 30 bp, Artificial Sequence
  Synthetic oligonucleotide
tagtccataaccctatttaacgagtgggag

SEQ ID NO: 74131 - DNA, 30 bp, Artificial Sequence
  Synthetic oligonucleotide
ggtccattgactagaaggtacatgtgggag

SEQ ID NO: 74132 - DNA, 30 bp, Artificial Sequence
  Synthetic oligonucleotide
gacttaaacctcactagagttgtgtgggag

SEQ ID NO: 74133 - DNA, 30 bp, Artificial Sequence
  Synthetic oligonucleotide
tcggacgtacgttgttttacaaagatggag

SEQ ID NO: 74134 - DNA, 30 bp, Artificial Sequence
  Synthetic oligonucleotide
cacatacgatgtgggcgcctgtctatggag

SEQ ID NO: 74135 - DNA, 30 bp, Artificial Sequence
  Synthetic oligonucleotide
gatgcaatatcctatatattacgtctggag

SEQ ID NO: 74136 - DNA, 30 bp, Artificial Sequence
  Synthetic oligonucleotide
ggaagggggtttcttcgtacacaagtggag

SEQ ID NO: 74137 - DNA, 30 bp, Artificial Sequence
  Synthetic oligonucleotide
tcagttatcgagagtcatcactcagtggag

SEQ ID NO: 74138 - DNA, 30 bp, Artificial Sequence
  Synthetic oligonucleotide
ccctaagcgacaagtgaatatcaaaatgag

SEQ ID NO: 74139 - DNA, 30 bp, Artificial Sequence
  Synthetic oligonucleotide
accagccggacaccgagaccgtcacatgag

SEQ ID NO: 74140 - DNA, 30 bp, Artificial Sequence
  Synthetic oligonucleotide
gcatgagcttacccataaccatcgcatgag

SEQ ID NO: 74141 - DNA, 30 bp, Artificial Sequence
  Synthetic oligonucleotide
ggcattatgatgtcaaggatacctcatgag

SEQ ID NO: 74142 - DNA, 30 bp, Artificial Sequence
  Synthetic oligonucleotide
agaagtggggactctcgaatgtctcatgag

SEQ ID NO: 74143 - DNA, 30 bp, Artificial Sequence
  Synthetic oligonucleotide
gtactttgctcaccatcgaccagtcatgag

SEQ ID NO: 74144 - DNA, 30 bp, Artificial Sequence
  Synthetic oligonucleotide
gtacacctgaggacaaaggcacatgatgag

SEQ ID NO: 74145 - DNA, 30 bp, Artificial Sequence
  Synthetic oligonucleotide
tccatatcacttgtaagcgttaactatgag

SEQ ID NO: 74146 - DNA, 30 bp, Artificial Sequence
  Synthetic oligonucleotide
tgtgggcccaccgttggagctgtctatgag

SEQ ID NO: 74147 - DNA, 30 bp, Artificial Sequence
  Synthetic oligonucleotide
gtccgcgtacactgtaacccgacgtatgag

SEQ ID NO: 74148 - DNA, 30 bp, Artificial Sequence
  Synthetic oligonucleotide
aggggagctcgtatcaaccaaggtactgag

SEQ ID NO: 74149 - DNA, 30 bp, Artificial Sequence
  Synthetic oligonucleotide
gacgcattgttcataggggttattactgag

SEQ ID NO: 74150 - DNA, 30 bp, Artificial Sequence
  Synthetic oligonucleotide
tgaaatactcgtagaacaccgggccctgag

SEQ ID NO: 74151 - DNA, 30 bp, Artificial Sequence
  Synthetic oligonucleotide
aacaattcccctacgtacaggcaatctgag

SEQ ID NO: 74152 - DNA, 30 bp, Artificial Sequence
  Synthetic oligonucleotide
cgtggaagcgcgcatggactccgatctgag

SEQ ID NO: 74153 - DNA, 30 bp, Artificial Sequence
  Synthetic oligonucleotide
cagcttgacgatgagtgcatgttctctgag

SEQ ID NO: 74154 - DNA, 30 bp, Artificial Sequence
  Synthetic oligonucleotide
aatggtccaccttacgcgagtctgtctgag

SEQ ID NO: 74155 - DNA, 30 bp, Artificial Sequence
  Synthetic oligonucleotide
cggcacacggttaagttcgtttgcagtgag

SEQ ID NO: 74156 - DNA, 30 bp, Artificial Sequence
  Synthetic oligonucleotide
ggcattattagccgggaaatgaagagtgag

SEQ ID NO: 74157 - DNA, 30 bp, Artificial Sequence
  Synthetic oligonucleotide
gaaggacaaaatcgtccaggtatgagtgag

SEQ ID NO: 74158 - DNA, 30 bp, Artificial Sequence
  Synthetic oligonucleotide
gcgacgacgcaaatctggagtctacgtgag

SEQ ID NO: 74159 - DNA, 30 bp, Artificial Sequence
  Synthetic oligonucleotide
tgatagctttttcggcaggaccgcggtgag

SEQ ID NO: 74160 - DNA, 30 bp, Artificial Sequence
  Synthetic oligonucleotide
tgggagtaggcgaatgtcgtaaccattgag

SEQ ID NO: 74161 - DNA, 30 bp, Artificial Sequence
  Synthetic oligonucleotide
ggtaagcgacggcgtattgtcgctattgag

SEQ ID NO: 74162 - DNA, 30 bp, Artificial Sequence
  Synthetic oligonucleotide
cataaaacgatcatctatcacgcagttgag

SEQ ID NO: 74163 - DNA, 30 bp, Artificial Sequence
  Synthetic oligonucleotide
ctatagccttatacgatttcgtgcgttgag

SEQ ID NO: 74164 - DNA, 30 bp, Artificial Sequence
  Synthetic oligonucleotide
taccgaaacatcctaagggaaacatttgag

SEQ ID NO: 74165 - DNA, 30 bp, Artificial Sequence
  Synthetic oligonucleotide
cacaaaccttgtggtcaaaaacgccaatag

SEQ ID NO: 74166 - DNA, 30 bp, Artificial Sequence
  Synthetic oligonucleotide
tgcagactgaaaggcccctaagtcgaatag

SEQ ID NO: 74167 - DNA, 30 bp, Artificial Sequence
  Synthetic oligonucleotide
caagatggcaggcaggtgtgctgggaatag

SEQ ID NO: 74168 - DNA, 30 bp, Artificial Sequence
  Synthetic oligonucleotide
tgcgtggtcgacgtgttcggcatataatag

SEQ ID NO: 74169 - DNA, 30 bp, Artificial Sequence
  Synthetic oligonucleotide
ttgcaaagtcggccagatgtgttataatag

SEQ ID NO: 74170 - DNA, 30 bp, Artificial Sequence
  Synthetic oligonucleotide
cccgaagtttccgatcagaactagacatag

SEQ ID NO: 74171 - DNA, 30 bp, Artificial Sequence
  Synthetic oligonucleotide
gttcgctggtaattcaaggactcaccatag

SEQ ID NO: 74172 - DNA, 30 bp, Artificial Sequence
  Synthetic oligonucleotide
aaagtagattgcgtccggtcgggagcatag

SEQ ID NO: 74173 - DNA, 30 bp, Artificial Sequence
  Synthetic oligonucleotide
gctcacagttcggatcagtattagtcatag

SEQ ID NO: 74174 - DNA, 30 bp, Artificial Sequence
  Synthetic oligonucleotide
acacaaccgcctacggctggaaacagatag

SEQ ID NO: 74175 - DNA, 30 bp, Artificial Sequence
  Synthetic oligonucleotide
gggaaaaatgttccccatctcaggagatag

SEQ ID NO: 74176 - DNA, 30 bp, Artificial Sequence
  Synthetic oligonucleotide
gaagagataagctaaacacccgggagatag

SEQ ID NO: 74177 - DNA, 31 bp, Artificial Sequence
  Synthetic oligonucleotide
aagcaaggattcgcacaagataatgagatag

SEQ ID NO: 74178 - DNA, 30 bp, Artificial Sequence
  Synthetic oligonucleotide
actgaatggatgtctattgaaacccgatag

SEQ ID NO: 74179 - DNA, 30 bp, Artificial Sequence
  Synthetic oligonucleotide
caagcgtgctaggtgttgtggctccgatag

SEQ ID NO: 74180 - DNA, 30 bp, Artificial Sequence
  Synthetic oligonucleotide
aacaaagtatcgtaggtgaagcggcgatag

SEQ ID NO: 74181 - DNA, 30 bp, Artificial Sequence
  Synthetic oligonucleotide
tcactactggcggaacccaagcatcgatag

SEQ ID NO: 74182 - DNA, 30 bp, Artificial Sequence
  Synthetic oligonucleotide
aagagggtgtcaatgggactaaaaggatag

SEQ ID NO: 74183 - DNA, 30 bp, Artificial Sequence
  Synthetic oligonucleotide
ttatgaaaagcctctcgatggtaaggatag

SEQ ID NO: 74184 - DNA, 30 bp, Artificial Sequence
  Synthetic oligonucleotide
cagcgcctctaaatcgccatgtacggatag

SEQ ID NO: 74185 - DNA, 30 bp, Artificial Sequence
  Synthetic oligonucleotide
agactaacgtaaggcgatattgcgggatag

SEQ ID NO: 74186 - DNA, 30 bp, Artificial Sequence
  Synthetic oligonucleotide
acgacgggtttgaggggttgatggggatag

SEQ ID NO: 74187 - DNA, 30 bp, Artificial Sequence
  Synthetic oligonucleotide
cgatgtgtaaagctctggcggctgggatag

SEQ ID NO: 74188 - DNA, 30 bp, Artificial Sequence
  Synthetic oligonucleotide
aggtacgataccggtcctggattgggatag

SEQ ID NO: 74189 - DNA, 30 bp, Artificial Sequence
  Synthetic oligonucleotide
gataaggtggcccggacacgaggatgatag

SEQ ID NO: 74190 - DNA, 30 bp, Artificial Sequence
  Synthetic oligonucleotide
ccggtagggatgacctctgtaacaatatag

SEQ ID NO: 74191 - DNA, 30 bp, Artificial Sequence
  Synthetic oligonucleotide
cgtattggactaacgggagccttcatatag

SEQ ID NO: 74192 - DNA, 30 bp, Artificial Sequence
  Synthetic oligonucleotide
ctcgatcagatagaatatgcagttatatag

SEQ ID NO: 74193 - DNA, 30 bp, Artificial Sequence
  Synthetic oligonucleotide
tgtaagtagttcggtaacccccgcctatag

SEQ ID NO: 74194 - DNA, 30 bp, Artificial Sequence
  Synthetic oligonucleotide
gtaataataaaacgcgaaagtgtagtatag

SEQ ID NO: 74195 - DNA, 30 bp, Artificial Sequence
  Synthetic oligonucleotide
ctgcggaaaactgagtcgcaacacgtatag

SEQ ID NO: 74196 - DNA, 30 bp, Artificial Sequence
  Synthetic oligonucleotide
cctctacaaggcatccatacacagttatag

SEQ ID NO: 74197 - DNA, 30 bp, Artificial Sequence
  Synthetic oligonucleotide
agacaatgaaaaaccattatagagaactag

SEQ ID NO: 74198 - DNA, 30 bp, Artificial Sequence
  Synthetic oligonucleotide
aggatgtacatataaactatgcggaactag

SEQ ID NO: 74199 - DNA, 30 bp, Artificial Sequence
  Synthetic oligonucleotide
cctgccaaagcgatcgaacagtataactag

SEQ ID NO: 74200 - DNA, 30 bp, Artificial Sequence
  Synthetic oligonucleotide
caacatccctcgaggcgccgatcacactag

SEQ ID NO: 74201 - DNA, 30 bp, Artificial Sequence
  Synthetic oligonucleotide
ttcgtcgggagaacggatggcaaggactag

SEQ ID NO: 74202 - DNA, 30 bp, Artificial Sequence
  Synthetic oligonucleotide
aaatcgggtcactataatggaagggactag

SEQ ID NO: 74203 - DNA, 30 bp, Artificial Sequence
  Synthetic oligonucleotide
tgactgataaacatgcgacacgatgactag

SEQ ID NO: 74204 - DNA, 30 bp, Artificial Sequence
  Synthetic oligonucleotide
gggctcccggtcacccatatcccatactag

SEQ ID NO: 74205 - DNA, 30 bp, Artificial Sequence
  Synthetic oligonucleotide
gatgagttgcctgtaaagcgggattactag

SEQ ID NO: 74206 - DNA, 30 bp, Artificial Sequence
  Synthetic oligonucleotide
tcaaccgaagacattcaaaaagtaacctag

SEQ ID NO: 74207 - DNA, 30 bp, Artificial Sequence
  Synthetic oligonucleotide
gaatacgggatggaaataaagttaacctag

SEQ ID NO: 74208 - DNA, 30 bp, Artificial Sequence
  Synthetic oligonucleotide
tgacatggactatgataaactggtacctag

SEQ ID NO: 74209 - DNA, 30 bp, Artificial Sequence
  Synthetic oligonucleotide
gggctaaccatattaggactgtttacctag

SEQ ID NO: 74210 - DNA, 30 bp, Artificial Sequence
  Synthetic oligonucleotide
atggggtagtgggtcattattcgtccctag

SEQ ID NO: 74211 - DNA, 30 bp, Artificial Sequence
  Synthetic oligonucleotide
cagaaattattaacaaaaaatactgcctag

SEQ ID NO: 74212 - DNA, 30 bp, Artificial Sequence
  Synthetic oligonucleotide
attgcactcacccattgtgacacctcctag

SEQ ID NO: 74213 - DNA, 30 bp, Artificial Sequence
  Synthetic oligonucleotide
tgacaccgataagtgtaagctccgtcctag

SEQ ID NO: 74214 - DNA, 30 bp, Artificial Sequence
  Synthetic oligonucleotide
tagtcggtcgcatcagtccgaatgagctag

SEQ ID NO: 74215 - DNA, 30 bp, Artificial Sequence
  Synthetic oligonucleotide
acgaatgacgaacgccgaaaggtacgctag

SEQ ID NO: 74216 - DNA, 30 bp, Artificial Sequence
  Synthetic oligonucleotide
tcaattaaaatactactccacaatcgctag

SEQ ID NO: 74217 - DNA, 30 bp, Artificial Sequence
  Synthetic oligonucleotide
ggcttgagcaatatcaattatgactgctag

SEQ ID NO: 74218 - DNA, 30 bp, Artificial Sequence
  Synthetic oligonucleotide
ctctggtccattaggataaggtggtgctag

SEQ ID NO: 74219 - DNA, 30 bp, Artificial Sequence
  Synthetic oligonucleotide
ccctggcctcgatgttggtggtagatctag

SEQ ID NO: 74220 - DNA, 30 bp, Artificial Sequence
  Synthetic oligonucleotide
cgtgtcgacgatatgtaataaatgatctag

SEQ ID NO: 74221 - DNA, 30 bp, Artificial Sequence
  Synthetic oligonucleotide
ccaaaaacagtggacatttaaattatctag

SEQ ID NO: 74222 - DNA, 30 bp, Artificial Sequence
  Synthetic oligonucleotide
ctgatagccgcctgcggaaatccactctag

SEQ ID NO: 74223 - DNA, 30 bp, Artificial Sequence
  Synthetic oligonucleotide
tacgtaggaggctccggattccgactctag

SEQ ID NO: 74224 - DNA, 30 bp, Artificial Sequence
  Synthetic oligonucleotide
caacagcggaagaagtcaagcggactctag

SEQ ID NO: 74225 - DNA, 30 bp, Artificial Sequence
  Synthetic oligonucleotide
taccgagcaccggaggtggccgtcctctag

SEQ ID NO: 74226 - DNA, 30 bp, Artificial Sequence
  Synthetic oligonucleotide
ttgcctaaaagctgaattatacatctctag

SEQ ID NO: 74227 - DNA, 30 bp, Artificial Sequence
  Synthetic oligonucleotide
gaataacacatgtagggatcgatcgtctag

SEQ ID NO: 74228 - DNA, 30 bp, Artificial Sequence
  Synthetic oligonucleotide
gagcgggggacatctgtttcaaaggtctag

SEQ ID NO: 74229 - DNA, 30 bp, Artificial Sequence
  Synthetic oligonucleotide
agactccaagctggtacgccgaaggtctag

SEQ ID NO: 74230 - DNA, 30 bp, Artificial Sequence
  Synthetic oligonucleotide
ggaggggagatcaggaattgcgcaaagtag

SEQ ID NO: 74231 - DNA, 30 bp, Artificial Sequence
  Synthetic oligonucleotide
cccttaggaccctgttgtggcgtaaagtag

SEQ ID NO: 74232 - DNA, 30 bp, Artificial Sequence
  Synthetic oligonucleotide
tcacaagcgtctgagttgaaatttaagtag

SEQ ID NO: 74233 - DNA, 30 bp, Artificial Sequence
  Synthetic oligonucleotide
agccatgtggagggcggtataaccgagtag

SEQ ID NO: 74234 - DNA, 30 bp, Artificial Sequence
  Synthetic oligonucleotide
gttggagtgatagagatgtgccaggagtag

SEQ ID NO: 74235 - DNA, 30 bp, Artificial Sequence
  Synthetic oligonucleotide
tccgggcaactcggagccagatcggagtag

SEQ ID NO: 74236 - DNA, 30 bp, Artificial Sequence
  Synthetic oligonucleotide
ggcaatgacgatctgtacacttgggagtag

SEQ ID NO: 74237 - DNA, 30 bp, Artificial Sequence
  Synthetic oligonucleotide
cctggcgtctgagcgctgtcgacctagtag

SEQ ID NO: 74238 - DNA, 30 bp, Artificial Sequence
  Synthetic oligonucleotide
aggcgaggtggcctggaaggggtgtagtag

SEQ ID NO: 74239 - DNA, 30 bp, Artificial Sequence
  Synthetic oligonucleotide
gctcaacccgacatatgtggaataacgtag

SEQ ID NO: 74240 - DNA, 31 bp, Artificial Sequence
  Synthetic oligonucleotide
tatgcaaggcggtacatgctacaatacgtag

SEQ ID NO: 74241 - DNA, 30 bp, Artificial Sequence
  Synthetic oligonucleotide
gcaaggacagctgcggatccgtttacgtag

SEQ ID NO: 74242 - DNA, 30 bp, Artificial Sequence
  Synthetic oligonucleotide
tgacaataacgcgtaaagcgggtcccgtag

SEQ ID NO: 74243 - DNA, 30 bp, Artificial Sequence
  Synthetic oligonucleotide
gcctcctaggaccgattttcacaagcgtag

SEQ ID NO: 74244 - DNA, 30 bp, Artificial Sequence
  Synthetic oligonucleotide
acgcctgttcggatattgttacattcgtag

SEQ ID NO: 74245 - DNA, 30 bp, Artificial Sequence
  Synthetic oligonucleotide
ccgtgcgttgcgggggtccgataaaggtag

SEQ ID NO: 74246 - DNA, 30 bp, Artificial Sequence
  Synthetic oligonucleotide
agccggtacggcaaccttagtgtaaggtag

SEQ ID NO: 74247 - DNA, 30 bp, Artificial Sequence
  Synthetic oligonucleotide
tgtcgccgggaaacgcggaggggcaggtag

SEQ ID NO: 74248 - DNA, 30 bp, Artificial Sequence
  Synthetic oligonucleotide
agcgggacatcgagaatcgttggggggtag

SEQ ID NO: 74249 - DNA, 30 bp, Artificial Sequence
  Synthetic oligonucleotide
aggcaaggcaatcaggttggtaagtggtag

SEQ ID NO: 74250 - DNA, 30 bp, Artificial Sequence
  Synthetic oligonucleotide
aggcgaccggaatagcaccaaaattggtag

SEQ ID NO: 74251 - DNA, 30 bp, Artificial Sequence
  Synthetic oligonucleotide
cgatggcccttgctaagaaatcgcatgtag

SEQ ID NO: 74252 - DNA, 30 bp, Artificial Sequence
  Synthetic oligonucleotide
tgctagaccggaggccagtcaaggctgtag

SEQ ID NO: 74253 - DNA, 30 bp, Artificial Sequence
  Synthetic oligonucleotide
ctataaagtcagcgacgagattgcgtgtag

SEQ ID NO: 74254 - DNA, 30 bp, Artificial Sequence
  Synthetic oligonucleotide
gatcgatgtttgctatggcttaatttgtag

SEQ ID NO: 74255 - DNA, 30 bp, Artificial Sequence
  Synthetic oligonucleotide
gtacgttgtgacacaaagatcgtcaattag

SEQ ID NO: 74256 - DNA, 30 bp, Artificial Sequence
  Synthetic oligonucleotide
cgccacgcgaaatgaggtttcgtcaattag

SEQ ID NO: 74257 - DNA, 30 bp, Artificial Sequence
  Synthetic oligonucleotide
cctggaggaggtttaaacgtgagtgattag

SEQ ID NO: 74258 - DNA, 30 bp, Artificial Sequence
  Synthetic oligonucleotide
tcgagagataggtacttagagtattattag

SEQ ID NO: 74259 - DNA, 30 bp, Artificial Sequence
  Synthetic oligonucleotide
cggggaaggtcgatataggacccgacttag

SEQ ID NO: 74260 - DNA, 30 bp, Artificial Sequence
  Synthetic oligonucleotide
tcacgagggaggtatcttacggctacttag

SEQ ID NO: 74261 - DNA, 30 bp, Artificial Sequence
  Synthetic oligonucleotide
tgggtcaatacggatatccattatccttag

SEQ ID NO: 74262 - DNA, 30 bp, Artificial Sequence
  Synthetic oligonucleotide
gatgcgctatgcagtgagataagggcttag

SEQ ID NO: 74263 - DNA, 30 bp, Artificial Sequence
  Synthetic oligonucleotide
gaccgactataaactagaaagactagttag

SEQ ID NO: 74264 - DNA, 30 bp, Artificial Sequence
  Synthetic oligonucleotide
ccctaaactacgtgagtgtacggcatttag

SEQ ID NO: 74265 - DNA, 30 bp, Artificial Sequence
  Synthetic oligonucleotide
acgttgcgtcgtgcacgtattgctatttag

SEQ ID NO: 74266 - DNA, 30 bp, Artificial Sequence
  Synthetic oligonucleotide
atgaccgaatattcgtaggcaaatctttag

SEQ ID NO: 74267 - DNA, 30 bp, Artificial Sequence
  Synthetic oligonucleotide
ataagttatgcgatagccaggtaagtttag

SEQ ID NO: 74268 - DNA, 30 bp, Artificial Sequence
  Synthetic oligonucleotide
aagtaattcgagggaaaaacatatttttag

SEQ ID NO: 74269 - DNA, 30 bp, Artificial Sequence
  Synthetic oligonucleotide
aggtgcaagcagcatgcccgcaccaaaacg

SEQ ID NO: 74270 - DNA, 30 bp, Artificial Sequence
  Synthetic oligonucleotide
aaacaatactacaggggactaaataaaacg

SEQ ID NO: 74271 - DNA, 30 bp, Artificial Sequence
  Synthetic oligonucleotide
atggagagcggcggatcctttcataaaacg

SEQ ID NO: 74272 - DNA, 30 bp, Artificial Sequence
  Synthetic oligonucleotide
cgctccgaatatggcgtcttttaacaaacg

SEQ ID NO: 74273 - DNA, 30 bp, Artificial Sequence
  Synthetic oligonucleotide
aggccctcgcaattacttcagcagcaaacg

SEQ ID NO: 74274 - DNA, 30 bp, Artificial Sequence
  Synthetic oligonucleotide
gcctccgacttcatacggtagcaagaaacg

SEQ ID NO: 74275 - DNA, 30 bp, Artificial Sequence
  Synthetic oligonucleotide
catggcagcaataagaacatcacagaaacg

SEQ ID NO: 74276 - DNA, 30 bp, Artificial Sequence
  Synthetic oligonucleotide
ataggaaccggtggtgccacagatgaaacg

SEQ ID NO: 74277 - DNA, 30 bp, Artificial Sequence
  Synthetic oligonucleotide
gttggacatgtgaatggattgccatcaacg

SEQ ID NO: 74278 - DNA, 30 bp, Artificial Sequence
  Synthetic oligonucleotide
agctgttgagtggggagctctcaaagaacg

SEQ ID NO: 74279 - DNA, 30 bp, Artificial Sequence
  Synthetic oligonucleotide
tgtagcaaactgtcttcggtgatcagaacg

SEQ ID NO: 74280 - DNA, 30 bp, Artificial Sequence
  Synthetic oligonucleotide
taatgcggagagagacaagaattcggaacg

SEQ ID NO: 74281 - DNA, 30 bp, Artificial Sequence
  Synthetic oligonucleotide
tacaccgacaagttgaccctcttgggaacg

SEQ ID NO: 74282 - DNA, 30 bp, Artificial Sequence
  Synthetic oligonucleotide
gtaactggtaaccagtaagttggttgaacg

SEQ ID NO: 74283 - DNA, 30 bp, Artificial Sequence
  Synthetic oligonucleotide
ccgggtagattattacggcaagccataacg

SEQ ID NO: 74284 - DNA, 30 bp, Artificial Sequence
  Synthetic oligonucleotide
agacattgagtcatgtttgatacgataacg

SEQ ID NO: 74285 - DNA, 30 bp, Artificial Sequence
  Synthetic oligonucleotide
ttggtctataatcgtaatcagaaagtaacg

SEQ ID NO: 74286 - DNA, 30 bp, Artificial Sequence
  Synthetic oligonucleotide
agattactgggtggtcgcgggtcagtaacg

SEQ ID NO: 74287 - DNA, 30 bp, Artificial Sequence
  Synthetic oligonucleotide
ggaagcaattatctcttcatgaaggtaacg

SEQ ID NO: 74288 - DNA, 30 bp, Artificial Sequence
  Synthetic oligonucleotide
ggcgtggtcttgctgggtcgagcattaacg

SEQ ID NO: 74289 - DNA, 30 bp, Artificial Sequence
  Synthetic oligonucleotide
tgcgtgcaaaaatttagaggacggttaacg

SEQ ID NO: 74290 - DNA, 30 bp, Artificial Sequence
  Synthetic oligonucleotide
taggagggagagtacgttccgtcgaacacg

SEQ ID NO: 74291 - DNA, 30 bp, Artificial Sequence
  Synthetic oligonucleotide
acaaagctcgaagttgttcggcataacacg

SEQ ID NO: 74292 - DNA, 30 bp, Artificial Sequence
  Synthetic oligonucleotide
tatggacagctgaatgcccatggtaacacg

SEQ ID NO: 74293 - DNA, 30 bp, Artificial Sequence
  Synthetic oligonucleotide
cactaacactgagagtggtatgaccacacg

SEQ ID NO: 74294 - DNA, 30 bp, Artificial Sequence
  Synthetic oligonucleotide
gagcttctgtagtgatcaacacgagacacg

SEQ ID NO: 74295 - DNA, 30 bp, Artificial Sequence
  Synthetic oligonucleotide
gggaaatgccagccctcgtacatcgacacg

SEQ ID NO: 74296 - DNA, 30 bp, Artificial Sequence
  Synthetic oligonucleotide
agactggggtgagcgaaagccatagccacg

SEQ ID NO: 74297 - DNA, 30 bp, Artificial Sequence
  Synthetic oligonucleotide
cgtgaagacacatcatgacgcgacgccacg

SEQ ID NO: 74298 - DNA, 30 bp, Artificial Sequence
  Synthetic oligonucleotide
cttccacgactaccgagtgccatatccacg

SEQ ID NO: 74299 - DNA, 30 bp, Artificial Sequence
  Synthetic oligonucleotide
acggataaggtccagtacctaagaagcacg

SEQ ID NO: 74300 - DNA, 30 bp, Artificial Sequence
  Synthetic oligonucleotide
gacctcgaactggtgagaaaaagcagcacg

SEQ ID NO: 74301 - DNA, 30 bp, Artificial Sequence
  Synthetic oligonucleotide
cgaacctgttgatcacgatcactgggcacg

SEQ ID NO: 74302 - DNA, 30 bp, Artificial Sequence
  Synthetic oligonucleotide
caagacctgggcgcttagacatggtgcacg

SEQ ID NO: 74303 - DNA, 30 bp, Artificial Sequence
  Synthetic oligonucleotide
agtaacgtatacatcctatacaagatcacg

SEQ ID NO: 74304 - DNA, 30 bp, Artificial Sequence
  Synthetic oligonucleotide
acacggggtattcatttgtgacagatcacg

SEQ ID NO: 74305 - DNA, 30 bp, Artificial Sequence
  Synthetic oligonucleotide
gcaacatgcaaacggtatggccagatcacg

SEQ ID NO: 74306 - DNA, 30 bp, Artificial Sequence
  Synthetic oligonucleotide
tttacagcaggagagaaacaggcgatcacg

SEQ ID NO: 74307 - DNA, 31 bp, Artificial Sequence
  Synthetic oligonucleotide
taaggttaccaggtaacgaccagttatcacg

SEQ ID NO: 74308 - DNA, 30 bp, Artificial Sequence
  Synthetic oligonucleotide
acggcagcatgcactgtaagatagctcacg

SEQ ID NO: 74309 - DNA, 30 bp, Artificial Sequence
  Synthetic oligonucleotide
acgcggggtgacgaggtactgtaagtcacg

SEQ ID NO: 74310 - DNA, 30 bp, Artificial Sequence
  Synthetic oligonucleotide
tggcggctgctataaaggaacacagtcacg

SEQ ID NO: 74311 - DNA, 30 bp, Artificial Sequence
  Synthetic oligonucleotide
aaaggaggtggctcgacgagtgaggtcacg

SEQ ID NO: 74312 - DNA, 30 bp, Artificial Sequence
  Synthetic oligonucleotide
acggtggagtagtgaaacgccaacttcacg

SEQ ID NO: 74313 - DNA, 30 bp, Artificial Sequence
  Synthetic oligonucleotide
ggtactaactcgaatttagatagaaagacg

SEQ ID NO: 74314 - DNA, 30 bp, Artificial Sequence
  Synthetic oligonucleotide
caggaaacaacagaactttggactaagacg

SEQ ID NO: 74315 - DNA, 30 bp, Artificial Sequence
  Synthetic oligonucleotide
acattctatcgtagtcttgtacaacagacg

SEQ ID NO: 74316 - DNA, 30 bp, Artificial Sequence
  Synthetic oligonucleotide
agttggccgttgggtaataagttacagacg

SEQ ID NO: 74317 - DNA, 30 bp, Artificial Sequence
  Synthetic oligonucleotide
atgggtccacaagagcctaaggggtagacg

SEQ ID NO: 74318 - DNA, 30 bp, Artificial Sequence
  Synthetic oligonucleotide
tgataacatcagagcctaagtaacacgacg

SEQ ID NO: 74319 - DNA, 30 bp, Artificial Sequence
  Synthetic oligonucleotide
acgggtccacagcgaggcacggttacgacg

SEQ ID NO: 74320 - DNA, 30 bp, Artificial Sequence
  Synthetic oligonucleotide
tcttctgggcgaggaatttgatttacgacg

SEQ ID NO: 74321 - DNA, 30 bp, Artificial Sequence
  Synthetic oligonucleotide
gggtcatggaaagacaccgcaaacccgacg

SEQ ID NO: 74322 - DNA, 30 bp, Artificial Sequence
  Synthetic oligonucleotide
tgaaaggaaagcgtttccgtggatcggacg

SEQ ID NO: 74323 - DNA, 30 bp, Artificial Sequence
  Synthetic oligonucleotide
acaggcgcatagggagtgattggtatgacg

SEQ ID NO: 74324 - DNA, 30 bp, Artificial Sequence
  Synthetic oligonucleotide
aggtgatgtggagtaatggcccaactgacg

SEQ ID NO: 74325 - DNA, 30 bp, Artificial Sequence
  Synthetic oligonucleotide
gcggtaagaacacaactttaaggaaatacg

SEQ ID NO: 74326 - DNA, 30 bp, Artificial Sequence
  Synthetic oligonucleotide
acgcacgatagagatgtgtatgccaatacg

SEQ ID NO: 74327 - DNA, 30 bp, Artificial Sequence
  Synthetic oligonucleotide
tgctacaacccctctaaaaaaaggaatacg

SEQ ID NO: 74328 - DNA, 30 bp, Artificial Sequence
  Synthetic oligonucleotide
acacgtaagaactagatccgcacacatacg

SEQ ID NO: 74329 - DNA, 30 bp, Artificial Sequence
  Synthetic oligonucleotide
gggagcaacccctcgtctgcgccccatacg

SEQ ID NO: 74330 - DNA, 30 bp, Artificial Sequence
  Synthetic oligonucleotide
tggcagataaggagaaccctgctagatacg

SEQ ID NO: 74331 - DNA, 30 bp, Artificial Sequence
  Synthetic oligonucleotide
aggagtgatcgcaatatccaagatgatacg

SEQ ID NO: 74332 - DNA, 30 bp, Artificial Sequence
  Synthetic oligonucleotide
tcgtctgggacgtcgagcagttcgtatacg

SEQ ID NO: 74333 - DNA, 30 bp, Artificial Sequence
  Synthetic oligonucleotide
ttgagggtgtgctacggactaatgtatacg

SEQ ID NO: 74334 - DNA, 30 bp, Artificial Sequence
  Synthetic oligonucleotide
gaacggggcatatcgggctaagcttctacg

SEQ ID NO: 74335 - DNA, 30 bp, Artificial Sequence
  Synthetic oligonucleotide
tgaagtaagcggctgaacgcgtaaagtacg

SEQ ID NO: 74336 - DNA, 30 bp, Artificial Sequence
  Synthetic oligonucleotide
acgttccgagtcagggaggaaacaagtacg

SEQ ID NO: 74337 - DNA, 30 bp, Artificial Sequence
  Synthetic oligonucleotide
gtgaattattacccccccgcgccgagtacg

SEQ ID NO: 74338 - DNA, 30 bp, Artificial Sequence
  Synthetic oligonucleotide
gcacacagccaaaggcgaccaatacgtacg

SEQ ID NO: 74339 - DNA, 29 bp, Artificial Sequence
  Synthetic oligonucleotide
cccgaaggtgtaaccgtaccgagcgtacg

SEQ ID NO: 74340 - DNA, 30 bp, Artificial Sequence
  Synthetic oligonucleotide
cgacgaccaagttgcaacaacgactgtacg

SEQ ID NO: 74341 - DNA, 30 bp, Artificial Sequence
  Synthetic oligonucleotide
cggcgcgtcgtggaagcagtcatctgtacg

SEQ ID NO: 74342 - DNA, 30 bp, Artificial Sequence
  Synthetic oligonucleotide
tggcaactagggtgctgtcatgtcattacg

SEQ ID NO: 74343 - DNA, 30 bp, Artificial Sequence
  Synthetic oligonucleotide
atctcaaggcaaggcgtaattaagcttacg

SEQ ID NO: 74344 - DNA, 30 bp, Artificial Sequence
  Synthetic oligonucleotide
tgcccgtacatgcttaagaggcgagttacg

SEQ ID NO: 74345 - DNA, 30 bp, Artificial Sequence
  Synthetic oligonucleotide
tggttcaagtcaggcggttaactggttacg

SEQ ID NO: 74346 - DNA, 30 bp, Artificial Sequence
  Synthetic oligonucleotide
caaggcattttcgttatcacatttaaaccg

SEQ ID NO: 74347 - DNA, 30 bp, Artificial Sequence
  Synthetic oligonucleotide
aatgggcgcacaaaataagtaaaacaaccg

SEQ ID NO: 74348 - DNA, 30 bp, Artificial Sequence
  Synthetic oligonucleotide
tcggctgaattgtgtcgtgtataacaaccg

SEQ ID NO: 74349 - DNA, 30 bp, Artificial Sequence
  Synthetic oligonucleotide
ctcgggactctaggaaaccaacgacaaccg

SEQ ID NO: 74350 - DNA, 30 bp, Artificial Sequence
  Synthetic oligonucleotide
aggagaggaaaaacgggcactctccaaccg

SEQ ID NO: 74351 - DNA, 30 bp, Artificial Sequence
  Synthetic oligonucleotide
cgttccctacgtatttatgaacagcaaccg

SEQ ID NO: 74352 - DNA, 30 bp, Artificial Sequence
  Synthetic oligonucleotide
tcaggccgtcgacaggttctgaggcaaccg

SEQ ID NO: 74353 - DNA, 30 bp, Artificial Sequence
  Synthetic oligonucleotide
tcagctctcgcccgcaacctaaacgaaccg

SEQ ID NO: 74354 - DNA, 30 bp, Artificial Sequence
  Synthetic oligonucleotide
ggttctagatcgggaccagctaacgaaccg

SEQ ID NO: 74355 - DNA, 30 bp, Artificial Sequence
  Synthetic oligonucleotide
agctatgttatccctccacccgaataaccg

SEQ ID NO: 74356 - DNA, 30 bp, Artificial Sequence
  Synthetic oligonucleotide
gcgtcgaggcttgacctccttacataaccg

SEQ ID NO: 74357 - DNA, 30 bp, Artificial Sequence
  Synthetic oligonucleotide
aacggggccgtgggtcgactcatctaaccg

SEQ ID NO: 74358 - DNA, 30 bp, Artificial Sequence
  Synthetic oligonucleotide
agaggctagtgaacaaaaggccagtaaccg

SEQ ID NO: 74359 - DNA, 30 bp, Artificial Sequence
  Synthetic oligonucleotide
atacaaagcagaacaaagcacgcaacaccg

SEQ ID NO: 74360 - DNA, 30 bp, Artificial Sequence
  Synthetic oligonucleotide
aaggcgccacttcagaacactggaacaccg

SEQ ID NO: 74361 - DNA, 30 bp, Artificial Sequence
  Synthetic oligonucleotide
acgactaggcggcgttcacgaatgacaccg

SEQ ID NO: 74362 - DNA, 30 bp, Artificial Sequence
  Synthetic oligonucleotide
ggcaaacacgaggcgctcccaggaccaccg

SEQ ID NO: 74363 - DNA, 30 bp, Artificial Sequence
  Synthetic oligonucleotide
gcgggtcggctcggtatatcaaagccaccg

SEQ ID NO: 74364 - DNA, 30 bp, Artificial Sequence
  Synthetic oligonucleotide
ggggttggatgtcggtaaagcaagccaccg

SEQ ID NO: 74365 - DNA, 30 bp, Artificial Sequence
  Synthetic oligonucleotide
gacagaaatactcagaccagtcagccaccg

SEQ ID NO: 74366 - DNA, 30 bp, Artificial Sequence
  Synthetic oligonucleotide
cacataacggaaaggagacgagaagcaccg

SEQ ID NO: 74367 - DNA, 30 bp, Artificial Sequence
  Synthetic oligonucleotide
aggtacttcagacggaacagattggcaccg

SEQ ID NO: 74368 - DNA, 30 bp, Artificial Sequence
  Synthetic oligonucleotide
acggattgtcgcccgtcagcgaattcaccg

SEQ ID NO: 74369 - DNA, 30 bp, Artificial Sequence
  Synthetic oligonucleotide
ggccttcactgcgacatagagccacgaccg

SEQ ID NO: 74370 - DNA, 30 bp, Artificial Sequence
  Synthetic oligonucleotide
aaggtgatgcacatgtaaagcggcggaccg

SEQ ID NO: 74371 - DNA, 30 bp, Artificial Sequence
  Synthetic oligonucleotide
tattcgttgaggtaacccacgaggggaccg

SEQ ID NO: 74372 - DNA, 30 bp, Artificial Sequence
  Synthetic oligonucleotide
gggatcttgaggaatcatgcgattggaccg

SEQ ID NO: 74373 - DNA, 30 bp, Artificial Sequence
  Synthetic oligonucleotide
taatatggcctgggcgagcggaagtgaccg

SEQ ID NO: 74374 - DNA, 30 bp, Artificial Sequence
  Synthetic oligonucleotide
agcagagtaagtgttggcgacagtataccg

SEQ ID NO: 74375 - DNA, 30 bp, Artificial Sequence
  Synthetic oligonucleotide
tgaagaacgtgtacagggagaagactaccg

SEQ ID NO: 74376 - DNA, 30 bp, Artificial Sequence
  Synthetic oligonucleotide
aggtcacgacggaggtcgggttaggtaccg

SEQ ID NO: 74377 - DNA, 30 bp, Artificial Sequence
  Synthetic oligonucleotide
gatatagcaaacaagggcgggcctgtaccg

SEQ ID NO: 74378 - DNA, 30 bp, Artificial Sequence
  Synthetic oligonucleotide
cggggagacagcgtaggttgacgtaacccg

SEQ ID NO: 74379 - DNA, 30 bp, Artificial Sequence
  Synthetic oligonucleotide
agattagtaaagacgtcgcctagcgacccg

SEQ ID NO: 74380 - DNA, 30 bp, Artificial Sequence
  Synthetic oligonucleotide
cgtccctgtgtatcccggaacaagtacccg

SEQ ID NO: 74381 - DNA, 30 bp, Artificial Sequence
  Synthetic oligonucleotide
atcggcttaatcatatgtccggcgtacccg

SEQ ID NO: 74382 - DNA, 30 bp, Artificial Sequence
  Synthetic oligonucleotide
aaaagcacaaaagcagcggtaggaaccccg

SEQ ID NO: 74383 - DNA, 30 bp, Artificial Sequence
  Synthetic oligonucleotide
gtgtggcaggctggagattcacttcccccg

SEQ ID NO: 74384 - DNA, 30 bp, Artificial Sequence
  Synthetic oligonucleotide
acaaagagcaaaggtctacttggatccccg

SEQ ID NO: 74385 - DNA, 30 bp, Artificial Sequence
  Synthetic oligonucleotide
tggggatagcgatagtcgccattcagcccg

SEQ ID NO: 74386 - DNA, 30 bp, Artificial Sequence
  Synthetic oligonucleotide
gcgtgagggaaagctagttgaggtagcccg

SEQ ID NO: 74387 - DNA, 30 bp, Artificial Sequence
  Synthetic oligonucleotide
cataaagaaatgggctcgcttccacgcccg

SEQ ID NO: 74388 - DNA, 30 bp, Artificial Sequence
  Synthetic oligonucleotide
caggagatacagtcggactatgctcgcccg

SEQ ID NO: 74389 - DNA, 30 bp, Artificial Sequence
  Synthetic oligonucleotide
cacaagcgaaagcaaactatagggggcccg

SEQ ID NO: 74390 - DNA, 30 bp, Artificial Sequence
  Synthetic oligonucleotide
catgtgggacatggctaagaaaatggcccg

SEQ ID NO: 74391 - DNA, 30 bp, Artificial Sequence
  Synthetic oligonucleotide
tcaagcgttgcggaagttgttcatggcccg

SEQ ID NO: 74392 - DNA, 30 bp, Artificial Sequence
  Synthetic oligonucleotide
aaataagatccctcatgtcgtactggcccg

SEQ ID NO: 74393 - DNA, 30 bp, Artificial Sequence
  Synthetic oligonucleotide
ggacgcgagaggtcactacggccatgcccg

SEQ ID NO: 74394 - DNA, 30 bp, Artificial Sequence
  Synthetic oligonucleotide
gttatgcgagcaagaaatcccctatgcccg

SEQ ID NO: 74395 - DNA, 30 bp, Artificial Sequence
  Synthetic oligonucleotide
aaatagaggtcgaatgcgccaaggtgcccg

SEQ ID NO: 74396 - DNA, 30 bp, Artificial Sequence
  Synthetic oligonucleotide
acgagaacatttcacgtcaaccggtgcccg

SEQ ID NO: 74397 - DNA, 30 bp, Artificial Sequence
  Synthetic oligonucleotide
acggatagcgaacctgccgtttaaatcccg

SEQ ID NO: 74398 - DNA, 30 bp, Artificial Sequence
  Synthetic oligonucleotide
cggggagttaactaactacggagtatcccg

SEQ ID NO: 74399 - DNA, 30 bp, Artificial Sequence
  Synthetic oligonucleotide
ttcgacatgtatggcaaagggcgtgtcccg

SEQ ID NO: 74400 - DNA, 30 bp, Artificial Sequence
  Synthetic oligonucleotide
cacgataagaaacgctagtgattattcccg

SEQ ID NO: 74401 - DNA, 30 bp, Artificial Sequence
  Synthetic oligonucleotide
ctcgccatagtgtctagaggcattttcccg

SEQ ID NO: 74402 - DNA, 30 bp, Artificial Sequence
  Synthetic oligonucleotide
acgattgatacgaacggtaatcaatagccg

SEQ ID NO: 74403 - DNA, 30 bp, Artificial Sequence
  Synthetic oligonucleotide
caggtgcggacccaagttacgttctagccg

SEQ ID NO: 74404 - DNA, 30 bp, Artificial Sequence
  Synthetic oligonucleotide
ctgcattaccatatgcaggtttcgtagccg

SEQ ID NO: 74405 - DNA, 30 bp, Artificial Sequence
  Synthetic oligonucleotide
agagacggaataaatttgatcccaacgccg

SEQ ID NO: 74406 - DNA, 30 bp, Artificial Sequence
  Synthetic oligonucleotide
ctcgccacactagagcaaggcgacacgccg

SEQ ID NO: 74407 - DNA, 29 bp, Artificial Sequence
  Synthetic oligonucleotide
gaaagaagaaagcagggcgcgctacgccg

SEQ ID NO: 74408 - DNA, 30 bp, Artificial Sequence
  Synthetic oligonucleotide
actcctgttcgatagtataaattaccgccg

SEQ ID NO: 74409 - DNA, 30 bp, Artificial Sequence
  Synthetic oligonucleotide
cttcaaatacccggagagcatcctccgccg

SEQ ID NO: 74410 - DNA, 30 bp, Artificial Sequence
  Synthetic oligonucleotide
tagtccatgtactctaaaggcgctccgccg

SEQ ID NO: 74411 - DNA, 30 bp, Artificial Sequence
  Synthetic oligonucleotide
ttactggaggtccccctacacaaggcgccg

SEQ ID NO: 74412 - DNA, 30 bp, Artificial Sequence
  Synthetic oligonucleotide
gtcaaacagcgggaatggggcacatcgccg

SEQ ID NO: 74413 - DNA, 30 bp, Artificial Sequence
  Synthetic oligonucleotide
cgttgtgttacttcaagttatcggtcgccg

SEQ ID NO: 74414 - DNA, 30 bp, Artificial Sequence
  Synthetic oligonucleotide
gagctttactgaacgagaaaatagcggccg

SEQ ID NO: 74415 - DNA, 30 bp, Artificial Sequence
  Synthetic oligonucleotide
ccggtcgttagaaagcaggcaggagggccg

SEQ ID NO: 74416 - DNA, 30 bp, Artificial Sequence
  Synthetic oligonucleotide
taattccggtaaaagaatgacagggggccg

SEQ ID NO: 74417 - DNA, 30 bp, Artificial Sequence
  Synthetic oligonucleotide
tggatgggtgcaaagaagcgttcgtggccg

SEQ ID NO: 74418 - DNA, 30 bp, Artificial Sequence
  Synthetic oligonucleotide
caggaaatctgctgaatacgttaactgccg

SEQ ID NO: 74419 - DNA, 30 bp, Artificial Sequence
  Synthetic oligonucleotide
cgggatacattctgagttgatcaggtgccg

SEQ ID NO: 74420 - DNA, 30 bp, Artificial Sequence
  Synthetic oligonucleotide
gcactctcgaactacacaaccaggttgccg

SEQ ID NO: 74421 - DNA, 30 bp, Artificial Sequence
  Synthetic oligonucleotide
gcggagaaaggagcatcaattgggaatccg

SEQ ID NO: 74422 - DNA, 30 bp, Artificial Sequence
  Synthetic oligonucleotide
ggattaggggggctggaagaaatagatccg

SEQ ID NO: 74423 - DNA, 30 bp, Artificial Sequence
  Synthetic oligonucleotide
agtcgattcgaccgaactggtagatatccg

SEQ ID NO: 74424 - DNA, 30 bp, Artificial Sequence
  Synthetic oligonucleotide
taccacacaatacgacggaagctgtatccg

SEQ ID NO: 74425 - DNA, 30 bp, Artificial Sequence
  Synthetic oligonucleotide
cccagtggcgcaaagtccgatggacctccg

SEQ ID NO: 74426 - DNA, 30 bp, Artificial Sequence
  Synthetic oligonucleotide
cggaagcaggcattgtagcgagcgcctccg

SEQ ID NO: 74427 - DNA, 30 bp, Artificial Sequence
  Synthetic oligonucleotide
cctgaaccaggaaatttcatacatgctccg

SEQ ID NO: 74428 - DNA, 30 bp, Artificial Sequence
  Synthetic oligonucleotide
caacccacacaggcatccccgcgtgctccg

SEQ ID NO: 74429 - DNA, 30 bp, Artificial Sequence
  Synthetic oligonucleotide
cggggatgattctgcccatttccatctccg

SEQ ID NO: 74430 - DNA, 30 bp, Artificial Sequence
  Synthetic oligonucleotide
tagataatgagttctggaaacagaagtccg

SEQ ID NO: 74431 - DNA, 30 bp, Artificial Sequence
  Synthetic oligonucleotide
agggtacaacaatgaaagtgatagagtccg

SEQ ID NO: 74432 - DNA, 30 bp, Artificial Sequence
  Synthetic oligonucleotide
actcggatccggggggtcctgactcgtccg

SEQ ID NO: 74433 - DNA, 30 bp, Artificial Sequence
  Synthetic oligonucleotide
agattcgggcgtcagacagcgtgcggtccg

SEQ ID NO: 74434 - DNA, 30 bp, Artificial Sequence
  Synthetic oligonucleotide
cataaagactagccaatcagtgaaattccg

SEQ ID NO: 74435 - DNA, 30 bp, Artificial Sequence
  Synthetic oligonucleotide
cgatatgatgaacgttacccccagattccg

SEQ ID NO: 74436 - DNA, 30 bp, Artificial Sequence
  Synthetic oligonucleotide
gcaggttgagcggctacctaacgacttccg

SEQ ID NO: 74437 - DNA, 30 bp, Artificial Sequence
  Synthetic oligonucleotide
cgtaagtagcatgcaactggatggcttccg

SEQ ID NO: 74438 - DNA, 30 bp, Artificial Sequence
  Synthetic oligonucleotide
gtcagacgggggtgtgcatggaaagttccg

SEQ ID NO: 74439 - DNA, 30 bp, Artificial Sequence
  Synthetic oligonucleotide
cgaagagcgagaatatacgctcatgttccg

SEQ ID NO: 74440 - DNA, 30 bp, Artificial Sequence
  Synthetic oligonucleotide
gccatggtcgaattcgataacctaaaagcg

SEQ ID NO: 74441 - DNA, 30 bp, Artificial Sequence
  Synthetic oligonucleotide
tactattgacttcgataactcttcaaagcg

SEQ ID NO: 74442 - DNA, 30 bp, Artificial Sequence
  Synthetic oligonucleotide
ggcttgtcacaagtagagacatcacaagcg

SEQ ID NO: 74443 - DNA, 30 bp, Artificial Sequence
  Synthetic oligonucleotide
catgcggaaggggattttctgaaccaagcg

SEQ ID NO: 74444 - DNA, 30 bp, Artificial Sequence
  Synthetic oligonucleotide
aaatcaggaatagtcaaaaactttcaagcg

SEQ ID NO: 74445 - DNA, 30 bp, Artificial Sequence
  Synthetic oligonucleotide
tactgggcatagtagtgagggcccgaagcg

SEQ ID NO: 74446 - DNA, 30 bp, Artificial Sequence
  Synthetic oligonucleotide
tggattagtagtctatgccaaatcgaagcg

SEQ ID NO: 74447 - DNA, 30 bp, Artificial Sequence
  Synthetic oligonucleotide
attcggccaaggtagtgctgaagggaagcg

SEQ ID NO: 74448 - DNA, 30 bp, Artificial Sequence
  Synthetic oligonucleotide
tggtcacagggaccttaacttacaacagcg

SEQ ID NO: 74449 - DNA, 30 bp, Artificial Sequence
  Synthetic oligonucleotide
tcgtgcagataaagccgtcccccaacagcg

SEQ ID NO: 74450 - DNA, 30 bp, Artificial Sequence
  Synthetic oligonucleotide
caaaccgcgtattaactgctcggaacagcg

SEQ ID NO: 74451 - DNA, 30 bp, Artificial Sequence
  Synthetic oligonucleotide
tgctcgcggggacatgcgtctagcacagcg

SEQ ID NO: 74452 - DNA, 30 bp, Artificial Sequence
  Synthetic oligonucleotide
cgtttatattaatcaggactaaccccagcg

SEQ ID NO: 74453 - DNA, 30 bp, Artificial Sequence
  Synthetic oligonucleotide
caacgattacatcggcaaatcacagcagcg

SEQ ID NO: 74454 - DNA, 30 bp, Artificial Sequence
  Synthetic oligonucleotide
accaaaaccgtactaacgacgggttcagcg

SEQ ID NO: 74455 - DNA, 30 bp, Artificial Sequence
  Synthetic oligonucleotide
ggcaaaaacgcaacagtttttggaagagcg

SEQ ID NO: 74456 - DNA, 30 bp, Artificial Sequence
  Synthetic oligonucleotide
gcctatcgagggttgtgaagcgcgagagcg

SEQ ID NO: 74457 - DNA, 30 bp, Artificial Sequence
  Synthetic oligonucleotide
accttgggtgtacataacttatgaggagcg

SEQ ID NO: 74458 - DNA, 30 bp, Artificial Sequence
  Synthetic oligonucleotide
tccatgtagggtagaacagtgcacggagcg

SEQ ID NO: 74459 - DNA, 30 bp, Artificial Sequence
  Synthetic oligonucleotide
ggacctcaatatagttaggtacgatgagcg

SEQ ID NO: 74460 - DNA, 30 bp, Artificial Sequence
  Synthetic oligonucleotide
cctatagcgatgaccgaaagtctatgagcg

SEQ ID NO: 74461 - DNA, 30 bp, Artificial Sequence
  Synthetic oligonucleotide
tatgtcaagacgagtgatccacactgagcg

SEQ ID NO: 74462 - DNA, 30 bp, Artificial Sequence
  Synthetic oligonucleotide
tgaggatatccctgaaccgcacggtgagcg

SEQ ID NO: 74463 - DNA, 30 bp, Artificial Sequence
  Synthetic oligonucleotide
gtcgtgtaaggacgagctaagacaatagcg

SEQ ID NO: 74464 - DNA, 30 bp, Artificial Sequence
  Synthetic oligonucleotide
ggatctagtaagattaccgaggatgtagcg

SEQ ID NO: 74465 - DNA, 30 bp, Artificial Sequence
  Synthetic oligonucleotide
ccgcgccgaagaaattcttctcctgtagcg

SEQ ID NO: 74466 - DNA, 30 bp, Artificial Sequence
  Synthetic oligonucleotide
acggggtcgatgggaccaaggattgtagcg

SEQ ID NO: 74467 - DNA, 30 bp, Artificial Sequence
  Synthetic oligonucleotide
ggtgccgatggacgggagcagaggcacgcg

SEQ ID NO: 74468 - DNA, 30 bp, Artificial Sequence
  Synthetic oligonucleotide
actgatggctagtgggtgggagcatacgcg

SEQ ID NO: 74469 - DNA, 30 bp, Artificial Sequence
  Synthetic oligonucleotide
gcttgatttcagtcatgcagaggatacgcg

SEQ ID NO: 74470 - DNA, 30 bp, Artificial Sequence
  Synthetic oligonucleotide
tagctcaggtaggtggtagacatctacgcg

SEQ ID NO: 74471 - DNA, 30 bp, Artificial Sequence
  Synthetic oligonucleotide
ttagaaaagactactctgttagacaccgcg

SEQ ID NO: 74472 - DNA, 30 bp, Artificial Sequence
  Synthetic oligonucleotide
ctacatcccgccacagaactaaccaccgcg

SEQ ID NO: 74473 - DNA, 30 bp, Artificial Sequence
  Synthetic oligonucleotide
aggaaggcctcacaagcggagcctcccgcg

SEQ ID NO: 74474 - DNA, 30 bp, Artificial Sequence
  Synthetic oligonucleotide
tcaggtgatggtaaacaaaggccatccgcg

SEQ ID NO: 74475 - DNA, 30 bp, Artificial Sequence
  Synthetic oligonucleotide
acgtgaggccgtccacaatcgccctccgcg

SEQ ID NO: 74476 - DNA, 30 bp, Artificial Sequence
  Synthetic oligonucleotide
tgagaccaatcatggtcagtccattccgcg

SEQ ID NO: 74477 - DNA, 30 bp, Artificial Sequence
  Synthetic oligonucleotide
gcgacaaccgctggttacatttcaagcgcg

SEQ ID NO: 74478 - DNA, 30 bp, Artificial Sequence
  Synthetic oligonucleotide
caagggaaaatctcatggcacgagagcgcg

SEQ ID NO: 74479 - DNA, 30 bp, Artificial Sequence
  Synthetic oligonucleotide
tgtgaaggaattgtcctgtgatggtgcgcg

SEQ ID NO: 74480 - DNA, 30 bp, Artificial Sequence
  Synthetic oligonucleotide
caaaagcaagccaattaatacatcaaggcg

SEQ ID NO: 74481 - DNA, 30 bp, Artificial Sequence
  Synthetic oligonucleotide
ccaagaaaaccgatgaaattcatacaggcg

SEQ ID NO: 74482 - DNA, 30 bp, Artificial Sequence
  Synthetic oligonucleotide
ggaaatgtaaaaaagccaactaacgaggcg

SEQ ID NO: 74483 - DNA, 30 bp, Artificial Sequence
  Synthetic oligonucleotide
cgtaatgcaggattaatcattcaataggcg

SEQ ID NO: 74484 - DNA, 30 bp, Artificial Sequence
  Synthetic oligonucleotide
accaagggagacataggattatggtaggcg

SEQ ID NO: 74485 - DNA, 29 bp, Artificial Sequence
  Synthetic oligonucleotide
gcagaactaattgtatacggccttaggcg

SEQ ID NO: 74486 - DNA, 30 bp, Artificial Sequence
  Synthetic oligonucleotide
caaccaaggctaatgattagcggttaggcg

SEQ ID NO: 74487 - DNA, 30 bp, Artificial Sequence
  Synthetic oligonucleotide
tgagggcctgattgtgaaaagcaaccggcg

SEQ ID NO: 74488 - DNA, 30 bp, Artificial Sequence
  Synthetic oligonucleotide
atgcccaaaatcaatagtaaggacccggcg

SEQ ID NO: 74489 - DNA, 30 bp, Artificial Sequence
  Synthetic oligonucleotide
ctaagtgtaccgcctcggtatgggccggcg

SEQ ID NO: 74490 - DNA, 30 bp, Artificial Sequence
  Synthetic oligonucleotide
tccacgggttatgtactactaactgcggcg

SEQ ID NO: 74491 - DNA, 30 bp, Artificial Sequence
  Synthetic oligonucleotide
ctagcgggggcgcgagacgtttttgcggcg

SEQ ID NO: 74492 - DNA, 30 bp, Artificial Sequence
  Synthetic oligonucleotide
acgcgcagaccggtgtctggcgagagggcg

SEQ ID NO: 74493 - DNA, 30 bp, Artificial Sequence
  Synthetic oligonucleotide
ggtgaacagtctagtgcgttggatagggcg

SEQ ID NO: 74494 - DNA, 30 bp, Artificial Sequence
  Synthetic oligonucleotide
gatacaacgatgtgaaggggtaatcgggcg

SEQ ID NO: 74495 - DNA, 30 bp, Artificial Sequence
  Synthetic oligonucleotide
cgaacggtaattgccggaacactaatggcg

SEQ ID NO: 74496 - DNA, 30 bp, Artificial Sequence
  Synthetic oligonucleotide
tggccatagtgcatatcaagtaacatggcg

SEQ ID NO: 74497 - DNA, 30 bp, Artificial Sequence
  Synthetic oligonucleotide
cggtgtagtgtctatcgcgaaaatctggcg

SEQ ID NO: 74498 - DNA, 30 bp, Artificial Sequence
  Synthetic oligonucleotide
agatacactagcgtctttgtccccgtggcg

SEQ ID NO: 74499 - DNA, 30 bp, Artificial Sequence
  Synthetic oligonucleotide
caggatccgggcgctgagggaagcgtggcg

SEQ ID NO: 74500 - DNA, 30 bp, Artificial Sequence
  Synthetic oligonucleotide
aacgcaccactagttaacttgagggtggcg

SEQ ID NO: 74501 - DNA, 30 bp, Artificial Sequence
  Synthetic oligonucleotide
gaagagcagtagagtgtcggttttgtggcg

SEQ ID NO: 74502 - DNA, 30 bp, Artificial Sequence
  Synthetic oligonucleotide
ggcatccggtttcaactaccaaaattggcg

SEQ ID NO: 74503 - DNA, 30 bp, Artificial Sequence
  Synthetic oligonucleotide
cgtccgttgacaaagggcgaattattggcg

SEQ ID NO: 74504 - DNA, 30 bp, Artificial Sequence
  Synthetic oligonucleotide
agaacgtaattgactcgaatatggttggcg

SEQ ID NO: 74505 - DNA, 30 bp, Artificial Sequence
  Synthetic oligonucleotide
cggcgcacatagaaacgtgaggtgttggcg

SEQ ID NO: 74506 - DNA, 30 bp, Artificial Sequence
  Synthetic oligonucleotide
gtgagtatcaaggaactggttgacaatgcg

SEQ ID NO: 74507 - DNA, 30 bp, Artificial Sequence
  Synthetic oligonucleotide
tcctataccagaaccaaacaaatacatgcg

SEQ ID NO: 74508 - DNA, 30 bp, Artificial Sequence
  Synthetic oligonucleotide
tggagaacggagtgcagttcctcgcatgcg

SEQ ID NO: 74509 - DNA, 30 bp, Artificial Sequence
  Synthetic oligonucleotide
agctcattggcgggtgtatcacttcatgcg

SEQ ID NO: 74510 - DNA, 30 bp, Artificial Sequence
  Synthetic oligonucleotide
ccggtgaatgggagccggtgagacgatgcg

SEQ ID NO: 74511 - DNA, 30 bp, Artificial Sequence
  Synthetic oligonucleotide
tgtagtccgtactacgtggaatatgatgcg

SEQ ID NO: 74512 - DNA, 30 bp, Artificial Sequence
  Synthetic oligonucleotide
tctaccacaagactgctaagacaaactgcg

SEQ ID NO: 74513 - DNA, 30 bp, Artificial Sequence
  Synthetic oligonucleotide
gaaacttatacaaaagtgcaattccctgcg

SEQ ID NO: 74514 - DNA, 30 bp, Artificial Sequence
  Synthetic oligonucleotide
tgggcaacccgagaacccattaaaagtgcg

SEQ ID NO: 74515 - DNA, 30 bp, Artificial Sequence
  Synthetic oligonucleotide
gtggagcgagtctgatcgtgacgaagtgcg

SEQ ID NO: 74516 - DNA, 30 bp, Artificial Sequence
  Synthetic oligonucleotide
tgccgaaaattaccttgtgtctatagtgcg

SEQ ID NO: 74517 - DNA, 30 bp, Artificial Sequence
  Synthetic oligonucleotide
gaagggaaatgcaagtacatgcgccgtgcg

SEQ ID NO: 74518 - DNA, 30 bp, Artificial Sequence
  Synthetic oligonucleotide
gctatatcaatggtgaaggtgtgtcgtgcg

SEQ ID NO: 74519 - DNA, 30 bp, Artificial Sequence
  Synthetic oligonucleotide
gtggcgttaaagaatctctcgtaaggtgcg

SEQ ID NO: 74520 - DNA, 30 bp, Artificial Sequence
  Synthetic oligonucleotide
gcttgggaagcaaggtaccacaagggtgcg

SEQ ID NO: 74521 - DNA, 30 bp, Artificial Sequence
  Synthetic oligonucleotide
ttgcctaaagacagttaggtaacctgtgcg

SEQ ID NO: 74522 - DNA, 30 bp, Artificial Sequence
  Synthetic oligonucleotide
gaacaccacagggcgtaaacgggcgttgcg

SEQ ID NO: 74523 - DNA, 30 bp, Artificial Sequence
  Synthetic oligonucleotide
aacggcctcacgcgtagcttaatatttgcg

SEQ ID NO: 74524 - DNA, 30 bp, Artificial Sequence
  Synthetic oligonucleotide
acttcgggagaaaataggaagagaaaatcg

SEQ ID NO: 74525 - DNA, 30 bp, Artificial Sequence
  Synthetic oligonucleotide
ggtatcccgtgaggggtaacgcccaaatcg

SEQ ID NO: 74526 - DNA, 30 bp, Artificial Sequence
  Synthetic oligonucleotide
acgacaagtacgggaaggatcaagaaatcg

SEQ ID NO: 74527 - DNA, 30 bp, Artificial Sequence
  Synthetic oligonucleotide
cgctgtggctgtttaatagtcagacaatcg

SEQ ID NO: 74528 - DNA, 30 bp, Artificial Sequence
  Synthetic oligonucleotide
tccgaccagactgtagtggaaggccaatcg

SEQ ID NO: 74529 - DNA, 30 bp, Artificial Sequence
  Synthetic oligonucleotide
cggatcaccaactcagtcatactggaatcg

SEQ ID NO: 74530 - DNA, 30 bp, Artificial Sequence
  Synthetic oligonucleotide
atcatcaggttggacttcgggtcataatcg

SEQ ID NO: 74531 - DNA, 30 bp, Artificial Sequence
  Synthetic oligonucleotide
cgtttagcatgcgagagactaaactaatcg

SEQ ID NO: 74532 - DNA, 30 bp, Artificial Sequence
  Synthetic oligonucleotide
atagatacgtgtcagcaccaacgctaatcg

SEQ ID NO: 74533 - DNA, 30 bp, Artificial Sequence
  Synthetic oligonucleotide
gcgcccacaaattatttgtcacagacatcg

SEQ ID NO: 74534 - DNA, 30 bp, Artificial Sequence
  Synthetic oligonucleotide
ggtgagtgggaacggtgcaataatacatcg

SEQ ID NO: 74535 - DNA, 30 bp, Artificial Sequence
  Synthetic oligonucleotide
gctgtggtgaggaggcatacatgagcatcg

SEQ ID NO: 74536 - DNA, 30 bp, Artificial Sequence
  Synthetic oligonucleotide
ggaacggggggtcattatttctatgcatcg

SEQ ID NO: 74537 - DNA, 30 bp, Artificial Sequence
  Synthetic oligonucleotide
aaggaaacgagagaaaggctaaactcatcg

SEQ ID NO: 74538 - DNA, 30 bp, Artificial Sequence
  Synthetic oligonucleotide
ggggcagcttgctctgccataacgtcatcg

SEQ ID NO: 74539 - DNA, 30 bp, Artificial Sequence
  Synthetic oligonucleotide
cgaacaagtctttcaactgggtggtcatcg

SEQ ID NO: 74540 - DNA, 30 bp, Artificial Sequence
  Synthetic oligonucleotide
gtagtgggtggaagaaacgatatgtcatcg

SEQ ID NO: 74541 - DNA, 31 bp, Artificial Sequence
  Synthetic oligonucleotide
gaatcaggaaccagctaaaaatcatagatcg

SEQ ID NO: 74542 - DNA, 30 bp, Artificial Sequence
  Synthetic oligonucleotide
tggttcgtaaaagccagtccggagcgatcg

SEQ ID NO: 74543 - DNA, 31 bp, Artificial Sequence
  Synthetic oligonucleotide
ccgcagagacatgtgtattgccgctcgatcg

SEQ ID NO: 74544 - DNA, 30 bp, Artificial Sequence
  Synthetic oligonucleotide
atgtatggcagtcgtagtgaatacggatcg

SEQ ID NO: 74545 - DNA, 30 bp, Artificial Sequence
  Synthetic oligonucleotide
cagctcatataagagcaactgccgggatcg

SEQ ID NO: 74546 - DNA, 30 bp, Artificial Sequence
  Synthetic oligonucleotide
acgttctagcgtgctatcgctgagtgatcg

SEQ ID NO: 74547 - DNA, 30 bp, Artificial Sequence
  Synthetic oligonucleotide
ggcaaaaatggcacggttgaggttatatcg

SEQ ID NO: 74548 - DNA, 30 bp, Artificial Sequence
  Synthetic oligonucleotide
ttgtactacaaagctcaatgaacactatcg

SEQ ID NO: 74549 - DNA, 30 bp, Artificial Sequence
  Synthetic oligonucleotide
agcgactcgtcacatgcgacaggcctatcg

SEQ ID NO: 74550 - DNA, 30 bp, Artificial Sequence
  Synthetic oligonucleotide
tcgaaccatacccctggttagtatctatcg

SEQ ID NO: 74551 - DNA, 30 bp, Artificial Sequence
  Synthetic oligonucleotide
ttaattggagatcgagagtaaaccgtatcg

SEQ ID NO: 74552 - DNA, 30 bp, Artificial Sequence
  Synthetic oligonucleotide
tgggtcgacagtatcactgttcgcgtatcg

SEQ ID NO: 74553 - DNA, 30 bp, Artificial Sequence
  Synthetic oligonucleotide
cgataggtctttgaaatcctcagtgtatcg

SEQ ID NO: 74554 - DNA, 30 bp, Artificial Sequence
  Synthetic oligonucleotide
cggtgattgatcgaatccgccaaattatcg

SEQ ID NO: 74555 - DNA, 30 bp, Artificial Sequence
  Synthetic oligonucleotide
cctacacagggtgacatccgttctttatcg

SEQ ID NO: 74556 - DNA, 30 bp, Artificial Sequence
  Synthetic oligonucleotide
cagtcgcgttagaaaatcatctcgaactcg

SEQ ID NO: 74557 - DNA, 30 bp, Artificial Sequence
  Synthetic oligonucleotide
tctcgagcgagcttcgcacaaatacactcg

SEQ ID NO: 74558 - DNA, 30 bp, Artificial Sequence
  Synthetic oligonucleotide
atgcaaaggcaaggtttggggtgagactcg

SEQ ID NO: 74559 - DNA, 30 bp, Artificial Sequence
  Synthetic oligonucleotide
agtggaaacacgggagactcaatcgactcg

SEQ ID NO: 74560 - DNA, 30 bp, Artificial Sequence
  Synthetic oligonucleotide
tagaaaatagggagcgatcatcattactcg

SEQ ID NO: 74561 - DNA, 30 bp, Artificial Sequence
  Synthetic oligonucleotide
ttcaggtctgatgtaaaaaattagacctcg

SEQ ID NO: 74562 - DNA, 30 bp, Artificial Sequence
  Synthetic oligonucleotide
tcaaccatgtatatggatctggttccctcg

SEQ ID NO: 74563 - DNA, 30 bp, Artificial Sequence
  Synthetic oligonucleotide
accttaacatgtgccgaacgtctagcctcg

SEQ ID NO: 74564 - DNA, 30 bp, Artificial Sequence
  Synthetic oligonucleotide
gggtgagattcgccgaagatcttatcctcg

SEQ ID NO: 74565 - DNA, 30 bp, Artificial Sequence
  Synthetic oligonucleotide
agtgtcgtcgacacttatattgccagctcg

SEQ ID NO: 74566 - DNA, 30 bp, Artificial Sequence
  Synthetic oligonucleotide
aggcgggttctgacaactggtttcagctcg

SEQ ID NO: 74567 - DNA, 30 bp, Artificial Sequence
  Synthetic oligonucleotide
tgcactgtcgaaagccagtgaccgagctcg

SEQ ID NO: 74568 - DNA, 30 bp, Artificial Sequence
  Synthetic oligonucleotide
ttgagtagaatacagcgcggttcgagctcg

SEQ ID NO: 74569 - DNA, 30 bp, Artificial Sequence
  Synthetic oligonucleotide
gcgattcgtggtaaaattgagggccgctcg

SEQ ID NO: 74570 - DNA, 30 bp, Artificial Sequence
  Synthetic oligonucleotide
acagaacagcttaaggcaccaggatgctcg

SEQ ID NO: 74571 - DNA, 30 bp, Artificial Sequence
  Synthetic oligonucleotide
acgcgggataatcctgctttaaggtgctcg

SEQ ID NO: 74572 - DNA, 30 bp, Artificial Sequence
  Synthetic oligonucleotide
gacgcatgggcacaagcggacgtaatctcg

SEQ ID NO: 74573 - DNA, 30 bp, Artificial Sequence
  Synthetic oligonucleotide
cgccgtggcgttagctcatggtaactctcg

SEQ ID NO: 74574 - DNA, 30 bp, Artificial Sequence
  Synthetic oligonucleotide
gaagtcgccaagagcaaatcatcgctctcg

SEQ ID NO: 74575 - DNA, 30 bp, Artificial Sequence
  Synthetic oligonucleotide
agacggatccttgatagagcgtaagtctcg

SEQ ID NO: 74576 - DNA, 30 bp, Artificial Sequence
  Synthetic oligonucleotide
agatgtcggcttcgcaggacaaaggtctcg

SEQ ID NO: 74577 - DNA, 30 bp, Artificial Sequence
  Synthetic oligonucleotide
ccaaatggtcactcaggatagacggtctcg

SEQ ID NO: 74578 - DNA, 30 bp, Artificial Sequence
  Synthetic oligonucleotide
ccgaacgttcaggactgtacacctgtctcg

SEQ ID NO: 74579 - DNA, 30 bp, Artificial Sequence
  Synthetic oligonucleotide
ctaacatcaggtagaggagttataaagtcg

SEQ ID NO: 74580 - DNA, 30 bp, Artificial Sequence
  Synthetic oligonucleotide
caagaggatatggtaggtgcagtaaagtcg

SEQ ID NO: 74581 - DNA, 30 bp, Artificial Sequence
  Synthetic oligonucleotide
tgcccagtgtctgaagtcggggcgaagtcg

SEQ ID NO: 74582 - DNA, 30 bp, Artificial Sequence
  Synthetic oligonucleotide
cggctgataaaacatagatgggaacagtcg

SEQ ID NO: 74583 - DNA, 30 bp, Artificial Sequence
  Synthetic oligonucleotide
ctagtttacgaacacatcaacccacagtcg

SEQ ID NO: 74584 - DNA, 30 bp, Artificial Sequence
  Synthetic oligonucleotide
gggaaatagaaaccgcgggccgcacagtcg

SEQ ID NO: 74585 - DNA, 30 bp, Artificial Sequence
  Synthetic oligonucleotide
gcagtagggtgtgcagcagtgtcacagtcg

SEQ ID NO: 74586 - DNA, 30 bp, Artificial Sequence
  Synthetic oligonucleotide
actccctgaagagacatttggtgacagtcg

SEQ ID NO: 74587 - DNA, 31 bp, Artificial Sequence
  Synthetic oligonucleotide
cgcacgagggttcgtggcataaactcagtcg

SEQ ID NO: 74588 - DNA, 30 bp, Artificial Sequence
  Synthetic oligonucleotide
ttggttgataggatctcttattcagagtcg

SEQ ID NO: 74589 - DNA, 30 bp, Artificial Sequence
  Synthetic oligonucleotide
agtcgcggaaagtcgccagtcgctgagtcg

SEQ ID NO: 74590 - DNA, 30 bp, Artificial Sequence
  Synthetic oligonucleotide
ccgtaatcccgttcaaaacggtgtgagtcg

SEQ ID NO: 74591 - DNA, 30 bp, Artificial Sequence
  Synthetic oligonucleotide
ctcaaaaagtatgctctaggtggaacgtcg

SEQ ID NO: 74592 - DNA, 30 bp, Artificial Sequence
  Synthetic oligonucleotide
aaggacaaggccggaccgcttgtgacgtcg

SEQ ID NO: 74593 - DNA, 30 bp, Artificial Sequence
  Synthetic oligonucleotide
atgtcttaccgagaaccctaggccccgtcg

SEQ ID NO: 74594 - DNA, 30 bp, Artificial Sequence
  Synthetic oligonucleotide
gatcacataagatgccaaggggttccgtcg

SEQ ID NO: 74595 - DNA, 30 bp, Artificial Sequence
  Synthetic oligonucleotide
gcgagttaaacagagggccctaattcgtcg

SEQ ID NO: 74596 - DNA, 30 bp, Artificial Sequence
  Synthetic oligonucleotide
atagaggagcatgtgcgacaacgaaggtcg

SEQ ID NO: 74597 - DNA, 30 bp, Artificial Sequence
  Synthetic oligonucleotide
cgtcaccgctagttcttggagcaggggtcg

SEQ ID NO: 74598 - DNA, 30 bp, Artificial Sequence
  Synthetic oligonucleotide
cgaacaacagtgggacggccattatggtcg

SEQ ID NO: 74599 - DNA, 30 bp, Artificial Sequence
  Synthetic oligonucleotide
attacaggctcgctatccaggaattggtcg

SEQ ID NO: 74600 - DNA, 30 bp, Artificial Sequence
  Synthetic oligonucleotide
aatcgatatcagggtcgagtgtgcatgtcg

SEQ ID NO: 74601 - DNA, 30 bp, Artificial Sequence
  Synthetic oligonucleotide
ataccgggttgtagagtgaaatatatgtcg

SEQ ID NO: 74602 - DNA, 30 bp, Artificial Sequence
  Synthetic oligonucleotide
tcatgcgtccttaatcgtgagtggctgtcg

SEQ ID NO: 74603 - DNA, 30 bp, Artificial Sequence
  Synthetic oligonucleotide
ggctgtcctgctgacggttcaggagtgtcg

SEQ ID NO: 74604 - DNA, 30 bp, Artificial Sequence
  Synthetic oligonucleotide
acgacaccaattagagttaggagcgtgtcg

SEQ ID NO: 74605 - DNA, 30 bp, Artificial Sequence
  Synthetic oligonucleotide
cgattattaaactttccccgataattgtcg

SEQ ID NO: 74606 - DNA, 30 bp, Artificial Sequence
  Synthetic oligonucleotide
ttaggctaaacacgtgcgaatgataattcg

SEQ ID NO: 74607 - DNA, 30 bp, Artificial Sequence
  Synthetic oligonucleotide
tagaaaacacgagtcactcgtccacattcg

SEQ ID NO: 74608 - DNA, 30 bp, Artificial Sequence
  Synthetic oligonucleotide
cctgcgtgtcctgtacgagttagtgattcg

SEQ ID NO: 74609 - DNA, 30 bp, Artificial Sequence
  Synthetic oligonucleotide
ccaccaacagtgactacaggagaatattcg

SEQ ID NO: 74610 - DNA, 30 bp, Artificial Sequence
  Synthetic oligonucleotide
cgaagagttgcgcaagtctcttggtattcg

SEQ ID NO: 74611 - DNA, 30 bp, Artificial Sequence
  Synthetic oligonucleotide
ggggcgtcatactaggaaaggagttattcg

SEQ ID NO: 74612 - DNA, 30 bp, Artificial Sequence
  Synthetic oligonucleotide
gtctaaccgattgagaagtgcatcacttcg

SEQ ID NO: 74613 - DNA, 30 bp, Artificial Sequence
  Synthetic oligonucleotide
gctagcgggctcgtacggggaagtacttcg

SEQ ID NO: 74614 - DNA, 30 bp, Artificial Sequence
  Synthetic oligonucleotide
ataacttctggccggtgcggtccagcttcg

SEQ ID NO: 74615 - DNA, 30 bp, Artificial Sequence
  Synthetic oligonucleotide
cggttctctcaatgccgaatcgggtcttcg

SEQ ID NO: 74616 - DNA, 30 bp, Artificial Sequence
  Synthetic oligonucleotide
ataggccccagggcacctccgatgagttcg

SEQ ID NO: 74617 - DNA, 30 bp, Artificial Sequence
  Synthetic oligonucleotide
agggctaagcgtgttgcttactcaggttcg

SEQ ID NO: 74618 - DNA, 30 bp, Artificial Sequence
  Synthetic oligonucleotide
tgcgcatcaactaacaaggggtcgggttcg

SEQ ID NO: 74619 - DNA, 30 bp, Artificial Sequence
  Synthetic oligonucleotide
ccggctgtatcagggtgagcaacctgttcg

SEQ ID NO: 74620 - DNA, 30 bp, Artificial Sequence
  Synthetic oligonucleotide
atggatgcgatcaatagcaggtggatttcg

SEQ ID NO: 74621 - DNA, 30 bp, Artificial Sequence
  Synthetic oligonucleotide
tgtgcactaaggattgaccgccacctttcg

SEQ ID NO: 74622 - DNA, 30 bp, Artificial Sequence
  Synthetic oligonucleotide
ctgttacaagtaagaatatctgtagtttcg

SEQ ID NO: 74623 - DNA, 30 bp, Artificial Sequence
  Synthetic oligonucleotide
cgaaagtctggctatgtggggggaaaaagg

SEQ ID NO: 74624 - DNA, 28 bp, Artificial Sequence
  Synthetic oligonucleotide
ccaatccagaaacccatcttaccaaagg

SEQ ID NO: 74625 - DNA, 30 bp, Artificial Sequence
  Synthetic oligonucleotide
cgtgagcgttcaggtctcgtgatccaaagg

SEQ ID NO: 74626 - DNA, 30 bp, Artificial Sequence
  Synthetic oligonucleotide
catatgaaattggttgtaagcactcaaagg

SEQ ID NO: 74627 - DNA, 30 bp, Artificial Sequence
  Synthetic oligonucleotide
atggaactggggaagtagcgctctcaaagg

SEQ ID NO: 74628 - DNA, 30 bp, Artificial Sequence
  Synthetic oligonucleotide
acggagaccacgatcgcagtcccagaaagg

SEQ ID NO: 74629 - DNA, 30 bp, Artificial Sequence
  Synthetic oligonucleotide
ggagaagtaacgtccgtcccatccgaaagg

SEQ ID NO: 74630 - DNA, 30 bp, Artificial Sequence
  Synthetic oligonucleotide
atccattagggtcgaccagggggcgaaagg

SEQ ID NO: 74631 - DNA, 30 bp, Artificial Sequence
  Synthetic oligonucleotide
gtgcgtagttaagacttattttctgaaagg

SEQ ID NO: 74632 - DNA, 30 bp, Artificial Sequence
  Synthetic oligonucleotide
ttcaaataaagtcatgaggtaacctaaagg

SEQ ID NO: 74633 - DNA, 30 bp, Artificial Sequence
  Synthetic oligonucleotide
ctgatggacacatgctgttcaaggtaaagg

SEQ ID NO: 74634 - DNA, 30 bp, Artificial Sequence
  Synthetic oligonucleotide
gtgaggtacctggttacgctaaattaaagg

SEQ ID NO: 74635 - DNA, 30 bp, Artificial Sequence
  Synthetic oligonucleotide
caagggttcatcgttcgctctaaaacaagg

SEQ ID NO: 74636 - DNA, 30 bp, Artificial Sequence
  Synthetic oligonucleotide
aatcgggttaccccatgacaataaacaagg

SEQ ID NO: 74637 - DNA, 30 bp, Artificial Sequence
  Synthetic oligonucleotide
attaaacaatatacacaaagagcaacaagg

SEQ ID NO: 74638 - DNA, 30 bp, Artificial Sequence
  Synthetic oligonucleotide
ttgcaagcaggggtcctcaggcgaacaagg

SEQ ID NO: 74639 - DNA, 30 bp, Artificial Sequence
  Synthetic oligonucleotide
atgggatgccgttttgtacccaacacaagg

SEQ ID NO: 74640 - DNA, 30 bp, Artificial Sequence
  Synthetic oligonucleotide
gtcacaagtcactgacccgagggcccaagg

SEQ ID NO: 74641 - DNA, 30 bp, Artificial Sequence
  Synthetic oligonucleotide
ttccgtgaaggaatgttgaaaaaggcaagg

SEQ ID NO: 74642 - DNA, 30 bp, Artificial Sequence
  Synthetic oligonucleotide
gaccctaaggcaataaatattctggcaagg

SEQ ID NO: 74643 - DNA, 30 bp, Artificial Sequence
  Synthetic oligonucleotide
cagaagaacgtgcctcgtaaaacgtcaagg

SEQ ID NO: 74644 - DNA, 30 bp, Artificial Sequence
  Synthetic oligonucleotide
gattgtaaatgtgaccatcacagttcaagg

SEQ ID NO: 74645 - DNA, 30 bp, Artificial Sequence
  Synthetic oligonucleotide
acgcgggtcagcgacacacttatttcaagg

SEQ ID NO: 74646 - DNA, 30 bp, Artificial Sequence
  Synthetic oligonucleotide
ataacggtgcataggccgacattacgaagg

SEQ ID NO: 74647 - DNA, 30 bp, Artificial Sequence
  Synthetic oligonucleotide
ggatgactattggaagtcaatgacggaagg

SEQ ID NO: 74648 - DNA, 30 bp, Artificial Sequence
  Synthetic oligonucleotide
gcgaccagatcactttccattacatgaagg

SEQ ID NO: 74649 - DNA, 30 bp, Artificial Sequence
  Synthetic oligonucleotide
tagcgcgtcaagcacgttaccggaataagg

SEQ ID NO: 74650 - DNA, 30 bp, Artificial Sequence
  Synthetic oligonucleotide
gcggacgggggagcagtgtacgtaataagg

SEQ ID NO: 74651 - DNA, 30 bp, Artificial Sequence
  Synthetic oligonucleotide
ggggaacctcagctatattggcctataagg

SEQ ID NO: 74652 - DNA, 30 bp, Artificial Sequence
  Synthetic oligonucleotide
cttaacacagtccgattctatacggtaagg

SEQ ID NO: 74653 - DNA, 30 bp, Artificial Sequence
  Synthetic oligonucleotide
ataaccggagagcaagtgcaccggttaagg

SEQ ID NO: 74654 - DNA, 30 bp, Artificial Sequence
  Synthetic oligonucleotide
ccacgagaaagtatgacacatgctttaagg

SEQ ID NO: 74655 - DNA, 30 bp, Artificial Sequence
  Synthetic oligonucleotide
cagggcctccgcgagaggtgcaaaaacagg

SEQ ID NO: 74656 - DNA, 30 bp, Artificial Sequence
  Synthetic oligonucleotide
gctcggggactacaagtcacaaggaacagg

SEQ ID NO: 74657 - DNA, 30 bp, Artificial Sequence
  Synthetic oligonucleotide
cgacgagagcacggtctcccggggcacagg

SEQ ID NO: 74658 - DNA, 30 bp, Artificial Sequence
  Synthetic oligonucleotide
cgtctagggaaataagtaggtcctcacagg

SEQ ID NO: 74659 - DNA, 30 bp, Artificial Sequence
  Synthetic oligonucleotide
caacgaaaccggttctcagagggtcacagg

SEQ ID NO: 74660 - DNA, 30 bp, Artificial Sequence
  Synthetic oligonucleotide
tcagaagcctgactaaagcgagaatacagg

SEQ ID NO: 74661 - DNA, 30 bp, Artificial Sequence
  Synthetic oligonucleotide
gcttgaagcatataaacggcaagatacagg

SEQ ID NO: 74662 - DNA, 30 bp, Artificial Sequence
  Synthetic oligonucleotide
gtggttcacgatcctcaacataggtacagg

SEQ ID NO: 74663 - DNA, 30 bp, Artificial Sequence
  Synthetic oligonucleotide
cgcgacgaaccggctagtgtccggaccagg

SEQ ID NO: 74664 - DNA, 30 bp, Artificial Sequence
  Synthetic oligonucleotide
gtgaagtgacacccttaaatggtgaccagg

SEQ ID NO: 74665 - DNA, 30 bp, Artificial Sequence
  Synthetic oligonucleotide
tcagtcgtccacaatggttttctacccagg

SEQ ID NO: 74666 - DNA, 30 bp, Artificial Sequence
  Synthetic oligonucleotide
tgtacgccaattcagctgaagtatcccagg

SEQ ID NO: 74667 - DNA, 30 bp, Artificial Sequence
  Synthetic oligonucleotide
ccgtaacgatgaatttgaataaattccagg

SEQ ID NO: 74668 - DNA, 30 bp, Artificial Sequence
  Synthetic oligonucleotide
tactgcgctagtacgattgcaatttccagg

SEQ ID NO: 74669 - DNA, 30 bp, Artificial Sequence
  Synthetic oligonucleotide
gagaccgactggtagtgtgactaaagcagg

SEQ ID NO: 74670 - DNA, 30 bp, Artificial Sequence
  Synthetic oligonucleotide
ccaggtctaccaggacaacttggcagcagg

SEQ ID NO: 74671 - DNA, 30 bp, Artificial Sequence
  Synthetic oligonucleotide
gtccacaaccagtcatattatttcagcagg

SEQ ID NO: 74672 - DNA, 30 bp, Artificial Sequence
  Synthetic oligonucleotide
tcgaggcttggtcgcacaaacatgagcagg

SEQ ID NO: 74673 - DNA, 30 bp, Artificial Sequence
  Synthetic oligonucleotide
tcacaatacgatacggtggacttcggcagg

SEQ ID NO: 74674 - DNA, 30 bp, Artificial Sequence
  Synthetic oligonucleotide
catagagcatatcaaacgacgtcatgcagg

SEQ ID NO: 74675 - DNA, 30 bp, Artificial Sequence
  Synthetic oligonucleotide
ggaggtagtaggccaaacaattgctgcagg

SEQ ID NO: 74676 - DNA, 30 bp, Artificial Sequence
  Synthetic oligonucleotide
gtcggaccattgttgggtggatcttgcagg

SEQ ID NO: 74677 - DNA, 30 bp, Artificial Sequence
  Synthetic oligonucleotide
cgcttcgtaaaaccaccagatgccatcagg

SEQ ID NO: 74678 - DNA, 30 bp, Artificial Sequence
  Synthetic oligonucleotide
agttgggctgaatgagaggactggatcagg

SEQ ID NO: 74679 - DNA, 30 bp, Artificial Sequence
  Synthetic oligonucleotide
ctagtgtgaggtggctgcaactaactcagg

SEQ ID NO: 74680 - DNA, 30 bp, Artificial Sequence
  Synthetic oligonucleotide
cgcaattcgcggcgtgtagaatgcctcagg

SEQ ID NO: 74681 - DNA, 30 bp, Artificial Sequence
  Synthetic oligonucleotide
ccggaaaatagttcttaggctcatctcagg

SEQ ID NO: 74682 - DNA, 30 bp, Artificial Sequence
  Synthetic oligonucleotide
ggcagcgaagtgtttagaactacagtcagg

SEQ ID NO: 74683 - DNA, 30 bp, Artificial Sequence
  Synthetic oligonucleotide
cttcgggattctgacatagagtggaagagg

SEQ ID NO: 74684 - DNA, 30 bp, Artificial Sequence
  Synthetic oligonucleotide
aggcaaggggtatagtggagagctaagagg

SEQ ID NO: 74685 - DNA, 30 bp, Artificial Sequence
  Synthetic oligonucleotide
gctgtagctatgggccctagataccagagg

SEQ ID NO: 74686 - DNA, 30 bp, Artificial Sequence
  Synthetic oligonucleotide
tgcgcctcagctaaagtccaagcccagagg

SEQ ID NO: 74687 - DNA, 30 bp, Artificial Sequence
  Synthetic oligonucleotide
ggataagcggggatagacagccaagagagg

SEQ ID NO: 74688 - DNA, 30 bp, Artificial Sequence
  Synthetic oligonucleotide
cattattggtgcgagaaaaggatggagagg

SEQ ID NO: 74689 - DNA, 30 bp, Artificial Sequence
  Synthetic oligonucleotide
ttaagctaatggctagcacaagcatagagg

SEQ ID NO: 74690 - DNA, 30 bp, Artificial Sequence
  Synthetic oligonucleotide
caattaatggcactgagcctatgatagagg

SEQ ID NO: 74691 - DNA, 30 bp, Artificial Sequence
  Synthetic oligonucleotide
agagcagagctaagatataccgtctagagg

SEQ ID NO: 74692 - DNA, 30 bp, Artificial Sequence
  Synthetic oligonucleotide
tagaagggattgtgaggccaccattagagg

SEQ ID NO: 74693 - DNA, 30 bp, Artificial Sequence
  Synthetic oligonucleotide
ggtgcccattgggagctgacacaaacgagg

SEQ ID NO: 74694 - DNA, 30 bp, Artificial Sequence
  Synthetic oligonucleotide
ttatggacaggcgttaggagcaacacgagg

SEQ ID NO: 74695 - DNA, 30 bp, Artificial Sequence
  Synthetic oligonucleotide
cgattgggcgacaatcaaggtaccacgagg

SEQ ID NO: 74696 - DNA, 30 bp, Artificial Sequence
  Synthetic oligonucleotide
aaacgatataacggcctcaaggtcacgagg

SEQ ID NO: 74697 - DNA, 30 bp, Artificial Sequence
  Synthetic oligonucleotide
atgggctcaaggtacgtaggctaaccgagg

SEQ ID NO: 74698 - DNA, 30 bp, Artificial Sequence
  Synthetic oligonucleotide
acatttgtaggatttcaggtgcgaccgagg

SEQ ID NO: 74699 - DNA, 30 bp, Artificial Sequence
  Synthetic oligonucleotide
agattaaagcttcccgacacaaatccgagg

SEQ ID NO: 74700 - DNA, 30 bp, Artificial Sequence
  Synthetic oligonucleotide
tatatgtaaggtcgtcctatagaagcgagg

SEQ ID NO: 74701 - DNA, 30 bp, Artificial Sequence
  Synthetic oligonucleotide
acgtcaccgctccaggtaaatcgagcgagg

SEQ ID NO: 74702 - DNA, 30 bp, Artificial Sequence
  Synthetic oligonucleotide
cgtcagtcagacgttggatagggcgcgagg

SEQ ID NO: 74703 - DNA, 30 bp, Artificial Sequence
  Synthetic oligonucleotide
tccgaaccataagagatgattactcggagg

SEQ ID NO: 74704 - DNA, 29 bp, Artificial Sequence
  Synthetic oligonucleotide
gtgggcaggaactcagtacacgtcggagg

SEQ ID NO: 74705 - DNA, 30 bp, Artificial Sequence
  Synthetic oligonucleotide
tcatgtctgtagagcggattaccagggagg

SEQ ID NO: 74706 - DNA, 30 bp, Artificial Sequence
  Synthetic oligonucleotide
agtccaaggccggtgatctgtatcgggagg

SEQ ID NO: 74707 - DNA, 30 bp, Artificial Sequence
  Synthetic oligonucleotide
tggccacagtggtcgaaaaatagggggagg

SEQ ID NO: 74708 - DNA, 30 bp, Artificial Sequence
  Synthetic oligonucleotide
ggacttgcataagactgacatggggggagg

SEQ ID NO: 74709 - DNA, 30 bp, Artificial Sequence
  Synthetic oligonucleotide
caattcacagagccgaggaggatggggagg

SEQ ID NO: 74710 - DNA, 30 bp, Artificial Sequence
  Synthetic oligonucleotide
gcccaagccggctataacgtcatatggagg

SEQ ID NO: 74711 - DNA, 30 bp, Artificial Sequence
  Synthetic oligonucleotide
agaataaagctcaatagatgcgagatgagg

SEQ ID NO: 74712 - DNA, 30 bp, Artificial Sequence
  Synthetic oligonucleotide
ttgtgtccccgcaggtggaggcggatgagg

SEQ ID NO: 74713 - DNA, 30 bp, Artificial Sequence
  Synthetic oligonucleotide
tgcgtcctatatccggttcatccactgagg

SEQ ID NO: 74714 - DNA, 30 bp, Artificial Sequence
  Synthetic oligonucleotide
agggtgacattgtgcgagggaatactgagg

SEQ ID NO: 74715 - DNA, 30 bp, Artificial Sequence
  Synthetic oligonucleotide
attgaggggacgaataggtgaaacctgagg

SEQ ID NO: 74716 - DNA, 30 bp, Artificial Sequence
  Synthetic oligonucleotide
gcgtagcgggcactcacgttcgccctgagg

SEQ ID NO: 74717 - DNA, 30 bp, Artificial Sequence
  Synthetic oligonucleotide
tcgttcgggactaatacaaggtttctgagg

SEQ ID NO: 74718 - DNA, 30 bp, Artificial Sequence
  Synthetic oligonucleotide
tccattggcagtgtttaacgcaaagtgagg

SEQ ID NO: 74719 - DNA, 30 bp, Artificial Sequence
  Synthetic oligonucleotide
cggatacctgaccaaagaggagttgtgagg

SEQ ID NO: 74720 - DNA, 30 bp, Artificial Sequence
  Synthetic oligonucleotide
ggcatagttggcctctcgagagaattgagg

SEQ ID NO: 74721 - DNA, 30 bp, Artificial Sequence
  Synthetic oligonucleotide
gatagcgcaaaaatatgcgaacgtttgagg

SEQ ID NO: 74722 - DNA, 30 bp, Artificial Sequence
  Synthetic oligonucleotide
tgtaattaaattgggtccggaagaaatagg

SEQ ID NO: 74723 - DNA, 30 bp, Artificial Sequence
  Synthetic oligonucleotide
agttaattggaaataagtgggaacaatagg

SEQ ID NO: 74724 - DNA, 30 bp, Artificial Sequence
  Synthetic oligonucleotide
atggtaaagttccgcatctacgggaatagg

SEQ ID NO: 74725 - DNA, 30 bp, Artificial Sequence
  Synthetic oligonucleotide
gtaagcccgggtttacgaagacataatagg

SEQ ID NO: 74726 - DNA, 30 bp, Artificial Sequence
  Synthetic oligonucleotide
gtgttatgccagtagttacaacgtaatagg

SEQ ID NO: 74727 - DNA, 30 bp, Artificial Sequence
  Synthetic oligonucleotide
ttgaggacttcgttaacagaactccatagg

SEQ ID NO: 74728 - DNA, 30 bp, Artificial Sequence
  Synthetic oligonucleotide
ttaagggtgaaagtaatcggatacgatagg

SEQ ID NO: 74729 - DNA, 30 bp, Artificial Sequence
  Synthetic oligonucleotide
gggtatccgccgggtcagaatacggatagg

SEQ ID NO: 74730 - DNA, 30 bp, Artificial Sequence
  Synthetic oligonucleotide
accgacgtactacactagggtcctgatagg

SEQ ID NO: 74731 - DNA, 30 bp, Artificial Sequence
  Synthetic oligonucleotide
agtagtgagtacaaaatatacagctatagg

SEQ ID NO: 74732 - DNA, 30 bp, Artificial Sequence
  Synthetic oligonucleotide
cgactatccacacgattcttatggtatagg

SEQ ID NO: 74733 - DNA, 30 bp, Artificial Sequence
  Synthetic oligonucleotide
ctgtcgggataaaagcgtaaaaaaactagg

SEQ ID NO: 74734 - DNA, 30 bp, Artificial Sequence
  Synthetic oligonucleotide
gcacagcctagaacaaactccaaaactagg

SEQ ID NO: 74735 - DNA, 30 bp, Artificial Sequence
  Synthetic oligonucleotide
gaagaggcgtacaagagtctcctcgctagg

SEQ ID NO: 74736 - DNA, 30 bp, Artificial Sequence
  Synthetic oligonucleotide
caagactaaataagcgaggagaaggctagg

SEQ ID NO: 74737 - DNA, 30 bp, Artificial Sequence
  Synthetic oligonucleotide
ttggccctctcataactgtcataatctagg

SEQ ID NO: 74738 - DNA, 30 bp, Artificial Sequence
  Synthetic oligonucleotide
ggttcatgaatagattaggtaccaggtagg

SEQ ID NO: 74739 - DNA, 30 bp, Artificial Sequence
  Synthetic oligonucleotide
agcacaacaatgcggccctggaggtgtagg

SEQ ID NO: 74740 - DNA, 30 bp, Artificial Sequence
  Synthetic oligonucleotide
cggccccagagttcacacaagggtattagg

SEQ ID NO: 74741 - DNA, 30 bp, Artificial Sequence
  Synthetic oligonucleotide
agcaatcaacaagtcgtatgccatcttagg

SEQ ID NO: 74742 - DNA, 30 bp, Artificial Sequence
  Synthetic oligonucleotide
gcacgataaaaactaaattcactatttagg

SEQ ID NO: 74743 - DNA, 30 bp, Artificial Sequence
  Synthetic oligonucleotide
ggttcgaagagcaaagcaggcgtctttagg

SEQ ID NO: 74744 - DNA, 30 bp, Artificial Sequence
  Synthetic oligonucleotide
aagggggatagggctaaactagtaaaacgg

SEQ ID NO: 74745 - DNA, 30 bp, Artificial Sequence
  Synthetic oligonucleotide
ccgctacataactggaagcaccgacaacgg

SEQ ID NO: 74746 - DNA, 30 bp, Artificial Sequence
  Synthetic oligonucleotide
ccagacaggcgtcagacacttcagcaacgg

SEQ ID NO: 74747 - DNA, 30 bp, Artificial Sequence
  Synthetic oligonucleotide
ttcatagccagccacactacatggcaacgg

SEQ ID NO: 74748 - DNA, 30 bp, Artificial Sequence
  Synthetic oligonucleotide
gcgtagtaatggtcgaaatccaggtaacgg

SEQ ID NO: 74749 - DNA, 30 bp, Artificial Sequence
  Synthetic oligonucleotide
catagatctagaagagctagactacgacgg

SEQ ID NO: 74750 - DNA, 30 bp, Artificial Sequence
  Synthetic oligonucleotide
ggccaggttataggtgtaccgcaccgacgg

SEQ ID NO: 74751 - DNA, 30 bp, Artificial Sequence
  Synthetic oligonucleotide
ggcgggctgtgcatcctagcaagaggacgg

SEQ ID NO: 74752 - DNA, 30 bp, Artificial Sequence
  Synthetic oligonucleotide
aagcaatgaacacgggacgtccagggacgg

SEQ ID NO: 74753 - DNA, 30 bp, Artificial Sequence
  Synthetic oligonucleotide
agtttggcgaggactccacagaggggacgg

SEQ ID NO: 74754 - DNA, 30 bp, Artificial Sequence
  Synthetic oligonucleotide
ggggggaattgtccggtctgagccatacgg

SEQ ID NO: 74755 - DNA, 30 bp, Artificial Sequence
  Synthetic oligonucleotide
tgaggctgatcaacgtgaagctgcatacgg

SEQ ID NO: 74756 - DNA, 30 bp, Artificial Sequence
  Synthetic oligonucleotide
tcgaaactatctatcccattttgcatacgg

SEQ ID NO: 74757 - DNA, 30 bp, Artificial Sequence
  Synthetic oligonucleotide
caaagctggaccataatcggccatatacgg

SEQ ID NO: 74758 - DNA, 30 bp, Artificial Sequence
  Synthetic oligonucleotide
agaaagtgacaagtgcagccggatatacgg

SEQ ID NO: 74759 - DNA, 30 bp, Artificial Sequence
  Synthetic oligonucleotide
caaaaactaagttggcagagccccgtacgg

SEQ ID NO: 74760 - DNA, 30 bp, Artificial Sequence
  Synthetic oligonucleotide
agtgcgtcgctgaagcggatccaggtacgg

SEQ ID NO: 74761 - DNA, 30 bp, Artificial Sequence
  Synthetic oligonucleotide
tggccaccgcttgatatacgagagaaccgg

SEQ ID NO: 74762 - DNA, 30 bp, Artificial Sequence
  Synthetic oligonucleotide
tgagcactattcgtgttctgccataaccgg

SEQ ID NO: 74763 - DNA, 30 bp, Artificial Sequence
  Synthetic oligonucleotide
cggtccgtgcgaactaaaggagcagaccgg

SEQ ID NO: 74764 - DNA, 30 bp, Artificial Sequence
  Synthetic oligonucleotide
aacacttcgtaggggagaaaataataccgg

SEQ ID NO: 74765 - DNA, 30 bp, Artificial Sequence
  Synthetic oligonucleotide
aaaatgggtcacgctatctcaatcgcccgg

SEQ ID NO: 74766 - DNA, 30 bp, Artificial Sequence
  Synthetic oligonucleotide
ggatttacaaagaattcgtgatacagccgg

SEQ ID NO: 74767 - DNA, 30 bp, Artificial Sequence
  Synthetic oligonucleotide
tcctaggttcccgtaccctctcatagccgg

SEQ ID NO: 74768 - DNA, 30 bp, Artificial Sequence
  Synthetic oligonucleotide
cgacatggcataattcaaacgtctcgccgg

SEQ ID NO: 74769 - DNA, 30 bp, Artificial Sequence
  Synthetic oligonucleotide
tccgctctaaagttcgaactcgaggtccgg

SEQ ID NO: 74770 - DNA, 30 bp, Artificial Sequence
  Synthetic oligonucleotide
tataaggttaagagagaaataatgaagcgg

SEQ ID NO: 74771 - DNA, 30 bp, Artificial Sequence
  Synthetic oligonucleotide
gtgccccccaccacgagtgaaaaacagcgg

SEQ ID NO: 74772 - DNA, 30 bp, Artificial Sequence
  Synthetic oligonucleotide
aaccgccatgaaatgtggtggaaagagcgg

SEQ ID NO: 74773 - DNA, 30 bp, Artificial Sequence
  Synthetic oligonucleotide
tggattgcgtagcattcggtggaagagcgg

SEQ ID NO: 74774 - DNA, 30 bp, Artificial Sequence
  Synthetic oligonucleotide
aggactagggagaccgcggagaaggagcgg

SEQ ID NO: 74775 - DNA, 30 bp, Artificial Sequence
  Synthetic oligonucleotide
ccagaccaaccgttgacaaataggtagcgg

SEQ ID NO: 74776 - DNA, 30 bp, Artificial Sequence
  Synthetic oligonucleotide
gcggatccgtattgaatatgaagagcgcgg

SEQ ID NO: 74777 - DNA, 30 bp, Artificial Sequence
  Synthetic oligonucleotide
gacggggtaaggaggtacttctgagcgcgg

SEQ ID NO: 74778 - DNA, 30 bp, Artificial Sequence
  Synthetic oligonucleotide
tactgtatagatcagtccattacagggcgg

SEQ ID NO: 74779 - DNA, 30 bp, Artificial Sequence
  Synthetic oligonucleotide
tcattatgggtatttcgagctctagggcgg

SEQ ID NO: 74780 - DNA, 30 bp, Artificial Sequence
  Synthetic oligonucleotide
acgacctccagtgtaagtcaggttgggcgg

SEQ ID NO: 74781 - DNA, 30 bp, Artificial Sequence
  Synthetic oligonucleotide
cgacacgtgactgtccttaggcaaatgcgg

SEQ ID NO: 74782 - DNA, 30 bp, Artificial Sequence
  Synthetic oligonucleotide
tcagtgtttcgaagtgggctcggaatgcgg

SEQ ID NO: 74783 - DNA, 30 bp, Artificial Sequence
  Synthetic oligonucleotide
cgcccgggagtggggatctaacttctgcgg

SEQ ID NO: 74784 - DNA, 30 bp, Artificial Sequence
  Synthetic oligonucleotide
gtgccaactcgggatatatgtgctgtgcgg

SEQ ID NO: 74785 - DNA, 30 bp, Artificial Sequence
  Synthetic oligonucleotide
gttaccggaggcgaactgatgaacttgcgg

SEQ ID NO: 74786 - DNA, 30 bp, Artificial Sequence
  Synthetic oligonucleotide
agtatgggtagtcaatagtaagtgttgcgg

SEQ ID NO: 74787 - DNA, 30 bp, Artificial Sequence
  Synthetic oligonucleotide
tattaaactcggccgaagaaaggaaatcgg

SEQ ID NO: 74788 - DNA, 30 bp, Artificial Sequence
  Synthetic oligonucleotide
gccattgcgagttggtatggatagaatcgg

SEQ ID NO: 74789 - DNA, 30 bp, Artificial Sequence
  Synthetic oligonucleotide
cgtaagaagtgcagcgtagaatcgaatcgg

SEQ ID NO: 74790 - DNA, 30 bp, Artificial Sequence
  Synthetic oligonucleotide
catcagaagtcaactgcccagcaagatcgg

SEQ ID NO: 74791 - DNA, 30 bp, Artificial Sequence
  Synthetic oligonucleotide
accgcgaatacagtgtgtgcaatagatcgg

SEQ ID NO: 74792 - DNA, 30 bp, Artificial Sequence
  Synthetic oligonucleotide
tcagtggcaaggttcgtttgcggcgatcgg

SEQ ID NO: 74793 - DNA, 30 bp, Artificial Sequence
  Synthetic oligonucleotide
cgagtctggcttcgaaaactgtagtatcgg

SEQ ID NO: 74794 - DNA, 30 bp, Artificial Sequence
  Synthetic oligonucleotide
ggggaagtcttatttgatgagtgttatcgg

SEQ ID NO: 74795 - DNA, 30 bp, Artificial Sequence
  Synthetic oligonucleotide
gttgagccgctagattacacgaatactcgg

SEQ ID NO: 74796 - DNA, 30 bp, Artificial Sequence
  Synthetic oligonucleotide
tcaaaagataggtcacggaacgagcctcgg

SEQ ID NO: 74797 - DNA, 30 bp, Artificial Sequence
  Synthetic oligonucleotide
ggtaggaaaactgtttgacttgtcgctcgg

SEQ ID NO: 74798 - DNA, 30 bp, Artificial Sequence
  Synthetic oligonucleotide
ttagatcgattacttaaaatgggggctcgg

SEQ ID NO: 74799 - DNA, 30 bp, Artificial Sequence
  Synthetic oligonucleotide
tgccaataatcaacggaccaatgctctcgg

SEQ ID NO: 74800 - DNA, 30 bp, Artificial Sequence
  Synthetic oligonucleotide
gaaagccgaggacgactaggtgtccgtcgg

SEQ ID NO: 74801 - DNA, 30 bp, Artificial Sequence
  Synthetic oligonucleotide
agggctggtgccacgtacctacttattcgg

SEQ ID NO: 74802 - DNA, 30 bp, Artificial Sequence
  Synthetic oligonucleotide
gagcgcgattgaaggctagacaagcttcgg

SEQ ID NO: 74803 - DNA, 30 bp, Artificial Sequence
  Synthetic oligonucleotide
tggagtgcgtcatacttggtcacgcttcgg

SEQ ID NO: 74804 - DNA, 30 bp, Artificial Sequence
  Synthetic oligonucleotide
tgcagatgtgtgtcaaatctaagagttcgg

SEQ ID NO: 74805 - DNA, 30 bp, Artificial Sequence
  Synthetic oligonucleotide
acgctgatcgagaaagcacgtgtagttcgg

SEQ ID NO: 74806 - DNA, 30 bp, Artificial Sequence
  Synthetic oligonucleotide
gataggggagacgttggaaggacggttcgg

SEQ ID NO: 74807 - DNA, 30 bp, Artificial Sequence
  Synthetic oligonucleotide
aggtaagctcaccgagatcacagtgttcgg

SEQ ID NO: 74808 - DNA, 30 bp, Artificial Sequence
  Synthetic oligonucleotide
tgaggttggattacagctagtcattttcgg

SEQ ID NO: 74809 - DNA, 30 bp, Artificial Sequence
  Synthetic oligonucleotide
ttggtgcaaattgggtagattttcaaaggg

SEQ ID NO: 74810 - DNA, 30 bp, Artificial Sequence
  Synthetic oligonucleotide
tcgttaagggatggcaagacactgaaaggg

SEQ ID NO: 74811 - DNA, 30 bp, Artificial Sequence
  Synthetic oligonucleotide
tcatgaggactacatgtggcattccaaggg

SEQ ID NO: 74812 - DNA, 30 bp, Artificial Sequence
  Synthetic oligonucleotide
caaaaatattatggagctccaagtcaaggg

SEQ ID NO: 74813 - DNA, 30 bp, Artificial Sequence
  Synthetic oligonucleotide
ttagagtccgggtacatctttccagaaggg

SEQ ID NO: 74814 - DNA, 30 bp, Artificial Sequence
  Synthetic oligonucleotide
gacgaagaactaaattgctattttgaaggg

SEQ ID NO: 74815 - DNA, 30 bp, Artificial Sequence
  Synthetic oligonucleotide
cggatactaatcatgtacaaatagtaaggg

SEQ ID NO: 74816 - DNA, 30 bp, Artificial Sequence
  Synthetic oligonucleotide
acaggactagcgttgtggacggaaacaggg

SEQ ID NO: 74817 - DNA, 30 bp, Artificial Sequence
  Synthetic oligonucleotide
atgacaaggacatcaatgcaagagacaggg

SEQ ID NO: 74818 - DNA, 30 bp, Artificial Sequence
  Synthetic oligonucleotide
actgcgcgtgagcattattatccgacaggg

SEQ ID NO: 74819 - DNA, 30 bp, Artificial Sequence
  Synthetic oligonucleotide
gtcggcccgcctagtaacgtgcggacaggg

SEQ ID NO: 74820 - DNA, 30 bp, Artificial Sequence
  Synthetic oligonucleotide
atggtaacgactgcaattcacgggccaggg

SEQ ID NO: 74821 - DNA, 30 bp, Artificial Sequence
  Synthetic oligonucleotide
agtcaagtatagctgtgaatgttggcaggg

SEQ ID NO: 74822 - DNA, 30 bp, Artificial Sequence
  Synthetic oligonucleotide
atcgtaagataaacactggttactgcaggg

SEQ ID NO: 74823 - DNA, 30 bp, Artificial Sequence
  Synthetic oligonucleotide
gtgaagtcggccacgtgaatctctgcaggg

SEQ ID NO: 74824 - DNA, 30 bp, Artificial Sequence
  Synthetic oligonucleotide
aaaggtaacggaaaggaacaaatctcaggg

SEQ ID NO: 74825 - DNA, 30 bp, Artificial Sequence
  Synthetic oligonucleotide
agcaaagctgtagaagccgaaccgtcaggg

SEQ ID NO: 74826 - DNA, 30 bp, Artificial Sequence
  Synthetic oligonucleotide
agaggatagtatataggcagtagaagaggg

SEQ ID NO: 74827 - DNA, 30 bp, Artificial Sequence
  Synthetic oligonucleotide
cacgtcagatgcaaaccacctagtagaggg

SEQ ID NO: 74828 - DNA, 30 bp, Artificial Sequence
  Synthetic oligonucleotide
cgggatgacggcaaaaagagaggtagaggg

SEQ ID NO: 74829 - DNA, 30 bp, Artificial Sequence
  Synthetic oligonucleotide
gaggcagtgatggggaccgatgttagaggg

SEQ ID NO: 74830 - DNA, 30 bp, Artificial Sequence
  Synthetic oligonucleotide
tatgggagggcatttccttccctacgaggg

SEQ ID NO: 74831 - DNA, 30 bp, Artificial Sequence
  Synthetic oligonucleotide
gtacaggcgttatggtgagggattcgaggg

SEQ ID NO: 74832 - DNA, 30 bp, Artificial Sequence
  Synthetic oligonucleotide
atcagcggacacgtattagttgttcgaggg

SEQ ID NO: 74833 - DNA, 30 bp, Artificial Sequence
  Synthetic oligonucleotide
ctgtgactacacggcagattaagaggaggg

SEQ ID NO: 74834 - DNA, 30 bp, Artificial Sequence
  Synthetic oligonucleotide
tatgtacggtagtaggccgccatcggaggg

SEQ ID NO: 74835 - DNA, 30 bp, Artificial Sequence
  Synthetic oligonucleotide
catttgtagcaaccggtacaccagggaggg

SEQ ID NO: 74836 - DNA, 30 bp, Artificial Sequence
  Synthetic oligonucleotide
gaagtcctgatcattaatccgcagggaggg

SEQ ID NO: 74837 - DNA, 30 bp, Artificial Sequence
  Synthetic oligonucleotide
ggataacgagggatccatacaacgggaggg

SEQ ID NO: 74838 - DNA, 30 bp, Artificial Sequence
  Synthetic oligonucleotide
gggccacgctttaaatctaatgcgggaggg

SEQ ID NO: 74839 - DNA, 30 bp, Artificial Sequence
  Synthetic oligonucleotide
ttgaatgcacaaatttaaagaaggggaggg

SEQ ID NO: 74840 - DNA, 30 bp, Artificial Sequence
  Synthetic oligonucleotide
gtctatgccgccttggcgtataggggaggg

SEQ ID NO: 74841 - DNA, 30 bp, Artificial Sequence
  Synthetic oligonucleotide
ccagcgctaaactcaggaactgctggaggg

SEQ ID NO: 74842 - DNA, 30 bp, Artificial Sequence
  Synthetic oligonucleotide
acaaatataactaccgctataaaatgaggg

SEQ ID NO: 74843 - DNA, 30 bp, Artificial Sequence
  Synthetic oligonucleotide
aggcgtcttaaaccgcggtctaaatgaggg

SEQ ID NO: 74844 - DNA, 30 bp, Artificial Sequence
  Synthetic oligonucleotide
ttcacaagaaggtgacatcgtcattgaggg

SEQ ID NO: 74845 - DNA, 30 bp, Artificial Sequence
  Synthetic oligonucleotide
gggagatgcctccaacacccgagtataggg

SEQ ID NO: 74846 - DNA, 30 bp, Artificial Sequence
  Synthetic oligonucleotide
taagctaatttcggcacattgaggctaggg

SEQ ID NO: 74847 - DNA, 30 bp, Artificial Sequence
  Synthetic oligonucleotide
aagcggcgcaggatgatgattctgctaggg

SEQ ID NO: 74848 - DNA, 30 bp, Artificial Sequence
  Synthetic oligonucleotide
gcgaaccgcgttttaacggcagtagtaggg

SEQ ID NO: 74849 - DNA, 30 bp, Artificial Sequence
  Synthetic oligonucleotide
acttacgtggtggaaggcgaacgcgtaggg

SEQ ID NO: 74850 - DNA, 30 bp, Artificial Sequence
  Synthetic oligonucleotide
attgcgaggacggtgtcctgtcgggtaggg

SEQ ID NO: 74851 - DNA, 30 bp, Artificial Sequence
  Synthetic oligonucleotide
gcggctagatgatgtgtctaatcattaggg

SEQ ID NO: 74852 - DNA, 30 bp, Artificial Sequence
  Synthetic oligonucleotide
actggcgccgcaacggaaactcgcttaggg

SEQ ID NO: 74853 - DNA, 30 bp, Artificial Sequence
  Synthetic oligonucleotide
tgaatatatgagatgggacacggaaacggg

SEQ ID NO: 74854 - DNA, 30 bp, Artificial Sequence
  Synthetic oligonucleotide
tgctgtcatactcaatattagaacaacggg

SEQ ID NO: 74855 - DNA, 30 bp, Artificial Sequence
  Synthetic oligonucleotide
ccgaagaacacggcgttcgcctgcaacggg

SEQ ID NO: 74856 - DNA, 30 bp, Artificial Sequence
  Synthetic oligonucleotide
gaggcggaccgctcataaaaatcgaacggg

SEQ ID NO: 74857 - DNA, 30 bp, Artificial Sequence
  Synthetic oligonucleotide
acgtcaatgccactggacatatcgaacggg

SEQ ID NO: 74858 - DNA, 30 bp, Artificial Sequence
  Synthetic oligonucleotide
ctcactgaagatggtttggtgtataacggg

SEQ ID NO: 74859 - DNA, 30 bp, Artificial Sequence
  Synthetic oligonucleotide
ttacgcgcgggattccactatcgtaacggg

SEQ ID NO: 74860 - DNA, 30 bp, Artificial Sequence
  Synthetic oligonucleotide
ttgtcagtcaatgaataggcgtttaacggg

SEQ ID NO: 74861 - DNA, 30 bp, Artificial Sequence
  Synthetic oligonucleotide
cctgcaagtaagttgctcagcggcgacggg

SEQ ID NO: 74862 - DNA, 30 bp, Artificial Sequence
  Synthetic oligonucleotide
ggtagaagagtgactcactagcgcaccggg

SEQ ID NO: 74863 - DNA, 30 bp, Artificial Sequence
  Synthetic oligonucleotide
gaagtacgattgatgtctggggtgaccggg

SEQ ID NO: 74864 - DNA, 30 bp, Artificial Sequence
  Synthetic oligonucleotide
tgttacctcgagtttagatatcgagccggg

SEQ ID NO: 74865 - DNA, 30 bp, Artificial Sequence
  Synthetic oligonucleotide
ccgacctctgggacaagtaacgtttccggg

SEQ ID NO: 74866 - DNA, 30 bp, Artificial Sequence
  Synthetic oligonucleotide
gttcgtaaacagctatagatggtaagcggg

SEQ ID NO: 74867 - DNA, 31 bp, Artificial Sequence
  Synthetic oligonucleotide
gcatcaaagaacagacctaacgcagagcggg

SEQ ID NO: 74868 - DNA, 30 bp, Artificial Sequence
  Synthetic oligonucleotide
atctccctgaaagtaagcgagaaaggcggg

SEQ ID NO: 74869 - DNA, 30 bp, Artificial Sequence
  Synthetic oligonucleotide
agataagccggaggggtgaagtggatcggg

SEQ ID NO: 74870 - DNA, 30 bp, Artificial Sequence
  Synthetic oligonucleotide
tgagcgatcatacctcgcttaccagtcggg

SEQ ID NO: 74871 - DNA, 30 bp, Artificial Sequence
  Synthetic oligonucleotide
tgacggagatggatgttcattttcgtcggg

SEQ ID NO: 74872 - DNA, 30 bp, Artificial Sequence
  Synthetic oligonucleotide
taggtccggaggacaaggctcaaaaagggg

SEQ ID NO: 74873 - DNA, 30 bp, Artificial Sequence
  Synthetic oligonucleotide
tacagtgcaactccatctaaaagaaagggg

SEQ ID NO: 74874 - DNA, 30 bp, Artificial Sequence
  Synthetic oligonucleotide
aacatcggcataccgtgggagctcaagggg

SEQ ID NO: 74875 - DNA, 30 bp, Artificial Sequence
  Synthetic oligonucleotide
agaaataaatattatagtgatcgtaagggg

SEQ ID NO: 74876 - DNA, 30 bp, Artificial Sequence
  Synthetic oligonucleotide
cctgacgaacgctatgcctaccaacagggg

SEQ ID NO: 74877 - DNA, 30 bp, Artificial Sequence
  Synthetic oligonucleotide
gcgggagtccaattaggcatattccagggg

SEQ ID NO: 74878 - DNA, 30 bp, Artificial Sequence
  Synthetic oligonucleotide
attcgtaacgaagacactagttatcagggg

SEQ ID NO: 74879 - DNA, 30 bp, Artificial Sequence
  Synthetic oligonucleotide
tagggtcgccggaatgttgtatctcagggg

SEQ ID NO: 74880 - DNA, 30 bp, Artificial Sequence
  Synthetic oligonucleotide
cttgggatcaagcctcgccatgaagagggg

SEQ ID NO: 74881 - DNA, 30 bp, Artificial Sequence
  Synthetic oligonucleotide
atcatgcgtaaggggatcacgccagagggg

SEQ ID NO: 74882 - DNA, 30 bp, Artificial Sequence
  Synthetic oligonucleotide
gcgcacctagatcaacttcaagacgagggg

SEQ ID NO: 74883 - DNA, 30 bp, Artificial Sequence
  Synthetic oligonucleotide
tatactgtggtgtgaagaaatgtcgagggg

SEQ ID NO: 74884 - DNA, 30 bp, Artificial Sequence
  Synthetic oligonucleotide
gcggatcctcaatcattaagaggggagggg

SEQ ID NO: 74885 - DNA, 30 bp, Artificial Sequence
  Synthetic oligonucleotide
cataccgagtgggtacgaattattgagggg

SEQ ID NO: 74886 - DNA, 30 bp, Artificial Sequence
  Synthetic oligonucleotide
taagaaaaaacacgatcccaataatagggg

SEQ ID NO: 74887 - DNA, 30 bp, Artificial Sequence
  Synthetic oligonucleotide
tacttgctatcatccaggacagcctagggg

SEQ ID NO: 74888 - DNA, 30 bp, Artificial Sequence
  Synthetic oligonucleotide
caagtgagtcgaaggacgataacgtagggg

SEQ ID NO: 74889 - DNA, 30 bp, Artificial Sequence
  Synthetic oligonucleotide
ggacaatgccaatgatcgttttaaacgggg

SEQ ID NO: 74890 - DNA, 30 bp, Artificial Sequence
  Synthetic oligonucleotide
tagttgtgcattgcgggtgatcgtacgggg

SEQ ID NO: 74891 - DNA, 30 bp, Artificial Sequence
  Synthetic oligonucleotide
agtaagttcccggcaaccaccataccgggg

SEQ ID NO: 74892 - DNA, 31 bp, Artificial Sequence
  Synthetic oligonucleotide
ccgccaaagccgaaaaccagagcgggcgggg

SEQ ID NO: 74893 - DNA, 30 bp, Artificial Sequence
  Synthetic oligonucleotide
aactacgacgacgagtgtcgtcatgcgggg

SEQ ID NO: 74894 - DNA, 30 bp, Artificial Sequence
  Synthetic oligonucleotide
atgagcctcaacgactgaacacaatcgggg

SEQ ID NO: 74895 - DNA, 30 bp, Artificial Sequence
  Synthetic oligonucleotide
catgcgggtttattgagcaatggatcgggg

SEQ ID NO: 74896 - DNA, 30 bp, Artificial Sequence
  Synthetic oligonucleotide
aagtgtgggaaccacctgagttaaaggggg

SEQ ID NO: 74897 - DNA, 30 bp, Artificial Sequence
  Synthetic oligonucleotide
tgcaagagcttatagctatggcccaggggg

SEQ ID NO: 74898 - DNA, 30 bp, Artificial Sequence
  Synthetic oligonucleotide
acgttatttgtgaaacgggacaaacggggg

SEQ ID NO: 74899 - DNA, 35 bp, Artificial Sequence
  Synthetic oligonucleotide
tgcggtgggttggggccagtcatgaatggcggggg

SEQ ID NO: 74900 - DNA, 30 bp, Artificial Sequence
  Synthetic oligonucleotide
aggaatatagtcaattttagttgctggggg

SEQ ID NO: 74901 - DNA, 30 bp, Artificial Sequence
  Synthetic oligonucleotide
tagacgttaatcgaacggtaaaattggggg

SEQ ID NO: 74902 - DNA, 30 bp, Artificial Sequence
  Synthetic oligonucleotide
ggtcgcatcacgtgtagcataccttggggg

SEQ ID NO: 74903 - DNA, 30 bp, Artificial Sequence
  Synthetic oligonucleotide
actgaagcgacctcgatgcatgtttggggg

SEQ ID NO: 74904 - DNA, 30 bp, Artificial Sequence
  Synthetic oligonucleotide
ccagacaaagatgtagtaccactaatgggg

SEQ ID NO: 74905 - DNA, 30 bp, Artificial Sequence
  Synthetic oligonucleotide
gaagagcttgccccgtggggaatgatgggg

SEQ ID NO: 74906 - DNA, 30 bp, Artificial Sequence
  Synthetic oligonucleotide
attgaaaaaatagaagaccactgtatgggg

SEQ ID NO: 74907 - DNA, 30 bp, Artificial Sequence
  Synthetic oligonucleotide
acgggatccgggttgaaatcacgactgggg

SEQ ID NO: 74908 - DNA, 30 bp, Artificial Sequence
  Synthetic oligonucleotide
gcagaacagcctagtgaacgggagctgggg

SEQ ID NO: 74909 - DNA, 30 bp, Artificial Sequence
  Synthetic oligonucleotide
aaggtgggaagagtgcattcttagctgggg

SEQ ID NO: 74910 - DNA, 30 bp, Artificial Sequence
  Synthetic oligonucleotide
gctaaatccggtgactcagcgaggctgggg

SEQ ID NO: 74911 - DNA, 30 bp, Artificial Sequence
  Synthetic oligonucleotide
agcttcacagaacgagggagcagcgtgggg

SEQ ID NO: 74912 - DNA, 30 bp, Artificial Sequence
  Synthetic oligonucleotide
aagagtgaaataaacgataatgatgtgggg

SEQ ID NO: 74913 - DNA, 30 bp, Artificial Sequence
  Synthetic oligonucleotide
tgagatcggggggtagataagatattgggg

SEQ ID NO: 74914 - DNA, 30 bp, Artificial Sequence
  Synthetic oligonucleotide
gcgtgaggttagctactaaaaagtttgggg

SEQ ID NO: 74915 - DNA, 30 bp, Artificial Sequence
  Synthetic oligonucleotide
taggtcatgcgtatttgtttgtaaaatggg

SEQ ID NO: 74916 - DNA, 30 bp, Artificial Sequence
  Synthetic oligonucleotide
cgttctagtgatgcgaggaaacgaaatggg

SEQ ID NO: 74917 - DNA, 30 bp, Artificial Sequence
  Synthetic oligonucleotide
ccccagacgttaagtagtgaagtgaatggg

SEQ ID NO: 74918 - DNA, 30 bp, Artificial Sequence
  Synthetic oligonucleotide
accagacctccggccacgactcgccatggg

SEQ ID NO: 74919 - DNA, 30 bp, Artificial Sequence
  Synthetic oligonucleotide
cgcgcctgatcgcgttggcagtgccatggg

SEQ ID NO: 74920 - DNA, 30 bp, Artificial Sequence
  Synthetic oligonucleotide
agatcatcgtatacgtaaattcaggatggg

SEQ ID NO: 74921 - DNA, 30 bp, Artificial Sequence
  Synthetic oligonucleotide
tgttccaagaaggccacgtgtttggatggg

SEQ ID NO: 74922 - DNA, 30 bp, Artificial Sequence
  Synthetic oligonucleotide
ggtccaagactcttcaactcagactatggg

SEQ ID NO: 74923 - DNA, 30 bp, Artificial Sequence
  Synthetic oligonucleotide
acggtaacgtcattttgtaatgcgtatggg

SEQ ID NO: 74924 - DNA, 30 bp, Artificial Sequence
  Synthetic oligonucleotide
cagccgcacgaacggattgaaggtcctggg

SEQ ID NO: 74925 - DNA, 30 bp, Artificial Sequence
  Synthetic oligonucleotide
aactcattaaagatgaagcgagaagctggg

SEQ ID NO: 74926 - DNA, 30 bp, Artificial Sequence
  Synthetic oligonucleotide
tgcaaatgagccacatcttgctgagctggg

SEQ ID NO: 74927 - DNA, 30 bp, Artificial Sequence
  Synthetic oligonucleotide
cagggcacatctgccgggcattatgctggg

SEQ ID NO: 74928 - DNA, 30 bp, Artificial Sequence
  Synthetic oligonucleotide
aggcccaaaagaagcagacgtaaaagtggg

SEQ ID NO: 74929 - DNA, 30 bp, Artificial Sequence
  Synthetic oligonucleotide
gcaaggctatccaaaggtatgcatcgtggg

SEQ ID NO: 74930 - DNA, 30 bp, Artificial Sequence
  Synthetic oligonucleotide
cggacagtcgaaaatccagtatcaggtggg

SEQ ID NO: 74931 - DNA, 30 bp, Artificial Sequence
  Synthetic oligonucleotide
cgacccaatgatgacgttcgttgctgtggg

SEQ ID NO: 74932 - DNA, 30 bp, Artificial Sequence
  Synthetic oligonucleotide
gctcataggggagcgtcagttacgattggg

SEQ ID NO: 74933 - DNA, 30 bp, Artificial Sequence
  Synthetic oligonucleotide
tgccactgattttgggggatcgggattggg

SEQ ID NO: 74934 - DNA, 30 bp, Artificial Sequence
  Synthetic oligonucleotide
tactcttaaggcaggaaaaaaagacttggg

SEQ ID NO: 74935 - DNA, 30 bp, Artificial Sequence
  Synthetic oligonucleotide
ataccactcagagtaggcgtaagccttggg

SEQ ID NO: 74936 - DNA, 30 bp, Artificial Sequence
  Synthetic oligonucleotide
acccgagatgacttgattagggggcttggg

SEQ ID NO: 74937 - DNA, 30 bp, Artificial Sequence
  Synthetic oligonucleotide
tacttattaagattcacactgtgagttggg

SEQ ID NO: 74938 - DNA, 30 bp, Artificial Sequence
  Synthetic oligonucleotide
tacgtacagggtcactcatatttgtttggg

SEQ ID NO: 74939 - DNA, 30 bp, Artificial Sequence
  Synthetic oligonucleotide
ctagcgagcggtcttcgaactcagaaatgg

SEQ ID NO: 74940 - DNA, 30 bp, Artificial Sequence
  Synthetic oligonucleotide
ttacagtacgggtcatagcaacgtaaatgg

SEQ ID NO: 74941 - DNA, 30 bp, Artificial Sequence
  Synthetic oligonucleotide
actgtatgataaagtgctacaagtcaatgg

SEQ ID NO: 74942 - DNA, 30 bp, Artificial Sequence
  Synthetic oligonucleotide
ggaattgcagtggtacaagagggtcaatgg

SEQ ID NO: 74943 - DNA, 30 bp, Artificial Sequence
  Synthetic oligonucleotide
aagcggtaaaagattgcctactgtcaatgg

SEQ ID NO: 74944 - DNA, 30 bp, Artificial Sequence
  Synthetic oligonucleotide
cgagagctatacgtctttacctcagaatgg

SEQ ID NO: 74945 - DNA, 30 bp, Artificial Sequence
  Synthetic oligonucleotide
agaagtgggcatctggtgggattagaatgg

SEQ ID NO: 74946 - DNA, 30 bp, Artificial Sequence
  Synthetic oligonucleotide
cgatcggaataaatcaaagcaccctaatgg

SEQ ID NO: 74947 - DNA, 30 bp, Artificial Sequence
  Synthetic oligonucleotide
ccacaagctaaggacggtcccccttaatgg

SEQ ID NO: 74948 - DNA, 30 bp, Artificial Sequence
  Synthetic oligonucleotide
gaagcgattagctaagtagttacgacatgg

SEQ ID NO: 74949 - DNA, 30 bp, Artificial Sequence
  Synthetic oligonucleotide
ggctttaagagtccagacttaaggacatgg

SEQ ID NO: 74950 - DNA, 30 bp, Artificial Sequence
  Synthetic oligonucleotide
gtcatagccagttagagccctggtacatgg

SEQ ID NO: 74951 - DNA, 30 bp, Artificial Sequence
  Synthetic oligonucleotide
caagatgacctcgcgaaataaaacgcatgg

SEQ ID NO: 74952 - DNA, 30 bp, Artificial Sequence
  Synthetic oligonucleotide
agttcagcaaagcgatcgtagtgggcatgg

SEQ ID NO: 74953 - DNA, 30 bp, Artificial Sequence
  Synthetic oligonucleotide
acactgggtgatataaccctagattcatgg

SEQ ID NO: 74954 - DNA, 30 bp, Artificial Sequence
  Synthetic oligonucleotide
aagcaaaaccacgactgtccggagagatgg

SEQ ID NO: 74955 - DNA, 30 bp, Artificial Sequence
  Synthetic oligonucleotide
aggcaacgcatagtggaagtcgctagatgg

SEQ ID NO: 74956 - DNA, 30 bp, Artificial Sequence
  Synthetic oligonucleotide
ttgggaggcatatttcataccctacgatgg

SEQ ID NO: 74957 - DNA, 30 bp, Artificial Sequence
  Synthetic oligonucleotide
cacttaatctcagactagggcaagcgatgg

SEQ ID NO: 74958 - DNA, 30 bp, Artificial Sequence
  Synthetic oligonucleotide
caattcgaacaaatcgccttcgagcgatgg

SEQ ID NO: 74959 - DNA, 30 bp, Artificial Sequence
  Synthetic oligonucleotide
ctgttaggtgtggacgatctgtatcgatgg

SEQ ID NO: 74960 - DNA, 30 bp, Artificial Sequence
  Synthetic oligonucleotide
tgaactggtacgtcctgtgatattcgatgg

SEQ ID NO: 74961 - DNA, 30 bp, Artificial Sequence
  Synthetic oligonucleotide
actagcgtgttagttggctcgataggatgg

SEQ ID NO: 74962 - DNA, 30 bp, Artificial Sequence
  Synthetic oligonucleotide
acgtccccatttgctgaaggcctcggatgg

SEQ ID NO: 74963 - DNA, 30 bp, Artificial Sequence
  Synthetic oligonucleotide
aggaatgaggggaaggatggctagtgatgg

SEQ ID NO: 74964 - DNA, 30 bp, Artificial Sequence
  Synthetic oligonucleotide
acttaaatcacactgggcttgccttgatgg

SEQ ID NO: 74965 - DNA, 30 bp, Artificial Sequence
  Synthetic oligonucleotide
cagaatacacgacagaaaacgagttgatgg

SEQ ID NO: 74966 - DNA, 30 bp, Artificial Sequence
  Synthetic oligonucleotide
ggtgataaaatgttagcgacggcaatatgg

SEQ ID NO: 74967 - DNA, 30 bp, Artificial Sequence
  Synthetic oligonucleotide
gcttgaattcatattggtagaaacatatgg

SEQ ID NO: 74968 - DNA, 30 bp, Artificial Sequence
  Synthetic oligonucleotide
ccgcggggatcttggggcgtgcctatatgg

SEQ ID NO: 74969 - DNA, 30 bp, Artificial Sequence
  Synthetic oligonucleotide
actacaaatgagaaacttgaaaggttatgg

SEQ ID NO: 74970 - DNA, 30 bp, Artificial Sequence
  Synthetic oligonucleotide
gtaggtccagcatacttgcactttaactgg

SEQ ID NO: 74971 - DNA, 30 bp, Artificial Sequence
  Synthetic oligonucleotide
ctcactggatacatcgtacgagaggactgg

SEQ ID NO: 74972 - DNA, 30 bp, Artificial Sequence
  Synthetic oligonucleotide
atgcacggaaatgaagccatattctactgg

SEQ ID NO: 74973 - DNA, 30 bp, Artificial Sequence
  Synthetic oligonucleotide
tgctcgtttaaccgaacacgactaacctgg

SEQ ID NO: 74974 - DNA, 30 bp, Artificial Sequence
  Synthetic oligonucleotide
caccggtacgaaaagccaatcaagacctgg

SEQ ID NO: 74975 - DNA, 30 bp, Artificial Sequence
  Synthetic oligonucleotide
atgtaattcgtcgaaggcaggtgttcctgg

SEQ ID NO: 74976 - DNA, 30 bp, Artificial Sequence
  Synthetic oligonucleotide
ggatgaataatgcaggctaggcgaagctgg

SEQ ID NO: 74977 - DNA, 30 bp, Artificial Sequence
  Synthetic oligonucleotide
ccgaatctattatgagttggcataagctgg

SEQ ID NO: 74978 - DNA, 30 bp, Artificial Sequence
  Synthetic oligonucleotide
gcggagaaatttcaacttgctcatggctgg

SEQ ID NO: 74979 - DNA, 31 bp, Artificial Sequence
  Synthetic oligonucleotide
tcttcgcgtctggctgggtaatagaatctgg

SEQ ID NO: 74980 - DNA, 30 bp, Artificial Sequence
  Synthetic oligonucleotide
agcaggttcagcaaaccaatagctctctgg

SEQ ID NO: 74981 - DNA, 30 bp, Artificial Sequence
  Synthetic oligonucleotide
acagagatcgcgcatcgttagacggtctgg

SEQ ID NO: 74982 - DNA, 30 bp, Artificial Sequence
  Synthetic oligonucleotide
ctctaggacaacctaggaaatgaattctgg

SEQ ID NO: 74983 - DNA, 30 bp, Artificial Sequence
  Synthetic oligonucleotide
ggtgaaatccgaagcaaccagaaaaagtgg

SEQ ID NO: 74984 - DNA, 30 bp, Artificial Sequence
  Synthetic oligonucleotide
ggggggaacagatgtaaaactcggaagtgg

SEQ ID NO: 74985 - DNA, 30 bp, Artificial Sequence
  Synthetic oligonucleotide
ttcgggtaaactagttgccaactgaagtgg

SEQ ID NO: 74986 - DNA, 30 bp, Artificial Sequence
  Synthetic oligonucleotide
gttactatgagctcgagagaaaagcagtgg

SEQ ID NO: 74987 - DNA, 30 bp, Artificial Sequence
  Synthetic oligonucleotide
ggccattgtcagagacgccaggaagagtgg

SEQ ID NO: 74988 - DNA, 30 bp, Artificial Sequence
  Synthetic oligonucleotide
agatacggatacgctcgctgaatagagtgg

SEQ ID NO: 74989 - DNA, 30 bp, Artificial Sequence
  Synthetic oligonucleotide
taaactgggcttagcgttccgatgtagtgg

SEQ ID NO: 74990 - DNA, 30 bp, Artificial Sequence
  Synthetic oligonucleotide
gaagtgagggtgcgtacgacatcaacgtgg

SEQ ID NO: 74991 - DNA, 30 bp, Artificial Sequence
  Synthetic oligonucleotide
gggcatctggcaagttactaaagtacgtgg

SEQ ID NO: 74992 - DNA, 30 bp, Artificial Sequence
  Synthetic oligonucleotide
cctagaacattatattcatcaagggcgtgg

SEQ ID NO: 74993 - DNA, 30 bp, Artificial Sequence
  Synthetic oligonucleotide
acgaatcaagatatgttgttcttggcgtgg

SEQ ID NO: 74994 - DNA, 30 bp, Artificial Sequence
  Synthetic oligonucleotide
tggcgtcgtgtaagggtatttgtgtcgtgg

SEQ ID NO: 74995 - DNA, 30 bp, Artificial Sequence
  Synthetic oligonucleotide
aaccggattgtgagcggtacactaaggtgg

SEQ ID NO: 74996 - DNA, 30 bp, Artificial Sequence
  Synthetic oligonucleotide
atgcgatgtcaaagtattaggacgaggtgg

SEQ ID NO: 74997 - DNA, 30 bp, Artificial Sequence
  Synthetic oligonucleotide
gaacactctacaacgtgagaagggaggtgg

SEQ ID NO: 74998 - DNA, 30 bp, Artificial Sequence
  Synthetic oligonucleotide
agctagctgatattgtagaaggggaggtgg

SEQ ID NO: 74999 - DNA, 30 bp, Artificial Sequence
  Synthetic oligonucleotide
atagcgttggaagggggataaatgaggtgg

SEQ ID NO: 75000 - DNA, 30 bp, Artificial Sequence
  Synthetic oligonucleotide
caccctaacaaagcgtgaaggctacggtgg

SEQ ID NO: 75001 - DNA, 30 bp, Artificial Sequence
  Synthetic oligonucleotide
tctcccctaagcattctaaagccagggtgg

SEQ ID NO: 75002 - DNA, 30 bp, Artificial Sequence
  Synthetic oligonucleotide
agtaggatcaccggtattccagtatggtgg

SEQ ID NO: 75003 - DNA, 30 bp, Artificial Sequence
  Synthetic oligonucleotide
gaccgtcccaggtacaggcttaacatgtgg

SEQ ID NO: 75004 - DNA, 30 bp, Artificial Sequence
  Synthetic oligonucleotide
cagggacggcgctgaggataaacgatgtgg

SEQ ID NO: 75005 - DNA, 30 bp, Artificial Sequence
  Synthetic oligonucleotide
cggcagaatacacatatcccagggctgtgg

SEQ ID NO: 75006 - DNA, 30 bp, Artificial Sequence
  Synthetic oligonucleotide
gtaactatgctaaagaaataaaccgtgtgg

SEQ ID NO: 75007 - DNA, 30 bp, Artificial Sequence
  Synthetic oligonucleotide
cggataagggtatatactggacgaaattgg

SEQ ID NO: 75008 - DNA, 30 bp, Artificial Sequence
  Synthetic oligonucleotide
tgtggtagtggcccaacgcgattcaattgg

SEQ ID NO: 75009 - DNA, 30 bp, Artificial Sequence
  Synthetic oligonucleotide
gcatctatggaacaattcggaaagaattgg

SEQ ID NO: 75010 - DNA, 30 bp, Artificial Sequence
  Synthetic oligonucleotide
gtaccagatggttccgagcagtggaattgg

SEQ ID NO: 75011 - DNA, 30 bp, Artificial Sequence
  Synthetic oligonucleotide
gtccgagtcgaaggtaaggctgtgaattgg

SEQ ID NO: 75012 - DNA, 30 bp, Artificial Sequence
  Synthetic oligonucleotide
aagacggcattgagtatcatcagacattgg

SEQ ID NO: 75013 - DNA, 30 bp, Artificial Sequence
  Synthetic oligonucleotide
gtgtccgttgatccggtgcgatgacattgg

SEQ ID NO: 75014 - DNA, 30 bp, Artificial Sequence
  Synthetic oligonucleotide
atctactggacaactccagtgccccattgg

SEQ ID NO: 75015 - DNA, 30 bp, Artificial Sequence
  Synthetic oligonucleotide
gttacgagagggtgttttgcctaagattgg

SEQ ID NO: 75016 - DNA, 30 bp, Artificial Sequence
  Synthetic oligonucleotide
cacaagcagagtacccatttctgagattgg

SEQ ID NO: 75017 - DNA, 30 bp, Artificial Sequence
  Synthetic oligonucleotide
cgggaaaggctggaccataagacttattgg

SEQ ID NO: 75018 - DNA, 30 bp, Artificial Sequence
  Synthetic oligonucleotide
taggacgggatggattaaaataaaacttgg

SEQ ID NO: 75019 - DNA, 30 bp, Artificial Sequence
  Synthetic oligonucleotide
aagggtactgaaaaagtaatcggaacttgg

SEQ ID NO: 75020 - DNA, 30 bp, Artificial Sequence
  Synthetic oligonucleotide
cgcactatattacgaggggaagccacttgg

SEQ ID NO: 75021 - DNA, 30 bp, Artificial Sequence
  Synthetic oligonucleotide
ccgatgagtgttaccctgaagttgacttgg

SEQ ID NO: 75022 - DNA, 30 bp, Artificial Sequence
  Synthetic oligonucleotide
tgcccaggacctcgaacgacgaaaccttgg

SEQ ID NO: 75023 - DNA, 30 bp, Artificial Sequence
  Synthetic oligonucleotide
cgtgccaaattaagcgaccgattcccttgg

SEQ ID NO: 75024 - DNA, 30 bp, Artificial Sequence
  Synthetic oligonucleotide
aatataagcctcaaggcgagaatcgcttgg

SEQ ID NO: 75025 - DNA, 30 bp, Artificial Sequence
  Synthetic oligonucleotide
cgcaggggcgttacgagtcagggggcttgg

SEQ ID NO: 75026 - DNA, 30 bp, Artificial Sequence
  Synthetic oligonucleotide
aaggaactcgacattccacggtgtgcttgg

SEQ ID NO: 75027 - DNA, 30 bp, Artificial Sequence
  Synthetic oligonucleotide
cccgcgaaactatggcgatgcggatcttgg

SEQ ID NO: 75028 - DNA, 30 bp, Artificial Sequence
  Synthetic oligonucleotide
gcgtactgcatgagtgcagagtgttcttgg

SEQ ID NO: 75029 - DNA, 30 bp, Artificial Sequence
  Synthetic oligonucleotide
aagggccaggattcagttgtggttagttgg

SEQ ID NO: 75030 - DNA, 30 bp, Artificial Sequence
  Synthetic oligonucleotide
ctggatgaaaatggtacggaaccgggttgg

SEQ ID NO: 75031 - DNA, 30 bp, Artificial Sequence
  Synthetic oligonucleotide
aagagaggggattatgcgctcaatggttgg

SEQ ID NO: 75032 - DNA, 30 bp, Artificial Sequence
  Synthetic oligonucleotide
catcaagcggattcgagaagcccaatttgg

SEQ ID NO: 75033 - DNA, 31 bp, Artificial Sequence
  Synthetic oligonucleotide
acaagctcgtagggaacacaatagcctttgg

SEQ ID NO: 75034 - DNA, 30 bp, Artificial Sequence
  Synthetic oligonucleotide
gatcgaacattcgcagactgaaagctttgg

SEQ ID NO: 75035 - DNA, 30 bp, Artificial Sequence
  Synthetic oligonucleotide
gcgattactttaggataattgtctctttgg

SEQ ID NO: 75036 - DNA, 30 bp, Artificial Sequence
  Synthetic oligonucleotide
aggcttgctatcgacgtatggaatgtttgg

SEQ ID NO: 75037 - DNA, 30 bp, Artificial Sequence
  Synthetic oligonucleotide
tgtcggacgattatgattcgtgttgtttgg

SEQ ID NO: 75038 - DNA, 30 bp, Artificial Sequence
  Synthetic oligonucleotide
gtggaatgggaacgagtatttgaattttgg

SEQ ID NO: 75039 - DNA, 30 bp, Artificial Sequence
  Synthetic oligonucleotide
acaacaggcactcaaaaaccgagcaaaatg

SEQ ID NO: 75040 - DNA, 30 bp, Artificial Sequence
  Synthetic oligonucleotide
attgaggttcgatccgaaagacggaaaatg

SEQ ID NO: 75041 - DNA, 30 bp, Artificial Sequence
  Synthetic oligonucleotide
tcgcggtcgtaaaacaggagtgggaaaatg

SEQ ID NO: 75042 - DNA, 30 bp, Artificial Sequence
  Synthetic oligonucleotide
agctggtaagacgtgtaatgccttaaaatg

SEQ ID NO: 75043 - DNA, 30 bp, Artificial Sequence
  Synthetic oligonucleotide
ctgtatacatccggatagacctgccaaatg

SEQ ID NO: 75044 - DNA, 30 bp, Artificial Sequence
  Synthetic oligonucleotide
gttggatatggagagacgtgcaggcaaatg

SEQ ID NO: 75045 - DNA, 29 bp, Artificial Sequence
  Synthetic oligonucleotide
tggtacagtggcaatcgattcggcaaatg

SEQ ID NO: 75046 - DNA, 30 bp, Artificial Sequence
  Synthetic oligonucleotide
cgcttagaccggttacttgaggacgaaatg

SEQ ID NO: 75047 - DNA, 30 bp, Artificial Sequence
  Synthetic oligonucleotide
atatggccaagattacagacattataaatg

SEQ ID NO: 75048 - DNA, 30 bp, Artificial Sequence
  Synthetic oligonucleotide
gcctcctaacagtctaatgatgactaaatg

SEQ ID NO: 75049 - DNA, 30 bp, Artificial Sequence
  Synthetic oligonucleotide
ggaggtaacgtgcaaaattttgggacaatg

SEQ ID NO: 75050 - DNA, 30 bp, Artificial Sequence
  Synthetic oligonucleotide
aagcataaacgtggtgactaaaagccaatg

SEQ ID NO: 75051 - DNA, 30 bp, Artificial Sequence
  Synthetic oligonucleotide
gatgggcaacttgtgctggatcaagcaatg

SEQ ID NO: 75052 - DNA, 30 bp, Artificial Sequence
  Synthetic oligonucleotide
caatacacgctcttaaatcaagccgcaatg

SEQ ID NO: 75053 - DNA, 30 bp, Artificial Sequence
  Synthetic oligonucleotide
gtcgtgtgctaatgactgaggtcggcaatg

SEQ ID NO: 75054 - DNA, 31 bp, Artificial Sequence
  Synthetic oligonucleotide
atttcaattcccaaaactgggaatggcaatg

SEQ ID NO: 75055 - DNA, 31 bp, Artificial Sequence
  Synthetic oligonucleotide
acggaggtgtcaatctgacaacagtgcaatg

SEQ ID NO: 75056 - DNA, 30 bp, Artificial Sequence
  Synthetic oligonucleotide
tactcgctctaagatagatctcgaagaatg

SEQ ID NO: 75057 - DNA, 30 bp, Artificial Sequence
  Synthetic oligonucleotide
cgtataatacaacagtgcgcttatagaatg

SEQ ID NO: 75058 - DNA, 30 bp, Artificial Sequence
  Synthetic oligonucleotide
cggaacgaataactcaagccgtatcgaatg

SEQ ID NO: 75059 - DNA, 30 bp, Artificial Sequence
  Synthetic oligonucleotide
gggtcatctgggcgactaggtcctcgaatg

SEQ ID NO: 75060 - DNA, 30 bp, Artificial Sequence
  Synthetic oligonucleotide
tagcagcaaggcgtcggagagtccggaatg

SEQ ID NO: 75061 - DNA, 30 bp, Artificial Sequence
  Synthetic oligonucleotide
aacgctatacaggctaatagccctggaatg

SEQ ID NO: 75062 - DNA, 30 bp, Artificial Sequence
  Synthetic oligonucleotide
gactcactgggagtgcgagcggctggaatg

SEQ ID NO: 75063 - DNA, 29 bp, Artificial Sequence
  Synthetic oligonucleotide
acgtcatgaggccagagagcgactgaatg

SEQ ID NO: 75064 - DNA, 31 bp, Artificial Sequence
  Synthetic oligonucleotide
aaaatatagtcgtgggttaagaagcataatg

SEQ ID NO: 75065 - DNA, 30 bp, Artificial Sequence
  Synthetic oligonucleotide
gcccccgagctgtgtaaataaaggataatg

SEQ ID NO: 75066 - DNA, 30 bp, Artificial Sequence
  Synthetic oligonucleotide
aggacgagtttgttagcgcgaactataatg

SEQ ID NO: 75067 - DNA, 30 bp, Artificial Sequence
  Synthetic oligonucleotide
tggccacagacaatccggacacctgtaatg

SEQ ID NO: 75068 - DNA, 30 bp, Artificial Sequence
  Synthetic oligonucleotide
tggacttacgggaaagtaaagccattaatg

SEQ ID NO: 75069 - DNA, 30 bp, Artificial Sequence
  Synthetic oligonucleotide
agggtggtcgaagggacaaccgatttaatg

SEQ ID NO: 75070 - DNA, 30 bp, Artificial Sequence
  Synthetic oligonucleotide
aagggattcacatgagaacagtttttaatg

SEQ ID NO: 75071 - DNA, 30 bp, Artificial Sequence
  Synthetic oligonucleotide
gaaagcgccggcatccactaccaaaacatg

SEQ ID NO: 75072 - DNA, 30 bp, Artificial Sequence
  Synthetic oligonucleotide
gaacagcccagggattagaggaacaacatg

SEQ ID NO: 75073 - DNA, 30 bp, Artificial Sequence
  Synthetic oligonucleotide
tgtcgatcaaagatcccgtcaaatcacatg

SEQ ID NO: 75074 - DNA, 30 bp, Artificial Sequence
  Synthetic oligonucleotide
cttcaaacaaagcaccattgtagagacatg

SEQ ID NO: 75075 - DNA, 30 bp, Artificial Sequence
  Synthetic oligonucleotide
ctgcgtcaaaccttagcattcaccgacatg

SEQ ID NO: 75076 - DNA, 30 bp, Artificial Sequence
  Synthetic oligonucleotide
gctaaagtaaggaaagtgcaaaaggacatg

SEQ ID NO: 75077 - DNA, 30 bp, Artificial Sequence
  Synthetic oligonucleotide
cttcgagcaactaggacgggcttggacatg

SEQ ID NO: 75078 - DNA, 30 bp, Artificial Sequence
  Synthetic oligonucleotide
gggccgacgcatgggaccagcagtgacatg

SEQ ID NO: 75079 - DNA, 30 bp, Artificial Sequence
  Synthetic oligonucleotide
agaattagcgaatgggcccagagttacatg

SEQ ID NO: 75080 - DNA, 30 bp, Artificial Sequence
  Synthetic oligonucleotide
tccggtgatagaaagcccagccaaaccatg

SEQ ID NO: 75081 - DNA, 30 bp, Artificial Sequence
  Synthetic oligonucleotide
cagatcacctaccgtgtgaacgccaccatg

SEQ ID NO: 75082 - DNA, 30 bp, Artificial Sequence
  Synthetic oligonucleotide
gcttgctgcgtgcgggaacagcttaccatg

SEQ ID NO: 75083 - DNA, 30 bp, Artificial Sequence
  Synthetic oligonucleotide
ttgatgggagagtggagctgtgtgcccatg

SEQ ID NO: 75084 - DNA, 30 bp, Artificial Sequence
  Synthetic oligonucleotide
caccacaatcgattagcgagcgtatccatg

SEQ ID NO: 75085 - DNA, 30 bp, Artificial Sequence
  Synthetic oligonucleotide
gaacgcatgtatctacgttccacttccatg

SEQ ID NO: 75086 - DNA, 30 bp, Artificial Sequence
  Synthetic oligonucleotide
ccttcaagaggacgtatgccgtgaagcatg

SEQ ID NO: 75087 - DNA, 30 bp, Artificial Sequence
  Synthetic oligonucleotide
tactgacgtgactaatatactaggagcatg

SEQ ID NO: 75088 - DNA, 30 bp, Artificial Sequence
  Synthetic oligonucleotide
gcgatgaatttgagaggtaaattgagcatg

SEQ ID NO: 75089 - DNA, 30 bp, Artificial Sequence
  Synthetic oligonucleotide
caacgaccgtaagttaaactggcacgcatg

SEQ ID NO: 75090 - DNA, 30 bp, Artificial Sequence
  Synthetic oligonucleotide
aggtggactggaacgctggtgcaaatcatg

SEQ ID NO: 75091 - DNA, 31 bp, Artificial Sequence
  Synthetic oligonucleotide
atacaatcaactgcggcgaaagaaactcatg

SEQ ID NO: 75092 - DNA, 30 bp, Artificial Sequence
  Synthetic oligonucleotide
tacgtcggaaatacatatcgacttctcatg

SEQ ID NO: 75093 - DNA, 30 bp, Artificial Sequence
  Synthetic oligonucleotide
gcggaggatcgccgccctcgtatagtcatg

SEQ ID NO: 75094 - DNA, 30 bp, Artificial Sequence
  Synthetic oligonucleotide
gctgaagctgtgaagatgatcggcgtcatg

SEQ ID NO: 75095 - DNA, 30 bp, Artificial Sequence
  Synthetic oligonucleotide
gaacggtatcacgatctggtgcaggtcatg

SEQ ID NO: 75096 - DNA, 30 bp, Artificial Sequence
  Synthetic oligonucleotide
caccggggatcctaggtgactaccaagatg

SEQ ID NO: 75097 - DNA, 30 bp, Artificial Sequence
  Synthetic oligonucleotide
atgcagacaccacttattttagtcaagatg

SEQ ID NO: 75098 - DNA, 30 bp, Artificial Sequence
  Synthetic oligonucleotide
ccggaataggaaccgtaccgtcggaagatg

SEQ ID NO: 75099 - DNA, 30 bp, Artificial Sequence
  Synthetic oligonucleotide
ccatagggaccgagagcgatgcaacagatg

SEQ ID NO: 75100 - DNA, 30 bp, Artificial Sequence
  Synthetic oligonucleotide
ggattgatcaaccagcgacggtaccagatg

SEQ ID NO: 75101 - DNA, 30 bp, Artificial Sequence
  Synthetic oligonucleotide
ccgtactgggaaactgagcaaacccagatg

SEQ ID NO: 75102 - DNA, 30 bp, Artificial Sequence
  Synthetic oligonucleotide
gaggtcagtccgcgtcgttaggctcagatg

SEQ ID NO: 75103 - DNA, 30 bp, Artificial Sequence
  Synthetic oligonucleotide
gcaatgtcatattcgtgtggggaagagatg

SEQ ID NO: 75104 - DNA, 30 bp, Artificial Sequence
  Synthetic oligonucleotide
agaggcgagagacctggggagaccgagatg

SEQ ID NO: 75105 - DNA, 30 bp, Artificial Sequence
  Synthetic oligonucleotide
caggtctaagagtagatttataccgagatg

SEQ ID NO: 75106 - DNA, 30 bp, Artificial Sequence
  Synthetic oligonucleotide
atcattggctcgactgctagaatctagatg

SEQ ID NO: 75107 - DNA, 30 bp, Artificial Sequence
  Synthetic oligonucleotide
cacgcgataatcagctgcgtaatctagatg

SEQ ID NO: 75108 - DNA, 30 bp, Artificial Sequence
  Synthetic oligonucleotide
acgtcatgcaagcaagtccagtcgtagatg

SEQ ID NO: 75109 - DNA, 30 bp, Artificial Sequence
  Synthetic oligonucleotide
cggggtgtataagtgttggatatgtagatg

SEQ ID NO: 75110 - DNA, 30 bp, Artificial Sequence
  Synthetic oligonucleotide
agggcccgctgtccctggatcgtgtagatg

SEQ ID NO: 75111 - DNA, 30 bp, Artificial Sequence
  Synthetic oligonucleotide
acggcacggctttaatgtttggtaacgatg

SEQ ID NO: 75112 - DNA, 30 bp, Artificial Sequence
  Synthetic oligonucleotide
ggtggtcagaactgtgtagccgggacgatg

SEQ ID NO: 75113 - DNA, 30 bp, Artificial Sequence
  Synthetic oligonucleotide
ggcgcaccaaacaaccgcctacgtacgatg

SEQ ID NO: 75114 - DNA, 30 bp, Artificial Sequence
  Synthetic oligonucleotide
ggagcttgatgaaaagtagagaacccgatg

SEQ ID NO: 75115 - DNA, 30 bp, Artificial Sequence
  Synthetic oligonucleotide
agagtgtatgggctgagaatcgtcccgatg

SEQ ID NO: 75116 - DNA, 30 bp, Artificial Sequence
  Synthetic oligonucleotide
gggtagcagactcgagtggtccaagcgatg

SEQ ID NO: 75117 - DNA, 30 bp, Artificial Sequence
  Synthetic oligonucleotide
actcatacaagagtttgcatatcagcgatg

SEQ ID NO: 75118 - DNA, 30 bp, Artificial Sequence
  Synthetic oligonucleotide
tatggttagacggtccgtgtcctagcgatg

SEQ ID NO: 75119 - DNA, 30 bp, Artificial Sequence
  Synthetic oligonucleotide
ccgttagatcacaataaagcctgcgcgatg

SEQ ID NO: 75120 - DNA, 30 bp, Artificial Sequence
  Synthetic oligonucleotide
ggcaactcgcgtaagaatacttacaggatg

SEQ ID NO: 75121 - DNA, 30 bp, Artificial Sequence
  Synthetic oligonucleotide
gttcgactggggcggctaccaattcggatg

SEQ ID NO: 75122 - DNA, 29 bp, Artificial Sequence
  Synthetic oligonucleotide
atgtgcatgtatagacgaacggtgggatg

SEQ ID NO: 75123 - DNA, 30 bp, Artificial Sequence
  Synthetic oligonucleotide
agtcgtaggtataattgagcaccatggatg

SEQ ID NO: 75124 - DNA, 30 bp, Artificial Sequence
  Synthetic oligonucleotide
gttaacgagatgattcaggccggatggatg

SEQ ID NO: 75125 - DNA, 30 bp, Artificial Sequence
  Synthetic oligonucleotide
cttgaactagcctgtcgggcaatctggatg

SEQ ID NO: 75126 - DNA, 30 bp, Artificial Sequence
  Synthetic oligonucleotide
acagggagtgacttatcgtgatatttgatg

SEQ ID NO: 75127 - DNA, 30 bp, Artificial Sequence
  Synthetic oligonucleotide
aggtccctacccatacgaaagagtttgatg

SEQ ID NO: 75128 - DNA, 30 bp, Artificial Sequence
  Synthetic oligonucleotide
tcgaacgatcgcccagtttaattaaatatg

SEQ ID NO: 75129 - DNA, 30 bp, Artificial Sequence
  Synthetic oligonucleotide
agaggttcaggtctacgtggatgcaatatg

SEQ ID NO: 75130 - DNA, 30 bp, Artificial Sequence
  Synthetic oligonucleotide
gcgtaaagggtcttgcgggggccacatatg

SEQ ID NO: 75131 - DNA, 30 bp, Artificial Sequence
  Synthetic oligonucleotide
acacatgggatcatggcttggtcctatatg

SEQ ID NO: 75132 - DNA, 30 bp, Artificial Sequence
  Synthetic oligonucleotide
ggccactcatcatccattataccgtatatg

SEQ ID NO: 75133 - DNA, 30 bp, Artificial Sequence
  Synthetic oligonucleotide
gcgggaagctccaaccgcagacgaactatg

SEQ ID NO: 75134 - DNA, 30 bp, Artificial Sequence
  Synthetic oligonucleotide
cgggcgagcggttaccattagcatactatg

SEQ ID NO: 75135 - DNA, 30 bp, Artificial Sequence
  Synthetic oligonucleotide
actgaggtacgctctgctacaccagctatg

SEQ ID NO: 75136 - DNA, 30 bp, Artificial Sequence
  Synthetic oligonucleotide
gtcacaacactggaagcgatacacgctatg

SEQ ID NO: 75137 - DNA, 30 bp, Artificial Sequence
  Synthetic oligonucleotide
ctcgagcggggattggtgctttaggctatg

SEQ ID NO: 75138 - DNA, 30 bp, Artificial Sequence
  Synthetic oligonucleotide
gatcaccgagctccacaaccgacggctatg

SEQ ID NO: 75139 - DNA, 30 bp, Artificial Sequence
  Synthetic oligonucleotide
agtgaatgcgtcacctcaaacccgtctatg

SEQ ID NO: 75140 - DNA, 30 bp, Artificial Sequence
  Synthetic oligonucleotide
tgagtcaagtgcgggtgcgcaaggcgtatg

SEQ ID NO: 75141 - DNA, 30 bp, Artificial Sequence
  Synthetic oligonucleotide
aagcagtgtcaagcttaactaaatcgtatg

SEQ ID NO: 75142 - DNA, 30 bp, Artificial Sequence
  Synthetic oligonucleotide
aggtggtcagggtggggaaaaatgggtatg

SEQ ID NO: 75143 - DNA, 30 bp, Artificial Sequence
  Synthetic oligonucleotide
caccgaaggcaataggggaggattggtatg

SEQ ID NO: 75144 - DNA, 30 bp, Artificial Sequence
  Synthetic oligonucleotide
cctaatatgtcggctgggtcgctctgtatg

SEQ ID NO: 75145 - DNA, 30 bp, Artificial Sequence
  Synthetic oligonucleotide
gtgctggatgggcgacagactgcagttatg

SEQ ID NO: 75146 - DNA, 30 bp, Artificial Sequence
  Synthetic oligonucleotide
cgaacacgcgcattgtcccctaatgttatg

SEQ ID NO: 75147 - DNA, 30 bp, Artificial Sequence
  Synthetic oligonucleotide
agtaaatccaacctactcagaactgttatg

SEQ ID NO: 75148 - DNA, 30 bp, Artificial Sequence
  Synthetic oligonucleotide
atatcggatgaggactggctaaactttatg

SEQ ID NO: 75149 - DNA, 26 bp, Artificial Sequence
  Synthetic oligonucleotide
atgcgcgagtgagtgcaacctttatg

SEQ ID NO: 75150 - DNA, 30 bp, Artificial Sequence
  Synthetic oligonucleotide
aaaagaatacatgacattatgattgaactg

SEQ ID NO: 75151 - DNA, 30 bp, Artificial Sequence
  Synthetic oligonucleotide
tggtgtagagataacaggaacgcctaactg

SEQ ID NO: 75152 - DNA, 31 bp, Artificial Sequence
  Synthetic oligonucleotide
gcactacatgaaggtggggtgatcttaactg

SEQ ID NO: 75153 - DNA, 30 bp, Artificial Sequence
  Synthetic oligonucleotide
agagatcaggcgtgtgaacgctggacactg

SEQ ID NO: 75154 - DNA, 30 bp, Artificial Sequence
  Synthetic oligonucleotide
caggcagaacagtaaggtttgggggcactg

SEQ ID NO: 75155 - DNA, 30 bp, Artificial Sequence
  Synthetic oligonucleotide
tggaattgaatcgtgatcgaataatcactg

SEQ ID NO: 75156 - DNA, 30 bp, Artificial Sequence
  Synthetic oligonucleotide
acttgaataggcacaactggcgggtcactg

SEQ ID NO: 75157 - DNA, 30 bp, Artificial Sequence
  Synthetic oligonucleotide
gcgattcgaaaatcagcgagacattcactg

SEQ ID NO: 75158 - DNA, 30 bp, Artificial Sequence
  Synthetic oligonucleotide
tgtgacgaattgtgaatgtattccagactg

SEQ ID NO: 75159 - DNA, 30 bp, Artificial Sequence
  Synthetic oligonucleotide
aaccgggcggcacgcaatgagaatagactg

SEQ ID NO: 75160 - DNA, 30 bp, Artificial Sequence
  Synthetic oligonucleotide
caatctgcaggataactaggaacccgactg

SEQ ID NO: 75161 - DNA, 30 bp, Artificial Sequence
  Synthetic oligonucleotide
actgactaagggcttgatgtgaagcgactg

SEQ ID NO: 75162 - DNA, 30 bp, Artificial Sequence
  Synthetic oligonucleotide
gagccacaatgagcagtcgacccctgactg

SEQ ID NO: 75163 - DNA, 30 bp, Artificial Sequence
  Synthetic oligonucleotide
tgagtacttgtagttcccgagcaaatactg

SEQ ID NO: 75164 - DNA, 30 bp, Artificial Sequence
  Synthetic oligonucleotide
gggtgattaaagattgtgccagagatactg

SEQ ID NO: 75165 - DNA, 30 bp, Artificial Sequence
  Synthetic oligonucleotide
gaagatgtacagaaggttccatctatactg

SEQ ID NO: 75166 - DNA, 30 bp, Artificial Sequence
  Synthetic oligonucleotide
gctcaacataacgaactgtgaattttactg

SEQ ID NO: 75167 - DNA, 30 bp, Artificial Sequence
  Synthetic oligonucleotide
cgacgctcattcccacaatcatagtacctg

SEQ ID NO: 75168 - DNA, 30 bp, Artificial Sequence
  Synthetic oligonucleotide
attgaatggagcggggaaacaagtaccctg

SEQ ID NO: 75169 - DNA, 30 bp, Artificial Sequence
  Synthetic oligonucleotide
tctgtacggtacagggacggcaaacccctg

SEQ ID NO: 75170 - DNA, 30 bp, Artificial Sequence
  Synthetic oligonucleotide
tacgttcagattgggacagatctgcccctg

SEQ ID NO: 75171 - DNA, 30 bp, Artificial Sequence
  Synthetic oligonucleotide
ggaaacgctaggtcgagcactgtagccctg

SEQ ID NO: 75172 - DNA, 30 bp, Artificial Sequence
  Synthetic oligonucleotide
tgatccaaggacgtgcatgcccgtgccctg

SEQ ID NO: 75173 - DNA, 30 bp, Artificial Sequence
  Synthetic oligonucleotide
ccgtggctagaaccgccttaatactccctg

SEQ ID NO: 75174 - DNA, 30 bp, Artificial Sequence
  Synthetic oligonucleotide
aaataaagtcactaaccttccacaagcctg

SEQ ID NO: 75175 - DNA, 30 bp, Artificial Sequence
  Synthetic oligonucleotide
acttcgagcatctacttcaagctcagcctg

SEQ ID NO: 75176 - DNA, 30 bp, Artificial Sequence
  Synthetic oligonucleotide
gcgagcgagggagtgggaaactgacgcctg

SEQ ID NO: 75177 - DNA, 30 bp, Artificial Sequence
  Synthetic oligonucleotide
ataagtgagtgatccgaagtcgagcgcctg

SEQ ID NO: 75178 - DNA, 30 bp, Artificial Sequence
  Synthetic oligonucleotide
gtgcctaaggacatcgccgatcaatgcctg

SEQ ID NO: 75179 - DNA, 30 bp, Artificial Sequence
  Synthetic oligonucleotide
ccaagaatctgacatgtttgtgagtgcctg

SEQ ID NO: 75180 - DNA, 30 bp, Artificial Sequence
  Synthetic oligonucleotide
tccgccccaacgtccggcgacaaactcctg

SEQ ID NO: 75181 - DNA, 30 bp, Artificial Sequence
  Synthetic oligonucleotide
acttaagcatggggggagggcgtactcctg

SEQ ID NO: 75182 - DNA, 30 bp, Artificial Sequence
  Synthetic oligonucleotide
gttgtgcggtacggcataccctgtctcctg

SEQ ID NO: 75183 - DNA, 30 bp, Artificial Sequence
  Synthetic oligonucleotide
gagggggtgtggacagatacgatcttcctg

SEQ ID NO: 75184 - DNA, 30 bp, Artificial Sequence
  Synthetic oligonucleotide
agcaattcggtcacgaccgcccctttcctg

SEQ ID NO: 75185 - DNA, 30 bp, Artificial Sequence
  Synthetic oligonucleotide
aggagaacctcccaacgtggattgcagctg

SEQ ID NO: 75186 - DNA, 30 bp, Artificial Sequence
  Synthetic oligonucleotide
agtggttaacaggacctggtgagcgagctg

SEQ ID NO: 75187 - DNA, 30 bp, Artificial Sequence
  Synthetic oligonucleotide
gcgaggaaaagcggaagtgaactgacgctg

SEQ ID NO: 75188 - DNA, 30 bp, Artificial Sequence
  Synthetic oligonucleotide
ctgggatacgaataggtaatctatacgctg

SEQ ID NO: 75189 - DNA, 30 bp, Artificial Sequence
  Synthetic oligonucleotide
tcggaagtaacatagatggggggcccgctg

SEQ ID NO: 75190 - DNA, 30 bp, Artificial Sequence
  Synthetic oligonucleotide
attggatatccagaaaagtgattcccgctg

SEQ ID NO: 75191 - DNA, 30 bp, Artificial Sequence
  Synthetic oligonucleotide
gcgtgtaaagcgtaggtgctaaatccgctg

SEQ ID NO: 75192 - DNA, 30 bp, Artificial Sequence
  Synthetic oligonucleotide
atacgtaatcaaatgtctagtcgtccgctg

SEQ ID NO: 75193 - DNA, 30 bp, Artificial Sequence
  Synthetic oligonucleotide
gggagccttaacacatgtcacagctcgctg

SEQ ID NO: 75194 - DNA, 30 bp, Artificial Sequence
  Synthetic oligonucleotide
gtgagggggtgaccaatgcgctcgaggctg

SEQ ID NO: 75195 - DNA, 30 bp, Artificial Sequence
  Synthetic oligonucleotide
atcaggacaagagtgaatcactggaggctg

SEQ ID NO: 75196 - DNA, 30 bp, Artificial Sequence
  Synthetic oligonucleotide
gcgggcgttaagccaagaagccgtaggctg

SEQ ID NO: 75197 - DNA, 30 bp, Artificial Sequence
  Synthetic oligonucleotide
atggggtgcaatccaagagtgtcacggctg

SEQ ID NO: 75198 - DNA, 30 bp, Artificial Sequence
  Synthetic oligonucleotide
atgctcgactaacgaggctggtaagggctg

SEQ ID NO: 75199 - DNA, 30 bp, Artificial Sequence
  Synthetic oligonucleotide
ctaacgagtaaaggcactcatagagggctg

SEQ ID NO: 75200 - DNA, 30 bp, Artificial Sequence
  Synthetic oligonucleotide
agggaggaataacccccgaacttagggctg

SEQ ID NO: 75201 - DNA, 30 bp, Artificial Sequence
  Synthetic oligonucleotide
tagtcgcaaccgtggcgacaaatggggctg

SEQ ID NO: 75202 - DNA, 30 bp, Artificial Sequence
  Synthetic oligonucleotide
atagctcatctatcgacccacgacatgctg

SEQ ID NO: 75203 - DNA, 30 bp, Artificial Sequence
  Synthetic oligonucleotide
ataagagtcatagaaaacctaagggtgctg

SEQ ID NO: 75204 - DNA, 30 bp, Artificial Sequence
  Synthetic oligonucleotide
acgggcttaaccaatcaacgcgggttgctg

SEQ ID NO: 75205 - DNA, 30 bp, Artificial Sequence
  Synthetic oligonucleotide
gatcagagcagtgcaattgcgaataatctg

SEQ ID NO: 75206 - DNA, 30 bp, Artificial Sequence
  Synthetic oligonucleotide
ccacgctgttgagtgtacagaccccatctg

SEQ ID NO: 75207 - DNA, 30 bp, Artificial Sequence
  Synthetic oligonucleotide
cggtaggacaagtgcaagtcggtgcatctg

SEQ ID NO: 75208 - DNA, 30 bp, Artificial Sequence
  Synthetic oligonucleotide
tgcctggctagtgatatctcgatgtatctg

SEQ ID NO: 75209 - DNA, 30 bp, Artificial Sequence
  Synthetic oligonucleotide
tggcgagacacgttgacatatttgcctctg

SEQ ID NO: 75210 - DNA, 30 bp, Artificial Sequence
  Synthetic oligonucleotide
gtctaaataaccaccaccgataatagtctg

SEQ ID NO: 75211 - DNA, 30 bp, Artificial Sequence
  Synthetic oligonucleotide
cattagtggactaagcaccgtcaaggtctg

SEQ ID NO: 75212 - DNA, 30 bp, Artificial Sequence
  Synthetic oligonucleotide
atgataacgtgtatgatggcatgaggtctg

SEQ ID NO: 75213 - DNA, 30 bp, Artificial Sequence
  Synthetic oligonucleotide
cacctctaagcatggaagtccggatgtctg

SEQ ID NO: 75214 - DNA, 30 bp, Artificial Sequence
  Synthetic oligonucleotide
agtcaaccggcaacactttgggcaattctg

SEQ ID NO: 75215 - DNA, 30 bp, Artificial Sequence
  Synthetic oligonucleotide
agggtatataaacgaaaaatggggattctg

SEQ ID NO: 75216 - DNA, 30 bp, Artificial Sequence
  Synthetic oligonucleotide
acgggtgttgggtactgcatagttgttctg

SEQ ID NO: 75217 - DNA, 30 bp, Artificial Sequence
  Synthetic oligonucleotide
gtaagccacgtgtggtacaggagatttctg

SEQ ID NO: 75218 - DNA, 30 bp, Artificial Sequence
  Synthetic oligonucleotide
cgaactagtcctcatttaagtcgcaaagtg

SEQ ID NO: 75219 - DNA, 30 bp, Artificial Sequence
  Synthetic oligonucleotide
cgccttgctcagagcccgaactcgaaagtg

SEQ ID NO: 75220 - DNA, 30 bp, Artificial Sequence
  Synthetic oligonucleotide
cgtttccacaggtgtctgaggcataaagtg

SEQ ID NO: 75221 - DNA, 30 bp, Artificial Sequence
  Synthetic oligonucleotide
ccgcggtgagtttggtttgtctccgaagtg

SEQ ID NO: 75222 - DNA, 30 bp, Artificial Sequence
  Synthetic oligonucleotide
agacccaaggctatcgcgggaggcgaagtg

SEQ ID NO: 75223 - DNA, 30 bp, Artificial Sequence
  Synthetic oligonucleotide
accctcgacggagcccggggaagtgaagtg

SEQ ID NO: 75224 - DNA, 30 bp, Artificial Sequence
  Synthetic oligonucleotide
gttccctaaactgtctaatggatataagtg

SEQ ID NO: 75225 - DNA, 30 bp, Artificial Sequence
  Synthetic oligonucleotide
taaggaggacgagcaggaacggtctaagtg

SEQ ID NO: 75226 - DNA, 30 bp, Artificial Sequence
  Synthetic oligonucleotide
ggtgggtccgcacagcaggaaggttaagtg

SEQ ID NO: 75227 - DNA, 30 bp, Artificial Sequence
  Synthetic oligonucleotide
gaatacaataccaaacaaacctgaacagtg

SEQ ID NO: 75228 - DNA, 30 bp, Artificial Sequence
  Synthetic oligonucleotide
catcagctgggactcgtttccgtcacagtg

SEQ ID NO: 75229 - DNA, 30 bp, Artificial Sequence
  Synthetic oligonucleotide
gggatccagagggtggcaccaatggcagtg

SEQ ID NO: 75230 - DNA, 30 bp, Artificial Sequence
  Synthetic oligonucleotide
cctgggggcgacaccactgagtgctcagtg

SEQ ID NO: 75231 - DNA, 30 bp, Artificial Sequence
  Synthetic oligonucleotide
tcgcagcctgaacaggggctttagagagtg

SEQ ID NO: 75232 - DNA, 30 bp, Artificial Sequence
  Synthetic oligonucleotide
tgtcagaaaagtactaaaccgaaccgagtg

SEQ ID NO: 75233 - DNA, 30 bp, Artificial Sequence
  Synthetic oligonucleotide
aggtgagtaaggtactgagctacaggagtg

SEQ ID NO: 75234 - DNA, 30 bp, Artificial Sequence
  Synthetic oligonucleotide
ccgggcacacacttcccaccaaaatgagtg

SEQ ID NO: 75235 - DNA, 30 bp, Artificial Sequence
  Synthetic oligonucleotide
acggatgtggatggctgttgcaactgagtg

SEQ ID NO: 75236 - DNA, 30 bp, Artificial Sequence
  Synthetic oligonucleotide
caagacgactagtagtagcagccctgagtg

SEQ ID NO: 75237 - DNA, 30 bp, Artificial Sequence
  Synthetic oligonucleotide
cgcgcctagcgtactgaactcgtctgagtg

SEQ ID NO: 75238 - DNA, 30 bp, Artificial Sequence
  Synthetic oligonucleotide
tattaagtgaagggtgaaaccctgtgagtg

SEQ ID NO: 75239 - DNA, 30 bp, Artificial Sequence
  Synthetic oligonucleotide
caccggggctaagggatagcataggtagtg

SEQ ID NO: 75240 - DNA, 30 bp, Artificial Sequence
  Synthetic oligonucleotide
caactcgtctgcgtaacaatacgaaacgtg

SEQ ID NO: 75241 - DNA, 30 bp, Artificial Sequence
  Synthetic oligonucleotide
tgtggagaaaacaatcttggtttaaacgtg

SEQ ID NO: 75242 - DNA, 30 bp, Artificial Sequence
  Synthetic oligonucleotide
tcgattgacataatgactctatccaacgtg

SEQ ID NO: 75243 - DNA, 30 bp, Artificial Sequence
  Synthetic oligonucleotide
ggccaggttgagcaatgtgaacagaacgtg

SEQ ID NO: 75244 - DNA, 30 bp, Artificial Sequence
  Synthetic oligonucleotide
ggggtaagagccagggtattatgccacgtg

SEQ ID NO: 75245 - DNA, 30 bp, Artificial Sequence
  Synthetic oligonucleotide
tgtaacgcctcaggaagagacccgcacgtg

SEQ ID NO: 75246 - DNA, 31 bp, Artificial Sequence
  Synthetic oligonucleotide
cgtcaaatacagtaagtcccagcaatacgtg

SEQ ID NO: 75247 - DNA, 30 bp, Artificial Sequence
  Synthetic oligonucleotide
tgccgcgaggaaaagctacttgattacgtg

SEQ ID NO: 75248 - DNA, 30 bp, Artificial Sequence
  Synthetic oligonucleotide
agtacattatggcgtaaacatccggccgtg

SEQ ID NO: 75249 - DNA, 30 bp, Artificial Sequence
  Synthetic oligonucleotide
gcggagatagtaaagggcatcgtttccgtg

SEQ ID NO: 75250 - DNA, 30 bp, Artificial Sequence
  Synthetic oligonucleotide
gcttgggcgcggtagaaaggctatagcgtg

SEQ ID NO: 75251 - DNA, 30 bp, Artificial Sequence
  Synthetic oligonucleotide
cggcccctaacgacctttgctaacggcgtg

SEQ ID NO: 75252 - DNA, 30 bp, Artificial Sequence
  Synthetic oligonucleotide
caacggagctcatcttaaggtattatcgtg

SEQ ID NO: 75253 - DNA, 30 bp, Artificial Sequence
  Synthetic oligonucleotide
aacacgccaccatcaggagatgaggtcgtg

SEQ ID NO: 75254 - DNA, 30 bp, Artificial Sequence
  Synthetic oligonucleotide
ctctgcacattctttatagcatcggtcgtg

SEQ ID NO: 75255 - DNA, 30 bp, Artificial Sequence
  Synthetic oligonucleotide
tttgtatgccgtcgaccgccgagattcgtg

SEQ ID NO: 75256 - DNA, 30 bp, Artificial Sequence
  Synthetic oligonucleotide
gggtacgtctcgaatggtgggtacttcgtg

SEQ ID NO: 75257 - DNA, 30 bp, Artificial Sequence
  Synthetic oligonucleotide
tggatgtgaataatcatcggcttgttcgtg

SEQ ID NO: 75258 - DNA, 30 bp, Artificial Sequence
  Synthetic oligonucleotide
tgtacatggcagggctagtagactttcgtg

SEQ ID NO: 75259 - DNA, 30 bp, Artificial Sequence
  Synthetic oligonucleotide
aaaggacttgactgcaggctgagcaaggtg

SEQ ID NO: 75260 - DNA, 31 bp, Artificial Sequence
  Synthetic oligonucleotide
agtggatggcacagctatcggctgccaggtg

SEQ ID NO: 75261 - DNA, 30 bp, Artificial Sequence
  Synthetic oligonucleotide
gaagccccgggagaagagtttatccaggtg

SEQ ID NO: 75262 - DNA, 30 bp, Artificial Sequence
  Synthetic oligonucleotide
aagcaaggccgggaaactccacatcaggtg

SEQ ID NO: 75263 - DNA, 30 bp, Artificial Sequence
  Synthetic oligonucleotide
cgaggagccacaccgacgatcggagaggtg

SEQ ID NO: 75264 - DNA, 30 bp, Artificial Sequence
  Synthetic oligonucleotide
agtatcgccacgtactaggagagtgaggtg

SEQ ID NO: 75265 - DNA, 30 bp, Artificial Sequence
  Synthetic oligonucleotide
gacggaaacaatccagcgggtgagacggtg

SEQ ID NO: 75266 - DNA, 30 bp, Artificial Sequence
  Synthetic oligonucleotide
cggcctgggctgtagaaagtaatgacggtg

SEQ ID NO: 75267 - DNA, 30 bp, Artificial Sequence
  Synthetic oligonucleotide
cgatctccgtacgttcgaaaaaaaccggtg

SEQ ID NO: 75268 - DNA, 30 bp, Artificial Sequence
  Synthetic oligonucleotide
agagcgcggccgtggcatagaagggcggtg

SEQ ID NO: 75269 - DNA, 30 bp, Artificial Sequence
  Synthetic oligonucleotide
tcggatcgactgatcgttatctaatcggtg

SEQ ID NO: 75270 - DNA, 30 bp, Artificial Sequence
  Synthetic oligonucleotide
gtctaggatgcaccgctaagagagtcggtg

SEQ ID NO: 75271 - DNA, 30 bp, Artificial Sequence
  Synthetic oligonucleotide
acaaagccggtagcctgccttctgtcggtg

SEQ ID NO: 75272 - DNA, 30 bp, Artificial Sequence
  Synthetic oligonucleotide
cggttcctattgcagtgaaaggagagggtg

SEQ ID NO: 75273 - DNA, 30 bp, Artificial Sequence
  Synthetic oligonucleotide
agtggatcctaagaaggactataccgggtg

SEQ ID NO: 75274 - DNA, 30 bp, Artificial Sequence
  Synthetic oligonucleotide
gacgcgatgttgattgagttggggcgggtg

SEQ ID NO: 75275 - DNA, 30 bp, Artificial Sequence
  Synthetic oligonucleotide
cctaaggatcatgcaggtgataccggggtg

SEQ ID NO: 75276 - DNA, 30 bp, Artificial Sequence
  Synthetic oligonucleotide
ctacatcaaagcctgttgcaacaatgggtg

SEQ ID NO: 75277 - DNA, 30 bp, Artificial Sequence
  Synthetic oligonucleotide
cccaggcgcgggtgataagatagctgggtg

SEQ ID NO: 75278 - DNA, 30 bp, Artificial Sequence
  Synthetic oligonucleotide
atactcaataggtggagaacgcggtgggtg

SEQ ID NO: 75279 - DNA, 30 bp, Artificial Sequence
  Synthetic oligonucleotide
tgaagagtatttaagtgaaacaattgggtg

SEQ ID NO: 75280 - DNA, 30 bp, Artificial Sequence
  Synthetic oligonucleotide
ataacacgcatgaaaagaggtacttgggtg

SEQ ID NO: 75281 - DNA, 30 bp, Artificial Sequence
  Synthetic oligonucleotide
cggtgagcggttctccagtaaccaatggtg

SEQ ID NO: 75282 - DNA, 30 bp, Artificial Sequence
  Synthetic oligonucleotide
tcgatggaatgttatcaagggcacatggtg

SEQ ID NO: 75283 - DNA, 30 bp, Artificial Sequence
  Synthetic oligonucleotide
aagctgctaaccggaatagagcatatggtg

SEQ ID NO: 75284 - DNA, 30 bp, Artificial Sequence
  Synthetic oligonucleotide
ttaacataacacaaagcacactgcctggtg

SEQ ID NO: 75285 - DNA, 30 bp, Artificial Sequence
  Synthetic oligonucleotide
agagtcaggtaaccagaaattaaagtggtg

SEQ ID NO: 75286 - DNA, 30 bp, Artificial Sequence
  Synthetic oligonucleotide
cgagtacgccgagaacaaagaggggtggtg

SEQ ID NO: 75287 - DNA, 30 bp, Artificial Sequence
  Synthetic oligonucleotide
tcgaggtgaatctgttgcactacattggtg

SEQ ID NO: 75288 - DNA, 30 bp, Artificial Sequence
  Synthetic oligonucleotide
caagtggctactcggtaggaattattggtg

SEQ ID NO: 75289 - DNA, 30 bp, Artificial Sequence
  Synthetic oligonucleotide
agagagaattatcgtacatggttattggtg

SEQ ID NO: 75290 - DNA, 30 bp, Artificial Sequence
  Synthetic oligonucleotide
tgcgaagtccgtgtatcgtaagctttggtg

SEQ ID NO: 75291 - DNA, 30 bp, Artificial Sequence
  Synthetic oligonucleotide
catcgaggctaggcctacagacgaaatgtg

SEQ ID NO: 75292 - DNA, 30 bp, Artificial Sequence
  Synthetic oligonucleotide
catcggccatcagtcggggtcaagaatgtg

SEQ ID NO: 75293 - DNA, 30 bp, Artificial Sequence
  Synthetic oligonucleotide
ctccgcgaacggaaaatctgtccgcatgtg

SEQ ID NO: 75294 - DNA, 30 bp, Artificial Sequence
  Synthetic oligonucleotide
cgggacagaggggattaggcgcatcatgtg

SEQ ID NO: 75295 - DNA, 30 bp, Artificial Sequence
  Synthetic oligonucleotide
cccgcggagtctataaacaactgcgatgtg

SEQ ID NO: 75296 - DNA, 30 bp, Artificial Sequence
  Synthetic oligonucleotide
agcccccagtgaaagacttaatgggatgtg

SEQ ID NO: 75297 - DNA, 30 bp, Artificial Sequence
  Synthetic oligonucleotide
cattggattcattacataaagtgatatgtg

SEQ ID NO: 75298 - DNA, 30 bp, Artificial Sequence
  Synthetic oligonucleotide
gcacggcttaacagaatctacaactatgtg

SEQ ID NO: 75299 - DNA, 30 bp, Artificial Sequence
  Synthetic oligonucleotide
cctcaaaaagctctctttctaaagtatgtg

SEQ ID NO: 75300 - DNA, 30 bp, Artificial Sequence
  Synthetic oligonucleotide
ggaagtgaaggtgggaaagctgtttatgtg

SEQ ID NO: 75301 - DNA, 30 bp, Artificial Sequence
  Synthetic oligonucleotide
ccgagacggatctccggaatgcgatctgtg

SEQ ID NO: 75302 - DNA, 30 bp, Artificial Sequence
  Synthetic oligonucleotide
ttgaaaacagataagctgccaaccagtgtg

SEQ ID NO: 75303 - DNA, 30 bp, Artificial Sequence
  Synthetic oligonucleotide
gaaatcctagaagccacgagaatgcgtgtg

SEQ ID NO: 75304 - DNA, 30 bp, Artificial Sequence
  Synthetic oligonucleotide
cacggttggagattagctttgctaggtgtg

SEQ ID NO: 75305 - DNA, 30 bp, Artificial Sequence
  Synthetic oligonucleotide
caggcacaaggcatttgttgcatcggtgtg

SEQ ID NO: 75306 - DNA, 31 bp, Artificial Sequence
  Synthetic oligonucleotide
ataactaaacagagtttttaagtagggtgtg

SEQ ID NO: 75307 - DNA, 30 bp, Artificial Sequence
  Synthetic oligonucleotide
cggacgctcataggaataatccgaattgtg

SEQ ID NO: 75308 - DNA, 30 bp, Artificial Sequence
  Synthetic oligonucleotide
tcgtcaatatcaggcgcaacggagattgtg

SEQ ID NO: 75309 - DNA, 30 bp, Artificial Sequence
  Synthetic oligonucleotide
agacttagggcacatcggactatgcttgtg

SEQ ID NO: 75310 - DNA, 30 bp, Artificial Sequence
  Synthetic oligonucleotide
aaacggaaaagaactcagttgaaagaattg

SEQ ID NO: 75311 - DNA, 30 bp, Artificial Sequence
  Synthetic oligonucleotide
aagatcaggaacgactgcgacttggaattg

SEQ ID NO: 75312 - DNA, 30 bp, Artificial Sequence
  Synthetic oligonucleotide
agcgtacctaatacagctccgtaataattg

SEQ ID NO: 75313 - DNA, 30 bp, Artificial Sequence
  Synthetic oligonucleotide
gtcgctaagaaatctggtcccacataattg

SEQ ID NO: 75314 - DNA, 30 bp, Artificial Sequence
  Synthetic oligonucleotide
acgctgatggttttcggtcattgataattg

SEQ ID NO: 75315 - DNA, 30 bp, Artificial Sequence
  Synthetic oligonucleotide
aaggagatataggcacgagttcgaacattg

SEQ ID NO: 75316 - DNA, 30 bp, Artificial Sequence
  Synthetic oligonucleotide
acccatgtcaggaaacttggagtaacattg

SEQ ID NO: 75317 - DNA, 30 bp, Artificial Sequence
  Synthetic oligonucleotide
ataccgagggatcttacgactctcacattg

SEQ ID NO: 75318 - DNA, 30 bp, Artificial Sequence
  Synthetic oligonucleotide
tctgcaatacgtctatagaaaatgacattg

SEQ ID NO: 75319 - DNA, 30 bp, Artificial Sequence
  Synthetic oligonucleotide
gatgggaattgaaccattgtatgtacattg

SEQ ID NO: 75320 - DNA, 30 bp, Artificial Sequence
  Synthetic oligonucleotide
tctaaccaagtatacgttgcccggccattg

SEQ ID NO: 75321 - DNA, 30 bp, Artificial Sequence
  Synthetic oligonucleotide
tagagaatagattctgaagtgtaagcattg

SEQ ID NO: 75322 - DNA, 30 bp, Artificial Sequence
  Synthetic oligonucleotide
cggggcgtagttctatcatcactctcattg

SEQ ID NO: 75323 - DNA, 30 bp, Artificial Sequence
  Synthetic oligonucleotide
aggcacaggtgcagtaacagccttggattg

SEQ ID NO: 75324 - DNA, 30 bp, Artificial Sequence
  Synthetic oligonucleotide
acgtaccatgggtttaagggagttggattg

SEQ ID NO: 75325 - DNA, 30 bp, Artificial Sequence
  Synthetic oligonucleotide
cgcctcggtcgaaaatagcgtcgctgattg

SEQ ID NO: 75326 - DNA, 30 bp, Artificial Sequence
  Synthetic oligonucleotide
cgtggacgattacttgggactcgcatattg

SEQ ID NO: 75327 - DNA, 30 bp, Artificial Sequence
  Synthetic oligonucleotide
ccttaacacggcgtgggataatctatattg

SEQ ID NO: 75328 - DNA, 30 bp, Artificial Sequence
  Synthetic oligonucleotide
gcaccgggcaaaggcacgtaatgagtattg

SEQ ID NO: 75329 - DNA, 30 bp, Artificial Sequence
  Synthetic oligonucleotide
ggatcgtgcaggcaagaactttaggtattg

SEQ ID NO: 75330 - DNA, 30 bp, Artificial Sequence
  Synthetic oligonucleotide
tcccaaggatgggccgccgaaccattattg

SEQ ID NO: 75331 - DNA, 30 bp, Artificial Sequence
  Synthetic oligonucleotide
cgtctgactgcaaaagtataagtcttattg

SEQ ID NO: 75332 - DNA, 30 bp, Artificial Sequence
  Synthetic oligonucleotide
aatcacaccagaacgtgaggcccgttattg

SEQ ID NO: 75333 - DNA, 30 bp, Artificial Sequence
  Synthetic oligonucleotide
tggatcgccgagcttaaatatgtcaacttg

SEQ ID NO: 75334 - DNA, 29 bp, Artificial Sequence
  Synthetic oligonucleotide
tggaagaagcagtaaccagggatcacttg

SEQ ID NO: 75335 - DNA, 30 bp, Artificial Sequence
  Synthetic oligonucleotide
cggagcgtaaccccaggttaaagtgacttg

SEQ ID NO: 75336 - DNA, 30 bp, Artificial Sequence
  Synthetic oligonucleotide
ggcaaagcgagatttcatgtctgtgacttg

SEQ ID NO: 75337 - DNA, 30 bp, Artificial Sequence
  Synthetic oligonucleotide
cacgggagcaaacacaaagctaggtacttg

SEQ ID NO: 75338 - DNA, 30 bp, Artificial Sequence
  Synthetic oligonucleotide
ggtaacggtgtctacgcccattggtacttg

SEQ ID NO: 75339 - DNA, 30 bp, Artificial Sequence
  Synthetic oligonucleotide
tataggcaggaggttacggaactgtacttg

SEQ ID NO: 75340 - DNA, 30 bp, Artificial Sequence
  Synthetic oligonucleotide
cgaaccacacagggacatagcgccgccttg

SEQ ID NO: 75341 - DNA, 30 bp, Artificial Sequence
  Synthetic oligonucleotide
acatcggtacagtaagagcaagcctccttg

SEQ ID NO: 75342 - DNA, 30 bp, Artificial Sequence
  Synthetic oligonucleotide
gatcagtgggtgtcagaaccgtatcgcttg

SEQ ID NO: 75343 - DNA, 30 bp, Artificial Sequence
  Synthetic oligonucleotide
ttaaaagaagaaatcaattaaacatgcttg

SEQ ID NO: 75344 - DNA, 30 bp, Artificial Sequence
  Synthetic oligonucleotide
gtcagcgacactcacagtacgagttgcttg

SEQ ID NO: 75345 - DNA, 30 bp, Artificial Sequence
  Synthetic oligonucleotide
ggcaggtagaacttgtgcgtcaggctcttg

SEQ ID NO: 75346 - DNA, 30 bp, Artificial Sequence
  Synthetic oligonucleotide
cgggatcgtaacctagtgacggtagtcttg

SEQ ID NO: 75347 - DNA, 30 bp, Artificial Sequence
  Synthetic oligonucleotide
gctatgccagtgtgacggattggatagttg

SEQ ID NO: 75348 - DNA, 30 bp, Artificial Sequence
  Synthetic oligonucleotide
tagtgaaagcacaggacggcatagacgttg

SEQ ID NO: 75349 - DNA, 30 bp, Artificial Sequence
  Synthetic oligonucleotide
gttaccggtacatccaaaatatatccgttg

SEQ ID NO: 75350 - DNA, 30 bp, Artificial Sequence
  Synthetic oligonucleotide
tagcgatctgttggagggcgatggaggttg

SEQ ID NO: 75351 - DNA, 30 bp, Artificial Sequence
  Synthetic oligonucleotide
ggagtgggtggagtaagtgagaaggggttg

SEQ ID NO: 75352 - DNA, 30 bp, Artificial Sequence
  Synthetic oligonucleotide
agctcacaaagcgagcggtttagggggttg

SEQ ID NO: 75353 - DNA, 30 bp, Artificial Sequence
  Synthetic oligonucleotide
agcatatcccttgtcaaccatgcctggttg

SEQ ID NO: 75354 - DNA, 30 bp, Artificial Sequence
  Synthetic oligonucleotide
tgctaagccttatgtagctaggaggtgttg

SEQ ID NO: 75355 - DNA, 30 bp, Artificial Sequence
  Synthetic oligonucleotide
taaaaacgctacctctccaacactaatttg

SEQ ID NO: 75356 - DNA, 30 bp, Artificial Sequence
  Synthetic oligonucleotide
cattgaaattaagtacaagggattaatttg

SEQ ID NO: 75357 - DNA, 30 bp, Artificial Sequence
  Synthetic oligonucleotide
agagaggcctcatctactaccccacatttg

SEQ ID NO: 75358 - DNA, 30 bp, Artificial Sequence
  Synthetic oligonucleotide
actctaggaacaccttcagcacgacatttg

SEQ ID NO: 75359 - DNA, 30 bp, Artificial Sequence
  Synthetic oligonucleotide
cgcaagtcgtgtgaagtataagaagatttg

SEQ ID NO: 75360 - DNA, 30 bp, Artificial Sequence
  Synthetic oligonucleotide
caacttcaacctataaccacatgtgatttg

SEQ ID NO: 75361 - DNA, 30 bp, Artificial Sequence
  Synthetic oligonucleotide
gcgtcgtcactcatcattagtttaactttg

SEQ ID NO: 75362 - DNA, 30 bp, Artificial Sequence
  Synthetic oligonucleotide
tcgccgagatgtcaccatgggaatcctttg

SEQ ID NO: 75363 - DNA, 30 bp, Artificial Sequence
  Synthetic oligonucleotide
agcgatctatttccccggcgaaaatctttg

SEQ ID NO: 75364 - DNA, 30 bp, Artificial Sequence
  Synthetic oligonucleotide
ggggcccatggctgaacttactgaagtttg

SEQ ID NO: 75365 - DNA, 30 bp, Artificial Sequence
  Synthetic oligonucleotide
gttagcgcaccactggaaggcataggtttg

SEQ ID NO: 75366 - DNA, 30 bp, Artificial Sequence
  Synthetic oligonucleotide
aggccatggttaccttttggacgatgtttg

SEQ ID NO: 75367 - DNA, 30 bp, Artificial Sequence
  Synthetic oligonucleotide
gcagcgtcgagagggaagtatgactgtttg

SEQ ID NO: 75368 - DNA, 30 bp, Artificial Sequence
  Synthetic oligonucleotide
taggatgagaattgggcaagcagttgtttg

SEQ ID NO: 75369 - DNA, 30 bp, Artificial Sequence
  Synthetic oligonucleotide
tcgcgaaccctgctaacgtaattaattttg

SEQ ID NO: 75370 - DNA, 30 bp, Artificial Sequence
  Synthetic oligonucleotide
taggtcaacgttagattgctactacttttg

SEQ ID NO: 75371 - DNA, 30 bp, Artificial Sequence
  Synthetic oligonucleotide
agggatggttaaaaattagtttcggttttg

SEQ ID NO: 75372 - DNA, 30 bp, Artificial Sequence
  Synthetic oligonucleotide
ccgtgtattgccatggatacagagtttttg

SEQ ID NO: 75373 - DNA, 30 bp, Artificial Sequence
  Synthetic oligonucleotide
acggcttagaagatctggaagtgccaaaat

SEQ ID NO: 75374 - DNA, 30 bp, Artificial Sequence
  Synthetic oligonucleotide
gtgaagaggttttgagtgtgaaggcaaaat

SEQ ID NO: 75375 - DNA, 30 bp, Artificial Sequence
  Synthetic oligonucleotide
acaatcgtggtcgcctgtccccccgaaaat

SEQ ID NO: 75376 - DNA, 30 bp, Artificial Sequence
  Synthetic oligonucleotide
accaccttaggattaggattatcggaaaat

SEQ ID NO: 75377 - DNA, 30 bp, Artificial Sequence
  Synthetic oligonucleotide
agcgttggatctcaatgcacattgacaaat

SEQ ID NO: 75378 - DNA, 30 bp, Artificial Sequence
  Synthetic oligonucleotide
tcatcaaatgcgatggttatcacagcaaat

SEQ ID NO: 75379 - DNA, 31 bp, Artificial Sequence
  Synthetic oligonucleotide
ggggatatctgaagggccaacgagagcaaat

SEQ ID NO: 75380 - DNA, 30 bp, Artificial Sequence
  Synthetic oligonucleotide
acgggcctcaacgttataggcatctcaaat

SEQ ID NO: 75381 - DNA, 30 bp, Artificial Sequence
  Synthetic oligonucleotide
agctgaagcacggcatcgtcccggtcaaat

SEQ ID NO: 75382 - DNA, 30 bp, Artificial Sequence
  Synthetic oligonucleotide
gtacaggtagtaatgtcgtccggaagaaat

SEQ ID NO: 75383 - DNA, 30 bp, Artificial Sequence
  Synthetic oligonucleotide
aagacggccccccccctaaagaccagaaat

SEQ ID NO: 75384 - DNA, 30 bp, Artificial Sequence
  Synthetic oligonucleotide
agcacacggtccggccacaacttgcgaaat

SEQ ID NO: 75385 - DNA, 30 bp, Artificial Sequence
  Synthetic oligonucleotide
accgcgaaggtggcactggtatgtcgaaat

SEQ ID NO: 75386 - DNA, 30 bp, Artificial Sequence
  Synthetic oligonucleotide
gtggtgaggtcggcaagacttaatggaaat

SEQ ID NO: 75387 - DNA, 30 bp, Artificial Sequence
  Synthetic oligonucleotide
tggcaggcggtagaccggcaatgtggaaat

SEQ ID NO: 75388 - DNA, 30 bp, Artificial Sequence
  Synthetic oligonucleotide
gtactaaatcagacaagtggtatatgaaat

SEQ ID NO: 75389 - DNA, 30 bp, Artificial Sequence
  Synthetic oligonucleotide
gcgcacgtcacgcaacagaagcgctgaaat

SEQ ID NO: 75390 - DNA, 30 bp, Artificial Sequence
  Synthetic oligonucleotide
agggcccatcggcactcagaacctataaat

SEQ ID NO: 75391 - DNA, 30 bp, Artificial Sequence
  Synthetic oligonucleotide
acgtgcgttagatgatgaacctagctaaat

SEQ ID NO: 75392 - DNA, 30 bp, Artificial Sequence
  Synthetic oligonucleotide
taacaaaaccgactgtccgtcaacgtaaat

SEQ ID NO: 75393 - DNA, 30 bp, Artificial Sequence
  Synthetic oligonucleotide
agtgacggcaccaacgcttcgtctgtaaat

SEQ ID NO: 75394 - DNA, 30 bp, Artificial Sequence
  Synthetic oligonucleotide
cggaaataatgagtgaaaccagcgttaaat

SEQ ID NO: 75395 - DNA, 30 bp, Artificial Sequence
  Synthetic oligonucleotide
acatatgcaaggaattctgatgggcacaat

SEQ ID NO: 75396 - DNA, 30 bp, Artificial Sequence
  Synthetic oligonucleotide
gtgcgaaagggtcataaagttattcacaat

SEQ ID NO: 75397 - DNA, 30 bp, Artificial Sequence
  Synthetic oligonucleotide
gcatacccaaaaaagagagaagaggacaat

SEQ ID NO: 75398 - DNA, 30 bp, Artificial Sequence
  Synthetic oligonucleotide
acagcgcctcggattcggtgcgactacaat

SEQ ID NO: 75399 - DNA, 30 bp, Artificial Sequence
  Synthetic oligonucleotide
ctgcgatctcggttagagacaaggtacaat

SEQ ID NO: 75400 - DNA, 30 bp, Artificial Sequence
  Synthetic oligonucleotide
agggctggaggctgtgggagtcattacaat

SEQ ID NO: 75401 - DNA, 30 bp, Artificial Sequence
  Synthetic oligonucleotide
aatcgtggattagcgtacacatcttacaat

SEQ ID NO: 75402 - DNA, 30 bp, Artificial Sequence
  Synthetic oligonucleotide
aaagtacatgtatgatcaaggtggcccaat

SEQ ID NO: 75403 - DNA, 30 bp, Artificial Sequence
  Synthetic oligonucleotide
cctagtggattttgtatcgacgatcccaat

SEQ ID NO: 75404 - DNA, 30 bp, Artificial Sequence
  Synthetic oligonucleotide
aatagttggtacagataatccgaagccaat

SEQ ID NO: 75405 - DNA, 30 bp, Artificial Sequence
  Synthetic oligonucleotide
tgtagatagtacttgtgggagcaggccaat

SEQ ID NO: 75406 - DNA, 30 bp, Artificial Sequence
  Synthetic oligonucleotide
agatcattcgcgagctccataccaagcaat

SEQ ID NO: 75407 - DNA, 30 bp, Artificial Sequence
  Synthetic oligonucleotide
cgacttgaaggacaaatttctcacagcaat

SEQ ID NO: 75408 - DNA, 30 bp, Artificial Sequence
  Synthetic oligonucleotide
agggtgactcatatctaggatcccagcaat

SEQ ID NO: 75409 - DNA, 30 bp, Artificial Sequence
  Synthetic oligonucleotide
ggtgaggtacggacctgggagaggagcaat

SEQ ID NO: 75410 - DNA, 30 bp, Artificial Sequence
  Synthetic oligonucleotide
gaatggacaatggcatcgtcccggagcaat

SEQ ID NO: 75411 - DNA, 30 bp, Artificial Sequence
  Synthetic oligonucleotide
ggaacggtcgatcaaatgaaagttagcaat

SEQ ID NO: 75412 - DNA, 30 bp, Artificial Sequence
  Synthetic oligonucleotide
tgattaaaccaccaagacactttccgcaat

SEQ ID NO: 75413 - DNA, 30 bp, Artificial Sequence
  Synthetic oligonucleotide
cggccaagcatttaactctggaagggcaat

SEQ ID NO: 75414 - DNA, 30 bp, Artificial Sequence
  Synthetic oligonucleotide
actaaaacattgagttgcaacgagggcaat

SEQ ID NO: 75415 - DNA, 30 bp, Artificial Sequence
  Synthetic oligonucleotide
ttaaatgagacatggaacagtaattgcaat

SEQ ID NO: 75416 - DNA, 30 bp, Artificial Sequence
  Synthetic oligonucleotide
ggctggaccagtcgtagaactgcgatcaat

SEQ ID NO: 75417 - DNA, 30 bp, Artificial Sequence
  Synthetic oligonucleotide
cagatatgggttaagagttgactgatcaat

SEQ ID NO: 75418 - DNA, 30 bp, Artificial Sequence
  Synthetic oligonucleotide
gcgagcgaccttgccaatacacgactcaat

SEQ ID NO: 75419 - DNA, 30 bp, Artificial Sequence
  Synthetic oligonucleotide
acggtttgggagccatgcgtcgccctcaat

SEQ ID NO: 75420 - DNA, 30 bp, Artificial Sequence
  Synthetic oligonucleotide
tacaggcactaaaggtcgtcaccagtcaat

SEQ ID NO: 75421 - DNA, 30 bp, Artificial Sequence
  Synthetic oligonucleotide
gctcactacgaccatatgtacaccgtcaat

SEQ ID NO: 75422 - DNA, 30 bp, Artificial Sequence
  Synthetic oligonucleotide
agaaatggacttgtcaaaagaatgcagaat

SEQ ID NO: 75423 - DNA, 30 bp, Artificial Sequence
  Synthetic oligonucleotide
ccaggtgccagtccaattatccctcagaat

SEQ ID NO: 75424 - DNA, 30 bp, Artificial Sequence
  Synthetic oligonucleotide
aataggggacacaatcggcagatagagaat

SEQ ID NO: 75425 - DNA, 30 bp, Artificial Sequence
  Synthetic oligonucleotide
ggcgaagatggtggctacgacacgtagaat

SEQ ID NO: 75426 - DNA, 30 bp, Artificial Sequence
  Synthetic oligonucleotide
cattagcagagctcagccagttacacgaat

SEQ ID NO: 75427 - DNA, 30 bp, Artificial Sequence
  Synthetic oligonucleotide
atgggtgtttgggggcaccagtggacgaat

SEQ ID NO: 75428 - DNA, 30 bp, Artificial Sequence
  Synthetic oligonucleotide
gaactagggctctatgtatttagggcgaat

SEQ ID NO: 75429 - DNA, 30 bp, Artificial Sequence
  Synthetic oligonucleotide
gttaaagtcccgcgaacagtggtggcgaat

SEQ ID NO: 75430 - DNA, 30 bp, Artificial Sequence
  Synthetic oligonucleotide
ctggactggcaacaggcagcacgctcgaat

SEQ ID NO: 75431 - DNA, 30 bp, Artificial Sequence
  Synthetic oligonucleotide
gacgttatgagaaagatacgccgttcgaat

SEQ ID NO: 75432 - DNA, 30 bp, Artificial Sequence
  Synthetic oligonucleotide
tagaccagattaggacatagctacaggaat

SEQ ID NO: 75433 - DNA, 30 bp, Artificial Sequence
  Synthetic oligonucleotide
aacgatcagaacgtatcgctgtgtaggaat

SEQ ID NO: 75434 - DNA, 30 bp, Artificial Sequence
  Synthetic oligonucleotide
gtctaacggaagggcctcaatcttaggaat

SEQ ID NO: 75435 - DNA, 30 bp, Artificial Sequence
  Synthetic oligonucleotide
acgcagtggaatcgaatttatcaccggaat

SEQ ID NO: 75436 - DNA, 30 bp, Artificial Sequence
  Synthetic oligonucleotide
aggttaacgtccgggggcaagttgcggaat

SEQ ID NO: 75437 - DNA, 30 bp, Artificial Sequence
  Synthetic oligonucleotide
tgggataggaattggaatgacgatgggaat

SEQ ID NO: 75438 - DNA, 30 bp, Artificial Sequence
  Synthetic oligonucleotide
tccaagctgatcaggtctgtcggtgggaat

SEQ ID NO: 75439 - DNA, 30 bp, Artificial Sequence
  Synthetic oligonucleotide
ccatgcgcgtcagggtaaatgaactggaat

SEQ ID NO: 75440 - DNA, 30 bp, Artificial Sequence
  Synthetic oligonucleotide
tgggaactgtagcatcttgttaagtggaat

SEQ ID NO: 75441 - DNA, 30 bp, Artificial Sequence
  Synthetic oligonucleotide
tggtatttgcgatagagtgtactttggaat

SEQ ID NO: 75442 - DNA, 30 bp, Artificial Sequence
  Synthetic oligonucleotide
agaacgggaacggaagtgagcataatgaat

SEQ ID NO: 75443 - DNA, 30 bp, Artificial Sequence
  Synthetic oligonucleotide
gacctccacaggtaaagctactggatgaat

SEQ ID NO: 75444 - DNA, 30 bp, Artificial Sequence
  Synthetic oligonucleotide
agcataggaataataggatactcattgaat

SEQ ID NO: 75445 - DNA, 30 bp, Artificial Sequence
  Synthetic oligonucleotide
gaaacactcaagaagtatggagtattgaat

SEQ ID NO: 75446 - DNA, 30 bp, Artificial Sequence
  Synthetic oligonucleotide
caggtcaacatggtgttacccaggttgaat

SEQ ID NO: 75447 - DNA, 30 bp, Artificial Sequence
  Synthetic oligonucleotide
agaaacgtgggctagtgcgtgctgttgaat

SEQ ID NO: 75448 - DNA, 30 bp, Artificial Sequence
  Synthetic oligonucleotide
aagccgcgcgggcctaaatgtgctttgaat

SEQ ID NO: 75449 - DNA, 30 bp, Artificial Sequence
  Synthetic oligonucleotide
ccgaacgtggatttagagccgctgaataat

SEQ ID NO: 75450 - DNA, 30 bp, Artificial Sequence
  Synthetic oligonucleotide
catgcggaaataaatgctgttaataataat

SEQ ID NO: 75451 - DNA, 30 bp, Artificial Sequence
  Synthetic oligonucleotide
cataatcgtgatgagtccgggggtaataat

SEQ ID NO: 75452 - DNA, 30 bp, Artificial Sequence
  Synthetic oligonucleotide
gcgcaaagcgggcagggaactttacataat

SEQ ID NO: 75453 - DNA, 30 bp, Artificial Sequence
  Synthetic oligonucleotide
aaggcagcgatatcaaaaggtggtcataat

SEQ ID NO: 75454 - DNA, 30 bp, Artificial Sequence
  Synthetic oligonucleotide
cggacgaacagacatgcctttacggataat

SEQ ID NO: 75455 - DNA, 30 bp, Artificial Sequence
  Synthetic oligonucleotide
acaaccatatctcaagagcaatagtataat

SEQ ID NO: 75456 - DNA, 30 bp, Artificial Sequence
  Synthetic oligonucleotide
gttagaccggacgaaggtgagggcactaat

SEQ ID NO: 75457 - DNA, 30 bp, Artificial Sequence
  Synthetic oligonucleotide
agtatctgctactagaaagaagggactaat

SEQ ID NO: 75458 - DNA, 30 bp, Artificial Sequence
  Synthetic oligonucleotide
tagcctaaggtactcaatcgcaaagctaat

SEQ ID NO: 75459 - DNA, 30 bp, Artificial Sequence
  Synthetic oligonucleotide
agggaagcgtacggatatgtgcgggctaat

SEQ ID NO: 75460 - DNA, 30 bp, Artificial Sequence
  Synthetic oligonucleotide
catcaaggaagagggcacaagtaatctaat

SEQ ID NO: 75461 - DNA, 30 bp, Artificial Sequence
  Synthetic oligonucleotide
tcctgacataggtggggctaagcatctaat

SEQ ID NO: 75462 - DNA, 30 bp, Artificial Sequence
  Synthetic oligonucleotide
gggcagtatcaaatgccccgccgatctaat

SEQ ID NO: 75463 - DNA, 30 bp, Artificial Sequence
  Synthetic oligonucleotide
ggcctcgaccgtaaaagaggttatagtaat

SEQ ID NO: 75464 - DNA, 30 bp, Artificial Sequence
  Synthetic oligonucleotide
gctcaaacataacgaatttatgagggtaat

SEQ ID NO: 75465 - DNA, 31 bp, Artificial Sequence
  Synthetic oligonucleotide
accgagcaggggactattgtaagactgtaat

SEQ ID NO: 75466 - DNA, 30 bp, Artificial Sequence
  Synthetic oligonucleotide
gcggccgagtccgccactgcatgatttaat

SEQ ID NO: 75467 - DNA, 30 bp, Artificial Sequence
  Synthetic oligonucleotide
tccgaaccaggttcggtgaagtaaaaacat

SEQ ID NO: 75468 - DNA, 30 bp, Artificial Sequence
  Synthetic oligonucleotide
gtacaacgtcatcaatcacggataaaacat

SEQ ID NO: 75469 - DNA, 30 bp, Artificial Sequence
  Synthetic oligonucleotide
ggatctcagaatagtaagaggttaaaacat

SEQ ID NO: 75470 - DNA, 30 bp, Artificial Sequence
  Synthetic oligonucleotide
cgataggcactgtggtctgcgatgcaacat

SEQ ID NO: 75471 - DNA, 30 bp, Artificial Sequence
  Synthetic oligonucleotide
cgacgcgcgctgttgagcaaatacgaacat

SEQ ID NO: 75472 - DNA, 30 bp, Artificial Sequence
  Synthetic oligonucleotide
agaaagaatcaccgcagtgtgacctaacat

SEQ ID NO: 75473 - DNA, 30 bp, Artificial Sequence
  Synthetic oligonucleotide
aactaagaaaagagacctcaaaggtaacat

SEQ ID NO: 75474 - DNA, 30 bp, Artificial Sequence
  Synthetic oligonucleotide
ttgactgtgaaagaatggagatcgccacat

SEQ ID NO: 75475 - DNA, 30 bp, Artificial Sequence
  Synthetic oligonucleotide
ccataggcgggataatatgctactccacat

SEQ ID NO: 75476 - DNA, 30 bp, Artificial Sequence
  Synthetic oligonucleotide
ccataaggatcctcctggggttaagcacat

SEQ ID NO: 75477 - DNA, 30 bp, Artificial Sequence
  Synthetic oligonucleotide
ggtcagtataatactgactaccgcgcacat

SEQ ID NO: 75478 - DNA, 30 bp, Artificial Sequence
  Synthetic oligonucleotide
ataagcgattttcttcaacagagggcacat

SEQ ID NO: 75479 - DNA, 30 bp, Artificial Sequence
  Synthetic oligonucleotide
tcgttcgcatgtctaatcggaagtgcacat

SEQ ID NO: 75480 - DNA, 30 bp, Artificial Sequence
  Synthetic oligonucleotide
ggacgggaagataaaatgagggtcagacat

SEQ ID NO: 75481 - DNA, 30 bp, Artificial Sequence
  Synthetic oligonucleotide
tcccaccactaccgacagaactttagacat

SEQ ID NO: 75482 - DNA, 30 bp, Artificial Sequence
  Synthetic oligonucleotide
catggcttaaccacacaaggaatacgacat

SEQ ID NO: 75483 - DNA, 30 bp, Artificial Sequence
  Synthetic oligonucleotide
cacgggtacaaaaatcgtgaagttcgacat

SEQ ID NO: 75484 - DNA, 30 bp, Artificial Sequence
  Synthetic oligonucleotide
gcctgtaggggcatacatcctatgggacat

SEQ ID NO: 75485 - DNA, 30 bp, Artificial Sequence
  Synthetic oligonucleotide
gcaagaaagtgcttattatcgaaaatacat

SEQ ID NO: 75486 - DNA, 30 bp, Artificial Sequence
  Synthetic oligonucleotide
aagtggtagggagagtgagacccgatacat

SEQ ID NO: 75487 - DNA, 30 bp, Artificial Sequence
  Synthetic oligonucleotide
ttgtgtggcgggtacggcgcatatatacat

SEQ ID NO: 75488 - DNA, 30 bp, Artificial Sequence
  Synthetic oligonucleotide
cagcccagtgatctcagcccggctatacat

SEQ ID NO: 75489 - DNA, 30 bp, Artificial Sequence
  Synthetic oligonucleotide
ggcaacgtgacacttagtgagtaactacat

SEQ ID NO: 75490 - DNA, 30 bp, Artificial Sequence
  Synthetic oligonucleotide
aggaccaagacaaagttccggcaggtacat

SEQ ID NO: 75491 - DNA, 30 bp, Artificial Sequence
  Synthetic oligonucleotide
tagggttagtaagctgtcgatcccttacat

SEQ ID NO: 75492 - DNA, 30 bp, Artificial Sequence
  Synthetic oligonucleotide
cgggcacgctactcactttccgtgaaccat

SEQ ID NO: 75493 - DNA, 30 bp, Artificial Sequence
  Synthetic oligonucleotide
atcggtgcccacgcggaattatcggaccat

SEQ ID NO: 75494 - DNA, 30 bp, Artificial Sequence
  Synthetic oligonucleotide
caaaaaaccgagcgagggaacatgtaccat

SEQ ID NO: 75495 - DNA, 30 bp, Artificial Sequence
  Synthetic oligonucleotide
ttacacaatcaggtaacacgtactccccat

SEQ ID NO: 75496 - DNA, 30 bp, Artificial Sequence
  Synthetic oligonucleotide
gcgcactaaagtatggcccagtatgcccat

SEQ ID NO: 75497 - DNA, 30 bp, Artificial Sequence
  Synthetic oligonucleotide
caggctttggtccaagccaagtgaagccat

SEQ ID NO: 75498 - DNA, 30 bp, Artificial Sequence
  Synthetic oligonucleotide
ctaggctagccaaagcaataatcacgccat

SEQ ID NO: 75499 - DNA, 30 bp, Artificial Sequence
  Synthetic oligonucleotide
cccgggtcacggggagtgaaaaattgccat

SEQ ID NO: 75500 - DNA, 30 bp, Artificial Sequence
  Synthetic oligonucleotide
tgacaaggtgcttactcagtgtattgccat

SEQ ID NO: 75501 - DNA, 30 bp, Artificial Sequence
  Synthetic oligonucleotide
ggtaggtggggtggataaatgttgatccat

SEQ ID NO: 75502 - DNA, 30 bp, Artificial Sequence
  Synthetic oligonucleotide
taaggtcaatagcattacgagcggctccat

SEQ ID NO: 75503 - DNA, 30 bp, Artificial Sequence
  Synthetic oligonucleotide
cagggtcgaggaccgtggtgtactctccat

SEQ ID NO: 75504 - DNA, 30 bp, Artificial Sequence
  Synthetic oligonucleotide
gaggatactattgtcgaataaggtaagcat

SEQ ID NO: 75505 - DNA, 30 bp, Artificial Sequence
  Synthetic oligonucleotide
aagtataaaccaaccactgaagcacagcat

SEQ ID NO: 75506 - DNA, 30 bp, Artificial Sequence
  Synthetic oligonucleotide
caagcggagtggtaatgatggacccagcat

SEQ ID NO: 75507 - DNA, 30 bp, Artificial Sequence
  Synthetic oligonucleotide
gcggggtagaaagtattgagaccccagcat

SEQ ID NO: 75508 - DNA, 30 bp, Artificial Sequence
  Synthetic oligonucleotide
taatgagagtaccccagacaggggcagcat

SEQ ID NO: 75509 - DNA, 30 bp, Artificial Sequence
  Synthetic oligonucleotide
ttgtaggggtgggccacaaacgatgagcat

SEQ ID NO: 75510 - DNA, 30 bp, Artificial Sequence
  Synthetic oligonucleotide
cttaagtttaacgggaataagtgtgagcat

SEQ ID NO: 75511 - DNA, 30 bp, Artificial Sequence
  Synthetic oligonucleotide
cgaggagaatcctttccgtggtgttagcat

SEQ ID NO: 75512 - DNA, 30 bp, Artificial Sequence
  Synthetic oligonucleotide
cacggtgcacagattaaatggtaaccgcat

SEQ ID NO: 75513 - DNA, 30 bp, Artificial Sequence
  Synthetic oligonucleotide
ccggtaggaatcaaggtggcaagagcgcat

SEQ ID NO: 75514 - DNA, 30 bp, Artificial Sequence
  Synthetic oligonucleotide
tcaccggactgtgggtaactatagtcgcat

SEQ ID NO: 75515 - DNA, 30 bp, Artificial Sequence
  Synthetic oligonucleotide
ggatagattaggaccagtcctgattcgcat

SEQ ID NO: 75516 - DNA, 30 bp, Artificial Sequence
  Synthetic oligonucleotide
taaaaactgcgaaattacgccgagaggcat

SEQ ID NO: 75517 - DNA, 30 bp, Artificial Sequence
  Synthetic oligonucleotide
aatcgcgatggcacgatatacaaggggcat

SEQ ID NO: 75518 - DNA, 30 bp, Artificial Sequence
  Synthetic oligonucleotide
ctctggaaaagggggtcaaagtgcatgcat

SEQ ID NO: 75519 - DNA, 30 bp, Artificial Sequence
  Synthetic oligonucleotide
ctgacacgcggtcgggagctgagcgtgcat

SEQ ID NO: 75520 - DNA, 30 bp, Artificial Sequence
  Synthetic oligonucleotide
gcggaacagaattaattatggttaaatcat

SEQ ID NO: 75521 - DNA, 30 bp, Artificial Sequence
  Synthetic oligonucleotide
ctacatcagccaaatcggttatggaatcat

SEQ ID NO: 75522 - DNA, 30 bp, Artificial Sequence
  Synthetic oligonucleotide
tcagagtcgagcgcggagaagcataatcat

SEQ ID NO: 75523 - DNA, 30 bp, Artificial Sequence
  Synthetic oligonucleotide
actcaagagagcccatgttgtgagtatcat

SEQ ID NO: 75524 - DNA, 30 bp, Artificial Sequence
  Synthetic oligonucleotide
ggcggcaggtgtagagaagttgtttatcat

SEQ ID NO: 75525 - DNA, 30 bp, Artificial Sequence
  Synthetic oligonucleotide
atgcacgtactggtcatggttatggctcat

SEQ ID NO: 75526 - DNA, 30 bp, Artificial Sequence
  Synthetic oligonucleotide
acctgggactctaagctggagcgatctcat

SEQ ID NO: 75527 - DNA, 30 bp, Artificial Sequence
  Synthetic oligonucleotide
cacggctacgcatcgaagtggagctctcat

SEQ ID NO: 75528 - DNA, 30 bp, Artificial Sequence
  Synthetic oligonucleotide
aaagagaaagccgaaagcctagcaagtcat

SEQ ID NO: 75529 - DNA, 30 bp, Artificial Sequence
  Synthetic oligonucleotide
tgatgtgcgttagtggtgtttcagagtcat

SEQ ID NO: 75530 - DNA, 30 bp, Artificial Sequence
  Synthetic oligonucleotide
attcagactgaggggagacagggacgtcat

SEQ ID NO: 75531 - DNA, 30 bp, Artificial Sequence
  Synthetic oligonucleotide
gcagggagataccgggtaggacagcgtcat

SEQ ID NO: 75532 - DNA, 30 bp, Artificial Sequence
  Synthetic oligonucleotide
aggaagcattcactccagcgctagggtcat

SEQ ID NO: 75533 - DNA, 30 bp, Artificial Sequence
  Synthetic oligonucleotide
cgagcacaacggccgccacatccatgtcat

SEQ ID NO: 75534 - DNA, 30 bp, Artificial Sequence
  Synthetic oligonucleotide
agaagtcgatagctcctgtcggcaattcat

SEQ ID NO: 75535 - DNA, 30 bp, Artificial Sequence
  Synthetic oligonucleotide
cgcgtataatcggcacgtgaaagcattcat

SEQ ID NO: 75536 - DNA, 30 bp, Artificial Sequence
  Synthetic oligonucleotide
agccgtctaataacactcataatgattcat

SEQ ID NO: 75537 - DNA, 30 bp, Artificial Sequence
  Synthetic oligonucleotide
aggggttctcagtaggtaagtgggaaagat

SEQ ID NO: 75538 - DNA, 30 bp, Artificial Sequence
  Synthetic oligonucleotide
tccttagtgtggtgcacaggtcgacaagat

SEQ ID NO: 75539 - DNA, 30 bp, Artificial Sequence
  Synthetic oligonucleotide
ggcaaattgttgtcccaatctgtacaagat

SEQ ID NO: 75540 - DNA, 30 bp, Artificial Sequence
  Synthetic oligonucleotide
gggagcggtcgctccgtaggtaaccaagat

SEQ ID NO: 75541 - DNA, 30 bp, Artificial Sequence
  Synthetic oligonucleotide
gacggtgtacggatatacgaccatcaagat

SEQ ID NO: 75542 - DNA, 30 bp, Artificial Sequence
  Synthetic oligonucleotide
gtgatgaaccagagaggttaaactcaagat

SEQ ID NO: 75543 - DNA, 30 bp, Artificial Sequence
  Synthetic oligonucleotide
tgctgggattaaaaattacgtatcgaagat

SEQ ID NO: 75544 - DNA, 30 bp, Artificial Sequence
  Synthetic oligonucleotide
cagaactccaaatgaactgccccgtaagat

SEQ ID NO: 75545 - DNA, 30 bp, Artificial Sequence
  Synthetic oligonucleotide
gtccataagggagtaaaacggctaacagat

SEQ ID NO: 75546 - DNA, 30 bp, Artificial Sequence
  Synthetic oligonucleotide
tgctatggtaaaccgtacggtacaccagat

SEQ ID NO: 75547 - DNA, 30 bp, Artificial Sequence
  Synthetic oligonucleotide
atggaatcgatgtcgatttaccgaccagat

SEQ ID NO: 75548 - DNA, 30 bp, Artificial Sequence
  Synthetic oligonucleotide
acgaccaaactaacatgggctaacccagat

SEQ ID NO: 75549 - DNA, 30 bp, Artificial Sequence
  Synthetic oligonucleotide
gtcgaacataccgagggcaaccgcccagat

SEQ ID NO: 75550 - DNA, 30 bp, Artificial Sequence
  Synthetic oligonucleotide
gtacaaaattatcgggtcgttcgcccagat

SEQ ID NO: 75551 - DNA, 30 bp, Artificial Sequence
  Synthetic oligonucleotide
tgggcggcaactcctttctattgcccagat

SEQ ID NO: 75552 - DNA, 30 bp, Artificial Sequence
  Synthetic oligonucleotide
agaggttcgacaaagggacctcccgcagat

SEQ ID NO: 75553 - DNA, 30 bp, Artificial Sequence
  Synthetic oligonucleotide
cttgttaagccacgtctatacctggcagat

SEQ ID NO: 75554 - DNA, 30 bp, Artificial Sequence
  Synthetic oligonucleotide
actagcaccaggacagttgtaattgcagat

SEQ ID NO: 75555 - DNA, 30 bp, Artificial Sequence
  Synthetic oligonucleotide
gcaacatcgtgaggcacacctacatcagat

SEQ ID NO: 75556 - DNA, 30 bp, Artificial Sequence
  Synthetic oligonucleotide
agcatataagaaggccagtgtacatcagat

SEQ ID NO: 75557 - DNA, 30 bp, Artificial Sequence
  Synthetic oligonucleotide
ccgtataaagcggtctggaaaccctcagat

SEQ ID NO: 75558 - DNA, 30 bp, Artificial Sequence
  Synthetic oligonucleotide
caaagcaagttaggtgcgatcatctcagat

SEQ ID NO: 75559 - DNA, 30 bp, Artificial Sequence
  Synthetic oligonucleotide
taggtacgggtactgtttgctacgagagat

SEQ ID NO: 75560 - DNA, 30 bp, Artificial Sequence
  Synthetic oligonucleotide
tacgctcagggcctgtattgcgaccgagat

SEQ ID NO: 75561 - DNA, 30 bp, Artificial Sequence
  Synthetic oligonucleotide
tcaccgatcgtttcaaagttcgtgcgagat

SEQ ID NO: 75562 - DNA, 30 bp, Artificial Sequence
  Synthetic oligonucleotide
ttgcccggagctaaggtgtgtactggagat

SEQ ID NO: 75563 - DNA, 30 bp, Artificial Sequence
  Synthetic oligonucleotide
cgtgccaacgggggtttaggtgttatagat

SEQ ID NO: 75564 - DNA, 30 bp, Artificial Sequence
  Synthetic oligonucleotide
gcctaggcttacccaagatttcgagtagat

SEQ ID NO: 75565 - DNA, 30 bp, Artificial Sequence
  Synthetic oligonucleotide
aggcgtatggaagttaggtctagggtagat

SEQ ID NO: 75566 - DNA, 30 bp, Artificial Sequence
  Synthetic oligonucleotide
ggagagctagggtcacgttggcgggtagat

SEQ ID NO: 75567 - DNA, 30 bp, Artificial Sequence
  Synthetic oligonucleotide
aaggtggtacttcgtgctcaacgtgtagat

SEQ ID NO: 75568 - DNA, 30 bp, Artificial Sequence
  Synthetic oligonucleotide
tgcagtggaggcacggcttcccttgtagat

SEQ ID NO: 75569 - DNA, 30 bp, Artificial Sequence
  Synthetic oligonucleotide
tcatcagtcaacccaccaccgtgattagat

SEQ ID NO: 75570 - DNA, 30 bp, Artificial Sequence
  Synthetic oligonucleotide
cggtaactaagagagcttgtctcaaacgat

SEQ ID NO: 75571 - DNA, 30 bp, Artificial Sequence
  Synthetic oligonucleotide
gctcggtcgcaagatcttggatcgaacgat

SEQ ID NO: 75572 - DNA, 30 bp, Artificial Sequence
  Synthetic oligonucleotide
cctcgaacacaagttgcagaatgtaacgat

SEQ ID NO: 75573 - DNA, 30 bp, Artificial Sequence
  Synthetic oligonucleotide
tgccgagtaacccaagattgcgttcacgat

SEQ ID NO: 75574 - DNA, 30 bp, Artificial Sequence
  Synthetic oligonucleotide
gtgagagaagtcacatcaccgatagacgat

SEQ ID NO: 75575 - DNA, 31 bp, Artificial Sequence
  Synthetic oligonucleotide
taagggggtttcccgaaacagaagtgacgat

SEQ ID NO: 75576 - DNA, 30 bp, Artificial Sequence
  Synthetic oligonucleotide
tataacataagcatgtaccagacacccgat

SEQ ID NO: 75577 - DNA, 30 bp, Artificial Sequence
  Synthetic oligonucleotide
tcgatgcccgtgtcacccatctcaagcgat

SEQ ID NO: 75578 - DNA, 30 bp, Artificial Sequence
  Synthetic oligonucleotide
tcacgttcatatgcggcgcaaaagcgcgat

SEQ ID NO: 75579 - DNA, 30 bp, Artificial Sequence
  Synthetic oligonucleotide
ggtatgcgacctgcaggacaccaaggcgat

SEQ ID NO: 75580 - DNA, 30 bp, Artificial Sequence
  Synthetic oligonucleotide
cagatgtactatcagtggcatcccatcgat

SEQ ID NO: 75581 - DNA, 30 bp, Artificial Sequence
  Synthetic oligonucleotide
gaaaatgtataagggcaagagaagatcgat

SEQ ID NO: 75582 - DNA, 30 bp, Artificial Sequence
  Synthetic oligonucleotide
tcgctgaaggtgcgcgaaacgcgtatcgat

SEQ ID NO: 75583 - DNA, 30 bp, Artificial Sequence
  Synthetic oligonucleotide
cacgggcacagagagtgcaggggtgtcgat

SEQ ID NO: 75584 - DNA, 30 bp, Artificial Sequence
  Synthetic oligonucleotide
agataggcggcgtttttagagaaaaaggat

SEQ ID NO: 75585 - DNA, 30 bp, Artificial Sequence
  Synthetic oligonucleotide
agctaagtcaactgcccggtgtccaaggat

SEQ ID NO: 75586 - DNA, 30 bp, Artificial Sequence
  Synthetic oligonucleotide
agcacgacaagcactgggctaatcaaggat

SEQ ID NO: 75587 - DNA, 30 bp, Artificial Sequence
  Synthetic oligonucleotide
agcggaggttacacaaggaatgagaaggat

SEQ ID NO: 75588 - DNA, 30 bp, Artificial Sequence
  Synthetic oligonucleotide
gggacgatcccgtctatcagtaataaggat

SEQ ID NO: 75589 - DNA, 30 bp, Artificial Sequence
  Synthetic oligonucleotide
ggcctcagccgcgtggcgttacaacaggat

SEQ ID NO: 75590 - DNA, 30 bp, Artificial Sequence
  Synthetic oligonucleotide
gtgagcgctaccgatgaatgattccaggat

SEQ ID NO: 75591 - DNA, 30 bp, Artificial Sequence
  Synthetic oligonucleotide
gacgtaccatcgcgccgtaaacagcaggat

SEQ ID NO: 75592 - DNA, 30 bp, Artificial Sequence
  Synthetic oligonucleotide
tatgaccgtgggttaggattgtctcaggat

SEQ ID NO: 75593 - DNA, 30 bp, Artificial Sequence
  Synthetic oligonucleotide
atcagaattggatttaagcaacttcaggat

SEQ ID NO: 75594 - DNA, 30 bp, Artificial Sequence
  Synthetic oligonucleotide
acctgtccgtcgatcaaatcggtcgaggat

SEQ ID NO: 75595 - DNA, 30 bp, Artificial Sequence
  Synthetic oligonucleotide
tcacggtacgagatcgtactggctgaggat

SEQ ID NO: 75596 - DNA, 30 bp, Artificial Sequence
  Synthetic oligonucleotide
taattcgtcacaaggacatataaataggat

SEQ ID NO: 75597 - DNA, 30 bp, Artificial Sequence
  Synthetic oligonucleotide
gcagcgaatatagaggcaattagaacggat

SEQ ID NO: 75598 - DNA, 30 bp, Artificial Sequence
  Synthetic oligonucleotide
aggtccagtgcgttatcagtggatacggat

SEQ ID NO: 75599 - DNA, 30 bp, Artificial Sequence
  Synthetic oligonucleotide
gtctatgtgggggggacactcgtgccggat

SEQ ID NO: 75600 - DNA, 30 bp, Artificial Sequence
  Synthetic oligonucleotide
gaagagctgaacctccgactcgctccggat

SEQ ID NO: 75601 - DNA, 30 bp, Artificial Sequence
  Synthetic oligonucleotide
gcaaattcagggccatccgaacatgcggat

SEQ ID NO: 75602 - DNA, 30 bp, Artificial Sequence
  Synthetic oligonucleotide
cactccaagtaatgagggatctagtcggat

SEQ ID NO: 75603 - DNA, 30 bp, Artificial Sequence
  Synthetic oligonucleotide
gtagacttacaccagagcgcttacagggat

SEQ ID NO: 75604 - DNA, 30 bp, Artificial Sequence
  Synthetic oligonucleotide
caagagttcacagtactcgacagtagggat

SEQ ID NO: 75605 - DNA, 30 bp, Artificial Sequence
  Synthetic oligonucleotide
cagggaggcatatgttgtgccagacgggat

SEQ ID NO: 75606 - DNA, 30 bp, Artificial Sequence
  Synthetic oligonucleotide
cggggaaccgtttgaaggagttcaggggat

SEQ ID NO: 75607 - DNA, 30 bp, Artificial Sequence
  Synthetic oligonucleotide
ccgaccaacgaatcgagaccgtgcatggat

SEQ ID NO: 75608 - DNA, 30 bp, Artificial Sequence
  Synthetic oligonucleotide
atcgggcgtcccatagtgtcacggatggat

SEQ ID NO: 75609 - DNA, 30 bp, Artificial Sequence
  Synthetic oligonucleotide
gcatagttatgagcgaggcttgtgatggat

SEQ ID NO: 75610 - DNA, 30 bp, Artificial Sequence
  Synthetic oligonucleotide
tcggaagtacgaacgcctttccgtctggat

SEQ ID NO: 75611 - DNA, 30 bp, Artificial Sequence
  Synthetic oligonucleotide
acggtcgcgtgcactttgatgggtctggat

SEQ ID NO: 75612 - DNA, 30 bp, Artificial Sequence
  Synthetic oligonucleotide
accggatcaagtggtcagaataacgtggat

SEQ ID NO: 75613 - DNA, 30 bp, Artificial Sequence
  Synthetic oligonucleotide
cgtcgttgcggaacagtcggtgctgtggat

SEQ ID NO: 75614 - DNA, 30 bp, Artificial Sequence
  Synthetic oligonucleotide
aatggcgaaacgacccaacctcgaaatgat

SEQ ID NO: 75615 - DNA, 30 bp, Artificial Sequence
  Synthetic oligonucleotide
caaggggaggtttgggtcccagagaatgat

SEQ ID NO: 75616 - DNA, 30 bp, Artificial Sequence
  Synthetic oligonucleotide
cgatggggtcagtgtgacgatggagatgat

SEQ ID NO: 75617 - DNA, 30 bp, Artificial Sequence
  Synthetic oligonucleotide
cgggggaaaaacgataatcggttggatgat

SEQ ID NO: 75618 - DNA, 30 bp, Artificial Sequence
  Synthetic oligonucleotide
acaacaaggaagatgtatttgccatatgat

SEQ ID NO: 75619 - DNA, 30 bp, Artificial Sequence
  Synthetic oligonucleotide
ggaccgtaaattcggagggtcagttatgat

SEQ ID NO: 75620 - DNA, 30 bp, Artificial Sequence
  Synthetic oligonucleotide
acaagggtgaaggcaataccttcggctgat

SEQ ID NO: 75621 - DNA, 30 bp, Artificial Sequence
  Synthetic oligonucleotide
gccgataaagggactgaggactagtctgat

SEQ ID NO: 75622 - DNA, 30 bp, Artificial Sequence
  Synthetic oligonucleotide
caggcaccggctacacaactgtcaagtgat

SEQ ID NO: 75623 - DNA, 30 bp, Artificial Sequence
  Synthetic oligonucleotide
gacgggtattcaatgtgacgtccacgtgat

SEQ ID NO: 75624 - DNA, 30 bp, Artificial Sequence
  Synthetic oligonucleotide
agtgtggtggaatagagagtagtaggtgat

SEQ ID NO: 75625 - DNA, 30 bp, Artificial Sequence
  Synthetic oligonucleotide
caagcaaggccctcctaaaaacgcggtgat

SEQ ID NO: 75626 - DNA, 30 bp, Artificial Sequence
  Synthetic oligonucleotide
aaacggcaatgaccaatcgtcgtaattgat

SEQ ID NO: 75627 - DNA, 30 bp, Artificial Sequence
  Synthetic oligonucleotide
taccgacaggtaaccacggtaactattgat

SEQ ID NO: 75628 - DNA, 30 bp, Artificial Sequence
  Synthetic oligonucleotide
gcgagacaccgtcatatattatgtcttgat

SEQ ID NO: 75629 - DNA, 30 bp, Artificial Sequence
  Synthetic oligonucleotide
atggggaaacgctaaattacagcagttgat

SEQ ID NO: 75630 - DNA, 30 bp, Artificial Sequence
  Synthetic oligonucleotide
ggtcccaaggcgggagagtaccgtgttgat

SEQ ID NO: 75631 - DNA, 30 bp, Artificial Sequence
  Synthetic oligonucleotide
aatggggggaagaggtatacaagatttgat

SEQ ID NO: 75632 - DNA, 30 bp, Artificial Sequence
  Synthetic oligonucleotide
ggtaccaaatcaggcaagacaccctttgat

SEQ ID NO: 75633 - DNA, 30 bp, Artificial Sequence
  Synthetic oligonucleotide
gtcgtcgataacagtgttgagtaggaatat

SEQ ID NO: 75634 - DNA, 30 bp, Artificial Sequence
  Synthetic oligonucleotide
aggccgcacctaatcgcaccttcggaatat

SEQ ID NO: 75635 - DNA, 30 bp, Artificial Sequence
  Synthetic oligonucleotide
gtcgggcgtcggaagggaatcgctgaatat

SEQ ID NO: 75636 - DNA, 29 bp, Artificial Sequence
  Synthetic oligonucleotide
gggggtacaaaggacgatctgaataatat

SEQ ID NO: 75637 - DNA, 30 bp, Artificial Sequence
  Synthetic oligonucleotide
cgtggtggaccaggcataagctcataatat

SEQ ID NO: 75638 - DNA, 30 bp, Artificial Sequence
  Synthetic oligonucleotide
cgttcaggcatcgcaaggactaagccatat

SEQ ID NO: 75639 - DNA, 30 bp, Artificial Sequence
  Synthetic oligonucleotide
aacgtaaccacatcttggtccactccatat

SEQ ID NO: 75640 - DNA, 30 bp, Artificial Sequence
  Synthetic oligonucleotide
acaccgaacaagatgtgtaattcagcatat

SEQ ID NO: 75641 - DNA, 30 bp, Artificial Sequence
  Synthetic oligonucleotide
cgcaagttaagtgtcacagcaagatcatat

SEQ ID NO: 75642 - DNA, 30 bp, Artificial Sequence
  Synthetic oligonucleotide
cggactacatttcggttcaatagcagatat

SEQ ID NO: 75643 - DNA, 30 bp, Artificial Sequence
  Synthetic oligonucleotide
gcattggatagaaaagtcagtaggagatat

SEQ ID NO: 75644 - DNA, 30 bp, Artificial Sequence
  Synthetic oligonucleotide
caggccgccaaccagtagactgcatgatat

SEQ ID NO: 75645 - DNA, 30 bp, Artificial Sequence
  Synthetic oligonucleotide
tcgagtccggttcaacacagtcggatatat

SEQ ID NO: 75646 - DNA, 30 bp, Artificial Sequence
  Synthetic oligonucleotide
cagtgaagtaggggacatcggttattatat

SEQ ID NO: 75647 - DNA, 30 bp, Artificial Sequence
  Synthetic oligonucleotide
aaggggtagcaagacaagtcagccaactat

SEQ ID NO: 75648 - DNA, 30 bp, Artificial Sequence
  Synthetic oligonucleotide
agcagggctgatgggcctccggagaactat

SEQ ID NO: 75649 - DNA, 30 bp, Artificial Sequence
  Synthetic oligonucleotide
taacgcgtttgcataaagccacggaactat

SEQ ID NO: 75650 - DNA, 30 bp, Artificial Sequence
  Synthetic oligonucleotide
gcggggcgtggctgagctggcatagactat

SEQ ID NO: 75651 - DNA, 30 bp, Artificial Sequence
  Synthetic oligonucleotide
tgtgatagaacaaccacaactaagccctat

SEQ ID NO: 75652 - DNA, 30 bp, Artificial Sequence
  Synthetic oligonucleotide
cgtgtttcttaaaaggtagaaagcgcctat

SEQ ID NO: 75653 - DNA, 30 bp, Artificial Sequence
  Synthetic oligonucleotide
tcgttgtaacatatcacagtttagtcctat

SEQ ID NO: 75654 - DNA, 30 bp, Artificial Sequence
  Synthetic oligonucleotide
ttgttgttttctctttttgtgttttcctat

SEQ ID NO: 75655 - DNA, 30 bp, Artificial Sequence
  Synthetic oligonucleotide
cacggaaaccgaaccgccaagcccagctat

SEQ ID NO: 75656 - DNA, 30 bp, Artificial Sequence
  Synthetic oligonucleotide
accttcaggttgtgctcaaaagggggctat

SEQ ID NO: 75657 - DNA, 30 bp, Artificial Sequence
  Synthetic oligonucleotide
aggcttacttgctaggcctcgaatggctat

SEQ ID NO: 75658 - DNA, 30 bp, Artificial Sequence
  Synthetic oligonucleotide
cgagatacgctaaaatcagacatcatctat

SEQ ID NO: 75659 - DNA, 30 bp, Artificial Sequence
  Synthetic oligonucleotide
cacgggtggttaacagtcagttcgctctat

SEQ ID NO: 75660 - DNA, 30 bp, Artificial Sequence
  Synthetic oligonucleotide
ctgagtgtgggagtgagagcacccttctat

SEQ ID NO: 75661 - DNA, 30 bp, Artificial Sequence
  Synthetic oligonucleotide
gcgagacagggagtgcttctcattttctat

SEQ ID NO: 75662 - DNA, 30 bp, Artificial Sequence
  Synthetic oligonucleotide
cgatgctgtaccgcgggaagactaaagtat

SEQ ID NO: 75663 - DNA, 30 bp, Artificial Sequence
  Synthetic oligonucleotide
cgtgataccggagcctgtatcaagaagtat

SEQ ID NO: 75664 - DNA, 30 bp, Artificial Sequence
  Synthetic oligonucleotide
cggggcgcgatgacagacgccattcagtat

SEQ ID NO: 75665 - DNA, 30 bp, Artificial Sequence
  Synthetic oligonucleotide
tgtaggagggtcatttggaatatagagtat

SEQ ID NO: 75666 - DNA, 30 bp, Artificial Sequence
  Synthetic oligonucleotide
taagaaaggggtaccgaccaataggagtat

SEQ ID NO: 75667 - DNA, 30 bp, Artificial Sequence
  Synthetic oligonucleotide
gcgtgcctcggtcaattataatgtgagtat

SEQ ID NO: 75668 - DNA, 30 bp, Artificial Sequence
  Synthetic oligonucleotide
gaaggcaagaatgagccaatttgatagtat

SEQ ID NO: 75669 - DNA, 30 bp, Artificial Sequence
  Synthetic oligonucleotide
cattacgtatagaggtagattaggtagtat

SEQ ID NO: 75670 - DNA, 30 bp, Artificial Sequence
  Synthetic oligonucleotide
taacaagtaccctcaggtgcgtacacgtat

SEQ ID NO: 75671 - DNA, 30 bp, Artificial Sequence
  Synthetic oligonucleotide
aagggagataagttggaataactgacgtat

SEQ ID NO: 75672 - DNA, 30 bp, Artificial Sequence
  Synthetic oligonucleotide
gcgttcaaccccacaaggagaaatacgtat

SEQ ID NO: 75673 - DNA, 30 bp, Artificial Sequence
  Synthetic oligonucleotide
tgatagaacgaggtgcgatgccgaccgtat

SEQ ID NO: 75674 - DNA, 30 bp, Artificial Sequence
  Synthetic oligonucleotide
tggtgactacgagtagcactgcgaccgtat

SEQ ID NO: 75675 - DNA, 30 bp, Artificial Sequence
  Synthetic oligonucleotide
cgttggggcttcagtcgagcaaaatcgtat

SEQ ID NO: 75676 - DNA, 30 bp, Artificial Sequence
  Synthetic oligonucleotide
ccgtaaagctcgattcgataatcaaggtat

SEQ ID NO: 75677 - DNA, 30 bp, Artificial Sequence
  Synthetic oligonucleotide
attgcggctcgggcttatatgagcaggtat

SEQ ID NO: 75678 - DNA, 30 bp, Artificial Sequence
  Synthetic oligonucleotide
cgcgatggaggctcggagtgccataggtat

SEQ ID NO: 75679 - DNA, 30 bp, Artificial Sequence
  Synthetic oligonucleotide
gatacgtcgcaatcaaagaagccttggtat

SEQ ID NO: 75680 - DNA, 30 bp, Artificial Sequence
  Synthetic oligonucleotide
agagtgaataaggatctgctgcgaatgtat

SEQ ID NO: 75681 - DNA, 30 bp, Artificial Sequence
  Synthetic oligonucleotide
cgcgcgacgcgggatgaggtagtgatgtat

SEQ ID NO: 75682 - DNA, 30 bp, Artificial Sequence
  Synthetic oligonucleotide
tcgccacgccgcccgggagaaagaaattat

SEQ ID NO: 75683 - DNA, 30 bp, Artificial Sequence
  Synthetic oligonucleotide
cgctcaccgctaggccttacacacaattat

SEQ ID NO: 75684 - DNA, 30 bp, Artificial Sequence
  Synthetic oligonucleotide
cgcataaaagtaggatacgtttcgaattat

SEQ ID NO: 75685 - DNA, 30 bp, Artificial Sequence
  Synthetic oligonucleotide
aatcgcgccggtcaaagtgccactaattat

SEQ ID NO: 75686 - DNA, 30 bp, Artificial Sequence
  Synthetic oligonucleotide
tcagggattcgcgcgtcgtaactgcattat

SEQ ID NO: 75687 - DNA, 30 bp, Artificial Sequence
  Synthetic oligonucleotide
acagggtgggtgtggggttgatacgattat

SEQ ID NO: 75688 - DNA, 30 bp, Artificial Sequence
  Synthetic oligonucleotide
acaggatccgttaccgacacacagacttat

SEQ ID NO: 75689 - DNA, 30 bp, Artificial Sequence
  Synthetic oligonucleotide
tggctagagaggacgctgttagagggttat

SEQ ID NO: 75690 - DNA, 30 bp, Artificial Sequence
  Synthetic oligonucleotide
caggtcctcagaggaggagagcggtgttat

SEQ ID NO: 75691 - DNA, 30 bp, Artificial Sequence
  Synthetic oligonucleotide
atcgggctaagaatggcaggcaacctttat

SEQ ID NO: 75692 - DNA, 30 bp, Artificial Sequence
  Synthetic oligonucleotide
ggggcacatggacttgcatcttcggtttat

SEQ ID NO: 75693 - DNA, 30 bp, Artificial Sequence
  Synthetic oligonucleotide
tagtggatgacggaggacagtagcttttat

SEQ ID NO: 75694 - DNA, 30 bp, Artificial Sequence
  Synthetic oligonucleotide
aagatgggtaaacacttcatgtagcaaact

SEQ ID NO: 75695 - DNA, 30 bp, Artificial Sequence
  Synthetic oligonucleotide
aattgggcacaacaggtggaactgcaaact

SEQ ID NO: 75696 - DNA, 30 bp, Artificial Sequence
  Synthetic oligonucleotide
cggttaaacgcgaatgctaagcgtcaaact

SEQ ID NO: 75697 - DNA, 30 bp, Artificial Sequence
  Synthetic oligonucleotide
ttacggagtatatacgatacgagggaaact

SEQ ID NO: 75698 - DNA, 30 bp, Artificial Sequence
  Synthetic oligonucleotide
gtgatattaaagggtttggtatcataaact

SEQ ID NO: 75699 - DNA, 30 bp, Artificial Sequence
  Synthetic oligonucleotide
atgcttgagacattgatgggcacaacaact

SEQ ID NO: 75700 - DNA, 30 bp, Artificial Sequence
  Synthetic oligonucleotide
aaggtaggcatgcaccataactccacaact

SEQ ID NO: 75701 - DNA, 30 bp, Artificial Sequence
  Synthetic oligonucleotide
tcgtgataagcgaggtagcggcatacaact

SEQ ID NO: 75702 - DNA, 30 bp, Artificial Sequence
  Synthetic oligonucleotide
cacatcggtaatcctactagattgccaact

SEQ ID NO: 75703 - DNA, 30 bp, Artificial Sequence
  Synthetic oligonucleotide
acttgccgacataacgcctaccaagcaact

SEQ ID NO: 75704 - DNA, 30 bp, Artificial Sequence
  Synthetic oligonucleotide
gtggaaaagaacgccggtacttatgcaact

SEQ ID NO: 75705 - DNA, 30 bp, Artificial Sequence
  Synthetic oligonucleotide
caacgaagggtaatagtatgtaccagaact

SEQ ID NO: 75706 - DNA, 30 bp, Artificial Sequence
  Synthetic oligonucleotide
taggacacgtattgagctaaaaaacgaact

SEQ ID NO: 75707 - DNA, 30 bp, Artificial Sequence
  Synthetic oligonucleotide
cataggacgatcctactagaaaggggaact

SEQ ID NO: 75708 - DNA, 30 bp, Artificial Sequence
  Synthetic oligonucleotide
ctgggtcaaagaccagtgtcatgatgaact

SEQ ID NO: 75709 - DNA, 30 bp, Artificial Sequence
  Synthetic oligonucleotide
gtacgaagtaggccaagtactgggtgaact

SEQ ID NO: 75710 - DNA, 30 bp, Artificial Sequence
  Synthetic oligonucleotide
ttggtcggtgggagcacagtcctgataact

SEQ ID NO: 75711 - DNA, 30 bp, Artificial Sequence
  Synthetic oligonucleotide
gtcaggtcgtgagtggagatccaattaact

SEQ ID NO: 75712 - DNA, 30 bp, Artificial Sequence
  Synthetic oligonucleotide
agcgtgcttagggacgccgcgtaccacact

SEQ ID NO: 75713 - DNA, 30 bp, Artificial Sequence
  Synthetic oligonucleotide
tacacatcgtcacatagcagttgcgacact

SEQ ID NO: 75714 - DNA, 30 bp, Artificial Sequence
  Synthetic oligonucleotide
ttggattcgcggtagaataagggagccact

SEQ ID NO: 75715 - DNA, 30 bp, Artificial Sequence
  Synthetic oligonucleotide
ataccgagattacaataaacatcatccact

SEQ ID NO: 75716 - DNA, 30 bp, Artificial Sequence
  Synthetic oligonucleotide
ggtcgtgtcgtatcgagacttttctccact

SEQ ID NO: 75717 - DNA, 30 bp, Artificial Sequence
  Synthetic oligonucleotide
acataagccgcgacatttcgcgaaggcact

SEQ ID NO: 75718 - DNA, 30 bp, Artificial Sequence
  Synthetic oligonucleotide
ttcatccaggtatgttccgccggcatcact

SEQ ID NO: 75719 - DNA, 30 bp, Artificial Sequence
  Synthetic oligonucleotide
cggggggcacattacgaaacctagatcact

SEQ ID NO: 75720 - DNA, 30 bp, Artificial Sequence
  Synthetic oligonucleotide
tcaacgtgcccagtgtagatactagtcact

SEQ ID NO: 75721 - DNA, 30 bp, Artificial Sequence
  Synthetic oligonucleotide
accattggtagatcttaaaaatgacagact

SEQ ID NO: 75722 - DNA, 30 bp, Artificial Sequence
  Synthetic oligonucleotide
cctcgtggacgagcacccatcaaccagact

SEQ ID NO: 75723 - DNA, 30 bp, Artificial Sequence
  Synthetic oligonucleotide
agagcaggaagaaatgccagattgcagact

SEQ ID NO: 75724 - DNA, 30 bp, Artificial Sequence
  Synthetic oligonucleotide
cgacaaagatgccactttgctggtcagact

SEQ ID NO: 75725 - DNA, 30 bp, Artificial Sequence
  Synthetic oligonucleotide
agcacaataccacggattgggagagagact

SEQ ID NO: 75726 - DNA, 30 bp, Artificial Sequence
  Synthetic oligonucleotide
cgtggctatgttaatgtgtcgtctgagact

SEQ ID NO: 75727 - DNA, 30 bp, Artificial Sequence
  Synthetic oligonucleotide
ccattcaaacatacacttcgcaacccgact

SEQ ID NO: 75728 - DNA, 30 bp, Artificial Sequence
  Synthetic oligonucleotide
ctaacagacataagtgagattcgcccgact

SEQ ID NO: 75729 - DNA, 30 bp, Artificial Sequence
  Synthetic oligonucleotide
ccagaggacatatgtaagagccctccgact

SEQ ID NO: 75730 - DNA, 30 bp, Artificial Sequence
  Synthetic oligonucleotide
aaagggcccaacttgtgggagccggcgact

SEQ ID NO: 75731 - DNA, 30 bp, Artificial Sequence
  Synthetic oligonucleotide
atgataagttctcagacagcgtcgtcgact

SEQ ID NO: 75732 - DNA, 30 bp, Artificial Sequence
  Synthetic oligonucleotide
acaatgccgatagaaacttcagggtcgact

SEQ ID NO: 75733 - DNA, 30 bp, Artificial Sequence
  Synthetic oligonucleotide
cggtaagtctagatagctacttggaggact

SEQ ID NO: 75734 - DNA, 30 bp, Artificial Sequence
  Synthetic oligonucleotide
gcgttgtctagagttacgtttagtaggact

SEQ ID NO: 75735 - DNA, 30 bp, Artificial Sequence
  Synthetic oligonucleotide
cacgtccatacttaaaagctcggtaggact

SEQ ID NO: 75736 - DNA, 30 bp, Artificial Sequence
  Synthetic oligonucleotide
gcgtacaggtggaaacagtcttcgcggact

SEQ ID NO: 75737 - DNA, 30 bp, Artificial Sequence
  Synthetic oligonucleotide
tctggggtaatgccgtaatattcagggact

SEQ ID NO: 75738 - DNA, 30 bp, Artificial Sequence
  Synthetic oligonucleotide
gtacaacgctggggaccaagtaatgggact

SEQ ID NO: 75739 - DNA, 30 bp, Artificial Sequence
  Synthetic oligonucleotide
cgctcaaccgaaccggagttgaaatggact

SEQ ID NO: 75740 - DNA, 30 bp, Artificial Sequence
  Synthetic oligonucleotide
tcgccctatagctcgaaaaaccggtggact

SEQ ID NO: 75741 - DNA, 30 bp, Artificial Sequence
  Synthetic oligonucleotide
gcgggcgaataccgtgtccaatggtggact

SEQ ID NO: 75742 - DNA, 30 bp, Artificial Sequence
  Synthetic oligonucleotide
ggcagtgcgagcaaagtatcgaagatgact

SEQ ID NO: 75743 - DNA, 30 bp, Artificial Sequence
  Synthetic oligonucleotide
tgaggggataacgttctaacatagctgact

SEQ ID NO: 75744 - DNA, 30 bp, Artificial Sequence
  Synthetic oligonucleotide
cggaggccgtaccccgatctagtcgtgact

SEQ ID NO: 75745 - DNA, 30 bp, Artificial Sequence
  Synthetic oligonucleotide
tgtcaacaaaaagcttcaaacggggtgact

SEQ ID NO: 75746 - DNA, 30 bp, Artificial Sequence
  Synthetic oligonucleotide
tgaggggctcatgcaccgctgaatgtgact

SEQ ID NO: 75747 - DNA, 30 bp, Artificial Sequence
  Synthetic oligonucleotide
tcacaaaccgtcgagatacgcgataatact

SEQ ID NO: 75748 - DNA, 30 bp, Artificial Sequence
  Synthetic oligonucleotide
actagccagaagtggtatctgtgacatact

SEQ ID NO: 75749 - DNA, 30 bp, Artificial Sequence
  Synthetic oligonucleotide
caatccaattaccagggtacagtacatact

SEQ ID NO: 75750 - DNA, 30 bp, Artificial Sequence
  Synthetic oligonucleotide
ttagaagaaacgaaagatacatcgactact

SEQ ID NO: 75751 - DNA, 30 bp, Artificial Sequence
  Synthetic oligonucleotide
gcagatgcgacatgtcactactagcgtact

SEQ ID NO: 75752 - DNA, 30 bp, Artificial Sequence
  Synthetic oligonucleotide
tggtaggggcaccggtttgattagcgtact

SEQ ID NO: 75753 - DNA, 30 bp, Artificial Sequence
  Synthetic oligonucleotide
atgccagagctaagggtcaaaaccggtact

SEQ ID NO: 75754 - DNA, 30 bp, Artificial Sequence
  Synthetic oligonucleotide
gatcaaacgataactacaagtactggtact

SEQ ID NO: 75755 - DNA, 30 bp, Artificial Sequence
  Synthetic oligonucleotide
gtgtggctatactaagtagggcgtggtact

SEQ ID NO: 75756 - DNA, 30 bp, Artificial Sequence
  Synthetic oligonucleotide
tagcaactcggtagtgacctggactgtact

SEQ ID NO: 75757 - DNA, 30 bp, Artificial Sequence
  Synthetic oligonucleotide
ggacgacattcaagcgaaacgccctgtact

SEQ ID NO: 75758 - DNA, 30 bp, Artificial Sequence
  Synthetic oligonucleotide
ccgcaggcgcgatcaaaaacaggctgtact

SEQ ID NO: 75759 - DNA, 30 bp, Artificial Sequence
  Synthetic oligonucleotide
ctcgggacggcaaggttgcgaatacttact

SEQ ID NO: 75760 - DNA, 30 bp, Artificial Sequence
  Synthetic oligonucleotide
cgatcctagaacgtcggatgtcgcgttact

SEQ ID NO: 75761 - DNA, 30 bp, Artificial Sequence
  Synthetic oligonucleotide
ctatgacctgttcccaacaagcaaaaacct

SEQ ID NO: 75762 - DNA, 31 bp, Artificial Sequence
  Synthetic oligonucleotide
accggacattctgtaacatagtcccaaacct

SEQ ID NO: 75763 - DNA, 30 bp, Artificial Sequence
  Synthetic oligonucleotide
ctaaaaaaaattcagggtaagagggaacct

SEQ ID NO: 75764 - DNA, 30 bp, Artificial Sequence
  Synthetic oligonucleotide
agacatcggtcaaccaaggaagttgaacct

SEQ ID NO: 75765 - DNA, 30 bp, Artificial Sequence
  Synthetic oligonucleotide
cggacgtatgaaccgaagttgtccacacct

SEQ ID NO: 75766 - DNA, 30 bp, Artificial Sequence
  Synthetic oligonucleotide
tgaagtcagccgttaccagcaatcccacct

SEQ ID NO: 75767 - DNA, 30 bp, Artificial Sequence
  Synthetic oligonucleotide
cgaaatcattcatagctcacggatccacct

SEQ ID NO: 75768 - DNA, 30 bp, Artificial Sequence
  Synthetic oligonucleotide
agtcgcatgcgctagtaatccttagcacct

SEQ ID NO: 75769 - DNA, 30 bp, Artificial Sequence
  Synthetic oligonucleotide
gggagggcaggcccttagtccgagtcacct

SEQ ID NO: 75770 - DNA, 30 bp, Artificial Sequence
  Synthetic oligonucleotide
acacatcagtgtgagctactcacaggacct

SEQ ID NO: 75771 - DNA, 30 bp, Artificial Sequence
  Synthetic oligonucleotide
atgagtcgtgtgtcacggcgggagtgacct

SEQ ID NO: 75772 - DNA, 30 bp, Artificial Sequence
  Synthetic oligonucleotide
cgacgcgtcaaccaactaaagcattgacct

SEQ ID NO: 75773 - DNA, 30 bp, Artificial Sequence
  Synthetic oligonucleotide
ctgagcgaaccacaggaggaacaactacct

SEQ ID NO: 75774 - DNA, 30 bp, Artificial Sequence
  Synthetic oligonucleotide
cccgtaatggaagtgaaaaggtgactacct

SEQ ID NO: 75775 - DNA, 30 bp, Artificial Sequence
  Synthetic oligonucleotide
cattagctgaaggatgtgataaagctacct

SEQ ID NO: 75776 - DNA, 30 bp, Artificial Sequence
  Synthetic oligonucleotide
tctgacgatactaacgatgcgtacgtacct

SEQ ID NO: 75777 - DNA, 30 bp, Artificial Sequence
  Synthetic oligonucleotide
cggcagtccgaattcagttgaatggtacct

SEQ ID NO: 75778 - DNA, 30 bp, Artificial Sequence
  Synthetic oligonucleotide
tcctgcgaactgtatagtagagtattacct

SEQ ID NO: 75779 - DNA, 30 bp, Artificial Sequence
  Synthetic oligonucleotide
cgtgtcaaactaggaaggagtatgaaccct

SEQ ID NO: 75780 - DNA, 30 bp, Artificial Sequence
  Synthetic oligonucleotide
aaagctgagatgtccaggcgtagggaccct

SEQ ID NO: 75781 - DNA, 30 bp, Artificial Sequence
  Synthetic oligonucleotide
cggcgagttccgctgtcgaggtgtccccct

SEQ ID NO: 75782 - DNA, 30 bp, Artificial Sequence
  Synthetic oligonucleotide
agaacaaggctgaaaatagtgaacgcccct

SEQ ID NO: 75783 - DNA, 30 bp, Artificial Sequence
  Synthetic oligonucleotide
tcgcaaagccacaccgcgtgaagtgcccct

SEQ ID NO: 75784 - DNA, 30 bp, Artificial Sequence
  Synthetic oligonucleotide
gattgtcaaagaagtgcatcgacctcccct

SEQ ID NO: 75785 - DNA, 30 bp, Artificial Sequence
  Synthetic oligonucleotide
tcaaacaaggcaaatgcgcggagggtccct

SEQ ID NO: 75786 - DNA, 30 bp, Artificial Sequence
  Synthetic oligonucleotide
gagatcacaaagttaacttatgaatagcct

SEQ ID NO: 75787 - DNA, 30 bp, Artificial Sequence
  Synthetic oligonucleotide
gtcacccaacgactggtgcgaaacaggcct

SEQ ID NO: 75788 - DNA, 30 bp, Artificial Sequence
  Synthetic oligonucleotide
cgtgtccgcggaatcgtcaccctcaggcct

SEQ ID NO: 75789 - DNA, 30 bp, Artificial Sequence
  Synthetic oligonucleotide
tacggaggggggcgacgtattttacggcct

SEQ ID NO: 75790 - DNA, 30 bp, Artificial Sequence
  Synthetic oligonucleotide
ggcatatcgaaaacttggctccagcggcct

SEQ ID NO: 75791 - DNA, 30 bp, Artificial Sequence
  Synthetic oligonucleotide
tgaggtgtcttacgtctgtcggctcggcct

SEQ ID NO: 75792 - DNA, 30 bp, Artificial Sequence
  Synthetic oligonucleotide
cgtagtttgcacgaatggaaacactggcct

SEQ ID NO: 75793 - DNA, 30 bp, Artificial Sequence
  Synthetic oligonucleotide
atgatacgtgcgagacataagtacttgcct

SEQ ID NO: 75794 - DNA, 30 bp, Artificial Sequence
  Synthetic oligonucleotide
cggcttgaaccgcgaaacatttaaaatcct

SEQ ID NO: 75795 - DNA, 30 bp, Artificial Sequence
  Synthetic oligonucleotide
caccatcggaatgacaaattaaaacatcct

SEQ ID NO: 75796 - DNA, 30 bp, Artificial Sequence
  Synthetic oligonucleotide
acattcgggtttagggaaacgaaagatcct

SEQ ID NO: 75797 - DNA, 30 bp, Artificial Sequence
  Synthetic oligonucleotide
taaaaaagaatggcccacctggcacctcct

SEQ ID NO: 75798 - DNA, 30 bp, Artificial Sequence
  Synthetic oligonucleotide
tggttaataacctagggcgcgaaacgtcct

SEQ ID NO: 75799 - DNA, 30 bp, Artificial Sequence
  Synthetic oligonucleotide
gcttcacaatgaacaaggcagcagcttcct

SEQ ID NO: 75800 - DNA, 30 bp, Artificial Sequence
  Synthetic oligonucleotide
cggttcgagtggcattcaggacgagttcct

SEQ ID NO: 75801 - DNA, 30 bp, Artificial Sequence
  Synthetic oligonucleotide
gacgcgtcaaaacgaagagggtcgaaagct

SEQ ID NO: 75802 - DNA, 30 bp, Artificial Sequence
  Synthetic oligonucleotide
acttcctatgaacaccgtcaaaaacaagct

SEQ ID NO: 75803 - DNA, 30 bp, Artificial Sequence
  Synthetic oligonucleotide
actggtacgatccctgtgtagccccaagct

SEQ ID NO: 75804 - DNA, 30 bp, Artificial Sequence
  Synthetic oligonucleotide
cgacagggtacaactcccgcctcaacagct

SEQ ID NO: 75805 - DNA, 30 bp, Artificial Sequence
  Synthetic oligonucleotide
actgagcagaaatcgatgcgcggcacagct

SEQ ID NO: 75806 - DNA, 30 bp, Artificial Sequence
  Synthetic oligonucleotide
gggctcgggacaattcagaagatgccagct

SEQ ID NO: 75807 - DNA, 30 bp, Artificial Sequence
  Synthetic oligonucleotide
gggtactcgaccatcagcgctagggcagct

SEQ ID NO: 75808 - DNA, 30 bp, Artificial Sequence
  Synthetic oligonucleotide
gagtagggaatttgcccacaacagtcagct

SEQ ID NO: 75809 - DNA, 30 bp, Artificial Sequence
  Synthetic oligonucleotide
atcgacccatgtgcattgtagcaaagagct

SEQ ID NO: 75810 - DNA, 30 bp, Artificial Sequence
  Synthetic oligonucleotide
cgaagggttatcgagcgtaggataagagct

SEQ ID NO: 75811 - DNA, 30 bp, Artificial Sequence
  Synthetic oligonucleotide
agcaaataataagtgtgcacttgctgagct

SEQ ID NO: 75812 - DNA, 30 bp, Artificial Sequence
  Synthetic oligonucleotide
atgcagtgggccgcgcattgatatctagct

SEQ ID NO: 75813 - DNA, 30 bp, Artificial Sequence
  Synthetic oligonucleotide
cacgcttgggaacgggataatacagtagct

SEQ ID NO: 75814 - DNA, 30 bp, Artificial Sequence
  Synthetic oligonucleotide
agatagttcaaggccagtcagaatgtagct

SEQ ID NO: 75815 - DNA, 30 bp, Artificial Sequence
  Synthetic oligonucleotide
tagggatgatcctcaaggagcgctgtagct

SEQ ID NO: 75816 - DNA, 30 bp, Artificial Sequence
  Synthetic oligonucleotide
cacccggtcatgaatctaaaaaacaacgct

SEQ ID NO: 75817 - DNA, 30 bp, Artificial Sequence
  Synthetic oligonucleotide
acaaccaattgttccagggtttagcacgct

SEQ ID NO: 75818 - DNA, 30 bp, Artificial Sequence
  Synthetic oligonucleotide
tccgtcaggtgcaaggctggcagtaccgct

SEQ ID NO: 75819 - DNA, 30 bp, Artificial Sequence
  Synthetic oligonucleotide
ggaaatccacccgaaccagccggacccgct

SEQ ID NO: 75820 - DNA, 29 bp, Artificial Sequence
  Synthetic oligonucleotide
ggcaatggtattgttgagagagaagcgct

SEQ ID NO: 75821 - DNA, 30 bp, Artificial Sequence
  Synthetic oligonucleotide
gcggggcgaggctctccgcagatcagcgct

SEQ ID NO: 75822 - DNA, 30 bp, Artificial Sequence
  Synthetic oligonucleotide
cgtcccccggggacggaataagtatgcgct

SEQ ID NO: 75823 - DNA, 30 bp, Artificial Sequence
  Synthetic oligonucleotide
tgctggatgtcgggtataagtgggtgcgct

SEQ ID NO: 75824 - DNA, 30 bp, Artificial Sequence
  Synthetic oligonucleotide
ccgaattccagttgcgtctaaaaactcgct

SEQ ID NO: 75825 - DNA, 30 bp, Artificial Sequence
  Synthetic oligonucleotide
agacatatgttttaacactatgagctcgct

SEQ ID NO: 75826 - DNA, 30 bp, Artificial Sequence
  Synthetic oligonucleotide
taagctgggccggaacgtcctcaaaaggct

SEQ ID NO: 75827 - DNA, 30 bp, Artificial Sequence
  Synthetic oligonucleotide
cgtcaggatgaactgaagattgcgaaggct

SEQ ID NO: 75828 - DNA, 30 bp, Artificial Sequence
  Synthetic oligonucleotide
tggagcgaacaggtcagccgtcaacaggct

SEQ ID NO: 75829 - DNA, 30 bp, Artificial Sequence
  Synthetic oligonucleotide
aagggcgagacgattcatcgtagccaggct

SEQ ID NO: 75830 - DNA, 30 bp, Artificial Sequence
  Synthetic oligonucleotide
accggaggactgatccacgcacaagaggct

SEQ ID NO: 75831 - DNA, 30 bp, Artificial Sequence
  Synthetic oligonucleotide
atgagtgatcctctgtaacaatactaggct

SEQ ID NO: 75832 - DNA, 31 bp, Artificial Sequence
  Synthetic oligonucleotide
cggaatcagcagacaacgctgacgttaggct

SEQ ID NO: 75833 - DNA, 30 bp, Artificial Sequence
  Synthetic oligonucleotide
tcagtggagggatccacagtagctccggct

SEQ ID NO: 75834 - DNA, 30 bp, Artificial Sequence
  Synthetic oligonucleotide
tcgtcaacatacacactgcgagaggcggct

SEQ ID NO: 75835 - DNA, 30 bp, Artificial Sequence
  Synthetic oligonucleotide
atatgcatgttcggtcacgccagggcggct

SEQ ID NO: 75836 - DNA, 30 bp, Artificial Sequence
  Synthetic oligonucleotide
gcgaacagggcattgagtttccgacgggct

SEQ ID NO: 75837 - DNA, 30 bp, Artificial Sequence
  Synthetic oligonucleotide
gactacaatcgtacggttggcatcgtggct

SEQ ID NO: 75838 - DNA, 30 bp, Artificial Sequence
  Synthetic oligonucleotide
gtggcacgagcaatctgacggtaggtggct

SEQ ID NO: 75839 - DNA, 30 bp, Artificial Sequence
  Synthetic oligonucleotide
acaatgtctaatcatttaaccaagcatgct

SEQ ID NO: 75840 - DNA, 30 bp, Artificial Sequence
  Synthetic oligonucleotide
taaatcgcgtagttagaatggaaagatgct

SEQ ID NO: 75841 - DNA, 30 bp, Artificial Sequence
  Synthetic oligonucleotide
tctcactcagtgggttaccggtgcgatgct

SEQ ID NO: 75842 - DNA, 30 bp, Artificial Sequence
  Synthetic oligonucleotide
catggagagagttctcaaaatgaggatgct

SEQ ID NO: 75843 - DNA, 30 bp, Artificial Sequence
  Synthetic oligonucleotide
tcaagtggcgaccgaaagcaggccactgct

SEQ ID NO: 75844 - DNA, 30 bp, Artificial Sequence
  Synthetic oligonucleotide
cacgtgccgagaataacacctcgcactgct

SEQ ID NO: 75845 - DNA, 30 bp, Artificial Sequence
  Synthetic oligonucleotide
aggcaaataaaactcttacaggatactgct

SEQ ID NO: 75846 - DNA, 30 bp, Artificial Sequence
  Synthetic oligonucleotide
cgggggttcagaaacagtccggggcctgct

SEQ ID NO: 75847 - DNA, 30 bp, Artificial Sequence
  Synthetic oligonucleotide
tccggtgccaacaaggatgcggtgagtgct

SEQ ID NO: 75848 - DNA, 30 bp, Artificial Sequence
  Synthetic oligonucleotide
ggtgagggaccaaacctattgttacgtgct

SEQ ID NO: 75849 - DNA, 30 bp, Artificial Sequence
  Synthetic oligonucleotide
gagaatatccacatacgacctggaggtgct

SEQ ID NO: 75850 - DNA, 30 bp, Artificial Sequence
  Synthetic oligonucleotide
aagtcacaaacagccagatagtacggtgct

SEQ ID NO: 75851 - DNA, 30 bp, Artificial Sequence
  Synthetic oligonucleotide
acatggcaaatatctgcggagttcggtgct

SEQ ID NO: 75852 - DNA, 30 bp, Artificial Sequence
  Synthetic oligonucleotide
gctacggtgggttagggaaaaaatcttgct

SEQ ID NO: 75853 - DNA, 30 bp, Artificial Sequence
  Synthetic oligonucleotide
ggaggcaataaagcgtccaatcacgttgct

SEQ ID NO: 75854 - DNA, 30 bp, Artificial Sequence
  Synthetic oligonucleotide
agaagttaccgagtgccaaggcgatttgct

SEQ ID NO: 75855 - DNA, 30 bp, Artificial Sequence
  Synthetic oligonucleotide
ggctcaatctaggcgatatagtcggaatct

SEQ ID NO: 75856 - DNA, 30 bp, Artificial Sequence
  Synthetic oligonucleotide
tcatcgtcgtagggaggtattaatgaatct

SEQ ID NO: 75857 - DNA, 30 bp, Artificial Sequence
  Synthetic oligonucleotide
tggacaggtgggtgggttagggactaatct

SEQ ID NO: 75858 - DNA, 30 bp, Artificial Sequence
  Synthetic oligonucleotide
ttagaatcctgcttacgaggtgtaccatct

SEQ ID NO: 75859 - DNA, 30 bp, Artificial Sequence
  Synthetic oligonucleotide
gacggactgagagttgagggtaaagcatct

SEQ ID NO: 75860 - DNA, 30 bp, Artificial Sequence
  Synthetic oligonucleotide
taaacgacagacctacacactctgagatct

SEQ ID NO: 75861 - DNA, 30 bp, Artificial Sequence
  Synthetic oligonucleotide
caacctaataaatggcctaaatcccgatct

SEQ ID NO: 75862 - DNA, 30 bp, Artificial Sequence
  Synthetic oligonucleotide
gcacgtgcggctcactaggactcccgatct

SEQ ID NO: 75863 - DNA, 30 bp, Artificial Sequence
  Synthetic oligonucleotide
gataactgggccgcgacagaactgcgatct

SEQ ID NO: 75864 - DNA, 30 bp, Artificial Sequence
  Synthetic oligonucleotide
ccccagattaattgggtagcagtgcgatct

SEQ ID NO: 75865 - DNA, 30 bp, Artificial Sequence
  Synthetic oligonucleotide
tcctgttatacgaataaaccgattcgatct

SEQ ID NO: 75866 - DNA, 30 bp, Artificial Sequence
  Synthetic oligonucleotide
ccaagagcacgatgtgagggtcaaggatct

SEQ ID NO: 75867 - DNA, 30 bp, Artificial Sequence
  Synthetic oligonucleotide
caaagtcgttaagtgggccatggaggatct

SEQ ID NO: 75868 - DNA, 30 bp, Artificial Sequence
  Synthetic oligonucleotide
cgagcgcacggggtacaagtcagtggatct

SEQ ID NO: 75869 - DNA, 30 bp, Artificial Sequence
  Synthetic oligonucleotide
ctaggtgcaagcacacttcaagtcctatct

SEQ ID NO: 75870 - DNA, 30 bp, Artificial Sequence
  Synthetic oligonucleotide
taggtagcagtcggtgaatcgatagtatct

SEQ ID NO: 75871 - DNA, 30 bp, Artificial Sequence
  Synthetic oligonucleotide
agtccgcaaatgcgcgaaggaatcgtatct

SEQ ID NO: 75872 - DNA, 30 bp, Artificial Sequence
  Synthetic oligonucleotide
ttggcggaccatctaacgcgaacttactct

SEQ ID NO: 75873 - DNA, 30 bp, Artificial Sequence
  Synthetic oligonucleotide
gggagagcggacgagacgaacaaaacctct

SEQ ID NO: 75874 - DNA, 30 bp, Artificial Sequence
  Synthetic oligonucleotide
ggtaacagggggattcattgaacaagctct

SEQ ID NO: 75875 - DNA, 30 bp, Artificial Sequence
  Synthetic oligonucleotide
cggaacgcttagggcaaaaaaacaggctct

SEQ ID NO: 75876 - DNA, 30 bp, Artificial Sequence
  Synthetic oligonucleotide
ccaaacgtgatcggtctgaataaaaagtct

SEQ ID NO: 75877 - DNA, 30 bp, Artificial Sequence
  Synthetic oligonucleotide
ggtcgggggcgtatcgtcgggttgaagtct

SEQ ID NO: 75878 - DNA, 30 bp, Artificial Sequence
  Synthetic oligonucleotide
gatactctcgaattcccaacaaaagagtct

SEQ ID NO: 75879 - DNA, 30 bp, Artificial Sequence
  Synthetic oligonucleotide
acaggcgttgagacatacttagaggagtct

SEQ ID NO: 75880 - DNA, 30 bp, Artificial Sequence
  Synthetic oligonucleotide
gtacggaagtgaaatccattgcatgagtct

SEQ ID NO: 75881 - DNA, 30 bp, Artificial Sequence
  Synthetic oligonucleotide
gcgatatcaccttgggccatgtagtagtct

SEQ ID NO: 75882 - DNA, 30 bp, Artificial Sequence
  Synthetic oligonucleotide
acgccaacttatctcccagaaaaaacgtct

SEQ ID NO: 75883 - DNA, 30 bp, Artificial Sequence
  Synthetic oligonucleotide
tacgcgtaacgataggactatgcgacgtct

SEQ ID NO: 75884 - DNA, 30 bp, Artificial Sequence
  Synthetic oligonucleotide
cgggagacggcacctttgcggaccccgtct

SEQ ID NO: 75885 - DNA, 30 bp, Artificial Sequence
  Synthetic oligonucleotide
acgtgacatggaatggtgcgcgcacggtct

SEQ ID NO: 75886 - DNA, 30 bp, Artificial Sequence
  Synthetic oligonucleotide
tcagatcccctgtggcgagttagatggtct

SEQ ID NO: 75887 - DNA, 30 bp, Artificial Sequence
  Synthetic oligonucleotide
gggggaacttcaaagcaattagattggtct

SEQ ID NO: 75888 - DNA, 30 bp, Artificial Sequence
  Synthetic oligonucleotide
ccatggtgccgacaacgcaagggagtgtct

SEQ ID NO: 75889 - DNA, 30 bp, Artificial Sequence
  Synthetic oligonucleotide
taagacagtctaatacactcctccgtgtct

SEQ ID NO: 75890 - DNA, 30 bp, Artificial Sequence
  Synthetic oligonucleotide
tagggatgggagaagaggcctacaaattct

SEQ ID NO: 75891 - DNA, 30 bp, Artificial Sequence
  Synthetic oligonucleotide
cgacaacgaatccactatgctcacaattct

SEQ ID NO: 75892 - DNA, 30 bp, Artificial Sequence
  Synthetic oligonucleotide
ggaagctggccaaactattgtaagcattct

SEQ ID NO: 75893 - DNA, 30 bp, Artificial Sequence
  Synthetic oligonucleotide
aaacgaactagcggattgaggcgatattct

SEQ ID NO: 75894 - DNA, 30 bp, Artificial Sequence
  Synthetic oligonucleotide
agcattggaagacaatatgcgaactattct

SEQ ID NO: 75895 - DNA, 30 bp, Artificial Sequence
  Synthetic oligonucleotide
gggtaggaacaactcgcgtgaataacttct

SEQ ID NO: 75896 - DNA, 30 bp, Artificial Sequence
  Synthetic oligonucleotide
aagggtttccgaaacacaagtgatggttct

SEQ ID NO: 75897 - DNA, 30 bp, Artificial Sequence
  Synthetic oligonucleotide
aggggagggaattttattatagtgtgttct

SEQ ID NO: 75898 - DNA, 30 bp, Artificial Sequence
  Synthetic oligonucleotide
cggtgcgaaaccagggagccctaacaaagt

SEQ ID NO: 75899 - DNA, 30 bp, Artificial Sequence
  Synthetic oligonucleotide
agagcgatgaaacctgtgcaaaaagaaagt

SEQ ID NO: 75900 - DNA, 30 bp, Artificial Sequence
  Synthetic oligonucleotide
agttgatgaagttgagtccgcgacgaaagt

SEQ ID NO: 75901 - DNA, 30 bp, Artificial Sequence
  Synthetic oligonucleotide
caggatacacaatggacaatggtataaagt

SEQ ID NO: 75902 - DNA, 30 bp, Artificial Sequence
  Synthetic oligonucleotide
agatgaaaggagaacgctcggctaacaagt

SEQ ID NO: 75903 - DNA, 30 bp, Artificial Sequence
  Synthetic oligonucleotide
ggtgcgtataaatcttgattagggccaagt

SEQ ID NO: 75904 - DNA, 30 bp, Artificial Sequence
  Synthetic oligonucleotide
acattataactgggagcagtagaagcaagt

SEQ ID NO: 75905 - DNA, 30 bp, Artificial Sequence
  Synthetic oligonucleotide
gtcacgtagtcggagtgaattcgagcaagt

SEQ ID NO: 75906 - DNA, 30 bp, Artificial Sequence
  Synthetic oligonucleotide
cgttgatcacgtcacaatagttgctcaagt

SEQ ID NO: 75907 - DNA, 30 bp, Artificial Sequence
  Synthetic oligonucleotide
gtggtcaacgatcttgacacggccagaagt

SEQ ID NO: 75908 - DNA, 30 bp, Artificial Sequence
  Synthetic oligonucleotide
ctcgagaggtaccaatagtaatcccgaagt

SEQ ID NO: 75909 - DNA, 30 bp, Artificial Sequence
  Synthetic oligonucleotide
agggtcgattctctacccgatcaatgaagt

SEQ ID NO: 75910 - DNA, 30 bp, Artificial Sequence
  Synthetic oligonucleotide
caggatggcgtaaacacatgaaacataagt

SEQ ID NO: 75911 - DNA, 30 bp, Artificial Sequence
  Synthetic oligonucleotide
cgtcacgtcaagttgtcggggtgtctaagt

SEQ ID NO: 75912 - DNA, 30 bp, Artificial Sequence
  Synthetic oligonucleotide
aggcttagagtagaataagcttctgtaagt

SEQ ID NO: 75913 - DNA, 30 bp, Artificial Sequence
  Synthetic oligonucleotide
aagtaaactataatacacggcccaaacagt

SEQ ID NO: 75914 - DNA, 30 bp, Artificial Sequence
  Synthetic oligonucleotide
tggagatgctgacttaagctaatgaacagt

SEQ ID NO: 75915 - DNA, 30 bp, Artificial Sequence
  Synthetic oligonucleotide
cggtacacgcaacatggtggagtgcacagt

SEQ ID NO: 75916 - DNA, 30 bp, Artificial Sequence
  Synthetic oligonucleotide
ctcaaaaggagcacggcttaggtcgacagt

SEQ ID NO: 75917 - DNA, 30 bp, Artificial Sequence
  Synthetic oligonucleotide
caagaccagatcacggagccattcgacagt

SEQ ID NO: 75918 - DNA, 30 bp, Artificial Sequence
  Synthetic oligonucleotide
ggggactcaatgtacgtggatccggacagt

SEQ ID NO: 75919 - DNA, 30 bp, Artificial Sequence
  Synthetic oligonucleotide
acacctaagagggtttcccaagctgacagt

SEQ ID NO: 75920 - DNA, 30 bp, Artificial Sequence
  Synthetic oligonucleotide
cagcgagtaccgcgagcgcgcgaaaccagt

SEQ ID NO: 75921 - DNA, 30 bp, Artificial Sequence
  Synthetic oligonucleotide
aacatccaaccagattttacctaaaccagt

SEQ ID NO: 75922 - DNA, 30 bp, Artificial Sequence
  Synthetic oligonucleotide
gggcagacgggcggtagcattcagaccagt

SEQ ID NO: 75923 - DNA, 30 bp, Artificial Sequence
  Synthetic oligonucleotide
cactcagagatatcggtccacattaccagt

SEQ ID NO: 75924 - DNA, 30 bp, Artificial Sequence
  Synthetic oligonucleotide
taagagggctcagacgagaccgaagccagt

SEQ ID NO: 75925 - DNA, 30 bp, Artificial Sequence
  Synthetic oligonucleotide
tgacaatgcttgtagtggctaggatccagt

SEQ ID NO: 75926 - DNA, 30 bp, Artificial Sequence
  Synthetic oligonucleotide
tggaaatcgtaggggggtgcggagtccagt

SEQ ID NO: 75927 - DNA, 30 bp, Artificial Sequence
  Synthetic oligonucleotide
aaatgaggtacaaactcgtaataatgcagt

SEQ ID NO: 75928 - DNA, 30 bp, Artificial Sequence
  Synthetic oligonucleotide
aaggaaacgcgcggaggcggtacatgcagt

SEQ ID NO: 75929 - DNA, 30 bp, Artificial Sequence
  Synthetic oligonucleotide
ctcgaacttaaaatggaaagagcaatcagt

SEQ ID NO: 75930 - DNA, 30 bp, Artificial Sequence
  Synthetic oligonucleotide
taaaggcacatgaagtaaaacataatcagt

SEQ ID NO: 75931 - DNA, 30 bp, Artificial Sequence
  Synthetic oligonucleotide
tatcaaaacatcacgccacagtgcatcagt

SEQ ID NO: 75932 - DNA, 30 bp, Artificial Sequence
  Synthetic oligonucleotide
agctcttctaaaaacggcgaggcgatcagt

SEQ ID NO: 75933 - DNA, 30 bp, Artificial Sequence
  Synthetic oligonucleotide
ctcgatcaccagcttagaagagcagtcagt

SEQ ID NO: 75934 - DNA, 30 bp, Artificial Sequence
  Synthetic oligonucleotide
atggaagtcgagtacctcgggctagtcagt

SEQ ID NO: 75935 - DNA, 30 bp, Artificial Sequence
  Synthetic oligonucleotide
agcgtgagtaactctgaaaacgcggtcagt

SEQ ID NO: 75936 - DNA, 30 bp, Artificial Sequence
  Synthetic oligonucleotide
attattggaccatagtgcggtcgaaagagt

SEQ ID NO: 75937 - DNA, 30 bp, Artificial Sequence
  Synthetic oligonucleotide
tttatcaggagtccgatcctagtgaagagt

SEQ ID NO: 75938 - DNA, 30 bp, Artificial Sequence
  Synthetic oligonucleotide
tatctgagcgtgggtacgttttgacagagt

SEQ ID NO: 75939 - DNA, 30 bp, Artificial Sequence
  Synthetic oligonucleotide
ggaggatatttgcccatgccgtcatagagt

SEQ ID NO: 75940 - DNA, 30 bp, Artificial Sequence
  Synthetic oligonucleotide
acgacagagttggctgttagcttatagagt

SEQ ID NO: 75941 - DNA, 30 bp, Artificial Sequence
  Synthetic oligonucleotide
aagagtaaatgcaatcggggtaagtagagt

SEQ ID NO: 75942 - DNA, 30 bp, Artificial Sequence
  Synthetic oligonucleotide
cagaagcccgaggcgcatcgatcaacgagt

SEQ ID NO: 75943 - DNA, 30 bp, Artificial Sequence
  Synthetic oligonucleotide
gttccaggagggcaaagctaccacacgagt

SEQ ID NO: 75944 - DNA, 30 bp, Artificial Sequence
  Synthetic oligonucleotide
cgatcccgaatgtgaagggtagttacgagt

SEQ ID NO: 75945 - DNA, 30 bp, Artificial Sequence
  Synthetic oligonucleotide
cagtgattggagcagatcagtaagccgagt

SEQ ID NO: 75946 - DNA, 30 bp, Artificial Sequence
  Synthetic oligonucleotide
ccgcctggtgaacctggggttaaagcgagt

SEQ ID NO: 75947 - DNA, 30 bp, Artificial Sequence
  Synthetic oligonucleotide
cggtaccagctcgatcaataagcagcgagt

SEQ ID NO: 75948 - DNA, 30 bp, Artificial Sequence
  Synthetic oligonucleotide
ctctcacatcgactaccgtaaggggcgagt

SEQ ID NO: 75949 - DNA, 30 bp, Artificial Sequence
  Synthetic oligonucleotide
ggccttataagccatcgcgacatgtcgagt

SEQ ID NO: 75950 - DNA, 30 bp, Artificial Sequence
  Synthetic oligonucleotide
tctgaaaatgcaagcgagcattgttcgagt

SEQ ID NO: 75951 - DNA, 30 bp, Artificial Sequence
  Synthetic oligonucleotide
ccgatggcaacttaggcagattaaaggagt

SEQ ID NO: 75952 - DNA, 30 bp, Artificial Sequence
  Synthetic oligonucleotide
cgtctggcagccaagcgttaccgtaggagt

SEQ ID NO: 75953 - DNA, 30 bp, Artificial Sequence
  Synthetic oligonucleotide
tgggggctgaaccccacagtcgagtggagt

SEQ ID NO: 75954 - DNA, 30 bp, Artificial Sequence
  Synthetic oligonucleotide
gtacgttcgctagacaaaaaacaaatgagt

SEQ ID NO: 75955 - DNA, 30 bp, Artificial Sequence
  Synthetic oligonucleotide
cactggattaggcgatggcgcaccatgagt

SEQ ID NO: 75956 - DNA, 30 bp, Artificial Sequence
  Synthetic oligonucleotide
cagcgtcctgcacgtgacattgcgatgagt

SEQ ID NO: 75957 - DNA, 30 bp, Artificial Sequence
  Synthetic oligonucleotide
gtaaaggggtacgcggttagaactatgagt

SEQ ID NO: 75958 - DNA, 30 bp, Artificial Sequence
  Synthetic oligonucleotide
agataatggtaataggcactttaactgagt

SEQ ID NO: 75959 - DNA, 30 bp, Artificial Sequence
  Synthetic oligonucleotide
cggtatgcaccataacttatctccctgagt

SEQ ID NO: 75960 - DNA, 30 bp, Artificial Sequence
  Synthetic oligonucleotide
cttcggtgttctggcagtgcgtgagtgagt

SEQ ID NO: 75961 - DNA, 30 bp, Artificial Sequence
  Synthetic oligonucleotide
aaccagcggcccaactatgtcggcgtgagt

SEQ ID NO: 75962 - DNA, 30 bp, Artificial Sequence
  Synthetic oligonucleotide
ggcccatccgatgttgcaaggtaggtgagt

SEQ ID NO: 75963 - DNA, 30 bp, Artificial Sequence
  Synthetic oligonucleotide
tcaattgcaaagtatgattctcccttgagt

SEQ ID NO: 75964 - DNA, 30 bp, Artificial Sequence
  Synthetic oligonucleotide
taaggctggctagattttaaataccatagt

SEQ ID NO: 75965 - DNA, 30 bp, Artificial Sequence
  Synthetic oligonucleotide
aggatctaagggattctacgatgtcatagt

SEQ ID NO: 75966 - DNA, 30 bp, Artificial Sequence
  Synthetic oligonucleotide
cacggattaaaagataagagaacagatagt

SEQ ID NO: 75967 - DNA, 30 bp, Artificial Sequence
  Synthetic oligonucleotide
cgctcccgcgaatttgggggcaacgatagt

SEQ ID NO: 75968 - DNA, 30 bp, Artificial Sequence
  Synthetic oligonucleotide
acaacaacatgcatcatataagtcgatagt

SEQ ID NO: 75969 - DNA, 30 bp, Artificial Sequence
  Synthetic oligonucleotide
gcaagatacctagggctgagaacggatagt

SEQ ID NO: 75970 - DNA, 30 bp, Artificial Sequence
  Synthetic oligonucleotide
actaacgaaaaggtggcactggaaactagt

SEQ ID NO: 75971 - DNA, 30 bp, Artificial Sequence
  Synthetic oligonucleotide
gtgacttaatgaacgaagtaaatgcctagt

SEQ ID NO: 75972 - DNA, 30 bp, Artificial Sequence
  Synthetic oligonucleotide
tgataggtataagaaaaacgaaacgctagt

SEQ ID NO: 75973 - DNA, 30 bp, Artificial Sequence
  Synthetic oligonucleotide
tatagcgcccaatctgtgacacgatctagt

SEQ ID NO: 75974 - DNA, 30 bp, Artificial Sequence
  Synthetic oligonucleotide
tgaccgcggggaactgcgcacggttctagt

SEQ ID NO: 75975 - DNA, 30 bp, Artificial Sequence
  Synthetic oligonucleotide
gaccgagaataaaagttcccgtatagtagt

SEQ ID NO: 75976 - DNA, 30 bp, Artificial Sequence
  Synthetic oligonucleotide
tacaggcgcggcggtgatcagagccgtagt

SEQ ID NO: 75977 - DNA, 30 bp, Artificial Sequence
  Synthetic oligonucleotide
aactaaataatatgagggagtagcggtagt

SEQ ID NO: 75978 - DNA, 30 bp, Artificial Sequence
  Synthetic oligonucleotide
tgcgcaccagcgaaagtcatactgtgtagt

SEQ ID NO: 75979 - DNA, 30 bp, Artificial Sequence
  Synthetic oligonucleotide
ggggtgagcagtatagtgcgatgttgtagt

SEQ ID NO: 75980 - DNA, 30 bp, Artificial Sequence
  Synthetic oligonucleotide
gaaagggcagcgtgagtcacaaaagttagt

SEQ ID NO: 75981 - DNA, 30 bp, Artificial Sequence
  Synthetic oligonucleotide
tggaggtggagaggataggacatggttagt

SEQ ID NO: 75982 - DNA, 30 bp, Artificial Sequence
  Synthetic oligonucleotide
ccgtcacccaccgtccacaccatcaaacgt

SEQ ID NO: 75983 - DNA, 30 bp, Artificial Sequence
  Synthetic oligonucleotide
cctcgcggcctgaggtccaggtgacaacgt

SEQ ID NO: 75984 - DNA, 30 bp, Artificial Sequence
  Synthetic oligonucleotide
tatcgaaggtgtgtacagcaattccaacgt

SEQ ID NO: 75985 - DNA, 30 bp, Artificial Sequence
  Synthetic oligonucleotide
caggtaaccggagactcggattggcaacgt

SEQ ID NO: 75986 - DNA, 30 bp, Artificial Sequence
  Synthetic oligonucleotide
cgtagcatgacatgctacaggtgagaacgt

SEQ ID NO: 75987 - DNA, 31 bp, Artificial Sequence
  Synthetic oligonucleotide
aagcataggtaagcttatgccaatagaacgt

SEQ ID NO: 75988 - DNA, 30 bp, Artificial Sequence
  Synthetic oligonucleotide
ttacgccgatggtcccaaaagtgttaacgt

SEQ ID NO: 75989 - DNA, 30 bp, Artificial Sequence
  Synthetic oligonucleotide
ccgccatggttggtgatgtaataagcacgt

SEQ ID NO: 75990 - DNA, 30 bp, Artificial Sequence
  Synthetic oligonucleotide
tcggcacggtagattactaagagaagacgt

SEQ ID NO: 75991 - DNA, 30 bp, Artificial Sequence
  Synthetic oligonucleotide
cggtccgtgaatgtactgatggcacgacgt

SEQ ID NO: 75992 - DNA, 30 bp, Artificial Sequence
  Synthetic oligonucleotide
ccgaacggcattctgaatgaacttcgacgt

SEQ ID NO: 75993 - DNA, 30 bp, Artificial Sequence
  Synthetic oligonucleotide
aaaccgcatcgttgaacgaaagcaggacgt

SEQ ID NO: 75994 - DNA, 30 bp, Artificial Sequence
  Synthetic oligonucleotide
accgaagggggccttcatcctagaggacgt

SEQ ID NO: 75995 - DNA, 30 bp, Artificial Sequence
  Synthetic oligonucleotide
acaaatggcgcacaggcgcaccgtggacgt

SEQ ID NO: 75996 - DNA, 30 bp, Artificial Sequence
  Synthetic oligonucleotide
agcattgtacaccgtgagaccagaatacgt

SEQ ID NO: 75997 - DNA, 30 bp, Artificial Sequence
  Synthetic oligonucleotide
ggtggatattttgggatggatcatatacgt

SEQ ID NO: 75998 - DNA, 30 bp, Artificial Sequence
  Synthetic oligonucleotide
accgggtatagcaacagcagaaaggtacgt

SEQ ID NO: 75999 - DNA, 30 bp, Artificial Sequence
  Synthetic oligonucleotide
gcttgatgagctggcgcgggaaagaaccgt

SEQ ID NO: 76000 - DNA, 30 bp, Artificial Sequence
  Synthetic oligonucleotide
agggagggaattaaaagaatcctgtaccgt

SEQ ID NO: 76001 - DNA, 30 bp, Artificial Sequence
  Synthetic oligonucleotide
cgctggttactctccctgaacaaaacccgt

SEQ ID NO: 76002 - DNA, 30 bp, Artificial Sequence
  Synthetic oligonucleotide
ggaggtgcgacattagccctaatcacccgt

SEQ ID NO: 76003 - DNA, 30 bp, Artificial Sequence
  Synthetic oligonucleotide
gcctgcgagcatatagtcacaaagccccgt

SEQ ID NO: 76004 - DNA, 30 bp, Artificial Sequence
  Synthetic oligonucleotide
caagaaatgttaaggagggtggttgcccgt

SEQ ID NO: 76005 - DNA, 30 bp, Artificial Sequence
  Synthetic oligonucleotide
acggtaatggccgtcgtgacccgctcccgt

SEQ ID NO: 76006 - DNA, 30 bp, Artificial Sequence
  Synthetic oligonucleotide
agaagcgcacgttattggcctagcagccgt

SEQ ID NO: 76007 - DNA, 30 bp, Artificial Sequence
  Synthetic oligonucleotide
ctggcgccgcctggggaccgagaacgccgt

SEQ ID NO: 76008 - DNA, 30 bp, Artificial Sequence
  Synthetic oligonucleotide
ggaaacacgaacgtgggccagaacggccgt

SEQ ID NO: 76009 - DNA, 30 bp, Artificial Sequence
  Synthetic oligonucleotide
tgtgtaatacgggtatagttggcatgccgt

SEQ ID NO: 76010 - DNA, 30 bp, Artificial Sequence
  Synthetic oligonucleotide
tccggatcgtcaccgaactgcgagtgccgt

SEQ ID NO: 76011 - DNA, 30 bp, Artificial Sequence
  Synthetic oligonucleotide
accgaagctggaagacatcttccgtgccgt

SEQ ID NO: 76012 - DNA, 30 bp, Artificial Sequence
  Synthetic oligonucleotide
tatagcgtcatagccaaatgaggattccgt

SEQ ID NO: 76013 - DNA, 30 bp, Artificial Sequence
  Synthetic oligonucleotide
ctagagctcaattctcaagacttgttccgt

SEQ ID NO: 76014 - DNA, 30 bp, Artificial Sequence
  Synthetic oligonucleotide
caagcggtagcgggagcgtaaccaaagcgt

SEQ ID NO: 76015 - DNA, 30 bp, Artificial Sequence
  Synthetic oligonucleotide
ggacacgggaaacttgtccgggaagagcgt

SEQ ID NO: 76016 - DNA, 30 bp, Artificial Sequence
  Synthetic oligonucleotide
agacagatttagacgactgttcctgagcgt

SEQ ID NO: 76017 - DNA, 30 bp, Artificial Sequence
  Synthetic oligonucleotide
acaaaatggaggcacggggacgtatagcgt

SEQ ID NO: 76018 - DNA, 30 bp, Artificial Sequence
  Synthetic oligonucleotide
tagtgagattttgaaacgatcccctagcgt

SEQ ID NO: 76019 - DNA, 30 bp, Artificial Sequence
  Synthetic oligonucleotide
acagggtaaaaggcgcattcgtaaacgcgt

SEQ ID NO: 76020 - DNA, 30 bp, Artificial Sequence
  Synthetic oligonucleotide
agaccgaatcagaggttcattaatacgcgt

SEQ ID NO: 76021 - DNA, 30 bp, Artificial Sequence
  Synthetic oligonucleotide
tagtacctgaggggatcgcgagaaccgcgt

SEQ ID NO: 76022 - DNA, 30 bp, Artificial Sequence
  Synthetic oligonucleotide
ttggggcagaataaccacacaacaccgcgt

SEQ ID NO: 76023 - DNA, 30 bp, Artificial Sequence
  Synthetic oligonucleotide
tgtcgagtccgttccacataatcagcgcgt

SEQ ID NO: 76024 - DNA, 30 bp, Artificial Sequence
  Synthetic oligonucleotide
cgtcgggctcgcacggtccaaatcgcgcgt

SEQ ID NO: 76025 - DNA, 30 bp, Artificial Sequence
  Synthetic oligonucleotide
atatgaggtgaaggacgatgcgctgcgcgt

SEQ ID NO: 76026 - DNA, 30 bp, Artificial Sequence
  Synthetic oligonucleotide
agagaggctggaggtgccgtagaatcgcgt

SEQ ID NO: 76027 - DNA, 30 bp, Artificial Sequence
  Synthetic oligonucleotide
tctggtcacaacatcaagcattaaaggcgt

SEQ ID NO: 76028 - DNA, 30 bp, Artificial Sequence
  Synthetic oligonucleotide
ttcggaaacacgaaaaacctgccaaggcgt

SEQ ID NO: 76029 - DNA, 30 bp, Artificial Sequence
  Synthetic oligonucleotide
ctagtgagcagaaggatagtggcaaggcgt

SEQ ID NO: 76030 - DNA, 30 bp, Artificial Sequence
  Synthetic oligonucleotide
gcgggtgcttgactaccagaaacggggcgt

SEQ ID NO: 76031 - DNA, 30 bp, Artificial Sequence
  Synthetic oligonucleotide
caccgagaactagcatgggggcagatgcgt

SEQ ID NO: 76032 - DNA, 30 bp, Artificial Sequence
  Synthetic oligonucleotide
gacaacctataaacctgaaaatcagtgcgt

SEQ ID NO: 76033 - DNA, 30 bp, Artificial Sequence
  Synthetic oligonucleotide
gagatcactctccgataatcacaggtgcgt

SEQ ID NO: 76034 - DNA, 30 bp, Artificial Sequence
  Synthetic oligonucleotide
gaaaaaatcggatgcatgaagaatgtgcgt

SEQ ID NO: 76035 - DNA, 30 bp, Artificial Sequence
  Synthetic oligonucleotide
gaaacggaggaatgatcaacagtattgcgt

SEQ ID NO: 76036 - DNA, 30 bp, Artificial Sequence
  Synthetic oligonucleotide
cggtcgatataacacgctaagttgttgcgt

SEQ ID NO: 76037 - DNA, 30 bp, Artificial Sequence
  Synthetic oligonucleotide
gggctcagtctgaccgatgggggacatcgt

SEQ ID NO: 76038 - DNA, 30 bp, Artificial Sequence
  Synthetic oligonucleotide
agagctatcagcactggccatgtgtatcgt

SEQ ID NO: 76039 - DNA, 30 bp, Artificial Sequence
  Synthetic oligonucleotide
tgagttacaagtgatgaagcttcaactcgt

SEQ ID NO: 76040 - DNA, 30 bp, Artificial Sequence
  Synthetic oligonucleotide
ccgtgtacaccgagtagcaccagtactcgt

SEQ ID NO: 76041 - DNA, 30 bp, Artificial Sequence
  Synthetic oligonucleotide
cgacttgagaaaatgtgtccagtgtctcgt

SEQ ID NO: 76042 - DNA, 30 bp, Artificial Sequence
  Synthetic oligonucleotide
ctgctccccgagcagccagagataagtcgt

SEQ ID NO: 76043 - DNA, 30 bp, Artificial Sequence
  Synthetic oligonucleotide
cgcgatgtttgggtagctaagtccggtcgt

SEQ ID NO: 76044 - DNA, 30 bp, Artificial Sequence
  Synthetic oligonucleotide
gaggcattagttctttgtgagaatggtcgt

SEQ ID NO: 76045 - DNA, 30 bp, Artificial Sequence
  Synthetic oligonucleotide
agcctcactcagaataaacgaagatgtcgt

SEQ ID NO: 76046 - DNA, 30 bp, Artificial Sequence
  Synthetic oligonucleotide
agttcatgccaggtactctacgagcttcgt

SEQ ID NO: 76047 - DNA, 30 bp, Artificial Sequence
  Synthetic oligonucleotide
tagaggaggagccctaagtaataaaaaggt

SEQ ID NO: 76048 - DNA, 30 bp, Artificial Sequence
  Synthetic oligonucleotide
ggctcccagccacttctcgaccccaaaggt

SEQ ID NO: 76049 - DNA, 30 bp, Artificial Sequence
  Synthetic oligonucleotide
ccactagaccgacatcacactcgtaaaggt

SEQ ID NO: 76050 - DNA, 30 bp, Artificial Sequence
  Synthetic oligonucleotide
cttgtaaagggcacacgcagagtcgaaggt

SEQ ID NO: 76051 - DNA, 30 bp, Artificial Sequence
  Synthetic oligonucleotide
ccagattgaccatgcttctagacataaggt

SEQ ID NO: 76052 - DNA, 30 bp, Artificial Sequence
  Synthetic oligonucleotide
ttcggtgaaatgggtgacggggaaacaggt

SEQ ID NO: 76053 - DNA, 30 bp, Artificial Sequence
  Synthetic oligonucleotide
tacgagggtgaactatgttacaacacaggt

SEQ ID NO: 76054 - DNA, 30 bp, Artificial Sequence
  Synthetic oligonucleotide
gttggtggagggcatcacttacagacaggt

SEQ ID NO: 76055 - DNA, 30 bp, Artificial Sequence
  Synthetic oligonucleotide
agcgcggttgaccaaccagtgtggacaggt

SEQ ID NO: 76056 - DNA, 30 bp, Artificial Sequence
  Synthetic oligonucleotide
aacgaggtgattcgcgagcttgtgccaggt

SEQ ID NO: 76057 - DNA, 30 bp, Artificial Sequence
  Synthetic oligonucleotide
gagccgtaacgtccggtaagcactccaggt

SEQ ID NO: 76058 - DNA, 30 bp, Artificial Sequence
  Synthetic oligonucleotide
gttatgcaagtctaagagaggcgtccaggt

SEQ ID NO: 76059 - DNA, 30 bp, Artificial Sequence
  Synthetic oligonucleotide
gcggaagcttgcgattttcgtattccaggt

SEQ ID NO: 76060 - DNA, 30 bp, Artificial Sequence
  Synthetic oligonucleotide
ttcgcgaggtgccacgaaaatcccgcaggt

SEQ ID NO: 76061 - DNA, 30 bp, Artificial Sequence
  Synthetic oligonucleotide
cagttaataaggaaaacgatggtggcaggt

SEQ ID NO: 76062 - DNA, 30 bp, Artificial Sequence
  Synthetic oligonucleotide
cgtggggggttatctcgccttaggtcaggt

SEQ ID NO: 76063 - DNA, 30 bp, Artificial Sequence
  Synthetic oligonucleotide
cggtgtactactaactcgatattgtcaggt

SEQ ID NO: 76064 - DNA, 30 bp, Artificial Sequence
  Synthetic oligonucleotide
tcaaagtgtaatgaaggttattacagaggt

SEQ ID NO: 76065 - DNA, 30 bp, Artificial Sequence
  Synthetic oligonucleotide
aaggatcccggttatagggacaagagaggt

SEQ ID NO: 76066 - DNA, 30 bp, Artificial Sequence
  Synthetic oligonucleotide
gcaggaaggactgtcgcattgtggagaggt

SEQ ID NO: 76067 - DNA, 30 bp, Artificial Sequence
  Synthetic oligonucleotide
gtactgactaagggacgtaatgtgagaggt

SEQ ID NO: 76068 - DNA, 30 bp, Artificial Sequence
  Synthetic oligonucleotide
gcagtaaggaccattggtgctgtgcgaggt

SEQ ID NO: 76069 - DNA, 30 bp, Artificial Sequence
  Synthetic oligonucleotide
cattagacgagaaggaagttgacatgaggt

SEQ ID NO: 76070 - DNA, 30 bp, Artificial Sequence
  Synthetic oligonucleotide
gcaggttggcgattccaaagggtgctaggt

SEQ ID NO: 76071 - DNA, 30 bp, Artificial Sequence
  Synthetic oligonucleotide
acggtacacgcgtgcgggtgctgagtaggt

SEQ ID NO: 76072 - DNA, 30 bp, Artificial Sequence
  Synthetic oligonucleotide
gggggatgagggttgaacatgcaattaggt

SEQ ID NO: 76073 - DNA, 30 bp, Artificial Sequence
  Synthetic oligonucleotide
atcaacgcggaagaaggtgatcccgacggt

SEQ ID NO: 76074 - DNA, 29 bp, Artificial Sequence
  Synthetic oligonucleotide
tagcgaaactggtcgaggggatctacggt

SEQ ID NO: 76075 - DNA, 30 bp, Artificial Sequence
  Synthetic oligonucleotide
ggggaggcaatagtcctatcttcgtacggt

SEQ ID NO: 76076 - DNA, 30 bp, Artificial Sequence
  Synthetic oligonucleotide
aggacgaatttatggctaagtcacaccggt

SEQ ID NO: 76077 - DNA, 30 bp, Artificial Sequence
  Synthetic oligonucleotide
ttattacagaaatcgagagccacgaccggt

SEQ ID NO: 76078 - DNA, 30 bp, Artificial Sequence
  Synthetic oligonucleotide
ctcaacccagtttgtcgagggccagccggt

SEQ ID NO: 76079 - DNA, 30 bp, Artificial Sequence
  Synthetic oligonucleotide
agtaataggacgacccatgcgctcgccggt

SEQ ID NO: 76080 - DNA, 30 bp, Artificial Sequence
  Synthetic oligonucleotide
aagccagactacacacctggggtgagcggt

SEQ ID NO: 76081 - DNA, 30 bp, Artificial Sequence
  Synthetic oligonucleotide
aggtgtagaggtcatcagggattttgcggt

SEQ ID NO: 76082 - DNA, 30 bp, Artificial Sequence
  Synthetic oligonucleotide
aacgaagcgggtcacacgtcccagatcggt

SEQ ID NO: 76083 - DNA, 30 bp, Artificial Sequence
  Synthetic oligonucleotide
tcgtcaagtatgcgtcgggaacccctcggt

SEQ ID NO: 76084 - DNA, 30 bp, Artificial Sequence
  Synthetic oligonucleotide
ccatggttagcagagtgaaatgtcttcggt

SEQ ID NO: 76085 - DNA, 30 bp, Artificial Sequence
  Synthetic oligonucleotide
acagtcgggtcaaaagcaatataaaagggt

SEQ ID NO: 76086 - DNA, 30 bp, Artificial Sequence
  Synthetic oligonucleotide
tctagcaacgcacagaccagcgggaagggt

SEQ ID NO: 76087 - DNA, 30 bp, Artificial Sequence
  Synthetic oligonucleotide
tcgggccagcaaagcagggaacgacagggt

SEQ ID NO: 76088 - DNA, 30 bp, Artificial Sequence
  Synthetic oligonucleotide
acactacgtacggatacgggttcccagggt

SEQ ID NO: 76089 - DNA, 30 bp, Artificial Sequence
  Synthetic oligonucleotide
tcttaaggatttctccatcaaatccagggt

SEQ ID NO: 76090 - DNA, 30 bp, Artificial Sequence
  Synthetic oligonucleotide
gggcagagtaagatcgactcctatcagggt

SEQ ID NO: 76091 - DNA, 30 bp, Artificial Sequence
  Synthetic oligonucleotide
ggcactgtgcgtggacagccataggagggt

SEQ ID NO: 76092 - DNA, 30 bp, Artificial Sequence
  Synthetic oligonucleotide
aggggcagatcgcttcggacaagttagggt

SEQ ID NO: 76093 - DNA, 30 bp, Artificial Sequence
  Synthetic oligonucleotide
ttgaggttgtgggaacatcatcagaggggt

SEQ ID NO: 76094 - DNA, 30 bp, Artificial Sequence
  Synthetic oligonucleotide
ctgggactgactattcgaaagtaacggggt

SEQ ID NO: 76095 - DNA, 30 bp, Artificial Sequence
  Synthetic oligonucleotide
actagcatgcggcgatgtgtgctccggggt

SEQ ID NO: 76096 - DNA, 25 bp, Artificial Sequence
  Synthetic oligonucleotide
agaccgagctgcaggtgtagggggt

SEQ ID NO: 76097 - DNA, 31 bp, Artificial Sequence
  Synthetic oligonucleotide
cggacgttccggtaatgtacgaggtgggggt

SEQ ID NO: 76098 - DNA, 30 bp, Artificial Sequence
  Synthetic oligonucleotide
cgttgacatgactaagcttgtgcgatgggt

SEQ ID NO: 76099 - DNA, 30 bp, Artificial Sequence
  Synthetic oligonucleotide
agagtccgagggcaatgcgacattgtgggt

SEQ ID NO: 76100 - DNA, 30 bp, Artificial Sequence
  Synthetic oligonucleotide
tgagtaatcataccagccaacatcttgggt

SEQ ID NO: 76101 - DNA, 30 bp, Artificial Sequence
  Synthetic oligonucleotide
ataattgcaacattgtcgtcagaaaatggt

SEQ ID NO: 76102 - DNA, 30 bp, Artificial Sequence
  Synthetic oligonucleotide
gatgaaacgtcaaaaaatctgtacaatggt

SEQ ID NO: 76103 - DNA, 30 bp, Artificial Sequence
  Synthetic oligonucleotide
ggacggtggttacgtattggtacacatggt

SEQ ID NO: 76104 - DNA, 30 bp, Artificial Sequence
  Synthetic oligonucleotide
tccgcaccggatcgatacgatagacatggt

SEQ ID NO: 76105 - DNA, 30 bp, Artificial Sequence
  Synthetic oligonucleotide
tggtgaataacgctagatttgtttcatggt

SEQ ID NO: 76106 - DNA, 30 bp, Artificial Sequence
  Synthetic oligonucleotide
ctcagggcaacgattgagccgtcggatggt

SEQ ID NO: 76107 - DNA, 30 bp, Artificial Sequence
  Synthetic oligonucleotide
aagctggagagacccaataccagatatggt

SEQ ID NO: 76108 - DNA, 30 bp, Artificial Sequence
  Synthetic oligonucleotide
acgaagaggttaaatctcgagcgatatggt

SEQ ID NO: 76109 - DNA, 30 bp, Artificial Sequence
  Synthetic oligonucleotide
tccggcacaatgctgagggaagaacctggt

SEQ ID NO: 76110 - DNA, 30 bp, Artificial Sequence
  Synthetic oligonucleotide
ataaggaatctccatgctcgtaggcctggt

SEQ ID NO: 76111 - DNA, 30 bp, Artificial Sequence
  Synthetic oligonucleotide
tcgagagcaccgtgatatttagctcctggt

SEQ ID NO: 76112 - DNA, 30 bp, Artificial Sequence
  Synthetic oligonucleotide
gcacaaggtggtaaaggtgagcccgctggt

SEQ ID NO: 76113 - DNA, 30 bp, Artificial Sequence
  Synthetic oligonucleotide
tcgggcataaatagtccttataaatctggt

SEQ ID NO: 76114 - DNA, 30 bp, Artificial Sequence
  Synthetic oligonucleotide
aggtagtgtcgaactgacatgctctctggt

SEQ ID NO: 76115 - DNA, 30 bp, Artificial Sequence
  Synthetic oligonucleotide
cgaaatattatcatccgctccatgagtggt

SEQ ID NO: 76116 - DNA, 30 bp, Artificial Sequence
  Synthetic oligonucleotide
gcccataaaagccgtatagcgaaccgtggt

SEQ ID NO: 76117 - DNA, 30 bp, Artificial Sequence
  Synthetic oligonucleotide
ttgagagaacttctcaaagagcgcggtggt

SEQ ID NO: 76118 - DNA, 30 bp, Artificial Sequence
  Synthetic oligonucleotide
aacggtacaatggaagcccatattggtggt

SEQ ID NO: 76119 - DNA, 30 bp, Artificial Sequence
  Synthetic oligonucleotide
gacgtcatttaggctcaagtgctctgtggt

SEQ ID NO: 76120 - DNA, 30 bp, Artificial Sequence
  Synthetic oligonucleotide
gaagactaataaaaaccctaggaaattggt

SEQ ID NO: 76121 - DNA, 30 bp, Artificial Sequence
  Synthetic oligonucleotide
acctgtgtctagagacagatctggcttggt

SEQ ID NO: 76122 - DNA, 30 bp, Artificial Sequence
  Synthetic oligonucleotide
atggcatctaaaagacactcgcgagttggt

SEQ ID NO: 76123 - DNA, 30 bp, Artificial Sequence
  Synthetic oligonucleotide
ccagtgcgcaaagcggtatcgaggaaatgt

SEQ ID NO: 76124 - DNA, 30 bp, Artificial Sequence
  Synthetic oligonucleotide
ggtcacttagcgctagatctggctgaatgt

SEQ ID NO: 76125 - DNA, 30 bp, Artificial Sequence
  Synthetic oligonucleotide
accaacgggtgcgaccttccctacacatgt

SEQ ID NO: 76126 - DNA, 30 bp, Artificial Sequence
  Synthetic oligonucleotide
aacaaatcgtaaaagtggccgtagacatgt

SEQ ID NO: 76127 - DNA, 30 bp, Artificial Sequence
  Synthetic oligonucleotide
atgataactttagctcgaagaggtccatgt

SEQ ID NO: 76128 - DNA, 30 bp, Artificial Sequence
  Synthetic oligonucleotide
ttcgaaccgagtttgcataatacagcatgt

SEQ ID NO: 76129 - DNA, 30 bp, Artificial Sequence
  Synthetic oligonucleotide
cagccaaatgggaaagacaaggacgcatgt

SEQ ID NO: 76130 - DNA, 30 bp, Artificial Sequence
  Synthetic oligonucleotide
tgtccccgggacgaacagttggcggcatgt

SEQ ID NO: 76131 - DNA, 30 bp, Artificial Sequence
  Synthetic oligonucleotide
ggagcccgatagcatcgtaagggggcatgt

SEQ ID NO: 76132 - DNA, 30 bp, Artificial Sequence
  Synthetic oligonucleotide
acaacaatagactaagggatgcggagatgt

SEQ ID NO: 76133 - DNA, 30 bp, Artificial Sequence
  Synthetic oligonucleotide
gctggaattatgggataagtgtaccgatgt

SEQ ID NO: 76134 - DNA, 30 bp, Artificial Sequence
  Synthetic oligonucleotide
acgatgataacagtagactttaagcgatgt

SEQ ID NO: 76135 - DNA, 30 bp, Artificial Sequence
  Synthetic oligonucleotide
agggcgcgcgacagttaagggatgcgatgt

SEQ ID NO: 76136 - DNA, 30 bp, Artificial Sequence
  Synthetic oligonucleotide
taaggtcggagaacgttattgcgcggatgt

SEQ ID NO: 76137 - DNA, 30 bp, Artificial Sequence
  Synthetic oligonucleotide
ctgaagtctccattaggggtcacgggatgt

SEQ ID NO: 76138 - DNA, 30 bp, Artificial Sequence
  Synthetic oligonucleotide
tcgtcgaaaacactcgtattcatctgatgt

SEQ ID NO: 76139 - DNA, 30 bp, Artificial Sequence
  Synthetic oligonucleotide
aagtagggaagctgaggcaagacttgatgt

SEQ ID NO: 76140 - DNA, 30 bp, Artificial Sequence
  Synthetic oligonucleotide
acgccgtattggtgatagcgcaaaatatgt

SEQ ID NO: 76141 - DNA, 30 bp, Artificial Sequence
  Synthetic oligonucleotide
aggcaggtctagctgaatagactgctatgt

SEQ ID NO: 76142 - DNA, 30 bp, Artificial Sequence
  Synthetic oligonucleotide
cgtgaggacaaatggctgaacatcgtatgt

SEQ ID NO: 76143 - DNA, 30 bp, Artificial Sequence
  Synthetic oligonucleotide
ccagtcacaaggcgtgtgattgaggtatgt

SEQ ID NO: 76144 - DNA, 30 bp, Artificial Sequence
  Synthetic oligonucleotide
agagtactaccagcacaacaaccacactgt

SEQ ID NO: 76145 - DNA, 30 bp, Artificial Sequence
  Synthetic oligonucleotide
ttaaggacgggaataaaagcaagccactgt

SEQ ID NO: 76146 - DNA, 30 bp, Artificial Sequence
  Synthetic oligonucleotide
tcgggcgggccaatatacgctttagactgt

SEQ ID NO: 76147 - DNA, 30 bp, Artificial Sequence
  Synthetic oligonucleotide
cggaacccaatttttgcgctctgtgactgt

SEQ ID NO: 76148 - DNA, 30 bp, Artificial Sequence
  Synthetic oligonucleotide
tagcaagagggactgataattgtaacctgt

SEQ ID NO: 76149 - DNA, 30 bp, Artificial Sequence
  Synthetic oligonucleotide
gaacacacggaacaatgaatgtaagcctgt

SEQ ID NO: 76150 - DNA, 30 bp, Artificial Sequence
  Synthetic oligonucleotide
cctagcacagcgtatggatcggacgcctgt

SEQ ID NO: 76151 - DNA, 30 bp, Artificial Sequence
  Synthetic oligonucleotide
gggggatcgggaacgatcgtgatcgcctgt

SEQ ID NO: 76152 - DNA, 30 bp, Artificial Sequence
  Synthetic oligonucleotide
agcaggactgtggcacaatgtgatcgctgt

SEQ ID NO: 76153 - DNA, 30 bp, Artificial Sequence
  Synthetic oligonucleotide
ccaaacggtagccaaacatggacaggctgt

SEQ ID NO: 76154 - DNA, 30 bp, Artificial Sequence
  Synthetic oligonucleotide
ggtacataccaagtcaccctacagtgctgt

SEQ ID NO: 76155 - DNA, 30 bp, Artificial Sequence
  Synthetic oligonucleotide
agatctttccaagaggagtcgcacatctgt

SEQ ID NO: 76156 - DNA, 30 bp, Artificial Sequence
  Synthetic oligonucleotide
gtcgtcaataggcacccgcgatacatctgt

SEQ ID NO: 76157 - DNA, 30 bp, Artificial Sequence
  Synthetic oligonucleotide
ggtgtggttaggaatatcgcctgattctgt

SEQ ID NO: 76158 - DNA, 30 bp, Artificial Sequence
  Synthetic oligonucleotide
tcataaccgataaaggcgattaggaagtgt

SEQ ID NO: 76159 - DNA, 30 bp, Artificial Sequence
  Synthetic oligonucleotide
aacggaggcgcaaaaactaaggtgaagtgt

SEQ ID NO: 76160 - DNA, 30 bp, Artificial Sequence
  Synthetic oligonucleotide
catacggcgatcaaaaaagaatctgagtgt

SEQ ID NO: 76161 - DNA, 30 bp, Artificial Sequence
  Synthetic oligonucleotide
cttcgtcaagtggaagcaaacgtctagtgt

SEQ ID NO: 76162 - DNA, 30 bp, Artificial Sequence
  Synthetic oligonucleotide
ccataatccaggaaacgggtctcggcgtgt

SEQ ID NO: 76163 - DNA, 30 bp, Artificial Sequence
  Synthetic oligonucleotide
aggcaaactttagactactatgacaggtgt

SEQ ID NO: 76164 - DNA, 30 bp, Artificial Sequence
  Synthetic oligonucleotide
acacccacgtaagggtgtaaagcgaggtgt

SEQ ID NO: 76165 - DNA, 30 bp, Artificial Sequence
  Synthetic oligonucleotide
tgtgtgcgataaatcaccatataagggtgt

SEQ ID NO: 76166 - DNA, 30 bp, Artificial Sequence
  Synthetic oligonucleotide
aaggtcaatgcttcagcagcacgagggtgt

SEQ ID NO: 76167 - DNA, 30 bp, Artificial Sequence
  Synthetic oligonucleotide
atcggcatctggctcgtgtgcagtgggtgt

SEQ ID NO: 76168 - DNA, 30 bp, Artificial Sequence
  Synthetic oligonucleotide
gggaccaagcgcacagggggacaatggtgt

SEQ ID NO: 76169 - DNA, 30 bp, Artificial Sequence
  Synthetic oligonucleotide
cggcgtcggtggcacaagttagcatggtgt

SEQ ID NO: 76170 - DNA, 30 bp, Artificial Sequence
  Synthetic oligonucleotide
tgagggaacgcgtaattccaattctggtgt

SEQ ID NO: 76171 - DNA, 30 bp, Artificial Sequence
  Synthetic oligonucleotide
tcctagctaggggctaattagtagtggtgt

SEQ ID NO: 76172 - DNA, 31 bp, Artificial Sequence
  Synthetic oligonucleotide
gggataagctaagatgtggggtttacattgt

SEQ ID NO: 76173 - DNA, 30 bp, Artificial Sequence
  Synthetic oligonucleotide
catgtaagcatgtcggcagtatccgattgt

SEQ ID NO: 76174 - DNA, 30 bp, Artificial Sequence
  Synthetic oligonucleotide
gctgccgaagaaaagttcgatggcgattgt

SEQ ID NO: 76175 - DNA, 30 bp, Artificial Sequence
  Synthetic oligonucleotide
ccagaacggacaagccacagaaatggttgt

SEQ ID NO: 76176 - DNA, 30 bp, Artificial Sequence
  Synthetic oligonucleotide
cggactgctagaacttgcgaccgtctttgt

SEQ ID NO: 76177 - DNA, 30 bp, Artificial Sequence
  Synthetic oligonucleotide
gtcgtttccaccatcttccgcctcgtttgt

SEQ ID NO: 76178 - DNA, 30 bp, Artificial Sequence
  Synthetic oligonucleotide
gtgtcaactgcaactggcgatcgaaaaatt

SEQ ID NO: 76179 - DNA, 30 bp, Artificial Sequence
  Synthetic oligonucleotide
cgactaagaggaagtgctgtaacttaaatt

SEQ ID NO: 76180 - DNA, 30 bp, Artificial Sequence
  Synthetic oligonucleotide
tggtagataaacgtcccgtcccgagcaatt

SEQ ID NO: 76181 - DNA, 30 bp, Artificial Sequence
  Synthetic oligonucleotide
tcgcattatggtaatcgtgtgggggcaatt

SEQ ID NO: 76182 - DNA, 30 bp, Artificial Sequence
  Synthetic oligonucleotide
cgtgtcaacctttcacataacgtgtcaatt

SEQ ID NO: 76183 - DNA, 30 bp, Artificial Sequence
  Synthetic oligonucleotide
gcatcgggcattgagtcgggcacaagaatt

SEQ ID NO: 76184 - DNA, 30 bp, Artificial Sequence
  Synthetic oligonucleotide
agggacactcaaggattaggcagcagaatt

SEQ ID NO: 76185 - DNA, 30 bp, Artificial Sequence
  Synthetic oligonucleotide
ttgcaggcgggacacgggttaaaacgaatt

SEQ ID NO: 76186 - DNA, 30 bp, Artificial Sequence
  Synthetic oligonucleotide
agattaacatcataaagtattgttcgaatt

SEQ ID NO: 76187 - DNA, 30 bp, Artificial Sequence
  Synthetic oligonucleotide
atgaagggaacgaacgtacgcaccctaatt

SEQ ID NO: 76188 - DNA, 30 bp, Artificial Sequence
  Synthetic oligonucleotide
tcttgagactcgaaaaccttgtccctaatt

SEQ ID NO: 76189 - DNA, 30 bp, Artificial Sequence
  Synthetic oligonucleotide
aggctcgaaaccgatggggatagtaacatt

SEQ ID NO: 76190 - DNA, 30 bp, Artificial Sequence
  Synthetic oligonucleotide
cgacatgtatgccataaccgcaggcacatt

SEQ ID NO: 76191 - DNA, 30 bp, Artificial Sequence
  Synthetic oligonucleotide
gagcgtagaataggcttggacaacgacatt

SEQ ID NO: 76192 - DNA, 30 bp, Artificial Sequence
  Synthetic oligonucleotide
cgggaagttgagaatccaaacaagtacatt

SEQ ID NO: 76193 - DNA, 30 bp, Artificial Sequence
  Synthetic oligonucleotide
aacagagcgacaactctagtctccaccatt

SEQ ID NO: 76194 - DNA, 30 bp, Artificial Sequence
  Synthetic oligonucleotide
agacgcgagcgacttcgaatgtaccccatt

SEQ ID NO: 76195 - DNA, 30 bp, Artificial Sequence
  Synthetic oligonucleotide
ggaccatacaactttatagtagcctccatt

SEQ ID NO: 76196 - DNA, 30 bp, Artificial Sequence
  Synthetic oligonucleotide
aggggcacccttcaattcaataaccgcatt

SEQ ID NO: 76197 - DNA, 30 bp, Artificial Sequence
  Synthetic oligonucleotide
gggaccgcattgaaggttatcctcggcatt

SEQ ID NO: 76198 - DNA, 30 bp, Artificial Sequence
  Synthetic oligonucleotide
agtcggccataatagctgccccacatcatt

SEQ ID NO: 76199 - DNA, 30 bp, Artificial Sequence
  Synthetic oligonucleotide
tggcatcagcagaggtgacgatacatcatt

SEQ ID NO: 76200 - DNA, 30 bp, Artificial Sequence
  Synthetic oligonucleotide
ctcaacaaagagggtgagctccgtatcatt

SEQ ID NO: 76201 - DNA, 30 bp, Artificial Sequence
  Synthetic oligonucleotide
gaagatctgctggagtatgctcagaagatt

SEQ ID NO: 76202 - DNA, 30 bp, Artificial Sequence
  Synthetic oligonucleotide
ccctccaaacaaatcgacaatttacagatt

SEQ ID NO: 76203 - DNA, 30 bp, Artificial Sequence
  Synthetic oligonucleotide
aggtggcaggagtaagccacaaatcagatt

SEQ ID NO: 76204 - DNA, 30 bp, Artificial Sequence
  Synthetic oligonucleotide
acgtcacaatgtgatcttttacgagagatt

SEQ ID NO: 76205 - DNA, 30 bp, Artificial Sequence
  Synthetic oligonucleotide
gtgagacaccattcagaggatgaaacgatt

SEQ ID NO: 76206 - DNA, 30 bp, Artificial Sequence
  Synthetic oligonucleotide
agcccgaccgacagtgcgcgtaccacgatt

SEQ ID NO: 76207 - DNA, 30 bp, Artificial Sequence
  Synthetic oligonucleotide
gctacgggggtaaccaccagggtcgcgatt

SEQ ID NO: 76208 - DNA, 30 bp, Artificial Sequence
  Synthetic oligonucleotide
atgcaatgagtttgataaaaaaacaggatt

SEQ ID NO: 76209 - DNA, 30 bp, Artificial Sequence
  Synthetic oligonucleotide
aaaggctggacgtctaagagcagacggatt

SEQ ID NO: 76210 - DNA, 30 bp, Artificial Sequence
  Synthetic oligonucleotide
gtgttaaggtataacagagcaaaagggatt

SEQ ID NO: 76211 - DNA, 30 bp, Artificial Sequence
  Synthetic oligonucleotide
aaacatatgcgaaggcgactttgagtgatt

SEQ ID NO: 76212 - DNA, 30 bp, Artificial Sequence
  Synthetic oligonucleotide
tcgatcatacgagattaaggatgtcatatt

SEQ ID NO: 76213 - DNA, 30 bp, Artificial Sequence
  Synthetic oligonucleotide
cgaggaacaaaggttgatatgctctatatt

SEQ ID NO: 76214 - DNA, 30 bp, Artificial Sequence
  Synthetic oligonucleotide
ttatgaacaaagtaaaccacgtgacctatt

SEQ ID NO: 76215 - DNA, 30 bp, Artificial Sequence
  Synthetic oligonucleotide
gacgagagttaaatatagaggaggcctatt

SEQ ID NO: 76216 - DNA, 31 bp, Artificial Sequence
  Synthetic oligonucleotide
aggtaatcgttggaatgtgtctaaagctatt

SEQ ID NO: 76217 - DNA, 29 bp, Artificial Sequence
  Synthetic oligonucleotide
cggacaactaagggaagaacggagctatt

SEQ ID NO: 76218 - DNA, 30 bp, Artificial Sequence
  Synthetic oligonucleotide
tgagaagctagtgcaggtgagcacagtatt

SEQ ID NO: 76219 - DNA, 30 bp, Artificial Sequence
  Synthetic oligonucleotide
tcggagatcaggtacaagtatcggcgtatt

SEQ ID NO: 76220 - DNA, 30 bp, Artificial Sequence
  Synthetic oligonucleotide
tcgacaagcgagtatgctcacatgcgtatt

SEQ ID NO: 76221 - DNA, 30 bp, Artificial Sequence
  Synthetic oligonucleotide
ataagacataactagacggcacatcgtatt

SEQ ID NO: 76222 - DNA, 30 bp, Artificial Sequence
  Synthetic oligonucleotide
tgataggggtctgagttggatgaaggtatt

SEQ ID NO: 76223 - DNA, 30 bp, Artificial Sequence
  Synthetic oligonucleotide
aagcgagacactggagagaaatgcggtatt

SEQ ID NO: 76224 - DNA, 30 bp, Artificial Sequence
  Synthetic oligonucleotide
cgatcgtgggttgagaaaccgtcatgtatt

SEQ ID NO: 76225 - DNA, 30 bp, Artificial Sequence
  Synthetic oligonucleotide
gggatctggtaaggcggtcaatgttgtatt

SEQ ID NO: 76226 - DNA, 30 bp, Artificial Sequence
  Synthetic oligonucleotide
agacgtggattaaacaggcgatgaattatt

SEQ ID NO: 76227 - DNA, 30 bp, Artificial Sequence
  Synthetic oligonucleotide
ctgccgaaacgtccgagaaacatcattatt

SEQ ID NO: 76228 - DNA, 30 bp, Artificial Sequence
  Synthetic oligonucleotide
aggaggcagagcacaatgtggacgattatt

SEQ ID NO: 76229 - DNA, 30 bp, Artificial Sequence
  Synthetic oligonucleotide
gcacgggaatgaaacagtaacaggtttatt

SEQ ID NO: 76230 - DNA, 30 bp, Artificial Sequence
  Synthetic oligonucleotide
actgtaggcggtatagtggatgtgaaactt

SEQ ID NO: 76231 - DNA, 30 bp, Artificial Sequence
  Synthetic oligonucleotide
cgtgagttgtgttgggagaagggagaactt

SEQ ID NO: 76232 - DNA, 30 bp, Artificial Sequence
  Synthetic oligonucleotide
aaggcatcagtaagttagtaagatccactt

SEQ ID NO: 76233 - DNA, 30 bp, Artificial Sequence
  Synthetic oligonucleotide
gggcgaggaattttcagtaggttaagactt

SEQ ID NO: 76234 - DNA, 30 bp, Artificial Sequence
  Synthetic oligonucleotide
gggcggtcagacacacccgcgcaccgactt

SEQ ID NO: 76235 - DNA, 30 bp, Artificial Sequence
  Synthetic oligonucleotide
tgctatgccagagtctgacggcgaatactt

SEQ ID NO: 76236 - DNA, 30 bp, Artificial Sequence
  Synthetic oligonucleotide
ccgacaggtattgagtgacctctcatactt

SEQ ID NO: 76237 - DNA, 30 bp, Artificial Sequence
  Synthetic oligonucleotide
agttggaagggtgctagctgcgaccccctt

SEQ ID NO: 76238 - DNA, 30 bp, Artificial Sequence
  Synthetic oligonucleotide
ccaagatagtatgttaaatgaagaggcctt

SEQ ID NO: 76239 - DNA, 30 bp, Artificial Sequence
  Synthetic oligonucleotide
gtagtcgagaggggcatgggaaactgcctt

SEQ ID NO: 76240 - DNA, 30 bp, Artificial Sequence
  Synthetic oligonucleotide
ggcgagctactgtcatgcgcgaactgcctt

SEQ ID NO: 76241 - DNA, 30 bp, Artificial Sequence
  Synthetic oligonucleotide
cagctccagagcgaccgacttatttgcctt

SEQ ID NO: 76242 - DNA, 30 bp, Artificial Sequence
  Synthetic oligonucleotide
gctagtatcaatatcccaagaagcatcctt

SEQ ID NO: 76243 - DNA, 29 bp, Artificial Sequence
  Synthetic oligonucleotide
aggatgaaccccaggagcagatattcctt

SEQ ID NO: 76244 - DNA, 30 bp, Artificial Sequence
  Synthetic oligonucleotide
gggaaggccgttgaatcagggacaaagctt

SEQ ID NO: 76245 - DNA, 30 bp, Artificial Sequence
  Synthetic oligonucleotide
aacctaatgtggcgagagacgggaaagctt

SEQ ID NO: 76246 - DNA, 30 bp, Artificial Sequence
  Synthetic oligonucleotide
gaagggagcgtcattgggtttggaaagctt

SEQ ID NO: 76247 - DNA, 30 bp, Artificial Sequence
  Synthetic oligonucleotide
ccctactgacactcaagagttcctcagctt

SEQ ID NO: 76248 - DNA, 30 bp, Artificial Sequence
  Synthetic oligonucleotide
cgtttccgtagatttagattctgtcagctt

SEQ ID NO: 76249 - DNA, 30 bp, Artificial Sequence
  Synthetic oligonucleotide
cagcggggggaagcactcaaacgggagctt

SEQ ID NO: 76250 - DNA, 30 bp, Artificial Sequence
  Synthetic oligonucleotide
acatcagccaatatgagctgatcagcgctt

SEQ ID NO: 76251 - DNA, 30 bp, Artificial Sequence
  Synthetic oligonucleotide
atctaactgcgggctcgtgagctggcgctt

SEQ ID NO: 76252 - DNA, 30 bp, Artificial Sequence
  Synthetic oligonucleotide
aagtgcaccacaagtgagtcaggcgggctt

SEQ ID NO: 76253 - DNA, 30 bp, Artificial Sequence
  Synthetic oligonucleotide
actacggaatacatcggtaaaacctggctt

SEQ ID NO: 76254 - DNA, 30 bp, Artificial Sequence
  Synthetic oligonucleotide
atgcagggcggaaaggatcagttctggctt

SEQ ID NO: 76255 - DNA, 30 bp, Artificial Sequence
  Synthetic oligonucleotide
aggtgtctgtggaaattagggaattggctt

SEQ ID NO: 76256 - DNA, 30 bp, Artificial Sequence
  Synthetic oligonucleotide
agcttcgtaagagaatgaacgtagctgctt

SEQ ID NO: 76257 - DNA, 30 bp, Artificial Sequence
  Synthetic oligonucleotide
cgtgctaaactggtgaactttcttctgctt

SEQ ID NO: 76258 - DNA, 30 bp, Artificial Sequence
  Synthetic oligonucleotide
tcgtgtatttcgtatgggcatgaggatctt

SEQ ID NO: 76259 - DNA, 30 bp, Artificial Sequence
  Synthetic oligonucleotide
acggtagtaggccctctcaactcttatctt

SEQ ID NO: 76260 - DNA, 30 bp, Artificial Sequence
  Synthetic oligonucleotide
gcggtgagttaaaggaatcgacgaactctt

SEQ ID NO: 76261 - DNA, 30 bp, Artificial Sequence
  Synthetic oligonucleotide
aggactatggattacgaccgacgaaaagtt

SEQ ID NO: 76262 - DNA, 30 bp, Artificial Sequence
  Synthetic oligonucleotide
aacagtcggcggaaggatgtcattaaagtt

SEQ ID NO: 76263 - DNA, 30 bp, Artificial Sequence
  Synthetic oligonucleotide
caacggataggccgggaagcttgacaagtt

SEQ ID NO: 76264 - DNA, 30 bp, Artificial Sequence
  Synthetic oligonucleotide
gtaacaatactgatcgaaaaagtagaagtt

SEQ ID NO: 76265 - DNA, 30 bp, Artificial Sequence
  Synthetic oligonucleotide
gcatcgctagggataccctcaactgaagtt

SEQ ID NO: 76266 - DNA, 30 bp, Artificial Sequence
  Synthetic oligonucleotide
accgctacgacgaaccaagttgcataagtt

SEQ ID NO: 76267 - DNA, 30 bp, Artificial Sequence
  Synthetic oligonucleotide
ctgcacaacacggggtaacgatagtaagtt

SEQ ID NO: 76268 - DNA, 30 bp, Artificial Sequence
  Synthetic oligonucleotide
ggacggggatggtaaatcatccgcacagtt

SEQ ID NO: 76269 - DNA, 30 bp, Artificial Sequence
  Synthetic oligonucleotide
cgccccgcgacctgtagaaaacggacagtt

SEQ ID NO: 76270 - DNA, 30 bp, Artificial Sequence
  Synthetic oligonucleotide
aagtcaaggggaccccacacggatccagtt

SEQ ID NO: 76271 - DNA, 30 bp, Artificial Sequence
  Synthetic oligonucleotide
aaaccaactaaccgagagtaatacagagtt

SEQ ID NO: 76272 - DNA, 30 bp, Artificial Sequence
  Synthetic oligonucleotide
tagcattgagtggagagggttgcgcgagtt

SEQ ID NO: 76273 - DNA, 30 bp, Artificial Sequence
  Synthetic oligonucleotide
aggagcaccttgtaagagagtgaaggagtt

SEQ ID NO: 76274 - DNA, 30 bp, Artificial Sequence
  Synthetic oligonucleotide
aggtagtggaagcgacatgtacgaaacgtt

SEQ ID NO: 76275 - DNA, 30 bp, Artificial Sequence
  Synthetic oligonucleotide
agtccgagacatcgtggggataaacacgtt

SEQ ID NO: 76276 - DNA, 30 bp, Artificial Sequence
  Synthetic oligonucleotide
tgcgcggagagaagccgaaagtactacgtt

SEQ ID NO: 76277 - DNA, 30 bp, Artificial Sequence
  Synthetic oligonucleotide
cgaaacccatttcccgtagcaatctacgtt

SEQ ID NO: 76278 - DNA, 30 bp, Artificial Sequence
  Synthetic oligonucleotide
accaggcgcaaggaatgctccatttacgtt

SEQ ID NO: 76279 - DNA, 30 bp, Artificial Sequence
  Synthetic oligonucleotide
tgggcaagatctctcatgaacaagaccgtt

SEQ ID NO: 76280 - DNA, 30 bp, Artificial Sequence
  Synthetic oligonucleotide
aggggctgaaacctctgtcccgattccgtt

SEQ ID NO: 76281 - DNA, 30 bp, Artificial Sequence
  Synthetic oligonucleotide
acctccccaacaaggaccgaacaaagcgtt

SEQ ID NO: 76282 - DNA, 30 bp, Artificial Sequence
  Synthetic oligonucleotide
gcaacagcagagccaaaactaatccgcgtt

SEQ ID NO: 76283 - DNA, 30 bp, Artificial Sequence
  Synthetic oligonucleotide
ccggattctgtagatgaagaagtgcgcgtt

SEQ ID NO: 76284 - DNA, 30 bp, Artificial Sequence
  Synthetic oligonucleotide
aaagcacaccgggactgggacttaatcgtt

SEQ ID NO: 76285 - DNA, 30 bp, Artificial Sequence
  Synthetic oligonucleotide
agcggtggggccggcaatagattgatcgtt

SEQ ID NO: 76286 - DNA, 31 bp, Artificial Sequence
  Synthetic oligonucleotide
cagggcgacaacccaaccagccggtatcgtt

SEQ ID NO: 76287 - DNA, 30 bp, Artificial Sequence
  Synthetic oligonucleotide
agcgcgtatcgataatgaacgtcaaaggtt

SEQ ID NO: 76288 - DNA, 30 bp, Artificial Sequence
  Synthetic oligonucleotide
ttggtcataaggaaagtaacatgtgaggtt

SEQ ID NO: 76289 - DNA, 30 bp, Artificial Sequence
  Synthetic oligonucleotide
tagtgtaggcgagttcgaactctcccggtt

SEQ ID NO: 76290 - DNA, 30 bp, Artificial Sequence
  Synthetic oligonucleotide
ctattgagccagagcaaatatacgccggtt

SEQ ID NO: 76291 - DNA, 30 bp, Artificial Sequence
  Synthetic oligonucleotide
taggtgctcgggaagcctgttaacgcggtt

SEQ ID NO: 76292 - DNA, 30 bp, Artificial Sequence
  Synthetic oligonucleotide
caaggagaaatatatagaccgggggcggtt

SEQ ID NO: 76293 - DNA, 30 bp, Artificial Sequence
  Synthetic oligonucleotide
gggtaaaattaccatgaaagggcgagggtt

SEQ ID NO: 76294 - DNA, 30 bp, Artificial Sequence
  Synthetic oligonucleotide
ctgaaggcgtgcatttcagaaaatagggtt

SEQ ID NO: 76295 - DNA, 30 bp, Artificial Sequence
  Synthetic oligonucleotide
accaagcactatgaggagatgactagggtt

SEQ ID NO: 76296 - DNA, 30 bp, Artificial Sequence
  Synthetic oligonucleotide
acgaactcctaacaagtgaaatgtagggtt

SEQ ID NO: 76297 - DNA, 30 bp, Artificial Sequence
  Synthetic oligonucleotide
gaaggagtgatgggtttagtacgtatggtt

SEQ ID NO: 76298 - DNA, 30 bp, Artificial Sequence
  Synthetic oligonucleotide
agttaggatagcccactagagtgcgtggtt

SEQ ID NO: 76299 - DNA, 30 bp, Artificial Sequence
  Synthetic oligonucleotide
taggacaagaacatcatgggccataatgtt

SEQ ID NO: 76300 - DNA, 30 bp, Artificial Sequence
  Synthetic oligonucleotide
cagtcgcaagagagaaacccgcagcatgtt

SEQ ID NO: 76301 - DNA, 30 bp, Artificial Sequence
  Synthetic oligonucleotide
gccagtccatagtaagcggcaaggcatgtt

SEQ ID NO: 76302 - DNA, 30 bp, Artificial Sequence
  Synthetic oligonucleotide
taagttgaggaggtaaagtgtccggatgtt

SEQ ID NO: 76303 - DNA, 30 bp, Artificial Sequence
  Synthetic oligonucleotide
aggatggcgtgaaatcataccggacctgtt

SEQ ID NO: 76304 - DNA, 30 bp, Artificial Sequence
  Synthetic oligonucleotide
cgcctaaagtgcgtccggggaaatcctgtt

SEQ ID NO: 76305 - DNA, 30 bp, Artificial Sequence
  Synthetic oligonucleotide
cctgggctcatcagggttcagctagctgtt

SEQ ID NO: 76306 - DNA, 30 bp, Artificial Sequence
  Synthetic oligonucleotide
ctgagaaggcttgcatcgcggtaccgtgtt

SEQ ID NO: 76307 - DNA, 30 bp, Artificial Sequence
  Synthetic oligonucleotide
cagccagaaagcgaatggcactgccgtgtt

SEQ ID NO: 76308 - DNA, 30 bp, Artificial Sequence
  Synthetic oligonucleotide
atgagcccttgaaaacatatgagaggtgtt

SEQ ID NO: 76309 - DNA, 30 bp, Artificial Sequence
  Synthetic oligonucleotide
tagaagagcagtgtggactggttctgtgtt

SEQ ID NO: 76310 - DNA, 30 bp, Artificial Sequence
  Synthetic oligonucleotide
ccgacggtaatggttagatttgtgattgtt

SEQ ID NO: 76311 - DNA, 30 bp, Artificial Sequence
  Synthetic oligonucleotide
agcgaggttgcccgactatgctcagttgtt

SEQ ID NO: 76312 - DNA, 30 bp, Artificial Sequence
  Synthetic oligonucleotide
caggctggcgtagacattaacgtggttgtt

SEQ ID NO: 76313 - DNA, 30 bp, Artificial Sequence
  Synthetic oligonucleotide
cacacaccgagcagaacccggcgtaaattt

SEQ ID NO: 76314 - DNA, 30 bp, Artificial Sequence
  Synthetic oligonucleotide
atcacaacgagagacattctgccttaattt

SEQ ID NO: 76315 - DNA, 30 bp, Artificial Sequence
  Synthetic oligonucleotide
gagaggtggactggtccagacagttaattt

SEQ ID NO: 76316 - DNA, 30 bp, Artificial Sequence
  Synthetic oligonucleotide
ggcaagtattcaggatcagtgcgggcattt

SEQ ID NO: 76317 - DNA, 30 bp, Artificial Sequence
  Synthetic oligonucleotide
aggtgagacccgtataagtctttggcattt

SEQ ID NO: 76318 - DNA, 30 bp, Artificial Sequence
  Synthetic oligonucleotide
tagacaaaaatcgagcaccgcaggatattt

SEQ ID NO: 76319 - DNA, 30 bp, Artificial Sequence
  Synthetic oligonucleotide
cgacggcactactattctgttgtgatattt

SEQ ID NO: 76320 - DNA, 30 bp, Artificial Sequence
  Synthetic oligonucleotide
gcggtcgcgtcccggaggagtgtgctattt

SEQ ID NO: 76321 - DNA, 30 bp, Artificial Sequence
  Synthetic oligonucleotide
gcgacgaacacacagagtgacctagtattt

SEQ ID NO: 76322 - DNA, 30 bp, Artificial Sequence
  Synthetic oligonucleotide
agccggtggaagggagtgggcacaaacttt

SEQ ID NO: 76323 - DNA, 30 bp, Artificial Sequence
  Synthetic oligonucleotide
ccaggcgctagccagacaaaacatcacttt

SEQ ID NO: 76324 - DNA, 40 bp, Artificial Sequence
  Synthetic oligonucleotide
tttaccgctactggaaaatggttaacagcctatctacttt

SEQ ID NO: 76325 - DNA, 30 bp, Artificial Sequence
  Synthetic oligonucleotide
agcagaagacttatggtgagactaaccttt

SEQ ID NO: 76326 - DNA, 30 bp, Artificial Sequence
  Synthetic oligonucleotide
ataaagctcgaacggcacacattccccttt

SEQ ID NO: 76327 - DNA, 30 bp, Artificial Sequence
  Synthetic oligonucleotide
ttagtaaaacgaaatgtggaagtagccttt

SEQ ID NO: 76328 - DNA, 30 bp, Artificial Sequence
  Synthetic oligonucleotide
ggatcattgactagaagaatgacacgcttt

SEQ ID NO: 76329 - DNA, 30 bp, Artificial Sequence
  Synthetic oligonucleotide
atggatgagtgaagccattattcaatcttt

SEQ ID NO: 76330 - DNA, 30 bp, Artificial Sequence
  Synthetic oligonucleotide
tggaataaggaggtaaccggatgtctcttt

SEQ ID NO: 76331 - DNA, 30 bp, Artificial Sequence
  Synthetic oligonucleotide
gtgaacgagggagcgagtgtgatattcttt

SEQ ID NO: 76332 - DNA, 30 bp, Artificial Sequence
  Synthetic oligonucleotide
ggtggcaaagcccgaggatcagtgaagttt

SEQ ID NO: 76333 - DNA, 30 bp, Artificial Sequence
  Synthetic oligonucleotide
tgaggggagatcgttggagccgaccagttt

SEQ ID NO: 76334 - DNA, 30 bp, Artificial Sequence
  Synthetic oligonucleotide
ttaacgtcgaaagaatcaacgcacgagttt

SEQ ID NO: 76335 - DNA, 30 bp, Artificial Sequence
  Synthetic oligonucleotide
gaggtctaacatcaacggggccgagcgttt

SEQ ID NO: 76336 - DNA, 30 bp, Artificial Sequence
  Synthetic oligonucleotide
tcaaaggtaaggacgtaaaatactaggttt

SEQ ID NO: 76337 - DNA, 30 bp, Artificial Sequence
  Synthetic oligonucleotide
agaatcatgcgacgaagggttatgcggttt

SEQ ID NO: 76338 - DNA, 30 bp, Artificial Sequence
  Synthetic oligonucleotide
tggcatgtgggaccagcgtttagactgttt

SEQ ID NO: 76339 - DNA, 30 bp, Artificial Sequence
  Synthetic oligonucleotide
gtggggacaacaatcgataccaatgtgttt

SEQ ID NO: 76340 - DNA, 30 bp, Artificial Sequence
  Synthetic oligonucleotide
caaaacacggcgaaactggtctgcaatttt

SEQ ID NO: 76341 - DNA, 30 bp, Artificial Sequence
  Synthetic oligonucleotide
tagacatcgttgtgagcatagagcactttt

SEQ ID NO: 76342 - DNA, 30 bp, Artificial Sequence
  Synthetic oligonucleotide
agagaggctgtggagaaatgtgaaaaaaaa

SEQ ID NO: 76343 - DNA, 30 bp, Artificial Sequence
  Synthetic oligonucleotide
caacaacttgagaacctcatcgcacaaaaa

SEQ ID NO: 76344 - DNA, 30 bp, Artificial Sequence
  Synthetic oligonucleotide
tgaatccggtgccagtcagagacataaaaa

SEQ ID NO: 76345 - DNA, 30 bp, Artificial Sequence
  Synthetic oligonucleotide
gttcggaagactaggttggggagataaaaa

SEQ ID NO: 76346 - DNA, 30 bp, Artificial Sequence
  Synthetic oligonucleotide
acagaaggaatatactgatcaggttaaaaa

SEQ ID NO: 76347 - DNA, 30 bp, Artificial Sequence
  Synthetic oligonucleotide
acgatgataacgggacgactttgttaaaaa

SEQ ID NO: 76348 - DNA, 30 bp, Artificial Sequence
  Synthetic oligonucleotide
cgcccgcgaatccgacgcgtgtcaacaaaa

SEQ ID NO: 76349 - DNA, 30 bp, Artificial Sequence
  Synthetic oligonucleotide
gatcgcgcggaggggaagggttacgcaaaa

SEQ ID NO: 76350 - DNA, 30 bp, Artificial Sequence
  Synthetic oligonucleotide
agtggtccgttaccgcaaagatccgcaaaa

SEQ ID NO: 76351 - DNA, 30 bp, Artificial Sequence
  Synthetic oligonucleotide
gcccaagtttagccaaattaacaggcaaaa

SEQ ID NO: 76352 - DNA, 30 bp, Artificial Sequence
  Synthetic oligonucleotide
agagagtcgctgctacaaataggggcaaaa

SEQ ID NO: 76353 - DNA, 30 bp, Artificial Sequence
  Synthetic oligonucleotide
gaagcacggatactagtgactattgcaaaa

SEQ ID NO: 76354 - DNA, 30 bp, Artificial Sequence
  Synthetic oligonucleotide
gaacgagagaagatatgagatacatcaaaa

SEQ ID NO: 76355 - DNA, 30 bp, Artificial Sequence
  Synthetic oligonucleotide
tgggattggtggcactatcgtggatcaaaa

SEQ ID NO: 76356 - DNA, 30 bp, Artificial Sequence
  Synthetic oligonucleotide
tactgtggtgtagaggaacgtatatcaaaa

SEQ ID NO: 76357 - DNA, 30 bp, Artificial Sequence
  Synthetic oligonucleotide
catgtctacttcgctagtgcgctatcaaaa

SEQ ID NO: 76358 - DNA, 30 bp, Artificial Sequence
  Synthetic oligonucleotide
gctaacgggcgtggctatgggcccagaaaa

SEQ ID NO: 76359 - DNA, 30 bp, Artificial Sequence
  Synthetic oligonucleotide
gacggtcatggtttaacttattccagaaaa

SEQ ID NO: 76360 - DNA, 30 bp, Artificial Sequence
  Synthetic oligonucleotide
gaatacagttacgggggcagaagcagaaaa

SEQ ID NO: 76361 - DNA, 30 bp, Artificial Sequence
  Synthetic oligonucleotide
gaccgacgtgcgtatagagatgttagaaaa

SEQ ID NO: 76362 - DNA, 30 bp, Artificial Sequence
  Synthetic oligonucleotide
taggcacttggtatcagaaatcatcgaaaa

SEQ ID NO: 76363 - DNA, 30 bp, Artificial Sequence
  Synthetic oligonucleotide
aaagaaaccctccacttcctagctcgaaaa

SEQ ID NO: 76364 - DNA, 30 bp, Artificial Sequence
  Synthetic oligonucleotide
gacaagcatcgaaggaaggcacttcgaaaa

SEQ ID NO: 76365 - DNA, 30 bp, Artificial Sequence
  Synthetic oligonucleotide
ctggggacacttcttacaaccgttcgaaaa

SEQ ID NO: 76366 - DNA, 30 bp, Artificial Sequence
  Synthetic oligonucleotide
cggcatcgaaaggactgagtaagtggaaaa

SEQ ID NO: 76367 - DNA, 30 bp, Artificial Sequence
  Synthetic oligonucleotide
caaagacctatctggtcagagcgcataaaa

SEQ ID NO: 76368 - DNA, 30 bp, Artificial Sequence
  Synthetic oligonucleotide
acgatccgaatgtgaaagattcagataaaa

SEQ ID NO: 76369 - DNA, 30 bp, Artificial Sequence
  Synthetic oligonucleotide
ctgatggctttgctaacgataccgataaaa

SEQ ID NO: 76370 - DNA, 30 bp, Artificial Sequence
  Synthetic oligonucleotide
cggacgaactgggaatttttgcggataaaa

SEQ ID NO: 76371 - DNA, 30 bp, Artificial Sequence
  Synthetic oligonucleotide
aaggcaaggctccatgttacaaccctaaaa

SEQ ID NO: 76372 - DNA, 30 bp, Artificial Sequence
  Synthetic oligonucleotide
ctcgccccaaacggagcggaggcgctaaaa

SEQ ID NO: 76373 - DNA, 31 bp, Artificial Sequence
  Synthetic oligonucleotide
atcgctaagccggttgtgtccactgctaaaa

SEQ ID NO: 76374 - DNA, 30 bp, Artificial Sequence
  Synthetic oligonucleotide
tcaaaggatgcgcgactcagggtgctaaaa

SEQ ID NO: 76375 - DNA, 30 bp, Artificial Sequence
  Synthetic oligonucleotide
gggtaacggagttaggcgaagaacgtaaaa

SEQ ID NO: 76376 - DNA, 31 bp, Artificial Sequence
  Synthetic oligonucleotide
aggggtgtaaaacttgctagtagacgtaaaa

SEQ ID NO: 76377 - DNA, 30 bp, Artificial Sequence
  Synthetic oligonucleotide
taacgagacaaaaatcagccttatgtaaaa

SEQ ID NO: 76378 - DNA, 30 bp, Artificial Sequence
  Synthetic oligonucleotide
cggagtggtgcgatgcagccgtcgaacaaa

SEQ ID NO: 76379 - DNA, 30 bp, Artificial Sequence
  Synthetic oligonucleotide
ctgcgcgtcagtacggactgagggaacaaa

SEQ ID NO: 76380 - DNA, 30 bp, Artificial Sequence
  Synthetic oligonucleotide
gcggtgacgggcaagatgtgcgacgacaaa

SEQ ID NO: 76381 - DNA, 30 bp, Artificial Sequence
  Synthetic oligonucleotide
gcgcacaggaaacccaatattgccgacaaa

SEQ ID NO: 76382 - DNA, 30 bp, Artificial Sequence
  Synthetic oligonucleotide
ttaggcattcctagtagtagtgtcgacaaa

SEQ ID NO: 76383 - DNA, 30 bp, Artificial Sequence
  Synthetic oligonucleotide
tcctaaggtcacctgctaacaagtgacaaa

SEQ ID NO: 76384 - DNA, 30 bp, Artificial Sequence
  Synthetic oligonucleotide
cgtaaggaatccactacttggagctacaaa

SEQ ID NO: 76385 - DNA, 30 bp, Artificial Sequence
  Synthetic oligonucleotide
acggaactctacacacctttaaagaccaaa

SEQ ID NO: 76386 - DNA, 30 bp, Artificial Sequence
  Synthetic oligonucleotide
gtagatagcttgagaaggaaatagaccaaa

SEQ ID NO: 76387 - DNA, 30 bp, Artificial Sequence
  Synthetic oligonucleotide
gctaggtcttacaagttcatagggaccaaa

SEQ ID NO: 76388 - DNA, 30 bp, Artificial Sequence
  Synthetic oligonucleotide
ccccaaagtgtgtaaccaactgtgaccaaa

SEQ ID NO: 76389 - DNA, 30 bp, Artificial Sequence
  Synthetic oligonucleotide
cgctcgatccatgcaggagctagtaccaaa

SEQ ID NO: 76390 - DNA, 30 bp, Artificial Sequence
  Synthetic oligonucleotide
cgttaacttgcctgagaacttaaggccaaa

SEQ ID NO: 76391 - DNA, 30 bp, Artificial Sequence
  Synthetic oligonucleotide
ggttacgacccagcgccgtagggtgccaaa

SEQ ID NO: 76392 - DNA, 30 bp, Artificial Sequence
  Synthetic oligonucleotide
cggcgtagggaccctgtatcgccatccaaa

SEQ ID NO: 76393 - DNA, 30 bp, Artificial Sequence
  Synthetic oligonucleotide
gaacttcactgaggtagtgccgactccaaa

SEQ ID NO: 76394 - DNA, 30 bp, Artificial Sequence
  Synthetic oligonucleotide
aagagtcaatagaatcttcaatctagcaaa

SEQ ID NO: 76395 - DNA, 30 bp, Artificial Sequence
  Synthetic oligonucleotide
ctggaggctgatcgtcagcaccgccgcaaa

SEQ ID NO: 76396 - DNA, 30 bp, Artificial Sequence
  Synthetic oligonucleotide
cggaggtcatagaatggtctcgggcgcaaa

SEQ ID NO: 76397 - DNA, 30 bp, Artificial Sequence
  Synthetic oligonucleotide
cgacaaatttctgggacctaaggtcgcaaa

SEQ ID NO: 76398 - DNA, 30 bp, Artificial Sequence
  Synthetic oligonucleotide
agtatgcgatgcagtaaagtgtggggcaaa

SEQ ID NO: 76399 - DNA, 30 bp, Artificial Sequence
  Synthetic oligonucleotide
aaggcgaaattcgcttcattagactgcaaa

SEQ ID NO: 76400 - DNA, 30 bp, Artificial Sequence
  Synthetic oligonucleotide
accgggaaacgtggccggtcaccctgcaaa

SEQ ID NO: 76401 - DNA, 30 bp, Artificial Sequence
  Synthetic oligonucleotide
ggtgaaacgggggcgcgagacatgtgcaaa

SEQ ID NO: 76402 - DNA, 30 bp, Artificial Sequence
  Synthetic oligonucleotide
gccgtgttacgccaaagccgggaaatcaaa

SEQ ID NO: 76403 - DNA, 30 bp, Artificial Sequence
  Synthetic oligonucleotide
ccgttcgaacaactgcggcacgatatcaaa

SEQ ID NO: 76404 - DNA, 30 bp, Artificial Sequence
  Synthetic oligonucleotide
atatatgcgaacccaacaacaagactcaaa

SEQ ID NO: 76405 - DNA, 30 bp, Artificial Sequence
  Synthetic oligonucleotide
ccggcgaaatttcggcacggactactcaaa

SEQ ID NO: 76406 - DNA, 30 bp, Artificial Sequence
  Synthetic oligonucleotide
ggagccaactagcctaaacagaccgtcaaa

SEQ ID NO: 76407 - DNA, 30 bp, Artificial Sequence
  Synthetic oligonucleotide
gtgatcgacgacgtggtccgtgcggtcaaa

SEQ ID NO: 76408 - DNA, 30 bp, Artificial Sequence
  Synthetic oligonucleotide
attaagagggtgctgaaggaaagtgtcaaa

SEQ ID NO: 76409 - DNA, 30 bp, Artificial Sequence
  Synthetic oligonucleotide
tcattgcattaatagggggcggaaaagaaa

SEQ ID NO: 76410 - DNA, 30 bp, Artificial Sequence
  Synthetic oligonucleotide
gttagaagaaagggcgcttagacgaagaaa

SEQ ID NO: 76411 - DNA, 30 bp, Artificial Sequence
  Synthetic oligonucleotide
gtcggggaactcactagctaaggacagaaa

SEQ ID NO: 76412 - DNA, 30 bp, Artificial Sequence
  Synthetic oligonucleotide
ccgagaagcgataggcacatagcccagaaa

SEQ ID NO: 76413 - DNA, 30 bp, Artificial Sequence
  Synthetic oligonucleotide
aggctgaactcaacaccttatgagcagaaa

SEQ ID NO: 76414 - DNA, 31 bp, Artificial Sequence
  Synthetic oligonucleotide
ttatgccaggttaaacagcaggtgagagaaa

SEQ ID NO: 76415 - DNA, 30 bp, Artificial Sequence
  Synthetic oligonucleotide
ctttgcgaagcgaggtgcatcaccgagaaa

SEQ ID NO: 76416 - DNA, 30 bp, Artificial Sequence
  Synthetic oligonucleotide
tctagctgtataaagtcatcaggcgagaaa

SEQ ID NO: 76417 - DNA, 30 bp, Artificial Sequence
  Synthetic oligonucleotide
aacggatgaccccaatacaagtaggagaaa

SEQ ID NO: 76418 - DNA, 30 bp, Artificial Sequence
  Synthetic oligonucleotide
tcacgatcgggcttcattggagtatagaaa

SEQ ID NO: 76419 - DNA, 30 bp, Artificial Sequence
  Synthetic oligonucleotide
acgggaacaccggccaaaaagacgtagaaa

SEQ ID NO: 76420 - DNA, 30 bp, Artificial Sequence
  Synthetic oligonucleotide
tttagtgagtcaaaatcacccgaaacgaaa

SEQ ID NO: 76421 - DNA, 30 bp, Artificial Sequence
  Synthetic oligonucleotide
atagggatcgagggtaacacttcaacgaaa

SEQ ID NO: 76422 - DNA, 30 bp, Artificial Sequence
  Synthetic oligonucleotide
ggttgtggagtagaaaacggctacccgaaa

SEQ ID NO: 76423 - DNA, 30 bp, Artificial Sequence
  Synthetic oligonucleotide
acaaggggaatcgaaaagtacggagcgaaa

SEQ ID NO: 76424 - DNA, 30 bp, Artificial Sequence
  Synthetic oligonucleotide
tccttcagggggagaatgccacgggcgaaa

SEQ ID NO: 76425 - DNA, 30 bp, Artificial Sequence
  Synthetic oligonucleotide
caattctataaaaccgggatcatggcgaaa

SEQ ID NO: 76426 - DNA, 30 bp, Artificial Sequence
  Synthetic oligonucleotide
actacgtaagccacgggtcccatatcgaaa

SEQ ID NO: 76427 - DNA, 30 bp, Artificial Sequence
  Synthetic oligonucleotide
cacgtaaaataatggaaaactctgaggaaa

SEQ ID NO: 76428 - DNA, 30 bp, Artificial Sequence
  Synthetic oligonucleotide
gcatcaccgaggttacgtagagttaggaaa

SEQ ID NO: 76429 - DNA, 30 bp, Artificial Sequence
  Synthetic oligonucleotide
acagaaagccaaacatacggagttaggaaa

SEQ ID NO: 76430 - DNA, 30 bp, Artificial Sequence
  Synthetic oligonucleotide
tagctgtagagctcaatggcgcgacggaaa

SEQ ID NO: 76431 - DNA, 30 bp, Artificial Sequence
  Synthetic oligonucleotide
caagctcggagaatcatcatatcccggaaa

SEQ ID NO: 76432 - DNA, 30 bp, Artificial Sequence
  Synthetic oligonucleotide
gtcgaaaaaaatgatgtcaatggcgggaaa

SEQ ID NO: 76433 - DNA, 30 bp, Artificial Sequence
  Synthetic oligonucleotide
ggctagctactatggggtgagatggggaaa

SEQ ID NO: 76434 - DNA, 30 bp, Artificial Sequence
  Synthetic oligonucleotide
caaataaagagaaacggcggaacctggaaa

SEQ ID NO: 76435 - DNA, 30 bp, Artificial Sequence
  Synthetic oligonucleotide
tacaggaaagcgaaattcgagaattggaaa

SEQ ID NO: 76436 - DNA, 30 bp, Artificial Sequence
  Synthetic oligonucleotide
cacgttaaggaccatcgacacccttggaaa

SEQ ID NO: 76437 - DNA, 30 bp, Artificial Sequence
  Synthetic oligonucleotide
tacgtctcagcacaagttagttaaatgaaa

SEQ ID NO: 76438 - DNA, 30 bp, Artificial Sequence
  Synthetic oligonucleotide
cctaatacataagtcaaaccagcaatgaaa

SEQ ID NO: 76439 - DNA, 30 bp, Artificial Sequence
  Synthetic oligonucleotide
gggccacctgaagggtagaaagggatgaaa

SEQ ID NO: 76440 - DNA, 30 bp, Artificial Sequence
  Synthetic oligonucleotide
ccggtcggcaccgtgaaggcaactctgaaa

SEQ ID NO: 76441 - DNA, 30 bp, Artificial Sequence
  Synthetic oligonucleotide
aagagcacgtggacaaagttcaacgtgaaa

SEQ ID NO: 76442 - DNA, 30 bp, Artificial Sequence
  Synthetic oligonucleotide
ttgacacgctctacggcgagaggcttgaaa

SEQ ID NO: 76443 - DNA, 30 bp, Artificial Sequence
  Synthetic oligonucleotide
acgagttattgcgggtgtggcgctttgaaa

SEQ ID NO: 76444 - DNA, 30 bp, Artificial Sequence
  Synthetic oligonucleotide
acagagcaactatggccacactaacataaa

SEQ ID NO: 76445 - DNA, 30 bp, Artificial Sequence
  Synthetic oligonucleotide
tggtctcaattacggacaagctcgcataaa

SEQ ID NO: 76446 - DNA, 30 bp, Artificial Sequence
  Synthetic oligonucleotide
gcgcctggcacaagagcgtagtaggataaa

SEQ ID NO: 76447 - DNA, 30 bp, Artificial Sequence
  Synthetic oligonucleotide
actatgatgcgacacgtaaggccatataaa

SEQ ID NO: 76448 - DNA, 30 bp, Artificial Sequence
  Synthetic oligonucleotide
acaagccagacgggatgcacaaagcctaaa

SEQ ID NO: 76449 - DNA, 30 bp, Artificial Sequence
  Synthetic oligonucleotide
ccatatgaaagcagagtctgtagtcctaaa

SEQ ID NO: 76450 - DNA, 30 bp, Artificial Sequence
  Synthetic oligonucleotide
aggtgcctccagtaactgggtagggctaaa

SEQ ID NO: 76451 - DNA, 30 bp, Artificial Sequence
  Synthetic oligonucleotide
acggttgactgttcgggggtggggagtaaa

SEQ ID NO: 76452 - DNA, 30 bp, Artificial Sequence
  Synthetic oligonucleotide
acacgttccatttaagttaccatgagtaaa

SEQ ID NO: 76453 - DNA, 30 bp, Artificial Sequence
  Synthetic oligonucleotide
agtatcacggaaggggaatgtttgagtaaa

SEQ ID NO: 76454 - DNA, 30 bp, Artificial Sequence
  Synthetic oligonucleotide
caaagacagaagctcgggcgaagtagtaaa

SEQ ID NO: 76455 - DNA, 30 bp, Artificial Sequence
  Synthetic oligonucleotide
agcacgggtcagtcgcatttggagggtaaa

SEQ ID NO: 76456 - DNA, 30 bp, Artificial Sequence
  Synthetic oligonucleotide
tcagtagaccctagtgtacagcattgtaaa

SEQ ID NO: 76457 - DNA, 30 bp, Artificial Sequence
  Synthetic oligonucleotide
gcgttgcgcataggcatcgccagtattaaa

SEQ ID NO: 76458 - DNA, 30 bp, Artificial Sequence
  Synthetic oligonucleotide
gggaagtcattggatgccatcgatcttaaa

SEQ ID NO: 76459 - DNA, 30 bp, Artificial Sequence
  Synthetic oligonucleotide
acaaagcactaatgcgggcaacctgttaaa

SEQ ID NO: 76460 - DNA, 30 bp, Artificial Sequence
  Synthetic oligonucleotide
tcaagactatcgccaggcgggatgtttaaa

SEQ ID NO: 76461 - DNA, 30 bp, Artificial Sequence
  Synthetic oligonucleotide
ggaagatcagtaaaatggttttgcaaacaa

SEQ ID NO: 76462 - DNA, 30 bp, Artificial Sequence
  Synthetic oligonucleotide
caccgaccccgcaagagcgcaaagaaacaa

SEQ ID NO: 76463 - DNA, 30 bp, Artificial Sequence
  Synthetic oligonucleotide
ctagtcagcgatacgtaagaacataaacaa

SEQ ID NO: 76464 - DNA, 30 bp, Artificial Sequence
  Synthetic oligonucleotide
ctgagtttcggtagacataaatttcaacaa

SEQ ID NO: 76465 - DNA, 30 bp, Artificial Sequence
  Synthetic oligonucleotide
acggtcatctcagtgtgtcaatttcaacaa

SEQ ID NO: 76466 - DNA, 30 bp, Artificial Sequence
  Synthetic oligonucleotide
cacgtcctggttaagtctgcgacagaacaa

SEQ ID NO: 76467 - DNA, 30 bp, Artificial Sequence
  Synthetic oligonucleotide
tcaccttcaaataagataactagcgaacaa

SEQ ID NO: 76468 - DNA, 30 bp, Artificial Sequence
  Synthetic oligonucleotide
taagcgaagacgaccacggcagaggaacaa

SEQ ID NO: 76469 - DNA, 30 bp, Artificial Sequence
  Synthetic oligonucleotide
gaatggtaaacgtgaataatattgtaacaa

SEQ ID NO: 76470 - DNA, 30 bp, Artificial Sequence
  Synthetic oligonucleotide
aagttattcacccatcgtagagtgacacaa

SEQ ID NO: 76471 - DNA, 30 bp, Artificial Sequence
  Synthetic oligonucleotide
cgtagtaagtcggttattgggtccccacaa

SEQ ID NO: 76472 - DNA, 30 bp, Artificial Sequence
  Synthetic oligonucleotide
ttacctgctttaacacttctccgagcacaa

SEQ ID NO: 76473 - DNA, 30 bp, Artificial Sequence
  Synthetic oligonucleotide
ctcgatgtccgtcggagagttcgagcacaa

SEQ ID NO: 76474 - DNA, 30 bp, Artificial Sequence
  Synthetic oligonucleotide
tagttagattggggagatgccctggcacaa

SEQ ID NO: 76475 - DNA, 30 bp, Artificial Sequence
  Synthetic oligonucleotide
cctcgatgcactgatcctctggtggcacaa

SEQ ID NO: 76476 - DNA, 30 bp, Artificial Sequence
  Synthetic oligonucleotide
cgtcaaagatcgtagcaatccccctcacaa

SEQ ID NO: 76477 - DNA, 30 bp, Artificial Sequence
  Synthetic oligonucleotide
caagcaaggttcatttggcacttctcacaa

SEQ ID NO: 76478 - DNA, 30 bp, Artificial Sequence
  Synthetic oligonucleotide
taccgaacacccgcataggaaaccagacaa

SEQ ID NO: 76479 - DNA, 30 bp, Artificial Sequence
  Synthetic oligonucleotide
agcacccgaaatgccattgataccagacaa

SEQ ID NO: 76480 - DNA, 30 bp, Artificial Sequence
  Synthetic oligonucleotide
agtggccgatcgaacctttactaacgacaa

SEQ ID NO: 76481 - DNA, 30 bp, Artificial Sequence
  Synthetic oligonucleotide
cgctattagagggatggacaaaaccgacaa

SEQ ID NO: 76482 - DNA, 30 bp, Artificial Sequence
  Synthetic oligonucleotide
cgtatatgagggaatgggtggtatggacaa

SEQ ID NO: 76483 - DNA, 30 bp, Artificial Sequence
  Synthetic oligonucleotide
atagcacgtaatagtaactatgaatgacaa

SEQ ID NO: 76484 - DNA, 30 bp, Artificial Sequence
  Synthetic oligonucleotide
taagcgagatgtgactgcacgccctgacaa

SEQ ID NO: 76485 - DNA, 30 bp, Artificial Sequence
  Synthetic oligonucleotide
cctccatatcaaaacatgtgccatctacaa

SEQ ID NO: 76486 - DNA, 30 bp, Artificial Sequence
  Synthetic oligonucleotide
gaggataccacagacacgtagaccgtacaa

SEQ ID NO: 76487 - DNA, 30 bp, Artificial Sequence
  Synthetic oligonucleotide
ggtgaaacacgggtaatagtgatggtacaa

SEQ ID NO: 76488 - DNA, 30 bp, Artificial Sequence
  Synthetic oligonucleotide
accgtggtcgggataacgtgtacacaccaa

SEQ ID NO: 76489 - DNA, 30 bp, Artificial Sequence
  Synthetic oligonucleotide
ggtaggggaagttggaatcacgcccaccaa

SEQ ID NO: 76490 - DNA, 30 bp, Artificial Sequence
  Synthetic oligonucleotide
ggatcccatccttccagtagtcgtcaccaa

SEQ ID NO: 76491 - DNA, 30 bp, Artificial Sequence
  Synthetic oligonucleotide
ccagaatcaactgggcagacttcggaccaa

SEQ ID NO: 76492 - DNA, 30 bp, Artificial Sequence
  Synthetic oligonucleotide
acagatagggccgccaagaccggtgaccaa

SEQ ID NO: 76493 - DNA, 30 bp, Artificial Sequence
  Synthetic oligonucleotide
ctcatagttcaaggtaaacgaaactaccaa

SEQ ID NO: 76494 - DNA, 30 bp, Artificial Sequence
  Synthetic oligonucleotide
acagacgcggaggcggaggcctgcacccaa

SEQ ID NO: 76495 - DNA, 30 bp, Artificial Sequence
  Synthetic oligonucleotide
gagccactaatcacttcatgagcaccccaa

SEQ ID NO: 76496 - DNA, 30 bp, Artificial Sequence
  Synthetic oligonucleotide
taggggagtttagtcacgagagtaccccaa

SEQ ID NO: 76497 - DNA, 30 bp, Artificial Sequence
  Synthetic oligonucleotide
cgagtaaactgcacttgtagtaggccccaa

SEQ ID NO: 76498 - DNA, 30 bp, Artificial Sequence
  Synthetic oligonucleotide
tggaactaggaaagttgtaaacgggcccaa

SEQ ID NO: 76499 - DNA, 30 bp, Artificial Sequence
  Synthetic oligonucleotide
tctggatgggcaaatttcgactcacgccaa

SEQ ID NO: 76500 - DNA, 30 bp, Artificial Sequence
  Synthetic oligonucleotide
ccgcaaagggtatattacagaagacgccaa

SEQ ID NO: 76501 - DNA, 30 bp, Artificial Sequence
  Synthetic oligonucleotide
atcggcgtaaaagtgtgaccgagacgccaa

SEQ ID NO: 76502 - DNA, 30 bp, Artificial Sequence
  Synthetic oligonucleotide
acatgcgattataaagtgacgtcatgccaa

SEQ ID NO: 76503 - DNA, 30 bp, Artificial Sequence
  Synthetic oligonucleotide
tgagacggggacaagttaacaataatccaa

SEQ ID NO: 76504 - DNA, 30 bp, Artificial Sequence
  Synthetic oligonucleotide
agtggtagtgccacaatacggtagatccaa

SEQ ID NO: 76505 - DNA, 30 bp, Artificial Sequence
  Synthetic oligonucleotide
ggagaaacgctagtcagcttaggagtccaa

SEQ ID NO: 76506 - DNA, 30 bp, Artificial Sequence
  Synthetic oligonucleotide
tagcagacattgtggcgtcactgattccaa

SEQ ID NO: 76507 - DNA, 30 bp, Artificial Sequence
  Synthetic oligonucleotide
tccgcgtgccaataccttctgcggttccaa

SEQ ID NO: 76508 - DNA, 30 bp, Artificial Sequence
  Synthetic oligonucleotide
agggtaggcctgggtagctcatctttccaa

SEQ ID NO: 76509 - DNA, 30 bp, Artificial Sequence
  Synthetic oligonucleotide
tcgtataatggagcgggcatgtgaaagcaa

SEQ ID NO: 76510 - DNA, 30 bp, Artificial Sequence
  Synthetic oligonucleotide
ccagacgggatataggtgtgatgcaagcaa

SEQ ID NO: 76511 - DNA, 30 bp, Artificial Sequence
  Synthetic oligonucleotide
ccgaccatagagtaccattcatggaagcaa

SEQ ID NO: 76512 - DNA, 30 bp, Artificial Sequence
  Synthetic oligonucleotide
cgcgccacaaaacacgtagtgtgtaagcaa

SEQ ID NO: 76513 - DNA, 30 bp, Artificial Sequence
  Synthetic oligonucleotide
gctgcgcggtcgtgagagttgcaacagcaa

SEQ ID NO: 76514 - DNA, 30 bp, Artificial Sequence
  Synthetic oligonucleotide
aagtgaaacagcctgtgtgcgagacagcaa

SEQ ID NO: 76515 - DNA, 30 bp, Artificial Sequence
  Synthetic oligonucleotide
ggcaaacagcagccctaattactgcagcaa

SEQ ID NO: 76516 - DNA, 30 bp, Artificial Sequence
  Synthetic oligonucleotide
agaacatgggggatttaaggtattcagcaa

SEQ ID NO: 76517 - DNA, 30 bp, Artificial Sequence
  Synthetic oligonucleotide
acagcccaggctatctacaacccagagcaa

SEQ ID NO: 76518 - DNA, 30 bp, Artificial Sequence
  Synthetic oligonucleotide
tactgcgagggatgtgtaagtagagagcaa

SEQ ID NO: 76519 - DNA, 30 bp, Artificial Sequence
  Synthetic oligonucleotide
ccttaatgagtcgggccaaatgacgagcaa

SEQ ID NO: 76520 - DNA, 30 bp, Artificial Sequence
  Synthetic oligonucleotide
ggtatacgtagatcctaagacgatgagcaa

SEQ ID NO: 76521 - DNA, 30 bp, Artificial Sequence
  Synthetic oligonucleotide
ggggaggtcggattgccgatttctgagcaa

SEQ ID NO: 76522 - DNA, 30 bp, Artificial Sequence
  Synthetic oligonucleotide
gtctggtatggagagttaatcacctagcaa

SEQ ID NO: 76523 - DNA, 30 bp, Artificial Sequence
  Synthetic oligonucleotide
ttggaatgatcggggccaagacgttagcaa

SEQ ID NO: 76524 - DNA, 30 bp, Artificial Sequence
  Synthetic oligonucleotide
actcgttcacgaaccaacaagcccacgcaa

SEQ ID NO: 76525 - DNA, 30 bp, Artificial Sequence
  Synthetic oligonucleotide
acacttgataatacgccagatggaccgcaa

SEQ ID NO: 76526 - DNA, 30 bp, Artificial Sequence
  Synthetic oligonucleotide
aagccaacttactagcaaggtggcccgcaa

SEQ ID NO: 76527 - DNA, 30 bp, Artificial Sequence
  Synthetic oligonucleotide
agtcccttggatgtaaggaccaaagcgcaa

SEQ ID NO: 76528 - DNA, 30 bp, Artificial Sequence
  Synthetic oligonucleotide
ggtactgtgaaggggcgccaacgcgcgcaa

SEQ ID NO: 76529 - DNA, 30 bp, Artificial Sequence
  Synthetic oligonucleotide
gtgtcatcctttgagggatagttcgcgcaa

SEQ ID NO: 76530 - DNA, 30 bp, Artificial Sequence
  Synthetic oligonucleotide
aacacggattggtccgtaaaataggcgcaa

SEQ ID NO: 76531 - DNA, 30 bp, Artificial Sequence
  Synthetic oligonucleotide
agtatttcgaacaaggggcgctgaaggcaa

SEQ ID NO: 76532 - DNA, 30 bp, Artificial Sequence
  Synthetic oligonucleotide
gtgacgacagaatggcgaatcttcaggcaa

SEQ ID NO: 76533 - DNA, 30 bp, Artificial Sequence
  Synthetic oligonucleotide
gtaaatcgcatatcccatcggagtaggcaa

SEQ ID NO: 76534 - DNA, 30 bp, Artificial Sequence
  Synthetic oligonucleotide
aagcaataggaaacacagtgccaacggcaa

SEQ ID NO: 76535 - DNA, 30 bp, Artificial Sequence
  Synthetic oligonucleotide
ctaaccctgtgatcggagttaggacggcaa

SEQ ID NO: 76536 - DNA, 30 bp, Artificial Sequence
  Synthetic oligonucleotide
gacatgggactgagcgtcctatctcggcaa

SEQ ID NO: 76537 - DNA, 30 bp, Artificial Sequence
  Synthetic oligonucleotide
ggaacgagtgtgggcgtgtataatgggcaa

SEQ ID NO: 76538 - DNA, 28 bp, Artificial Sequence
  Synthetic oligonucleotide
ttacgaactagcttcagcggatgggcaa

SEQ ID NO: 76539 - DNA, 30 bp, Artificial Sequence
  Synthetic oligonucleotide
cccgtcgtgtagtctcataaatctgggcaa

SEQ ID NO: 76540 - DNA, 30 bp, Artificial Sequence
  Synthetic oligonucleotide
gcttagaagggtaaaaatgtagaatggcaa

SEQ ID NO: 76541 - DNA, 29 bp, Artificial Sequence
  Synthetic oligonucleotide
gggcactcccccagcaatactcatggcaa

SEQ ID NO: 76542 - DNA, 30 bp, Artificial Sequence
  Synthetic oligonucleotide
cacagaagctgaagggttctggagtggcaa

SEQ ID NO: 76543 - DNA, 30 bp, Artificial Sequence
  Synthetic oligonucleotide
acacacgggatataggtacataggtggcaa

SEQ ID NO: 76544 - DNA, 30 bp, Artificial Sequence
  Synthetic oligonucleotide
tcgtcagatagccggtcaaggatgtggcaa

SEQ ID NO: 76545 - DNA, 30 bp, Artificial Sequence
  Synthetic oligonucleotide
gtatgaaatgtcatttaagcagacctgcaa

SEQ ID NO: 76546 - DNA, 30 bp, Artificial Sequence
  Synthetic oligonucleotide
ctcggtagtcaactagtcaggtacctgcaa

SEQ ID NO: 76547 - DNA, 30 bp, Artificial Sequence
  Synthetic oligonucleotide
agatcgaacagcgcggtcgttcgagtgcaa

SEQ ID NO: 76548 - DNA, 30 bp, Artificial Sequence
  Synthetic oligonucleotide
aggtacgggacgccaggtcgcgatttgcaa

SEQ ID NO: 76549 - DNA, 30 bp, Artificial Sequence
  Synthetic oligonucleotide
gggcccacagcgtctccaaacggtttgcaa

SEQ ID NO: 76550 - DNA, 30 bp, Artificial Sequence
  Synthetic oligonucleotide
gtcccaaccagcctatttcgccaacatcaa

SEQ ID NO: 76551 - DNA, 30 bp, Artificial Sequence
  Synthetic oligonucleotide
gtagatcaatgcggaactgacacccatcaa

SEQ ID NO: 76552 - DNA, 30 bp, Artificial Sequence
  Synthetic oligonucleotide
ataacgtattgtgataacccccaagatcaa

SEQ ID NO: 76553 - DNA, 30 bp, Artificial Sequence
  Synthetic oligonucleotide
tcggtgcaaagggctatagcaagggatcaa

SEQ ID NO: 76554 - DNA, 28 bp, Artificial Sequence
  Synthetic oligonucleotide
taaggactagggcctaggcgtgtatcaa

SEQ ID NO: 76555 - DNA, 30 bp, Artificial Sequence
  Synthetic oligonucleotide
aaacgttcagaaaagtccgagcagactcaa

SEQ ID NO: 76556 - DNA, 30 bp, Artificial Sequence
  Synthetic oligonucleotide
tcgttttaagaaatgagcaacgtgactcaa

SEQ ID NO: 76557 - DNA, 30 bp, Artificial Sequence
  Synthetic oligonucleotide
tgtgtctgatatctggaaaatgtgactcaa

SEQ ID NO: 76558 - DNA, 30 bp, Artificial Sequence
  Synthetic oligonucleotide
ctagactcccatcgaaaagccagatctcaa

SEQ ID NO: 76559 - DNA, 30 bp, Artificial Sequence
  Synthetic oligonucleotide
tcagtacgggttactacacccgaaagtcaa

SEQ ID NO: 76560 - DNA, 30 bp, Artificial Sequence
  Synthetic oligonucleotide
catcctacggggcgagttacccgaagtcaa

SEQ ID NO: 76561 - DNA, 30 bp, Artificial Sequence
  Synthetic oligonucleotide
gcgtagatttcataaaaaaggcgccgtcaa

SEQ ID NO: 76562 - DNA, 30 bp, Artificial Sequence
  Synthetic oligonucleotide
aggggcaacaaagggggaagatgtcgtcaa

SEQ ID NO: 76563 - DNA, 30 bp, Artificial Sequence
  Synthetic oligonucleotide
actagatatggttggtggaaaattcgtcaa

SEQ ID NO: 76564 - DNA, 30 bp, Artificial Sequence
  Synthetic oligonucleotide
cgacttgtatttctcaagaagcaaggtcaa

SEQ ID NO: 76565 - DNA, 30 bp, Artificial Sequence
  Synthetic oligonucleotide
agaataatacaagggtaccgttgaggtcaa

SEQ ID NO: 76566 - DNA, 30 bp, Artificial Sequence
  Synthetic oligonucleotide
ctgacaaagggagtaagggccttcggtcaa

SEQ ID NO: 76567 - DNA, 30 bp, Artificial Sequence
  Synthetic oligonucleotide
acaagcctgggtccggtcatccagggtcaa

SEQ ID NO: 76568 - DNA, 30 bp, Artificial Sequence
  Synthetic oligonucleotide
ctaacagtcggaaacggcctacggggtcaa

SEQ ID NO: 76569 - DNA, 30 bp, Artificial Sequence
  Synthetic oligonucleotide
agaagaagggacaaccctatatctggtcaa

SEQ ID NO: 76570 - DNA, 30 bp, Artificial Sequence
  Synthetic oligonucleotide
acaacagaggtaactgcatgaggaattcaa

SEQ ID NO: 76571 - DNA, 30 bp, Artificial Sequence
  Synthetic oligonucleotide
gtcacgctacaagcaacagggggccttcaa

SEQ ID NO: 76572 - DNA, 30 bp, Artificial Sequence
  Synthetic oligonucleotide
gggatcgtgaaaggtgagctggggcttcaa

SEQ ID NO: 76573 - DNA, 30 bp, Artificial Sequence
  Synthetic oligonucleotide
agggactgaagaccacactttctcgttcaa

SEQ ID NO: 76574 - DNA, 30 bp, Artificial Sequence
  Synthetic oligonucleotide
agaactaacgcggacggtgccgtggttcaa

SEQ ID NO: 76575 - DNA, 30 bp, Artificial Sequence
  Synthetic oligonucleotide
cagccgggtaacacgcggacaaaaaaagaa

SEQ ID NO: 76576 - DNA, 30 bp, Artificial Sequence
  Synthetic oligonucleotide
acgtaccgttatcagcgaattgccaaagaa

SEQ ID NO: 76577 - DNA, 30 bp, Artificial Sequence
  Synthetic oligonucleotide
tgtcgagatctgcgtcattgcaaacaagaa

SEQ ID NO: 76578 - DNA, 30 bp, Artificial Sequence
  Synthetic oligonucleotide
ctgccagatctactcctggtgagacaagaa

SEQ ID NO: 76579 - DNA, 30 bp, Artificial Sequence
  Synthetic oligonucleotide
ggtccgaatgagtgtatgcaacgccaagaa

SEQ ID NO: 76580 - DNA, 30 bp, Artificial Sequence
  Synthetic oligonucleotide
gcggcctggatataacctcgagaagaagaa

SEQ ID NO: 76581 - DNA, 30 bp, Artificial Sequence
  Synthetic oligonucleotide
tgctgaggccaacaatagccgtaagaagaa

SEQ ID NO: 76582 - DNA, 30 bp, Artificial Sequence
  Synthetic oligonucleotide
gtgggatttgacagaaaacgattagaagaa

SEQ ID NO: 76583 - DNA, 30 bp, Artificial Sequence
  Synthetic oligonucleotide
acggaccattagagaaacccaatcgaagaa

SEQ ID NO: 76584 - DNA, 30 bp, Artificial Sequence
  Synthetic oligonucleotide
tctaggtagtgaaaacaaggacatgaagaa

SEQ ID NO: 76585 - DNA, 30 bp, Artificial Sequence
  Synthetic oligonucleotide
acgcgtaaacgtccgcgggtatatgaagaa

SEQ ID NO: 76586 - DNA, 30 bp, Artificial Sequence
  Synthetic oligonucleotide
aaaggagagcataacatataggtgtaagaa

SEQ ID NO: 76587 - DNA, 30 bp, Artificial Sequence
  Synthetic oligonucleotide
atggcagtgcccaagacggttaccacagaa

SEQ ID NO: 76588 - DNA, 30 bp, Artificial Sequence
  Synthetic oligonucleotide
aactcggaacaccgtagcctcgagacagaa

SEQ ID NO: 76589 - DNA, 30 bp, Artificial Sequence
  Synthetic oligonucleotide
ctcgggaggcgaaacaaagttcctacagaa

SEQ ID NO: 76590 - DNA, 30 bp, Artificial Sequence
  Synthetic oligonucleotide
aaaaggaaccatggttctaaacccccagaa

SEQ ID NO: 76591 - DNA, 30 bp, Artificial Sequence
  Synthetic oligonucleotide
gactactggactgctgctcaaagcccagaa

SEQ ID NO: 76592 - DNA, 30 bp, Artificial Sequence
  Synthetic oligonucleotide
agacaagacatggggaatacgctgccagaa

SEQ ID NO: 76593 - DNA, 30 bp, Artificial Sequence
  Synthetic oligonucleotide
ggcgattaagaaatccgacttggtccagaa

SEQ ID NO: 76594 - DNA, 30 bp, Artificial Sequence
  Synthetic oligonucleotide
atcggtaaagacgggaaactagaagcagaa

SEQ ID NO: 76595 - DNA, 30 bp, Artificial Sequence
  Synthetic oligonucleotide
ccatagattgtgcctcataacttggcagaa

SEQ ID NO: 76596 - DNA, 30 bp, Artificial Sequence
  Synthetic oligonucleotide
caacactgtacggcgaggactttggcagaa

SEQ ID NO: 76597 - DNA, 30 bp, Artificial Sequence
  Synthetic oligonucleotide
atagatcagtttcaagcagatcaatcagaa

SEQ ID NO: 76598 - DNA, 30 bp, Artificial Sequence
  Synthetic oligonucleotide
aagcctggtgattgtggctgtgaatcagaa

SEQ ID NO: 76599 - DNA, 30 bp, Artificial Sequence
  Synthetic oligonucleotide
acaagtgttgggtccagaaaatgatcagaa

SEQ ID NO: 76600 - DNA, 30 bp, Artificial Sequence
  Synthetic oligonucleotide
tgtcccatgaacaagactgagatctcagaa

SEQ ID NO: 76601 - DNA, 30 bp, Artificial Sequence
  Synthetic oligonucleotide
tgcggagcacggacgccaactaattcagaa

SEQ ID NO: 76602 - DNA, 30 bp, Artificial Sequence
  Synthetic oligonucleotide
cgacacgtcacaggaggactgcattcagaa

SEQ ID NO: 76603 - DNA, 30 bp, Artificial Sequence
  Synthetic oligonucleotide
tcgtgcgcgacattgtgagaaaaaagagaa

SEQ ID NO: 76604 - DNA, 30 bp, Artificial Sequence
  Synthetic oligonucleotide
gatcatgggacgttaagttcgccacgagaa

SEQ ID NO: 76605 - DNA, 30 bp, Artificial Sequence
  Synthetic oligonucleotide
gcagagttactctttcgaaactcccgagaa

SEQ ID NO: 76606 - DNA, 30 bp, Artificial Sequence
  Synthetic oligonucleotide
gggcacgattggtggtcactgtttcgagaa

SEQ ID NO: 76607 - DNA, 30 bp, Artificial Sequence
  Synthetic oligonucleotide
gctcagctactgggcgtgcctaaaggagaa

SEQ ID NO: 76608 - DNA, 30 bp, Artificial Sequence
  Synthetic oligonucleotide
cacggaagcaaccagagggatagcggagaa

SEQ ID NO: 76609 - DNA, 30 bp, Artificial Sequence
  Synthetic oligonucleotide
taaggtgggttgatggtccatcgttgagaa

SEQ ID NO: 76610 - DNA, 30 bp, Artificial Sequence
  Synthetic oligonucleotide
cgcgaggcgttacgttagcgtttttgagaa

SEQ ID NO: 76611 - DNA, 30 bp, Artificial Sequence
  Synthetic oligonucleotide
caagggtccactcaatgcattgaaatagaa

SEQ ID NO: 76612 - DNA, 30 bp, Artificial Sequence
  Synthetic oligonucleotide
tcaatcggagtctagctgggctaaatagaa

SEQ ID NO: 76613 - DNA, 30 bp, Artificial Sequence
  Synthetic oligonucleotide
gagacctgaacacctaacatgccaatagaa

SEQ ID NO: 76614 - DNA, 30 bp, Artificial Sequence
  Synthetic oligonucleotide
gcacctgggggcaaattgaaccgaatagaa

SEQ ID NO: 76615 - DNA, 30 bp, Artificial Sequence
  Synthetic oligonucleotide
gtaacgtgagtccgtatacttcgcatagaa

SEQ ID NO: 76616 - DNA, 30 bp, Artificial Sequence
  Synthetic oligonucleotide
taagattatttagggtaagccgatatagaa

SEQ ID NO: 76617 - DNA, 30 bp, Artificial Sequence
  Synthetic oligonucleotide
aggcagagtcgaggcaggtcctctatagaa

SEQ ID NO: 76618 - DNA, 30 bp, Artificial Sequence
  Synthetic oligonucleotide
ggagacgttaggattaatgggtgactagaa

SEQ ID NO: 76619 - DNA, 30 bp, Artificial Sequence
  Synthetic oligonucleotide
ctaaggctccggatcatttaccgtctagaa

SEQ ID NO: 76620 - DNA, 30 bp, Artificial Sequence
  Synthetic oligonucleotide
caacaccgcctgtccactaagtaggtagaa

SEQ ID NO: 76621 - DNA, 30 bp, Artificial Sequence
  Synthetic oligonucleotide
tatagctgcaaaagtagatcaggattagaa

SEQ ID NO: 76622 - DNA, 30 bp, Artificial Sequence
  Synthetic oligonucleotide
tcggagtgacagtacagaaatgtgttagaa

SEQ ID NO: 76623 - DNA, 30 bp, Artificial Sequence
  Synthetic oligonucleotide
gcgaacgacctccgcagatgttgacacgaa

SEQ ID NO: 76624 - DNA, 30 bp, Artificial Sequence
  Synthetic oligonucleotide
aagcaacaagctttgcgaaggtgagacgaa

SEQ ID NO: 76625 - DNA, 30 bp, Artificial Sequence
  Synthetic oligonucleotide
ggactatgagaagagcacatgcctgacgaa

SEQ ID NO: 76626 - DNA, 30 bp, Artificial Sequence
  Synthetic oligonucleotide
ctatgcacggatagtgaaatcatctacgaa

SEQ ID NO: 76627 - DNA, 30 bp, Artificial Sequence
  Synthetic oligonucleotide
aggttagtatgttaatttcaaagcgccgaa

SEQ ID NO: 76628 - DNA, 30 bp, Artificial Sequence
  Synthetic oligonucleotide
agccacatgtaacggatattatgtgccgaa

SEQ ID NO: 76629 - DNA, 30 bp, Artificial Sequence
  Synthetic oligonucleotide
agacatagggggtaagctgggcgctccgaa

SEQ ID NO: 76630 - DNA, 30 bp, Artificial Sequence
  Synthetic oligonucleotide
tcgttccgactcacggtcgaaataagcgaa

SEQ ID NO: 76631 - DNA, 30 bp, Artificial Sequence
  Synthetic oligonucleotide
actctcagtatcctaagagtactaagcgaa

SEQ ID NO: 76632 - DNA, 30 bp, Artificial Sequence
  Synthetic oligonucleotide
cggatattgttctacgaaacagatagcgaa

SEQ ID NO: 76633 - DNA, 30 bp, Artificial Sequence
  Synthetic oligonucleotide
cgctaaagaaaccgattatgggatagcgaa

SEQ ID NO: 76634 - DNA, 30 bp, Artificial Sequence
  Synthetic oligonucleotide
ttgtaaaacagatgcccagaggtccgcgaa

SEQ ID NO: 76635 - DNA, 30 bp, Artificial Sequence
  Synthetic oligonucleotide
catgcgaaactcgaatagtttaagcgcgaa

SEQ ID NO: 76636 - DNA, 30 bp, Artificial Sequence
  Synthetic oligonucleotide
cctgagattgcgaaagacgaacagcgcgaa

SEQ ID NO: 76637 - DNA, 31 bp, Artificial Sequence
  Synthetic oligonucleotide
cgtctgtgtaggcgtcagagtagcgcgcgaa

SEQ ID NO: 76638 - DNA, 30 bp, Artificial Sequence
  Synthetic oligonucleotide
tgcagacttcggacaatcctagcatgcgaa

SEQ ID NO: 76639 - DNA, 30 bp, Artificial Sequence
  Synthetic oligonucleotide
gggcgcatctctaggccaatcaggatcgaa

SEQ ID NO: 76640 - DNA, 30 bp, Artificial Sequence
  Synthetic oligonucleotide
gccttggcatggcgacgtaaacacctcgaa

SEQ ID NO: 76641 - DNA, 30 bp, Artificial Sequence
  Synthetic oligonucleotide
agggtgaacatcttgcaccatcggctcgaa

SEQ ID NO: 76642 - DNA, 30 bp, Artificial Sequence
  Synthetic oligonucleotide
tagcgaagaatcgttagttatagagtcgaa

SEQ ID NO: 76643 - DNA, 30 bp, Artificial Sequence
  Synthetic oligonucleotide
gcacgatcgatacaccggtattacgtcgaa

SEQ ID NO: 76644 - DNA, 30 bp, Artificial Sequence
  Synthetic oligonucleotide
agcatcatagggcgatgggggcccgtcgaa

SEQ ID NO: 76645 - DNA, 30 bp, Artificial Sequence
  Synthetic oligonucleotide
ggggttgtcgaacactatagcacggtcgaa

SEQ ID NO: 76646 - DNA, 30 bp, Artificial Sequence
  Synthetic oligonucleotide
ctcttgaaaagaagcaaatttgtggtcgaa

SEQ ID NO: 76647 - DNA, 30 bp, Artificial Sequence
  Synthetic oligonucleotide
aacagtaccccccagtaaaaccaattcgaa

SEQ ID NO: 76648 - DNA, 30 bp, Artificial Sequence
  Synthetic oligonucleotide
gggtggttgagacgcgaagattgtttcgaa

SEQ ID NO: 76649 - DNA, 30 bp, Artificial Sequence
  Synthetic oligonucleotide
atgttcggttcgcgaaattcggcaaaggaa

SEQ ID NO: 76650 - DNA, 30 bp, Artificial Sequence
  Synthetic oligonucleotide
tagcgtaaatataagaatagctggaaggaa

SEQ ID NO: 76651 - DNA, 30 bp, Artificial Sequence
  Synthetic oligonucleotide
aaaggaacaatggcaataagggaacaggaa

SEQ ID NO: 76652 - DNA, 30 bp, Artificial Sequence
  Synthetic oligonucleotide
cccgagccggaaggagaaggtgcacaggaa

SEQ ID NO: 76653 - DNA, 30 bp, Artificial Sequence
  Synthetic oligonucleotide
cttgtattggtggacattgataccgaggaa

SEQ ID NO: 76654 - DNA, 30 bp, Artificial Sequence
  Synthetic oligonucleotide
tgaaaatcacgggatactgaccgcgaggaa

SEQ ID NO: 76655 - DNA, 30 bp, Artificial Sequence
  Synthetic oligonucleotide
ggctgatgctatgagggtgaatgcgaggaa

SEQ ID NO: 76656 - DNA, 30 bp, Artificial Sequence
  Synthetic oligonucleotide
tcagtatcatctgtgttacccgaggaggaa

SEQ ID NO: 76657 - DNA, 30 bp, Artificial Sequence
  Synthetic oligonucleotide
catgagcattcatctcggctacatgaggaa

SEQ ID NO: 76658 - DNA, 30 bp, Artificial Sequence
  Synthetic oligonucleotide
tggggccctgacgttgctctgtgctaggaa

SEQ ID NO: 76659 - DNA, 30 bp, Artificial Sequence
  Synthetic oligonucleotide
tacaaatatcgaacgggatcttgttaggaa

SEQ ID NO: 76660 - DNA, 30 bp, Artificial Sequence
  Synthetic oligonucleotide
agcggtagaaatacaagtcgctacacggaa

SEQ ID NO: 76661 - DNA, 30 bp, Artificial Sequence
  Synthetic oligonucleotide
atgcaaatgggcggtaggtcatatacggaa

SEQ ID NO: 76662 - DNA, 30 bp, Artificial Sequence
  Synthetic oligonucleotide
gaggtctatagagcagtctcgcaaccggaa

SEQ ID NO: 76663 - DNA, 30 bp, Artificial Sequence
  Synthetic oligonucleotide
ctgaatcacgatttcttcgacaggccggaa

SEQ ID NO: 76664 - DNA, 30 bp, Artificial Sequence
  Synthetic oligonucleotide
gaagttcaagaagatcggattcatccggaa

SEQ ID NO: 76665 - DNA, 31 bp, Artificial Sequence
  Synthetic oligonucleotide
gaatcgagctgaagatggcaggtctccggaa

SEQ ID NO: 76666 - DNA, 30 bp, Artificial Sequence
  Synthetic oligonucleotide
tatgggaattagcaggcggtccaagcggaa

SEQ ID NO: 76667 - DNA, 30 bp, Artificial Sequence
  Synthetic oligonucleotide
cgtcattcaaccctgagttcagacgcggaa

SEQ ID NO: 76668 - DNA, 30 bp, Artificial Sequence
  Synthetic oligonucleotide
gcaaggtcggcaggtgacgggggcgcggaa

SEQ ID NO: 76669 - DNA, 30 bp, Artificial Sequence
  Synthetic oligonucleotide
gatgtcactgcagtcttaataagggcggaa

SEQ ID NO: 76670 - DNA, 30 bp, Artificial Sequence
  Synthetic oligonucleotide
gggctaggccaatactgttccccatcggaa

SEQ ID NO: 76671 - DNA, 30 bp, Artificial Sequence
  Synthetic oligonucleotide
cacagacacaaaagttagtcgttttcggaa

SEQ ID NO: 76672 - DNA, 30 bp, Artificial Sequence
  Synthetic oligonucleotide
tgtaaccggggctggtggcagggcagggaa

SEQ ID NO: 76673 - DNA, 30 bp, Artificial Sequence
  Synthetic oligonucleotide
gtccagtcaaccgattgccacttcagggaa

SEQ ID NO: 76674 - DNA, 31 bp, Artificial Sequence
  Synthetic oligonucleotide
atgaagggccgacagattcgtaatgtgggaa

SEQ ID NO: 76675 - DNA, 30 bp, Artificial Sequence
  Synthetic oligonucleotide
acgcgagaagggaagggcatatcttgggaa

SEQ ID NO: 76676 - DNA, 30 bp, Artificial Sequence
  Synthetic oligonucleotide
ccttccagaaaacggagttagcgttgggaa

SEQ ID NO: 76677 - DNA, 30 bp, Artificial Sequence
  Synthetic oligonucleotide
ttgactcgcaaagaaaaaacgtccatggaa

SEQ ID NO: 76678 - DNA, 30 bp, Artificial Sequence
  Synthetic oligonucleotide
aagcggtcactctggagcgtcactatggaa

SEQ ID NO: 76679 - DNA, 30 bp, Artificial Sequence
  Synthetic oligonucleotide
catcacacgctgcgagaagctgctatggaa

SEQ ID NO: 76680 - DNA, 30 bp, Artificial Sequence
  Synthetic oligonucleotide
ggctacggtccaagtgacaacgttctggaa

SEQ ID NO: 76681 - DNA, 30 bp, Artificial Sequence
  Synthetic oligonucleotide
aacattgtaaaaattggcaaatgcgtggaa

SEQ ID NO: 76682 - DNA, 30 bp, Artificial Sequence
  Synthetic oligonucleotide
gtatgcagatggatacgttgagttgtggaa

SEQ ID NO: 76683 - DNA, 30 bp, Artificial Sequence
  Synthetic oligonucleotide
gaatgggattagcagacaggcaagttggaa

SEQ ID NO: 76684 - DNA, 30 bp, Artificial Sequence
  Synthetic oligonucleotide
caccgggcacacggcatcgctactaatgaa

SEQ ID NO: 76685 - DNA, 30 bp, Artificial Sequence
  Synthetic oligonucleotide
acaggatttacgagcccgagtaggcatgaa

SEQ ID NO: 76686 - DNA, 30 bp, Artificial Sequence
  Synthetic oligonucleotide
gggctacaggattcgatgcatggggatgaa

SEQ ID NO: 76687 - DNA, 30 bp, Artificial Sequence
  Synthetic oligonucleotide
aagcggaggcaataagggtctgttgatgaa

SEQ ID NO: 76688 - DNA, 30 bp, Artificial Sequence
  Synthetic oligonucleotide
agagcggacaatcaggtaaacacgtatgaa

SEQ ID NO: 76689 - DNA, 30 bp, Artificial Sequence
  Synthetic oligonucleotide
cagagagctgtggccgctgcggtgtatgaa

SEQ ID NO: 76690 - DNA, 30 bp, Artificial Sequence
  Synthetic oligonucleotide
aataagaaatggcgcggatgagcaactgaa

SEQ ID NO: 76691 - DNA, 30 bp, Artificial Sequence
  Synthetic oligonucleotide
aagcgcaatgattaggattcacggactgaa

SEQ ID NO: 76692 - DNA, 30 bp, Artificial Sequence
  Synthetic oligonucleotide
atcggtaccagtgcgctgctcccggctgaa

SEQ ID NO: 76693 - DNA, 30 bp, Artificial Sequence
  Synthetic oligonucleotide
cggctgggagtgtgaattgactgtgctgaa

SEQ ID NO: 76694 - DNA, 30 bp, Artificial Sequence
  Synthetic oligonucleotide
tccatgagcggcggaggctagctaagtgaa

SEQ ID NO: 76695 - DNA, 30 bp, Artificial Sequence
  Synthetic oligonucleotide
ctgacttgggggatccaagctcgccgtgaa

SEQ ID NO: 76696 - DNA, 30 bp, Artificial Sequence
  Synthetic oligonucleotide
aagacgtcgaaagggggccaggatcgtgaa

SEQ ID NO: 76697 - DNA, 30 bp, Artificial Sequence
  Synthetic oligonucleotide
cacgtgacaaaggatcatccggtgattgaa

SEQ ID NO: 76698 - DNA, 30 bp, Artificial Sequence
  Synthetic oligonucleotide
caatgggcatcttgcagtacattgattgaa

SEQ ID NO: 76699 - DNA, 30 bp, Artificial Sequence
  Synthetic oligonucleotide
gattgcgaggatattaagcctgagcttgaa

SEQ ID NO: 76700 - DNA, 30 bp, Artificial Sequence
  Synthetic oligonucleotide
gacacgattaagtctggataaatagttgaa

SEQ ID NO: 76701 - DNA, 30 bp, Artificial Sequence
  Synthetic oligonucleotide
ccagtacagtcgaaagctaggagcgttgaa

SEQ ID NO: 76702 - DNA, 30 bp, Artificial Sequence
  Synthetic oligonucleotide
aagggtaagttgaatagatacggcaaataa

SEQ ID NO: 76703 - DNA, 30 bp, Artificial Sequence
  Synthetic oligonucleotide
ttaaccacttcaacaatggcaatgaaataa

SEQ ID NO: 76704 - DNA, 30 bp, Artificial Sequence
  Synthetic oligonucleotide
gcatctggataaaacacgtgggctaaataa

SEQ ID NO: 76705 - DNA, 30 bp, Artificial Sequence
  Synthetic oligonucleotide
catcagtggcagaattgcttcccccaataa

SEQ ID NO: 76706 - DNA, 30 bp, Artificial Sequence
  Synthetic oligonucleotide
cgctgtttgggaagggggtacaaagaataa

SEQ ID NO: 76707 - DNA, 30 bp, Artificial Sequence
  Synthetic oligonucleotide
gtgaccgtgtatgctgaaggattcgaataa

SEQ ID NO: 76708 - DNA, 30 bp, Artificial Sequence
  Synthetic oligonucleotide
tagctatgaatagggctagagcgtgaataa

SEQ ID NO: 76709 - DNA, 30 bp, Artificial Sequence
  Synthetic oligonucleotide
tcgcaatgcacgaccgtgatgtgttaataa

SEQ ID NO: 76710 - DNA, 30 bp, Artificial Sequence
  Synthetic oligonucleotide
ctgagcgggctcaagggctatgacacataa

SEQ ID NO: 76711 - DNA, 30 bp, Artificial Sequence
  Synthetic oligonucleotide
ggacccatgaaacgtatctaaattacataa

SEQ ID NO: 76712 - DNA, 30 bp, Artificial Sequence
  Synthetic oligonucleotide
agagtcggcccgccccacacggcaccataa

SEQ ID NO: 76713 - DNA, 30 bp, Artificial Sequence
  Synthetic oligonucleotide
caaaactgaaccaaaaacgggagaccataa

SEQ ID NO: 76714 - DNA, 30 bp, Artificial Sequence
  Synthetic oligonucleotide
ggcgactgttgaagtgatcgagagtcataa

SEQ ID NO: 76715 - DNA, 30 bp, Artificial Sequence
  Synthetic oligonucleotide
gatgaatcgttggaaaacttatccagataa

SEQ ID NO: 76716 - DNA, 30 bp, Artificial Sequence
  Synthetic oligonucleotide
taacatcatattacagcgatactacgataa

SEQ ID NO: 76717 - DNA, 30 bp, Artificial Sequence
  Synthetic oligonucleotide
cacttacggataagcaatggttgccgataa

SEQ ID NO: 76718 - DNA, 30 bp, Artificial Sequence
  Synthetic oligonucleotide
gaataagaacttgcaagtagggtgcgataa

SEQ ID NO: 76719 - DNA, 30 bp, Artificial Sequence
  Synthetic oligonucleotide
tttagggaaacgatagaggctcaaggataa

SEQ ID NO: 76720 - DNA, 31 bp, Artificial Sequence
  Synthetic oligonucleotide
gcacgtggggaggaaccgaaccctatgataa

SEQ ID NO: 76721 - DNA, 30 bp, Artificial Sequence
  Synthetic oligonucleotide
tcatcactcaagcacatgtatcggtgataa

SEQ ID NO: 76722 - DNA, 30 bp, Artificial Sequence
  Synthetic oligonucleotide
tcagtaagcttaaataaagaagaactataa

SEQ ID NO: 76723 - DNA, 30 bp, Artificial Sequence
  Synthetic oligonucleotide
ggaaattgtggatgtcagggctctgtataa

SEQ ID NO: 76724 - DNA, 30 bp, Artificial Sequence
  Synthetic oligonucleotide
gagcgagtagaacggacaactggattataa

SEQ ID NO: 76725 - DNA, 30 bp, Artificial Sequence
  Synthetic oligonucleotide
tggctgcgctgtgaaccgatagtattataa

SEQ ID NO: 76726 - DNA, 30 bp, Artificial Sequence
  Synthetic oligonucleotide
gcacgggttggatacggccacgtattataa

SEQ ID NO: 76727 - DNA, 30 bp, Artificial Sequence
  Synthetic oligonucleotide
tgtgcaagaatactcaaggatatcttataa

SEQ ID NO: 76728 - DNA, 30 bp, Artificial Sequence
  Synthetic oligonucleotide
caaatcagaggtccaattaggagaaactaa

SEQ ID NO: 76729 - DNA, 30 bp, Artificial Sequence
  Synthetic oligonucleotide
cgaggatgtgggtatcagtcggccaactaa

SEQ ID NO: 76730 - DNA, 30 bp, Artificial Sequence
  Synthetic oligonucleotide
aggggcggacactaatttggcagacactaa

SEQ ID NO: 76731 - DNA, 30 bp, Artificial Sequence
  Synthetic oligonucleotide
gtcaagagacccttagtcgtactacactaa

SEQ ID NO: 76732 - DNA, 30 bp, Artificial Sequence
  Synthetic oligonucleotide
cccgttgtaggtgttagccagaccgactaa

SEQ ID NO: 76733 - DNA, 30 bp, Artificial Sequence
  Synthetic oligonucleotide
gggaagttatcgtatgatgtttctgactaa

SEQ ID NO: 76734 - DNA, 30 bp, Artificial Sequence
  Synthetic oligonucleotide
atgtgggtagatagatcttgcattgactaa

SEQ ID NO: 76735 - DNA, 30 bp, Artificial Sequence
  Synthetic oligonucleotide
cgaaggtggtagccgcctggtgcatactaa

SEQ ID NO: 76736 - DNA, 30 bp, Artificial Sequence
  Synthetic oligonucleotide
gagacgccaactggatggtgatggtactaa

SEQ ID NO: 76737 - DNA, 30 bp, Artificial Sequence
  Synthetic oligonucleotide
ggcgaatgtgtatccacttccattacctaa

SEQ ID NO: 76738 - DNA, 30 bp, Artificial Sequence
  Synthetic oligonucleotide
agtgagaccgtggacggtacaacctcctaa

SEQ ID NO: 76739 - DNA, 30 bp, Artificial Sequence
  Synthetic oligonucleotide
tcgaaataataaacgcgagaacagtcctaa

SEQ ID NO: 76740 - DNA, 30 bp, Artificial Sequence
  Synthetic oligonucleotide
agccacatctcgaggcaatgtttgtcctaa

SEQ ID NO: 76741 - DNA, 30 bp, Artificial Sequence
  Synthetic oligonucleotide
aatcaaggcagtagtccatagacaagctaa

SEQ ID NO: 76742 - DNA, 30 bp, Artificial Sequence
  Synthetic oligonucleotide
accgggaacgatttgtcctctcgaagctaa

SEQ ID NO: 76743 - DNA, 30 bp, Artificial Sequence
  Synthetic oligonucleotide
acacgccatcgatcttgttcaaatcgctaa

SEQ ID NO: 76744 - DNA, 30 bp, Artificial Sequence
  Synthetic oligonucleotide
acctataagactgttacctggcaaggctaa

SEQ ID NO: 76745 - DNA, 30 bp, Artificial Sequence
  Synthetic oligonucleotide
aggttcgaacgcgacaagcttacaggctaa

SEQ ID NO: 76746 - DNA, 30 bp, Artificial Sequence
  Synthetic oligonucleotide
atagaagtcggtgtgaccgtcaagggctaa

SEQ ID NO: 76747 - DNA, 30 bp, Artificial Sequence
  Synthetic oligonucleotide
gaaggcaccgtcgagcaaagaaagtgctaa

SEQ ID NO: 76748 - DNA, 30 bp, Artificial Sequence
  Synthetic oligonucleotide
agctaggtactaggctgtaggcgcatctaa

SEQ ID NO: 76749 - DNA, 30 bp, Artificial Sequence
  Synthetic oligonucleotide
gggaacggtgcctcgtcctagtggttctaa

SEQ ID NO: 76750 - DNA, 30 bp, Artificial Sequence
  Synthetic oligonucleotide
ccgtccacggatggataccgacccaagtaa

SEQ ID NO: 76751 - DNA, 30 bp, Artificial Sequence
  Synthetic oligonucleotide
ttatcggggtcaatggtataacaacagtaa

SEQ ID NO: 76752 - DNA, 30 bp, Artificial Sequence
  Synthetic oligonucleotide
cacgcgtatgcgggagagggagaatagtaa

SEQ ID NO: 76753 - DNA, 31 bp, Artificial Sequence
  Synthetic oligonucleotide
agacaggcaggtgcatttaaacatctagtaa

SEQ ID NO: 76754 - DNA, 30 bp, Artificial Sequence
  Synthetic oligonucleotide
atccacatgcaccaatcattattcgcgtaa

SEQ ID NO: 76755 - DNA, 30 bp, Artificial Sequence
  Synthetic oligonucleotide
cattgtcagcacgaaaggctcgctgcgtaa

SEQ ID NO: 76756 - DNA, 30 bp, Artificial Sequence
  Synthetic oligonucleotide
cggccgacaaagtagccaaagacatcgtaa

SEQ ID NO: 76757 - DNA, 30 bp, Artificial Sequence
  Synthetic oligonucleotide
gggatatttataccaaggcggcagtcgtaa

SEQ ID NO: 76758 - DNA, 30 bp, Artificial Sequence
  Synthetic oligonucleotide
gccaagacggttgtacgtgaagtgtcgtaa

SEQ ID NO: 76759 - DNA, 30 bp, Artificial Sequence
  Synthetic oligonucleotide
ctaagctaagatggtatatgtttaaggtaa

SEQ ID NO: 76760 - DNA, 30 bp, Artificial Sequence
  Synthetic oligonucleotide
gtcaaggtatcatcacgggtcacacggtaa

SEQ ID NO: 76761 - DNA, 30 bp, Artificial Sequence
  Synthetic oligonucleotide
tcgttagggactcgggctgattgacggtaa

SEQ ID NO: 76762 - DNA, 30 bp, Artificial Sequence
  Synthetic oligonucleotide
gatcgagcctcgtggtacaggcgccggtaa

SEQ ID NO: 76763 - DNA, 30 bp, Artificial Sequence
  Synthetic oligonucleotide
cggccgatgagcgaaccttcctttcggtaa

SEQ ID NO: 76764 - DNA, 30 bp, Artificial Sequence
  Synthetic oligonucleotide
cgtagtcatcgtacactaagctgagggtaa

SEQ ID NO: 76765 - DNA, 30 bp, Artificial Sequence
  Synthetic oligonucleotide
tgtccataaaacaagtagtctaaggggtaa

SEQ ID NO: 76766 - DNA, 30 bp, Artificial Sequence
  Synthetic oligonucleotide
cctaactgaatggctaatacccatgggtaa

SEQ ID NO: 76767 - DNA, 30 bp, Artificial Sequence
  Synthetic oligonucleotide
tttggagttcgggcgcccacacgatggtaa

SEQ ID NO: 76768 - DNA, 30 bp, Artificial Sequence
  Synthetic oligonucleotide
cagaagagattgcccgtgaggaaaatgtaa

SEQ ID NO: 76769 - DNA, 30 bp, Artificial Sequence
  Synthetic oligonucleotide
gtgcaaggatatacgtacagggtcatgtaa

SEQ ID NO: 76770 - DNA, 30 bp, Artificial Sequence
  Synthetic oligonucleotide
gccggaccaccacgttaagtgagagtgtaa

SEQ ID NO: 76771 - DNA, 30 bp, Artificial Sequence
  Synthetic oligonucleotide
ctaggtattatcgaactcatatacgtgtaa

SEQ ID NO: 76772 - DNA, 30 bp, Artificial Sequence
  Synthetic oligonucleotide
acgggcggtacggactagggttgtgtgtaa

SEQ ID NO: 76773 - DNA, 30 bp, Artificial Sequence
  Synthetic oligonucleotide
ctgaattgacatcgagttccatggttgtaa

SEQ ID NO: 76774 - DNA, 30 bp, Artificial Sequence
  Synthetic oligonucleotide
tccgtgggaccaacaagtgttacaaattaa

SEQ ID NO: 76775 - DNA, 30 bp, Artificial Sequence
  Synthetic oligonucleotide
aagcggactcaaggtcgacaaatcgattaa

SEQ ID NO: 76776 - DNA, 30 bp, Artificial Sequence
  Synthetic oligonucleotide
atacgtcaggtgctatggtggagtgattaa

SEQ ID NO: 76777 - DNA, 30 bp, Artificial Sequence
  Synthetic oligonucleotide
tcggttacagacacaactggaccatattaa

SEQ ID NO: 76778 - DNA, 30 bp, Artificial Sequence
  Synthetic oligonucleotide
gcgttgcacaacgatagattcgcctattaa

SEQ ID NO: 76779 - DNA, 30 bp, Artificial Sequence
  Synthetic oligonucleotide
tgccgggaggattgatctcgagaaacttaa

SEQ ID NO: 76780 - DNA, 30 bp, Artificial Sequence
  Synthetic oligonucleotide
acactaagctcggtagacatactaacttaa

SEQ ID NO: 76781 - DNA, 30 bp, Artificial Sequence
  Synthetic oligonucleotide
ctgccaaaccaatgagagcggcgtccttaa

SEQ ID NO: 76782 - DNA, 30 bp, Artificial Sequence
  Synthetic oligonucleotide
ctactcgagaaccctaaccgctgagcttaa

SEQ ID NO: 76783 - DNA, 30 bp, Artificial Sequence
  Synthetic oligonucleotide
aggatccgtatacaacatccccgcgcttaa

SEQ ID NO: 76784 - DNA, 30 bp, Artificial Sequence
  Synthetic oligonucleotide
taagggagaaaggttgccacgcgggcttaa

SEQ ID NO: 76785 - DNA, 30 bp, Artificial Sequence
  Synthetic oligonucleotide
gggggctaacaaattccggaaaatgcttaa

SEQ ID NO: 76786 - DNA, 30 bp, Artificial Sequence
  Synthetic oligonucleotide
aacgtatgtaacaatgaaaggctctcttaa

SEQ ID NO: 76787 - DNA, 30 bp, Artificial Sequence
  Synthetic oligonucleotide
aatgagggacggctgtctcgtagaagttaa

SEQ ID NO: 76788 - DNA, 30 bp, Artificial Sequence
  Synthetic oligonucleotide
gtaagtcaacagatagtccattggagttaa

SEQ ID NO: 76789 - DNA, 30 bp, Artificial Sequence
  Synthetic oligonucleotide
tcgcgaagtggacccgtgatataccgttaa

SEQ ID NO: 76790 - DNA, 30 bp, Artificial Sequence
  Synthetic oligonucleotide
gggtagtggattcgttcagtctagcgttaa

SEQ ID NO: 76791 - DNA, 30 bp, Artificial Sequence
  Synthetic oligonucleotide
actcggggcggaaccatagttgagggttaa

SEQ ID NO: 76792 - DNA, 30 bp, Artificial Sequence
  Synthetic oligonucleotide
ggcggggtgtatccaatcagtctatgttaa

SEQ ID NO: 76793 - DNA, 30 bp, Artificial Sequence
  Synthetic oligonucleotide
agtaggcactgtgaacacaacgagatttaa

SEQ ID NO: 76794 - DNA, 30 bp, Artificial Sequence
  Synthetic oligonucleotide
cgaataaaacgagggcaaccacgtctttaa

SEQ ID NO: 76795 - DNA, 30 bp, Artificial Sequence
  Synthetic oligonucleotide
caacgtccaagcttgcggctacgattttaa

SEQ ID NO: 76796 - DNA, 30 bp, Artificial Sequence
  Synthetic oligonucleotide
acatgttgtcagaaggaggtgagcttttaa

SEQ ID NO: 76797 - DNA, 30 bp, Artificial Sequence
  Synthetic oligonucleotide
agtaaacggaatgatggtctaacgttttaa

SEQ ID NO: 76798 - DNA, 30 bp, Artificial Sequence
  Synthetic oligonucleotide
ggaagcagcgaagcgtacagtaatttttaa

SEQ ID NO: 76799 - DNA, 30 bp, Artificial Sequence
  Synthetic oligonucleotide
acggacgatcgtcaggaatcgactttttaa

SEQ ID NO: 76800 - DNA, 30 bp, Artificial Sequence
  Synthetic oligonucleotide
gtcagaccggacgtctgatgcacaaaaaca

SEQ ID NO: 76801 - DNA, 30 bp, Artificial Sequence
  Synthetic oligonucleotide
acgtggaccttgaatcgatactgacaaaca

SEQ ID NO: 76802 - DNA, 30 bp, Artificial Sequence
  Synthetic oligonucleotide
ttcaaaaacggggggagaatagaggaaaca

SEQ ID NO: 76803 - DNA, 30 bp, Artificial Sequence
  Synthetic oligonucleotide
cagaatcaacgatcagctatgacataaaca

SEQ ID NO: 76804 - DNA, 30 bp, Artificial Sequence
  Synthetic oligonucleotide
cagatggtcgacaagcgtacaccaacaaca

SEQ ID NO: 76805 - DNA, 30 bp, Artificial Sequence
  Synthetic oligonucleotide
ccgccaaatgagtcgtaataaaccacaaca

SEQ ID NO: 76806 - DNA, 30 bp, Artificial Sequence
  Synthetic oligonucleotide
ggacacaccccgaaagccaaaccgccaaca

SEQ ID NO: 76807 - DNA, 30 bp, Artificial Sequence
  Synthetic oligonucleotide
gaaaagggtgaccggggggcgacagcaaca

SEQ ID NO: 76808 - DNA, 30 bp, Artificial Sequence
  Synthetic oligonucleotide
catacggccagacaacgagcagatgcaaca

SEQ ID NO: 76809 - DNA, 30 bp, Artificial Sequence
  Synthetic oligonucleotide
tccggtatgaaccgtgccaaaactgcaaca

SEQ ID NO: 76810 - DNA, 30 bp, Artificial Sequence
  Synthetic oligonucleotide
atagccagggtggtaggatgtgtttcaaca

SEQ ID NO: 76811 - DNA, 30 bp, Artificial Sequence
  Synthetic oligonucleotide
gtgttagcgacagagatgattgaaagaaca

SEQ ID NO: 76812 - DNA, 30 bp, Artificial Sequence
  Synthetic oligonucleotide
atcccgagtgacatcgaccaggagagaaca

SEQ ID NO: 76813 - DNA, 30 bp, Artificial Sequence
  Synthetic oligonucleotide
agggcattttgtgctagtggctagagaaca

SEQ ID NO: 76814 - DNA, 30 bp, Artificial Sequence
  Synthetic oligonucleotide
aggtggaccctcggtttcactttaggaaca

SEQ ID NO: 76815 - DNA, 30 bp, Artificial Sequence
  Synthetic oligonucleotide
agatataggggtacgagcggcaggggaaca

SEQ ID NO: 76816 - DNA, 31 bp, Artificial Sequence
  Synthetic oligonucleotide
taccagaatcgaccaaaagccacctggaaca

SEQ ID NO: 76817 - DNA, 30 bp, Artificial Sequence
  Synthetic oligonucleotide
atcgatagttcaagggttataggcataaca

SEQ ID NO: 76818 - DNA, 30 bp, Artificial Sequence
  Synthetic oligonucleotide
ctaacaagtatttagagtagcgagataaca

SEQ ID NO: 76819 - DNA, 30 bp, Artificial Sequence
  Synthetic oligonucleotide
tggaacgctaggacacaatctatactaaca

SEQ ID NO: 76820 - DNA, 30 bp, Artificial Sequence
  Synthetic oligonucleotide
tcgttgacccaagttcgtggccgagtaaca

SEQ ID NO: 76821 - DNA, 30 bp, Artificial Sequence
  Synthetic oligonucleotide
aaccagataaaccttgcagcgggggtaaca

SEQ ID NO: 76822 - DNA, 30 bp, Artificial Sequence
  Synthetic oligonucleotide
taaacacttactcacatatcggggttaaca

SEQ ID NO: 76823 - DNA, 30 bp, Artificial Sequence
  Synthetic oligonucleotide
cgggctgtcaattgtatataattcaacaca

SEQ ID NO: 76824 - DNA, 30 bp, Artificial Sequence
  Synthetic oligonucleotide
acaagatatcgcgttgaaacgtttaacaca

SEQ ID NO: 76825 - DNA, 29 bp, Artificial Sequence
  Synthetic oligonucleotide
agagaggtacatagggagtttgccacaca

SEQ ID NO: 76826 - DNA, 30 bp, Artificial Sequence
  Synthetic oligonucleotide
cgcctgagcccacacagaggagtgcacaca

SEQ ID NO: 76827 - DNA, 30 bp, Artificial Sequence
  Synthetic oligonucleotide
taagcactcaggtgtgagggtgcagacaca

SEQ ID NO: 76828 - DNA, 30 bp, Artificial Sequence
  Synthetic oligonucleotide
atggagtgcctgcaagcacatgccgacaca

SEQ ID NO: 76829 - DNA, 30 bp, Artificial Sequence
  Synthetic oligonucleotide
atgtccagagacactaatagacgtgacaca

SEQ ID NO: 76830 - DNA, 30 bp, Artificial Sequence
  Synthetic oligonucleotide
aggtaagacgctgattgagcgaggtacaca

SEQ ID NO: 76831 - DNA, 30 bp, Artificial Sequence
  Synthetic oligonucleotide
cacgagattgcaggagagtaccgttacaca

SEQ ID NO: 76832 - DNA, 30 bp, Artificial Sequence
  Synthetic oligonucleotide
gcagtttaagggaccaatagtgagaccaca

SEQ ID NO: 76833 - DNA, 30 bp, Artificial Sequence
  Synthetic oligonucleotide
taacaggtttgtcttaacacagtacccaca

SEQ ID NO: 76834 - DNA, 30 bp, Artificial Sequence
  Synthetic oligonucleotide
aggccgggagccccacttaaccgagccaca

SEQ ID NO: 76835 - DNA, 30 bp, Artificial Sequence
  Synthetic oligonucleotide
taatgggagcttaaagtcaagctagccaca

SEQ ID NO: 76836 - DNA, 30 bp, Artificial Sequence
  Synthetic oligonucleotide
acagatctcgagaatggacttttcgccaca

SEQ ID NO: 76837 - DNA, 30 bp, Artificial Sequence
  Synthetic oligonucleotide
agtaattgaacagaaaggaaagcggccaca

SEQ ID NO: 76838 - DNA, 30 bp, Artificial Sequence
  Synthetic oligonucleotide
ctgttccaggagtagaccagcacttccaca

SEQ ID NO: 76839 - DNA, 30 bp, Artificial Sequence
  Synthetic oligonucleotide
accagggtagcggtattcatttcaagcaca

SEQ ID NO: 76840 - DNA, 30 bp, Artificial Sequence
  Synthetic oligonucleotide
ctttgattcgagaaaaccagcttaagcaca

SEQ ID NO: 76841 - DNA, 30 bp, Artificial Sequence
  Synthetic oligonucleotide
cgatagtctgtgtgacccacaatcagcaca

SEQ ID NO: 76842 - DNA, 30 bp, Artificial Sequence
  Synthetic oligonucleotide
aacaggaagaaaggttccgagaaacgcaca

SEQ ID NO: 76843 - DNA, 30 bp, Artificial Sequence
  Synthetic oligonucleotide
gctaagaggagtaccagtgaagaccgcaca

SEQ ID NO: 76844 - DNA, 30 bp, Artificial Sequence
  Synthetic oligonucleotide
atcaagtatcaggagtacgtacacggcaca

SEQ ID NO: 76845 - DNA, 30 bp, Artificial Sequence
  Synthetic oligonucleotide
ttgcctttactctactactagggcggcaca

SEQ ID NO: 76846 - DNA, 30 bp, Artificial Sequence
  Synthetic oligonucleotide
aaccagcattgataatgtatacagggcaca

SEQ ID NO: 76847 - DNA, 30 bp, Artificial Sequence
  Synthetic oligonucleotide
gtcaggccttagcacattgggtggggcaca

SEQ ID NO: 76848 - DNA, 30 bp, Artificial Sequence
  Synthetic oligonucleotide
ccgtgatttacgtctataaaatttggcaca

SEQ ID NO: 76849 - DNA, 30 bp, Artificial Sequence
  Synthetic oligonucleotide
taatgtgtggcgtgttcggcaaaatgcaca

SEQ ID NO: 76850 - DNA, 30 bp, Artificial Sequence
  Synthetic oligonucleotide
acacgtgcttgatgtctacaataatgcaca

SEQ ID NO: 76851 - DNA, 30 bp, Artificial Sequence
  Synthetic oligonucleotide
tccacgcgaatttacttcaaatactgcaca

SEQ ID NO: 76852 - DNA, 30 bp, Artificial Sequence
  Synthetic oligonucleotide
tcatccacacgtcaaaccgcccagtgcaca

SEQ ID NO: 76853 - DNA, 30 bp, Artificial Sequence
  Synthetic oligonucleotide
atggctggggccaccaaaaatacgatcaca

SEQ ID NO: 76854 - DNA, 30 bp, Artificial Sequence
  Synthetic oligonucleotide
tggtgcaagttgttggccaaaatgatcaca

SEQ ID NO: 76855 - DNA, 30 bp, Artificial Sequence
  Synthetic oligonucleotide
tctcctgagtccccaggtcaagccgtcaca

SEQ ID NO: 76856 - DNA, 30 bp, Artificial Sequence
  Synthetic oligonucleotide
ttacacaggtgaaccagcggtcaggtcaca

SEQ ID NO: 76857 - DNA, 30 bp, Artificial Sequence
  Synthetic oligonucleotide
atggacctggctagggtcgtgcatgtcaca

SEQ ID NO: 76858 - DNA, 30 bp, Artificial Sequence
  Synthetic oligonucleotide
ccggtacctggggagagcgatcatgtcaca

SEQ ID NO: 76859 - DNA, 30 bp, Artificial Sequence
  Synthetic oligonucleotide
ctcaacaataggcgactatttcggaagaca

SEQ ID NO: 76860 - DNA, 30 bp, Artificial Sequence
  Synthetic oligonucleotide
gcaaagcttagtcactgtcagctcgagaca

SEQ ID NO: 76861 - DNA, 30 bp, Artificial Sequence
  Synthetic oligonucleotide
cgtttctatccatgtaagcggaaggagaca

SEQ ID NO: 76862 - DNA, 30 bp, Artificial Sequence
  Synthetic oligonucleotide
ggtgtgttagctcgcgcggagtaatagaca

SEQ ID NO: 76863 - DNA, 30 bp, Artificial Sequence
  Synthetic oligonucleotide
tacacaatgggcatgcactcactgtagaca

SEQ ID NO: 76864 - DNA, 30 bp, Artificial Sequence
  Synthetic oligonucleotide
ggccacataagattgtcttggagtacgaca

SEQ ID NO: 76865 - DNA, 30 bp, Artificial Sequence
  Synthetic oligonucleotide
gaaggcccgtgtaagtactggagtccgaca

SEQ ID NO: 76866 - DNA, 30 bp, Artificial Sequence
  Synthetic oligonucleotide
ggtaacagggcgatatttccataagcgaca

SEQ ID NO: 76867 - DNA, 30 bp, Artificial Sequence
  Synthetic oligonucleotide
ggacatgtaggcctctggttgtccgcgaca

SEQ ID NO: 76868 - DNA, 30 bp, Artificial Sequence
  Synthetic oligonucleotide
ctgcgatactagtggtgcatcaacaggaca

SEQ ID NO: 76869 - DNA, 30 bp, Artificial Sequence
  Synthetic oligonucleotide
tgggacgcgttggagagggacttccggaca

SEQ ID NO: 76870 - DNA, 31 bp, Artificial Sequence
  Synthetic oligonucleotide
cgaaagtgggagaagtcacatagacgggaca

SEQ ID NO: 76871 - DNA, 30 bp, Artificial Sequence
  Synthetic oligonucleotide
catgtccaatgagaacacacctaatggaca

SEQ ID NO: 76872 - DNA, 30 bp, Artificial Sequence
  Synthetic oligonucleotide
acgagagctaccgtgacggggacaatgaca

SEQ ID NO: 76873 - DNA, 30 bp, Artificial Sequence
  Synthetic oligonucleotide
aggcacagttgggggtcgggacccatgaca

SEQ ID NO: 76874 - DNA, 30 bp, Artificial Sequence
  Synthetic oligonucleotide
aaacaggagctacagctgggagagatgaca

SEQ ID NO: 76875 - DNA, 30 bp, Artificial Sequence
  Synthetic oligonucleotide
gttgattgggtaaaactagatacgatgaca

SEQ ID NO: 76876 - DNA, 40 bp, Artificial Sequence
  Synthetic oligonucleotide
gttactactacactacagaaaccaactttgcttgctgaca

SEQ ID NO: 76877 - DNA, 30 bp, Artificial Sequence
  Synthetic oligonucleotide
gcgcaggcacgcaaagactgatacgtgaca

SEQ ID NO: 76878 - DNA, 30 bp, Artificial Sequence
  Synthetic oligonucleotide
tactagaacgattcctcgtgaagggtgaca

SEQ ID NO: 76879 - DNA, 30 bp, Artificial Sequence
  Synthetic oligonucleotide
tctgtacacaatcagcgaggagttgtgaca

SEQ ID NO: 76880 - DNA, 30 bp, Artificial Sequence
  Synthetic oligonucleotide
ccgtgaggaatgatatcctgttgattgaca

SEQ ID NO: 76881 - DNA, 30 bp, Artificial Sequence
  Synthetic oligonucleotide
actgggactagtctactgaaaatattgaca

SEQ ID NO: 76882 - DNA, 30 bp, Artificial Sequence
  Synthetic oligonucleotide
tacgcccaccccccgacttccaccttgaca

SEQ ID NO: 76883 - DNA, 30 bp, Artificial Sequence
  Synthetic oligonucleotide
aacaaaacaacgtgagctaggtagttgaca

SEQ ID NO: 76884 - DNA, 30 bp, Artificial Sequence
  Synthetic oligonucleotide
atggagcgacttatgtaagtatagaataca

SEQ ID NO: 76885 - DNA, 30 bp, Artificial Sequence
  Synthetic oligonucleotide
gctacaatcatatttggcccctcacataca

SEQ ID NO: 76886 - DNA, 30 bp, Artificial Sequence
  Synthetic oligonucleotide
gccgtattataagatgggggaaggcataca

SEQ ID NO: 76887 - DNA, 30 bp, Artificial Sequence
  Synthetic oligonucleotide
ggctactggaagctcaagttactagataca

SEQ ID NO: 76888 - DNA, 30 bp, Artificial Sequence
  Synthetic oligonucleotide
gatactcacgagtggactaatagggataca

SEQ ID NO: 76889 - DNA, 30 bp, Artificial Sequence
  Synthetic oligonucleotide
gcgagtggcggagttggtagggcatataca

SEQ ID NO: 76890 - DNA, 30 bp, Artificial Sequence
  Synthetic oligonucleotide
acgggggccgccctgtattgcaactataca

SEQ ID NO: 76891 - DNA, 30 bp, Artificial Sequence
  Synthetic oligonucleotide
aaaaagagataaggcaaaccagtctataca

SEQ ID NO: 76892 - DNA, 30 bp, Artificial Sequence
  Synthetic oligonucleotide
agctggggtaaagtacgcaacgacactaca

SEQ ID NO: 76893 - DNA, 30 bp, Artificial Sequence
  Synthetic oligonucleotide
acgaggtaaattaacggaggttacactaca

SEQ ID NO: 76894 - DNA, 30 bp, Artificial Sequence
  Synthetic oligonucleotide
gctgtgaggtcgataatatgctgtcctaca

SEQ ID NO: 76895 - DNA, 30 bp, Artificial Sequence
  Synthetic oligonucleotide
gtcgacctaaggtagatactggacgctaca

SEQ ID NO: 76896 - DNA, 30 bp, Artificial Sequence
  Synthetic oligonucleotide
gaagcatagggatctaagagataggctaca

SEQ ID NO: 76897 - DNA, 30 bp, Artificial Sequence
  Synthetic oligonucleotide
gtagcggactgtactaacttcctctctaca

SEQ ID NO: 76898 - DNA, 30 bp, Artificial Sequence
  Synthetic oligonucleotide
tgatcacagtcgaccctctgaaagtctaca

SEQ ID NO: 76899 - DNA, 30 bp, Artificial Sequence
  Synthetic oligonucleotide
gtggggctggagtacgtggaacagtctaca

SEQ ID NO: 76900 - DNA, 30 bp, Artificial Sequence
  Synthetic oligonucleotide
aacagcaaggcgtatgcggcggggtctaca

SEQ ID NO: 76901 - DNA, 30 bp, Artificial Sequence
  Synthetic oligonucleotide
gaccgggaccagaattgtaccgcaagtaca

SEQ ID NO: 76902 - DNA, 30 bp, Artificial Sequence
  Synthetic oligonucleotide
gcagatcacatccgttccctctagagtaca

SEQ ID NO: 76903 - DNA, 30 bp, Artificial Sequence
  Synthetic oligonucleotide
agaagagagacacggatgacaccccgtaca

SEQ ID NO: 76904 - DNA, 30 bp, Artificial Sequence
  Synthetic oligonucleotide
cacatcgcattattgtcgaaatgccgtaca

SEQ ID NO: 76905 - DNA, 30 bp, Artificial Sequence
  Synthetic oligonucleotide
acagacgagtgcgttatggttccgcgtaca

SEQ ID NO: 76906 - DNA, 30 bp, Artificial Sequence
  Synthetic oligonucleotide
cagtggaagtgctcggcattcctgcgtaca

SEQ ID NO: 76907 - DNA, 30 bp, Artificial Sequence
  Synthetic oligonucleotide
tggtgaggcaatcccgtcggattaggtaca

SEQ ID NO: 76908 - DNA, 30 bp, Artificial Sequence
  Synthetic oligonucleotide
ggaggtctatcgcacctgcgcaacggtaca

SEQ ID NO: 76909 - DNA, 30 bp, Artificial Sequence
  Synthetic oligonucleotide
gtcaacaggttcaaatgcgcagggggtaca

SEQ ID NO: 76910 - DNA, 30 bp, Artificial Sequence
  Synthetic oligonucleotide
tagctggatacagtagagcgaattggtaca

SEQ ID NO: 76911 - DNA, 30 bp, Artificial Sequence
  Synthetic oligonucleotide
ttcggcaagctcaagctcgaaaaatgtaca

SEQ ID NO: 76912 - DNA, 30 bp, Artificial Sequence
  Synthetic oligonucleotide
caggtcctccccaacgcgttagagtgtaca

SEQ ID NO: 76913 - DNA, 30 bp, Artificial Sequence
  Synthetic oligonucleotide
tgacaagaaaagttgctattcacgtgtaca

SEQ ID NO: 76914 - DNA, 30 bp, Artificial Sequence
  Synthetic oligonucleotide
gtcgcattagaagcagtgttagcacttaca

SEQ ID NO: 76915 - DNA, 30 bp, Artificial Sequence
  Synthetic oligonucleotide
cagcgcgaagcactcagtgtacgccttaca

SEQ ID NO: 76916 - DNA, 30 bp, Artificial Sequence
  Synthetic oligonucleotide
gagagttaggacatcaagatcgcgaaacca

SEQ ID NO: 76917 - DNA, 30 bp, Artificial Sequence
  Synthetic oligonucleotide
ccagttaaaataaatggaatcgggcaacca

SEQ ID NO: 76918 - DNA, 30 bp, Artificial Sequence
  Synthetic oligonucleotide
ggtatgatatggactagggagaatcaacca

SEQ ID NO: 76919 - DNA, 30 bp, Artificial Sequence
  Synthetic oligonucleotide
atgttagcataacagaagccggcataacca

SEQ ID NO: 76920 - DNA, 30 bp, Artificial Sequence
  Synthetic oligonucleotide
cacgtggtttaagatttagactcataacca

SEQ ID NO: 76921 - DNA, 30 bp, Artificial Sequence
  Synthetic oligonucleotide
acacacgcgttcggacagaaccggtaacca

SEQ ID NO: 76922 - DNA, 30 bp, Artificial Sequence
  Synthetic oligonucleotide
cggaatatcgactgactgtacctgtaacca

SEQ ID NO: 76923 - DNA, 30 bp, Artificial Sequence
  Synthetic oligonucleotide
ccttgacgagggttcagcccgatgacacca

SEQ ID NO: 76924 - DNA, 30 bp, Artificial Sequence
  Synthetic oligonucleotide
agccgggtgtaggaaaggcgcactacacca

SEQ ID NO: 76925 - DNA, 30 bp, Artificial Sequence
  Synthetic oligonucleotide
tgttaggaaatcaatgttatacggccacca

SEQ ID NO: 76926 - DNA, 30 bp, Artificial Sequence
  Synthetic oligonucleotide
ctcgtggtgggtgggaaacagtaagcacca

SEQ ID NO: 76927 - DNA, 30 bp, Artificial Sequence
  Synthetic oligonucleotide
ggttgagccggatctactcgtacctcacca

SEQ ID NO: 76928 - DNA, 30 bp, Artificial Sequence
  Synthetic oligonucleotide
agggacacgcccgtaatacaaagaagacca

SEQ ID NO: 76929 - DNA, 30 bp, Artificial Sequence
  Synthetic oligonucleotide
aacaaagagtaaaaagtctcgccacgacca

SEQ ID NO: 76930 - DNA, 30 bp, Artificial Sequence
  Synthetic oligonucleotide
cactacatacgaatatgtttcgtaggacca

SEQ ID NO: 76931 - DNA, 30 bp, Artificial Sequence
  Synthetic oligonucleotide
gacattgctggcaatgagggattcggacca

SEQ ID NO: 76932 - DNA, 30 bp, Artificial Sequence
  Synthetic oligonucleotide
acaccaccacagggaaggtaaaggggacca

SEQ ID NO: 76933 - DNA, 31 bp, Artificial Sequence
  Synthetic oligonucleotide
tcctcacaacatctactggtctcatggacca

SEQ ID NO: 76934 - DNA, 30 bp, Artificial Sequence
  Synthetic oligonucleotide
ttaccaggtgagggggtaccaaaatgacca

SEQ ID NO: 76935 - DNA, 30 bp, Artificial Sequence
  Synthetic oligonucleotide
gtcaacttcacttaaagctcgccctgacca

SEQ ID NO: 76936 - DNA, 30 bp, Artificial Sequence
  Synthetic oligonucleotide
aaacactaactcgtttaacagcggtgacca

SEQ ID NO: 76937 - DNA, 30 bp, Artificial Sequence
  Synthetic oligonucleotide
cgggataaagagaaaaagtaagggtgacca

SEQ ID NO: 76938 - DNA, 30 bp, Artificial Sequence
  Synthetic oligonucleotide
cgactatccagtaacgacggtctaatacca

SEQ ID NO: 76939 - DNA, 30 bp, Artificial Sequence
  Synthetic oligonucleotide
cgcccgggagcattcgacctagccatacca

SEQ ID NO: 76940 - DNA, 30 bp, Artificial Sequence
  Synthetic oligonucleotide
gcggggagttatgaaagccaatttatacca

SEQ ID NO: 76941 - DNA, 30 bp, Artificial Sequence
  Synthetic oligonucleotide
aggcttatgttaccaaagggtcagctacca

SEQ ID NO: 76942 - DNA, 30 bp, Artificial Sequence
  Synthetic oligonucleotide
acatgatcaaatgtgtactagactttacca

SEQ ID NO: 76943 - DNA, 30 bp, Artificial Sequence
  Synthetic oligonucleotide
gaacgatagtatggtggtatacggaaccca

SEQ ID NO: 76944 - DNA, 30 bp, Artificial Sequence
  Synthetic oligonucleotide
tatgaaaacatgtgggttccgcgacaccca

SEQ ID NO: 76945 - DNA, 30 bp, Artificial Sequence
  Synthetic oligonucleotide
gcaatgaagtgaacgatcggaaatcaccca

SEQ ID NO: 76946 - DNA, 30 bp, Artificial Sequence
  Synthetic oligonucleotide
tggagtggttgaacactctagattgaccca

SEQ ID NO: 76947 - DNA, 30 bp, Artificial Sequence
  Synthetic oligonucleotide
cgagaacaggcagggcaggaagtataccca

SEQ ID NO: 76948 - DNA, 30 bp, Artificial Sequence
  Synthetic oligonucleotide
tgatctggattaggattaagagtataccca

SEQ ID NO: 76949 - DNA, 30 bp, Artificial Sequence
  Synthetic oligonucleotide
accacctgtgtagagaccatggtaacccca

SEQ ID NO: 76950 - DNA, 30 bp, Artificial Sequence
  Synthetic oligonucleotide
tcaaatagaggggcacctagtgtccgccca

SEQ ID NO: 76951 - DNA, 30 bp, Artificial Sequence
  Synthetic oligonucleotide
cgatcgatcccattgacactagagggccca

SEQ ID NO: 76952 - DNA, 30 bp, Artificial Sequence
  Synthetic oligonucleotide
acatcaacagtatatcccaatacatgccca

SEQ ID NO: 76953 - DNA, 30 bp, Artificial Sequence
  Synthetic oligonucleotide
gtcacaattgcatagtcgaaagggtgccca

SEQ ID NO: 76954 - DNA, 30 bp, Artificial Sequence
  Synthetic oligonucleotide
cgggcagtgagagtacaacggaagctccca

SEQ ID NO: 76955 - DNA, 31 bp, Artificial Sequence
  Synthetic oligonucleotide
tagagttgaagacagtgggctcaaattccca

SEQ ID NO: 76956 - DNA, 30 bp, Artificial Sequence
  Synthetic oligonucleotide
aactaagacaatcccacgacaatcttccca

SEQ ID NO: 76957 - DNA, 30 bp, Artificial Sequence
  Synthetic oligonucleotide
ggaacgaatgtcctaggagacgcgttccca

SEQ ID NO: 76958 - DNA, 29 bp, Artificial Sequence
  Synthetic oligonucleotide
agacaggtgtgtcctccaacggcaagcca

SEQ ID NO: 76959 - DNA, 30 bp, Artificial Sequence
  Synthetic oligonucleotide
cgtttatacgatgggggtgtcggcaagcca

SEQ ID NO: 76960 - DNA, 30 bp, Artificial Sequence
  Synthetic oligonucleotide
ttggcgctgggaattgtaaaagtcaagcca

SEQ ID NO: 76961 - DNA, 30 bp, Artificial Sequence
  Synthetic oligonucleotide
atcagtagaatttggagacattagaagcca

SEQ ID NO: 76962 - DNA, 30 bp, Artificial Sequence
  Synthetic oligonucleotide
aggcgtctcgcacatacgacataaacgcca

SEQ ID NO: 76963 - DNA, 30 bp, Artificial Sequence
  Synthetic oligonucleotide
ggacagaaagcagggtatgcgatcacgcca

SEQ ID NO: 76964 - DNA, 30 bp, Artificial Sequence
  Synthetic oligonucleotide
tgtagacttgatttaaagcaaactacgcca

SEQ ID NO: 76965 - DNA, 30 bp, Artificial Sequence
  Synthetic oligonucleotide
cacccacgaacaatcctcatgaacaggcca

SEQ ID NO: 76966 - DNA, 30 bp, Artificial Sequence
  Synthetic oligonucleotide
ctagcgccgcgatcgtattacaggaggcca

SEQ ID NO: 76967 - DNA, 30 bp, Artificial Sequence
  Synthetic oligonucleotide
catggcactagaacgatggcttgacggcca

SEQ ID NO: 76968 - DNA, 30 bp, Artificial Sequence
  Synthetic oligonucleotide
caagtaccgttctaatgaaatggccggcca

SEQ ID NO: 76969 - DNA, 30 bp, Artificial Sequence
  Synthetic oligonucleotide
tcagggtccattgtgcacagaatggggcca

SEQ ID NO: 76970 - DNA, 30 bp, Artificial Sequence
  Synthetic oligonucleotide
tggtgaatttcgacggttcattagtggcca

SEQ ID NO: 76971 - DNA, 30 bp, Artificial Sequence
  Synthetic oligonucleotide
ccgctcgaaaagctgcatacagattggcca

SEQ ID NO: 76972 - DNA, 30 bp, Artificial Sequence
  Synthetic oligonucleotide
agatcaggcgcgcactcgttatacctgcca

SEQ ID NO: 76973 - DNA, 30 bp, Artificial Sequence
  Synthetic oligonucleotide
cccaaaaagtgaactaaatttctagtgcca

SEQ ID NO: 76974 - DNA, 30 bp, Artificial Sequence
  Synthetic oligonucleotide
ggatactggtcgaaccaaatgagtgtgcca

SEQ ID NO: 76975 - DNA, 30 bp, Artificial Sequence
  Synthetic oligonucleotide
atatacgaactaaaaaagcacattgtgcca

SEQ ID NO: 76976 - DNA, 30 bp, Artificial Sequence
  Synthetic oligonucleotide
gctacagataaaatagtataccatttgcca

SEQ ID NO: 76977 - DNA, 30 bp, Artificial Sequence
  Synthetic oligonucleotide
ctccggagctaaatatcatacaaaaatcca

SEQ ID NO: 76978 - DNA, 30 bp, Artificial Sequence
  Synthetic oligonucleotide
gctgaagctcagcacaccgcttaccatcca

SEQ ID NO: 76979 - DNA, 30 bp, Artificial Sequence
  Synthetic oligonucleotide
caccacttgagggcctaagctcatcatcca

SEQ ID NO: 76980 - DNA, 30 bp, Artificial Sequence
  Synthetic oligonucleotide
gggccagttgtaaaacccctcgcagatcca

SEQ ID NO: 76981 - DNA, 30 bp, Artificial Sequence
  Synthetic oligonucleotide
aggctcgtaaaggagccccctagagatcca

SEQ ID NO: 76982 - DNA, 30 bp, Artificial Sequence
  Synthetic oligonucleotide
atacggatgtatctggtcacccctgatcca

SEQ ID NO: 76983 - DNA, 30 bp, Artificial Sequence
  Synthetic oligonucleotide
ggacagtgagttgccagattgcttgatcca

SEQ ID NO: 76984 - DNA, 30 bp, Artificial Sequence
  Synthetic oligonucleotide
caacgaacgtgcaggtggccgtcatatcca

SEQ ID NO: 76985 - DNA, 30 bp, Artificial Sequence
  Synthetic oligonucleotide
tggaacggttatctactctgtggctatcca

SEQ ID NO: 76986 - DNA, 30 bp, Artificial Sequence
  Synthetic oligonucleotide
agacggtgaggtatgaatacgtggtatcca

SEQ ID NO: 76987 - DNA, 30 bp, Artificial Sequence
  Synthetic oligonucleotide
ctcgtgtgggtatagcgtctcgtatctcca

SEQ ID NO: 76988 - DNA, 30 bp, Artificial Sequence
  Synthetic oligonucleotide
caatggtaaaccataggcggtccgcgtcca

SEQ ID NO: 76989 - DNA, 30 bp, Artificial Sequence
  Synthetic oligonucleotide
taacaagacggttggttctggaacggtcca

SEQ ID NO: 76990 - DNA, 30 bp, Artificial Sequence
  Synthetic oligonucleotide
ctggaggaactagcataaacactgtgtcca

SEQ ID NO: 76991 - DNA, 30 bp, Artificial Sequence
  Synthetic oligonucleotide
agcaaaagaatcatatcattgagcattcca

SEQ ID NO: 76992 - DNA, 30 bp, Artificial Sequence
  Synthetic oligonucleotide
cgtcccgcgcacatcgtatttagacttcca

SEQ ID NO: 76993 - DNA, 30 bp, Artificial Sequence
  Synthetic oligonucleotide
tatgggaaatagttcagaggtggtcttcca

SEQ ID NO: 76994 - DNA, 30 bp, Artificial Sequence
  Synthetic oligonucleotide
tcgggcctgaaaaactgcgtattggttcca

SEQ ID NO: 76995 - DNA, 30 bp, Artificial Sequence
  Synthetic oligonucleotide
ttggacggtcacagtttggcctaaaaagca

SEQ ID NO: 76996 - DNA, 30 bp, Artificial Sequence
  Synthetic oligonucleotide
gattaggaggaagagatctcggataaagca

SEQ ID NO: 76997 - DNA, 30 bp, Artificial Sequence
  Synthetic oligonucleotide
aatggaggtatgctgagttagcaacaagca

SEQ ID NO: 76998 - DNA, 30 bp, Artificial Sequence
  Synthetic oligonucleotide
acacgcgaagctccgaactagagccaagca

SEQ ID NO: 76999 - DNA, 30 bp, Artificial Sequence
  Synthetic oligonucleotide
agcgtgcgcatagggggacgcggtcaagca

SEQ ID NO: 77000 - DNA, 30 bp, Artificial Sequence
  Synthetic oligonucleotide
ctacagggttaaggtagcaaaaatgaagca

SEQ ID NO: 77001 - DNA, 30 bp, Artificial Sequence
  Synthetic oligonucleotide
tcatctggtattgtaccgtacccataagca

SEQ ID NO: 77002 - DNA, 30 bp, Artificial Sequence
  Synthetic oligonucleotide
agtcgttgtctcagtcagacttactaagca

SEQ ID NO: 77003 - DNA, 30 bp, Artificial Sequence
  Synthetic oligonucleotide
acgaaagtgcgccagaaaaaaccgacagca

SEQ ID NO: 77004 - DNA, 30 bp, Artificial Sequence
  Synthetic oligonucleotide
cacacactcgggcaaaggccccatacagca

SEQ ID NO: 77005 - DNA, 30 bp, Artificial Sequence
  Synthetic oligonucleotide
tcaggaaggatttaccctattgctccagca

SEQ ID NO: 77006 - DNA, 30 bp, Artificial Sequence
  Synthetic oligonucleotide
gacggcagggccaaacacctctgtgcagca

SEQ ID NO: 77007 - DNA, 30 bp, Artificial Sequence
  Synthetic oligonucleotide
cgcagtgcaagtacaagttgtgggtcagca

SEQ ID NO: 77008 - DNA, 30 bp, Artificial Sequence
  Synthetic oligonucleotide
ttgcgggataccctgtccccagcgagagca

SEQ ID NO: 77009 - DNA, 30 bp, Artificial Sequence
  Synthetic oligonucleotide
gtctaattaacctggtcactagtgagagca

SEQ ID NO: 77010 - DNA, 30 bp, Artificial Sequence
  Synthetic oligonucleotide
gtttagagaatatactcataaggaggagca

SEQ ID NO: 77011 - DNA, 29 bp, Artificial Sequence
  Synthetic oligonucleotide
atcggctaaggcgggagattattggagca

SEQ ID NO: 77012 - DNA, 30 bp, Artificial Sequence
  Synthetic oligonucleotide
aagcaaacttcaatcgaaatggcatgagca

SEQ ID NO: 77013 - DNA, 30 bp, Artificial Sequence
  Synthetic oligonucleotide
gcgcctggaagggtgcaggtaagatgagca

SEQ ID NO: 77014 - DNA, 30 bp, Artificial Sequence
  Synthetic oligonucleotide
agtagagcatggatccgttccggatgagca

SEQ ID NO: 77015 - DNA, 30 bp, Artificial Sequence
  Synthetic oligonucleotide
acaactaaccgatccagatcgtagatagca

SEQ ID NO: 77016 - DNA, 31 bp, Artificial Sequence
  Synthetic oligonucleotide
ggctccggcgacgtatctttccgccctagca

SEQ ID NO: 77017 - DNA, 30 bp, Artificial Sequence
  Synthetic oligonucleotide
gcgctaagagctgaaatgctattcctagca

SEQ ID NO: 77018 - DNA, 30 bp, Artificial Sequence
  Synthetic oligonucleotide
cagcctggaaagtctaatcgaacgctagca

SEQ ID NO: 77019 - DNA, 30 bp, Artificial Sequence
  Synthetic oligonucleotide
ccgtgacacttcagtgtccgtggagtagca

SEQ ID NO: 77020 - DNA, 30 bp, Artificial Sequence
  Synthetic oligonucleotide
taaagggcgcggggcagactaagggtagca

SEQ ID NO: 77021 - DNA, 30 bp, Artificial Sequence
  Synthetic oligonucleotide
ggcaatttcgggcgaacaaggcaattagca

SEQ ID NO: 77022 - DNA, 30 bp, Artificial Sequence
  Synthetic oligonucleotide
aaaaaagcggagcatctacgggcattagca

SEQ ID NO: 77023 - DNA, 30 bp, Artificial Sequence
  Synthetic oligonucleotide
catggtgctgtgaagggctgacgcttagca

SEQ ID NO: 77024 - DNA, 30 bp, Artificial Sequence
  Synthetic oligonucleotide
gtcacggtcttacaccagggtgctttagca

SEQ ID NO: 77025 - DNA, 30 bp, Artificial Sequence
  Synthetic oligonucleotide
cgagtccgaccagtcaaagcgtgcaacgca

SEQ ID NO: 77026 - DNA, 30 bp, Artificial Sequence
  Synthetic oligonucleotide
cgatgatcttaaaaaccctaggagaacgca

SEQ ID NO: 77027 - DNA, 30 bp, Artificial Sequence
  Synthetic oligonucleotide
ccacaaacttgaaagttaagatgaaccgca

SEQ ID NO: 77028 - DNA, 30 bp, Artificial Sequence
  Synthetic oligonucleotide
ggaactaccaagagtttagcctacaccgca

SEQ ID NO: 77029 - DNA, 30 bp, Artificial Sequence
  Synthetic oligonucleotide
ataatcagattagaaacttactgcaccgca

SEQ ID NO: 77030 - DNA, 30 bp, Artificial Sequence
  Synthetic oligonucleotide
cgtacgtagaacgatcagacaggtaccgca

SEQ ID NO: 77031 - DNA, 30 bp, Artificial Sequence
  Synthetic oligonucleotide
ctaaggcacccaacaacgtgaatcgccgca

SEQ ID NO: 77032 - DNA, 30 bp, Artificial Sequence
  Synthetic oligonucleotide
catagaagagttattgtgttacaatccgca

SEQ ID NO: 77033 - DNA, 30 bp, Artificial Sequence
  Synthetic oligonucleotide
tgtgtaatcagaactaaatgaggctccgca

SEQ ID NO: 77034 - DNA, 30 bp, Artificial Sequence
  Synthetic oligonucleotide
aacagacagtccacctccgtcagaagcgca

SEQ ID NO: 77035 - DNA, 30 bp, Artificial Sequence
  Synthetic oligonucleotide
aggacttcttaaaaaaagttaactagcgca

SEQ ID NO: 77036 - DNA, 30 bp, Artificial Sequence
  Synthetic oligonucleotide
ttattcccgcccccaacagggggtagcgca

SEQ ID NO: 77037 - DNA, 30 bp, Artificial Sequence
  Synthetic oligonucleotide
ttaccacgtcaaccgagagtctttcgcgca

SEQ ID NO: 77038 - DNA, 30 bp, Artificial Sequence
  Synthetic oligonucleotide
aataccctgaatcgacgatacagaggcgca

SEQ ID NO: 77039 - DNA, 30 bp, Artificial Sequence
  Synthetic oligonucleotide
atctaatgaagtacggtgcacttcggcgca

SEQ ID NO: 77040 - DNA, 30 bp, Artificial Sequence
  Synthetic oligonucleotide
agtatgatacatttgggttataggggcgca

SEQ ID NO: 77041 - DNA, 30 bp, Artificial Sequence
  Synthetic oligonucleotide
gtcttggaaggtatcgagaccggaatcgca

SEQ ID NO: 77042 - DNA, 30 bp, Artificial Sequence
  Synthetic oligonucleotide
cgtgaagcttcctcgtgtcagggtatcgca

SEQ ID NO: 77043 - DNA, 30 bp, Artificial Sequence
  Synthetic oligonucleotide
caacgcataccttagagacattgtatcgca

SEQ ID NO: 77044 - DNA, 30 bp, Artificial Sequence
  Synthetic oligonucleotide
ctgacggccgagggccaaggaacagtcgca

SEQ ID NO: 77045 - DNA, 30 bp, Artificial Sequence
  Synthetic oligonucleotide
agaatctaacacgggtatggcatcgtcgca

SEQ ID NO: 77046 - DNA, 30 bp, Artificial Sequence
  Synthetic oligonucleotide
gtctagggtgagaatgctgtcggattcgca

SEQ ID NO: 77047 - DNA, 30 bp, Artificial Sequence
  Synthetic oligonucleotide
acggtatagctgctgaacgtgcgcaaggca

SEQ ID NO: 77048 - DNA, 30 bp, Artificial Sequence
  Synthetic oligonucleotide
aagtgcgattcagtagtagcgctcaaggca

SEQ ID NO: 77049 - DNA, 30 bp, Artificial Sequence
  Synthetic oligonucleotide
tggatttactagattgacaagggtcaggca

SEQ ID NO: 77050 - DNA, 30 bp, Artificial Sequence
  Synthetic oligonucleotide
ggcgaggtaggagggtcaatcgccgaggca

SEQ ID NO: 77051 - DNA, 30 bp, Artificial Sequence
  Synthetic oligonucleotide
gccaagaggtacgaacttagaacggaggca

SEQ ID NO: 77052 - DNA, 30 bp, Artificial Sequence
  Synthetic oligonucleotide
aactcgcagaggtaaggggtcggaacggca

SEQ ID NO: 77053 - DNA, 30 bp, Artificial Sequence
  Synthetic oligonucleotide
cggcaaaaattcatagttcatcgcacggca

SEQ ID NO: 77054 - DNA, 30 bp, Artificial Sequence
  Synthetic oligonucleotide
acggcgtagacgttatttgggctgacggca

SEQ ID NO: 77055 - DNA, 30 bp, Artificial Sequence
  Synthetic oligonucleotide
acgtagggagttactagcgatgatccggca

SEQ ID NO: 77056 - DNA, 30 bp, Artificial Sequence
  Synthetic oligonucleotide
actgaaatagacaggcagataagggcggca

SEQ ID NO: 77057 - DNA, 30 bp, Artificial Sequence
  Synthetic oligonucleotide
cagggacgaggacaagactcacccagggca

SEQ ID NO: 77058 - DNA, 30 bp, Artificial Sequence
  Synthetic oligonucleotide
ttacgtactaaggagcgtatactgagggca

SEQ ID NO: 77059 - DNA, 30 bp, Artificial Sequence
  Synthetic oligonucleotide
ggtggtgaatgtcagatgtactctagggca

SEQ ID NO: 77060 - DNA, 30 bp, Artificial Sequence
  Synthetic oligonucleotide
acgtctgcagtgtctcgcgtcttcggggca

SEQ ID NO: 77061 - DNA, 30 bp, Artificial Sequence
  Synthetic oligonucleotide
cacacagtgccatgtcacgttgtctgggca

SEQ ID NO: 77062 - DNA, 30 bp, Artificial Sequence
  Synthetic oligonucleotide
tacaaccgtgagagtatcgtgtgttgggca

SEQ ID NO: 77063 - DNA, 30 bp, Artificial Sequence
  Synthetic oligonucleotide
taataggcttaagagggcgaaacaatggca

SEQ ID NO: 77064 - DNA, 30 bp, Artificial Sequence
  Synthetic oligonucleotide
caggcaaaaaggtcccaaactctaatggca

SEQ ID NO: 77065 - DNA, 30 bp, Artificial Sequence
  Synthetic oligonucleotide
atgtatcgtggcaccaagtaagtaatggca

SEQ ID NO: 77066 - DNA, 30 bp, Artificial Sequence
  Synthetic oligonucleotide
agggttgtcgtaatcgccaggaggatggca

SEQ ID NO: 77067 - DNA, 30 bp, Artificial Sequence
  Synthetic oligonucleotide
ggagccgtgaggcaggcgtgaattatggca

SEQ ID NO: 77068 - DNA, 30 bp, Artificial Sequence
  Synthetic oligonucleotide
tggtggcggcaatcggcgagggtagtggca

SEQ ID NO: 77069 - DNA, 30 bp, Artificial Sequence
  Synthetic oligonucleotide
aggaatctgacaaggcttacatgcgtggca

SEQ ID NO: 77070 - DNA, 30 bp, Artificial Sequence
  Synthetic oligonucleotide
actacatcaaacatgccgggactggtggca

SEQ ID NO: 77071 - DNA, 30 bp, Artificial Sequence
  Synthetic oligonucleotide
actatggtcagaagtaaacatttggtggca

SEQ ID NO: 77072 - DNA, 30 bp, Artificial Sequence
  Synthetic oligonucleotide
ccgaaacttgtgcgttccctcatattggca

SEQ ID NO: 77073 - DNA, 30 bp, Artificial Sequence
  Synthetic oligonucleotide
tgccagactaacgcgctcaactgtttggca

SEQ ID NO: 77074 - DNA, 30 bp, Artificial Sequence
  Synthetic oligonucleotide
ttcgtactggctggagtgttaagtaatgca

SEQ ID NO: 77075 - DNA, 30 bp, Artificial Sequence
  Synthetic oligonucleotide
ccgcgctaaggagtcaatgttagtaatgca

SEQ ID NO: 77076 - DNA, 30 bp, Artificial Sequence
  Synthetic oligonucleotide
cacgcgcctcctgggaatggctaatatgca

SEQ ID NO: 77077 - DNA, 30 bp, Artificial Sequence
  Synthetic oligonucleotide
agggaaaatatacctcatggaatctatgca

SEQ ID NO: 77078 - DNA, 30 bp, Artificial Sequence
  Synthetic oligonucleotide
tccggaaagaaaaaccctagacgaactgca

SEQ ID NO: 77079 - DNA, 30 bp, Artificial Sequence
  Synthetic oligonucleotide
ctcacgaggtaactcaaggccacacctgca

SEQ ID NO: 77080 - DNA, 30 bp, Artificial Sequence
  Synthetic oligonucleotide
atatcatcaagagtgttccgaatacctgca

SEQ ID NO: 77081 - DNA, 30 bp, Artificial Sequence
  Synthetic oligonucleotide
cagcaaggataattcggtaagcggtctgca

SEQ ID NO: 77082 - DNA, 30 bp, Artificial Sequence
  Synthetic oligonucleotide
agattactaacagggtgagagggaagtgca

SEQ ID NO: 77083 - DNA, 30 bp, Artificial Sequence
  Synthetic oligonucleotide
aggttagtagaaataccggtgttaagtgca

SEQ ID NO: 77084 - DNA, 30 bp, Artificial Sequence
  Synthetic oligonucleotide
tacgggttacaaagcaaaaaacacagtgca

SEQ ID NO: 77085 - DNA, 30 bp, Artificial Sequence
  Synthetic oligonucleotide
accttctgatacttggtgtataggagtgca

SEQ ID NO: 77086 - DNA, 30 bp, Artificial Sequence
  Synthetic oligonucleotide
cgggtccaatattccacaactggtagtgca

SEQ ID NO: 77087 - DNA, 30 bp, Artificial Sequence
  Synthetic oligonucleotide
cgtatgacaaatcgactgtggggacgtgca

SEQ ID NO: 77088 - DNA, 30 bp, Artificial Sequence
  Synthetic oligonucleotide
tgatatgatagggaaacgaacatacgtgca

SEQ ID NO: 77089 - DNA, 30 bp, Artificial Sequence
  Synthetic oligonucleotide
catagtggcacgacggtattacatcgtgca

SEQ ID NO: 77090 - DNA, 30 bp, Artificial Sequence
  Synthetic oligonucleotide
agacgaagttgccatatccctggtggtgca

SEQ ID NO: 77091 - DNA, 30 bp, Artificial Sequence
  Synthetic oligonucleotide
cgactctgagtaggcacgtgaccatgtgca

SEQ ID NO: 77092 - DNA, 30 bp, Artificial Sequence
  Synthetic oligonucleotide
gcaataatcgagtgtctgcccacgtgtgca

SEQ ID NO: 77093 - DNA, 30 bp, Artificial Sequence
  Synthetic oligonucleotide
ccggctcaaactaagcggtcataaattgca

SEQ ID NO: 77094 - DNA, 30 bp, Artificial Sequence
  Synthetic oligonucleotide
gtccatgtcttcaaaatcaaaggaattgca

SEQ ID NO: 77095 - DNA, 30 bp, Artificial Sequence
  Synthetic oligonucleotide
acaaaggtcatagtacaataaatagttgca

SEQ ID NO: 77096 - DNA, 30 bp, Artificial Sequence
  Synthetic oligonucleotide
gtcgcacccgagcacaagaccaagtttgca

SEQ ID NO: 77097 - DNA, 30 bp, Artificial Sequence
  Synthetic oligonucleotide
gcgtcatgctaggtgaatcctgaaaaatca

SEQ ID NO: 77098 - DNA, 30 bp, Artificial Sequence
  Synthetic oligonucleotide
cggcagagcgctagataccacatcaaatca

SEQ ID NO: 77099 - DNA, 30 bp, Artificial Sequence
  Synthetic oligonucleotide
ggcgtaaaagttgtgaaccaaaagaaatca

SEQ ID NO: 77100 - DNA, 30 bp, Artificial Sequence
  Synthetic oligonucleotide
gtacgaggttacgagcctgaatataaatca

SEQ ID NO: 77101 - DNA, 30 bp, Artificial Sequence
  Synthetic oligonucleotide
aacacacagaacggaacctccacccaatca

SEQ ID NO: 77102 - DNA, 30 bp, Artificial Sequence
  Synthetic oligonucleotide
caggatatcttgaccgtaacccaggaatca

SEQ ID NO: 77103 - DNA, 27 bp, Artificial Sequence
  Synthetic oligonucleotide
caactatcagggaaacagcaaacatca

SEQ ID NO: 77104 - DNA, 30 bp, Artificial Sequence
  Synthetic oligonucleotide
aaacaaagctaactcgaaagtacaacatca

SEQ ID NO: 77105 - DNA, 30 bp, Artificial Sequence
  Synthetic oligonucleotide
cgcgccaaaacgggcacgtcaagcacatca

SEQ ID NO: 77106 - DNA, 30 bp, Artificial Sequence
  Synthetic oligonucleotide
accatcataaaccgattattctatacatca

SEQ ID NO: 77107 - DNA, 30 bp, Artificial Sequence
  Synthetic oligonucleotide
aacagacagggatgcatttcggctacatca

SEQ ID NO: 77108 - DNA, 30 bp, Artificial Sequence
  Synthetic oligonucleotide
aatgagaaatcggctgcacatatagcatca

SEQ ID NO: 77109 - DNA, 30 bp, Artificial Sequence
  Synthetic oligonucleotide
aagggcctgcttttcccgcaaaaggcatca

SEQ ID NO: 77110 - DNA, 30 bp, Artificial Sequence
  Synthetic oligonucleotide
ctaaatctgtcaaagagatacagaagatca

SEQ ID NO: 77111 - DNA, 30 bp, Artificial Sequence
  Synthetic oligonucleotide
acacataaaagagattacggcctcagatca

SEQ ID NO: 77112 - DNA, 30 bp, Artificial Sequence
  Synthetic oligonucleotide
aggcaaatacagggagcttacaatagatca

SEQ ID NO: 77113 - DNA, 30 bp, Artificial Sequence
  Synthetic oligonucleotide
cgtagccttgaaaaactatgaatccgatca

SEQ ID NO: 77114 - DNA, 30 bp, Artificial Sequence
  Synthetic oligonucleotide
atggacttttagatgaggagccatcgatca

SEQ ID NO: 77115 - DNA, 30 bp, Artificial Sequence
  Synthetic oligonucleotide
tgactaagacgtgcacgctaacgaggatca

SEQ ID NO: 77116 - DNA, 30 bp, Artificial Sequence
  Synthetic oligonucleotide
cgtcagacaggtagctcttcctagggatca

SEQ ID NO: 77117 - DNA, 30 bp, Artificial Sequence
  Synthetic oligonucleotide
tccacaagatggcaaatagaagcgatatca

SEQ ID NO: 77118 - DNA, 30 bp, Artificial Sequence
  Synthetic oligonucleotide
caccgaaccgtatacgttatcgaggtatca

SEQ ID NO: 77119 - DNA, 30 bp, Artificial Sequence
  Synthetic oligonucleotide
agcgtaggggcggggtcatcagatgtatca

SEQ ID NO: 77120 - DNA, 30 bp, Artificial Sequence
  Synthetic oligonucleotide
ttacatcgcggagccctaacacatttatca

SEQ ID NO: 77121 - DNA, 30 bp, Artificial Sequence
  Synthetic oligonucleotide
tctggtgggaggacctcagagaacaactca

SEQ ID NO: 77122 - DNA, 30 bp, Artificial Sequence
  Synthetic oligonucleotide
gactagagttcagggcttcaaaagcactca

SEQ ID NO: 77123 - DNA, 31 bp, Artificial Sequence
  Synthetic oligonucleotide
taggaggctttatgccaggatgcgtcactca

SEQ ID NO: 77124 - DNA, 30 bp, Artificial Sequence
  Synthetic oligonucleotide
ccggtatccgcataaagcagaggggactca

SEQ ID NO: 77125 - DNA, 30 bp, Artificial Sequence
  Synthetic oligonucleotide
aacatgacagggaattgtggacatgactca

SEQ ID NO: 77126 - DNA, 30 bp, Artificial Sequence
  Synthetic oligonucleotide
ggtcgtgtgaaccgaactaaggagacctca

SEQ ID NO: 77127 - DNA, 30 bp, Artificial Sequence
  Synthetic oligonucleotide
caatgacataattttgacagggatacctca

SEQ ID NO: 77128 - DNA, 30 bp, Artificial Sequence
  Synthetic oligonucleotide
gctacagagtgcagatactgacccgcctca

SEQ ID NO: 77129 - DNA, 30 bp, Artificial Sequence
  Synthetic oligonucleotide
gcaaacctgagagggaaaaaggccagctca

SEQ ID NO: 77130 - DNA, 30 bp, Artificial Sequence
  Synthetic oligonucleotide
atgtcacggaggtactctgaattcagctca

SEQ ID NO: 77131 - DNA, 30 bp, Artificial Sequence
  Synthetic oligonucleotide
agggaagggtataactgggtcctccgctca

SEQ ID NO: 77132 - DNA, 30 bp, Artificial Sequence
  Synthetic oligonucleotide
cataagacagggttaacggatacgcgctca

SEQ ID NO: 77133 - DNA, 30 bp, Artificial Sequence
  Synthetic oligonucleotide
ataatctaatccgagttgagtaaaggctca

SEQ ID NO: 77134 - DNA, 30 bp, Artificial Sequence
  Synthetic oligonucleotide
tgatcgaaaatccgcagttacttttgctca

SEQ ID NO: 77135 - DNA, 30 bp, Artificial Sequence
  Synthetic oligonucleotide
aggcgttcgggataaagccttcacatctca

SEQ ID NO: 77136 - DNA, 30 bp, Artificial Sequence
  Synthetic oligonucleotide
tacggaagccgatgcacacttacgatctca

SEQ ID NO: 77137 - DNA, 30 bp, Artificial Sequence
  Synthetic oligonucleotide
ggcctgaaccaactccaccaagagctctca

SEQ ID NO: 77138 - DNA, 30 bp, Artificial Sequence
  Synthetic oligonucleotide
ggcgatggcgaatggctactgtacttctca

SEQ ID NO: 77139 - DNA, 30 bp, Artificial Sequence
  Synthetic oligonucleotide
accactggatctggaagcggggccaagtca

SEQ ID NO: 77140 - DNA, 30 bp, Artificial Sequence
  Synthetic oligonucleotide
tacggagaaacgattagaaattcccagtca

SEQ ID NO: 77141 - DNA, 30 bp, Artificial Sequence
  Synthetic oligonucleotide
tgaacggaacacgagaatgctccgcagtca

SEQ ID NO: 77142 - DNA, 30 bp, Artificial Sequence
  Synthetic oligonucleotide
agggaagcttaatgtgcaaggctgcagtca

SEQ ID NO: 77143 - DNA, 30 bp, Artificial Sequence
  Synthetic oligonucleotide
caacgaatgacctacgttttcagggagtca

SEQ ID NO: 77144 - DNA, 30 bp, Artificial Sequence
  Synthetic oligonucleotide
gggatttaccacacgaaaagtatctagtca

SEQ ID NO: 77145 - DNA, 30 bp, Artificial Sequence
  Synthetic oligonucleotide
ccgtgcagagattggatgaacacttagtca

SEQ ID NO: 77146 - DNA, 30 bp, Artificial Sequence
  Synthetic oligonucleotide
taggttggcatgggagcgagttgttagtca

SEQ ID NO: 77147 - DNA, 30 bp, Artificial Sequence
  Synthetic oligonucleotide
gtggactgattgtcgaagggccaaacgtca

SEQ ID NO: 77148 - DNA, 30 bp, Artificial Sequence
  Synthetic oligonucleotide
gggaacttaaacatacctctaagcacgtca

SEQ ID NO: 77149 - DNA, 30 bp, Artificial Sequence
  Synthetic oligonucleotide
cgcagtggccaatgtacttgtgtcacgtca

SEQ ID NO: 77150 - DNA, 30 bp, Artificial Sequence
  Synthetic oligonucleotide
ggggtgcgttccgccgagcacttcacgtca

SEQ ID NO: 77151 - DNA, 30 bp, Artificial Sequence
  Synthetic oligonucleotide
agaggggggaccaccctacggctcccgtca

SEQ ID NO: 77152 - DNA, 30 bp, Artificial Sequence
  Synthetic oligonucleotide
atcatcggaggtgcagtacacgaggcgtca

SEQ ID NO: 77153 - DNA, 30 bp, Artificial Sequence
  Synthetic oligonucleotide
ggaacgaagttcatatcgtgacggaggtca

SEQ ID NO: 77154 - DNA, 30 bp, Artificial Sequence
  Synthetic oligonucleotide
ccacgcaattttaacgaagattgtaggtca

SEQ ID NO: 77155 - DNA, 30 bp, Artificial Sequence
  Synthetic oligonucleotide
gtagtcgagaaagtaacgaatcaagggtca

SEQ ID NO: 77156 - DNA, 30 bp, Artificial Sequence
  Synthetic oligonucleotide
aggaacatctttggagcctggtaagggtca

SEQ ID NO: 77157 - DNA, 30 bp, Artificial Sequence
  Synthetic oligonucleotide
cattcattagtgactctcgcgacagggtca

SEQ ID NO: 77158 - DNA, 30 bp, Artificial Sequence
  Synthetic oligonucleotide
ctcgtgtatcacgggatgaggatctggtca

SEQ ID NO: 77159 - DNA, 30 bp, Artificial Sequence
  Synthetic oligonucleotide
tttcgaaacgagagtccggtcaccctgtca

SEQ ID NO: 77160 - DNA, 30 bp, Artificial Sequence
  Synthetic oligonucleotide
gcgtaatattccgatagcgatagagtgtca

SEQ ID NO: 77161 - DNA, 30 bp, Artificial Sequence
  Synthetic oligonucleotide
gaaacgcaaataatagtacaatacgtgtca

SEQ ID NO: 77162 - DNA, 30 bp, Artificial Sequence
  Synthetic oligonucleotide
ccatacatcagacctccgcagtataattca

SEQ ID NO: 77163 - DNA, 30 bp, Artificial Sequence
  Synthetic oligonucleotide
cctaagcgatggtgcgtacggggacattca

SEQ ID NO: 77164 - DNA, 30 bp, Artificial Sequence
  Synthetic oligonucleotide
tctacatcagtatggtcagtaattcattca

SEQ ID NO: 77165 - DNA, 30 bp, Artificial Sequence
  Synthetic oligonucleotide
acggtcttagtcatagggtgcctggattca

SEQ ID NO: 77166 - DNA, 30 bp, Artificial Sequence
  Synthetic oligonucleotide
ctccgggcatcataccgaacagcaacttca

SEQ ID NO: 77167 - DNA, 30 bp, Artificial Sequence
  Synthetic oligonucleotide
ggcagggcttaaatcatactctcaacttca

SEQ ID NO: 77168 - DNA, 30 bp, Artificial Sequence
  Synthetic oligonucleotide
gccaaccaagaagcgcgatcccgaacttca

SEQ ID NO: 77169 - DNA, 30 bp, Artificial Sequence
  Synthetic oligonucleotide
acgaacacgacgatcgtcactaacccttca

SEQ ID NO: 77170 - DNA, 30 bp, Artificial Sequence
  Synthetic oligonucleotide
ggatgtcggtgaaaggtgtatatcgcttca

SEQ ID NO: 77171 - DNA, 30 bp, Artificial Sequence
  Synthetic oligonucleotide
atgctcgtcttataaggcgtgaaatcttca

SEQ ID NO: 77172 - DNA, 30 bp, Artificial Sequence
  Synthetic oligonucleotide
gaggggtagctctacttcattcagtcttca

SEQ ID NO: 77173 - DNA, 30 bp, Artificial Sequence
  Synthetic oligonucleotide
ggacttcaaaacggctcagagtggtcttca

SEQ ID NO: 77174 - DNA, 30 bp, Artificial Sequence
  Synthetic oligonucleotide
accactcagtggcagaactaatgcagttca

SEQ ID NO: 77175 - DNA, 30 bp, Artificial Sequence
  Synthetic oligonucleotide
agggagacctgtcgttagttgtatagttca

SEQ ID NO: 77176 - DNA, 30 bp, Artificial Sequence
  Synthetic oligonucleotide
tattcggactacgatagggaacgacgttca

SEQ ID NO: 77177 - DNA, 30 bp, Artificial Sequence
  Synthetic oligonucleotide
agggcgagtggtaagcccaatagtcgttca

SEQ ID NO: 77178 - DNA, 30 bp, Artificial Sequence
  Synthetic oligonucleotide
gggctactggcaaataaaaactgaggttca

SEQ ID NO: 77179 - DNA, 30 bp, Artificial Sequence
  Synthetic oligonucleotide
ctgtgggtcggaaggaatactcagggttca

SEQ ID NO: 77180 - DNA, 30 bp, Artificial Sequence
  Synthetic oligonucleotide
agcgtcctacttaggctgaatcgtggttca

SEQ ID NO: 77181 - DNA, 30 bp, Artificial Sequence
  Synthetic oligonucleotide
gtggacctaggccgcgataaccgaatttca

SEQ ID NO: 77182 - DNA, 30 bp, Artificial Sequence
  Synthetic oligonucleotide
tggctccggtagaccagaacgacgatttca

SEQ ID NO: 77183 - DNA, 30 bp, Artificial Sequence
  Synthetic oligonucleotide
ggctcaggggaatccaacctgtctatttca

SEQ ID NO: 77184 - DNA, 30 bp, Artificial Sequence
  Synthetic oligonucleotide
caagatagtcgaagtgcacatgacctttca

SEQ ID NO: 77185 - DNA, 30 bp, Artificial Sequence
  Synthetic oligonucleotide
ataaggtctatcgaacacagccagaaaaga

SEQ ID NO: 77186 - DNA, 30 bp, Artificial Sequence
  Synthetic oligonucleotide
gggaacgctcacaaacgcccccataaaaga

SEQ ID NO: 77187 - DNA, 30 bp, Artificial Sequence
  Synthetic oligonucleotide
tagagttacgttagaggaggtctgcaaaga

SEQ ID NO: 77188 - DNA, 30 bp, Artificial Sequence
  Synthetic oligonucleotide
attcacggaacaattctcgccttcgaaaga

SEQ ID NO: 77189 - DNA, 30 bp, Artificial Sequence
  Synthetic oligonucleotide
cgtatcgagcgtgtgacacgagaggaaaga

SEQ ID NO: 77190 - DNA, 30 bp, Artificial Sequence
  Synthetic oligonucleotide
acttagcgatcgaaaatggtcggataaaga

SEQ ID NO: 77191 - DNA, 30 bp, Artificial Sequence
  Synthetic oligonucleotide
aagctaggagctaattatcgtttataaaga

SEQ ID NO: 77192 - DNA, 30 bp, Artificial Sequence
  Synthetic oligonucleotide
attggacagcaaatactaggcaggtaaaga

SEQ ID NO: 77193 - DNA, 30 bp, Artificial Sequence
  Synthetic oligonucleotide
actaaaaaggacaagatcacgagttaaaga

SEQ ID NO: 77194 - DNA, 30 bp, Artificial Sequence
  Synthetic oligonucleotide
tataagcgggcaacaacgatcctaacaaga

SEQ ID NO: 77195 - DNA, 30 bp, Artificial Sequence
  Synthetic oligonucleotide
caaatgggaggtgtatctatgagcacaaga

SEQ ID NO: 77196 - DNA, 30 bp, Artificial Sequence
  Synthetic oligonucleotide
gcgcccatcagccacagctacgggccaaga

SEQ ID NO: 77197 - DNA, 30 bp, Artificial Sequence
  Synthetic oligonucleotide
tgaaaatacgaaccttagaccccgtcaaga

SEQ ID NO: 77198 - DNA, 30 bp, Artificial Sequence
  Synthetic oligonucleotide
tgcagcccgtatcggcaagcgtgaagaaga

SEQ ID NO: 77199 - DNA, 30 bp, Artificial Sequence
  Synthetic oligonucleotide
attataccactttaaccaaccataagaaga

SEQ ID NO: 77200 - DNA, 30 bp, Artificial Sequence
  Synthetic oligonucleotide
tagggtcactcctcaaagggttgcagaaga

SEQ ID NO: 77201 - DNA, 30 bp, Artificial Sequence
  Synthetic oligonucleotide
aggtgcgttggttcgtacccggtcagaaga

SEQ ID NO: 77202 - DNA, 30 bp, Artificial Sequence
  Synthetic oligonucleotide
atggactcaaccgcatccgctcggagaaga

SEQ ID NO: 77203 - DNA, 30 bp, Artificial Sequence
  Synthetic oligonucleotide
gcaaggggtagtgtacgaagggctagaaga

SEQ ID NO: 77204 - DNA, 30 bp, Artificial Sequence
  Synthetic oligonucleotide
gacatgaccggcaggaaccaggaccgaaga

SEQ ID NO: 77205 - DNA, 30 bp, Artificial Sequence
  Synthetic oligonucleotide
atgcgcaaaagagctccaaacaagcgaaga

SEQ ID NO: 77206 - DNA, 30 bp, Artificial Sequence
  Synthetic oligonucleotide
tgatgacatcaggatggggaactatgaaga

SEQ ID NO: 77207 - DNA, 30 bp, Artificial Sequence
  Synthetic oligonucleotide
tgggcctgggatatgtacgggttgtgaaga

SEQ ID NO: 77208 - DNA, 30 bp, Artificial Sequence
  Synthetic oligonucleotide
tagtttcggacacataaacgcgacataaga

SEQ ID NO: 77209 - DNA, 30 bp, Artificial Sequence
  Synthetic oligonucleotide
tcgcttggaatgcttacaaaccccataaga

SEQ ID NO: 77210 - DNA, 30 bp, Artificial Sequence
  Synthetic oligonucleotide
ccgacccggcacaatatacggcatataaga

SEQ ID NO: 77211 - DNA, 30 bp, Artificial Sequence
  Synthetic oligonucleotide
ccggggaaagtcttaaatcgctctataaga

SEQ ID NO: 77212 - DNA, 30 bp, Artificial Sequence
  Synthetic oligonucleotide
gcctggactcagaggcgttccttcctaaga

SEQ ID NO: 77213 - DNA, 30 bp, Artificial Sequence
  Synthetic oligonucleotide
ttaccaagcacacgtgaagaagagctaaga

SEQ ID NO: 77214 - DNA, 30 bp, Artificial Sequence
  Synthetic oligonucleotide
ttgaatagaggcatgtaaaggaacgtaaga

SEQ ID NO: 77215 - DNA, 30 bp, Artificial Sequence
  Synthetic oligonucleotide
ataaagtcaactcagcaggctgccgtaaga

SEQ ID NO: 77216 - DNA, 30 bp, Artificial Sequence
  Synthetic oligonucleotide
gacagtaaagccatggtataccaggtaaga

SEQ ID NO: 77217 - DNA, 30 bp, Artificial Sequence
  Synthetic oligonucleotide
agacgtgtggggccaatagcggtcttaaga

SEQ ID NO: 77218 - DNA, 30 bp, Artificial Sequence
  Synthetic oligonucleotide
atgtggagggtgtcaacgcccgtgttaaga

SEQ ID NO: 77219 - DNA, 30 bp, Artificial Sequence
  Synthetic oligonucleotide
aaagagcctaatcctttgaccaatttaaga

SEQ ID NO: 77220 - DNA, 30 bp, Artificial Sequence
  Synthetic oligonucleotide
cgtgctcaccccatcgctaggaccaacaga

SEQ ID NO: 77221 - DNA, 30 bp, Artificial Sequence
  Synthetic oligonucleotide
cacgggtcccctcgctacctcggacacaga

SEQ ID NO: 77222 - DNA, 30 bp, Artificial Sequence
  Synthetic oligonucleotide
ctcaggtccgggtgcccaggactacacaga

SEQ ID NO: 77223 - DNA, 30 bp, Artificial Sequence
  Synthetic oligonucleotide
ataagaagacttttcggccggcgtcacaga

SEQ ID NO: 77224 - DNA, 30 bp, Artificial Sequence
  Synthetic oligonucleotide
tggtaatcggatggtgatagcattcacaga

SEQ ID NO: 77225 - DNA, 30 bp, Artificial Sequence
  Synthetic oligonucleotide
tacccatagggcaggtggcacaaggacaga

SEQ ID NO: 77226 - DNA, 30 bp, Artificial Sequence
  Synthetic oligonucleotide
atgaattcgaagtgacaagcaaattacaga

SEQ ID NO: 77227 - DNA, 30 bp, Artificial Sequence
  Synthetic oligonucleotide
tacctggatgccagggggcgccgttacaga

SEQ ID NO: 77228 - DNA, 30 bp, Artificial Sequence
  Synthetic oligonucleotide
tcaaaaacccacgggtgctggaccaccaga

SEQ ID NO: 77229 - DNA, 30 bp, Artificial Sequence
  Synthetic oligonucleotide
cctaacgatagcgcactgtcatggcccaga

SEQ ID NO: 77230 - DNA, 30 bp, Artificial Sequence
  Synthetic oligonucleotide
cgagtgttttgtacccatgagaacgccaga

SEQ ID NO: 77231 - DNA, 30 bp, Artificial Sequence
  Synthetic oligonucleotide
gtcggttgcggtccgttaccgaaggccaga

SEQ ID NO: 77232 - DNA, 30 bp, Artificial Sequence
  Synthetic oligonucleotide
ccatgaaaaaatggtacggataaggccaga

SEQ ID NO: 77233 - DNA, 30 bp, Artificial Sequence
  Synthetic oligonucleotide
ggtatatcggggagtgatagaggggccaga

SEQ ID NO: 77234 - DNA, 30 bp, Artificial Sequence
  Synthetic oligonucleotide
ggtagccacgtaatacatgagaatgccaga

SEQ ID NO: 77235 - DNA, 30 bp, Artificial Sequence
  Synthetic oligonucleotide
ggggccgttaaaggtcagcccgtatccaga

SEQ ID NO: 77236 - DNA, 30 bp, Artificial Sequence
  Synthetic oligonucleotide
cagatatatgaggttagtgcgcactccaga

SEQ ID NO: 77237 - DNA, 30 bp, Artificial Sequence
  Synthetic oligonucleotide
cgaacagtttctcggagatttggttccaga

SEQ ID NO: 77238 - DNA, 30 bp, Artificial Sequence
  Synthetic oligonucleotide
aagaacaactccaggcgcatcgtgagcaga

SEQ ID NO: 77239 - DNA, 30 bp, Artificial Sequence
  Synthetic oligonucleotide
gtcgagtttcctacaacataccgtagcaga

SEQ ID NO: 77240 - DNA, 30 bp, Artificial Sequence
  Synthetic oligonucleotide
aaccacaggacaccagcgcgctcacgcaga

SEQ ID NO: 77241 - DNA, 30 bp, Artificial Sequence
  Synthetic oligonucleotide
aagggagtttggacgatatggcaaggcaga

SEQ ID NO: 77242 - DNA, 30 bp, Artificial Sequence
  Synthetic oligonucleotide
agagacgtccgtgcgaatagacacggcaga

SEQ ID NO: 77243 - DNA, 30 bp, Artificial Sequence
  Synthetic oligonucleotide
gagcgagatttgcaagattatgtgatcaga

SEQ ID NO: 77244 - DNA, 30 bp, Artificial Sequence
  Synthetic oligonucleotide
caattctcctaggagattgtacatatcaga

SEQ ID NO: 77245 - DNA, 30 bp, Artificial Sequence
  Synthetic oligonucleotide
agggggtagcaaaccgacgcttttatcaga

SEQ ID NO: 77246 - DNA, 30 bp, Artificial Sequence
  Synthetic oligonucleotide
accttaacatagctatgaacttaactcaga

SEQ ID NO: 77247 - DNA, 30 bp, Artificial Sequence
  Synthetic oligonucleotide
catcgggagtgtgcgcgcggaagagtcaga

SEQ ID NO: 77248 - DNA, 30 bp, Artificial Sequence
  Synthetic oligonucleotide
gggcatggattgggggcctagagagtcaga

SEQ ID NO: 77249 - DNA, 30 bp, Artificial Sequence
  Synthetic oligonucleotide
acggcacaagtggtgggcctaaacgtcaga

SEQ ID NO: 77250 - DNA, 30 bp, Artificial Sequence
  Synthetic oligonucleotide
ggccgtgtggggtagttatttaacgtcaga

SEQ ID NO: 77251 - DNA, 30 bp, Artificial Sequence
  Synthetic oligonucleotide
ctaaggcccgggggcgtacgcgccgtcaga

SEQ ID NO: 77252 - DNA, 30 bp, Artificial Sequence
  Synthetic oligonucleotide
acagcggaatttggcaatcatgccgtcaga

SEQ ID NO: 77253 - DNA, 30 bp, Artificial Sequence
  Synthetic oligonucleotide
tcggactaagctgtaacgtatcgcttcaga

SEQ ID NO: 77254 - DNA, 30 bp, Artificial Sequence
  Synthetic oligonucleotide
cgtgaggcgtgtatgactcgacggttcaga

SEQ ID NO: 77255 - DNA, 30 bp, Artificial Sequence
  Synthetic oligonucleotide
aaatggggtgatgggattggtcaaaagaga

SEQ ID NO: 77256 - DNA, 30 bp, Artificial Sequence
  Synthetic oligonucleotide
agatcataagctcagtagaggtaaaagaga

SEQ ID NO: 77257 - DNA, 30 bp, Artificial Sequence
  Synthetic oligonucleotide
atgcaataccgggttgttcgtgggaagaga

SEQ ID NO: 77258 - DNA, 30 bp, Artificial Sequence
  Synthetic oligonucleotide
ccaagttaataacagaaagtcactaagaga

SEQ ID NO: 77259 - DNA, 30 bp, Artificial Sequence
  Synthetic oligonucleotide
ctgattggggcaaaccgcgtcccgcagaga

SEQ ID NO: 77260 - DNA, 30 bp, Artificial Sequence
  Synthetic oligonucleotide
ataatcaggtggatagggaaaagagagaga

SEQ ID NO: 77261 - DNA, 30 bp, Artificial Sequence
  Synthetic oligonucleotide
cagggggataagttgccacaacacgagaga

SEQ ID NO: 77262 - DNA, 30 bp, Artificial Sequence
  Synthetic oligonucleotide
tgaccgcctgggggtaggatcggggagaga

SEQ ID NO: 77263 - DNA, 30 bp, Artificial Sequence
  Synthetic oligonucleotide
gtcagcgtagcctggtaaagtagtgagaga

SEQ ID NO: 77264 - DNA, 30 bp, Artificial Sequence
  Synthetic oligonucleotide
agtgagtgattacaaagcactggtgagaga

SEQ ID NO: 77265 - DNA, 30 bp, Artificial Sequence
  Synthetic oligonucleotide
gggcagcgatccaaacttgcacgatagaga

SEQ ID NO: 77266 - DNA, 30 bp, Artificial Sequence
  Synthetic oligonucleotide
ggctaatgtagactctagacaaattagaga

SEQ ID NO: 77267 - DNA, 30 bp, Artificial Sequence
  Synthetic oligonucleotide
ccggtacgccaatttcggttcgattagaga

SEQ ID NO: 77268 - DNA, 30 bp, Artificial Sequence
  Synthetic oligonucleotide
aacgggctcacgcgcgcggggtcaccgaga

SEQ ID NO: 77269 - DNA, 30 bp, Artificial Sequence
  Synthetic oligonucleotide
atggtgatggggaatataaaggtagcgaga

SEQ ID NO: 77270 - DNA, 30 bp, Artificial Sequence
  Synthetic oligonucleotide
atactgctgacctaattccggacgtcgaga

SEQ ID NO: 77271 - DNA, 30 bp, Artificial Sequence
  Synthetic oligonucleotide
taggccaaccgagttccatccaggtcgaga

SEQ ID NO: 77272 - DNA, 30 bp, Artificial Sequence
  Synthetic oligonucleotide
cctcgcattataaggggcaggtggtcgaga

SEQ ID NO: 77273 - DNA, 30 bp, Artificial Sequence
  Synthetic oligonucleotide
ctaactagatgattaggaacggtaaggaga

SEQ ID NO: 77274 - DNA, 30 bp, Artificial Sequence
  Synthetic oligonucleotide
cttagaagattccactttgtaatcaggaga

SEQ ID NO: 77275 - DNA, 30 bp, Artificial Sequence
  Synthetic oligonucleotide
caagtcatcgccttggaactcgagaggaga

SEQ ID NO: 77276 - DNA, 30 bp, Artificial Sequence
  Synthetic oligonucleotide
atagacatacccgaatctgactataggaga

SEQ ID NO: 77277 - DNA, 30 bp, Artificial Sequence
  Synthetic oligonucleotide
gtgctgtgatcgcaagacattgagcggaga

SEQ ID NO: 77278 - DNA, 31 bp, Artificial Sequence
  Synthetic oligonucleotide
gcgtaatcataatagttgattcgtgcggaga

SEQ ID NO: 77279 - DNA, 30 bp, Artificial Sequence
  Synthetic oligonucleotide
gaatggatcgaaacaagctgaaaagggaga

SEQ ID NO: 77280 - DNA, 30 bp, Artificial Sequence
  Synthetic oligonucleotide
taacggaaatagaggcttcacctagggaga

SEQ ID NO: 77281 - DNA, 30 bp, Artificial Sequence
  Synthetic oligonucleotide
tatacggatattgaaaggatgagtgggaga

SEQ ID NO: 77282 - DNA, 30 bp, Artificial Sequence
  Synthetic oligonucleotide
agccgtgagaagttgtggggcggtgggaga

SEQ ID NO: 77283 - DNA, 30 bp, Artificial Sequence
  Synthetic oligonucleotide
ttgggggctaacaatatagtacagtggaga

SEQ ID NO: 77284 - DNA, 30 bp, Artificial Sequence
  Synthetic oligonucleotide
ccggcaatggtgttcggtcgaatgtggaga

SEQ ID NO: 77285 - DNA, 30 bp, Artificial Sequence
  Synthetic oligonucleotide
gccatagcaaggggtgttacttgaatgaga

SEQ ID NO: 77286 - DNA, 30 bp, Artificial Sequence
  Synthetic oligonucleotide
gggtgttaagcgctaagaaaggccatgaga

SEQ ID NO: 77287 - DNA, 30 bp, Artificial Sequence
  Synthetic oligonucleotide
tgacacgcgagccagagtactagcatgaga

SEQ ID NO: 77288 - DNA, 30 bp, Artificial Sequence
  Synthetic oligonucleotide
aggtgtcgaatgtggggcaccgtcatgaga

SEQ ID NO: 77289 - DNA, 30 bp, Artificial Sequence
  Synthetic oligonucleotide
ccgcgacgaaagcactgtcgtcccctgaga

SEQ ID NO: 77290 - DNA, 30 bp, Artificial Sequence
  Synthetic oligonucleotide
agtcgatctctaccataagcaccgctgaga

SEQ ID NO: 77291 - DNA, 30 bp, Artificial Sequence
  Synthetic oligonucleotide
taatgaaactttagagagtgatggctgaga

SEQ ID NO: 77292 - DNA, 30 bp, Artificial Sequence
  Synthetic oligonucleotide
cgtagagctcgcagtcccggtaatttgaga

SEQ ID NO: 77293 - DNA, 30 bp, Artificial Sequence
  Synthetic oligonucleotide
gccaggtaaataatccttaaaactttgaga

SEQ ID NO: 77294 - DNA, 30 bp, Artificial Sequence
  Synthetic oligonucleotide
cacgagtcctgcgcgcatcaaacaaataga

SEQ ID NO: 77295 - DNA, 30 bp, Artificial Sequence
  Synthetic oligonucleotide
cgcatagatttacaaaagtttaataataga

SEQ ID NO: 77296 - DNA, 30 bp, Artificial Sequence
  Synthetic oligonucleotide
cgacgacggcgctttagtccaaaacataga

SEQ ID NO: 77297 - DNA, 30 bp, Artificial Sequence
  Synthetic oligonucleotide
gttgagccgatctcgtttcctacacataga

SEQ ID NO: 77298 - DNA, 30 bp, Artificial Sequence
  Synthetic oligonucleotide
tacggtaccactgcgcctgcctaagataga

SEQ ID NO: 77299 - DNA, 30 bp, Artificial Sequence
  Synthetic oligonucleotide
tgctgtacaggcaccgattatcgagataga

SEQ ID NO: 77300 - DNA, 30 bp, Artificial Sequence
  Synthetic oligonucleotide
acatgtagaacaattggacatgtggataga

SEQ ID NO: 77301 - DNA, 30 bp, Artificial Sequence
  Synthetic oligonucleotide
cacgtgtgggaacctccaccggaaactaga

SEQ ID NO: 77302 - DNA, 30 bp, Artificial Sequence
  Synthetic oligonucleotide
cagttaatcgcataggcgtgcggaactaga

SEQ ID NO: 77303 - DNA, 30 bp, Artificial Sequence
  Synthetic oligonucleotide
ccggaattagcgtcgtccaattagtctaga

SEQ ID NO: 77304 - DNA, 30 bp, Artificial Sequence
  Synthetic oligonucleotide
catagcttcattgcgatattacggagtaga

SEQ ID NO: 77305 - DNA, 30 bp, Artificial Sequence
  Synthetic oligonucleotide
ttagcggacaaatatatagggattagtaga

SEQ ID NO: 77306 - DNA, 30 bp, Artificial Sequence
  Synthetic oligonucleotide
cgtgggggtgaggggctatgacttcgtaga

SEQ ID NO: 77307 - DNA, 30 bp, Artificial Sequence
  Synthetic oligonucleotide
gcatgaacaaataggctctagcgctgtaga

SEQ ID NO: 77308 - DNA, 30 bp, Artificial Sequence
  Synthetic oligonucleotide
ggtggcgtaaagtccttcgcaaagtgtaga

SEQ ID NO: 77309 - DNA, 30 bp, Artificial Sequence
  Synthetic oligonucleotide
ccgaaaatgcgacactggtcgtacattaga

SEQ ID NO: 77310 - DNA, 30 bp, Artificial Sequence
  Synthetic oligonucleotide
ccaactgccaaagcgaagatagccgttaga

SEQ ID NO: 77311 - DNA, 30 bp, Artificial Sequence
  Synthetic oligonucleotide
tctcacgtggtaacgtcgtcaatcgttaga

SEQ ID NO: 77312 - DNA, 30 bp, Artificial Sequence
  Synthetic oligonucleotide
ataggacacgaacattaaaacccggttaga

SEQ ID NO: 77313 - DNA, 30 bp, Artificial Sequence
  Synthetic oligonucleotide
acgtggtgccagcagacaacggttgttaga

SEQ ID NO: 77314 - DNA, 30 bp, Artificial Sequence
  Synthetic oligonucleotide
gtaacacagtgtaccaaatccacgtttaga

SEQ ID NO: 77315 - DNA, 30 bp, Artificial Sequence
  Synthetic oligonucleotide
tgctccgtgacaatatcctatataaaacga

SEQ ID NO: 77316 - DNA, 30 bp, Artificial Sequence
  Synthetic oligonucleotide
accataactaactgactgttcttaaaacga

SEQ ID NO: 77317 - DNA, 30 bp, Artificial Sequence
  Synthetic oligonucleotide
agctgtcaacaaaggccgaagactaaacga

SEQ ID NO: 77318 - DNA, 30 bp, Artificial Sequence
  Synthetic oligonucleotide
gtatggtgttgagactaaggcattaaacga

SEQ ID NO: 77319 - DNA, 30 bp, Artificial Sequence
  Synthetic oligonucleotide
gctctaatgccaaactgggtccgacaacga

SEQ ID NO: 77320 - DNA, 30 bp, Artificial Sequence
  Synthetic oligonucleotide
ctattggaagagagttagtgctagcaacga

SEQ ID NO: 77321 - DNA, 30 bp, Artificial Sequence
  Synthetic oligonucleotide
cggaccccgacagtgcgtgtgacagaacga

SEQ ID NO: 77322 - DNA, 30 bp, Artificial Sequence
  Synthetic oligonucleotide
gcaacaatgatgtctaataaacacgaacga

SEQ ID NO: 77323 - DNA, 30 bp, Artificial Sequence
  Synthetic oligonucleotide
aaaagatggctacttgctggccaggaacga

SEQ ID NO: 77324 - DNA, 30 bp, Artificial Sequence
  Synthetic oligonucleotide
ttagcaattgggaagggtaaaaactaacga

SEQ ID NO: 77325 - DNA, 30 bp, Artificial Sequence
  Synthetic oligonucleotide
atgtgatctcgatcggaatggtcttaacga

SEQ ID NO: 77326 - DNA, 30 bp, Artificial Sequence
  Synthetic oligonucleotide
gaatcagggtcagagaatgagacaacacga

SEQ ID NO: 77327 - DNA, 30 bp, Artificial Sequence
  Synthetic oligonucleotide
gggtaatattgaatcagaacaatgacacga

SEQ ID NO: 77328 - DNA, 30 bp, Artificial Sequence
  Synthetic oligonucleotide
ctgtaagaggaatctacccatatgacacga

SEQ ID NO: 77329 - DNA, 30 bp, Artificial Sequence
  Synthetic oligonucleotide
cagggatcgcgaataaacagtcagccacga

SEQ ID NO: 77330 - DNA, 30 bp, Artificial Sequence
  Synthetic oligonucleotide
agcgatcaaacaactgcgcggaacgcacga

SEQ ID NO: 77331 - DNA, 30 bp, Artificial Sequence
  Synthetic oligonucleotide
agagcaggagtattctgagcattatcacga

SEQ ID NO: 77332 - DNA, 30 bp, Artificial Sequence
  Synthetic oligonucleotide
cgcaaaaagtccgggaggcgtttcagacga

SEQ ID NO: 77333 - DNA, 30 bp, Artificial Sequence
  Synthetic oligonucleotide
ccgagtatttcacatggaggactgcgacga

SEQ ID NO: 77334 - DNA, 30 bp, Artificial Sequence
  Synthetic oligonucleotide
gtagcagtctgtagttgcctaggcggacga

SEQ ID NO: 77335 - DNA, 30 bp, Artificial Sequence
  Synthetic oligonucleotide
tcaggtttctcaaaatcacagatcggacga

SEQ ID NO: 77336 - DNA, 30 bp, Artificial Sequence
  Synthetic oligonucleotide
agcccacaaacttctcctaactcatgacga

SEQ ID NO: 77337 - DNA, 30 bp, Artificial Sequence
  Synthetic oligonucleotide
gatcgacgctcgtagtgggagatgtgacga

SEQ ID NO: 77338 - DNA, 30 bp, Artificial Sequence
  Synthetic oligonucleotide
aggtactaggctcggtgggccgaaatacga

SEQ ID NO: 77339 - DNA, 30 bp, Artificial Sequence
  Synthetic oligonucleotide
cggtctagtctcaagggtacaacaatacga

SEQ ID NO: 77340 - DNA, 30 bp, Artificial Sequence
  Synthetic oligonucleotide
acggggtaagtagccagattagacatacga

SEQ ID NO: 77341 - DNA, 30 bp, Artificial Sequence
  Synthetic oligonucleotide
gtccgggagctaaagcgattaagcatacga

SEQ ID NO: 77342 - DNA, 30 bp, Artificial Sequence
  Synthetic oligonucleotide
tctgggggtgtggagattacttatatacga

SEQ ID NO: 77343 - DNA, 30 bp, Artificial Sequence
  Synthetic oligonucleotide
ctagagcctctcgagattagatgactacga

SEQ ID NO: 77344 - DNA, 30 bp, Artificial Sequence
  Synthetic oligonucleotide
tgcatatacattactggtgggagcctacga

SEQ ID NO: 77345 - DNA, 30 bp, Artificial Sequence
  Synthetic oligonucleotide
acgttggcggcgatacatgtgatcctacga

SEQ ID NO: 77346 - DNA, 30 bp, Artificial Sequence
  Synthetic oligonucleotide
aaagttagcacaaaccgggaatcgctacga

SEQ ID NO: 77347 - DNA, 30 bp, Artificial Sequence
  Synthetic oligonucleotide
cgatcgatgtaatgcgcggatgggctacga

SEQ ID NO: 77348 - DNA, 30 bp, Artificial Sequence
  Synthetic oligonucleotide
atcgaccatcgaaatcactaacaagtacga

SEQ ID NO: 77349 - DNA, 30 bp, Artificial Sequence
  Synthetic oligonucleotide
gcagcggctccagtgacccagaaattacga

SEQ ID NO: 77350 - DNA, 30 bp, Artificial Sequence
  Synthetic oligonucleotide
gagaggccgcgaattgaggtcatgttacga

SEQ ID NO: 77351 - DNA, 30 bp, Artificial Sequence
  Synthetic oligonucleotide
ggacgaaagctcactcgggaccctttacga

SEQ ID NO: 77352 - DNA, 30 bp, Artificial Sequence
  Synthetic oligonucleotide
atacttcataacataggtgtagttaaccga

SEQ ID NO: 77353 - DNA, 30 bp, Artificial Sequence
  Synthetic oligonucleotide
acgccgattgccctataggtatagcaccga

SEQ ID NO: 77354 - DNA, 30 bp, Artificial Sequence
  Synthetic oligonucleotide
acctcaatatcgtcatttgcaatgcaccga

SEQ ID NO: 77355 - DNA, 30 bp, Artificial Sequence
  Synthetic oligonucleotide
cagtccagtaagctgtaaaagatgcaccga

SEQ ID NO: 77356 - DNA, 30 bp, Artificial Sequence
  Synthetic oligonucleotide
aacgtgtggaaaatagacatgatataccga

SEQ ID NO: 77357 - DNA, 30 bp, Artificial Sequence
  Synthetic oligonucleotide
ctaaagctcaactagctgtcagcgtaccga

SEQ ID NO: 77358 - DNA, 30 bp, Artificial Sequence
  Synthetic oligonucleotide
agtgcgggactcaaccgcagttattaccga

SEQ ID NO: 77359 - DNA, 30 bp, Artificial Sequence
  Synthetic oligonucleotide
ggggggcgaacgacttggcaccaaacccga

SEQ ID NO: 77360 - DNA, 30 bp, Artificial Sequence
  Synthetic oligonucleotide
caatggaaggtatcgataaacgggccccga

SEQ ID NO: 77361 - DNA, 30 bp, Artificial Sequence
  Synthetic oligonucleotide
tagggtcaaggatgaaagaattcggcccga

SEQ ID NO: 77362 - DNA, 30 bp, Artificial Sequence
  Synthetic oligonucleotide
ctagtacgcgggggctccagttacagccga

SEQ ID NO: 77363 - DNA, 30 bp, Artificial Sequence
  Synthetic oligonucleotide
agagtgaaggtagagtgatagatcagccga

SEQ ID NO: 77364 - DNA, 30 bp, Artificial Sequence
  Synthetic oligonucleotide
ataggcaaaacatttaggaacctccgccga

SEQ ID NO: 77365 - DNA, 30 bp, Artificial Sequence
  Synthetic oligonucleotide
gaataagggaacgggtcgcaactgcgccga

SEQ ID NO: 77366 - DNA, 30 bp, Artificial Sequence
  Synthetic oligonucleotide
gacttaggtgtttaagaggaataaggccga

SEQ ID NO: 77367 - DNA, 30 bp, Artificial Sequence
  Synthetic oligonucleotide
aggatcaataaaattatcaccagaggccga

SEQ ID NO: 77368 - DNA, 30 bp, Artificial Sequence
  Synthetic oligonucleotide
tagtcggattataagacacatacatgccga

SEQ ID NO: 77369 - DNA, 30 bp, Artificial Sequence
  Synthetic oligonucleotide
agccaaaatccgacatgaagtctatgccga

SEQ ID NO: 77370 - DNA, 30 bp, Artificial Sequence
  Synthetic oligonucleotide
ccttcgcataagggggcgtcccgctgccga

SEQ ID NO: 77371 - DNA, 30 bp, Artificial Sequence
  Synthetic oligonucleotide
cgatagtctttaccccgagtactgtgccga

SEQ ID NO: 77372 - DNA, 30 bp, Artificial Sequence
  Synthetic oligonucleotide
aggttgtctcaaagtgcccctttaatccga

SEQ ID NO: 77373 - DNA, 30 bp, Artificial Sequence
  Synthetic oligonucleotide
agccaccacctatacggaggtaacatccga

SEQ ID NO: 77374 - DNA, 30 bp, Artificial Sequence
  Synthetic oligonucleotide
gcgggagatcgaaaatgctacattatccga

SEQ ID NO: 77375 - DNA, 30 bp, Artificial Sequence
  Synthetic oligonucleotide
gtcaagtgaacttcgttctaatcgctccga

SEQ ID NO: 77376 - DNA, 30 bp, Artificial Sequence
  Synthetic oligonucleotide
gtttaggtgggtagatctggcaaggtccga

SEQ ID NO: 77377 - DNA, 30 bp, Artificial Sequence
  Synthetic oligonucleotide
gactgaaggcccacggatcaaggtgtccga

SEQ ID NO: 77378 - DNA, 30 bp, Artificial Sequence
  Synthetic oligonucleotide
acggaggctaaatatgggttggctttccga

SEQ ID NO: 77379 - DNA, 30 bp, Artificial Sequence
  Synthetic oligonucleotide
tggagttcgaaatgattggggtgtttccga

SEQ ID NO: 77380 - DNA, 30 bp, Artificial Sequence
  Synthetic oligonucleotide
agactacccaagccaggattatcgaagcga

SEQ ID NO: 77381 - DNA, 30 bp, Artificial Sequence
  Synthetic oligonucleotide
aagcgagtctctgcagggtcataacagcga

SEQ ID NO: 77382 - DNA, 30 bp, Artificial Sequence
  Synthetic oligonucleotide
cagcccctgaggaaaaagctagtacagcga

SEQ ID NO: 77383 - DNA, 30 bp, Artificial Sequence
  Synthetic oligonucleotide
gcaccaggtggcacagttacatcccagcga

SEQ ID NO: 77384 - DNA, 30 bp, Artificial Sequence
  Synthetic oligonucleotide
ctaccggttgtcagaggatgagcagagcga

SEQ ID NO: 77385 - DNA, 30 bp, Artificial Sequence
  Synthetic oligonucleotide
caagccagccctgtataattaagcgagcga

SEQ ID NO: 77386 - DNA, 30 bp, Artificial Sequence
  Synthetic oligonucleotide
ggggaaaaaatccgggatagcagatagcga

SEQ ID NO: 77387 - DNA, 30 bp, Artificial Sequence
  Synthetic oligonucleotide
gcttacacgaacggcatttagtgatagcga

SEQ ID NO: 77388 - DNA, 30 bp, Artificial Sequence
  Synthetic oligonucleotide
gacgccgacgtgcccacagagtactagcga

SEQ ID NO: 77389 - DNA, 30 bp, Artificial Sequence
  Synthetic oligonucleotide
acccaggctaggcgagcaccaagaccgcga

SEQ ID NO: 77390 - DNA, 30 bp, Artificial Sequence
  Synthetic oligonucleotide
agcgtcgacctcgcatggcaagccccgcga

SEQ ID NO: 77391 - DNA, 30 bp, Artificial Sequence
  Synthetic oligonucleotide
tgcaaaagtgggtcgggtaggcagccgcga

SEQ ID NO: 77392 - DNA, 30 bp, Artificial Sequence
  Synthetic oligonucleotide
cgcgcggataagtctggaccggtgccgcga

SEQ ID NO: 77393 - DNA, 30 bp, Artificial Sequence
  Synthetic oligonucleotide
gtcagtgtgaatattactccgccatcgcga

SEQ ID NO: 77394 - DNA, 30 bp, Artificial Sequence
  Synthetic oligonucleotide
ctttggatgatcaaacagatagttaggcga

SEQ ID NO: 77395 - DNA, 30 bp, Artificial Sequence
  Synthetic oligonucleotide
ccagagaatgtaaaagaagtggaagggcga

SEQ ID NO: 77396 - DNA, 30 bp, Artificial Sequence
  Synthetic oligonucleotide
atactctagatatccggcaatggatggcga

SEQ ID NO: 77397 - DNA, 30 bp, Artificial Sequence
  Synthetic oligonucleotide
tgatgcttgacgtctaaccgctagtggcga

SEQ ID NO: 77398 - DNA, 30 bp, Artificial Sequence
  Synthetic oligonucleotide
cctgggccaaataatttaggatcgtggcga

SEQ ID NO: 77399 - DNA, 30 bp, Artificial Sequence
  Synthetic oligonucleotide
cgctcggggtcaaggtacctcatgtggcga

SEQ ID NO: 77400 - DNA, 30 bp, Artificial Sequence
  Synthetic oligonucleotide
agatcaaccatcaaggtataactgtggcga

SEQ ID NO: 77401 - DNA, 30 bp, Artificial Sequence
  Synthetic oligonucleotide
aggcgtggtctaggtagagtcagttggcga

SEQ ID NO: 77402 - DNA, 30 bp, Artificial Sequence
  Synthetic oligonucleotide
ccgttcaacacagaaggtatctcaatgcga

SEQ ID NO: 77403 - DNA, 30 bp, Artificial Sequence
  Synthetic oligonucleotide
gcgtagttcaagagatatagtgaggtgcga

SEQ ID NO: 77404 - DNA, 30 bp, Artificial Sequence
  Synthetic oligonucleotide
caggctattatgatcgggtgtcaattgcga

SEQ ID NO: 77405 - DNA, 30 bp, Artificial Sequence
  Synthetic oligonucleotide
aggcttcccaggtgatcaaactggaatcga

SEQ ID NO: 77406 - DNA, 30 bp, Artificial Sequence
  Synthetic oligonucleotide
cgggcactggtttctctggacttacatcga

SEQ ID NO: 77407 - DNA, 30 bp, Artificial Sequence
  Synthetic oligonucleotide
cgggtaactcatagattcgtggctcatcga

SEQ ID NO: 77408 - DNA, 30 bp, Artificial Sequence
  Synthetic oligonucleotide
taccgggtgcaccagaaagtcgttcatcga

SEQ ID NO: 77409 - DNA, 30 bp, Artificial Sequence
  Synthetic oligonucleotide
ctacactggcgagaagtaaacccagatcga

SEQ ID NO: 77410 - DNA, 30 bp, Artificial Sequence
  Synthetic oligonucleotide
ggtcagccacggccggcgggaggagatcga

SEQ ID NO: 77411 - DNA, 30 bp, Artificial Sequence
  Synthetic oligonucleotide
cgtcttattcagaatccaagcagtgatcga

SEQ ID NO: 77412 - DNA, 30 bp, Artificial Sequence
  Synthetic oligonucleotide
agtcgtacggtcagttgaaagaagtatcga

SEQ ID NO: 77413 - DNA, 30 bp, Artificial Sequence
  Synthetic oligonucleotide
cgggacacgaaggtctgacgagacactcga

SEQ ID NO: 77414 - DNA, 30 bp, Artificial Sequence
  Synthetic oligonucleotide
ttaccgaaggggtggcactgtgggactcga

SEQ ID NO: 77415 - DNA, 30 bp, Artificial Sequence
  Synthetic oligonucleotide
taaagacacgagctatgacgtcggcctcga

SEQ ID NO: 77416 - DNA, 30 bp, Artificial Sequence
  Synthetic oligonucleotide
gcccaccctttacgaatacagattcctcga

SEQ ID NO: 77417 - DNA, 30 bp, Artificial Sequence
  Synthetic oligonucleotide
tacacaattacgtgcccatgatatgctcga

SEQ ID NO: 77418 - DNA, 30 bp, Artificial Sequence
  Synthetic oligonucleotide
tggtcgaacgactaccatagttagtctcga

SEQ ID NO: 77419 - DNA, 30 bp, Artificial Sequence
  Synthetic oligonucleotide
cactatacggctaccgcaggtgattctcga

SEQ ID NO: 77420 - DNA, 30 bp, Artificial Sequence
  Synthetic oligonucleotide
ggtactagttatggcaggtccgcaagtcga

SEQ ID NO: 77421 - DNA, 30 bp, Artificial Sequence
  Synthetic oligonucleotide
ccaggtaaagtgaataaggtagtaagtcga

SEQ ID NO: 77422 - DNA, 30 bp, Artificial Sequence
  Synthetic oligonucleotide
cgagacaacggcgcgaattaagaacgtcga

SEQ ID NO: 77423 - DNA, 30 bp, Artificial Sequence
  Synthetic oligonucleotide
gcggctgatgtgaggagatttcgacgtcga

SEQ ID NO: 77424 - DNA, 30 bp, Artificial Sequence
  Synthetic oligonucleotide
cttacgccgattgcttagttacctcgtcga

SEQ ID NO: 77425 - DNA, 30 bp, Artificial Sequence
  Synthetic oligonucleotide
gtatggctattgaatagacgacccggtcga

SEQ ID NO: 77426 - DNA, 30 bp, Artificial Sequence
  Synthetic oligonucleotide
cggctggtctgatgctgtggagagattcga

SEQ ID NO: 77427 - DNA, 30 bp, Artificial Sequence
  Synthetic oligonucleotide
ctaatcacggttttagtcagggtgattcga

SEQ ID NO: 77428 - DNA, 30 bp, Artificial Sequence
  Synthetic oligonucleotide
ggcgtagcaggcggtcattatgcatttcga

SEQ ID NO: 77429 - DNA, 30 bp, Artificial Sequence
  Synthetic oligonucleotide
tatgggacgtcaaacttggagatgtttcga

SEQ ID NO: 77430 - DNA, 30 bp, Artificial Sequence
  Synthetic oligonucleotide
tcactaccaaggacgtggtgggtaaaagga

SEQ ID NO: 77431 - DNA, 30 bp, Artificial Sequence
  Synthetic oligonucleotide
ttggtccggctgacgtcgaataacaaagga

SEQ ID NO: 77432 - DNA, 30 bp, Artificial Sequence
  Synthetic oligonucleotide
gaacaaggtctggcttgatctaccaaagga

SEQ ID NO: 77433 - DNA, 30 bp, Artificial Sequence
  Synthetic oligonucleotide
gaggcttacgaggcttcagcgagtaaagga

SEQ ID NO: 77434 - DNA, 30 bp, Artificial Sequence
  Synthetic oligonucleotide
gctgtggtaatctaagagaaaccgcaagga

SEQ ID NO: 77435 - DNA, 30 bp, Artificial Sequence
  Synthetic oligonucleotide
agcatgaaatcccctttttgggatcaagga

SEQ ID NO: 77436 - DNA, 30 bp, Artificial Sequence
  Synthetic oligonucleotide
aaaaggacgttctcgaggctctatcaagga

SEQ ID NO: 77437 - DNA, 30 bp, Artificial Sequence
  Synthetic oligonucleotide
taccgggaagctgcgtcgaacattcaagga

SEQ ID NO: 77438 - DNA, 30 bp, Artificial Sequence
  Synthetic oligonucleotide
gtacatacagcccgcactacgccagaagga

SEQ ID NO: 77439 - DNA, 30 bp, Artificial Sequence
  Synthetic oligonucleotide
agattgaaacggtgccgaaccctagaagga

SEQ ID NO: 77440 - DNA, 30 bp, Artificial Sequence
  Synthetic oligonucleotide
gttggccctagcacaacgtttaaggaagga

SEQ ID NO: 77441 - DNA, 30 bp, Artificial Sequence
  Synthetic oligonucleotide
atgcaccttgattagagctccagtgaagga

SEQ ID NO: 77442 - DNA, 30 bp, Artificial Sequence
  Synthetic oligonucleotide
cggattcatcacaccaagatcagtgaagga

SEQ ID NO: 77443 - DNA, 30 bp, Artificial Sequence
  Synthetic oligonucleotide
agtgatgcctgccacatcgcgagataagga

SEQ ID NO: 77444 - DNA, 30 bp, Artificial Sequence
  Synthetic oligonucleotide
cattactttcgaaggtgcactatgtaagga

SEQ ID NO: 77445 - DNA, 30 bp, Artificial Sequence
  Synthetic oligonucleotide
ggagagtaaatgaccatatcccattaagga

SEQ ID NO: 77446 - DNA, 30 bp, Artificial Sequence
  Synthetic oligonucleotide
atctggtccacagggtcggaaagttaagga

SEQ ID NO: 77447 - DNA, 30 bp, Artificial Sequence
  Synthetic oligonucleotide
catgcgttgaactacgagatattaccagga

SEQ ID NO: 77448 - DNA, 30 bp, Artificial Sequence
  Synthetic oligonucleotide
tagcactccccgaaggaggacagcccagga

SEQ ID NO: 77449 - DNA, 31 bp, Artificial Sequence
  Synthetic oligonucleotide
gaaaaattacgccacccagatttctccagga

SEQ ID NO: 77450 - DNA, 30 bp, Artificial Sequence
  Synthetic oligonucleotide
gcctacgaattacggaggcggtcagcagga

SEQ ID NO: 77451 - DNA, 30 bp, Artificial Sequence
  Synthetic oligonucleotide
gcgactagaagcgtggtctgttccgcagga

SEQ ID NO: 77452 - DNA, 30 bp, Artificial Sequence
  Synthetic oligonucleotide
acgcggctctagtaaagaataggggcagga

SEQ ID NO: 77453 - DNA, 30 bp, Artificial Sequence
  Synthetic oligonucleotide
ctacagcgaaggtacgtgggcagctcagga

SEQ ID NO: 77454 - DNA, 30 bp, Artificial Sequence
  Synthetic oligonucleotide
gttcctcagggtacagctgtcaagtcagga

SEQ ID NO: 77455 - DNA, 30 bp, Artificial Sequence
  Synthetic oligonucleotide
tcacgaagtacccacatcccaagttcagga

SEQ ID NO: 77456 - DNA, 30 bp, Artificial Sequence
  Synthetic oligonucleotide
ctttacgaccccacggagtgcaaccgagga

SEQ ID NO: 77457 - DNA, 30 bp, Artificial Sequence
  Synthetic oligonucleotide
cctaagaaagctgctaccggaacaggagga

SEQ ID NO: 77458 - DNA, 30 bp, Artificial Sequence
  Synthetic oligonucleotide
gtgctgggagggcatggtgttaacggagga

SEQ ID NO: 77459 - DNA, 30 bp, Artificial Sequence
  Synthetic oligonucleotide
ctgaaagcgacgtgcaactttgacggagga

SEQ ID NO: 77460 - DNA, 30 bp, Artificial Sequence
  Synthetic oligonucleotide
ggtcccaagactcaaggtgtttggtgagga

SEQ ID NO: 77461 - DNA, 30 bp, Artificial Sequence
  Synthetic oligonucleotide
agcagaccattggtaggtagttcgatagga

SEQ ID NO: 77462 - DNA, 30 bp, Artificial Sequence
  Synthetic oligonucleotide
tcttccaatcgaatggacgaaaatatagga

SEQ ID NO: 77463 - DNA, 30 bp, Artificial Sequence
  Synthetic oligonucleotide
cagcacacgaagaatcgggtaccgctagga

SEQ ID NO: 77464 - DNA, 30 bp, Artificial Sequence
  Synthetic oligonucleotide
gtatatggtaaagcagactcggcggtagga

SEQ ID NO: 77465 - DNA, 30 bp, Artificial Sequence
  Synthetic oligonucleotide
cattaggcgatcataacgggtcgggtagga

SEQ ID NO: 77466 - DNA, 30 bp, Artificial Sequence
  Synthetic oligonucleotide
cggttcagaagacgatataggaatttagga

SEQ ID NO: 77467 - DNA, 30 bp, Artificial Sequence
  Synthetic oligonucleotide
aagatccatcgactccggctattcaacgga

SEQ ID NO: 77468 - DNA, 30 bp, Artificial Sequence
  Synthetic oligonucleotide
cacacacgactagggtgaggggaatacgga

SEQ ID NO: 77469 - DNA, 30 bp, Artificial Sequence
  Synthetic oligonucleotide
cagaggtcagacacatacacatagtacgga

SEQ ID NO: 77470 - DNA, 30 bp, Artificial Sequence
  Synthetic oligonucleotide
ggagatgcgtatgcactcgtgtgcaccgga

SEQ ID NO: 77471 - DNA, 30 bp, Artificial Sequence
  Synthetic oligonucleotide
gggatggtcagtaccaaagaggtgcccgga

SEQ ID NO: 77472 - DNA, 30 bp, Artificial Sequence
  Synthetic oligonucleotide
cggtaagccgccacgaaagagactgccgga

SEQ ID NO: 77473 - DNA, 30 bp, Artificial Sequence
  Synthetic oligonucleotide
gcaggtaatcgtaataactagagctccgga

SEQ ID NO: 77474 - DNA, 30 bp, Artificial Sequence
  Synthetic oligonucleotide
tcactagagctggctcacgcattctccgga

SEQ ID NO: 77475 - DNA, 30 bp, Artificial Sequence
  Synthetic oligonucleotide
gcttgagattgaaaaaaatgcgaaagcgga

SEQ ID NO: 77476 - DNA, 30 bp, Artificial Sequence
  Synthetic oligonucleotide
taatcagggcaacatattccaccgagcgga

SEQ ID NO: 77477 - DNA, 30 bp, Artificial Sequence
  Synthetic oligonucleotide
gctatatgaaaccatacgaactggagcgga

SEQ ID NO: 77478 - DNA, 30 bp, Artificial Sequence
  Synthetic oligonucleotide
cactaaaaccggatggttagatgaggcgga

SEQ ID NO: 77479 - DNA, 30 bp, Artificial Sequence
  Synthetic oligonucleotide
tttgcgaggtcttgagcaggcgagggcgga

SEQ ID NO: 77480 - DNA, 30 bp, Artificial Sequence
  Synthetic oligonucleotide
actgatctaatgaagttggtaatcatcgga

SEQ ID NO: 77481 - DNA, 30 bp, Artificial Sequence
  Synthetic oligonucleotide
aaacattgcaaaatgaagttatggatcgga

SEQ ID NO: 77482 - DNA, 30 bp, Artificial Sequence
  Synthetic oligonucleotide
cacctctcagggacactaaagttactcgga

SEQ ID NO: 77483 - DNA, 30 bp, Artificial Sequence
  Synthetic oligonucleotide
gttttgagaaagtgcgcaaaggtcctcgga

SEQ ID NO: 77484 - DNA, 30 bp, Artificial Sequence
  Synthetic oligonucleotide
aggccctctgcgatacaggagcggctcgga

SEQ ID NO: 77485 - DNA, 30 bp, Artificial Sequence
  Synthetic oligonucleotide
caagagagggcgacggtcgttaatctcgga

SEQ ID NO: 77486 - DNA, 30 bp, Artificial Sequence
  Synthetic oligonucleotide
ataaggtccgatcacaccacagccttcgga

SEQ ID NO: 77487 - DNA, 30 bp, Artificial Sequence
  Synthetic oligonucleotide
gcgcacgcaactacaggtaagagcttcgga

SEQ ID NO: 77488 - DNA, 30 bp, Artificial Sequence
  Synthetic oligonucleotide
ccatcaagtccccatccaaataccaaggga

SEQ ID NO: 77489 - DNA, 30 bp, Artificial Sequence
  Synthetic oligonucleotide
ggcgccgccatgagctagctcagcaaggga

SEQ ID NO: 77490 - DNA, 30 bp, Artificial Sequence
  Synthetic oligonucleotide
tcgtatttgcatcatcaaaaataacaggga

SEQ ID NO: 77491 - DNA, 30 bp, Artificial Sequence
  Synthetic oligonucleotide
gcggtagttacggacaagcacgtgcaggga

SEQ ID NO: 77492 - DNA, 30 bp, Artificial Sequence
  Synthetic oligonucleotide
aacggattttactaggcatcgtacgaggga

SEQ ID NO: 77493 - DNA, 30 bp, Artificial Sequence
  Synthetic oligonucleotide
caacatccgttatggtcgttagtggaggga

SEQ ID NO: 77494 - DNA, 30 bp, Artificial Sequence
  Synthetic oligonucleotide
acgcgtatgggcgtcgcaaatgactaggga

SEQ ID NO: 77495 - DNA, 30 bp, Artificial Sequence
  Synthetic oligonucleotide
aaaacgagaggaattcacgttatgtaggga

SEQ ID NO: 77496 - DNA, 30 bp, Artificial Sequence
  Synthetic oligonucleotide
tctgacgatagagtagaaaggggtacggga

SEQ ID NO: 77497 - DNA, 30 bp, Artificial Sequence
  Synthetic oligonucleotide
gacgcgacgtaacatgtataaagcccggga

SEQ ID NO: 77498 - DNA, 30 bp, Artificial Sequence
  Synthetic oligonucleotide
ggacgacgctaacgttgggcataggcggga

SEQ ID NO: 77499 - DNA, 30 bp, Artificial Sequence
  Synthetic oligonucleotide
cgtaacaattatcattgtgtcttacgggga

SEQ ID NO: 77500 - DNA, 30 bp, Artificial Sequence
  Synthetic oligonucleotide
ggggcatcagctgctcgtgaaccaggggga

SEQ ID NO: 77501 - DNA, 30 bp, Artificial Sequence
  Synthetic oligonucleotide
gcaggtgtaagaatatctgggtgcggggga

SEQ ID NO: 77502 - DNA, 30 bp, Artificial Sequence
  Synthetic oligonucleotide
attaagcgggtgcatgctattgagggggga

SEQ ID NO: 77503 - DNA, 30 bp, Artificial Sequence
  Synthetic oligonucleotide
agagagatgagccccatcgggggtggggga

SEQ ID NO: 77504 - DNA, 30 bp, Artificial Sequence
  Synthetic oligonucleotide
ttaacggaaactcagtaaaggcttggggga

SEQ ID NO: 77505 - DNA, 30 bp, Artificial Sequence
  Synthetic oligonucleotide
catagcggcgttctggtgacgtttggggga

SEQ ID NO: 77506 - DNA, 30 bp, Artificial Sequence
  Synthetic oligonucleotide
tcaaaacgaggcgttgcacagtgctgggga

SEQ ID NO: 77507 - DNA, 30 bp, Artificial Sequence
  Synthetic oligonucleotide
tcgcacaactagctagcgcgaggaatggga

SEQ ID NO: 77508 - DNA, 30 bp, Artificial Sequence
  Synthetic oligonucleotide
tgagacaagcaggtaataagctagatggga

SEQ ID NO: 77509 - DNA, 30 bp, Artificial Sequence
  Synthetic oligonucleotide
acacactagataggctgactatgtatggga

SEQ ID NO: 77510 - DNA, 30 bp, Artificial Sequence
  Synthetic oligonucleotide
aggcttcacaataagtgtcggaggctggga

SEQ ID NO: 77511 - DNA, 30 bp, Artificial Sequence
  Synthetic oligonucleotide
gaggcgtcggtggaggagtcctcagtggga

SEQ ID NO: 77512 - DNA, 30 bp, Artificial Sequence
  Synthetic oligonucleotide
ggcgggtggaatgtccaacaccaggtggga

SEQ ID NO: 77513 - DNA, 30 bp, Artificial Sequence
  Synthetic oligonucleotide
tagaaagtatgatttgctggggcggtggga

SEQ ID NO: 77514 - DNA, 30 bp, Artificial Sequence
  Synthetic oligonucleotide
tcatgtacgtccactcataccaacttggga

SEQ ID NO: 77515 - DNA, 30 bp, Artificial Sequence
  Synthetic oligonucleotide
gcaggaaattctgcctccgaacaaaatgga

SEQ ID NO: 77516 - DNA, 30 bp, Artificial Sequence
  Synthetic oligonucleotide
gttggaacggctgcccatgcgtgaaatgga

SEQ ID NO: 77517 - DNA, 30 bp, Artificial Sequence
  Synthetic oligonucleotide
cgtgcggaagagtcgtgacagtataatgga

SEQ ID NO: 77518 - DNA, 30 bp, Artificial Sequence
  Synthetic oligonucleotide
gatgtacgtagaagctaggcagttaatgga

SEQ ID NO: 77519 - DNA, 30 bp, Artificial Sequence
  Synthetic oligonucleotide
tcttaattgagctccagaatgtcacatgga

SEQ ID NO: 77520 - DNA, 30 bp, Artificial Sequence
  Synthetic oligonucleotide
acaatctagaagcatgatgtgagacatgga

SEQ ID NO: 77521 - DNA, 30 bp, Artificial Sequence
  Synthetic oligonucleotide
cgtaaaggccatggcgtactggtacatgga

SEQ ID NO: 77522 - DNA, 30 bp, Artificial Sequence
  Synthetic oligonucleotide
attgtagacgaggactcgggcgtgcatgga

SEQ ID NO: 77523 - DNA, 30 bp, Artificial Sequence
  Synthetic oligonucleotide
gccaacttacagcgcgagagggatcatgga

SEQ ID NO: 77524 - DNA, 30 bp, Artificial Sequence
  Synthetic oligonucleotide
ggtgcgaatcgggtcatgcaagtcgatgga

SEQ ID NO: 77525 - DNA, 30 bp, Artificial Sequence
  Synthetic oligonucleotide
tcttgcgtacgctagagggatatctatgga

SEQ ID NO: 77526 - DNA, 30 bp, Artificial Sequence
  Synthetic oligonucleotide
catgtaccaagtctgataattgagtatgga

SEQ ID NO: 77527 - DNA, 30 bp, Artificial Sequence
  Synthetic oligonucleotide
cgcttcggcctagagatcactgcgtatgga

SEQ ID NO: 77528 - DNA, 30 bp, Artificial Sequence
  Synthetic oligonucleotide
acggtgtagggcgtcctgcaggctcctgga

SEQ ID NO: 77529 - DNA, 30 bp, Artificial Sequence
  Synthetic oligonucleotide
gaggttgacagtacatggtcgatcgctgga

SEQ ID NO: 77530 - DNA, 30 bp, Artificial Sequence
  Synthetic oligonucleotide
agtgaaattaccgcactggcctaggctgga

SEQ ID NO: 77531 - DNA, 30 bp, Artificial Sequence
  Synthetic oligonucleotide
ctgttaagaataaagacagggagggctgga

SEQ ID NO: 77532 - DNA, 30 bp, Artificial Sequence
  Synthetic oligonucleotide
gatgtaggcgaaactcgaagcctatctgga

SEQ ID NO: 77533 - DNA, 30 bp, Artificial Sequence
  Synthetic oligonucleotide
gtcagggctatcgaattagtcctctctgga

SEQ ID NO: 77534 - DNA, 30 bp, Artificial Sequence
  Synthetic oligonucleotide
ataagggcgtctccaatggtaatgagtgga

SEQ ID NO: 77535 - DNA, 30 bp, Artificial Sequence
  Synthetic oligonucleotide
acgggctactaactcaaccgaggtagtgga

SEQ ID NO: 77536 - DNA, 30 bp, Artificial Sequence
  Synthetic oligonucleotide
gacatagccgaggcggacccgaaacgtgga

SEQ ID NO: 77537 - DNA, 30 bp, Artificial Sequence
  Synthetic oligonucleotide
actgcaaaaaataagacaactagacgtgga

SEQ ID NO: 77538 - DNA, 30 bp, Artificial Sequence
  Synthetic oligonucleotide
aaggatttatggcctcgtaacctaggtgga

SEQ ID NO: 77539 - DNA, 30 bp, Artificial Sequence
  Synthetic oligonucleotide
tactaagacaatagcacttgagcctgtgga

SEQ ID NO: 77540 - DNA, 30 bp, Artificial Sequence
  Synthetic oligonucleotide
ataagcgtataccgtccacgtatgtgtgga

SEQ ID NO: 77541 - DNA, 30 bp, Artificial Sequence
  Synthetic oligonucleotide
gcatggatccgagagacagtcgtttgtgga

SEQ ID NO: 77542 - DNA, 30 bp, Artificial Sequence
  Synthetic oligonucleotide
acatctaggaaccaaaggcggatagttgga

SEQ ID NO: 77543 - DNA, 30 bp, Artificial Sequence
  Synthetic oligonucleotide
tcgttgtgcaatcggtagggacctgttgga

SEQ ID NO: 77544 - DNA, 30 bp, Artificial Sequence
  Synthetic oligonucleotide
gcgccgagaccgtagtcacttgttgttgga

SEQ ID NO: 77545 - DNA, 30 bp, Artificial Sequence
  Synthetic oligonucleotide
acaaaatgcgctaccatgcatcacaaatga

SEQ ID NO: 77546 - DNA, 30 bp, Artificial Sequence
  Synthetic oligonucleotide
taggcggagttgctagtttcaaccaaatga

SEQ ID NO: 77547 - DNA, 30 bp, Artificial Sequence
  Synthetic oligonucleotide
cgatgaattgatatgatagttcccaaatga

SEQ ID NO: 77548 - DNA, 31 bp, Artificial Sequence
  Synthetic oligonucleotide
agtcgatcagactgggacacaggaacaatga

SEQ ID NO: 77549 - DNA, 30 bp, Artificial Sequence
  Synthetic oligonucleotide
tcgtggtgcgggtaatagccgggcgaatga

SEQ ID NO: 77550 - DNA, 30 bp, Artificial Sequence
  Synthetic oligonucleotide
gttacctggtatataggacgcgaggaatga

SEQ ID NO: 77551 - DNA, 30 bp, Artificial Sequence
  Synthetic oligonucleotide
caggctgattggtaaaagtacacggaatga

SEQ ID NO: 77552 - DNA, 30 bp, Artificial Sequence
  Synthetic oligonucleotide
tcagaagatgcgtcggtgtcaaaataatga

SEQ ID NO: 77553 - DNA, 30 bp, Artificial Sequence
  Synthetic oligonucleotide
cgaacgatgtaacagaaagttggaccatga

SEQ ID NO: 77554 - DNA, 30 bp, Artificial Sequence
  Synthetic oligonucleotide
aacgggcgtacaaggctgcgtgacccatga

SEQ ID NO: 77555 - DNA, 30 bp, Artificial Sequence
  Synthetic oligonucleotide
gtaaactgccgtgacacccgacaggcatga

SEQ ID NO: 77556 - DNA, 30 bp, Artificial Sequence
  Synthetic oligonucleotide
gtggaaatggaactgggcaaataatcatga

SEQ ID NO: 77557 - DNA, 30 bp, Artificial Sequence
  Synthetic oligonucleotide
cggtgtgatgtccccgcataccgaagatga

SEQ ID NO: 77558 - DNA, 30 bp, Artificial Sequence
  Synthetic oligonucleotide
cacaacatataactaggtcacaagagatga

SEQ ID NO: 77559 - DNA, 30 bp, Artificial Sequence
  Synthetic oligonucleotide
actgccccagaagattgctggtagagatga

SEQ ID NO: 77560 - DNA, 30 bp, Artificial Sequence
  Synthetic oligonucleotide
aacgtacaagcactaataggtacacgatga

SEQ ID NO: 77561 - DNA, 30 bp, Artificial Sequence
  Synthetic oligonucleotide
gatataagcgaaataacgatgcgtggatga

SEQ ID NO: 77562 - DNA, 30 bp, Artificial Sequence
  Synthetic oligonucleotide
gatcgaggagttggcttcatctcatgatga

SEQ ID NO: 77563 - DNA, 30 bp, Artificial Sequence
  Synthetic oligonucleotide
tggaagctgcgggaatgtggtctctgatga

SEQ ID NO: 77564 - DNA, 30 bp, Artificial Sequence
  Synthetic oligonucleotide
tactccaaatggaaacagcccaaaatatga

SEQ ID NO: 77565 - DNA, 30 bp, Artificial Sequence
  Synthetic oligonucleotide
gtgtggagtaattacattgtccaactatga

SEQ ID NO: 77566 - DNA, 30 bp, Artificial Sequence
  Synthetic oligonucleotide
tcaagagtagatgtttgtgagcaactatga

SEQ ID NO: 77567 - DNA, 30 bp, Artificial Sequence
  Synthetic oligonucleotide
aacacggcgacgataccaagaagtgtatga

SEQ ID NO: 77568 - DNA, 30 bp, Artificial Sequence
  Synthetic oligonucleotide
aacagaggggccaactctttattaaactga

SEQ ID NO: 77569 - DNA, 30 bp, Artificial Sequence
  Synthetic oligonucleotide
acggtactccgaaatactaaaagggactga

SEQ ID NO: 77570 - DNA, 30 bp, Artificial Sequence
  Synthetic oligonucleotide
gaacgattgagtggaggccggaggtactga

SEQ ID NO: 77571 - DNA, 30 bp, Artificial Sequence
  Synthetic oligonucleotide
tgcgagcaaatcgattgtcctaattactga

SEQ ID NO: 77572 - DNA, 30 bp, Artificial Sequence
  Synthetic oligonucleotide
gggattcggggaaatccgatccatacctga

SEQ ID NO: 77573 - DNA, 30 bp, Artificial Sequence
  Synthetic oligonucleotide
cgaattagccgatgtgcccgggtggcctga

SEQ ID NO: 77574 - DNA, 30 bp, Artificial Sequence
  Synthetic oligonucleotide
tttcacgtcttgcctagtatcgcgtcctga

SEQ ID NO: 77575 - DNA, 30 bp, Artificial Sequence
  Synthetic oligonucleotide
gcacggggactcgctaagtgaggttcctga

SEQ ID NO: 77576 - DNA, 30 bp, Artificial Sequence
  Synthetic oligonucleotide
ccgttaactaggtcgtgacgaaatcgctga

SEQ ID NO: 77577 - DNA, 30 bp, Artificial Sequence
  Synthetic oligonucleotide
gtcagaagtgtcctagttacgataggctga

SEQ ID NO: 77578 - DNA, 30 bp, Artificial Sequence
  Synthetic oligonucleotide
ggctaacattcaactatgtctcagggctga

SEQ ID NO: 77579 - DNA, 30 bp, Artificial Sequence
  Synthetic oligonucleotide
cgaatctatagagtgaacatccttggctga

SEQ ID NO: 77580 - DNA, 30 bp, Artificial Sequence
  Synthetic oligonucleotide
tacactgaacagacctaatattcaatctga

SEQ ID NO: 77581 - DNA, 30 bp, Artificial Sequence
  Synthetic oligonucleotide
taagagttcccgctacaacacagagtctga

SEQ ID NO: 77582 - DNA, 30 bp, Artificial Sequence
  Synthetic oligonucleotide
aggtacgtgtacctccgtgtaagggtctga

SEQ ID NO: 77583 - DNA, 30 bp, Artificial Sequence
  Synthetic oligonucleotide
tcgtgatctacactatcatcgggtgtctga

SEQ ID NO: 77584 - DNA, 30 bp, Artificial Sequence
  Synthetic oligonucleotide
cggcaagctaccctaaaactttgtgtctga

SEQ ID NO: 77585 - DNA, 30 bp, Artificial Sequence
  Synthetic oligonucleotide
cttgaaagccagcatgcgcagagaaagtga

SEQ ID NO: 77586 - DNA, 30 bp, Artificial Sequence
  Synthetic oligonucleotide
tgcaaatgtagggtgacccggaggcagtga

SEQ ID NO: 77587 - DNA, 30 bp, Artificial Sequence
  Synthetic oligonucleotide
cgagaggggattaatatcgccaacgagtga

SEQ ID NO: 77588 - DNA, 30 bp, Artificial Sequence
  Synthetic oligonucleotide
cgaacccctagagtgtcggatggaacgtga

SEQ ID NO: 77589 - DNA, 30 bp, Artificial Sequence
  Synthetic oligonucleotide
tgaacgacaaaaatttttagcatcacgtga

SEQ ID NO: 77590 - DNA, 30 bp, Artificial Sequence
  Synthetic oligonucleotide
agtagtcagaggtctcaggcacagacgtga

SEQ ID NO: 77591 - DNA, 30 bp, Artificial Sequence
  Synthetic oligonucleotide
tgccaaggaatctaatcgtatcgaccgtga

SEQ ID NO: 77592 - DNA, 30 bp, Artificial Sequence
  Synthetic oligonucleotide
acttgggccgcgaagccgattatcccgtga

SEQ ID NO: 77593 - DNA, 30 bp, Artificial Sequence
  Synthetic oligonucleotide
accaaagtttgttgttgtagtgaagcgtga

SEQ ID NO: 77594 - DNA, 30 bp, Artificial Sequence
  Synthetic oligonucleotide
agtcgcagtgcttcttagtgagtagcgtga

SEQ ID NO: 77595 - DNA, 30 bp, Artificial Sequence
  Synthetic oligonucleotide
gtggggctatgtcggacagattgtgcgtga

SEQ ID NO: 77596 - DNA, 30 bp, Artificial Sequence
  Synthetic oligonucleotide
gtgacgggggtgcagcctgcgtaatcgtga

SEQ ID NO: 77597 - DNA, 30 bp, Artificial Sequence
  Synthetic oligonucleotide
agatactatttaccgtatatgctctcgtga

SEQ ID NO: 77598 - DNA, 30 bp, Artificial Sequence
  Synthetic oligonucleotide
ggtcaaagacctgcgttctcgaaaaggtga

SEQ ID NO: 77599 - DNA, 30 bp, Artificial Sequence
  Synthetic oligonucleotide
agaccacgatatggaaatttatgtaggtga

SEQ ID NO: 77600 - DNA, 30 bp, Artificial Sequence
  Synthetic oligonucleotide
gcatgaagaaataagcagtggagacggtga

SEQ ID NO: 77601 - DNA, 30 bp, Artificial Sequence
  Synthetic oligonucleotide
ccctaagtggtaacgtcggaaagcgggtga

SEQ ID NO: 77602 - DNA, 30 bp, Artificial Sequence
  Synthetic oligonucleotide
acaggacataatcacattggatcggggtga

SEQ ID NO: 77603 - DNA, 30 bp, Artificial Sequence
  Synthetic oligonucleotide
cacgaaattctggatggctctaaaatgtga

SEQ ID NO: 77604 - DNA, 31 bp, Artificial Sequence
  Synthetic oligonucleotide
taggataaaggggaggtgattacaaatgtga

SEQ ID NO: 77605 - DNA, 30 bp, Artificial Sequence
  Synthetic oligonucleotide
aaaaatgtcgacaagaggtcacagctgtga

SEQ ID NO: 77606 - DNA, 30 bp, Artificial Sequence
  Synthetic oligonucleotide
ttctggaaaaagggagctgccaaagtgtga

SEQ ID NO: 77607 - DNA, 30 bp, Artificial Sequence
  Synthetic oligonucleotide
aaccagcgtacgaaactagctagcgtgtga

SEQ ID NO: 77608 - DNA, 30 bp, Artificial Sequence
  Synthetic oligonucleotide
gggaggggactattaatttaggaaaattga

SEQ ID NO: 77609 - DNA, 30 bp, Artificial Sequence
  Synthetic oligonucleotide
cgtcatgtaatatcaatcggcataaattga

SEQ ID NO: 77610 - DNA, 30 bp, Artificial Sequence
  Synthetic oligonucleotide
atgagggggggttcttcgcaattaaattga

SEQ ID NO: 77611 - DNA, 30 bp, Artificial Sequence
  Synthetic oligonucleotide
tcgctatgcatggtattggcacgacattga

SEQ ID NO: 77612 - DNA, 30 bp, Artificial Sequence
  Synthetic oligonucleotide
ttgcgtacgcctgggactctgaagcattga

SEQ ID NO: 77613 - DNA, 30 bp, Artificial Sequence
  Synthetic oligonucleotide
gacaccgaataatgtaatagtcaaccttga

SEQ ID NO: 77614 - DNA, 30 bp, Artificial Sequence
  Synthetic oligonucleotide
gccgcggggattggctagtggttagcttga

SEQ ID NO: 77615 - DNA, 30 bp, Artificial Sequence
  Synthetic oligonucleotide
aaccaggtagaacattagccatgggcttga

SEQ ID NO: 77616 - DNA, 30 bp, Artificial Sequence
  Synthetic oligonucleotide
gtgagggggcagagtagacacggatcttga

SEQ ID NO: 77617 - DNA, 30 bp, Artificial Sequence
  Synthetic oligonucleotide
gacaattagtgggacggcctaaggagttga

SEQ ID NO: 77618 - DNA, 30 bp, Artificial Sequence
  Synthetic oligonucleotide
cgaggttgcaaaaacactttgaggagttga

SEQ ID NO: 77619 - DNA, 30 bp, Artificial Sequence
  Synthetic oligonucleotide
atcttactgagtggaccaggtgaacgttga

SEQ ID NO: 77620 - DNA, 30 bp, Artificial Sequence
  Synthetic oligonucleotide
cggtattatgacacttactaagaaggttga

SEQ ID NO: 77621 - DNA, 30 bp, Artificial Sequence
  Synthetic oligonucleotide
ggagggcaggtacatgatttggtaatttga

SEQ ID NO: 77622 - DNA, 30 bp, Artificial Sequence
  Synthetic oligonucleotide
gaaggaggaaaatggtgagacaacctttga

SEQ ID NO: 77623 - DNA, 30 bp, Artificial Sequence
  Synthetic oligonucleotide
taaaagaggtgataaagttgggagctttga

SEQ ID NO: 77624 - DNA, 30 bp, Artificial Sequence
  Synthetic oligonucleotide
actggatacgggtttgaaggtactctttga

SEQ ID NO: 77625 - DNA, 30 bp, Artificial Sequence
  Synthetic oligonucleotide
agggtaaaggatctagggaatggagtttga

SEQ ID NO: 77626 - DNA, 30 bp, Artificial Sequence
  Synthetic oligonucleotide
cgagcgattagaagcccgtggtccgtttga

SEQ ID NO: 77627 - DNA, 30 bp, Artificial Sequence
  Synthetic oligonucleotide
aggatgtatatgcaactaaaacgcaaaata

SEQ ID NO: 77628 - DNA, 30 bp, Artificial Sequence
  Synthetic oligonucleotide
catgtgagtgggagataatctgttaaaata

SEQ ID NO: 77629 - DNA, 30 bp, Artificial Sequence
  Synthetic oligonucleotide
cagaaaagaactcactcggatcatcaaata

SEQ ID NO: 77630 - DNA, 30 bp, Artificial Sequence
  Synthetic oligonucleotide
agacccagtgcacggctgcgacgagaaata

SEQ ID NO: 77631 - DNA, 30 bp, Artificial Sequence
  Synthetic oligonucleotide
ctgtggataaccatgctactgagataaata

SEQ ID NO: 77632 - DNA, 30 bp, Artificial Sequence
  Synthetic oligonucleotide
tagatagacgatagcgagccggatccaata

SEQ ID NO: 77633 - DNA, 30 bp, Artificial Sequence
  Synthetic oligonucleotide
caacataggccgcgtgttggctatccaata

SEQ ID NO: 77634 - DNA, 30 bp, Artificial Sequence
  Synthetic oligonucleotide
tgggcgtatggaagccacagtcgcgcaata

SEQ ID NO: 77635 - DNA, 30 bp, Artificial Sequence
  Synthetic oligonucleotide
tggcgtcatcgtatgatagtagtcgcaata

SEQ ID NO: 77636 - DNA, 30 bp, Artificial Sequence
  Synthetic oligonucleotide
acacacctagggacaaatgggggatcaata

SEQ ID NO: 77637 - DNA, 30 bp, Artificial Sequence
  Synthetic oligonucleotide
caaatagacctaactcaactagtgagaata

SEQ ID NO: 77638 - DNA, 30 bp, Artificial Sequence
  Synthetic oligonucleotide
gcggaccataaccccttgtttctgcgaata

SEQ ID NO: 77639 - DNA, 30 bp, Artificial Sequence
  Synthetic oligonucleotide
ggacgggtagtcaacattgagaggggaata

SEQ ID NO: 77640 - DNA, 30 bp, Artificial Sequence
  Synthetic oligonucleotide
acgtgagctagcgccccatcgcctggaata

SEQ ID NO: 77641 - DNA, 30 bp, Artificial Sequence
  Synthetic oligonucleotide
ctggagaaacacatcaagtacaaatgaata

SEQ ID NO: 77642 - DNA, 30 bp, Artificial Sequence
  Synthetic oligonucleotide
tagccatggacatgttaagcgaaatgaata

SEQ ID NO: 77643 - DNA, 30 bp, Artificial Sequence
  Synthetic oligonucleotide
atggacagcattaaacgacagagatgaata

SEQ ID NO: 77644 - DNA, 30 bp, Artificial Sequence
  Synthetic oligonucleotide
tcatttcggggcgggtttataatatgaata

SEQ ID NO: 77645 - DNA, 30 bp, Artificial Sequence
  Synthetic oligonucleotide
gatgataaaaccaaagatattctctgaata

SEQ ID NO: 77646 - DNA, 30 bp, Artificial Sequence
  Synthetic oligonucleotide
tgaaagctgggaaagcgcagttagtgaata

SEQ ID NO: 77647 - DNA, 30 bp, Artificial Sequence
  Synthetic oligonucleotide
aggtcacgcttcggggtcgaaccgtgaata

SEQ ID NO: 77648 - DNA, 30 bp, Artificial Sequence
  Synthetic oligonucleotide
tggacaatggtgctgggtaacccttgaata

SEQ ID NO: 77649 - DNA, 30 bp, Artificial Sequence
  Synthetic oligonucleotide
aggcctgaaacaagtggggggaaaataata

SEQ ID NO: 77650 - DNA, 30 bp, Artificial Sequence
  Synthetic oligonucleotide
cagcgcaattagcccatatagcaaataata

SEQ ID NO: 77651 - DNA, 30 bp, Artificial Sequence
  Synthetic oligonucleotide
gctaccgcgagacacttcgccaagataata

SEQ ID NO: 77652 - DNA, 30 bp, Artificial Sequence
  Synthetic oligonucleotide
cgggaaaatttcgatcgatttgcgctaata

SEQ ID NO: 77653 - DNA, 30 bp, Artificial Sequence
  Synthetic oligonucleotide
agcgataccgacggtacagctaaggtaata

SEQ ID NO: 77654 - DNA, 30 bp, Artificial Sequence
  Synthetic oligonucleotide
tggttgtgataaggcaaagagagggtaata

SEQ ID NO: 77655 - DNA, 30 bp, Artificial Sequence
  Synthetic oligonucleotide
gagccgacagtgaacgcatgatccaacata

SEQ ID NO: 77656 - DNA, 30 bp, Artificial Sequence
  Synthetic oligonucleotide
tgcggtaaacggccacgggaaatagacata

SEQ ID NO: 77657 - DNA, 30 bp, Artificial Sequence
  Synthetic oligonucleotide
ctgctcgtgggtcatagatatagcgacata

SEQ ID NO: 77658 - DNA, 30 bp, Artificial Sequence
  Synthetic oligonucleotide
agccgagatcaatacaacgctcagtacata

SEQ ID NO: 77659 - DNA, 30 bp, Artificial Sequence
  Synthetic oligonucleotide
taaaggtacggcaaaaacttactgtacata

SEQ ID NO: 77660 - DNA, 30 bp, Artificial Sequence
  Synthetic oligonucleotide
gacgtagtgtatagcaagcagatttacata

SEQ ID NO: 77661 - DNA, 30 bp, Artificial Sequence
  Synthetic oligonucleotide
atggggtgtgggaagacgggggtaaccata

SEQ ID NO: 77662 - DNA, 30 bp, Artificial Sequence
  Synthetic oligonucleotide
ttcttgatggataagtgcgctggtaccata

SEQ ID NO: 77663 - DNA, 30 bp, Artificial Sequence
  Synthetic oligonucleotide
tgggaacaaacgtgacaagtgttccccata

SEQ ID NO: 77664 - DNA, 30 bp, Artificial Sequence
  Synthetic oligonucleotide
tacgtaccggaagagtatcataatcccata

SEQ ID NO: 77665 - DNA, 30 bp, Artificial Sequence
  Synthetic oligonucleotide
caggctcagtccgagagacgtggcgccata

SEQ ID NO: 77666 - DNA, 30 bp, Artificial Sequence
  Synthetic oligonucleotide
agagggttgagtgccatcttactaagcata

SEQ ID NO: 77667 - DNA, 30 bp, Artificial Sequence
  Synthetic oligonucleotide
cgaaaggttgctcacggtatttaacgcata

SEQ ID NO: 77668 - DNA, 30 bp, Artificial Sequence
  Synthetic oligonucleotide
cgctcctagtagcaagccgaggttcgcata

SEQ ID NO: 77669 - DNA, 30 bp, Artificial Sequence
  Synthetic oligonucleotide
gcgagaacctatgcccgcctccaaggcata

SEQ ID NO: 77670 - DNA, 30 bp, Artificial Sequence
  Synthetic oligonucleotide
agaagttgcactagggggcaatcatgcata

SEQ ID NO: 77671 - DNA, 30 bp, Artificial Sequence
  Synthetic oligonucleotide
cgaaggcaggaatcgacacgctcatgcata

SEQ ID NO: 77672 - DNA, 30 bp, Artificial Sequence
  Synthetic oligonucleotide
aacagataagatggaaaacgtagatgcata

SEQ ID NO: 77673 - DNA, 30 bp, Artificial Sequence
  Synthetic oligonucleotide
gagatcaagacgtttcaggggtcgtgcata

SEQ ID NO: 77674 - DNA, 30 bp, Artificial Sequence
  Synthetic oligonucleotide
tgcattggtagcaagggagagcagttcata

SEQ ID NO: 77675 - DNA, 30 bp, Artificial Sequence
  Synthetic oligonucleotide
gatacgtatagaccgcgaagactaaagata

SEQ ID NO: 77676 - DNA, 30 bp, Artificial Sequence
  Synthetic oligonucleotide
agcacgtgatgcaaagaaccgtagaagata

SEQ ID NO: 77677 - DNA, 30 bp, Artificial Sequence
  Synthetic oligonucleotide
gccggcctccacagaactagtcggaagata

SEQ ID NO: 77678 - DNA, 30 bp, Artificial Sequence
  Synthetic oligonucleotide
ttgccaacgattaataaaatttcacagata

SEQ ID NO: 77679 - DNA, 30 bp, Artificial Sequence
  Synthetic oligonucleotide
aacaatgcaaggtacactaacacagagata

SEQ ID NO: 77680 - DNA, 30 bp, Artificial Sequence
  Synthetic oligonucleotide
tggcgaataagcgggggtagttatgagata

SEQ ID NO: 77681 - DNA, 30 bp, Artificial Sequence
  Synthetic oligonucleotide
aatggagagctaaaagacaacagtgagata

SEQ ID NO: 77682 - DNA, 30 bp, Artificial Sequence
  Synthetic oligonucleotide
gctagcttgggagggccgccgtggtagata

SEQ ID NO: 77683 - DNA, 30 bp, Artificial Sequence
  Synthetic oligonucleotide
ccacgtcgaagataaagggtcgctacgata

SEQ ID NO: 77684 - DNA, 30 bp, Artificial Sequence
  Synthetic oligonucleotide
gtaactgaactgtggccaatcccggcgata

SEQ ID NO: 77685 - DNA, 30 bp, Artificial Sequence
  Synthetic oligonucleotide
gtgactagcacccgcgcccgaactgcgata

SEQ ID NO: 77686 - DNA, 30 bp, Artificial Sequence
  Synthetic oligonucleotide
gtgcgaacgtgtagggagctcgcatcgata

SEQ ID NO: 77687 - DNA, 30 bp, Artificial Sequence
  Synthetic oligonucleotide
aggattcaactatcagtcactagaaggata

SEQ ID NO: 77688 - DNA, 30 bp, Artificial Sequence
  Synthetic oligonucleotide
acggctaggcacgcgagtgatttcaggata

SEQ ID NO: 77689 - DNA, 30 bp, Artificial Sequence
  Synthetic oligonucleotide
gtcaccaccacatctctaaatcaagggata

SEQ ID NO: 77690 - DNA, 30 bp, Artificial Sequence
  Synthetic oligonucleotide
agagcaactaggtatgatacccgggggata

SEQ ID NO: 77691 - DNA, 30 bp, Artificial Sequence
  Synthetic oligonucleotide
gcggaggatttcgctcccctcgaatggata

SEQ ID NO: 77692 - DNA, 30 bp, Artificial Sequence
  Synthetic oligonucleotide
aaacgtgataaatttgacataacctggata

SEQ ID NO: 77693 - DNA, 30 bp, Artificial Sequence
  Synthetic oligonucleotide
gcgaacattgtaggtgggccgcgtatgata

SEQ ID NO: 77694 - DNA, 30 bp, Artificial Sequence
  Synthetic oligonucleotide
ggagccacggagaggaattttccactgata

SEQ ID NO: 77695 - DNA, 30 bp, Artificial Sequence
  Synthetic oligonucleotide
cagaatagccgacaacctatacaagtgata

SEQ ID NO: 77696 - DNA, 30 bp, Artificial Sequence
  Synthetic oligonucleotide
cagtaggagagtcagaattttcgtgtgata

SEQ ID NO: 77697 - DNA, 30 bp, Artificial Sequence
  Synthetic oligonucleotide
gagccaaaagtaaatatcgaatgtgtgata

SEQ ID NO: 77698 - DNA, 30 bp, Artificial Sequence
  Synthetic oligonucleotide
agagagagcaggaagtatgaaccattgata

SEQ ID NO: 77699 - DNA, 30 bp, Artificial Sequence
  Synthetic oligonucleotide
ggaagtaaacacatgggatatgctttgata

SEQ ID NO: 77700 - DNA, 30 bp, Artificial Sequence
  Synthetic oligonucleotide
ccgagcgggaggtatacgagagccaatata

SEQ ID NO: 77701 - DNA, 30 bp, Artificial Sequence
  Synthetic oligonucleotide
gtcacacggagacactctccttgcgatata

SEQ ID NO: 77702 - DNA, 30 bp, Artificial Sequence
  Synthetic oligonucleotide
aactgaggccaagatagtatgaaggatata

SEQ ID NO: 77703 - DNA, 30 bp, Artificial Sequence
  Synthetic oligonucleotide
catacatacgagaacctagccacggatata

SEQ ID NO: 77704 - DNA, 30 bp, Artificial Sequence
  Synthetic oligonucleotide
cgtgaccgggtacctaatgtaaactatata

SEQ ID NO: 77705 - DNA, 30 bp, Artificial Sequence
  Synthetic oligonucleotide
ccttaagcagaattgtggccaacctatata

SEQ ID NO: 77706 - DNA, 30 bp, Artificial Sequence
  Synthetic oligonucleotide
gcgagctcgattgcagataaaagcactata

SEQ ID NO: 77707 - DNA, 30 bp, Artificial Sequence
  Synthetic oligonucleotide
acgatgagagtttacgtaccccggactata

SEQ ID NO: 77708 - DNA, 30 bp, Artificial Sequence
  Synthetic oligonucleotide
cggagactgacgatcatgtataggcctata

SEQ ID NO: 77709 - DNA, 30 bp, Artificial Sequence
  Synthetic oligonucleotide
aggcattagtcttaaataaaggatgctata

SEQ ID NO: 77710 - DNA, 30 bp, Artificial Sequence
  Synthetic oligonucleotide
agggcagattcacagcaatgtcgtgctata

SEQ ID NO: 77711 - DNA, 30 bp, Artificial Sequence
  Synthetic oligonucleotide
cattgtataaagccaggaacgaagagtata

SEQ ID NO: 77712 - DNA, 30 bp, Artificial Sequence
  Synthetic oligonucleotide
agcttgacaatttggcaagaggagagtata

SEQ ID NO: 77713 - DNA, 30 bp, Artificial Sequence
  Synthetic oligonucleotide
caggcgtgcaatctgtcgcgtaggagtata

SEQ ID NO: 77714 - DNA, 30 bp, Artificial Sequence
  Synthetic oligonucleotide
gtgtaatcgtgggtattaaagcggagtata

SEQ ID NO: 77715 - DNA, 30 bp, Artificial Sequence
  Synthetic oligonucleotide
atcgaaacccgccaacaaggggatagtata

SEQ ID NO: 77716 - DNA, 30 bp, Artificial Sequence
  Synthetic oligonucleotide
gtgtgctacgtaccagagttacaaggtata

SEQ ID NO: 77717 - DNA, 30 bp, Artificial Sequence
  Synthetic oligonucleotide
gtcctgcaagcggggataaggctaggtata

SEQ ID NO: 77718 - DNA, 30 bp, Artificial Sequence
  Synthetic oligonucleotide
gagcaatgtctatagtgacccgagggtata

SEQ ID NO: 77719 - DNA, 30 bp, Artificial Sequence
  Synthetic oligonucleotide
aggggaaactacctgtttcacgtgggtata

SEQ ID NO: 77720 - DNA, 30 bp, Artificial Sequence
  Synthetic oligonucleotide
aaagtagcattgaataagaaataatgtata

SEQ ID NO: 77721 - DNA, 30 bp, Artificial Sequence
  Synthetic oligonucleotide
agcaggcagcgcgcgcagggggcttgtata

SEQ ID NO: 77722 - DNA, 30 bp, Artificial Sequence
  Synthetic oligonucleotide
gtaaggaaagcatacggacgaggggttata

SEQ ID NO: 77723 - DNA, 30 bp, Artificial Sequence
  Synthetic oligonucleotide
agcaaaaatcggggaagggagctgtttata

SEQ ID NO: 77724 - DNA, 30 bp, Artificial Sequence
  Synthetic oligonucleotide
taagtacagatccgggatcctgcaaaacta

SEQ ID NO: 77725 - DNA, 30 bp, Artificial Sequence
  Synthetic oligonucleotide
gaggacatcccaggaactcacgtaaaacta

SEQ ID NO: 77726 - DNA, 30 bp, Artificial Sequence
  Synthetic oligonucleotide
atacgggtaatggtggttcctgaacaacta

SEQ ID NO: 77727 - DNA, 30 bp, Artificial Sequence
  Synthetic oligonucleotide
tctgataggtggtgtataacgatacaacta

SEQ ID NO: 77728 - DNA, 30 bp, Artificial Sequence
  Synthetic oligonucleotide
aagtcgcaacacggcactagtaagcaacta

SEQ ID NO: 77729 - DNA, 30 bp, Artificial Sequence
  Synthetic oligonucleotide
ccgacattacatatagagggacctcaacta

SEQ ID NO: 77730 - DNA, 30 bp, Artificial Sequence
  Synthetic oligonucleotide
ggaggcgtgctcgatgaatggcaataacta

SEQ ID NO: 77731 - DNA, 30 bp, Artificial Sequence
  Synthetic oligonucleotide
ctaatgtgcggaacacaataccattaacta

SEQ ID NO: 77732 - DNA, 30 bp, Artificial Sequence
  Synthetic oligonucleotide
agaatcggaggttgcgtctatatagcacta

SEQ ID NO: 77733 - DNA, 30 bp, Artificial Sequence
  Synthetic oligonucleotide
tgataaagagcacggttatagctggcacta

SEQ ID NO: 77734 - DNA, 30 bp, Artificial Sequence
  Synthetic oligonucleotide
tgagaccatcagtagtcactgaactcacta

SEQ ID NO: 77735 - DNA, 30 bp, Artificial Sequence
  Synthetic oligonucleotide
tgccaaggatggagagataatgggtcacta

SEQ ID NO: 77736 - DNA, 30 bp, Artificial Sequence
  Synthetic oligonucleotide
aggcgtgacttataagaacgaaagagacta

SEQ ID NO: 77737 - DNA, 30 bp, Artificial Sequence
  Synthetic oligonucleotide
gtcataatgtaagacaaaccgtagagacta

SEQ ID NO: 77738 - DNA, 30 bp, Artificial Sequence
  Synthetic oligonucleotide
cgaaaaggggtcactaccctgtaacgacta

SEQ ID NO: 77739 - DNA, 30 bp, Artificial Sequence
  Synthetic oligonucleotide
cgaaggtgtggcacgtcgcagcgccgacta

SEQ ID NO: 77740 - DNA, 30 bp, Artificial Sequence
  Synthetic oligonucleotide
gcgcgatggtgccacaacagtgtccgacta

SEQ ID NO: 77741 - DNA, 30 bp, Artificial Sequence
  Synthetic oligonucleotide
gacggcacgcggacgtcgtaactttgacta

SEQ ID NO: 77742 - DNA, 30 bp, Artificial Sequence
  Synthetic oligonucleotide
aggatcgacagcgacttacacataatacta

SEQ ID NO: 77743 - DNA, 31 bp, Artificial Sequence
  Synthetic oligonucleotide
ggcccgtgcaagcagacggctacacatacta

SEQ ID NO: 77744 - DNA, 30 bp, Artificial Sequence
  Synthetic oligonucleotide
aacgaagatgtaccaacgcgaggactacta

SEQ ID NO: 77745 - DNA, 30 bp, Artificial Sequence
  Synthetic oligonucleotide
acagagttcacgatgagaacagtgaaccta

SEQ ID NO: 77746 - DNA, 30 bp, Artificial Sequence
  Synthetic oligonucleotide
cttcagaaatacatttacgtaaaccaccta

SEQ ID NO: 77747 - DNA, 30 bp, Artificial Sequence
  Synthetic oligonucleotide
tcaagggtagcttaataactaggtcaccta

SEQ ID NO: 77748 - DNA, 30 bp, Artificial Sequence
  Synthetic oligonucleotide
ggaacactaagaggagacaggaacgaccta

SEQ ID NO: 77749 - DNA, 30 bp, Artificial Sequence
  Synthetic oligonucleotide
ggggtaacagttatctgaatcagtgaccta

SEQ ID NO: 77750 - DNA, 30 bp, Artificial Sequence
  Synthetic oligonucleotide
ccgtcgctgagggactacgtttgataccta

SEQ ID NO: 77751 - DNA, 30 bp, Artificial Sequence
  Synthetic oligonucleotide
taacagcgcccagtggcacagttaacccta

SEQ ID NO: 77752 - DNA, 30 bp, Artificial Sequence
  Synthetic oligonucleotide
cgtacaaacgcggtttcgagttacgcccta

SEQ ID NO: 77753 - DNA, 30 bp, Artificial Sequence
  Synthetic oligonucleotide
gtacgcgaccaatgatggaacaagtcccta

SEQ ID NO: 77754 - DNA, 30 bp, Artificial Sequence
  Synthetic oligonucleotide
acaacccacattgatttaatatcgagccta

SEQ ID NO: 77755 - DNA, 30 bp, Artificial Sequence
  Synthetic oligonucleotide
gcgaggcgtaccaccgtcacgctgagccta

SEQ ID NO: 77756 - DNA, 30 bp, Artificial Sequence
  Synthetic oligonucleotide
gagagggagaccagaagccgcaatagccta

SEQ ID NO: 77757 - DNA, 30 bp, Artificial Sequence
  Synthetic oligonucleotide
catcgggccggggggtaccggggacgccta

SEQ ID NO: 77758 - DNA, 30 bp, Artificial Sequence
  Synthetic oligonucleotide
cttaaaaggagcggctgaaggaagcgccta

SEQ ID NO: 77759 - DNA, 30 bp, Artificial Sequence
  Synthetic oligonucleotide
agacattgcactagttctgaagggcgccta

SEQ ID NO: 77760 - DNA, 30 bp, Artificial Sequence
  Synthetic oligonucleotide
aataccggtgatgaggtcaaaaatcgccta

SEQ ID NO: 77761 - DNA, 30 bp, Artificial Sequence
  Synthetic oligonucleotide
gctgagacaagggagggcatacatggccta

SEQ ID NO: 77762 - DNA, 30 bp, Artificial Sequence
  Synthetic oligonucleotide
tgataagaaaaatcattaaggcttggccta

SEQ ID NO: 77763 - DNA, 30 bp, Artificial Sequence
  Synthetic oligonucleotide
agctcaccatagaacggggacacgtgccta

SEQ ID NO: 77764 - DNA, 30 bp, Artificial Sequence
  Synthetic oligonucleotide
tctcattcctgcgcgagccacgagatccta

SEQ ID NO: 77765 - DNA, 30 bp, Artificial Sequence
  Synthetic oligonucleotide
tgggcaaagagagcattattgggactccta

SEQ ID NO: 77766 - DNA, 30 bp, Artificial Sequence
  Synthetic oligonucleotide
caaagtcgatctcgcgagtaacagctccta

SEQ ID NO: 77767 - DNA, 30 bp, Artificial Sequence
  Synthetic oligonucleotide
cacctatgagagctaagtagctaggtccta

SEQ ID NO: 77768 - DNA, 30 bp, Artificial Sequence
  Synthetic oligonucleotide
ggcgattaaatgccggatccatacaagcta

SEQ ID NO: 77769 - DNA, 30 bp, Artificial Sequence
  Synthetic oligonucleotide
aaggtctcgaacctagtcctcctcaagcta

SEQ ID NO: 77770 - DNA, 30 bp, Artificial Sequence
  Synthetic oligonucleotide
gggcccgcacgttggcggaggaataagcta

SEQ ID NO: 77771 - DNA, 30 bp, Artificial Sequence
  Synthetic oligonucleotide
caagaaaatgtcatttttcgcggtaagcta

SEQ ID NO: 77772 - DNA, 30 bp, Artificial Sequence
  Synthetic oligonucleotide
atgtgtacgggagtacattaaaaccagcta

SEQ ID NO: 77773 - DNA, 30 bp, Artificial Sequence
  Synthetic oligonucleotide
aacgccgatgtccagaaagttggcgagcta

SEQ ID NO: 77774 - DNA, 30 bp, Artificial Sequence
  Synthetic oligonucleotide
aggaccagtggcgattcgacatcctagcta

SEQ ID NO: 77775 - DNA, 30 bp, Artificial Sequence
  Synthetic oligonucleotide
aggatcgattacacatcggtggggccgcta

SEQ ID NO: 77776 - DNA, 30 bp, Artificial Sequence
  Synthetic oligonucleotide
acggattgcggttacttggaggcctcgcta

SEQ ID NO: 77777 - DNA, 30 bp, Artificial Sequence
  Synthetic oligonucleotide
tcgcaattgacactataggtgcacaggcta

SEQ ID NO: 77778 - DNA, 30 bp, Artificial Sequence
  Synthetic oligonucleotide
aaagcccattggcatattaggaggaggcta

SEQ ID NO: 77779 - DNA, 30 bp, Artificial Sequence
  Synthetic oligonucleotide
aacgcgcgcgaactgagacatgttaggcta

SEQ ID NO: 77780 - DNA, 30 bp, Artificial Sequence
  Synthetic oligonucleotide
aaggcatggcagaactgatatacgcggcta

SEQ ID NO: 77781 - DNA, 30 bp, Artificial Sequence
  Synthetic oligonucleotide
cattgtggaagtaggctaggcattcggcta

SEQ ID NO: 77782 - DNA, 30 bp, Artificial Sequence
  Synthetic oligonucleotide
tacgtgtaaaggtgaaggaccgaagggcta

SEQ ID NO: 77783 - DNA, 30 bp, Artificial Sequence
  Synthetic oligonucleotide
gatgagaaggtcatgttcgccgtcgggcta

SEQ ID NO: 77784 - DNA, 30 bp, Artificial Sequence
  Synthetic oligonucleotide
tactccagcaaggttatactaacatggcta

SEQ ID NO: 77785 - DNA, 30 bp, Artificial Sequence
  Synthetic oligonucleotide
cgggacattgtacctcaaggcagcatgcta

SEQ ID NO: 77786 - DNA, 30 bp, Artificial Sequence
  Synthetic oligonucleotide
gtgaaaactgcagctccatacaagatgcta

SEQ ID NO: 77787 - DNA, 30 bp, Artificial Sequence
  Synthetic oligonucleotide
tgagcgtggtgcccaagctacagcctgcta

SEQ ID NO: 77788 - DNA, 30 bp, Artificial Sequence
  Synthetic oligonucleotide
gacgggcagtgagtatctagtgccaatcta

SEQ ID NO: 77789 - DNA, 30 bp, Artificial Sequence
  Synthetic oligonucleotide
gcgatcgatatgatgaagccaacgaatcta

SEQ ID NO: 77790 - DNA, 30 bp, Artificial Sequence
  Synthetic oligonucleotide
agtcgtgttcggtggtatctaattaatcta

SEQ ID NO: 77791 - DNA, 30 bp, Artificial Sequence
  Synthetic oligonucleotide
atgccagtcgaaagactgggagctcatcta

SEQ ID NO: 77792 - DNA, 30 bp, Artificial Sequence
  Synthetic oligonucleotide
aactgtaggaaggagtgcgccttagatcta

SEQ ID NO: 77793 - DNA, 30 bp, Artificial Sequence
  Synthetic oligonucleotide
aatgaagcaccgcgaccgggcaactatcta

SEQ ID NO: 77794 - DNA, 30 bp, Artificial Sequence
  Synthetic oligonucleotide
aacggggcccggacaattgccaagtatcta

SEQ ID NO: 77795 - DNA, 40 bp, Artificial Sequence
  Synthetic oligonucleotide
acttagccaggtggacagtgtaccctgcgacgcgtatcta

SEQ ID NO: 77796 - DNA, 30 bp, Artificial Sequence
  Synthetic oligonucleotide
tccacaaagtaaaatacattaagaactcta

SEQ ID NO: 77797 - DNA, 30 bp, Artificial Sequence
  Synthetic oligonucleotide
cggttcgggcattcaaatctaaggactcta

SEQ ID NO: 77798 - DNA, 30 bp, Artificial Sequence
  Synthetic oligonucleotide
gccaggggcataaaatctatccaacctcta

SEQ ID NO: 77799 - DNA, 30 bp, Artificial Sequence
  Synthetic oligonucleotide
gtaacatccatatctgagtgcgtacctcta

SEQ ID NO: 77800 - DNA, 30 bp, Artificial Sequence
  Synthetic oligonucleotide
gtggtaaagtcgagggggttaacgtctcta

SEQ ID NO: 77801 - DNA, 30 bp, Artificial Sequence
  Synthetic oligonucleotide
agatataggtgcaacgattcaaacagtcta

SEQ ID NO: 77802 - DNA, 30 bp, Artificial Sequence
  Synthetic oligonucleotide
agcgggagaaaaccagggacggtaggtcta

SEQ ID NO: 77803 - DNA, 30 bp, Artificial Sequence
  Synthetic oligonucleotide
ggcggggaccaagaaactattcaacttcta

SEQ ID NO: 77804 - DNA, 30 bp, Artificial Sequence
  Synthetic oligonucleotide
tcccaagagacctacagacactccaaagta

SEQ ID NO: 77805 - DNA, 30 bp, Artificial Sequence
  Synthetic oligonucleotide
accgaggatcagaaaaatgccctcaaagta

SEQ ID NO: 77806 - DNA, 30 bp, Artificial Sequence
  Synthetic oligonucleotide
gcgttggatgtacggggcctagcagaagta

SEQ ID NO: 77807 - DNA, 30 bp, Artificial Sequence
  Synthetic oligonucleotide
catcttggggcgcaacttcgctgctaagta

SEQ ID NO: 77808 - DNA, 30 bp, Artificial Sequence
  Synthetic oligonucleotide
agaataagcagaagcacttactggtaagta

SEQ ID NO: 77809 - DNA, 30 bp, Artificial Sequence
  Synthetic oligonucleotide
aaggaggggccagccactaggctgtaagta

SEQ ID NO: 77810 - DNA, 30 bp, Artificial Sequence
  Synthetic oligonucleotide
gcggaagatatagaatcctgattaacagta

SEQ ID NO: 77811 - DNA, 30 bp, Artificial Sequence
  Synthetic oligonucleotide
gagaagcccgtgccaaatcaggttacagta

SEQ ID NO: 77812 - DNA, 30 bp, Artificial Sequence
  Synthetic oligonucleotide
catcaaacaatcccgcttaggcgaccagta

SEQ ID NO: 77813 - DNA, 30 bp, Artificial Sequence
  Synthetic oligonucleotide
acaaagtactcgggaacaggcggaccagta

SEQ ID NO: 77814 - DNA, 30 bp, Artificial Sequence
  Synthetic oligonucleotide
tcggggtataaagtgcgaacattaccagta

SEQ ID NO: 77815 - DNA, 30 bp, Artificial Sequence
  Synthetic oligonucleotide
atcgtggctccaaccgcaagttgcccagta

SEQ ID NO: 77816 - DNA, 30 bp, Artificial Sequence
  Synthetic oligonucleotide
ctaatagcgtatggcgtagaaaagccagta

SEQ ID NO: 77817 - DNA, 30 bp, Artificial Sequence
  Synthetic oligonucleotide
agggctgcgtcagtggtcaatgagccagta

SEQ ID NO: 77818 - DNA, 30 bp, Artificial Sequence
  Synthetic oligonucleotide
acgtagaactcaacaaagactgagccagta

SEQ ID NO: 77819 - DNA, 30 bp, Artificial Sequence
  Synthetic oligonucleotide
ccgattaggcaaaatggaagataggcagta

SEQ ID NO: 77820 - DNA, 30 bp, Artificial Sequence
  Synthetic oligonucleotide
caccgggactggttcggatcctcggcagta

SEQ ID NO: 77821 - DNA, 30 bp, Artificial Sequence
  Synthetic oligonucleotide
gataggggataaaaatataagttatcagta

SEQ ID NO: 77822 - DNA, 30 bp, Artificial Sequence
  Synthetic oligonucleotide
tcggacgaatctggtgggatctactcagta

SEQ ID NO: 77823 - DNA, 30 bp, Artificial Sequence
  Synthetic oligonucleotide
gtcgggaggccatcagccaagctgagagta

SEQ ID NO: 77824 - DNA, 30 bp, Artificial Sequence
  Synthetic oligonucleotide
aggaaggttacatgccgttaggtacgagta

SEQ ID NO: 77825 - DNA, 30 bp, Artificial Sequence
  Synthetic oligonucleotide
gtggacaaaacagttttcggctcccgagta

SEQ ID NO: 77826 - DNA, 30 bp, Artificial Sequence
  Synthetic oligonucleotide
ggacagcacgcgatgcccagcacgggagta

SEQ ID NO: 77827 - DNA, 30 bp, Artificial Sequence
  Synthetic oligonucleotide
atgtgcgggcaggtcctggatgtgggagta

SEQ ID NO: 77828 - DNA, 30 bp, Artificial Sequence
  Synthetic oligonucleotide
tcccgatcgcccgcatggaaaaactgagta

SEQ ID NO: 77829 - DNA, 30 bp, Artificial Sequence
  Synthetic oligonucleotide
cgaaggacgattggatatcatcgttgagta

SEQ ID NO: 77830 - DNA, 30 bp, Artificial Sequence
  Synthetic oligonucleotide
cacgtgatttgcactaacgtttgttgagta

SEQ ID NO: 77831 - DNA, 30 bp, Artificial Sequence
  Synthetic oligonucleotide
agatgccaagggacacataggcacatagta

SEQ ID NO: 77832 - DNA, 30 bp, Artificial Sequence
  Synthetic oligonucleotide
ccgcagtatgcacgaagataagccatagta

SEQ ID NO: 77833 - DNA, 30 bp, Artificial Sequence
  Synthetic oligonucleotide
tggcactggcagataaaccggtaactagta

SEQ ID NO: 77834 - DNA, 30 bp, Artificial Sequence
  Synthetic oligonucleotide
ttcgcggtgggaaatccaacatcactagta

SEQ ID NO: 77835 - DNA, 30 bp, Artificial Sequence
  Synthetic oligonucleotide
agaactcgacggacatctcaagagctagta

SEQ ID NO: 77836 - DNA, 30 bp, Artificial Sequence
  Synthetic oligonucleotide
cggttgaggacgagtggacaagtagtagta

SEQ ID NO: 77837 - DNA, 30 bp, Artificial Sequence
  Synthetic oligonucleotide
catggaaaggtagcagcgcacaaattagta

SEQ ID NO: 77838 - DNA, 30 bp, Artificial Sequence
  Synthetic oligonucleotide
gtagtcccggaagatacacgctaacacgta

SEQ ID NO: 77839 - DNA, 30 bp, Artificial Sequence
  Synthetic oligonucleotide
atacgacacgatgatattagtaagcacgta

SEQ ID NO: 77840 - DNA, 30 bp, Artificial Sequence
  Synthetic oligonucleotide
caatggtcgcgagtcgacttcgggcacgta

SEQ ID NO: 77841 - DNA, 30 bp, Artificial Sequence
  Synthetic oligonucleotide
agggacaagggtgaaaccttcggtgacgta

SEQ ID NO: 77842 - DNA, 30 bp, Artificial Sequence
  Synthetic oligonucleotide
ctggtcggttactgaagtggtaaatacgta

SEQ ID NO: 77843 - DNA, 30 bp, Artificial Sequence
  Synthetic oligonucleotide
gatacacccacaacaaacggccagtacgta

SEQ ID NO: 77844 - DNA, 30 bp, Artificial Sequence
  Synthetic oligonucleotide
cgaatcgtgaaaccaggggaaagttacgta

SEQ ID NO: 77845 - DNA, 30 bp, Artificial Sequence
  Synthetic oligonucleotide
cacgaaagagttcttgcgggacctaccgta

SEQ ID NO: 77846 - DNA, 30 bp, Artificial Sequence
  Synthetic oligonucleotide
tcggtctcaataaatccgaagtgtaccgta

SEQ ID NO: 77847 - DNA, 30 bp, Artificial Sequence
  Synthetic oligonucleotide
aatgcgaactgaagcgaggtgtcacccgta

SEQ ID NO: 77848 - DNA, 30 bp, Artificial Sequence
  Synthetic oligonucleotide
aggccgggcatagagccatagcactccgta

SEQ ID NO: 77849 - DNA, 30 bp, Artificial Sequence
  Synthetic oligonucleotide
taggtccgtgaaaaattgcatggtagcgta

SEQ ID NO: 77850 - DNA, 30 bp, Artificial Sequence
  Synthetic oligonucleotide
tcatacatctgagcgaaacggcaacgcgta

SEQ ID NO: 77851 - DNA, 30 bp, Artificial Sequence
  Synthetic oligonucleotide
acttacaggcaactccaggctgcaggcgta

SEQ ID NO: 77852 - DNA, 31 bp, Artificial Sequence
  Synthetic oligonucleotide
cgtgggaaagtagacttgtgagaacggcgta

SEQ ID NO: 77853 - DNA, 30 bp, Artificial Sequence
  Synthetic oligonucleotide
ttgttggactgtagcaagccgcgcggcgta

SEQ ID NO: 77854 - DNA, 30 bp, Artificial Sequence
  Synthetic oligonucleotide
ttgctcgaatatcaatatagtgtcggcgta

SEQ ID NO: 77855 - DNA, 30 bp, Artificial Sequence
  Synthetic oligonucleotide
tactacaccaatatacactccgcttgcgta

SEQ ID NO: 77856 - DNA, 30 bp, Artificial Sequence
  Synthetic oligonucleotide
tgattacaagttgtatcaattcgttgcgta

SEQ ID NO: 77857 - DNA, 30 bp, Artificial Sequence
  Synthetic oligonucleotide
gtggtcgggtgttcccttagtagcctcgta

SEQ ID NO: 77858 - DNA, 30 bp, Artificial Sequence
  Synthetic oligonucleotide
aagtggaagacgtattgtctaactctcgta

SEQ ID NO: 77859 - DNA, 30 bp, Artificial Sequence
  Synthetic oligonucleotide
aacgaggggggaaccgattggtgtctcgta

SEQ ID NO: 77860 - DNA, 30 bp, Artificial Sequence
  Synthetic oligonucleotide
tggtagcggaccccgaataagggcgtcgta

SEQ ID NO: 77861 - DNA, 30 bp, Artificial Sequence
  Synthetic oligonucleotide
caagctttcagtcaacgggtaaacaaggta

SEQ ID NO: 77862 - DNA, 30 bp, Artificial Sequence
  Synthetic oligonucleotide
gcctcactaagttaatcaggcaagaaggta

SEQ ID NO: 77863 - DNA, 30 bp, Artificial Sequence
  Synthetic oligonucleotide
caattcaggcagtgtcatgctcataaggta

SEQ ID NO: 77864 - DNA, 30 bp, Artificial Sequence
  Synthetic oligonucleotide
agtgagcgtagagccggaggtatacaggta

SEQ ID NO: 77865 - DNA, 30 bp, Artificial Sequence
  Synthetic oligonucleotide
gatgagttcagagtccagcatggccaggta

SEQ ID NO: 77866 - DNA, 30 bp, Artificial Sequence
  Synthetic oligonucleotide
cacacagaataaaggcaagctctagaggta

SEQ ID NO: 77867 - DNA, 30 bp, Artificial Sequence
  Synthetic oligonucleotide
cgtaggctcgatccacgaagttacgaggta

SEQ ID NO: 77868 - DNA, 30 bp, Artificial Sequence
  Synthetic oligonucleotide
gtggaccgtaaattctacgtattggaggta

SEQ ID NO: 77869 - DNA, 30 bp, Artificial Sequence
  Synthetic oligonucleotide
taagcaggagggaaactggtccatgaggta

SEQ ID NO: 77870 - DNA, 30 bp, Artificial Sequence
  Synthetic oligonucleotide
acctacgcgcgatggcgaatgcctgaggta

SEQ ID NO: 77871 - DNA, 30 bp, Artificial Sequence
  Synthetic oligonucleotide
agtcggagtgggatcaattactgataggta

SEQ ID NO: 77872 - DNA, 30 bp, Artificial Sequence
  Synthetic oligonucleotide
tggccaagataggaaatcatgggctaggta

SEQ ID NO: 77873 - DNA, 30 bp, Artificial Sequence
  Synthetic oligonucleotide
agatggaacaggtacataataacgtaggta

SEQ ID NO: 77874 - DNA, 30 bp, Artificial Sequence
  Synthetic oligonucleotide
cttgggagagggaatgccgtcgattaggta

SEQ ID NO: 77875 - DNA, 30 bp, Artificial Sequence
  Synthetic oligonucleotide
tcctcagttagcaacagccggtgaacggta

SEQ ID NO: 77876 - DNA, 30 bp, Artificial Sequence
  Synthetic oligonucleotide
agagggacatcagaggcgcgctccacggta

SEQ ID NO: 77877 - DNA, 30 bp, Artificial Sequence
  Synthetic oligonucleotide
gcgaaggcgatttaccgaacgcgaccggta

SEQ ID NO: 77878 - DNA, 30 bp, Artificial Sequence
  Synthetic oligonucleotide
cgaccgagtttacgtacatgtaagccggta

SEQ ID NO: 77879 - DNA, 30 bp, Artificial Sequence
  Synthetic oligonucleotide
cgtcctttcatgaagagatcaaaatcggta

SEQ ID NO: 77880 - DNA, 30 bp, Artificial Sequence
  Synthetic oligonucleotide
ccgaagataggatatgaagtcaggagggta

SEQ ID NO: 77881 - DNA, 30 bp, Artificial Sequence
  Synthetic oligonucleotide
ggtcggacaagcacggtatgaatgcgggta

SEQ ID NO: 77882 - DNA, 30 bp, Artificial Sequence
  Synthetic oligonucleotide
acggaaccacgatgctaagcttcaggggta

SEQ ID NO: 77883 - DNA, 30 bp, Artificial Sequence
  Synthetic oligonucleotide
agacccgtacggactaaagagcgatgggta

SEQ ID NO: 77884 - DNA, 30 bp, Artificial Sequence
  Synthetic oligonucleotide
taatatcagatccagaatggccattgggta

SEQ ID NO: 77885 - DNA, 30 bp, Artificial Sequence
  Synthetic oligonucleotide
agcgtgcattagtctatcttgacttgggta

SEQ ID NO: 77886 - DNA, 30 bp, Artificial Sequence
  Synthetic oligonucleotide
tgggtggccaagcatcacgcgtcaatggta

SEQ ID NO: 77887 - DNA, 30 bp, Artificial Sequence
  Synthetic oligonucleotide
atgggtgccgggggttacccaagaatggta

SEQ ID NO: 77888 - DNA, 30 bp, Artificial Sequence
  Synthetic oligonucleotide
gcgccgcttgaaagtggtaagtgaatggta

SEQ ID NO: 77889 - DNA, 30 bp, Artificial Sequence
  Synthetic oligonucleotide
cgatcctagtcacatttgcataacatggta

SEQ ID NO: 77890 - DNA, 30 bp, Artificial Sequence
  Synthetic oligonucleotide
cagggcggtgtttgtatactacacatggta

SEQ ID NO: 77891 - DNA, 30 bp, Artificial Sequence
  Synthetic oligonucleotide
aaggacaaatagtcggttcgcggagtggta

SEQ ID NO: 77892 - DNA, 30 bp, Artificial Sequence
  Synthetic oligonucleotide
gggcgttgtaaactgtagtacaatgtggta

SEQ ID NO: 77893 - DNA, 30 bp, Artificial Sequence
  Synthetic oligonucleotide
taggcatacaggcgcagacagcgattggta

SEQ ID NO: 77894 - DNA, 30 bp, Artificial Sequence
  Synthetic oligonucleotide
acgataatatcggagtacccattattggta

SEQ ID NO: 77895 - DNA, 30 bp, Artificial Sequence
  Synthetic oligonucleotide
tgctcaggaaccacctgcaaagctaatgta

SEQ ID NO: 77896 - DNA, 30 bp, Artificial Sequence
  Synthetic oligonucleotide
ggagagttatacggaaatgattaccatgta

SEQ ID NO: 77897 - DNA, 30 bp, Artificial Sequence
  Synthetic oligonucleotide
ggctctaataagggtcgggaataagatgta

SEQ ID NO: 77898 - DNA, 30 bp, Artificial Sequence
  Synthetic oligonucleotide
tgcatgtaggattagtacagaggagatgta

SEQ ID NO: 77899 - DNA, 30 bp, Artificial Sequence
  Synthetic oligonucleotide
cttgcgagataataggggagtttagatgta

SEQ ID NO: 77900 - DNA, 30 bp, Artificial Sequence
  Synthetic oligonucleotide
cgtcaagcggatgctagtgagaactatgta

SEQ ID NO: 77901 - DNA, 30 bp, Artificial Sequence
  Synthetic oligonucleotide
acattggacgtgtaaagaagaccgtatgta

SEQ ID NO: 77902 - DNA, 30 bp, Artificial Sequence
  Synthetic oligonucleotide
gcattaacgggaataaaacataggactgta

SEQ ID NO: 77903 - DNA, 30 bp, Artificial Sequence
  Synthetic oligonucleotide
cgatagattaaagggttacagtggactgta

SEQ ID NO: 77904 - DNA, 30 bp, Artificial Sequence
  Synthetic oligonucleotide
taggatactagaacgtgaaaaggagctgta

SEQ ID NO: 77905 - DNA, 30 bp, Artificial Sequence
  Synthetic oligonucleotide
ctgtggagtgagggtctagtgatcgctgta

SEQ ID NO: 77906 - DNA, 30 bp, Artificial Sequence
  Synthetic oligonucleotide
ggccagctgagcggttaaaatacatctgta

SEQ ID NO: 77907 - DNA, 30 bp, Artificial Sequence
  Synthetic oligonucleotide
aagaatggagccatggcacacgagtctgta

SEQ ID NO: 77908 - DNA, 30 bp, Artificial Sequence
  Synthetic oligonucleotide
caggtgcctaccgtattacgacattctgta

SEQ ID NO: 77909 - DNA, 30 bp, Artificial Sequence
  Synthetic oligonucleotide
cggtacatcaaactagagtaaggcagtgta

SEQ ID NO: 77910 - DNA, 30 bp, Artificial Sequence
  Synthetic oligonucleotide
cagaggatcaacgcaattttcgttagtgta

SEQ ID NO: 77911 - DNA, 30 bp, Artificial Sequence
  Synthetic oligonucleotide
ggtgaagcacacaattatggattacgtgta

SEQ ID NO: 77912 - DNA, 30 bp, Artificial Sequence
  Synthetic oligonucleotide
tgccgtgccattgtaagccagctaggtgta

SEQ ID NO: 77913 - DNA, 30 bp, Artificial Sequence
  Synthetic oligonucleotide
atctaaaggcatctgaaagcaggttgtgta

SEQ ID NO: 77914 - DNA, 30 bp, Artificial Sequence
  Synthetic oligonucleotide
tcgaacgtgctcgtgaggcgcttaattgta

SEQ ID NO: 77915 - DNA, 30 bp, Artificial Sequence
  Synthetic oligonucleotide
ggagacacgcaagattgttgagcgattgta

SEQ ID NO: 77916 - DNA, 30 bp, Artificial Sequence
  Synthetic oligonucleotide
cgagaaaaccaaatagcggagcaccttgta

SEQ ID NO: 77917 - DNA, 30 bp, Artificial Sequence
  Synthetic oligonucleotide
atgggggtgcgcccaccttgactgcttgta

SEQ ID NO: 77918 - DNA, 30 bp, Artificial Sequence
  Synthetic oligonucleotide
cagggtagcgatcttcagaggatagttgta

SEQ ID NO: 77919 - DNA, 30 bp, Artificial Sequence
  Synthetic oligonucleotide
actaatgcaattacacgactctaaaaatta

SEQ ID NO: 77920 - DNA, 29 bp, Artificial Sequence
  Synthetic oligonucleotide
gcgatttgccagggcagatacgaaaatta

SEQ ID NO: 77921 - DNA, 30 bp, Artificial Sequence
  Synthetic oligonucleotide
aagcccatgtgcataagtatagctaaatta

SEQ ID NO: 77922 - DNA, 30 bp, Artificial Sequence
  Synthetic oligonucleotide
cgaagggagtcgggttcctttaaggaatta

SEQ ID NO: 77923 - DNA, 30 bp, Artificial Sequence
  Synthetic oligonucleotide
taacttggagtcgtaacaggtccggaatta

SEQ ID NO: 77924 - DNA, 30 bp, Artificial Sequence
  Synthetic oligonucleotide
ccaccaatagatgagcaaaacttggaatta

SEQ ID NO: 77925 - DNA, 30 bp, Artificial Sequence
  Synthetic oligonucleotide
ggaggcgagtcgtctacagaaaatgaatta

SEQ ID NO: 77926 - DNA, 30 bp, Artificial Sequence
  Synthetic oligonucleotide
tgaacgggtatatcgttggaacatgaatta

SEQ ID NO: 77927 - DNA, 30 bp, Artificial Sequence
  Synthetic oligonucleotide
cgccaacttgagcctaggttagctgaatta

SEQ ID NO: 77928 - DNA, 30 bp, Artificial Sequence
  Synthetic oligonucleotide
gaggggcaccgacacgtactaatttaatta

SEQ ID NO: 77929 - DNA, 30 bp, Artificial Sequence
  Synthetic oligonucleotide
ggtgccaactggtataacatcaaagcatta

SEQ ID NO: 77930 - DNA, 30 bp, Artificial Sequence
  Synthetic oligonucleotide
cggtaaagaactcacatcggcagagcatta

SEQ ID NO: 77931 - DNA, 30 bp, Artificial Sequence
  Synthetic oligonucleotide
taacgcgtgatgccagtacttctacgatta

SEQ ID NO: 77932 - DNA, 29 bp, Artificial Sequence
  Synthetic oligonucleotide
cctgagaaagcccaaccatcccgcgatta

SEQ ID NO: 77933 - DNA, 30 bp, Artificial Sequence
  Synthetic oligonucleotide
ttgtgagaggaaacttagactaatggatta

SEQ ID NO: 77934 - DNA, 30 bp, Artificial Sequence
  Synthetic oligonucleotide
ggcaacggaaagtgtaaataggagtgatta

SEQ ID NO: 77935 - DNA, 30 bp, Artificial Sequence
  Synthetic oligonucleotide
tctagaagggaagtgactgcggcttgatta

SEQ ID NO: 77936 - DNA, 30 bp, Artificial Sequence
  Synthetic oligonucleotide
ccaggtggaaggcgcttgtacctcatatta

SEQ ID NO: 77937 - DNA, 30 bp, Artificial Sequence
  Synthetic oligonucleotide
ggtgagaggaggaccagtcttggacactta

SEQ ID NO: 77938 - DNA, 30 bp, Artificial Sequence
  Synthetic oligonucleotide
gcgataccgagtgcgtaaggggttcactta

SEQ ID NO: 77939 - DNA, 30 bp, Artificial Sequence
  Synthetic oligonucleotide
ccgattgtgcgagcatagaatgtcgactta

SEQ ID NO: 77940 - DNA, 30 bp, Artificial Sequence
  Synthetic oligonucleotide
tattgagtgcacgccggcactgcgtactta

SEQ ID NO: 77941 - DNA, 30 bp, Artificial Sequence
  Synthetic oligonucleotide
ccggaagcgagtgagttgagtcttgcctta

SEQ ID NO: 77942 - DNA, 30 bp, Artificial Sequence
  Synthetic oligonucleotide
cgtaaagagagtgggctcattgtccgctta

SEQ ID NO: 77943 - DNA, 30 bp, Artificial Sequence
  Synthetic oligonucleotide
ggagtcatgggaagtggcacatctcgctta

SEQ ID NO: 77944 - DNA, 30 bp, Artificial Sequence
  Synthetic oligonucleotide
tcatgcgaattatcgtacgatgttggctta

SEQ ID NO: 77945 - DNA, 30 bp, Artificial Sequence
  Synthetic oligonucleotide
agaacatgtttcaaaaggaggggaatctta

SEQ ID NO: 77946 - DNA, 30 bp, Artificial Sequence
  Synthetic oligonucleotide
gcgtgatcaagggaacgatatatactctta

SEQ ID NO: 77947 - DNA, 30 bp, Artificial Sequence
  Synthetic oligonucleotide
cagtgatcgaactactaatttccgttctta

SEQ ID NO: 77948 - DNA, 30 bp, Artificial Sequence
  Synthetic oligonucleotide
ctgagtgttcagcaatgcagctgcaagtta

SEQ ID NO: 77949 - DNA, 30 bp, Artificial Sequence
  Synthetic oligonucleotide
acagaaatggggactccgggtcagaagtta

SEQ ID NO: 77950 - DNA, 30 bp, Artificial Sequence
  Synthetic oligonucleotide
gtgttaagtaagatagagaaaatgaagtta

SEQ ID NO: 77951 - DNA, 30 bp, Artificial Sequence
  Synthetic oligonucleotide
gttgtggtatcgagggggctgaatcagtta

SEQ ID NO: 77952 - DNA, 30 bp, Artificial Sequence
  Synthetic oligonucleotide
gaaaacgccttcaccgaagaatcagagtta

SEQ ID NO: 77953 - DNA, 30 bp, Artificial Sequence
  Synthetic oligonucleotide
tgatgtcagagtcggcgtgaaaccgagtta

SEQ ID NO: 77954 - DNA, 30 bp, Artificial Sequence
  Synthetic oligonucleotide
agcgaatgccgtatatagtcttaggagtta

SEQ ID NO: 77955 - DNA, 30 bp, Artificial Sequence
  Synthetic oligonucleotide
agagacaatcctgccaattcaattgagtta

SEQ ID NO: 77956 - DNA, 30 bp, Artificial Sequence
  Synthetic oligonucleotide
acgtgaaggttgttttaacaggactagtta

SEQ ID NO: 77957 - DNA, 30 bp, Artificial Sequence
  Synthetic oligonucleotide
ggaccgagccggcggacagtagggtagtta

SEQ ID NO: 77958 - DNA, 30 bp, Artificial Sequence
  Synthetic oligonucleotide
acacataaaaaaggggtgatgatttagtta

SEQ ID NO: 77959 - DNA, 30 bp, Artificial Sequence
  Synthetic oligonucleotide
agcgtcagttaagtcgaagtcaagccgtta

SEQ ID NO: 77960 - DNA, 30 bp, Artificial Sequence
  Synthetic oligonucleotide
agaggccctaggaacaccaaccaggcgtta

SEQ ID NO: 77961 - DNA, 29 bp, Artificial Sequence
  Synthetic oligonucleotide
ccagatggctcacgtatatgaaaaggtta

SEQ ID NO: 77962 - DNA, 30 bp, Artificial Sequence
  Synthetic oligonucleotide
ggaaagtgatatgcggaggatgaaaggtta

SEQ ID NO: 77963 - DNA, 30 bp, Artificial Sequence
  Synthetic oligonucleotide
tagggtaaaggtgtaaacttatcaaggtta

SEQ ID NO: 77964 - DNA, 30 bp, Artificial Sequence
  Synthetic oligonucleotide
tcgagggccgtacgcacgctatcgaggtta

SEQ ID NO: 77965 - DNA, 30 bp, Artificial Sequence
  Synthetic oligonucleotide
attacgacaggcctggaagctaataggtta

SEQ ID NO: 77966 - DNA, 29 bp, Artificial Sequence
  Synthetic oligonucleotide
gggaatggaactgaaaacagacccggtta

SEQ ID NO: 77967 - DNA, 30 bp, Artificial Sequence
  Synthetic oligonucleotide
tggaggaaccaaagatccgcagaggggtta

SEQ ID NO: 77968 - DNA, 30 bp, Artificial Sequence
  Synthetic oligonucleotide
tagcacggaacaccccagacgtgctggtta

SEQ ID NO: 77969 - DNA, 30 bp, Artificial Sequence
  Synthetic oligonucleotide
gggacgggaggcgaaattgttaaactgtta

SEQ ID NO: 77970 - DNA, 30 bp, Artificial Sequence
  Synthetic oligonucleotide
ggagaaaattggcagcgtgggcaagtgtta

SEQ ID NO: 77971 - DNA, 30 bp, Artificial Sequence
  Synthetic oligonucleotide
gtgatcagatcaataggaagtatcgtgtta

SEQ ID NO: 77972 - DNA, 30 bp, Artificial Sequence
  Synthetic oligonucleotide
catcgtgatgttctcagcgcggatgtgtta

SEQ ID NO: 77973 - DNA, 30 bp, Artificial Sequence
  Synthetic oligonucleotide
gggttaaaacgcaagaagatcttattgtta

SEQ ID NO: 77974 - DNA, 30 bp, Artificial Sequence
  Synthetic oligonucleotide
acgttacgcgatggcgccaggatcttgtta

SEQ ID NO: 77975 - DNA, 30 bp, Artificial Sequence
  Synthetic oligonucleotide
agataaaaggggtgtgtcgcacagttgtta

SEQ ID NO: 77976 - DNA, 30 bp, Artificial Sequence
  Synthetic oligonucleotide
ccataggacatcagccgacagaccaattta

SEQ ID NO: 77977 - DNA, 30 bp, Artificial Sequence
  Synthetic oligonucleotide
agtaagtgcgtaatggtgggagtgaattta

SEQ ID NO: 77978 - DNA, 30 bp, Artificial Sequence
  Synthetic oligonucleotide
gcgaaggcacatttccatatatgtaattta

SEQ ID NO: 77979 - DNA, 30 bp, Artificial Sequence
  Synthetic oligonucleotide
tcgaaccatagctcggtactccgccattta

SEQ ID NO: 77980 - DNA, 30 bp, Artificial Sequence
  Synthetic oligonucleotide
cagatgacagactagtaccgaatatattta

SEQ ID NO: 77981 - DNA, 30 bp, Artificial Sequence
  Synthetic oligonucleotide
taggtacggaggagccggttctacgcttta

SEQ ID NO: 77982 - DNA, 30 bp, Artificial Sequence
  Synthetic oligonucleotide
cagacaaacctgataaaatagaaggcttta

SEQ ID NO: 77983 - DNA, 30 bp, Artificial Sequence
  Synthetic oligonucleotide
ccgtcgcagaggatgggtggcacgagttta

SEQ ID NO: 77984 - DNA, 30 bp, Artificial Sequence
  Synthetic oligonucleotide
ccgacaaggtaaggctaatctacgagttta

SEQ ID NO: 77985 - DNA, 30 bp, Artificial Sequence
  Synthetic oligonucleotide
ataagagcaaaacatagtataaggagttta

SEQ ID NO: 77986 - DNA, 30 bp, Artificial Sequence
  Synthetic oligonucleotide
tcgtcacacccatacgagagccgacgttta

SEQ ID NO: 77987 - DNA, 30 bp, Artificial Sequence
  Synthetic oligonucleotide
gtattagtggcaatctcaaaagcaggttta

SEQ ID NO: 77988 - DNA, 30 bp, Artificial Sequence
  Synthetic oligonucleotide
cccaatatgctcatgagagaaagtggttta

SEQ ID NO: 77989 - DNA, 30 bp, Artificial Sequence
  Synthetic oligonucleotide
agcgatggctaggaacttctatgctgttta

SEQ ID NO: 77990 - DNA, 30 bp, Artificial Sequence
  Synthetic oligonucleotide
ataggactcgagtggtgttaagatgtttta

SEQ ID NO: 77991 - DNA, 30 bp, Artificial Sequence
  Synthetic oligonucleotide
gggcgagagacctattcactccgaaaaaac

SEQ ID NO: 77992 - DNA, 30 bp, Artificial Sequence
  Synthetic oligonucleotide
acttggcaggcgagaagtattccgcaaaac

SEQ ID NO: 77993 - DNA, 30 bp, Artificial Sequence
  Synthetic oligonucleotide
gaaagaacggataaggaggaattgcaaaac

SEQ ID NO: 77994 - DNA, 30 bp, Artificial Sequence
  Synthetic oligonucleotide
ccccgacatacccctgaatcctgagaaaac

SEQ ID NO: 77995 - DNA, 30 bp, Artificial Sequence
  Synthetic oligonucleotide
ctaaacacaacaaatatttacatagaaaac

SEQ ID NO: 77996 - DNA, 30 bp, Artificial Sequence
  Synthetic oligonucleotide
tatgatcacacctcgggtgcaccgccaaac

SEQ ID NO: 77997 - DNA, 30 bp, Artificial Sequence
  Synthetic oligonucleotide
tctcatacgacactacctcatgaaagaaac

SEQ ID NO: 77998 - DNA, 30 bp, Artificial Sequence
  Synthetic oligonucleotide
cattgtggcactcccaaagaccagagaaac

SEQ ID NO: 77999 - DNA, 30 bp, Artificial Sequence
  Synthetic oligonucleotide
cgattggtcagttctatagaaacgcgaaac

SEQ ID NO: 78000 - DNA, 30 bp, Artificial Sequence
  Synthetic oligonucleotide
acaccggtgataaaagctaagacgcgaaac

SEQ ID NO: 78001 - DNA, 30 bp, Artificial Sequence
  Synthetic oligonucleotide
tgcgttagttatgatggaagtatgcgaaac

SEQ ID NO: 78002 - DNA, 30 bp, Artificial Sequence
  Synthetic oligonucleotide
aggccagccttgcccgtagaaaccggaaac

SEQ ID NO: 78003 - DNA, 30 bp, Artificial Sequence
  Synthetic oligonucleotide
cgcctgatgccgggcaatgtcgtgggaaac

SEQ ID NO: 78004 - DNA, 30 bp, Artificial Sequence
  Synthetic oligonucleotide
gcgagtctggtgtaaggaccggatggaaac

SEQ ID NO: 78005 - DNA, 30 bp, Artificial Sequence
  Synthetic oligonucleotide
gcgcactgtagcgctatcgcaaactgaaac

SEQ ID NO: 78006 - DNA, 30 bp, Artificial Sequence
  Synthetic oligonucleotide
gtcacgaagctgataattataaggtgaaac

SEQ ID NO: 78007 - DNA, 30 bp, Artificial Sequence
  Synthetic oligonucleotide
tgtgggcaagttacgctggtgacaataaac

SEQ ID NO: 78008 - DNA, 30 bp, Artificial Sequence
  Synthetic oligonucleotide
ttaccaagaggaagttgtgctggcataaac

SEQ ID NO: 78009 - DNA, 30 bp, Artificial Sequence
  Synthetic oligonucleotide
ggccgaataacgacgagacgtagtataaac

SEQ ID NO: 78010 - DNA, 30 bp, Artificial Sequence
  Synthetic oligonucleotide
gaaccatcagaggagggttaatgtataaac

SEQ ID NO: 78011 - DNA, 30 bp, Artificial Sequence
  Synthetic oligonucleotide
ccataaggccgaatgttatgttcactaaac

SEQ ID NO: 78012 - DNA, 30 bp, Artificial Sequence
  Synthetic oligonucleotide
taacaaaatacactagagttcatagtaaac

SEQ ID NO: 78013 - DNA, 30 bp, Artificial Sequence
  Synthetic oligonucleotide
gtacaagcaagtaaacgagaagacgtaaac

SEQ ID NO: 78014 - DNA, 30 bp, Artificial Sequence
  Synthetic oligonucleotide
gcgaaaccaggatccacgagcgacgtaaac

SEQ ID NO: 78015 - DNA, 30 bp, Artificial Sequence
  Synthetic oligonucleotide
tgaaacgtcggattactctagttcttaaac

SEQ ID NO: 78016 - DNA, 30 bp, Artificial Sequence
  Synthetic oligonucleotide
ccccaaagggtgaggtaatgccggttaaac

SEQ ID NO: 78017 - DNA, 30 bp, Artificial Sequence
  Synthetic oligonucleotide
ccaacgtggcggatgcccaacatcaacaac

SEQ ID NO: 78018 - DNA, 30 bp, Artificial Sequence
  Synthetic oligonucleotide
atggaaaaacttcgaacactacacgacaac

SEQ ID NO: 78019 - DNA, 30 bp, Artificial Sequence
  Synthetic oligonucleotide
tccgaactaggatccaacagttttgacaac

SEQ ID NO: 78020 - DNA, 30 bp, Artificial Sequence
  Synthetic oligonucleotide
tcccaggtgtggagccggaaatcatacaac

SEQ ID NO: 78021 - DNA, 30 bp, Artificial Sequence
  Synthetic oligonucleotide
tcaatccggaaattaccctgagcaaccaac

SEQ ID NO: 78022 - DNA, 30 bp, Artificial Sequence
  Synthetic oligonucleotide
cgtagggtccagccaggcgtcagaaccaac

SEQ ID NO: 78023 - DNA, 30 bp, Artificial Sequence
  Synthetic oligonucleotide
cattgactggtaaacggcgctcaacgcaac

SEQ ID NO: 78024 - DNA, 30 bp, Artificial Sequence
  Synthetic oligonucleotide
acgggcgtaccttcctaccagagaatcaac

SEQ ID NO: 78025 - DNA, 30 bp, Artificial Sequence
  Synthetic oligonucleotide
cgtcaggcttcctctaacagatagatcaac

SEQ ID NO: 78026 - DNA, 30 bp, Artificial Sequence
  Synthetic oligonucleotide
taggcaggtagtggtgtcattcatatcaac

SEQ ID NO: 78027 - DNA, 30 bp, Artificial Sequence
  Synthetic oligonucleotide
attcgacacatatggaaggggggcgtcaac

SEQ ID NO: 78028 - DNA, 30 bp, Artificial Sequence
  Synthetic oligonucleotide
agctgcgaagacttggcgaataatgtcaac

SEQ ID NO: 78029 - DNA, 30 bp, Artificial Sequence
  Synthetic oligonucleotide
ggacacgacccgctcgtacttaagttcaac

SEQ ID NO: 78030 - DNA, 31 bp, Artificial Sequence
  Synthetic oligonucleotide
accgcccggcctaggagaaggatggttcaac

SEQ ID NO: 78031 - DNA, 30 bp, Artificial Sequence
  Synthetic oligonucleotide
aggcttaacctacaaaaaccagacaagaac

SEQ ID NO: 78032 - DNA, 30 bp, Artificial Sequence
  Synthetic oligonucleotide
caacatacccacttccaccctactaagaac

SEQ ID NO: 78033 - DNA, 30 bp, Artificial Sequence
  Synthetic oligonucleotide
gctgacaagctagtcggaacgtttaagaac

SEQ ID NO: 78034 - DNA, 30 bp, Artificial Sequence
  Synthetic oligonucleotide
tagtggagtcaagaaacacagcagcagaac

SEQ ID NO: 78035 - DNA, 30 bp, Artificial Sequence
  Synthetic oligonucleotide
gagacccacacgtgcgtaaaggaagagaac

SEQ ID NO: 78036 - DNA, 30 bp, Artificial Sequence
  Synthetic oligonucleotide
gttagtcagtgagcccgaacactcgagaac

SEQ ID NO: 78037 - DNA, 30 bp, Artificial Sequence
  Synthetic oligonucleotide
gcattacgtcacccgtaccctaaggagaac

SEQ ID NO: 78038 - DNA, 30 bp, Artificial Sequence
  Synthetic oligonucleotide
ttgtacgggtaccggtagcggacatagaac

SEQ ID NO: 78039 - DNA, 30 bp, Artificial Sequence
  Synthetic oligonucleotide
tacccgagagatcgcgcccccaaaacgaac

SEQ ID NO: 78040 - DNA, 30 bp, Artificial Sequence
  Synthetic oligonucleotide
agcattcgttaatggaggaggaagacgaac

SEQ ID NO: 78041 - DNA, 30 bp, Artificial Sequence
  Synthetic oligonucleotide
aatgcaacatatagttcccagctagcgaac

SEQ ID NO: 78042 - DNA, 30 bp, Artificial Sequence
  Synthetic oligonucleotide
gtggactgacacctcaaagactcacggaac

SEQ ID NO: 78043 - DNA, 30 bp, Artificial Sequence
  Synthetic oligonucleotide
acgaagttcagggttaatggcaaccggaac

SEQ ID NO: 78044 - DNA, 30 bp, Artificial Sequence
  Synthetic oligonucleotide
gaagacaggggatccaaatgcggagggaac

SEQ ID NO: 78045 - DNA, 30 bp, Artificial Sequence
  Synthetic oligonucleotide
acgtatgagttgttggacgggcgtgggaac

SEQ ID NO: 78046 - DNA, 30 bp, Artificial Sequence
  Synthetic oligonucleotide
cttgcgaactaagaattgaggaaatggaac

SEQ ID NO: 78047 - DNA, 30 bp, Artificial Sequence
  Synthetic oligonucleotide
ccacgccactatttcattagagcatggaac

SEQ ID NO: 78048 - DNA, 30 bp, Artificial Sequence
  Synthetic oligonucleotide
ggagcgggtatgctactcaggtgatggaac

SEQ ID NO: 78049 - DNA, 30 bp, Artificial Sequence
  Synthetic oligonucleotide
aggccagggccgaacgtctgttactggaac

SEQ ID NO: 78050 - DNA, 31 bp, Artificial Sequence
  Synthetic oligonucleotide
ggggcatgtgcaacttcaattcgcgatgaac

SEQ ID NO: 78051 - DNA, 30 bp, Artificial Sequence
  Synthetic oligonucleotide
tgaagtatgaatggggaagtatcgatgaac

SEQ ID NO: 78052 - DNA, 30 bp, Artificial Sequence
  Synthetic oligonucleotide
cactcatggtcctgcgaacatcatatgaac

SEQ ID NO: 78053 - DNA, 30 bp, Artificial Sequence
  Synthetic oligonucleotide
ggaacagattaggggacgtaggatatgaac

SEQ ID NO: 78054 - DNA, 30 bp, Artificial Sequence
  Synthetic oligonucleotide
tctcgaacatgaacgaaccatatagtgaac

SEQ ID NO: 78055 - DNA, 30 bp, Artificial Sequence
  Synthetic oligonucleotide
gtcgaaagacagaatgtaatcaaggtgaac

SEQ ID NO: 78056 - DNA, 30 bp, Artificial Sequence
  Synthetic oligonucleotide
atctaggcagaaaatgagattcaggtgaac

SEQ ID NO: 78057 - DNA, 30 bp, Artificial Sequence
  Synthetic oligonucleotide
tgacccgaaacccggcattgtctggtgaac

SEQ ID NO: 78058 - DNA, 30 bp, Artificial Sequence
  Synthetic oligonucleotide
tggatcacggaagagtagacgattttgaac

SEQ ID NO: 78059 - DNA, 30 bp, Artificial Sequence
  Synthetic oligonucleotide
ccttctaacgggtgaaggggagccaataac

SEQ ID NO: 78060 - DNA, 30 bp, Artificial Sequence
  Synthetic oligonucleotide
acgcgtccaatcttggaggcgggtaataac

SEQ ID NO: 78061 - DNA, 30 bp, Artificial Sequence
  Synthetic oligonucleotide
acatcattagcacccgagtcattccataac

SEQ ID NO: 78062 - DNA, 30 bp, Artificial Sequence
  Synthetic oligonucleotide
cgaggtggatctccagtttaccggcataac

SEQ ID NO: 78063 - DNA, 30 bp, Artificial Sequence
  Synthetic oligonucleotide
agcgcggaagttatagacagaatacctaac

SEQ ID NO: 78064 - DNA, 30 bp, Artificial Sequence
  Synthetic oligonucleotide
accgtcgagcgaacttgcgcatagcctaac

SEQ ID NO: 78065 - DNA, 30 bp, Artificial Sequence
  Synthetic oligonucleotide
ccataccagcgtagggtgtagtagagtaac

SEQ ID NO: 78066 - DNA, 30 bp, Artificial Sequence
  Synthetic oligonucleotide
acgactagctctaaattacgtacgagtaac

SEQ ID NO: 78067 - DNA, 30 bp, Artificial Sequence
  Synthetic oligonucleotide
agtctggatccataggcgacattgagtaac

SEQ ID NO: 78068 - DNA, 30 bp, Artificial Sequence
  Synthetic oligonucleotide
acgaaagaacggctggtccgctgctgtaac

SEQ ID NO: 78069 - DNA, 30 bp, Artificial Sequence
  Synthetic oligonucleotide
gtcgagttactttgaaaaacagcaattaac

SEQ ID NO: 78070 - DNA, 30 bp, Artificial Sequence
  Synthetic oligonucleotide
cactgcgaaaagtgtgatatttcgattaac

SEQ ID NO: 78071 - DNA, 30 bp, Artificial Sequence
  Synthetic oligonucleotide
atacgacccatcaactggataaggattaac

SEQ ID NO: 78072 - DNA, 30 bp, Artificial Sequence
  Synthetic oligonucleotide
cggtcccaatcatcgcccatgccgaaacac

SEQ ID NO: 78073 - DNA, 30 bp, Artificial Sequence
  Synthetic oligonucleotide
aagcagttaatggacaaacagagggaacac

SEQ ID NO: 78074 - DNA, 30 bp, Artificial Sequence
  Synthetic oligonucleotide
atacagccgggaatggtaaatgacccacac

SEQ ID NO: 78075 - DNA, 30 bp, Artificial Sequence
  Synthetic oligonucleotide
acgtctttgtccaacgtaggtatagcacac

SEQ ID NO: 78076 - DNA, 30 bp, Artificial Sequence
  Synthetic oligonucleotide
ccagtctggaaaacacgatcgagctcacac

SEQ ID NO: 78077 - DNA, 30 bp, Artificial Sequence
  Synthetic oligonucleotide
tgccctacggccacagggttctaaagacac

SEQ ID NO: 78078 - DNA, 30 bp, Artificial Sequence
  Synthetic oligonucleotide
cccaaactttactgaggaatggacagacac

SEQ ID NO: 78079 - DNA, 30 bp, Artificial Sequence
  Synthetic oligonucleotide
gtcggaactagagttaattgtgtaggacac

SEQ ID NO: 78080 - DNA, 30 bp, Artificial Sequence
  Synthetic oligonucleotide
aattggcatcaaaggggttatacgtgacac

SEQ ID NO: 78081 - DNA, 30 bp, Artificial Sequence
  Synthetic oligonucleotide
ggaggaacaactataatcttacaaatacac

SEQ ID NO: 78082 - DNA, 30 bp, Artificial Sequence
  Synthetic oligonucleotide
gtgtgtgaccacttaaactggaacctacac

SEQ ID NO: 78083 - DNA, 30 bp, Artificial Sequence
  Synthetic oligonucleotide
caggggggtgcgcatgcctatcatctacac

SEQ ID NO: 78084 - DNA, 30 bp, Artificial Sequence
  Synthetic oligonucleotide
gttcgctgaacttcacctaaaagcgtacac

SEQ ID NO: 78085 - DNA, 30 bp, Artificial Sequence
  Synthetic oligonucleotide
gtccatgatgaggtgagagtggctaaccac

SEQ ID NO: 78086 - DNA, 30 bp, Artificial Sequence
  Synthetic oligonucleotide
ttaagacacagccaaaacgcatgcgaccac

SEQ ID NO: 78087 - DNA, 30 bp, Artificial Sequence
  Synthetic oligonucleotide
gacgtttaacccgttaagctataggaccac

SEQ ID NO: 78088 - DNA, 30 bp, Artificial Sequence
  Synthetic oligonucleotide
gaacgcgattatgcacgtgttaagtcccac

SEQ ID NO: 78089 - DNA, 30 bp, Artificial Sequence
  Synthetic oligonucleotide
cgctttcacaaactagatacacacagccac

SEQ ID NO: 78090 - DNA, 30 bp, Artificial Sequence
  Synthetic oligonucleotide
ccccgacccaccgaaagaggtgatagccac

SEQ ID NO: 78091 - DNA, 30 bp, Artificial Sequence
  Synthetic oligonucleotide
ttggggaactagatgtggtaaccacgccac

SEQ ID NO: 78092 - DNA, 30 bp, Artificial Sequence
  Synthetic oligonucleotide
aaactcgctagaaggtataaacgtcgccac

SEQ ID NO: 78093 - DNA, 30 bp, Artificial Sequence
  Synthetic oligonucleotide
gctaggcgaaccatgagagagcgaggccac

SEQ ID NO: 78094 - DNA, 30 bp, Artificial Sequence
  Synthetic oligonucleotide
tcgtgcgtaaggatgagatctgaatgccac

SEQ ID NO: 78095 - DNA, 30 bp, Artificial Sequence
  Synthetic oligonucleotide
cgcaacgtggatgacaagggctactgccac

SEQ ID NO: 78096 - DNA, 30 bp, Artificial Sequence
  Synthetic oligonucleotide
caatagcctactagactccgggacatccac

SEQ ID NO: 78097 - DNA, 30 bp, Artificial Sequence
  Synthetic oligonucleotide
tggtaccggcgtattccaggcggagtccac

SEQ ID NO: 78098 - DNA, 30 bp, Artificial Sequence
  Synthetic oligonucleotide
cgccacccatattcctaaaattggttccac

SEQ ID NO: 78099 - DNA, 30 bp, Artificial Sequence
  Synthetic oligonucleotide
tatcagtcggaagttcaatagcacaagcac

SEQ ID NO: 78100 - DNA, 30 bp, Artificial Sequence
  Synthetic oligonucleotide
cagaagcagcttaacggatggctgaagcac

SEQ ID NO: 78101 - DNA, 30 bp, Artificial Sequence
  Synthetic oligonucleotide
gacttactgtaaaactcacaggaacagcac

SEQ ID NO: 78102 - DNA, 30 bp, Artificial Sequence
  Synthetic oligonucleotide
aagaagcacgtcgggtattagctacagcac

SEQ ID NO: 78103 - DNA, 30 bp, Artificial Sequence
  Synthetic oligonucleotide
gcaatcagacctcagtcacaccgccagcac

SEQ ID NO: 78104 - DNA, 30 bp, Artificial Sequence
  Synthetic oligonucleotide
ggcttaacaaggacgttctaaccatagcac

SEQ ID NO: 78105 - DNA, 30 bp, Artificial Sequence
  Synthetic oligonucleotide
cgtctagcgtgtcaagtgtacgtatagcac

SEQ ID NO: 78106 - DNA, 30 bp, Artificial Sequence
  Synthetic oligonucleotide
ggaagtagaaaagaaacctcgagttagcac

SEQ ID NO: 78107 - DNA, 30 bp, Artificial Sequence
  Synthetic oligonucleotide
tataaaataagaacagagatgtgatcgcac

SEQ ID NO: 78108 - DNA, 30 bp, Artificial Sequence
  Synthetic oligonucleotide
gcgtcgtagatgagaaaggtaatatcgcac

SEQ ID NO: 78109 - DNA, 30 bp, Artificial Sequence
  Synthetic oligonucleotide
agaatatcgagcactacacaccggtcgcac

SEQ ID NO: 78110 - DNA, 30 bp, Artificial Sequence
  Synthetic oligonucleotide
caacaaagcattaaactacccataaggcac

SEQ ID NO: 78111 - DNA, 30 bp, Artificial Sequence
  Synthetic oligonucleotide
acgagggtgaacgcaatattggtacggcac

SEQ ID NO: 78112 - DNA, 30 bp, Artificial Sequence
  Synthetic oligonucleotide
ggtggagaaaatgtatgccaccaggggcac

SEQ ID NO: 78113 - DNA, 30 bp, Artificial Sequence
  Synthetic oligonucleotide
gcaatcctaccggaggaatacacggggcac

SEQ ID NO: 78114 - DNA, 30 bp, Artificial Sequence
  Synthetic oligonucleotide
atcgatctaacgggtctaacggcggggcac

SEQ ID NO: 78115 - DNA, 30 bp, Artificial Sequence
  Synthetic oligonucleotide
tccgaaggcatctgagggtcacatgggcac

SEQ ID NO: 78116 - DNA, 30 bp, Artificial Sequence
  Synthetic oligonucleotide
tgataaccgggtccgcaacacgatctgcac

SEQ ID NO: 78117 - DNA, 30 bp, Artificial Sequence
  Synthetic oligonucleotide
ggctcgtcatcacctaagtggcttctgcac

SEQ ID NO: 78118 - DNA, 30 bp, Artificial Sequence
  Synthetic oligonucleotide
gactaagcgctgtcgtaccgaaggttgcac

SEQ ID NO: 78119 - DNA, 30 bp, Artificial Sequence
  Synthetic oligonucleotide
gtcaagctctatacatacacgccgaatcac

SEQ ID NO: 78120 - DNA, 30 bp, Artificial Sequence
  Synthetic oligonucleotide
accaattaaggggtgctttgagcagatcac

SEQ ID NO: 78121 - DNA, 30 bp, Artificial Sequence
  Synthetic oligonucleotide
cagcggagaaagcaagtaggatgggatcac

SEQ ID NO: 78122 - DNA, 30 bp, Artificial Sequence
  Synthetic oligonucleotide
tgtagtgaggacaattctcaactggatcac

SEQ ID NO: 78123 - DNA, 30 bp, Artificial Sequence
  Synthetic oligonucleotide
agtactgagaggagtaagagtgtctatcac

SEQ ID NO: 78124 - DNA, 30 bp, Artificial Sequence
  Synthetic oligonucleotide
gtccacggacatgggaattgaagaactcac

SEQ ID NO: 78125 - DNA, 30 bp, Artificial Sequence
  Synthetic oligonucleotide
acggtcggctagggtaacacggaccctcac

SEQ ID NO: 78126 - DNA, 30 bp, Artificial Sequence
  Synthetic oligonucleotide
cacgacaagaaagcattacgtgaagctcac

SEQ ID NO: 78127 - DNA, 30 bp, Artificial Sequence
  Synthetic oligonucleotide
ttaggtactcgaccagaatggtctgctcac

SEQ ID NO: 78128 - DNA, 30 bp, Artificial Sequence
  Synthetic oligonucleotide
tgcatacaagaagggtataatttaagtcac

SEQ ID NO: 78129 - DNA, 30 bp, Artificial Sequence
  Synthetic oligonucleotide
cgatagacagactgccccatacacagtcac

SEQ ID NO: 78130 - DNA, 30 bp, Artificial Sequence
  Synthetic oligonucleotide
taaccaaggtcagtaacaatcagcagtcac

SEQ ID NO: 78131 - DNA, 30 bp, Artificial Sequence
  Synthetic oligonucleotide
cggtagaacactgaatctatgtgttgtcac

SEQ ID NO: 78132 - DNA, 30 bp, Artificial Sequence
  Synthetic oligonucleotide
gttgggtacaatcaacaattccgcattcac

SEQ ID NO: 78133 - DNA, 30 bp, Artificial Sequence
  Synthetic oligonucleotide
gactggtacttgcgtaggaaactccttcac

SEQ ID NO: 78134 - DNA, 30 bp, Artificial Sequence
  Synthetic oligonucleotide
gctgtgtagatgggcacgtaaggtgttcac

SEQ ID NO: 78135 - DNA, 30 bp, Artificial Sequence
  Synthetic oligonucleotide
acaaaaaagccgactcactcccactttcac

SEQ ID NO: 78136 - DNA, 30 bp, Artificial Sequence
  Synthetic oligonucleotide
gaacgagcgagggtaatatattgttttcac

SEQ ID NO: 78137 - DNA, 34 bp, Artificial Sequence
  Synthetic oligonucleotide
gatactagaccaccacgtgtgcatcagaaaagac

SEQ ID NO: 78138 - DNA, 30 bp, Artificial Sequence
  Synthetic oligonucleotide
gggaacgattgaataaatattcaacaagac

SEQ ID NO: 78139 - DNA, 30 bp, Artificial Sequence
  Synthetic oligonucleotide
acgtggacgaaggggtctaacacacaagac

SEQ ID NO: 78140 - DNA, 30 bp, Artificial Sequence
  Synthetic oligonucleotide
tcgccccttatacactcggatgagcaagac

SEQ ID NO: 78141 - DNA, 30 bp, Artificial Sequence
  Synthetic oligonucleotide
agtgcggctgttggcacgtgggtagaagac

SEQ ID NO: 78142 - DNA, 30 bp, Artificial Sequence
  Synthetic oligonucleotide
agagacctctgactctcaaacttataagac

SEQ ID NO: 78143 - DNA, 30 bp, Artificial Sequence
  Synthetic oligonucleotide
acatgaccaaacgtcgagccacagtaagac

SEQ ID NO: 78144 - DNA, 30 bp, Artificial Sequence
  Synthetic oligonucleotide
tcaggaactatcagggcaaggtcttaagac

SEQ ID NO: 78145 - DNA, 30 bp, Artificial Sequence
  Synthetic oligonucleotide
gcggagacctcactcaacttagcaccagac

SEQ ID NO: 78146 - DNA, 30 bp, Artificial Sequence
  Synthetic oligonucleotide
agctaccatatgtgcgcttactgcccagac

SEQ ID NO: 78147 - DNA, 30 bp, Artificial Sequence
  Synthetic oligonucleotide
gtggagggctgggtataggtctgagcagac

SEQ ID NO: 78148 - DNA, 30 bp, Artificial Sequence
  Synthetic oligonucleotide
aaacgcctcggcagaatatacgtagcagac

SEQ ID NO: 78149 - DNA, 30 bp, Artificial Sequence
  Synthetic oligonucleotide
ctgggaaataagtgggtatgtaaatcagac

SEQ ID NO: 78150 - DNA, 30 bp, Artificial Sequence
  Synthetic oligonucleotide
atcatagtgccgattagtagggtctcagac

SEQ ID NO: 78151 - DNA, 30 bp, Artificial Sequence
  Synthetic oligonucleotide
gatcggcacgcggagtaatagtggtcagac

SEQ ID NO: 78152 - DNA, 30 bp, Artificial Sequence
  Synthetic oligonucleotide
atgaggcccgacaccacccgtgagagagac

SEQ ID NO: 78153 - DNA, 30 bp, Artificial Sequence
  Synthetic oligonucleotide
ggagaacgcggaatttgacatcgtagagac

SEQ ID NO: 78154 - DNA, 30 bp, Artificial Sequence
  Synthetic oligonucleotide
gttactacgagattgcaacggccaggagac

SEQ ID NO: 78155 - DNA, 30 bp, Artificial Sequence
  Synthetic oligonucleotide
gggagccaaagggtccgttacctctgagac

SEQ ID NO: 78156 - DNA, 30 bp, Artificial Sequence
  Synthetic oligonucleotide
aaagtgctacatgcaaaaatcatgatagac

SEQ ID NO: 78157 - DNA, 30 bp, Artificial Sequence
  Synthetic oligonucleotide
acagaatgaaagcgatggagatagttagac

SEQ ID NO: 78158 - DNA, 30 bp, Artificial Sequence
  Synthetic oligonucleotide
tgaggccaccataatacggcatagaacgac

SEQ ID NO: 78159 - DNA, 30 bp, Artificial Sequence
  Synthetic oligonucleotide
ctgacctaacttcttatgaacattaacgac

SEQ ID NO: 78160 - DNA, 30 bp, Artificial Sequence
  Synthetic oligonucleotide
tagtagtacatcacggaagtaagacacgac

SEQ ID NO: 78161 - DNA, 30 bp, Artificial Sequence
  Synthetic oligonucleotide
gtgaggagaacggcggagtaggcttacgac

SEQ ID NO: 78162 - DNA, 30 bp, Artificial Sequence
  Synthetic oligonucleotide
gcaacagtgttcatttagagcaccaccgac

SEQ ID NO: 78163 - DNA, 30 bp, Artificial Sequence
  Synthetic oligonucleotide
gggaatggtgcacgacatagactcaccgac

SEQ ID NO: 78164 - DNA, 30 bp, Artificial Sequence
  Synthetic oligonucleotide
ggaaagcacagacgttacacaatacccgac

SEQ ID NO: 78165 - DNA, 30 bp, Artificial Sequence
  Synthetic oligonucleotide
acatatgtcagggacgaccacccgcccgac

SEQ ID NO: 78166 - DNA, 30 bp, Artificial Sequence
  Synthetic oligonucleotide
ttgttggccaatacaaggactgcctccgac

SEQ ID NO: 78167 - DNA, 30 bp, Artificial Sequence
  Synthetic oligonucleotide
tactgaaaggaatggggagtatgaagcgac

SEQ ID NO: 78168 - DNA, 30 bp, Artificial Sequence
  Synthetic oligonucleotide
tcgaacaaggtccggccataagcgcgcgac

SEQ ID NO: 78169 - DNA, 30 bp, Artificial Sequence
  Synthetic oligonucleotide
gacgatcacacgtgcacttggttgcgcgac

SEQ ID NO: 78170 - DNA, 29 bp, Artificial Sequence
  Synthetic oligonucleotide
taaacgacggttattaacgagcaggcgac

SEQ ID NO: 78171 - DNA, 30 bp, Artificial Sequence
  Synthetic oligonucleotide
gctgaccagttgcaaaagcgatgaggcgac

SEQ ID NO: 78172 - DNA, 30 bp, Artificial Sequence
  Synthetic oligonucleotide
atgcattagagaatgagcgctaccggcgac

SEQ ID NO: 78173 - DNA, 30 bp, Artificial Sequence
  Synthetic oligonucleotide
acaggtaggaaccatacctcagtatgcgac

SEQ ID NO: 78174 - DNA, 30 bp, Artificial Sequence
  Synthetic oligonucleotide
catcagagtacaactcggtgttaaatcgac

SEQ ID NO: 78175 - DNA, 30 bp, Artificial Sequence
  Synthetic oligonucleotide
ccctagtgggaacctacttggcacatcgac

SEQ ID NO: 78176 - DNA, 30 bp, Artificial Sequence
  Synthetic oligonucleotide
tgagaagcgtgttaagggtcaaggatcgac

SEQ ID NO: 78177 - DNA, 30 bp, Artificial Sequence
  Synthetic oligonucleotide
gacgcaagggtccctcgcaaagttatcgac

SEQ ID NO: 78178 - DNA, 30 bp, Artificial Sequence
  Synthetic oligonucleotide
tctgaacaggagagagaatatttgctcgac

SEQ ID NO: 78179 - DNA, 30 bp, Artificial Sequence
  Synthetic oligonucleotide
cttagtacatcgggagggcatggggtcgac

SEQ ID NO: 78180 - DNA, 30 bp, Artificial Sequence
  Synthetic oligonucleotide
aacgactgcatcttgtagggtctggtcgac

SEQ ID NO: 78181 - DNA, 30 bp, Artificial Sequence
  Synthetic oligonucleotide
ggctgatacgtagtggtatatgacttcgac

SEQ ID NO: 78182 - DNA, 30 bp, Artificial Sequence
  Synthetic oligonucleotide
gcacataagttgaacggcgcaaaaaaggac

SEQ ID NO: 78183 - DNA, 30 bp, Artificial Sequence
  Synthetic oligonucleotide
gctaaggcgtctctcggcctgcataaggac

SEQ ID NO: 78184 - DNA, 30 bp, Artificial Sequence
  Synthetic oligonucleotide
gagagtcgggaacaccatcagttacaggac

SEQ ID NO: 78185 - DNA, 30 bp, Artificial Sequence
  Synthetic oligonucleotide
cgggaatccgacagggaccattaccaggac

SEQ ID NO: 78186 - DNA, 30 bp, Artificial Sequence
  Synthetic oligonucleotide
aactacagtaaatcttagaaatcccaggac

SEQ ID NO: 78187 - DNA, 30 bp, Artificial Sequence
  Synthetic oligonucleotide
cagtacgatgactggaagggagggcaggac

SEQ ID NO: 78188 - DNA, 30 bp, Artificial Sequence
  Synthetic oligonucleotide
gatgggtgcagaccaatgtcatgagaggac

SEQ ID NO: 78189 - DNA, 30 bp, Artificial Sequence
  Synthetic oligonucleotide
acaaaagagttcccgacaccggacgaggac

SEQ ID NO: 78190 - DNA, 30 bp, Artificial Sequence
  Synthetic oligonucleotide
aagggagagtcacaaaccgcccccgaggac

SEQ ID NO: 78191 - DNA, 30 bp, Artificial Sequence
  Synthetic oligonucleotide
aatacgcatttcacccactgaatcgaggac

SEQ ID NO: 78192 - DNA, 30 bp, Artificial Sequence
  Synthetic oligonucleotide
ccagacctacggtgccggagattggaggac

SEQ ID NO: 78193 - DNA, 30 bp, Artificial Sequence
  Synthetic oligonucleotide
agtcgccaggatgctatgaaaaggacggac

SEQ ID NO: 78194 - DNA, 30 bp, Artificial Sequence
  Synthetic oligonucleotide
cgtggtggaatgtaagtatcagcagcggac

SEQ ID NO: 78195 - DNA, 30 bp, Artificial Sequence
  Synthetic oligonucleotide
aacaccaaacataggtaatcacttgcggac

SEQ ID NO: 78196 - DNA, 30 bp, Artificial Sequence
  Synthetic oligonucleotide
taaggggcgcgcaacaatagcgtctcggac

SEQ ID NO: 78197 - DNA, 30 bp, Artificial Sequence
  Synthetic oligonucleotide
gaggcagagatgggttgacgaccgtcggac

SEQ ID NO: 78198 - DNA, 30 bp, Artificial Sequence
  Synthetic oligonucleotide
ctatccgacgatgaaaataattgcagggac

SEQ ID NO: 78199 - DNA, 30 bp, Artificial Sequence
  Synthetic oligonucleotide
ggactaagcttcgataggggattcagggac

SEQ ID NO: 78200 - DNA, 30 bp, Artificial Sequence
  Synthetic oligonucleotide
gagcgtagttctcttcgtcaaatgagggac

SEQ ID NO: 78201 - DNA, 30 bp, Artificial Sequence
  Synthetic oligonucleotide
ccttaaaagtcgagataagcccaacgggac

SEQ ID NO: 78202 - DNA, 30 bp, Artificial Sequence
  Synthetic oligonucleotide
gttacctagcacgttagaatctaaggggac

SEQ ID NO: 78203 - DNA, 30 bp, Artificial Sequence
  Synthetic oligonucleotide
tgcttcgttaagtcggacagaagatgggac

SEQ ID NO: 78204 - DNA, 30 bp, Artificial Sequence
  Synthetic oligonucleotide
aagggaactctacccactttagtaatggac

SEQ ID NO: 78205 - DNA, 30 bp, Artificial Sequence
  Synthetic oligonucleotide
aggaaggtcctgattagaatcaccttggac

SEQ ID NO: 78206 - DNA, 30 bp, Artificial Sequence
  Synthetic oligonucleotide
gcttgttacagtgggaccgatagtttggac

SEQ ID NO: 78207 - DNA, 30 bp, Artificial Sequence
  Synthetic oligonucleotide
tcgtattgatcggtgggtttcgaaaatgac

SEQ ID NO: 78208 - DNA, 30 bp, Artificial Sequence
  Synthetic oligonucleotide
agctctagatttaaataacagatcaatgac

SEQ ID NO: 78209 - DNA, 30 bp, Artificial Sequence
  Synthetic oligonucleotide
ctatgcgatacaagaataatgtttaatgac

SEQ ID NO: 78210 - DNA, 30 bp, Artificial Sequence
  Synthetic oligonucleotide
ggggggaataatagatcatgacaacatgac

SEQ ID NO: 78211 - DNA, 30 bp, Artificial Sequence
  Synthetic oligonucleotide
aagcaatcgcacctagctcaagatcatgac

SEQ ID NO: 78212 - DNA, 30 bp, Artificial Sequence
  Synthetic oligonucleotide
tcaactgtaggaaaactaaagcgggatgac

SEQ ID NO: 78213 - DNA, 30 bp, Artificial Sequence
  Synthetic oligonucleotide
acgggcgttcagaatagccggttatatgac

SEQ ID NO: 78214 - DNA, 30 bp, Artificial Sequence
  Synthetic oligonucleotide
aagtaaaggagaaggggagacgcgcctgac

SEQ ID NO: 78215 - DNA, 30 bp, Artificial Sequence
  Synthetic oligonucleotide
catataacaacacggaaccgagtagctgac

SEQ ID NO: 78216 - DNA, 30 bp, Artificial Sequence
  Synthetic oligonucleotide
acgatagctccagagacttctagggctgac

SEQ ID NO: 78217 - DNA, 30 bp, Artificial Sequence
  Synthetic oligonucleotide
tgatgggcatataaccgatgccgggctgac

SEQ ID NO: 78218 - DNA, 30 bp, Artificial Sequence
  Synthetic oligonucleotide
ccgatacaatccttcgaccgaaattctgac

SEQ ID NO: 78219 - DNA, 30 bp, Artificial Sequence
  Synthetic oligonucleotide
ccccagcatggagcgaaagtggaaagtgac

SEQ ID NO: 78220 - DNA, 30 bp, Artificial Sequence
  Synthetic oligonucleotide
cgcgtcactcatatcctgcgcaaaggtgac

SEQ ID NO: 78221 - DNA, 30 bp, Artificial Sequence
  Synthetic oligonucleotide
tagagccacagtctaagagtatcgggtgac

SEQ ID NO: 78222 - DNA, 30 bp, Artificial Sequence
  Synthetic oligonucleotide
agcgacccatcattcgcgttgtagattgac

SEQ ID NO: 78223 - DNA, 30 bp, Artificial Sequence
  Synthetic oligonucleotide
agagtggtactgcaatgtgaccaacttgac

SEQ ID NO: 78224 - DNA, 30 bp, Artificial Sequence
  Synthetic oligonucleotide
catggcgtggcattacgttgtgtggttgac

SEQ ID NO: 78225 - DNA, 30 bp, Artificial Sequence
  Synthetic oligonucleotide
tcgagactgagttatggtaatgagtttgac

SEQ ID NO: 78226 - DNA, 30 bp, Artificial Sequence
  Synthetic oligonucleotide
tcgaggttcagggcttaccatgattttgac

SEQ ID NO: 78227 - DNA, 30 bp, Artificial Sequence
  Synthetic oligonucleotide
agagcgaaaggggatatgtcgcaaaaatac

SEQ ID NO: 78228 - DNA, 30 bp, Artificial Sequence
  Synthetic oligonucleotide
gtgaccagggaaaagtgctgacggaaatac

SEQ ID NO: 78229 - DNA, 30 bp, Artificial Sequence
  Synthetic oligonucleotide
gccatggcagaagttacggaaaggcaatac

SEQ ID NO: 78230 - DNA, 30 bp, Artificial Sequence
  Synthetic oligonucleotide
tgaactcagtgaatgcaatgagctcaatac

SEQ ID NO: 78231 - DNA, 30 bp, Artificial Sequence
  Synthetic oligonucleotide
agtgaaaattcggcacacgtgcgataatac

SEQ ID NO: 78232 - DNA, 30 bp, Artificial Sequence
  Synthetic oligonucleotide
acctagaaataacggtctagtgagtaatac

SEQ ID NO: 78233 - DNA, 30 bp, Artificial Sequence
  Synthetic oligonucleotide
cagttaacgaccagtgcacaccctacatac

SEQ ID NO: 78234 - DNA, 30 bp, Artificial Sequence
  Synthetic oligonucleotide
ccgagaatcagaaatctataccgtacatac

SEQ ID NO: 78235 - DNA, 30 bp, Artificial Sequence
  Synthetic oligonucleotide
cgatagagtcatcctatgttaaacccatac

SEQ ID NO: 78236 - DNA, 30 bp, Artificial Sequence
  Synthetic oligonucleotide
agcctgcgaattgtcggaatagcgccatac

SEQ ID NO: 78237 - DNA, 30 bp, Artificial Sequence
  Synthetic oligonucleotide
ctgcagggcactggtactggaaccgcatac

SEQ ID NO: 78238 - DNA, 30 bp, Artificial Sequence
  Synthetic oligonucleotide
agataaaaaggtccttaaaaactggcatac

SEQ ID NO: 78239 - DNA, 30 bp, Artificial Sequence
  Synthetic oligonucleotide
tcgcggggtcgttcgggcatcattgcatac

SEQ ID NO: 78240 - DNA, 30 bp, Artificial Sequence
  Synthetic oligonucleotide
ggagtgcaaataggccgagtctgctcatac

SEQ ID NO: 78241 - DNA, 30 bp, Artificial Sequence
  Synthetic oligonucleotide
ggttcagctggcaaaacacggatctcatac

SEQ ID NO: 78242 - DNA, 30 bp, Artificial Sequence
  Synthetic oligonucleotide
ggtaaatataagcgtggcttgtaccgatac

SEQ ID NO: 78243 - DNA, 30 bp, Artificial Sequence
  Synthetic oligonucleotide
aagcctcacacgagcgtagacgggggatac

SEQ ID NO: 78244 - DNA, 30 bp, Artificial Sequence
  Synthetic oligonucleotide
tacatcacaaggcacagggtcgagtgatac

SEQ ID NO: 78245 - DNA, 30 bp, Artificial Sequence
  Synthetic oligonucleotide
gcctacgcggacccaaaaaaccgagtatac

SEQ ID NO: 78246 - DNA, 30 bp, Artificial Sequence
  Synthetic oligonucleotide
ccttaacaggcatccccgaccacggtatac

SEQ ID NO: 78247 - DNA, 30 bp, Artificial Sequence
  Synthetic oligonucleotide
accttcgagcgaagggtcatgagggtatac

SEQ ID NO: 78248 - DNA, 30 bp, Artificial Sequence
  Synthetic oligonucleotide
atcagaacacacacacttaatggattatac

SEQ ID NO: 78249 - DNA, 30 bp, Artificial Sequence
  Synthetic oligonucleotide
atgccacacttacaagagaggacacactac

SEQ ID NO: 78250 - DNA, 30 bp, Artificial Sequence
  Synthetic oligonucleotide
cagaaataaccagaccacgtgcgcgactac

SEQ ID NO: 78251 - DNA, 30 bp, Artificial Sequence
  Synthetic oligonucleotide
cgtgtggcggttatggattaggtctactac

SEQ ID NO: 78252 - DNA, 30 bp, Artificial Sequence
  Synthetic oligonucleotide
gttcactaagcgtaagggaaagggggctac

SEQ ID NO: 78253 - DNA, 30 bp, Artificial Sequence
  Synthetic oligonucleotide
cacgctcacgataacccggcaagtggctac

SEQ ID NO: 78254 - DNA, 30 bp, Artificial Sequence
  Synthetic oligonucleotide
ctccagcgtggatcgatgcgagttggctac

SEQ ID NO: 78255 - DNA, 30 bp, Artificial Sequence
  Synthetic oligonucleotide
acatttactccccaagggtgtcgaatctac

SEQ ID NO: 78256 - DNA, 30 bp, Artificial Sequence
  Synthetic oligonucleotide
gaagagagcttctcaagaattggagtctac

SEQ ID NO: 78257 - DNA, 40 bp, Artificial Sequence
  Synthetic oligonucleotide
aagtagcatggcgcgatattgctcttagctacgtttctac

SEQ ID NO: 78258 - DNA, 30 bp, Artificial Sequence
  Synthetic oligonucleotide
ggatcaacgtaatcgtagtcatatcagtac

SEQ ID NO: 78259 - DNA, 30 bp, Artificial Sequence
  Synthetic oligonucleotide
cagacaagagctatgcccgggggcgagtac

SEQ ID NO: 78260 - DNA, 30 bp, Artificial Sequence
  Synthetic oligonucleotide
tcgaagcatcgctcacgagtcgcaccgtac

SEQ ID NO: 78261 - DNA, 31 bp, Artificial Sequence
  Synthetic oligonucleotide
cgagctcggtgtaagtgattttgcgccgtac

SEQ ID NO: 78262 - DNA, 30 bp, Artificial Sequence
  Synthetic oligonucleotide
agcaacacgatcagaatagttagagcgtac

SEQ ID NO: 78263 - DNA, 30 bp, Artificial Sequence
  Synthetic oligonucleotide
ccgatcagttggagcatatgtttggcgtac

SEQ ID NO: 78264 - DNA, 30 bp, Artificial Sequence
  Synthetic oligonucleotide
aaaggtagcttacccatgaagcatgcgtac

SEQ ID NO: 78265 - DNA, 30 bp, Artificial Sequence
  Synthetic oligonucleotide
tgcagattggctaccaagcgctgatcgtac

SEQ ID NO: 78266 - DNA, 40 bp, Artificial Sequence
  Synthetic oligonucleotide
gggtccctacgtccacgttatgaaacgatgggactcgtac

SEQ ID NO: 78267 - DNA, 30 bp, Artificial Sequence
  Synthetic oligonucleotide
tgtcactgagacttaattatttactcgtac

SEQ ID NO: 78268 - DNA, 30 bp, Artificial Sequence
  Synthetic oligonucleotide
atagctaggatctcgacgaatggctcgtac

SEQ ID NO: 78269 - DNA, 30 bp, Artificial Sequence
  Synthetic oligonucleotide
tggacacatctaaggtgagaagtgtcgtac

SEQ ID NO: 78270 - DNA, 30 bp, Artificial Sequence
  Synthetic oligonucleotide
gatgagatgataaggtttggctaaaggtac

SEQ ID NO: 78271 - DNA, 30 bp, Artificial Sequence
  Synthetic oligonucleotide
tcacgcatgaccgtaattccactgaggtac

SEQ ID NO: 78272 - DNA, 30 bp, Artificial Sequence
  Synthetic oligonucleotide
acagagtcaacgattttattagggcggtac

SEQ ID NO: 78273 - DNA, 30 bp, Artificial Sequence
  Synthetic oligonucleotide
cacatgccgggatgagagctaccttggtac

SEQ ID NO: 78274 - DNA, 30 bp, Artificial Sequence
  Synthetic oligonucleotide
ctccatgtagtgcgcaaatcaaacatgtac

SEQ ID NO: 78275 - DNA, 30 bp, Artificial Sequence
  Synthetic oligonucleotide
ggcaacttagaggggctggcatacatgtac

SEQ ID NO: 78276 - DNA, 30 bp, Artificial Sequence
  Synthetic oligonucleotide
accatcagggacactaggtacgagaattac

SEQ ID NO: 78277 - DNA, 30 bp, Artificial Sequence
  Synthetic oligonucleotide
cgtgttggctactcgcgatggtccgattac

SEQ ID NO: 78278 - DNA, 30 bp, Artificial Sequence
  Synthetic oligonucleotide
atcttacgtgagagacaaagcattgattac

SEQ ID NO: 78279 - DNA, 30 bp, Artificial Sequence
  Synthetic oligonucleotide
agattccgcgtacgacgtgactgcacttac

SEQ ID NO: 78280 - DNA, 30 bp, Artificial Sequence
  Synthetic oligonucleotide
attggcaaactatggataccaccgccttac

SEQ ID NO: 78281 - DNA, 30 bp, Artificial Sequence
  Synthetic oligonucleotide
gtggggtggagaacattatctgggccttac

SEQ ID NO: 78282 - DNA, 30 bp, Artificial Sequence
  Synthetic oligonucleotide
tacgactctaaacggaaaaatagggcttac

SEQ ID NO: 78283 - DNA, 30 bp, Artificial Sequence
  Synthetic oligonucleotide
tagtgaccaccgaaaagaaagtgaagttac

SEQ ID NO: 78284 - DNA, 30 bp, Artificial Sequence
  Synthetic oligonucleotide
tcgacgaactaggctagcgtgtccagttac

SEQ ID NO: 78285 - DNA, 30 bp, Artificial Sequence
  Synthetic oligonucleotide
aaacacgcgttggcattgggatggtgttac

SEQ ID NO: 78286 - DNA, 30 bp, Artificial Sequence
  Synthetic oligonucleotide
ctgcaggaccggcatttaaaggtgatttac

SEQ ID NO: 78287 - DNA, 30 bp, Artificial Sequence
  Synthetic oligonucleotide
agcgggaaacctggtccagaaagccaaacc

SEQ ID NO: 78288 - DNA, 30 bp, Artificial Sequence
  Synthetic oligonucleotide
acaattgatattgatgtacccacgcaaacc

SEQ ID NO: 78289 - DNA, 30 bp, Artificial Sequence
  Synthetic oligonucleotide
tgaccatgaggtgcaccgacgtacgaaacc

SEQ ID NO: 78290 - DNA, 30 bp, Artificial Sequence
  Synthetic oligonucleotide
ttcctaacagggcacaagccagatacaacc

SEQ ID NO: 78291 - DNA, 30 bp, Artificial Sequence
  Synthetic oligonucleotide
gagattataagccccacgacaagcgcaacc

SEQ ID NO: 78292 - DNA, 30 bp, Artificial Sequence
  Synthetic oligonucleotide
ggggcgccaaaggtaagcctggtctcaacc

SEQ ID NO: 78293 - DNA, 30 bp, Artificial Sequence
  Synthetic oligonucleotide
cagtgaggttgtcaaacagcataaagaacc

SEQ ID NO: 78294 - DNA, 30 bp, Artificial Sequence
  Synthetic oligonucleotide
gagagatcgatgggtgccctgtccagaacc

SEQ ID NO: 78295 - DNA, 30 bp, Artificial Sequence
  Synthetic oligonucleotide
gcggaaccaggtaattgatgggtgagaacc

SEQ ID NO: 78296 - DNA, 30 bp, Artificial Sequence
  Synthetic oligonucleotide
atctgcaaactagatgattgtaaccgaacc

SEQ ID NO: 78297 - DNA, 30 bp, Artificial Sequence
  Synthetic oligonucleotide
atcgggcagtggtatagaaaagcgggaacc

SEQ ID NO: 78298 - DNA, 30 bp, Artificial Sequence
  Synthetic oligonucleotide
ctgacacaacgaccttgatacgacttaacc

SEQ ID NO: 78299 - DNA, 30 bp, Artificial Sequence
  Synthetic oligonucleotide
caaggcatcccaaagccaaactccaacacc

SEQ ID NO: 78300 - DNA, 30 bp, Artificial Sequence
  Synthetic oligonucleotide
aacggctggagagctcccctgtttaacacc

SEQ ID NO: 78301 - DNA, 30 bp, Artificial Sequence
  Synthetic oligonucleotide
tacaacccggatctctaagcgaggcacacc

SEQ ID NO: 78302 - DNA, 30 bp, Artificial Sequence
  Synthetic oligonucleotide
agattctagccttaaggcaatagtgccacc

SEQ ID NO: 78303 - DNA, 30 bp, Artificial Sequence
  Synthetic oligonucleotide
atggagtacactataccactatcaagcacc

SEQ ID NO: 78304 - DNA, 30 bp, Artificial Sequence
  Synthetic oligonucleotide
ctgacattaagaacggacctagaatgcacc

SEQ ID NO: 78305 - DNA, 30 bp, Artificial Sequence
  Synthetic oligonucleotide
gtgcgacgatgcgtaaatgacaccatcacc

SEQ ID NO: 78306 - DNA, 30 bp, Artificial Sequence
  Synthetic oligonucleotide
cctcaggctagcttcgtccaatgcatcacc

SEQ ID NO: 78307 - DNA, 30 bp, Artificial Sequence
  Synthetic oligonucleotide
agacacctcgaatgaaagttctacgtcacc

SEQ ID NO: 78308 - DNA, 30 bp, Artificial Sequence
  Synthetic oligonucleotide
gagaccaataggcatttggcaactgtcacc

SEQ ID NO: 78309 - DNA, 30 bp, Artificial Sequence
  Synthetic oligonucleotide
actgggtgtagcgacaatccgctattcacc

SEQ ID NO: 78310 - DNA, 30 bp, Artificial Sequence
  Synthetic oligonucleotide
ttgggacatggcggcgagccccttaagacc

SEQ ID NO: 78311 - DNA, 30 bp, Artificial Sequence
  Synthetic oligonucleotide
gtacaactcaccaagaagtcgcgacagacc

SEQ ID NO: 78312 - DNA, 30 bp, Artificial Sequence
  Synthetic oligonucleotide
gcatggaaaacggttgatacagacgagacc

SEQ ID NO: 78313 - DNA, 30 bp, Artificial Sequence
  Synthetic oligonucleotide
ttaaagaccaacataggcaaactgccgacc

SEQ ID NO: 78314 - DNA, 30 bp, Artificial Sequence
  Synthetic oligonucleotide
tggatgggaaactgttctgaatctccgacc

SEQ ID NO: 78315 - DNA, 30 bp, Artificial Sequence
  Synthetic oligonucleotide
gacgccatgattacgagcactcgggcgacc

SEQ ID NO: 78316 - DNA, 30 bp, Artificial Sequence
  Synthetic oligonucleotide
gcgtaggcaactccatgcggcgtatcgacc

SEQ ID NO: 78317 - DNA, 30 bp, Artificial Sequence
  Synthetic oligonucleotide
caagatgtccgatataggctcgataggacc

SEQ ID NO: 78318 - DNA, 30 bp, Artificial Sequence
  Synthetic oligonucleotide
atggatggtaattttagggccgtacggacc

SEQ ID NO: 78319 - DNA, 30 bp, Artificial Sequence
  Synthetic oligonucleotide
aggccttgagactcacgagaggcgcggacc

SEQ ID NO: 78320 - DNA, 30 bp, Artificial Sequence
  Synthetic oligonucleotide
atgtaaaacctagaaccacttgtagggacc

SEQ ID NO: 78321 - DNA, 30 bp, Artificial Sequence
  Synthetic oligonucleotide
ctagcggagaaacagacgagggaaatgacc

SEQ ID NO: 78322 - DNA, 30 bp, Artificial Sequence
  Synthetic oligonucleotide
ggcactattatgggagtgaggcgaatgacc

SEQ ID NO: 78323 - DNA, 30 bp, Artificial Sequence
  Synthetic oligonucleotide
cagtcaaatacccgtaactggcgactgacc

SEQ ID NO: 78324 - DNA, 30 bp, Artificial Sequence
  Synthetic oligonucleotide
tagcactcataaccactgaaaacgctgacc

SEQ ID NO: 78325 - DNA, 30 bp, Artificial Sequence
  Synthetic oligonucleotide
catgtaataataaattgcaggcgggtgacc

SEQ ID NO: 78326 - DNA, 30 bp, Artificial Sequence
  Synthetic oligonucleotide
tcccacggacacagaacagcctacaatacc

SEQ ID NO: 78327 - DNA, 30 bp, Artificial Sequence
  Synthetic oligonucleotide
atgggatgtccccacccagtgccgaatacc

SEQ ID NO: 78328 - DNA, 30 bp, Artificial Sequence
  Synthetic oligonucleotide
tcgaaagtactccgaatgctgagtcatacc

SEQ ID NO: 78329 - DNA, 30 bp, Artificial Sequence
  Synthetic oligonucleotide
gtcgaatgagcgagataagtaaaagatacc

SEQ ID NO: 78330 - DNA, 30 bp, Artificial Sequence
  Synthetic oligonucleotide
ccaaaagaggcggttagatgggagtatacc

SEQ ID NO: 78331 - DNA, 30 bp, Artificial Sequence
  Synthetic oligonucleotide
gatcatgcacctcaagagagaggcactacc

SEQ ID NO: 78332 - DNA, 30 bp, Artificial Sequence
  Synthetic oligonucleotide
cgggctgcggtgttctcggagaagactacc

SEQ ID NO: 78333 - DNA, 30 bp, Artificial Sequence
  Synthetic oligonucleotide
gacaccgtaggcaaggcaaggaaccctacc

SEQ ID NO: 78334 - DNA, 30 bp, Artificial Sequence
  Synthetic oligonucleotide
ggtagaatagctgggccgagggactctacc

SEQ ID NO: 78335 - DNA, 30 bp, Artificial Sequence
  Synthetic oligonucleotide
aataggtgcaattaactgtgcgggcgtacc

SEQ ID NO: 78336 - DNA, 30 bp, Artificial Sequence
  Synthetic oligonucleotide
cggtagatgactgtgtagcacaccattacc

SEQ ID NO: 78337 - DNA, 30 bp, Artificial Sequence
  Synthetic oligonucleotide
gtgggggaaacgaatgtcggtgtgattacc

SEQ ID NO: 78338 - DNA, 30 bp, Artificial Sequence
  Synthetic oligonucleotide
accgaaggtaaaaacacgaatagcgttacc

SEQ ID NO: 78339 - DNA, 30 bp, Artificial Sequence
  Synthetic oligonucleotide
tgaacccagaagagctcgatttggtttacc

SEQ ID NO: 78340 - DNA, 30 bp, Artificial Sequence
  Synthetic oligonucleotide
cataacctcacaatggatacgccaaaaccc

SEQ ID NO: 78341 - DNA, 30 bp, Artificial Sequence
  Synthetic oligonucleotide
ctcacagagaaatcctgccaaagtaaaccc

SEQ ID NO: 78342 - DNA, 30 bp, Artificial Sequence
  Synthetic oligonucleotide
ggaggtagggctatcactggtacacaaccc

SEQ ID NO: 78343 - DNA, 30 bp, Artificial Sequence
  Synthetic oligonucleotide
gagcaagggtcaacacaatcaaaggaaccc

SEQ ID NO: 78344 - DNA, 30 bp, Artificial Sequence
  Synthetic oligonucleotide
tgaaagagtcaacacacacgaccggaaccc

SEQ ID NO: 78345 - DNA, 30 bp, Artificial Sequence
  Synthetic oligonucleotide
ctacactcacagcctcgttggtcgacaccc

SEQ ID NO: 78346 - DNA, 30 bp, Artificial Sequence
  Synthetic oligonucleotide
cggagtaacgactctcaacgaaatgcaccc

SEQ ID NO: 78347 - DNA, 30 bp, Artificial Sequence
  Synthetic oligonucleotide
gaaccagggagaagaaaaagggactcaccc

SEQ ID NO: 78348 - DNA, 30 bp, Artificial Sequence
  Synthetic oligonucleotide
atcaacgccgccaggaatcaaaggtcaccc

SEQ ID NO: 78349 - DNA, 30 bp, Artificial Sequence
  Synthetic oligonucleotide
tactgtgtaatcatgcccaagctaagaccc

SEQ ID NO: 78350 - DNA, 30 bp, Artificial Sequence
  Synthetic oligonucleotide
ttgagagaggggggacggtagtctcgaccc

SEQ ID NO: 78351 - DNA, 30 bp, Artificial Sequence
  Synthetic oligonucleotide
ccatctgcataacatcaatgcacgggaccc

SEQ ID NO: 78352 - DNA, 30 bp, Artificial Sequence
  Synthetic oligonucleotide
catctcgttgctgagggcaacacgtgaccc

SEQ ID NO: 78353 - DNA, 30 bp, Artificial Sequence
  Synthetic oligonucleotide
tcatgttgccagtgtacaaaactgtgaccc

SEQ ID NO: 78354 - DNA, 30 bp, Artificial Sequence
  Synthetic oligonucleotide
ggagactcaataactccagatggttgaccc

SEQ ID NO: 78355 - DNA, 30 bp, Artificial Sequence
  Synthetic oligonucleotide
acctagcctaaccgtatgacatctataccc

SEQ ID NO: 78356 - DNA, 30 bp, Artificial Sequence
  Synthetic oligonucleotide
ggcccatgaggtctctttcagcatctaccc

SEQ ID NO: 78357 - DNA, 30 bp, Artificial Sequence
  Synthetic oligonucleotide
gcggtcagccatcacaggaaacatgtaccc

SEQ ID NO: 78358 - DNA, 30 bp, Artificial Sequence
  Synthetic oligonucleotide
aaagcgtggccgtcccgaataaggaacccc

SEQ ID NO: 78359 - DNA, 30 bp, Artificial Sequence
  Synthetic oligonucleotide
tgttaactcgtttatagaggagcacacccc

SEQ ID NO: 78360 - DNA, 30 bp, Artificial Sequence
  Synthetic oligonucleotide
aagcacgggcggcaaaagcacgcgcacccc

SEQ ID NO: 78361 - DNA, 31 bp, Artificial Sequence
  Synthetic oligonucleotide
gggtccctgggaccaggattaaacagacccc

SEQ ID NO: 78362 - DNA, 30 bp, Artificial Sequence
  Synthetic oligonucleotide
ttaggagcgagagcataatagagctacccc

SEQ ID NO: 78363 - DNA, 30 bp, Artificial Sequence
  Synthetic oligonucleotide
ccgtaaaaatacaccagtgcagcgtacccc

SEQ ID NO: 78364 - DNA, 30 bp, Artificial Sequence
  Synthetic oligonucleotide
ggtgacaagactggacagagagtgtacccc

SEQ ID NO: 78365 - DNA, 30 bp, Artificial Sequence
  Synthetic oligonucleotide
gcaacactgcgtatcgaagaggataccccc

SEQ ID NO: 78366 - DNA, 30 bp, Artificial Sequence
  Synthetic oligonucleotide
agaggacggattccgccataagagcccccc

SEQ ID NO: 78367 - DNA, 30 bp, Artificial Sequence
  Synthetic oligonucleotide
tcgatccaagatggtttaacgagagccccc

SEQ ID NO: 78368 - DNA, 30 bp, Artificial Sequence
  Synthetic oligonucleotide
gcgacacgaagaccggctcgtgatgccccc

SEQ ID NO: 78369 - DNA, 30 bp, Artificial Sequence
  Synthetic oligonucleotide
cgtaaccgaccgggggtctcagcaagcccc

SEQ ID NO: 78370 - DNA, 30 bp, Artificial Sequence
  Synthetic oligonucleotide
accagctaggccatcatcagcagaagcccc

SEQ ID NO: 78371 - DNA, 30 bp, Artificial Sequence
  Synthetic oligonucleotide
taaatgcgatggttcggtgctaaacgcccc

SEQ ID NO: 78372 - DNA, 30 bp, Artificial Sequence
  Synthetic oligonucleotide
tcttaaagtggacacctcgatgaccgcccc

SEQ ID NO: 78373 - DNA, 30 bp, Artificial Sequence
  Synthetic oligonucleotide
cagagtccggggataaaccggtgtcgcccc

SEQ ID NO: 78374 - DNA, 30 bp, Artificial Sequence
  Synthetic oligonucleotide
cgaggcccgccaaagtatttagaatgcccc

SEQ ID NO: 78375 - DNA, 30 bp, Artificial Sequence
  Synthetic oligonucleotide
atgagcacgaattcgtggtcactggtcccc

SEQ ID NO: 78376 - DNA, 30 bp, Artificial Sequence
  Synthetic oligonucleotide
atcataggatccacggatgataacttcccc

SEQ ID NO: 78377 - DNA, 30 bp, Artificial Sequence
  Synthetic oligonucleotide
agtgatagccgagcgagatggtacttcccc

SEQ ID NO: 78378 - DNA, 30 bp, Artificial Sequence
  Synthetic oligonucleotide
cgtacataacttaaatcactcccacagccc

SEQ ID NO: 78379 - DNA, 30 bp, Artificial Sequence
  Synthetic oligonucleotide
tctccggaaggaacgattaccgtgcagccc

SEQ ID NO: 78380 - DNA, 30 bp, Artificial Sequence
  Synthetic oligonucleotide
aatggaggtacaggaacgatcaaggagccc

SEQ ID NO: 78381 - DNA, 30 bp, Artificial Sequence
  Synthetic oligonucleotide
gcgggaaatatcgaactgtaatcgtagccc

SEQ ID NO: 78382 - DNA, 30 bp, Artificial Sequence
  Synthetic oligonucleotide
cacagcatctgactcgttatatcgccgccc

SEQ ID NO: 78383 - DNA, 30 bp, Artificial Sequence
  Synthetic oligonucleotide
actgaggatgtactctacacagaatcgccc

SEQ ID NO: 78384 - DNA, 30 bp, Artificial Sequence
  Synthetic oligonucleotide
aaagaatgtcaatggcagaacgtgcggccc

SEQ ID NO: 78385 - DNA, 30 bp, Artificial Sequence
  Synthetic oligonucleotide
aggtcccgacacaaaaggctataaatgccc

SEQ ID NO: 78386 - DNA, 30 bp, Artificial Sequence
  Synthetic oligonucleotide
tgccgtactgcgataccgagacgtatgccc

SEQ ID NO: 78387 - DNA, 30 bp, Artificial Sequence
  Synthetic oligonucleotide
tccgtaggtgtatgtcacccgatactgccc

SEQ ID NO: 78388 - DNA, 30 bp, Artificial Sequence
  Synthetic oligonucleotide
cgagagctcatgtagcacgggggtctgccc

SEQ ID NO: 78389 - DNA, 30 bp, Artificial Sequence
  Synthetic oligonucleotide
taatgtacgtcctctacacgggaagtgccc

SEQ ID NO: 78390 - DNA, 30 bp, Artificial Sequence
  Synthetic oligonucleotide
gtctgagaggaggcgtgaaactcaactccc

SEQ ID NO: 78391 - DNA, 30 bp, Artificial Sequence
  Synthetic oligonucleotide
ggtgtgagatcgggaatacagcatcctccc

SEQ ID NO: 78392 - DNA, 30 bp, Artificial Sequence
  Synthetic oligonucleotide
tggcatctcccgagcagaataccccgtccc

SEQ ID NO: 78393 - DNA, 30 bp, Artificial Sequence
  Synthetic oligonucleotide
aggtgccaaagtagtattaagtgtcgtccc

SEQ ID NO: 78394 - DNA, 30 bp, Artificial Sequence
  Synthetic oligonucleotide
tacgccataaagttgggaatcattcgtccc

SEQ ID NO: 78395 - DNA, 30 bp, Artificial Sequence
  Synthetic oligonucleotide
cgagcaaacttcatgatggtgttgggtccc

SEQ ID NO: 78396 - DNA, 30 bp, Artificial Sequence
  Synthetic oligonucleotide
gtgaggaacatggatatctacggtggtccc

SEQ ID NO: 78397 - DNA, 30 bp, Artificial Sequence
  Synthetic oligonucleotide
cgatcaggaagggtgattaagtttggtccc

SEQ ID NO: 78398 - DNA, 30 bp, Artificial Sequence
  Synthetic oligonucleotide
acgaaaccacaggtgtgttcagcgtttccc

SEQ ID NO: 78399 - DNA, 30 bp, Artificial Sequence
  Synthetic oligonucleotide
actaagctcgaagagataaaataccaagcc

SEQ ID NO: 78400 - DNA, 30 bp, Artificial Sequence
  Synthetic oligonucleotide
ggtacagtctcgacgggaattgtgcaagcc

SEQ ID NO: 78401 - DNA, 30 bp, Artificial Sequence
  Synthetic oligonucleotide
atcgatgcgggccagcgtaagagggaagcc

SEQ ID NO: 78402 - DNA, 30 bp, Artificial Sequence
  Synthetic oligonucleotide
tcgaagcgagtgcccggccgagtggaagcc

SEQ ID NO: 78403 - DNA, 30 bp, Artificial Sequence
  Synthetic oligonucleotide
tcgtagcatgacgacgggggaacttaagcc

SEQ ID NO: 78404 - DNA, 30 bp, Artificial Sequence
  Synthetic oligonucleotide
ggttccatggagcaaagatctacttaagcc

SEQ ID NO: 78405 - DNA, 30 bp, Artificial Sequence
  Synthetic oligonucleotide
tcggtagaaccgaccgatgatcaaccagcc

SEQ ID NO: 78406 - DNA, 30 bp, Artificial Sequence
  Synthetic oligonucleotide
caagcggtgtccactgagaatttgccagcc

SEQ ID NO: 78407 - DNA, 30 bp, Artificial Sequence
  Synthetic oligonucleotide
acttgtccttgttctaggtgcggttcagcc

SEQ ID NO: 78408 - DNA, 30 bp, Artificial Sequence
  Synthetic oligonucleotide
tgacggggggaaccggagaaggccagagcc

SEQ ID NO: 78409 - DNA, 30 bp, Artificial Sequence
  Synthetic oligonucleotide
ctcgcacctatacagacacgataaatagcc

SEQ ID NO: 78410 - DNA, 30 bp, Artificial Sequence
  Synthetic oligonucleotide
atgacaagctgaaacaaattggaactagcc

SEQ ID NO: 78411 - DNA, 30 bp, Artificial Sequence
  Synthetic oligonucleotide
tctacggggactccgatttacgaagtagcc

SEQ ID NO: 78412 - DNA, 30 bp, Artificial Sequence
  Synthetic oligonucleotide
agtaacgggcgttgaccccgagcagtagcc

SEQ ID NO: 78413 - DNA, 30 bp, Artificial Sequence
  Synthetic oligonucleotide
taaacgtagattaggaaggatatggtagcc

SEQ ID NO: 78414 - DNA, 30 bp, Artificial Sequence
  Synthetic oligonucleotide
cgcgataagtctgaattgatgtcgttagcc

SEQ ID NO: 78415 - DNA, 30 bp, Artificial Sequence
  Synthetic oligonucleotide
ggaacaatagtctataccagcaaaaacgcc

SEQ ID NO: 78416 - DNA, 30 bp, Artificial Sequence
  Synthetic oligonucleotide
ccgacgaatttagattcggggcaaaacgcc

SEQ ID NO: 78417 - DNA, 31 bp, Artificial Sequence
  Synthetic oligonucleotide
tgattcggagtcgcgagtgaggtcgtacgcc

SEQ ID NO: 78418 - DNA, 30 bp, Artificial Sequence
  Synthetic oligonucleotide
aggcaataaattatacagaagaggtacgcc

SEQ ID NO: 78419 - DNA, 30 bp, Artificial Sequence
  Synthetic oligonucleotide
taacatagagggaaacgcgtaagaaccgcc

SEQ ID NO: 78420 - DNA, 30 bp, Artificial Sequence
  Synthetic oligonucleotide
taaggatcgttgtacgagtgcgacgccgcc

SEQ ID NO: 78421 - DNA, 30 bp, Artificial Sequence
  Synthetic oligonucleotide
cgccatagttgctgatagacgatcgccgcc

SEQ ID NO: 78422 - DNA, 30 bp, Artificial Sequence
  Synthetic oligonucleotide
ggaggatcggtcgtaaccatagtggccgcc

SEQ ID NO: 78423 - DNA, 30 bp, Artificial Sequence
  Synthetic oligonucleotide
cgacctgtatcggaatagccattatccgcc

SEQ ID NO: 78424 - DNA, 30 bp, Artificial Sequence
  Synthetic oligonucleotide
aaacacatattgggttagctaacaagcgcc

SEQ ID NO: 78425 - DNA, 30 bp, Artificial Sequence
  Synthetic oligonucleotide
gtaccatgatccacataccagacaagcgcc

SEQ ID NO: 78426 - DNA, 30 bp, Artificial Sequence
  Synthetic oligonucleotide
tcggcttaatgaggcactacatctggcgcc

SEQ ID NO: 78427 - DNA, 30 bp, Artificial Sequence
  Synthetic oligonucleotide
aggggctttcacgtacaagaacagctcgcc

SEQ ID NO: 78428 - DNA, 30 bp, Artificial Sequence
  Synthetic oligonucleotide
ggctttcgtcaaaaacgaaggatagtcgcc

SEQ ID NO: 78429 - DNA, 30 bp, Artificial Sequence
  Synthetic oligonucleotide
ctgagggttcatctaacccaatgtgtcgcc

SEQ ID NO: 78430 - DNA, 30 bp, Artificial Sequence
  Synthetic oligonucleotide
ctactgagggagacatatattattgtcgcc

SEQ ID NO: 78431 - DNA, 29 bp, Artificial Sequence
  Synthetic oligonucleotide
aggtctagaagtaggtaattaagttcgcc

SEQ ID NO: 78432 - DNA, 30 bp, Artificial Sequence
  Synthetic oligonucleotide
ttaaggagaaaggttagttgtcaacaggcc

SEQ ID NO: 78433 - DNA, 30 bp, Artificial Sequence
  Synthetic oligonucleotide
gggacgaacaccgggccggaacagcaggcc

SEQ ID NO: 78434 - DNA, 29 bp, Artificial Sequence
  Synthetic oligonucleotide
tggggaaaggaagatcttataggcaggcc

SEQ ID NO: 78435 - DNA, 30 bp, Artificial Sequence
  Synthetic oligonucleotide
ccggtaaaatcagctaacaacaactaggcc

SEQ ID NO: 78436 - DNA, 30 bp, Artificial Sequence
  Synthetic oligonucleotide
acgcaggagctggttcaggagtagacggcc

SEQ ID NO: 78437 - DNA, 30 bp, Artificial Sequence
  Synthetic oligonucleotide
ataaacgagtgggtatgggagttaccggcc

SEQ ID NO: 78438 - DNA, 30 bp, Artificial Sequence
  Synthetic oligonucleotide
cgtaacggagagatccaccatcagccggcc

SEQ ID NO: 78439 - DNA, 30 bp, Artificial Sequence
  Synthetic oligonucleotide
aggtgaggcgctacgtgtgcagatagggcc

SEQ ID NO: 78440 - DNA, 30 bp, Artificial Sequence
  Synthetic oligonucleotide
aaaactatcacgcgaggaccgtatcgggcc

SEQ ID NO: 78441 - DNA, 30 bp, Artificial Sequence
  Synthetic oligonucleotide
acggcgaacctgtgattccacggctgggcc

SEQ ID NO: 78442 - DNA, 30 bp, Artificial Sequence
  Synthetic oligonucleotide
tgtccaccgtagagcaaggagtaaatggcc

SEQ ID NO: 78443 - DNA, 30 bp, Artificial Sequence
  Synthetic oligonucleotide
ctgaatctttcggctacgtgctcgatggcc

SEQ ID NO: 78444 - DNA, 30 bp, Artificial Sequence
  Synthetic oligonucleotide
gaacgggcgaaggaatggactcacctggcc

SEQ ID NO: 78445 - DNA, 30 bp, Artificial Sequence
  Synthetic oligonucleotide
atgggctacttactataagggcagcatgcc

SEQ ID NO: 78446 - DNA, 30 bp, Artificial Sequence
  Synthetic oligonucleotide
ccgcgcctagggagcggaatagcgactgcc

SEQ ID NO: 78447 - DNA, 30 bp, Artificial Sequence
  Synthetic oligonucleotide
acggaggttgtcggcaagcgaagggctgcc

SEQ ID NO: 78448 - DNA, 30 bp, Artificial Sequence
  Synthetic oligonucleotide
cgcttgagtcgggacaaattttggagtgcc

SEQ ID NO: 78449 - DNA, 30 bp, Artificial Sequence
  Synthetic oligonucleotide
taactacacgactgaactccgcatagtgcc

SEQ ID NO: 78450 - DNA, 30 bp, Artificial Sequence
  Synthetic oligonucleotide
cagtaggggactaacaagttctcaggtgcc

SEQ ID NO: 78451 - DNA, 30 bp, Artificial Sequence
  Synthetic oligonucleotide
agggcgcgggcggtatccgtcttatgtgcc

SEQ ID NO: 78452 - DNA, 30 bp, Artificial Sequence
  Synthetic oligonucleotide
gaggggagatagatctgtaaatgaattgcc

SEQ ID NO: 78453 - DNA, 30 bp, Artificial Sequence
  Synthetic oligonucleotide
ggcgtttggagggagattatgaacattgcc

SEQ ID NO: 78454 - DNA, 30 bp, Artificial Sequence
  Synthetic oligonucleotide
gtactcaagggatagcgatctccgtttgcc

SEQ ID NO: 78455 - DNA, 30 bp, Artificial Sequence
  Synthetic oligonucleotide
gaacgcctgatcaggagaaagccaaaatcc

SEQ ID NO: 78456 - DNA, 30 bp, Artificial Sequence
  Synthetic oligonucleotide
tgaaatggggaaaatcacgcagacgaatcc

SEQ ID NO: 78457 - DNA, 30 bp, Artificial Sequence
  Synthetic oligonucleotide
agctccgaagtaactaatgcattggaatcc

SEQ ID NO: 78458 - DNA, 30 bp, Artificial Sequence
  Synthetic oligonucleotide
gggaagagaacagagacctattagtaatcc

SEQ ID NO: 78459 - DNA, 30 bp, Artificial Sequence
  Synthetic oligonucleotide
aaaggcagcgaacttgcacgacgaccatcc

SEQ ID NO: 78460 - DNA, 30 bp, Artificial Sequence
  Synthetic oligonucleotide
atgtctagggatagaaagaaggttccatcc

SEQ ID NO: 78461 - DNA, 30 bp, Artificial Sequence
  Synthetic oligonucleotide
taaagaagagaatcaacagagtatgcatcc

SEQ ID NO: 78462 - DNA, 30 bp, Artificial Sequence
  Synthetic oligonucleotide
taagcattcgatgaggagaccccaagatcc

SEQ ID NO: 78463 - DNA, 27 bp, Artificial Sequence
  Synthetic oligonucleotide
gcgtgggtttagtaagatgagcgatcc

SEQ ID NO: 78464 - DNA, 30 bp, Artificial Sequence
  Synthetic oligonucleotide
atggaactggaaacaatgtgaatgggatcc

SEQ ID NO: 78465 - DNA, 30 bp, Artificial Sequence
  Synthetic oligonucleotide
aacacacgcgtagacaacagagtgggatcc

SEQ ID NO: 78466 - DNA, 30 bp, Artificial Sequence
  Synthetic oligonucleotide
atatcgaggccaacgaatcgatccatatcc

SEQ ID NO: 78467 - DNA, 30 bp, Artificial Sequence
  Synthetic oligonucleotide
gtggcacactaggtgacaaagtatttatcc

SEQ ID NO: 78468 - DNA, 30 bp, Artificial Sequence
  Synthetic oligonucleotide
aggagcgaagtcgatcttgaattccactcc

SEQ ID NO: 78469 - DNA, 30 bp, Artificial Sequence
  Synthetic oligonucleotide
cttctcacgaaaagggaacaatgggactcc

SEQ ID NO: 78470 - DNA, 30 bp, Artificial Sequence
  Synthetic oligonucleotide
gccttctggacagaaactttgcgtgactcc

SEQ ID NO: 78471 - DNA, 30 bp, Artificial Sequence
  Synthetic oligonucleotide
tccctaatggtacattacaaaaaagcctcc

SEQ ID NO: 78472 - DNA, 30 bp, Artificial Sequence
  Synthetic oligonucleotide
cggcattggcaagctcacacacagtcctcc

SEQ ID NO: 78473 - DNA, 30 bp, Artificial Sequence
  Synthetic oligonucleotide
ccgatgcgatactatacacccggttcctcc

SEQ ID NO: 78474 - DNA, 30 bp, Artificial Sequence
  Synthetic oligonucleotide
ggaaacggtatgccatcgctgatccgctcc

SEQ ID NO: 78475 - DNA, 30 bp, Artificial Sequence
  Synthetic oligonucleotide
agataagcgacaatcaggcccacgtgctcc

SEQ ID NO: 78476 - DNA, 30 bp, Artificial Sequence
  Synthetic oligonucleotide
tagcgggactggttgggcaatgtcctctcc

SEQ ID NO: 78477 - DNA, 30 bp, Artificial Sequence
  Synthetic oligonucleotide
cgaaaacctagcggcgggtggaacgtctcc

SEQ ID NO: 78478 - DNA, 30 bp, Artificial Sequence
  Synthetic oligonucleotide
aggtgcggaaaccaaacggaaatacagtcc

SEQ ID NO: 78479 - DNA, 30 bp, Artificial Sequence
  Synthetic oligonucleotide
caggctgcataggagaacacatagcagtcc

SEQ ID NO: 78480 - DNA, 30 bp, Artificial Sequence
  Synthetic oligonucleotide
ttgtgtgaggttcaaggagtgcacgagtcc

SEQ ID NO: 78481 - DNA, 30 bp, Artificial Sequence
  Synthetic oligonucleotide
acacccgatcccgagggattttgagcgtcc

SEQ ID NO: 78482 - DNA, 30 bp, Artificial Sequence
  Synthetic oligonucleotide
gcgatctcgctcaacaggggttggtcgtcc

SEQ ID NO: 78483 - DNA, 30 bp, Artificial Sequence
  Synthetic oligonucleotide
agaaacggtacccaattagaggtacggtcc

SEQ ID NO: 78484 - DNA, 30 bp, Artificial Sequence
  Synthetic oligonucleotide
ctcaaaccaaatgcattcgactagcggtcc

SEQ ID NO: 78485 - DNA, 30 bp, Artificial Sequence
  Synthetic oligonucleotide
cagttcataggatataaagtggaagggtcc

SEQ ID NO: 78486 - DNA, 30 bp, Artificial Sequence
  Synthetic oligonucleotide
cacaaacccggtcgaatctccactgggtcc

SEQ ID NO: 78487 - DNA, 30 bp, Artificial Sequence
  Synthetic oligonucleotide
agaagagtcacaagtccgcaggtgtggtcc

SEQ ID NO: 78488 - DNA, 30 bp, Artificial Sequence
  Synthetic oligonucleotide
accatcgaacatgggctcgaagaaatgtcc

SEQ ID NO: 78489 - DNA, 30 bp, Artificial Sequence
  Synthetic oligonucleotide
gtacaagcgcgctgaagcgatcaggtgtcc

SEQ ID NO: 78490 - DNA, 30 bp, Artificial Sequence
  Synthetic oligonucleotide
ggcgattccgaactgtggcggtccagttcc

SEQ ID NO: 78491 - DNA, 30 bp, Artificial Sequence
  Synthetic oligonucleotide
caccggtgagtaaacggacaagcaatttcc

SEQ ID NO: 78492 - DNA, 30 bp, Artificial Sequence
  Synthetic oligonucleotide
gatggaacatcttaagatacgagggtttcc

SEQ ID NO: 78493 - DNA, 30 bp, Artificial Sequence
  Synthetic oligonucleotide
gctaaaaagaaagatgaatgggttttttcc

SEQ ID NO: 78494 - DNA, 30 bp, Artificial Sequence
  Synthetic oligonucleotide
agggtacacaaagggtacacaggaaaaagc

SEQ ID NO: 78495 - DNA, 30 bp, Artificial Sequence
  Synthetic oligonucleotide
gggcgggcgatgcatgtttccataaaaagc

SEQ ID NO: 78496 - DNA, 30 bp, Artificial Sequence
  Synthetic oligonucleotide
caggtcgaaaaatggagagagttcaaaagc

SEQ ID NO: 78497 - DNA, 30 bp, Artificial Sequence
  Synthetic oligonucleotide
gaggaaacatcgaagtgtattggacaaagc

SEQ ID NO: 78498 - DNA, 30 bp, Artificial Sequence
  Synthetic oligonucleotide
aaggacaaagtaggtaataaatcgcaaagc

SEQ ID NO: 78499 - DNA, 30 bp, Artificial Sequence
  Synthetic oligonucleotide
tcggcatgatacacaaagcgtgatcaaagc

SEQ ID NO: 78500 - DNA, 30 bp, Artificial Sequence
  Synthetic oligonucleotide
tcaaccgtactcaggctccctccagaaagc

SEQ ID NO: 78501 - DNA, 30 bp, Artificial Sequence
  Synthetic oligonucleotide
gttaggacagccggaaaggattgtgaaagc

SEQ ID NO: 78502 - DNA, 30 bp, Artificial Sequence
  Synthetic oligonucleotide
aagtggtaagacgtacggtgtcgctaaagc

SEQ ID NO: 78503 - DNA, 30 bp, Artificial Sequence
  Synthetic oligonucleotide
tggtctatacccgagcaacctgtctaaagc

SEQ ID NO: 78504 - DNA, 30 bp, Artificial Sequence
  Synthetic oligonucleotide
tcaagcgctgatttggatagcaagtaaagc

SEQ ID NO: 78505 - DNA, 31 bp, Artificial Sequence
  Synthetic oligonucleotide
gtacaaaagctgacgggggtaagattaaagc

SEQ ID NO: 78506 - DNA, 30 bp, Artificial Sequence
  Synthetic oligonucleotide
tcattagtcaaggcaagtctcgtaacaagc

SEQ ID NO: 78507 - DNA, 30 bp, Artificial Sequence
  Synthetic oligonucleotide
atacggtctagcattaaaggagttccaagc

SEQ ID NO: 78508 - DNA, 30 bp, Artificial Sequence
  Synthetic oligonucleotide
cctgtaaggacgaatggtgtcaccgcaagc

SEQ ID NO: 78509 - DNA, 30 bp, Artificial Sequence
  Synthetic oligonucleotide
aagcagaatttgaggggtgaaagcgcaagc

SEQ ID NO: 78510 - DNA, 30 bp, Artificial Sequence
  Synthetic oligonucleotide
ctgagtaggctcttggcctggatcgcaagc

SEQ ID NO: 78511 - DNA, 30 bp, Artificial Sequence
  Synthetic oligonucleotide
tggttaatgtaagcgggtaacggctcaagc

SEQ ID NO: 78512 - DNA, 30 bp, Artificial Sequence
  Synthetic oligonucleotide
tgagggcacttttgggtagataagcgaagc

SEQ ID NO: 78513 - DNA, 30 bp, Artificial Sequence
  Synthetic oligonucleotide
ccattatacgtgagatgacgggatcgaagc

SEQ ID NO: 78514 - DNA, 30 bp, Artificial Sequence
  Synthetic oligonucleotide
agaagtacctcgctttgagtgacaggaagc

SEQ ID NO: 78515 - DNA, 30 bp, Artificial Sequence
  Synthetic oligonucleotide
gaggtttgatgcgaaaacggggctggaagc

SEQ ID NO: 78516 - DNA, 30 bp, Artificial Sequence
  Synthetic oligonucleotide
gtatggtaccactgaccttcgagatgaagc

SEQ ID NO: 78517 - DNA, 30 bp, Artificial Sequence
  Synthetic oligonucleotide
cgttctcaaatcgaactgttcaagtgaagc

SEQ ID NO: 78518 - DNA, 30 bp, Artificial Sequence
  Synthetic oligonucleotide
aggttagtccgtatctaactgtagtgaagc

SEQ ID NO: 78519 - DNA, 30 bp, Artificial Sequence
  Synthetic oligonucleotide
agagtattgagcttacgaacacaaataagc

SEQ ID NO: 78520 - DNA, 30 bp, Artificial Sequence
  Synthetic oligonucleotide
aacaggaggacatggacaccctacgtaagc

SEQ ID NO: 78521 - DNA, 30 bp, Artificial Sequence
  Synthetic oligonucleotide
ctagaacgatgcgtcggaggttgtgtaagc

SEQ ID NO: 78522 - DNA, 30 bp, Artificial Sequence
  Synthetic oligonucleotide
tgcatctcaccgcacaaagtcggattaagc

SEQ ID NO: 78523 - DNA, 30 bp, Artificial Sequence
  Synthetic oligonucleotide
catagccataattgtgaaaactggttaagc

SEQ ID NO: 78524 - DNA, 30 bp, Artificial Sequence
  Synthetic oligonucleotide
agcagaccttgggttctggcctacaacagc

SEQ ID NO: 78525 - DNA, 30 bp, Artificial Sequence
  Synthetic oligonucleotide
acaggagaaaaagtcagatttatgaacagc

SEQ ID NO: 78526 - DNA, 30 bp, Artificial Sequence
  Synthetic oligonucleotide
ttaaaatgtggagactgtgtaattaacagc

SEQ ID NO: 78527 - DNA, 30 bp, Artificial Sequence
  Synthetic oligonucleotide
aaggtcgccttgcttaatgaaaaacacagc

SEQ ID NO: 78528 - DNA, 30 bp, Artificial Sequence
  Synthetic oligonucleotide
cctggcaccaggttccaagcacaagacagc

SEQ ID NO: 78529 - DNA, 30 bp, Artificial Sequence
  Synthetic oligonucleotide
acgaacggtaatcgaaaccatttagacagc

SEQ ID NO: 78530 - DNA, 30 bp, Artificial Sequence
  Synthetic oligonucleotide
tggaggaaagctcggcatgagaaggacagc

SEQ ID NO: 78531 - DNA, 30 bp, Artificial Sequence
  Synthetic oligonucleotide
ggaagcgtagtcgagatcgtttgtgacagc

SEQ ID NO: 78532 - DNA, 30 bp, Artificial Sequence
  Synthetic oligonucleotide
gcatgcgaaggagataacactcgttacagc

SEQ ID NO: 78533 - DNA, 30 bp, Artificial Sequence
  Synthetic oligonucleotide
gaggaaattgcgaagagaaggatgcccagc

SEQ ID NO: 78534 - DNA, 30 bp, Artificial Sequence
  Synthetic oligonucleotide
acaggccgatagacctctggttctcccagc

SEQ ID NO: 78535 - DNA, 30 bp, Artificial Sequence
  Synthetic oligonucleotide
cctcaggcgaatgtgacgcccaaggccagc

SEQ ID NO: 78536 - DNA, 30 bp, Artificial Sequence
  Synthetic oligonucleotide
acgtatagtgttgtgcgtgatccaggcagc

SEQ ID NO: 78537 - DNA, 30 bp, Artificial Sequence
  Synthetic oligonucleotide
ataaaagaatctcgtaagggccaatgcagc

SEQ ID NO: 78538 - DNA, 30 bp, Artificial Sequence
  Synthetic oligonucleotide
ttaggacggtcaaaacggagcccgtgcagc

SEQ ID NO: 78539 - DNA, 30 bp, Artificial Sequence
  Synthetic oligonucleotide
cacgggcgcaaaatcagcgcgagcatcagc

SEQ ID NO: 78540 - DNA, 30 bp, Artificial Sequence
  Synthetic oligonucleotide
gggtaagccgatagcagaggatgggtcagc

SEQ ID NO: 78541 - DNA, 30 bp, Artificial Sequence
  Synthetic oligonucleotide
gtgcgccactagaaaagcgagtgtgtcagc

SEQ ID NO: 78542 - DNA, 30 bp, Artificial Sequence
  Synthetic oligonucleotide
cctgagcttttcgacaagagtcaccagagc

SEQ ID NO: 78543 - DNA, 30 bp, Artificial Sequence
  Synthetic oligonucleotide
tctcacaccgactccttaagcatccagagc

SEQ ID NO: 78544 - DNA, 30 bp, Artificial Sequence
  Synthetic oligonucleotide
cgggaataccacggcgatctatagcagagc

SEQ ID NO: 78545 - DNA, 30 bp, Artificial Sequence
  Synthetic oligonucleotide
gttgcagaaatgaaacctgagatttagagc

SEQ ID NO: 78546 - DNA, 30 bp, Artificial Sequence
  Synthetic oligonucleotide
agcgcgaaaacgaccttgacacggacgagc

SEQ ID NO: 78547 - DNA, 30 bp, Artificial Sequence
  Synthetic oligonucleotide
cacgtggtcttagtgtaaccgtgtacgagc

SEQ ID NO: 78548 - DNA, 30 bp, Artificial Sequence
  Synthetic oligonucleotide
taaaataggcaccgttgagacggaccgagc

SEQ ID NO: 78549 - DNA, 30 bp, Artificial Sequence
  Synthetic oligonucleotide
ctaaacggccatctaagaaaagtagcgagc

SEQ ID NO: 78550 - DNA, 30 bp, Artificial Sequence
  Synthetic oligonucleotide
gacggcaagttttgaagcggttaggcgagc

SEQ ID NO: 78551 - DNA, 30 bp, Artificial Sequence
  Synthetic oligonucleotide
atgtcgcccaatcttgagcggggtgcgagc

SEQ ID NO: 78552 - DNA, 30 bp, Artificial Sequence
  Synthetic oligonucleotide
taggcaggtagcctgggtgaacggtcgagc

SEQ ID NO: 78553 - DNA, 30 bp, Artificial Sequence
  Synthetic oligonucleotide
aaaagtcgcggctaccacgcgcagaggagc

SEQ ID NO: 78554 - DNA, 30 bp, Artificial Sequence
  Synthetic oligonucleotide
tctaagaggtaaatcggggactagaggagc

SEQ ID NO: 78555 - DNA, 30 bp, Artificial Sequence
  Synthetic oligonucleotide
acgaagaatcccatcgaagtctataggagc
